United States Patent Application Publication US 2026/0103690 A1 - sequence listing, part 62

SEQ ID NO: 301395 - protein, 401 aa, unidentified
MKRLSGGIDIGSDNHHIIIMDDEEQILYDQKIAHKFSEFYKAVREFREIEKREGGIISFAIEGKNGYGAPFDRILIESGFTLYNVDNLKLKQFRNVFGAEWRNDKRDAKMLAKMLKLRDYLDAENEKAFIAVEKATKINEKLKILSRHQQTLIDEKIRLQNRLRKRLLEVCPEILEIGDTDSKKMLRLLVRYPDFSRYKGLTMGALLKIKMIGKKQASLMLESLRNTKYVEELADIYKTIISSHSRRILELKEEIEMLDKKLEKLGEKSSEVKRLKSISGVGTKLSSRLVGEIGDINRFKNERQLAIYCGVACIDDESGKHKRTRVVYKANKICKATMIEIAGCTIRYVSESATYYAKKRTEGKEHNHALRCLARQLIKVIFKMLKEDRDYILKEEMEKAA

SEQ ID NO: 301396 - protein, 356 aa, unidentified
MINRSKLDFSGQPIYLGLDIHKKSWSVSIFTRHGEYQTFSQAPQVETLVHYLRHHFPGALYYAVYEAGYCGFWIHDQLVKEGVHCTVVNPADVPTKNKEQRRKGDQVDCRKLSRGLRNGELEGIYVPPRERLEDRSLIRTRVSMTRKQTRCKNQIKGMLLFYGVQIPEDKEMGHWTGRFIQWIEGIRMERASGDMALRIHLEELSHLRQIIAKLNRAILVLSRTEEYREWIRLLRTIPGISTLTGMIVLVELGEITRFRSLDQLCSYVGLIPDTRGSGDKEHVEGVTQRRHSHLRWLLIEASWIAIRKDPALMEAFDQYCKRMKKSKAIIKIARKLLNRVRYVLKKKAEYVPCVIE

SEQ ID NO: 301397 - protein, 434 aa, unidentified
MRILFERCCGLDIHKVSIAACVVITRDGKTEEETRRFGTMTADLLELAAWLKARGVQHVAMESTGVYWKPVWNILEAEGFDLLLANAQEVKIVPGRKTDQKDSQWIADLHQHGLLRKSFVPPRQVRDLRDLTRTRATLAQDHSSICNRIQKVLEDANIKLASVASDVFGASGRAILQALMKGESDAEGLAELSKGRLRNKIPELRRALEGRVTGHHRFLIGRHWRQMESLENQLRQFEAEIAERMKPTAEEIVRMRKSLPADAPLPPSPREEAISLWMELPGIGLTTASSMVAELGVNMEQFPTSGHLASWAALCPGNNESAGKRMSGKTRKGNVWLRRTMCEAAWAAAHSKKTYFAAQFGRIAARRGKKRALIAVAHSLLVVAYEMLKHKKHYRELGSDFFEGLNKDQVKRRLVQRLAKLGFQVTVTTTPTAE

SEQ ID NO: 301398 - protein, 351 aa, unidentified
MTMVGGLDVHRQQITFDYVDDDGLVRWGQIRPATRKTLRGWLAEHCPDGDAEFALEGCTGWRYIAEELATAGVGVHLGDPAEIAVARGPKKRAKTDRADARLLRTLLLQGRFPESWIPPAHVLEIRTLGRLYCTLMDQRRTWQQRIHAQLFHQGCPPIKALLSAAGRQALASAELSPIGRQYVDTALRRIDELTAEIKPLRTQLINFARHQVGCQTLQSRHYGIGWLCAAILWAEIGDARRFCSSDKLVRFAGLDVTVYSSDGKCSPGHLSRQGSPELRWAAFEAAKSAARRSSPDYGYYHKLAAKRDGHNGKNPTLAVERKILRRCYHTLRELGDAALALPVPQRKEAAA

SEQ ID NO: 301399 - protein, 410 aa, unidentified
MSVLEVALDPSTVIVAVDPGKAFNRVWISNGSGMLVDPMSLSVSREGIAQLELALNKHGPASPVIAIEATGSLHRPWVTELERCHPGSVRLFAPSETKSARTQLGSGRFKTDDRDCAALTYMARQGGGRRYGEQSSVEALRAAVRHRRGLVADRKVAQQRLHDQLNALCPGLSAPSGHGRSLALETPTGLAVLACAAAFSGRPPQLRSLMCRAPGRLTIRTAQYWLQRWRGCLPPPADANQRAHRLDRDLDRYRRLRGDIDAVDLEIVALLADTEGQVLTTLPGVASIRAAAFAAHSLPIERFPDAEHLYSATGLAPALYQSATLRRRGRISRQGLAEHRDALMGMAWGLSQFSPAFAERDADLRARGMAPIQARVALARHACRLAYRLLRTQQPFDEQRYRQGRLSGER

SEQ ID NO: 301400 - protein, 416 aa, unidentified
MKKHNNSPKKSEPTSKRAKSRGLVQLEPKEVLAELLGKLREKLGSKVVAASAGEEQPRGELRPNFDRLTVGVDLGDQWSHYCILGLEGETLAEGQLRTTPQDVTEFFEALNAARVVVEVGTHSAWVREVICSCGHEVLVANPRLMEGSKRRKRKNDRIDANKLARLGRVDPQSLHPMQHRSPEVRQDLVMLRARDALVAARTELINATRGLVKSMGARLPKCSSPSFAQKVEAAVPTEIQEALLPLVGLTAALSDCIQGYDEKIERLGREKYGHTALLRQVKGVGPITALAYVLTLENPGRFAKSRDVGPYLGLVPKQEDSGESQPQLGISKAGDTMVRRLLVGSAQYILGPFGPDTDLRRYGLRLCERGGKNAKKRAAVAVARKLAVLLHRLWVTGEVYEPLRHGGSGRMVHAAA

SEQ ID NO: 301401 - protein, 317 aa, unidentified
MSKTNTIVAGIDVAKAKLDVAITAASCAGRSRTTLPVFTTLPACCAPARLPGSVWKPPAATSATVVEYLRKAGFNVVVLQPRQVRAFAEFILCRAKSDCIDAGLIAACVAHHQIEREAPDPRIAAFADQLTFIEQTEEDIVRIKVRLEHTRDPKLRRVMLADIERLKSRRAKVIARLVAALRTHEDLARRLDLLRSIDGVGPRTALAFIIRMPELGRLSREQAAALAGLAPFVHDSGDRKGERHIAGGRDRLRKSVYSAALPAAFRWNTQLITLYKRLTEAGKPHKLALVACARKLVIFANTVLARGTAWSSRPATC

SEQ ID NO: 301402 - protein, 341 aa, unidentified
MYYTGCDAHKKNCTLQHIDEDGALGLMMTITNTPQGFNAFLDKLDAPTVITFEASRSYWWLYQYLSKHPKVSDVVVVDPYRSRKIAEELAVLKGYGRAKNDRIDSEMLAEQTRTGLAVGIQVPTPEQFERRTACRHRFELKQNRTASANLIHSTLAMHGHSIALGELTGNEASRKHLFEQLPGYVQIIISDLIAQIELFEKQTAGIQQLLDKLLPESDPQMQLLMTAPGFGPICSRIVLTEILDIAYFKAPKSLVNYSGLAPIEQDSAGKKGIIKLNRHCNYYLKYAFMTAAHAARTHPRYRRKYEQDLKKHGKTQAKINLARRLAKAIYWMLNRQQPFKF

SEQ ID NO: 301403 - protein, 358 aa, unidentified
MIHLAIDHGKKVSHAVALNDAGEILFDQEILSTLEGFASIKDALPTDQPIQSIVEAGWNWGKVFAALEDLGLNPKLSNATKSRFIAESFTKTDRIDATTHAIMLKAGITPLVHVPGKLTRDHKNLLRHRFWLVRVNVMIKNRVHSILDRNHLQPPARSDLFGGHGRAWMNALTLREPDNKLLKAHLELFDIIRDDTKQTEKWVDSALKDNKMIPILESLPGVGKILGALIALEIDTVHRFNSPSKLAAYSGLVPSTYSSSGKTYHGRLIPASNRHLRFAYIEAAWNASRVSPYFRGFYERLKERKGACKAIGAVGRRLCEISYFCLKDNRAYEERPYRYKRSLTPEQENFGRVALLSQ

SEQ ID NO: 301404 - protein, 358 aa, unidentified
MAQSKKINFNGQNIYIGIDVHLKSWSVTIMTESGYKRTHSQKPSAKELFEHLKKHYPDGKYQAAYESGFSGYSTYYALKEYGIECMIIHAADVPTSQYDHVMKTDAIDSEKLAKSLKGGLLRGIYIRDKEELDDRSLVRLRKTLQKQLGGYKSRVKHLLYNNGIDYPDCFENSRSHWSNHFIFWLENEVKLLSSTRHSLDLLLEQVKLFRKNLLKATRMVRELSKKSLYTQRYENLISIPGIGIVTAMSILTEIGDASRFHNQREFASFLGLIPSCHSSGESIASAEKTFRGNKHLGALVIESAWISIRHDRAMAMAYGEYCKRMKAQEAIIRVARKMSNRILSVLKSGKKYQYDKIR

SEQ ID NO: 301405 - protein, 335 aa, unidentified
MSIMGCDLHTRYQFVAVVEAEDGEVVGRCLEHQNGEAKAFYAQLPKPSLIGIEATGYTQWFERMLAELGHELWVGDPAEIRARAVRRQKTDTRDAEHLLDLLLSKRFPRIWVPSVEERDLRQLLKHRDKLVHLQTSVRNQLHFLAMNQGLCRKKKLWSAQGRGELESLSLGEWASLRRQELLDLLDRWAGRVEELNGAVKAAAEQRADCRELMKVKGVGPVTSLAYVLTLGPIGRFASSRALVSYLGLNPSEHSSGGRQRLGKISKQGNQMLRWLLVEAGHGVAQFDPELRRKYQRVKFRRGGAVASVALARHLAVRLYWTLRQAGTASAAGSHA

SEQ ID NO: 301406 - protein, 412 aa, unidentified
MDVIHPRCAGLDISQKDAKVCVRINGAGRRKTSGTVTTFGATTRQIMAMRDHLAAQQVTCVVMEATGDYWKPFYYLLADLSGVEVMLVNARHVKNLPGRKTDVADATWLASLGAHGLVRGSFVPPEPIRQLRDLTRTRTAITRERTREIQRLEKLLEDAGIKLSSVAADLNGASSRAMLEALLSGETEPAAMADLAKKRLRMKIPQLTEALYGRFTSHHAFLTRMHLDLIDQHTAAIEQLTDRIEVVIEPFRRFRDLICTIPGIGGNTADVVVAETGADMARFPTAQHLASWAGTTPGNNESAGKVKARRTRPGNPYLQGALGTAAMSISHTHDTYLAAKYRRIATRRGPLKANVAVQRALLVAIWNIATTNTTYHDPGGDYFTRLNPQKARNNAVRQLEAMGYHVTLDQAS

SEQ ID NO: 301407 - protein, 349 aa, unidentified
MTIVGCDLHTRKQQVAVLHTDTGEVVEQELVHAGDAVERFYRTLPRPVTVGIESTGYALWFHELMQHLGHTLLVGEAAKIRAMVVRKTKTDRRDAQHLLDLLKHDRFPAVWIPDPATRDLRALVTHRMRLVRMRTMVKNGLHAIAMNRRLTLGPSLWSQRGLAQLQGLALAPHTTQRRDESLQLLTWLTARIAALDDRVAAAAQADPGARLLLTHPGVGPLTALTTVLVLGPVSRFPDSKHVVSYTGLAPAVHASADTCHLGQITKQGSPLLRFVLGQAGLIAAHAEVDLTRHYRTLLRRRGRPKAIVAIARKLLVRLYIMLRDQIDYEEFRRRGRTPRRQEVPPPALA

SEQ ID NO: 301408 - protein, 314 aa, unidentified
MNAGVDVAKDWLDACWGTEARRFAYDAEGIKQLAAALQQAAVDLVVMEASGGYEVTAAAALQAEGFAVAVLNPRQARDFAKSMGVLAKTDRVDARVLRDFANVVAAHPQRHRYLKPLPDGQREHLAALVMRRRQLVEMRGAEANRLATAHKSARKSVAAILKALDRQLASVDADIDGCLRKDFKDTMAWLDTVKGVGPVTMSTLVALLPELGQLSGRSISALVGVAPMARESGTWRGRRHICGGRYEVRSVVYMATLSAVRHNPVFRAFHQRLITAGKPPKVALVACMRKLVVILNAMARDRAAWRHPEASHAA

SEQ ID NO: 301409 - protein, 330 aa, unidentified
MDHCAIDLGGRKSQVCVRSPDGQLLFEGPYDTHSLPEFLRLLPRSRVIVETTAEAFRVADAAKEAGHEVRVVPATLVRSLGVGARKTKTDKRDARALSEVSCRIDLPSVHIPSARSREWKAICGMHDALTASRTKLINNLRGWLRGQGLRIGKGKAETFAERMMKFELPDYVTSQVEALAALTRKIRESDKRIETLAKDELCQRLMTVPGIGPSSAVRFVAAIDEISRFESAHKVESYLGLVPGESSSSERQQRLSITKAGPSSVRWVLGQAAWSLQVRCHDPAARPLQLWAAEIARKRGRRIATIALARKLAGILYALWRDGTRYEQRR

SEQ ID NO: 301410 - protein, 389 aa, unidentified
MQIIADRPEAPSAIHTDLGAIFISLELSRSTWLITSLSPGGGGKMSKHSVPAGEISALLARFSEFRQKAFARTGKWFPIIVIQEAGLDGFWIHRVLQNEGFESHVVDPASIATSRRRRRAKTDRIDGEALLRALLAHKRGEPRVCAMVKAPTPEEEDRRRLCRERKVLTNERVLHVNRIKGLLFSQGVSRYEPLRRDRRQRLDELRTGDGGRPLPKHLKAQISREFDRLELLIEQIKAVEAERDALLAAQRVAAPAPAAMLLDIKGIGPEFAAILWSEGLFRHFDNRRQVASYAGLAPTPWQSGKVDREQGVSKAGNPRLRTTLIQLAWLWLRHQPQSAMALWFKERVGRNGGRFKKTTIVALARKLLVALWKYVTAGVVIDGAVMKAA

SEQ ID NO: 301411 - protein, 350 aa, unidentified
MQGTGRWIGLDLSKETYEMCYFDQKGKVGRSGGETTKGGRAKLYAKLKAEDIVAMEVNSLAFVMEKEMRVIGCTVVILDASQLSIIYSSTKKTDKEDALKLARLVKIYEKEDLPIVDVPTEKEYYRRKLIKEYKTLKGDRTQEINRLHALFLQCGITTMKRSNLQTDANRQKVLPQLFGYEVGQAKRVCERLTLLEAQIKELEQTITKECKADKDIERLKTIPGVGDKTALAFTAYVGDGKRFNNGDEVANYLGLVPRVDCSGSIKRYGHITKKGNRIVRALLYQAAWSIVRSKHGGALKAKYFYMTEHGKGKKISITAIARKMAKLLYLVMKNKQMVYQELPFPDLQAG

SEQ ID NO: 301412 - protein, 351 aa, unidentified
MKSEQTAQPKLYIGIDIHKRSWKIHCATDLFSGKSFTMPPNPEVLKTYVHTHFQDHEVSTAYEAGCCGYYAHRSFEGYGWRSLVVNPADIHRKGKERFTKTDKIDAQLIARELKDGRLECIHIPEVEREQLRSLFRRRNDLVKDFRRVKSYIKMQLLYFGVSIPEAFDNDHWSHDFRGWIDAIVFNHPTARETLDSRMRSFRFIDKELREVSSKLRAYCRKHYKKDYYLLRSIPGIGGIVACGIICELGDMRRFNNIKHLAGYVGLSPGVHQSGDNQRATGITMRAHRLMRSYFIEASWQAIRTDPIMQAYYRKHLGKNVKNIIVKVARKLLSRTLAVIKTETPYAIGVIE

SEQ ID NO: 301413 - protein, 334 aa, unidentified
MFVGLDVHRRRTQVAAIDEDGHELFNRNVSNDLEQLGGVLVGFEPGTPVVFEATYGWAWLAELLSDMGFDAHLAHPAACKAIASARLKNDKVDARILAQLLRVDLLGEAWIAPRPVRELRLLLRHRAALVRLRTTLKTRVRAVLAERGVDATDALWDGPGRRWLAKLELPDVEREIVDDLCALLDAVDPIVARLEREIRARAKPDPRVDALQHLPGVGLLTAMTLVAEIGDINRFATARRLCSWSGLTPRVRNSDTKVRHGHITKMGPAAVRYVLGEAAQVAKTKPPFVDAYESMRRRRGKQIATTAIARRLLAAAFYVLKEVDDQDVADRCAG

SEQ ID NO: 301414 - protein, 364 aa, unidentified
MTAAQAGRQAASSTVEVVGGVDTHKDTHTAAAVDTAGRVLGSAQFPTDAAGYRALLRWLRGFGTLLLVGVEGTGVYGAGLARSLAAQGVAMVEVDRPDRKARRWQGKSDPVDAEAAARAALARVRTGVPKQRDGRVEALRTLRVARRSAVGQRADVQRQIKALIVTAPESLRAQLRKWPDRELIEVCADLRPDRANADDPGTATKIALRSLARRHRRLSVEVADLDELLGPLVAQINPGLLALKGVGAEVAGQLLVTAGENADRLTNEAAFAMLCGAAPLPASSGKTTRHRLNRGGDRAANCALWRIVITRMGTDQRTKKYVARRTTEGLAKPEIIRCLKRYVAREVFLALQSASTEKRPANAA

SEQ ID NO: 301415 - protein, 415 aa, unidentified
MSYNLVAGLDIHKKTVVVVVLQSAQPDQDYASGTFGTTQFGLKELAVFLRRHGVTHAAMESTAQYWRPVWMRLEEEFTLTLAQARSTRARRGRKWDKADARRIAKRLLSGDLTVSYVPPPEQRDWRLLSRTQVAMRESLVRLRNQVEVLLEQAQIKLSSVVSDLFGRSGRRMLEALLQGMEDPAELASLGDRRLRASKEQLADALTGRLTEAHRIVLRLLLQQIDQIEQHVIDLDRALAQALAAHQEAVERLCEIPGISVRTAQYLIAETGPGAESFASPGKLASWVAICPGQQESAGVTVSNRSAKGNWMMRRTLSQTAWAAVKSKGSEARRRFLAWRPRLGTQKAIWAVAHYQLRVVWKVLHDRVRYLSPDTEALNHRALMARAARVFNQLRNLGYDVSITPPSNPVYINSKR

SEQ ID NO: 301416 - protein, 458 aa, unidentified
MAHRKKKIGAQLVEDEEYQLRYERVAGIDVAKGKADVCTRLPPAREGGRRVSRTEEVAATVTVILALAVRLLADGVELVSMESTSDYWRIWFYVLEAAGLNVQLVNSSHARQLAGRPKTDRLDAQWLARLTEMGLLRPSFVPPAEIRALRDLTRTRLQLVHDRTREWQRLEKLLEGALVKLSSALSSLARVKSARVILEALAGGERDPRVLAGLAARQVRAGRAGIEQAMEGMLYGDHHGRLTRIHLDHITFLDRSIAAIEDDIAAALDAIPAAQGIDAAGTRSPDPGPGAAVLPAAERLAEIPGVSLDLARAIIAETGLDMTRFPTAAHLVSWAGLTPVARQSGPRSRKPGKGHGDSYLRGYCTQAATGAATTDTFLGERLRRLSRRLGGSRARCAVGRSILVIIWHLLASPEARYTELGPGWHARKTDTDRRTRSLLNQLRALHPDSDITITEPAA

SEQ ID NO: 301417 - protein, 423 aa, unidentified
MEVMHERVAGLDVHKAMIVACVRIMAGGKISRECRTFETSTAGLEALLGWLTQSGCTHVAMEATGVYWKPVWNILSDGEFELIVANAAHIKNVPGRKTDVNDAMWIADLVACGLIKASFVPEQEIQELRSLLRARKQLTREQTSHIQRIQKTLEEANIKLDSVISDILGVSGRRMIEAMIAGVRSPLRLAELADRRLKVSPKALYDALHGRLTDHHRFMLELYLGQHDALSGAIARLDQAVEALIARMDEEVAAGQATFLSLIMLLCTIPGVSILSATVILSEIGRDMSRFATAGHLLAWAGLCPGQNESAGKRKSSRLRKGAPWLKTMLVQCAWAASRRKDSYYKAQFNRLRSKRGPKKAICAVAASMLTAIYHMLKDGTLHQDLGADHFDRRSTEVKAKRLVAQLTKLGFQVELQPLPQAA

SEQ ID NO: 301418 - protein, 377 aa, unidentified
MATTRTVLRGQLTAKPGDLYMSLELGDKHWHISIGGERRSVSHYIVEAGHTEEVADCIAKAAARLHTARVHSCYEAGRDGWWLHRWLTELGVDNIVVDPASIEVNRRARRAKTDRLDADKLLAMLVRHHRGERVWSVLREPSPSDEDARRAHRELQRLTHERIAHTNRISSLLVLHNLRPRIVIGGRDWPVWWNAHREQVPPTLRAELEREAVRLKVVKEQVRAIEAARARELAEGKQPLVAQLVRLRAIGAKGAWVLVKEVFGWRHFANRRELAGSLGLVPTPYASGDSEIEQGISKAGNRRVRALLVELAWSWSRLQPGSALTQWFNRRFAGAGKRMRRVGIVALARRLAIALWRYLQTGEIPIGARLKPAGSGI

SEQ ID NO: 301419 - protein, 385 aa, unidentified
MRDKTIVPREYDVFGGLDVDKNSIAATFSGHQGFIRSLSMPYKVEALLNHVRNHFADQKVAFAYEAGPTGYGLYDGLAAQGYTCLIAAPSMIPRAPGQRVKTNRLDSKALSESLRGGQLKSIHVPSPIYRELRHLTQLRDTMMSEAVGMKQRIKSLLLFEGIAFPPAPAGSQWSFIVKAKLRKLSCSNTVRFKLDQLLDSLEFAEKQIFKSTKEIRRFCQTDPELAQCIEYMMTVSGVGWIVASQLLARIGDWRELENIRQLGGFLGLVPMEHSTGDKTDRGPITHTGDGRLRSKLIQAAWSAIRKDGELREFFRSVCQRHPRKVASRVAIVAVARKLSVRLSVVLMKQRPYEVREKVHSAPLTQEETSPQGTTRRLAEPGEKNS

SEQ ID NO: 301420 - protein, 415 aa, unidentified
MEPVLECCAGMDVHEKKVDVCIAHGSLDKSPKFEIRTFSTMTSDLEELSSWLKKYKVTAIGMESTGVYWKPIFNIMEGEFTIVLANAQHLKSIPRKKTDIMDCMRIARLLRYGLLPNSFIPPREIRELRDLNRTRRKLVGMMTSEKNRLTKVLESANIKLSSVVSKISGVSSLAMIRSLLEKDKLSKEEIAQLAKGSLKKKVDQLDKALNGKITDHHRFLLKMHMENIDHLAKQIEKIDEEIKRKMIPFQKEAKLIQTIPGISEVSASAVLSEIGIDMSQFPDEGHISSWAGLCPGNNESAGKKKSGKTQKGNSSLKATLVEAAWAASKTKGSSYSAFYHNIVKRRGKKRALVALAHRMLTDIYSVLKTKEPYQDTGAEATNEIARKRKERSMIRSLEKAGYSVVKTSVAEMAVA

SEQ ID NO: 301421 - protein, 391 aa, unidentified
MVCVGIDVAKDKHDCCILDSDGTIRADCITIPNNMDGFKQLLQTIRDCTKKSDKIKVGLEATGHYSYNILGFLLDNDLAVYVMNPLHTNLYRKSLSLRKTKTDRVDARTIATMLLSDVDLKSYTDTAYHNEELKSLTRYRFDKVRERAKLKQSVSRLVTILFPELEKLVPSLHIASVYALLSEYPGAKQISEIHLTKLTNLLVTASKGRYGKDKAIQIRDAARTSIGSVMPAKFLELKHTIKLIRELTSEIDEIEVSIQKIMDELNPPILSIPGVGIQSAAMILAEIGDFSNFESPDKVLAYAGCSPSIYQSGKLTNCYAHMEKRGSRYLRYALYNATKYVCYWNPVFAEYLAKKRAEGKHYNVALSHATKKLVRLIYALQKSGKAYLTAA

SEQ ID NO: 301422 - protein, 314 aa, unidentified
MKMAMLSFCGIDVSKDRLDVVVLPEGWFFSVSNDTAGWAELVARLRPLTVSAIGLEPSGGYERGIIRALLAAGLSVRRINPNKLRQFARARGVLAKNDRLDARLIAEYVAIMPTRVVQRDAAVERLAEIVTMRRQLCDEHVAAENQAAHLEDAMLRRLSKRRQTRLEADIRLLDKRLAEMVAANVALAQRYELLTSMPGVGPVLAFTLIALLPELGKMTRKQIAALVGLAPYDSDSGKLKGHRSIYGGRMPVRNVLYMAALSASRYSPALKAFHNRLADADKKSKVIIVAVMRKMITTLNAMLRDNAAWQPQSA

SEQ ID NO: 301423 - protein, 438 aa, unidentified
MSNKVFFNLNDLFISVGIDVGADFSWMSIALPNQQFVGKPYKILHNSIDSLTTAVSKIKEAEELYSLESRIFLESTGIYHYPLFCYLRDKGFNCSVINPIITKNSTNINIRKVHNDRFDSKKAALVGLKPDLKVSLMPSDLALNCRNLCREYYDLMDNRSAYVNKLQGELRMVFPQYLGIFSKVTINTSLTLLETYTSPSAFLKADKQEIIDIIKSTARFGLTYAQNKYNAIIQAATDANQFGYIIDSNIKRIRLYISFIRKYDEEINSILESLHELVDANEDADFVKQIHLIETFKGAGFLSAVSIMGEIGDFSAFSKPKQLFAYFGLDPAVKQSGKFEGTKVQMSKRGSAIARRVIHTLTLQSISISRNGEAKNPVLREYYLKKCDSKPRLVAMGAVSHKVCNMIFAILRDNKPFKIIAPQEHIKQYNAAKCDIAA

SEQ ID NO: 301424 - protein, 340 aa, unidentified
MNEITLIGIDLGKHVFHLHAQDVKGHEVFRKKLTRSQLLPFFGNLKTVTVVMEACAGSHWLARQLIAMGHAAKLISPQYVRPFVKSNKNDYIDAEAICEVAARPSMRFVEPRSEAQQTLAALHRVREGLVVERTATINRIHGILLEFGISLPSYKAVLHRLSDALAVNELPCRLAELLHRLHEHYRYLDQQVHDIDKDLTLQLREDENAARLLSIPGIGVVTASLLASEIGNVSQYEGGRNFAASIGLVPKQHSTGGRNVLYGISKQGDKHLRHLLVQCARAVIQRVALRTDRLGEWIRSMLTRRHSNVVACAVANKLARIAWAVLTKHAAYDPSLGCRA

SEQ ID NO: 301425 - protein, 364 aa, unidentified
MEPPLKDGVIMRQHRISIFKKRRRSMKDIKILGVDIAKDVFQLCGIDEWGKVIYTRRVKRAQYVSTVASLKVGCVVMEACGGANHWYRTFMGMGISTQLISPQHVKPYVKSNKNDRNDAQAIAEAASRASMRFVRGKTVEQQDVQALLKIRDRLVKSRTALINEIRGLLQEYGLTMARGAKRFYEELPLILASEAVGLTPRMKRVLNCLYTELLNRDEAIGDYEEELKAVAKANEDCQRVQSIPGVGYLTALSVYASVGDIHQFHRSRQLSAFIGLVPRQHSSGNKEVLLGISKRGNVMLRTLLIHGARALLRHVKNKTDKKSLWLKALIERRGMNRACVALANKNARIIWALLTRQETYRCGA

SEQ ID NO: 301426 - protein, 458 aa, unidentified
MVQTKRPRSRREMPAVHPDAAAIDVGATMHVVAVPPDRDPEPVRTFGTFTADLHRLADWLRACRIKSVVMESTGVYWIPIFEILEQKGFDVQLVNARDAKHVPGRKTDVSDAEWLQRLHEHGLLRGSFQPKGEVKALRSYLRQRERLLDSAATYIQHMQKALTQMNVQLHHVVSDITGVTGMRIVRAIVAGERDAATLAAFRDNRCKEPVETIREALIGNYREEHVFALTQALELYDIHQKKVAECDKRIETVLEQLKATRPTPAKPLPAPRHKTKQSNAPNLAARDALYAVLGIDLTQIHGLGPYLALKLVGECGTDLSAWPSAKHFTSWLSLAPRNKISGGKILSSATRRSNNRAASLLRLAAVTVGRTETALGAFFRRLSARIGKAKAITATARKIAVLFYNALRHGMKYTDPGAAYYEERYRQRVLSNLQRRAKAFGYVLQAAAPQAPQAVGVS

SEQ ID NO: 301427 - protein, 352 aa, unidentified
MVNSIYKNLKYKGMKKFLFIGIDFSKSKFDVSILENIEQKSFLQETFENSETGYKSFLRWVSKQSKIKRCDWLFCGEHTGIYSRNLSNFLAGKGLFIWLENPLQIKRSSGIKRAKTDRYDSIVIAQYACRYIDRAVAYKPAESQIESLQLLVAYRTRLVKSKVSIEVGANEMRSVIKRDATARLIYEKSQVEVKRIKKQINDIERKMHETIINSVLKENYLLINSIKGVGMQTAVMLIIHTNNFLGFQTARQIASYCGSAPFPDESGKTDKGNHISRLANKELKVLLSQCAHSAILHNSEIAAYAQRKMNEGKPKRVVVNNVRNKLIQIIFAIVKSKIPYRENYLNPFAECA

SEQ ID NO: 301428 - protein, 315 aa, unidentified
MTTKIECFVGIDVSKEKLDIGILGETKVTQAANDENEIIALRKRLLELKPTIIVIEATGGYEEALVLDLFEAGLPVALVSPQRVRQYARARGLLAKTDKLDAINLAEFGRNVQPRLFTAKNEQSRHLCDLLTRRRQLWEMLKAEKNRLRTAHSTLKVSLETVITCLKNEITDMDQQVRAFLDEHANWHKQEELLRTAPAVGVVTAATLLAELPELGKLDRKQIAALVGVAPMSWDSGKKRGYRKTKGGRPEVRSILYMATLVGMRYNPVIKAQYDSLLKRGKIKKVALTACMRKFLTILNAMMRDQKPFHTATQS

SEQ ID NO: 301429 - protein, 401 aa, unidentified
MKEFNAEQHRVESASALAVVSNAGGAERYAAYVGLDVHKETIAVAVAEPGRAEPVYRGEIANRPKSVEKMLAKLSETYDGGLLAFCYEAGPCGYVLYRQILASGHDCQVVAPSRIPKAPGERLKTDRRDALKLARLLRSGDLKAVWVPDTDQEMMRDLSRARDDMKGQERKARQQLNAFVLRHGHHWPRGKSRWSQAHYHWLESLRFEQPWQQVTLQEYIDAAKAASERVAQLNAHLMRALPEWSLAPVVDSLIALRGVDKLAAIVLLAELGDISRFDSPRELMAFLGLVPSEHSSGERRRQGGITRTGNAHARRMLVESAWSYRFPARQTMHLKRKAVKASASAKQIAWAAQKRLCGRYRTLTRAGKNLKVVCVAIARELAGFIWDIVRQEMPRLAPQAA

SEQ ID NO: 301430 - protein, 435 aa, unidentified
MEILTKCACGLDVHQATVVACLLTLRDHGKVEKQMRSLGTKTRELVELRQWLEAEGCTHVAMESTGVYWKPVYAILEEGPFELTVANAQHIKHVPGRKTDVKDAEWIADLQLHGLLKPSFVPPKLIRQLRDLTRYRRKLVESRSAERNRLLKVLETANIKLSSVASDVFGVSGMLMLGKLAEGKATPAGMAQLAKGRLREKIAELEPALEGRMEEHHRYLLQLQLRRLRDLDQDLKELDARIQAKLQPYQQEMDLLMGIPGVDWGGAAVIMAELGPDLKAFPSASQVSCWAGLAPGNHQSAGKRRNARVTKGNVHLKTALVEAAHAAARQGDLSAGQILSRQRPARRQASGGHGRSQNSGGGLPYAFQKGPLQGSGRCVSGYAQQAPTHAKLDPALRTPRLLRHRTITSCLIRRCNRQERHFHSRDTEVTEKRRR

SEQ ID NO: 301431 - protein, 332 aa, unidentified
MNEAGQKGASIRVENNRSLFCRFLSKLPPGSSIALETVGNWYWMVDEMEKAGHMPQLAHATKAKLMMGQINKSDKLDAHALALLLRNGTLPVVWIPPGELRDQRELSRMRMALVRTRTKFKNRIHATLSKYGLQIPEVSDIFGVQGRLLLRNCLGELPSYTSQSVETQLELLDQVETHIRWCEKKIEEVVNKTPAMELLLTLPGVGDILAVVMAMEIGDVRRFPTSHHLASYAGTVPRIKESGGRHYYGKVRPDVNRYLKWALVEAANIIVINQGRWSDRHVVRLYWRIKERKGYPKAVVAVARHLAEAAFWVLKRNEPYKEPQGAKTVSST

SEQ ID NO: 301432 - protein, 353 aa, unidentified
MKCDQYMGMDVHQATTVVVVLDVEGGLVLETIVATEAAAILRLIRSLSGPLHVTFEETTQAAWLYEVTRAYVAEVIVCDPRRNKLLSEGSKADKPDARKLAELLRAGMLRSVYHGHEATRKLKEFVRAYETLSADTGRTMVRIKAIYRGRGIRTAGRGVYQIQQREQWLEQLTEPGVRQRVSWLYEQLDQLRPLRRRAKQAMLAESRSHRAVALLRSIPQLGPIRSALIVATVDTPHRFRTRQQLWSYSGLAVVTHMSSEYEIKQGRVVRSRKPIATRGLNRNCNRRLKEVFIGAATGGSQAEPYRSYLEKLKQTGMRAEMARLTLARKIAAIALRIWKKGETFDPKKLNWTT

SEQ ID NO: 301433 - protein, 369 aa, unidentified
MGEYSEAFVAFDVAKIKHAVAVAEGGRTGEVRFLGEIENREGPIERTVKKLAGRYDRLHFCFEAGPTGYGLYRQLRALGHDCMVVAPALIPKRPGERVKTNRRDAVTLARLHRAGELTGVWVPDAVHEAVRDLVRARQAAADDLRRKRQQLLSFLLRHGRIYSGSGHWTLAHRRWLANQAFEHAAQQIVFQDGIDAIEDAIARLRHLEEQLVTIVPGWSMAPVVEAYQAMRGASFLVAVTFAAEIGDVRRFDNPRQLMSFLGLVPAESSTGDTVRRKGLTLAGNRRARRALVEAAWTYRYPARVSETLRARLEGLPKAVRDIAWKAQVRLCARYRRLSATGKKLPVVVAAIAREMAAFLWAIGREVAPG

SEQ ID NO: 301434 - protein, 432 aa, unidentified
MSKYYKSPVIGIDVSANFSMVCILAPNGDIYKKPFKVNHDSDGFNLLLQKIRKTEDEFSTKSVTFMEATGIYHLTLFCFLKDNKVDCFVINPLVTNCNKNKSIRKVKNDKVDSITIAKTGKFENIKASNYLNIDVYLLRDLCREYYNLVDTKSNIKKQISSAIRIAFPGYQTVFSDTTGKTSLNVLKSYNTPKKIIDTPKEEIINFLEKSSRKGNVWARKTYNKLITAADNANKIGIKSYTFTSKITRQLKLLETYETEIDSLVKEIKETLNSNNISDSFRKSVDLISSLPGVGFITSVALASEIGDIKRFKKPKQLVAFFGIDPSVSQSGKFNSTKNVMSKRGTSYGRRALYAVALTSVRKKRNGELNNPVLFNYYKTSLQGKKKKVALVAIMHKLLKYIFAILRDEKPYEIRDPKLHSKMYLENNSRLIA

SEQ ID NO: 301435 - protein, 323 aa, unidentified
MSPIVGIDVAKHSVDLAIELDNGKHRTKAKLSNDPKGFATLHAWLYTHAQPDSWVVMEATGIYHQALAEFLYAHGYRVCVLNPAQVALYARRQLQRVKTDRSDAKLIASYGLRHRDQLRAWHPDPPALKTLKALVRRRDDLLQMLQMERNRLEVAQANGQPSIQGLIDHLHARISEIQQAIEDHIDQDPDLRRQRSLLTSIDGIGDISAALLLAELGPVKRLADAAAVTAVAGLNRRLHESGRYQGKVCISRTGSARLRAGLYMPALVAMRHNPVVTALKQRLHARGKHGKQIVCAAMRKLLHLAYGVLKSGTAFDPHKALAR

SEQ ID NO: 301436 - protein, 418 aa, unidentified
MDAVVERCGGLDVHRDNVVATVRVPSGDRRRWEQKTHTFRATLAGLSALAEWLAGFGVTVVGMEATGVYWKTVFQALEQRFECWLLNAQHLHNVPGRKTDVKDSEWICQLVAHGLVRPSFVPPPEIRRLRDLTRLRKAQTNERTRAIQRLEKVLQDAGIKLTSVASQTYSKSARAMLEALLSGVTDPELLAELAKARMRSKIPQLREALQNRFDVSHHGVMVAQLLAHIDTLDAAIESLDYRIEVMLAPHTGLVELLCTIPGVAARTAQVLIAECGLDMTRFPTVGHFASWAGVCPGHHESAGRRRSGRTRPGPRWLIEALTESAKAAARTKGTYLAAHHAQLRGRRGEPKAVGATRHDILVAYYHIVRDQVPFRELGPDWQRKRYSPEHRARRLQRQLEALGYTVTLEQTAGAEQAA

SEQ ID NO: 301437 - protein, 331 aa, unidentified
MNYIGMDIHKQFTVAVVKDEQGNKLVEDKFTNSEDNFGSFMKQFKPEETKIVIESTCVWEYIYEILEARKYEVKLANPVRTRAIAEARIKTDSVDASTLADLLRANLVAESYIPPKEIRRLRETTRERRTFVKQTTQIKNKIHAILIKRGVKIPTTTLCKGTLLWLKEKLSNEKIILHYLDLLEYHKQKLSEIDKTISDTAYVNNNAKLLMTIPGIGTIRALDIVAEIGEIDRFSTANRLCSYAGLVPSIKQSGNTLRVGRLVKQSSKVLKHTLIEGCWTLIQSKETNPLKEFYKKLAKKKGKQKAICATARKLGCVIHAMLKNQEEFRYS

SEQ ID NO: 301438 - protein, 449 aa, unidentified
MPRLHSKPTGLPVVNDRAAAIDIGSRFHVVAVPPDLCDEPVQTFRAFTADLQRMADWLVSLGIKTVAMESTGVYWIPAYEILEARGLEVIVANARESRAVPGRKSDVNDAQWLQRLHACGLLRPSFRPNGDIAALRAYLRLRERHLDYAAAHIQHMQKALTFMNLQLHHVVTDVTGATGMRIIRAIVAGERDPGVLAAMRDRNCKSSVETIRAALVGNYLPEHTFALQQALALYDFYQARVDECDAQIERTLAMLTADKPLPREPLAKARNRAQQPNALSFDVRSLMYQLAGVDLTQIHGIGPYLAVRLVAECGTDLGRWPTAKHFTSWLTLSPGCKVSGGKVLSSHTRKTTNRVAALLRLAAVTVGKTSTALGAFYRRLAARIGKAKAVTATARKIAVLFYNAMRFGMQYVDPGADHYEQRYKERVIKQLHRRAAEFGLCLQPTGGVS

SEQ ID NO: 301439 - protein, 402 aa, unidentified
MNAVGIDVSKGKSMVAIMRPFGEIVSTPFEIKHTTSDINSLVELINSVEGESRIVMEHTGRYYEVLAHQLSEANLFVSTINPKLIKDFDNDSLRKVKSDKADAVKIARYALDKWQNLKQYSVMDELRNQLKTMNRQFGFYMKHKTAMKNNLISILDQTYPGVNTYFDSPARSDSSQKWGDFASTYWHVDCVCKMSKNAFINHYQNWCKRKKYNFSQSKAEEIYGKAKELVPVLPKDDITKLIIKQAVDQLNSVSTTVESLRTLMNETASKLPEYPVVMAMKGVGTSLGPQLMAEIGDVSRFTHKGAITAFAGVDPGVNESGSYEQKSVPTSKRGSSILRKTLFQVMDVLIKTHPQDDPVYQFIDKKRAQGKPYYVYMTAGANKFLRIYYGRVKEYLSSLPES

SEQ ID NO: 301440 - protein, 340 aa, unidentified
MQITTIGLDIAKNVFQVHGISVGERVVVRKQLRRNQVMAFFEALSPCLIGMEACASAHYWARELTKLGHEVRLMPAKDVKAYVKRNKNDAADAEAICEAVGRPTMRFVRIKSAEQQGQLMQHRMRDLLLRQRTQTINALRAHLAELGITAAQGREGLKDLLAIVADERDERLPINARISLVVLAAQLQALQRLIGTLEKRIMAQHRASQESRRLATIPGIGVVGATAIAATITDPKAFRSGRDLAAWIGLVPHEDSTGGKRKLGPISKQGDRYLRRILVVGAHSVLRRAKHNPERYPWLTRLLARRPFKVVAIALANKMARVAWALLAKSDTYRPRLAAA

SEQ ID NO: 301441 - protein, 404 aa, unidentified
MEETFAGIDWASEEHALCVVDGGGATLEGEMHAHDEAGVKELVARMRALSVCRVAIERPDGLLVDRLLEAGFTVLPIHPNKLKATRPRYEAAGGKSDGFDAFVLAELARTDSNRYRALRPNSDETKALRALTRTREDLVGARVRLANELRAQLDAFWPGAARVFADVDSPIGLAFLERYPAPADARGLGPKRLEGFLARNRYPGRRSAAELLERLRSAPAGRAGELEAEARRGAVLGLVAALRPIVAQIRDLTSQIAGAVRCHPDGQVFLPLFKDPKSVITAARLVAEIGDDRGRYPTCDSLAADAGMAPVARESGKRKVAGFRWACDKRLRDAVSCLADSTRHTNPWARKVYLDARSRGLEHPHAIRVLGRAWLRVLWRCWRDEVPYEPTKHGNLRRLQPAGG

SEQ ID NO: 301442 - protein, 410 aa, unidentified
MERLIERGAGLDVHRDSVAVCVRVPGPGGDRVQHVRTFGTTTEALITLRDWLEAHGVTHVAMESTGVYWKPVYYLLEEHCVCLLVNAAHIKQVPGRKTDMKDCVWIADLLEHGLLRGSFVPPPFIRDLRDLTRYRRGLIEERTRQANRLHKLLQEAGIKLASVASDILGVSGRAMLDALAQGTTDADVLADLARGKLRRKLPALRQALTGRFRAHHAFLASQLLAHLDYLDETLETVTARIGEVLAPFAVVIDRLDTIPGYSRQTAEEVIAEVGFDMSVFPTDRHLSSWAGLCPGNNESAGKHRSGRTRKGNRWLRQTLVRAAHAARYRKDTALAARYHRVARHRGEKKALVAVAHALLVTAYHVINEQTTYRELGFDYHDRRDAEQARRRALAILERQGYRVILERAAA

SEQ ID NO: 301443 - protein, 353 aa, unidentified
MDHPSIQSEVILGVDTHLDTHVAAVISQGGRLLGALAAPTNAVGYLKLLAWARSFGNLQRAGIEGTGTYGAGLARVLRDHAIEVLVVNRPDRAKRRLQGKSDSTDAESAARAVLSGSATAIPKSQSGAAEAMRTISVARRSAVKAKTQAINQLRALLVSAPQDIRERLLKAKSEQCVKACASTRSLGETALLQTLTSTLKLLAKRWLMLAAELKQLDATLDSLTSRSAKRLREQFGVGPQTAAILMAVAGDNPERLRSEAALAALCGASPLQASSGKTTRHRLNRGGDRSANNALWTIAMVRMRSEPRTRAYVERRTMEGMSGKEIHRCLKRYIARELYPLILADLADAAKIS

SEQ ID NO: 301444 - protein, 343 aa, unidentified
MSGAYEGKQIVGMDLHRRRSVVVRMTDTGERLETVRISNDPDYLRAVMARAGDAPEVVLEATYGWYWAADTLAELGANVHLAHPLGVKMFGLRRVKNDERDAADLADLLRMGRLPESWIAPPATRELRGWVRHRAKLVGLRSSVKNQIYAVLAAAGVAVSMSDLFGVAGRQLLATTLLAVESRSRVDSLLRIIEALDFEIDLYARLIAGRLRTDPGYHAIQTIPGVGPLLGAVFVAEIGDISRFQRPEQLASWAGLTPKHHESDTTVHRGRITKQGSRLVRWAAVEAVQRVPAHTRLGQTRDRVGQRRGRNIGAVAAARELMTLGVHGLRDHHIRCLTSTPAA

SEQ ID NO: 301445 - protein, 319 aa, unidentified
MQVNKARVILGVDVSKDWLDVHREGAQGPQRITNERAAIDAVLKGYRGAAIAVEPTNTYHQLLVERARQLGLVVYLVSGYQIKHYGQALGQRMNTDPIDAKLIARFLSREIDDLKPYEPKPPQQALLWTLLKRRGKLVQTRQQVRQSLSGIKELSKVREQLLKSYRKALAALDKKIKALLIALGWQPEVARLKAIPGVGPLTALALLVAYRSGTFIHHDPFIASLGLDVRAKESGKFKGQRKLTKRGDGEYRRLLYCAAMTACRMAGYFQDRHQALQARGLAPTAAHVVVARKIATIAFHLLRKQVAFDPSELARPAAA

SEQ ID NO: 301446 - protein, 416 aa, unidentified
MRLTKGGRVRYYLGVDWADQVHAVWVVDEQGTKVGMRTVPHTAEGLSEWGRELDEWRARGIARWAAIERPEGRVVDFLLDHGVVVHPINPKALDRARDRFRQSAAKSDPFDARVLADFLRTDHAHLRALPPSSDAAQELKLLTDDYQRQIRQQTRLVNQLTTTLKAYYPRGLEVAELTTALAREFLPAYPTPAALTALTERRWPRWARAHRLSEARTRDLWAVLQRPQLPVPAHVVRAKARLMQSLVAQLTLVMEVVGAYREAIEDVFAQIPAAQWIRTLPIGDHGITAPTLWARLGDAPGRWESFRHLQAQAGTVPVTIRSGKQQVVRFRFACDKSLHYIIDHVAFLSLRWSEWARAYYDEQRARGHSYRQALRALSAKWLKIIFVMWERQVPYDEQYHLATMTRQQLRRQKQIA

SEQ ID NO: 301447 - protein, 311 aa, unidentified
MNTTLCGIDISKDWLDAHIEPMGAANRFANDAAGITDLAAWCQNHDVELVIMEASGGYERLAFLLLWEMGQPCGMANARSVRYFAEAMGFLEKTDRIDAAVIARYGAVKRLKPTPPPSAAQQRLKALVARLSQVGGDLTIQKQRKSTADAETIASLDEVIALLARQSRRLEGEIATLIDDDPLWACLDRAFRSLKGVASRTVARLMAQLPEIGILSNKAIAKLAGLAPIANDSGKRSGRRPVRGGRAGPRGVLFLVASIVAKYDPHLAAFKQRLQTAGKEKMVIRIALARKLLVILNAKARDARNEFANAT

SEQ ID NO: 301448 - protein, 450 aa, unidentified
MAQRSGLTRGDRRRNAKIEELRAVVRPDRAILAIDLGENKQVAALLDHDGRVLGRRVARDKAHALGGLLRWAAEQAGRHGFAGVVLGCEPTGHRWRSVMQLADAAGLGFVCVQSLRVHLAREADDYTRDKTDHKDAVLIGKLIARLDCYLPERAEEDWARLRHLGQRRFRLVGEMVACRNQIEDLLSCCWPAALECAVKPLDSTTWLACLAVTVDRCNGNPAKLRGLGRDRFSAAVRRELPRFGAQRVCHKVADRFFAALTDGRGVSVQRRGALERVGMLIDDWRSAIARLGEVEARMVAVLDGLGLTTLVTSVPGVSAVGAAVILAETGDLSRFATARSVVKHAGLNPAENTSANFRGQTRVSHRGRPALRAAAWRAAWGALPHNPVLGARFTHLTTRERDRLAPGQARVACAATLLRWLYAIVTSRESWNPDRAAGIRAGQAGEAAAA

SEQ ID NO: 301449 - protein, 341 aa, unidentified
MDTVSLVGIDLGKHCFHLHAQDASGRMVFRKKLTRSQMFALLGNFPSCTVVMEACAGAHWIARRLQALGHEAKLISPHFVKPFRQGNKNDFADAQAICEAASRPSMRFVSPRNEAQQVVSALHRVREALVRERTGTINQIHAFLLEFGISLPRGMAVIRRLPAVLETQALPPRLVAVLERLQAHFKYLDEQIGQLEHELLTQLHEDERSERLLEIPGIGPITASVLMSELGDAHQYGSARQFAASIGLVPRQYSTGGKPTLLGISKRGDKELRRLLVQCARVIMLGIERRTDSLGTWVRSLLARQHSNVVACALANKLARIAWAILAKGTHYRSAPAALAA

SEQ ID NO: 301450 - protein, 345 aa, unidentified
MSRHLAALLARFAELKRKATMRTGTSYPIIVIQEAGLDGFWIHRVLQGEGIESHVVDAASIAAPRRRRRVKTDKIDGEALLRALLAYKRGEPRVCAMVVAPSPEEEDRRRVCRERQTLIGERVTHVNRIKGLLFSQGASDYEPLRRDRRARLEALRTGDGRALPMHLKAQISRELDRLELLLAQTKAVEAERDALLAPVSQAADGEAEAPKPVAMLLAVKGIGAEFAAVIWSEGLCRQFSNRRQVAAYAGLAATPWRSGAIAHEQGVSRSGNPRLRTTMVQLAWLWLRHQPGSALARWFHEQGQRGRKGWRKGAIVALARKLLVALWKYVTHGVVIEGAMMKGAA

SEQ ID NO: 301451 - protein, 331 aa, unidentified
MHYSHYIGVDISKNTLDAAIYAAEMRRSDTKHLTNDAEGLKELVLWAKASGAKPKSMLICAEHTGVYGNALQLFCEKKGIALCLENPLQIKRSMGLVRGKDDQIDAIRIAQYAFDHRDKLKLYQRPSDNIQHLSNLLRERRLYVRQKAALLLQQSELGVYETAQSRTRRENLICKHDSAIKAVEKQMMKIIKSDAGLKKTYDLILSVVGIGLVTAIETIVYTNNFQNFETPRQYASFIGVAPFDHKSGVSVNGRTRVSQFCRKQQKVSITMAARSAIINDPWLKSYYHRKMKEKGDQRSQHGVILNAVKFKLILRMFAVVKSGTPYKVMKY

SEQ ID NO: 301452 - protein, 416 aa, unidentified
METKQRNGGDSIYQKRKMAFIGIDMHKDTHTAVVMDCWTNKLGEITFANRPSAYDKFMVDVKSLYGDLQPIFGLEDTRGFGRNFASYLLGHKYTVKHVNPAYTDAMRSSAPMSRKDDSYDAFCVARILRDMLDTLPDEQHDDLSWTIRQLVKRRDSLVKGIIVAKNQLNAQLTYVYPSYKQYFCDVDTKTAMYFWEKYPHPKHLKGVQPEELLEELRQVHRGMTVKKVQEIISLSERNSPEEKDYQDERDLVIKSLVRELKFRKQENEDIDRELERLIQLTGYKLHTMPGINLITAAGIISEIGNIERFPNSDKLARFSGVAPVNFSSAGKGKDQRSRQGNRVLNAIFHFLAIQLVQVNPNGKARHPVFREYFESKLKEGKTKPQALVCITRRAVRIIYGMMRTKTEYKPFEKLVD

SEQ ID NO: 301453 - protein, 402 aa, unidentified
MNCVGIDVSKGKSMIAVMRPFGEVVVSPFEVRHTANELSELAGLLKSLDGETRVVMESTGNYHAPVAWLLHDAGLYVSVVNAMLVHDYGNNSLRRAKTDKKDAVKLANYGLDHWLTLPRYVPDEDTRLMLKTCYRQYQQYSKVQTMLKNNLISLLDTAFPDANRLFTSPPRADGSEKWVDFVATFWHCECVCGLSKKAFTAKYQKWCRKHGYNFSQDKALDIYASACGRFGVMPKTNTAKLLVEQAISQLQTTSAALAALKQEMQSLAASLPEYPVVMEMFGVGPTLGPQLIAEIGDVRRFHSKKALVAFAGIDAPPYQSGQIDVRSRSISKRGSASLRRTLFLVMGVLLQCAPMDEPVYQFMNKKRSEGKPYRVYMMASANKFLRIYYASVKAYLDSLEHD

SEQ ID NO: 301454 - protein, 355 aa, unidentified
MIVIGVDPHKATHTAAAVADGIGELLAERTVQARRTGHEELLDWARSLAGERVWALEDCRHVSVSFERFLLASGEQVVRVPPKLMAGARRSSRIRGKSDAIDALAVARACLREPELPSARLDGPEREIRLLVDHREDLVAERTRIQQRLRWHLHELQPELELPAGCLDRRVWLERLGRRLARREQTAQVRICRELVVRCRELTCRAAELERELAVLVSAQAPTLLELPGCGVLTAAKLVGETAGVERFSGEAKLAMHAGTAPLPASSGARQRHRLNRSGNRQLNCALHRIAITQGRWHPPARAYLARKESEGRSRKEALRCLKRHLARVVYRTLRALEEEKMTSTNRPVLVPALT

SEQ ID NO: 301455 - protein, 366 aa, unidentified
MQEALMDKYIGFDIDSNKTSVCIVQKNKEDRYATIGPDAGSMRKFLANEKKDGSRVHVTFEISGQAGYLYDSLIDCVDSIKVANPDKMTWIYRTAKKNDRIDARKMAVLLSIGEIPAVHMPTKEVRQWRMIICHRKKLLATSVAAKNRIRALLKSQGMRRSLHKGGWWRIANRLWLRELCGGGFDVNNMWRMQLSNLICELNMAEEHIDSVTSYLDGYLDKQTGGKLLMSIPGVGPRTAEAVLAFTDDVERFAGGKEYCGYFGVTPKLDESGNSRRLGHISKKGPSVVRWVLVESSWKVIRYSKSMRSFYERVMAGQQSRKKIAIVAVARKLLSIMRAMLLTGAMFDETFVSSVDYGKIEKLRKSA

SEQ ID NO: 301456 - protein, 357 aa, unidentified
MCIITETGEKIEEVFGTLTPELDRLRDTLLAYHVDEVAMESTSIYWIPIWRVLDAGFDVKLVNPYFIRQLPGRKTDIKDAQWIATVLQKGLIKGSFIPENRIQELRGYNRRITYLNRNLQRADQSIDLILQRCNIRLSNYVSDIGGKSMRMVVKALSMGQTDPIELTGLVHGRTKNKHGEQTIKDALTGILSATDMDLLGMSLSEAEFYQQQLTACKDKLLELCGNYYKEELELLQGIPGIKEHSAASIIAEIGVDMETFQTASNLVGWAGLRPRNDQSAGKIKGRKTLHGNKYLRIILIQCAWGASRTRESSFFIKYNTLKKRMNHNKALVANARKLLVVIWNILAKKQPYKAIAA

SEQ ID NO: 301457 - protein, 369 aa, unidentified
MDLLIERCAGIDIGKTEVVACVRTPGPRGEGRRKETRTFPSFSADLEAMADWFSAEGVTEVAMEATGSYWKPVWYVLEDRGFDQKLVNAQHLRILPGRKSDVLDAEWIAELLEHGLLRGSFVPPEAIRELRDLTRYRKRLTQARTAELQRIEKTLEDAGIKLDVVASDILGVSGRLMLKALIAGERDAEKLAEMAKGVLRNKIPQLRQALRGRFRDHHALLVGMALEHAEYLDAAIARLDDQIDALFAANTSEAGVPFVEARDRLATIPGVGKRAAQTIIAEIGVDMARFPTAGHLASWAGLAPGTNITGGKRRSGKTSPGDKWLGEILNQCAWAVAAAATPTCPPSSGGSPAASARRKPPSRSATRSS

SEQ ID NO: 301458 - protein, 356 aa, unidentified
MSKNVTSNQSISRQCVGIDISKDSFVACISHKTSSDEIIVKSSKKISNTPAGFKTLQEWVTKFTSLEHPLIYVMEATGVYYEPLAFDLLERGKSVSVQLAKNVKFFMQSHNIKSKTDDIDAQAIAQMGLERKLKLWQPGSIQMRLLKHLCRERAMLQAEQTTVKNQSHAWKHTYKPEESILKRLESRLSFIKAQIQEIEKEIQSIVEKDQDLAKRVANVCSIKGVGLLSAIVIIAETNGFALFNNKAQLISYAGYDVVRKQSGNAESKTRISKKGNKNIRKALFFPATTASRFNTKMKSTYESITERTAIKMKGNVAVQRKMLVLIYTIYKNNIPYDENYQYDKERNEPQKIRRSQ

SEQ ID NO: 301459 - protein, 403 aa, unidentified
MNSVGIDVSKGRSTVAILRPLGEVVQKPREVVHSTIELEKLAYQIIGLGESTRVIMEATGRYHEPVAAVLHEKGIYVTILNPILIKQSGGGSVRKVSTDKKDALKIAKYGLDNWNDLREYIPVDTLRQQLKLFSRQYNLYMKTSVSLQNNLIALLDKTFPGANELFDSPTRADGHQKWVDFVTVFWHCDCITRVNRQAFTDRYQKWCKRNGYHFSKTKAEEAYFASAGHFPTLPKNNNTKLLITSAANALTEAQKVLMVIKAEVVRLAKLMPEYDAVIAMYGVGDITAAQLMAELGDVRRFENRGAIVAFAGIDPEVSQSGKMKSESNPATKRGSPHLRKTLYQVATTHLKRSPANEPVYQFLDKKRKEGKPYFVYMTAAANKFLRIYHAKVKEYLNNLEAQL

SEQ ID NO: 301460 - protein, 318 aa, unidentified
MAQIRAVVGLDVAKDKVDACIRSASAERTFGNTPEGHRELLSWLSEHAVGRAVMEATGGYEESWAKSLEQAGVEVVIVDPRRVRHFARSAGQRAKNDPIDARMIAWFATTFTDQPGKPRDRQRQALEQLVTARLGLIDLQTRIGNRTEHDQPAEARKAYRAASKALTTQIAKLEAAIAARLKLTAEFAERAAIIRSTPGLGDTATAGVVAFMPELGHVDNQAAAALLGVAPYDDDSGDRHGKRHISGGRHKLRKLLFMPILGAATQHNPALKAYYERLLARGKLKKVALIACMRKLITILNTMLKRGEKWDPAKHAAA

SEQ ID NO: 301461 - protein, 341 aa, unidentified
MSEITTIGLDLAKHVFQVHGIDAQGTTVLRKRLRRGQVLAFFSRIPRCVVGLEACATGHYWARELGALGHEVRLMPAQYVKAYIKRNKHDAADAEAICEAVGRPTMRFVPVKTADQQATQLLHRGREQLVRQRTMLVNALRAHLAEFGMVAAQGLRNVGELIAIIRDDGDRRLPAVARQVLQVLANQIEQIEAAIAALERQLLAWHKSNPVSQRLASIPGIGPIIATAIASTVADPNVFRSGREFAAWLGLVPRQNSTGGKIRLGGITKRGNRYLRRLLINGASANLLRSRATKADPWVIGLRRRRPPLVVAVALANKTARIAWAVMLRQNEYQPRAVAAQ

SEQ ID NO: 301462 - protein, 341 aa, unidentified
MDYFAAIDVSLEQSSVCVVDDTGKIVREAKVASEPEALAAWFAGSGLKFTRIGLEAGPLSQWLHAGLMAAGLAVILIETRHLKAALGAMKVKTDRNDARGMAQLVRMGWFRPVHVKTVPAQEIRALLTARDLLQRKLQDVELGMRGLLRGFGLKVGKVSKSKYEARIRELAAGHPMLEPVTSAMLQARATLRAEYANLHRMLLRIVRADAVCRRFMTAPGVGAVVAVTYRTSVDDPTRFHKSRDLGPYFGLTPSRYQSGEVDWTGRITKVGDVMVRAALYEAANVILTRMTRFSTLKAWALRIAKHRGMKRAKVALARKLAVVLHRMWVDGTDFRWRKTAA

SEQ ID NO: 301463 - protein, 350 aa, unidentified
MIIIGCDFHSRFQQIAMLDPQTGEVIEHRLEHENGEARKFYAGLATPARVGMEATGYAQWFERMLAEQGHQLWVGDAAEIRAAMVRKQKTDSRDACHILDLLLKDKFPRIWIPSTEERDVRQLLRHRYKLVCWRTSLKNQLHAMAMGHGICRKKKLWTAVGRKELQGLSLGPWASRRRQHLLGMLDQLEPVLEELDRAVIQEVERRPAAMRLMTQPGVGPVTALAYVLTIGPVSRFQRSKQVVSYLGFNPSEESSGGRQRLGSISKQGNSMLRFLLVEAAQTASIYDPELRRDYRRLKFRRGSGVAKVAIARKLAVRLYWKLREQPSPVPPAPMQGSPAVSVVGESLSSS

SEQ ID NO: 301464 - protein, 335 aa, unidentified
MNYVGLDVHQRTSTYCILDANGKVVKRQTVAGPWRAVVRRLREETGPLRICFEASCGYGPLYDELAAFASQVTMAHPGQLRLIFRAKRKNDRVDARKLATLLYLDQVPAAYVPPLDVRHWRELIEFRRRLVNQRTACKNQIRALLRSAGVAAVTKLWTRSGQQWLSELELPSRSQRLRRDLMQERLRHLDQEIRHATSELDHIGSRHPGVVLLRTIPGVGARTAEAVVAYIDRIERFGRTGQVASYFGLVPSQDASAGTNRLGHITKQGPATARQYLVEAAWQAVYRCPEARVRYDRICKGDPKRRKTALVATAHWLLRCMTAMLRTGEVWRGAA

SEQ ID NO: 301465 - protein, 395 aa, unidentified
MHKEKHCAVVIDCWMEKIGEVNFENKPSKFPAFVEDIRKICGTKEFVFGLEDTRGYGRNLASYLTGRKLEVKHVNPAYTNAVRLSNPIIYKDDSYDAYCVARVLRDMMDTLQDAKHEDIYWAIRQLVKRREIIVKYNVMNKNQLHSQLSYSYPSYKKFFSQIDGKGALCFWENYPSPVHIWNSTPEQIYETIKAVHRAFKIERVHAIIDMIKNDGNTQKGYQEERDSIVRNIVKDIKNNQELLKDIDEQLRKLLPQTGYKLQTMPGIDLITEAKLVSEIGDINRFPNSDKLARFMGLAPVHFSSAGKGKDERCRSGNRELNAIFHFLAIQMVAISPSGKPRHPVFREYFEQKVKEGKNKPQALICITRTLVRIIYGMMKTKTEYKPYEKKEKEND

SEQ ID NO: 301466 - protein, 343 aa, unidentified
MEHYVGLDVSLKQTSICVVNQVGSVVREGVVDSEPEAIATFVRSKAPGAVRIGLETGPTATWLWTELKQLGLPVICIDARHAKAVLKMQINKSDRNDAAGIARIMQTGWFKEVRVKDLDSHSVRALLASRALLVKIKRDLENQVRGLLKNVGLVIGRAKFNVFAVRAEELIEDRPELIAVVGPLLKARKAIEQQTDDLDRKVLKLARYDAQVRRFMTVPGVGPITALCFKATIDDPTRFKRSRSVGAYVGLTTRRHASGETDWTGRISKCGDAMLRSYLFEAAGVLLTRVPKWSALKAWGMRLAKRNGLRKAKVAVARKLAVILHRMWIDGTEFNWSKKEVAA

SEQ ID NO: 301467 - protein, 340 aa, unidentified
MSLYGGIDLHANNSVIVVINEHDEVIYRKRLPNALLTILEQLAPYHTEMQGLVVESTYNWYWLVDGLMEADYRVHLANPAAIQQYSGLKYTDDHSDARWLAHLLRLAVLPEGYIYPKADRAVRDLLRKRAHLVRQHTANVLSVQNIMARNTGGRFSVKRIQELTKQELTTLLTEETQVLAVTSSLVVLDCLQQQIKTLEKTVHKRLQHTPSYEQLLTVQGIGTILAQTITLETGAISRFPTVGNYASYCRCVDSTKISNGKRKGTGNVKNGNPYLAWAYMEAAQFALRFQPEAQRFYQRKLAKSRNNTVLARKAVAHKLSRACYYMMRDLVPFEATKAFG

SEQ ID NO: 301468 - protein, 336 aa, unidentified
MQITTVSIDLAKNVFHVVCCNSRNKIVRKKKVKRSHLLAYLSGIPSCLVVMEACSTSNHWGREIRALGHQVKLLPAQHVKAFLTGNKNDYNDAHAIVIASQQGHIKAVPIKTIEQQDSQLVHKVRELAVGQRTALCNHIRGLLLEYGISVQQGIKHLRTAVLQVVDDTSGLSSPCRQVFGLLYSQLVLLDNCIERYNEQIKQQATDNDISQRLQSIPGIGPLIASSLYNEIGNGSAYKKGRDVSASLGLVPRQHSTGGKEVLLGISKRGNRYLRCLLVQGAKAVVSRAKNKTDKLSQWINRIVATRGHNKACIAYANKMARMAWAVTVSGEHYKPV

SEQ ID NO: 301469 - protein, 351 aa, unidentified
MIIVGVDYHPSVQQVAFLDTETGETGERRLNHSDGEAERFYRDLQRRQVKVRVGIEATGHARWFERLLAELKFELWIGDPARIKAARVRKQKTDRQDAQLLLRLLIEGRFPQIWVPSPENRDLRQLIWHRHRLVQMRTRAMNQIQAAAMNEGVRRKKTLWSKTGRRQLEALPLAPWATRRRQDLLELVDRLNTTIDELTAAAEQEARKRPEVLRLMTHPGVGPITALAFVLVLGSPDRFGCGHQIGSYLGLIPCEDSSADRQRLGHITKQGSSLLRFLLVEAAQAAVRWDPDWRRRFVHLAMRRDRRIAKVAMARKLAVSLYWMWRKECDYQQTLQFGSHAGEPGFVHGVK

SEQ ID NO: 301470 - protein, 345 aa, unidentified
MEISTIGLDLAKNVFQVHGVSATGDVVLRKTLRRAQVLPFFAKLPPCLVGAEACGTSHHWARELTKLGHEVRLMPASYVKPYVKRGKNDAADAEAICEAVTRQTMRFVPIKSREQQAALSIHRARSLLIKQRTQLVNMMRCVLAELGIAIPVGVEKALQMARKIADGEAELDLPDEAQNVIVALAEQMLQLHAQLRKLDLRLAALQRSDERARRLATIPGIGPVGATALAASVGDPAQFKSGRQFAAWLGLTPRQRSSGGKERLGRITKMGDNYLRQLLVVGATALIRSARSKPETVDPRFVALVARKPARVASVAIANKMARIAWAIMARGGVFQRGHAPILAA

SEQ ID NO: 301471 - protein, 344 aa, unidentified
MDNHTQYSGFAGVDLAKKVMQIHFVTEDGEITDKSTKRAEFLDFFRNRGKCLIGMEACGSSQDWARKLEAMGHEVHLMSPKAVKPFVSGQKNDHNDAIGIYKAMFNGVRRVPVKSTEIRDLQTLRRIRSQVTKDKVKEINHVRGLLAEHGIVMGKSLKAFNKDISSALESLKERGDVSPLVAEELRTTVEAIKTKIKRQKKLDQEIEQLARGCKSYENFLKTPGVGPVTAAMLCVLLCDPSIFANGRQFAAYIGLAPRSRGSGGKNYVIGIPSKFNCDCESRAVFVECAQAIARCKNKSPWVEGILRRKPKKVALIAIANKLARQVWAMANKGESFKQMEILTA

SEQ ID NO: 301472 - protein, 345 aa, unidentified
MNEFYEGQQFVGMDLHRRRSVLVRMSETGEHLETVRILNDRDVLAEVMSRAGEAPEVVLEATYGWYWAVDALAELGASVHLAHPLGVKAFSYRRVKNDQRDAADLADLLRMGRLPHAWIAPPETRELRELVRHRAKLVAMRSRCKAEVHAVLAKGGVWVPMTDLFGVEGTLLLDRVTMPAPYVARIASLRRFIEAFDAEIDLFTGLAQRRLTKDAGYTAIQQIPGVGPVLAAVFVAEIGDVHRFDGPAQLTCWAGLTPRHHESDTTVHRGHITKQGSRLVRWAAIESVKILPATSRIGAIREQVAHRRGNRNIGAVAAARRQLELVFYGLRDHHVRALHRSPRAA

SEQ ID NO: 301473 - protein, 424 aa, unidentified
MSKKKSSVAGLGALYARVCGLDVHKKVVVAWVRILDAKDGTVQSTLRQFGTMTADLVELRQWLAEARVTHVAMESTGVYWQPVFNLLEGHFKTWVVNAQHIKKVPGRKTDMKDAEWIAQLMQCGLLRPSFIPDRQQRELRDLTRQQTKLVQQRNAVDNRIQKVLETANIKLGSVASDVLGVSGRKMIEALIAGEKDVTVLAELAQRKLRDKIPQLQRALEGELNDHHRFLLRQLLGQYDFLEKEIASVSERLGAIAPPSFRAAVEQLDAIAGVGERGARALLAQTGTDMSRFPTHKHFTSWAGQCPGNHESAGKRRSGKTPAANRHLDAVLTEMAHAAVRTKNSYFKSQYHRLAGRRGKKRAIGAVKHSLLVTVYFMLRDHKPYKDLGVDYFDKLNPQQRIRYHVRKLQDLGQQVELSPIADAA

SEQ ID NO: 301474 - protein, 430 aa, unidentified
MNSTQNRKIAQVKNTTLVIGIDVGSEFHYARAFDDRGYEYSGKPLRFSNTESGFCELLAWMQEIKEKQGKENIIAGMEPTGHYWFCLGIFLRDNGIKPVLVNPQHVKKSKELDDNSQSKNDRKDPKVIAGLVKDGRYSYPYIPEGVYAELRTASNLRFRIESELTSVKNRLARWISIYFPEYREVYGKSDAKGGLMVLKVAPLPEDIIELGVDGVNQIWRDAKLRGSNGIKRAESLVGAARRSIGVRPGKEAARLEMSILLEDHETKVQRLEEIMDLLNTLMEKIPGVKKLLEIKGVGAKTVSGFLAEVGDVRRFTDPKQVQKYAGLALVENSSGKHKGQTTISRRGRKRLRYLLFEVSMSLVSKNPEFRELHVYFTTREERPLKKMQSLTAIGCKLIRIFYALLTKDIEYSAEKMRKDIQRPETQKSAA

SEQ ID NO: 301475 - protein, 352 aa, unidentified
MVIVLGADVHKATHTFVAVDEVGRKLGEKTVRATTVGHEGALRWARAQFGSQLRWGIEDCRHLSARLERDLLAGGQEVVRVPPKLMAQTRASARERGKSDPIDALAVARAVLREPDLPAAVHDESSRELKLLVDRREDLIGERTRQINRLRWHLHELDPEFDVPARALRIRTQRDRVAHWLAGRRGLVAELARDILADITVASVKATELEKRIISVVEVRYPNLLTIPGCGPLAAAKIAGETANVSRFRSEACFAMNAGVAPLPVWSGNTRGRVRMSRTGNRQLNAALHRIAVTQIRLDCLGRTYYRKRIDNGDSTVETLRCLKRRLARIVFNALHTDQQPSAHGISLPLAA

SEQ ID NO: 301476 - protein, 322 aa, unidentified
MAKHITICAGIDTGKRKLDVAIEGRREQLQVENTPGGHAVLLAWLRQHRVKRIGIEASGGYEQPVVTELRRKRFVVVVFQPAQVRAYAKFHLQRAKNDKIDAALIASCTAAVRKIHAAPDPRLQPFAEQLTMIDQISEDIARLKNRIENCRNARINQLWQEDIARLERREKAELKSLVASIRKHSDLAKRLELIHSVDGIGLPTAVAILVRMPEIGRITREQAVALAGLAPYDDDSGEQVGVRHIEGGRKRLRRALYTASLAASFRWNRQLIQLYQRLTAAGKEHKRALVACARKMLIFANTVVARGTPWCDEPPAGSLPVS

SEQ ID NO: 301477 - protein, 410 aa, unidentified
MQVLHPCCCGLDVHKRFVVACLIWSTEDGKQHKELRRFDTLTPDLLRLIDWLQNAACTHVALESTGVYWMPIFNLMEGLFEIVLVNAQHMKAVPGRKTDTKDAEWIADLLSHGLLKASFIPPQPQRDLRDLTRYRTSLKQERTRHVNRIHKLLEETNLKLSSVFGDLMCKTGRAILHELAAGEANPEVLADLALLRAPHKRDALVPALQGCMRAHHRFLLQELLEMVQTLERAIGRLDHEIEERLQPQKELMEQLDAITGVSQRVLETLFVEVGWELDSFPDAAHLASWVGICPGQHESGGKRRSGRTRKGNRHAKTMLVQAAHAAGKTKTYLGAQYRRLSKGRGIKRAAVAVGHSILVIYYHMLTTSQPYEEKGENYFAQHDHQEKQRRLVKQLERLGYTVKLTQEHIA

SEQ ID NO: 301478 - protein, 401 aa, unidentified
MVKIRERIWVGIDVGKASHHACAVDETGKVVFSQQTANGQAAIQALIARAGKAGGEVCWALDMTSGTAGLLLALLWQTGQPVRYVPGRLVNRMAGAFAGEGKTDAKDAKTIAETARLRTDLVTVTAADPIVADLQVLTAQREDLMGDWVRGVNRLRALLASIFPSLERAFDYSTRSALVLLTGFQTPTSLRDAGRDGVQAYLTEHGAWPRGIPVMADKALDAAGEQTVVLPTEKVTAPLIARLAADLLDLDRRIKDLDKQLTDRFEEHGHATAITSIPGFGPILGAQFLADTGGDLQRVFGTPGRLAAYAGLAPVPRDSGRVKNNLHRPKRYHRGLRRVFYLAAFSSIRADGPSKTFYQRKRSEGKVHTQALIALARRLVDVIWALIRDDREFQPTVAAAA

SEQ ID NO: 301479 - protein, 409 aa, unidentified
MRYYIGVDWGDREHAVWVEDEQGQRVSAGMVAHSPVGFSEWGRQLDEWRAQGIELWAAIERPEGRVVDVLLDHGVRVYPVNPKAVDRARDRFRQSGAKDDLFDARVLAGFLRTDHGHLLVLEPSSEAAQELKLLTEDYQRQVRTQTRLVNQLTATLKAYYPRALDVAELTTALAAAFLQAYPTPATLLALTERQWQRWAKAHHLSTVRTVELWTSLKAPQLPVPPHVVRAKSRLMQALVTELAAVVAAVASYRQAIDDFFATMPAAAWARTLPVGEHGATVPTLWARLGDAPGRWQSFRHLQAHAGMVPVTVRSGKQVVVAFRFACDKQLRYAVDQVAWLSLQRSEWARAYYDEQRARGHRHRRALRALGAKWLKIIFIMWQRHVPYSEEHHLATMARQALRHPEKKIA

SEQ ID NO: 301480 - protein, 351 aa, unidentified
MKSEQTAQPKLYIGIDIHKRSWKIHCATDLFSGKSFTMPAKPDVLKTYVSTHFQDHEVSTAYEAGCCGYYAHRSFEGYGWRSLVVNPADIHRKGKERFTKTDKIDAQLIARELKDGRLESIHVPEVEREQLRSLFRRRNDLVKDFRRVKSYIKMQLLYFGVSIPEAFDNDHWSHDFRGWIDAIIFNHPTARETLDSRMRSFRFIDKELRDVSSKLRAYCRKHYKKDYYLLRSIPGIGGIVACGIICELGDLRRFKSIKHLAGYVGLAPGVHQSGDNQRATGITMRAHRLMRSYFIEASWQAIRTDPVMQAYYRKHLGKNAKSIIVKIARKLLSRTLAVIKTETPYTIGVIE

SEQ ID NO: 301481 - protein, 426 aa, unidentified
MWDAKRRVLKIKSLKHGIIQDKRGNVMRAVFGIDVSKTSSEVAILVNGEKVHGYTILNDAFGFNRLLGDLKTVHNPEIIFEATGVYSRRLQAFLEEYSYAYTRLNPLEAKKQLDSLRVRKTDKIDAEKLAKSQLVHNRKPTYVQEEVYQHLRDLSRFYQNLTEDLVRAKNRLHKVLQITFPELENLLSTPTGEQYWNLVMAFPCKEFVLRLSQSDLCEIIRQSTSKRISEKRIAYLTDKLIKLAKQSFCAVKKTSPMLEEVRYYAQELLRLSERRQVVLNDMVALAQPLPEYDILRSIPGIAETTATSIIGELGDIRRFQSSNQINAFIGIDLRHYESGNFLAKEHITKRGNPYARKILFKCIHNIASASHTNPCHIADFYEKRKRQSTIASTKPHTIASIHRLIRTMYYLITHNKLYDYSLTQNR

SEQ ID NO: 301482 - protein, 339 aa, unidentified
MRRERSGRCWRKFAQLQRKAFARTGKSYPIITIQEAGLDGFSLHRVLQQGGIESHVVDAASVAVPRRRRRAKTDKIDGEALLRVLLAYKRGEPRVCSMVVAASAEEEDRRRICREREVLLAERIRHVNRIKGLLLAQGICGYAPLRRDRRARLAGLRTADGRELPQHLKAQIGRELDRLELLLVQISAVEAERDAMLAKLSQSEDENTPVPALAMLLGVKGIGAEFAATLWFECFYRTFANRRQIAAYAGLAATPWQSGAVAHEQGVSKAGNARLRKKLVQLAWLWLRHQPASPLARWFHQQAHRKIAIVALARKLLVALWKYVTAGVVIEGAALKGAA

SEQ ID NO: 301483 - protein, 383 aa, unidentified
MEVLLYCCCGLDVHKDLIEACILRGEGLEPETIRERFGTTRPELKRLTMWLSKNDCYSVAMESTGVYWKPIFETLELCSEYLEKIWVVNANHMRNLPGRKSDVGDAEWIATLLRHGLLEKSFVPPAAIRDLRECSRLHRSFVQERCRYVNRLEKFLQAHGFKFSSVMKDILCLAGRKLLNILQDTGSLNELDVIENCRRLRHSTKEISAAVCGNLTVAEQRLLKHLLHKLDSCQEDISSILEDMHLLSQQFQEQLAIIDSIPGFDEESTMEIIAEISAAPQEHFSSGEKLCRWAGVTPRNDESAGKMKSRKTLHGNPYVKSILCQAAWAAVKVRNSPFHDWFWFHQHKLGQKKAIIAVSRKLLMLIYLLLQTGQCYRPPEKTA

SEQ ID NO: 301484 - protein, 466 aa, unidentified
MESFYLGIDVSKGYSDFVIINNKKQPVVENFQLDDTFESHNRLYGILQEFLVQRPKATVYAAVESTGGYENNWYNSLSKFQGSLSLKTARLNPLAVVHNSKAGLTRNKTDKISAQNVAEYLVAHPEKVTYQHHDQMASLRKQWGFIQMLTKQSTQLRNQLNSLLYTTHPELLSFCQDGMPERMLKLLIDYPTAEQVKKARAKTLAKIPYVTMQRAQQLVANAKRSVASATDEVSRQLVSDTAQQILHLKKTIATQTDLMIDACDLPEVALLKTFVGIGDKSAIGLLLEIESVARFKTVKKLASFWGLHPVYKTSGDGSGGFKMSKQGRKSPRKILFTVALAAIEKNPVIKALYEYHLKQGRKKMNAIGICMHKILRIIYGMLKNNTPFDPKIDRANRQRMIPVKATNGKESKDRRFEGYDPAAPVSRRQRKKRVEREQPQSVNNTMRGISAPVHISTILANMLCKV

SEQ ID NO: 301485 - protein, 296 aa, unidentified
MSHQTTAEAIITIGIDLGKNTFHLIGMDARGRIVLRRKVSRGQLLPCLANVPACLIGLEACAGAHHVGRQLAALGHDVRLLPAQYVKPFLKGHKNDYRDAEAIAEAVQRPTMRPVPLKSAEQLDLQALHRVRSRLIAQRTAVINQIRGFLLECGLPVRQGLAGLREALPTLLSQRTDVLSPRMVHLIEDLTEDWRRLDDRIETLTRDITALARQDASCCRLMGIPGVGVITASAMVAAIGTGAAFAKGRDFAAWLGLVPKQISTGNRTILGGLSKRGNRYLRTLFVGGAIVSRGVV

SEQ ID NO: 301486 - protein, 273 aa, unidentified
MKRIKFVGLDVHAETITVAVAEQDGEVRSLGVIPNREELIRKLVKKLGPAEQLRFCYEAGPTGYVVYWQLTALGAKCEVVAPTLVPVKSGERVKTDRRDALKLARNYRAGELTAVWVPDAVHEALRDLVRAREAAKKDQLRAKHRLGKFLLRHGRRPPTGVKPWTLKYLAWVKQEVHFEQPAQEATLLDYLHEVEHAEARIARLDLAIEEAVKSTPPKMKAVIEGLQALRGVAQVAAVTIVAELGEVSRFSRGRQLMGYAGIVASEHSSGESN

SEQ ID NO: 301487 - protein, 385 aa, unidentified
MTFEPSLSTFRPQNYQVFSGLDVDKGSIAVTFSDHNRLINSLRLPYSSAQLLNYVRKHFPQQQVAFVYEAGPTGFGLYDDLTSEGYPCLVVAPSMVPTAPGKRVKTNRLDSKKLSEGLRGGQLRSIHVPARPYRELRHLVQLRDTHVRQLSATKCRIKSLLLYEGIPYPDPKGRWSAAVIGALRALPCTEAVHFKLEHLIGTLYFHFNSAAVVQKQIRRFCQKDPELRQSIALLKSIPGIGWIVAAHLVARLGDWRQIDNVRSIAGFLGLVSSEHSTGDKQNRGSITRTGDSRLRNKLIQSAWTTIKKDPELRAFYRSVCQRQPKKLAARKAIVAVARKLTTRIYAVLKQQRPFVLRPDIAIAPLTAEETAALQERLDTAQNEQP

SEQ ID NO: 301488 - protein, 320 aa, unidentified
MMAQNDLVVVGIDVAKEKVDVCVRAFASRQTFPSTAPGRRKLVGWLRKHNVNKAVMEASGGYERDWNKALRQAGIEVRIVDPKRVRSFALSAGRLAKNDAIDAEMIAWFAETFSEAPSQTHDPAHEELLALVKARIALVELKTRLQNQNEHAASGPVQKAHARILKSLAAEIAKLEAAISAKVKATQDFTERAEIIESVPGFAETTSATLLAGMPELGQVSDEIAAALIGVAPFDDDSGKRHGERHIKGGRRWVRNAIYMPCLGAATQNNPVLKAFYQRLIAKGKEPKVALTACMRKLIVILNTMIARRQKWNPTRYAVA

SEQ ID NO: 301489 - protein, 410 aa, unidentified
MEVLHPRCCGLDVHKETVVACVRLVIDGKLVKEVRTFSTTTAGLIELSEWLTETKCTHVAMEATGVYWKPVWHILADDGFQLVLANAAHIKNVPGRKSDVKDSDWISDLLAHGLIRPSFVPDGPTQEMRTFLRTRKQFVHEKGSHILRIQKTLEDANIKLDSVITDIIGVSGRKMIEALIAGERDPAKLASLADPRLKASQQTLRQVLRGRVTAQHRFLLRLHLDQINALDAAIARIDREVEASIAPFRTAVEQVSTVPGVKSLAAQTILSEIGLDMSRFPSSGHLISWACICPRSDESAGKRRSTRIRKGSPWLKTTLVQCAWAATRTKGSYLQAQFYRIRARRGPKKAILAVAASILTAIYHMLKDGTFYQDLGPNHFDQRTKERQKNRLIKRFADLGYAVELIPQAS

SEQ ID NO: 301490 - protein, 344 aa, unidentified
MTYYTGIDVSLRSVSICVIDNEGAIKFEGKVASDVEAIVAVLKKLGAQICQVGLEAGTLTQYLTYGLRAAGYEVICLEARHVAATLAAMRNKTDRNDARGLAHILRTGWYRTVYVKSVQSHQTRALLTSRKAVLSKCIDLENELRGLLRVLGVRLPMRVGHGAFDALIRRHLQHHPDWAAALLPLLDARTMLYQTFLKLEYAVRSMARQDPVCQRLMTVPGIGPVSSLTFKSAVDDPARFRSSRTVAAHFGLTPRRFQSGESDNPGRISKAGDAGVREALYTAAHALLTRSNAWSTLKAWGLRLAKTRGHRRAVTAVARKLAVILHQMWVRATDFQPRRPKATA

SEQ ID NO: 301491 - protein, 404 aa, unidentified
MKGPIVSIDVSKGKSDYQAFKDLNVKYTGSRSIKHNKEGFDEIVNLVREMEKKLETEVCVVYEATGVYHRVLKKVFEDNNIKQFIINPLLSAKTRKNDSLRSPKTDKLDPKSIAKTYYSHSLHNSHKQETIYHELRELSRYYEDILVHIRKDKVAFRAQLDIVFPGYDTLYDDLYGPVALAIIEKYPHPEMLQKKKINTVSKVIQNKTCHRQAVSDTMADKAIEYSKTIYSGCDKDDIEVLILQRFIKKLNEDMAEAERTIGEMIKLAQELPDFNIIKSIPGIGDNLAARIIAELGDMTRFKKKNELVAFAGLDPRVSESGQNDGDHMHITKKGNKRLRCLLYLAVTCSIRLKRDDNSIKDFYIKKKQQSNPMCSKAAKTACASKLVRIIYSMCKTGELYQYNK

SEQ ID NO: 301492 - protein, 324 aa, unidentified
MIDGILGIDVSKNTLDVSISSFTKVRTKSFANTSDGWHHLLDWLVAQKIRRVHACLESTGRYSLGIACALYEAGHIVSIINPAQVRDFVRTKLGRNKTDGIDASRIREYCELFKPLPWAPPSEAHRRLSELQTIRSGIIAGLTEWKNRKNSGIVDAEAQALADATILHFTSQIGAVDKAIALAIENDSDLRSKRDLLLSINGVGDTLAGIVLAELPGPNVLHSSGEVVAYAGLNPRQHQSGTSVDRATRISKIGNAVLRAALYMPALSAMRYNPAIVALVTRLKSRGRLKPKQIVVAAMRKLLVLCFGVLKTGKPFDPAIAMGC

SEQ ID NO: 301493 - protein, 345 aa, unidentified
MELMYYIGLDVHKQKISYCVKDSGGKVYAEGSLPATRIDLDLWMKTLPQPWSAAMEATMFTGWIYDHLKPHAAALKVAHPLMLRAIAAAKKKNDRIDANKICDCLRCDFLPECYMASTAIRERRRTLRYRNLLVRQMVQMKNKTSMLLMEAGVSYNKQRLHKAGYFRELLATNPDIDEGLVPLLRLCRETVVRLQKTESALVRSLERDSLLMDRVERLMTIPAVGPITALTWALEVGDVQRFSSIKKAISYCGLCGAEKSSANTVQRTPLSKQRNKHLQTTLIEAAKMAPRNSQTLAMLYDKEKQRGNANRATLAVARKLVAYLMAVDRRQRDFQLVETSNGIAA

SEQ ID NO: 301494 - protein, 323 aa, unidentified
MSTTSGRATYYYVGIDVSKATLDVAILPTKEHFVVANDEGGIDELLGKLAEQFVDVLVVLEASGGFERPAVAALAASGVALFVVNPRQARDFAKATGKLAKTDRIDAFVLARFAEAIRPTPRAIPNEEAREFQEILARRRQIVRMMTAEKNRLGASASKAIRGRIEAHVKWLEKELSRTERDLDETIQASPTLKGNEVLLKSVPGVGPVLARTLLAELPELGSLSPRELSALVGVAPLNRDSGTLRGRRTVWGGRARVREALYMGALIASRFNPSIKEFYERLVEADKPKKVALVACMRKLLTILNAVMRERTPWRCPHALNS

SEQ ID NO: 301495 - protein, 463 aa, unidentified
MGRRRQTRPRKIQGVPGSRALPVIRPAVAAVDVGSQEHFVCAPGAGAGQTEVRVFGAVTAQLEAMADWLASRGVESVALESTGVYWIALYDLLESRGMEVLLVNARHLRHVSGRKSDMADCQWLQVLHACGLVRGSHRPGEEIGAIRTVRRHRENLIAQRTTVVQWMQKALDQMNVRVHRAVSDLTGKTGMEIVRAIVAGERDALRLAQRRDLRCERSVEEIAEHLRGTWREEHLFTLGLALREYDHLQECIAACDAQIGRQVRALLPPQRRDAKAPAHLKPAKAKALRRHGDEPLREALWRLTGVDLTRIDAICPATALTFVTEVGLDLSVFPDENHFISWLRLAPFQATSGGRPLRGKKPPKGATYVANALRNAASSLRHARCALGAAFRRTAARHGPGVATFAMARTLAQRLYRMLRYGHDYLDIGVAAYEERFQRRRLLNIQTRAREMGYDLVPIPVAG

SEQ ID NO: 301496 - protein, 460 aa, unidentified
MPSKNGTRKSKSSVGEEMQVVHPNTAGVDIGSREHWACAAAADGSRPIKRFGTTTRQLVALADWLDELGVKSVAMESTYVYWIPLYELLESRGFDVILANAREVKNVPGRAKTDVSDCAWLQKLHTFGLIRSSFRPPKNICAMRTLQRHAASLIEQRVRDTQLLQRSLDQMNIQIHRAVTDITGKTGMSIIHAIIDGERDPRELAKLRDPRCKVTEQELAEHLEGTWIEEHLFTLASGVRSLEHTESEIEQVESRIMEMIKALQPEEAKAVEAPKHPTASKERSIQAKGGKELRDALWRFTGCDLTRIDGISPSTAMIVLTEVGYDLSAFPSEKHFVSWLRLCPRHAVSGGKRLRKQRSNLAVNRIALVLRMAALSLQRTKTGLGAHFRKVARARDGKIAIVATARKLALLIYRMLKFGQAYVDEGAKAYEARQAERRIFGLHQSAKSLGYKLIPVEEVS

SEQ ID NO: 301497 - protein, 343 aa, unidentified
MRAITTIGLDIAKSVFQVHGIDAEGNVLIRRQLKRRYVLTFFEKLQPCLVGIEACATSHHWSRELKALGHTVRLMPPAYVKPYVKRQKNDAADAEAICEAVTRANMRFVETKTPEQQSCLMLHRARQLFIRQQTSVINAIRAHMAEFGIVAPVGRKGVEQLLAIVMDAGDQRVPEVARACLAALGAQLRMVKAQILEFDRRIMAWHRSNETSRRLDAIPGIGPALATALVASVADPKAFRSGRNFSAWIGLVPKQHSSGGKDKLGSISKQGDRYLRSLFTAGALAVIRYAKIHGTQHRPWLTALLARRPTKVAAIALANKIARMAWAMMAKGERYKEPVALAA

SEQ ID NO: 301498 - protein, 353 aa, unidentified
MMVLGADTHKRSHTIAAVAAGTGELLGEKTAAVGARGFRALLIWARGLDGERVWALEDCRHVSGSFERFLIARGERVLRVPTKLMADVRRAARTRGKSDSIDAVAVARAALREGLDELPTAHLDGLELDLRLLVDHRERLVRQRVALNNTLQWHLHDLWPELELPGGALFSTKWSTRIGRRLARAEQTMRVRIARDELRRLRELSASIRALETEIAEMVAQVAPQLLSEPGFGPLTAAKLVGEIAGAGRFATDAKLARAGGLAPIPVSSGKTNRHRLDRGGNRQINAAIHRIAITRARCHPETKDYVARRLSEGKTHRDAIRSLKRHLARRIWHLLQPPAPIPNQTITPTSLT

SEQ ID NO: 301499 - protein, 387 aa, unidentified
MSQTVAALMPAAVDYEKTLVLAIEVSNKSWVLAAQVPGLPHAKAKRTIDPEAEALLTAIAGYRARAAAMGRSIERVIAVYEAGWSGFWLARWLMRHGVEVHVVQPSSVPVDRRVRRAKSDGIDSELLLRTLLAWLRGEPRVCSMVPIPDEADEDARRCVRERTELISERVGLTNRIGAVLATLGVSDYNPLLGNRSRRLAELRTALGEPLPANAHAKIKRLLVRLELVLTQIAELERERDAVMETEASDRASRMIQQLTALRGIGVQSATVLVREAFVRCFANGKALGSYAGLASSPYSSGGIDREQGIGKAGNRRVRTVMVELAWLWTRYQPGAAQICWFRERVGTTERRVRKIMVVALARKLLIALWRFVIDGVLPEGAVFKPAA

SEQ ID NO: 301500 - protein, 432 aa, unidentified
MEVVHPQVAGIDVHKKVIWVAVRLPGEGPGQRALTVRRFKTFWRSLQKMAGWLAELGVTDAALESTGVYWWPVYHALAGAGIEVCVCNAAHMRNVPGRKRDITDCQWIAELHEYGLLRASFIPDAQVAALRQRTRYRKKLIEQRTSEGQRLAKVLEDAGIKIDSVASKLLIKSGRKMIGALISGERDPGRLADLAEGVLRRKTEELQMACDGRFTAGHGQMCRLHLDAYDHLTAQIAELDTLVAEAAAPFAALIARLVTIPGIGQRTAEVIIAETGGDMSRFATAARLAAWAGLAPGDNESAGKRKKAPARQGNPHLRTAMVEAAWATWRTATRPGARFRRLARRFGKGNEKKAAVAVAHTLLCIAWAVMRYDSDYIDAGADYYERRDQRNHEHLVRYHQNALARLGVEVIVTPPGDGAPPPPTPDNPGQAA

SEQ ID NO: 301501 - protein, 425 aa, unidentified
MHEETAGICIFVVRIEKLTTMKTCGLDVHKDMIFCAIYDGKDAVVEKFNTFTPDLRAMCAYISGHGVDTVAMESTGVYIDANRTVLRQSGMKAVVVNPFLIKQMPGRKSDTKDAVWIAKLMHKGMLPSSFIPDGLLSELRAYTREYTRLVQRRSAILTKVDRFMVSGGIRLSSCLSKITTQSYRKVAFAVADGEGDPETLAALVRGCTRHKRDGSLVKALTGCMEEFTRWRMRIALEELELCEKQIEESKKMMTELADANYREQVSLLCTVPGISLVSAICILAEIGADMTQFGSSGRLAGWAGLRPRNDESAGKYKSTAVTKGGSHLKPMLVQCAWGAVHTGESAFQAFFRRLSSRKSAKKAIIAVARKLLTAVYAILLHHEEYSPKKTSSVSPEQLHRMVQYHARQYQRLTAQLPPQTQTVTA

SEQ ID NO: 301502 - protein, 387 aa, unidentified
MTKIASSPSPAAVDYDATLILAVETSNKNWVLAAHVPGLGQVKAKQTIEPNVDALSKAIAGYRRRATSGGGAVERVVVVYEAGYGGFWLARWLDAQGVEVHVVQPSSVPVERRKRRAKSDKIDADLLLRTLLAWLRGDPRVCSMVRVPDETDEDARRPTREREELVRERISLTNRIGATLATLGVNDYNPLRRDRRTKLETLRTPLGKSLPEHATAKILRILERLELLLGQIAAIERRRDAVLEDEAPDREEGMIQRLAGLRGIGAQGATVLVYEAFVRPFASGKALGSYAGLTGTPFNSGGSEREQGVSKAGNRRLRGAMGELAWLWLRYQPDSALAKWFRDRLAGANGRMKKILLVALARKLLIALWRYVTHGVIPEGAVLSLAT

SEQ ID NO: 301503 - protein, 451 aa, unidentified
MEKTKKYENMSVVNPHAAGIDVGSKSHFVSVGQQKEDVKEFGIYTENHHDLCKWLKEKEVTTVAMESTGNYWIPLFFMLQSYGFAVILVNGKFTKNVRGKKSDVLDCQWIQKLHSLGLLEGSFIPDNDTQELRQLCRHRQSMLEDAASYIKKMQKSLRQTNIRLDNALNDTMGVSGKAIVEAIISGHRDPKYLASLVNFRVKKSQDEIAKALTGDWRNEYVFELKQSYEVYQFIHQKIAECDKQIEVILQERIKQYNAPLPNDLCTSEIKIKKYNKNDPQINLQILSYQLTDGIDLSAIDGVSHNTLLAILSEVGIDFSKFPTAKHFASWLHLAPNNKITGGKIISSRTQKGKNRLADALRHVAVVIGHNLKGGALHQFFHRIAFKKDKAAAITATARKIAVIIWNMMTKKTPFSYMNEEEYLKGIRVKQINSLKKKMKSLGIKPHEIGLL

SEQ ID NO: 301504 - protein, 370 aa, unidentified
MLDTTTFVGLDVHARSIKAVSLDVMTGEVRCATFGYDAGAVAEWVRSVDPRARCVYESGVTGFDLQKRLSGLGVDCVVGAVSKMVKPSADRRRKNDRNDAEFLARMLSVGNVVEVWVPDDECEAARDLTRALEDARDDLSRSKQRLSKFLLRHGLVFDERTPTGRRKGNWTRAHWSWIESIRFAEGADNDVLAYYVDAVRRAAEEKARLEGLVEAEARKPRWRRRVDSLRCLKGVDTASAADLVFEAGEFSRFRNARSFAAWVGLTPSEHSSGESDRRGAITKAGNKHLRKTLVEAAWHYLTCSGRPKDLAKGQAPDRGARRHAAKGVRRLVERREALLARGVHSNKANVATARELACWVWAVGLMAEEA

SEQ ID NO: 301505 - protein, 391 aa, unidentified
MIFIGIDAAKDKHDCFIANSDGEVLCDVFTISNTLTGFNDLLSKLKSFSKDLSKTKVGLEATGHYSYNLLGFLLDNGLPTYVLNPLHTNLYRKSLSLRKTKTDKVDARTIASMLMSCKDLKPYTRALYHNEELKSLTRYRFDKVSERAKLKTSVSRLITILFPELEKLVPVVHCVSVYALLSEFPSAKHIANANLTRLTNLLYSASKGHYNRDTAIRLREAARTSIGSVMPAKSLELKHTIKLIGELDNEISEIETAINQIVDSLGTTILTIPGIGYATAASILAEVGDFSNFETPDKILAFAGMSPSTYQSGQLTNCYAHMEKRGSKYLRFPLYNATKNVCKWDSNFAAYLAKKRSEGKHYNVAISHAAKKLVRLIFALEKSRLPYMPVA

SEQ ID NO: 301506 - protein, 344 aa, unidentified
MSIKVVGIDIAKNLFQVCVLGTNGQILSNRKVKRDKLLDTVRQLPEQTALAMESCATSHHWGRIFQELGYTVALIPAQHVKPFVGRQKNDANDARAICEAYSRPNLHFVPVKSVEQQDLKAIRSVRKRLVENRTALANQIRGLTAEYGVVFPLSIKALRSHLPLALEDAENALSPVMRNLLQTLYCDFVSLSEEIDEMTQSVTMLSQQNPKYEAIRNIPGFGPILTAALISEVGAGNQFQNGRQFSAWCGLVPKQNSTGGKSSLGSLSKNGNRELRALLIHGARAVVRCGANKADAMGVWLRGLIARRGKAKAIVALANKLGRVAWHILAKNSEYDINQAFKPV

SEQ ID NO: 301507 - protein, 364 aa, unidentified
MTRSSRPTPAELSVVGIDIGKDVFHIVGFSGDGRIVLRRKIRRLALTAAFEKLPRCIVGLEACLSAHFVSRMLRKLGFEPRIIPAKYTKPFVKGQKNDYNDAEGIAEAALRPNLKLVSEKTQDQLDLQALHRVRSRLVSRRTATINQIRAFLIEQGITARTGARALRNSLFAILHNRADEISPRMADIIVGLYEDWLWLDERIESVTNEIEAISKTENDCERLMSVPGIGPIISTGMVAAIGTGEAFDRGRDFGAWLGLVPRQYSTGGKPILGRISKRGSRYLRTLFVQAAHIILMRPHNWDKFSFGGWLKRASERMHKHKLAVALANKLARIAWSILRNGGRSKHSPPRHRRSNAQCRTPVRD

SEQ ID NO: 301508 - protein, 345 aa, unidentified
MVLKYSLGVDVASEKFDVNLSTIDSMQNVKVVASHKFSNTQKGFLALHHWLQKKWKTRQEPMVVTMEATGIYYEMLALFLFKQGYTVAVVLPNKAKKYMQSCGVKSKNDKIDAKGLARMGAEQSLAPWEPMIEFYYELRELTRQHESLQGHRTVVTNQLHATSRGMYPNMFVTNQLKSMIAAIDEQIKATEVAISKLIASNPQVQEKARRITKIKGLGLLTVAVLIAETNGFTLFENSRQLVSYAGYDVIENQSGNRTGKTRISKKGNSRLRRALHMPALSVVRWRQAPFINLYERTLERHSIKMKSYVAVQKKLLVIIYALWKSGRDFDTNYEHQRLEEIKKAA

SEQ ID NO: 301509 - protein, 334 aa, unidentified
MENIALIGIDLGKNSFHIHCQDHRGKAVYRKKFTRPKLIEFLATCPATTIAMEACGGSHFMARKLAELGHFPKLISPQFVRPFVKSNKNDFVDAEAICEAASRPSMRFVQPRTESQQAMRALHRVRESLVQDKVKTTNQMHAFLLEFGISVPRGAAVISRLSTLLEDSSLPLYLSQLLLKLQQHYHYLVEQIKDLESQLKRKLDEDEVGQRLLSIPCVGTLTASTISTEIGDGKQYASSRDFAAATALVPRQYSTGGRTTLLGISKRGNKKIRTLLVQCARVFIQKLEHQSGKLADWVRELLCRKSNFVVTCALANKLARIAWALTARQQTYEA

SEQ ID NO: 301510 - protein, 391 aa, unidentified
MERPVAQQLNDLSRSLTPLDQDSTIIAVIEMSQASWLVAGIVPGIERHPLKKLEPSEVELLRLLMRWRAEATQNGRTITRIAVAFEAGRDGFWLARWLRARDIEAYVIHPTSVAVSREHRRAKTDRLDTGLLKRVFIGWLRGEPDHCHMVAIPTLAEEDAKRPSREREGLVRERTRLVNRMKSCLVRFGVRSFKPTLRNAPDRLATLRTPEGVPLPPNTLLELRRDMARLRFVMDQIKEVEEARAQGLEQAPQEKTHVMVRLLARIMGIGLETADMLVHEVLARTLRDRRAVARYAGLTGSPDESGSRRREKGLAKAGNARVRRGMIQLAWRFLLHQKESALAQWYRARTADARGGTRKTLIVALARKLLIALWRMVTTGEVPAGVVLRAA

SEQ ID NO: 301511 - protein, 370 aa, unidentified
MHQSSTLYIGLDVHKESIAVAYVAQAHHAEVVSLGNIGTRQCDIDQLIRKMQSKSKHLIFVYEAGPCGYWLYRYLTKKGHVCWVVAPSLIPKKPGDRVKTNRRDAIKLARLMRSGDLTPVYVPQVEDEAIRDLCRAREDTIRALKAAKFQLKAFLLRHDIRYTGRATWSPAHLRWLSEVVCPTPAQQIVFQEYIRAVTDHTERLTRLEQALTDQVQTWRLAPVVDALQALRGVQFTVAVTTVAELGDLTRFDNPRQLMHYLGLTPSEYSTGERRQQGGITKTGNSHARRALVEGAWAYRYPAKISRHLQLRLEKVPKAIQDISWKAQVRLCKRYRQLSARGKNPNQVVVAIARELSAFMWAIAQEVPLTP

SEQ ID NO: 301512 - protein, 393 aa, unidentified
MLFVGIDIAKNSHEAAVIDENGNVVVKPFKFANSLGGFEKFLSSIQGISADLSVFEFGMEATGHYWLNLYTKLTDYNVVVHVINPVQSDALRGLYIRKTKNDAKDAFIIAELIRFGKYSQTTLSDPDLLSLRELTRQRFYLVDCVSDAKRKTISFIDKIFPEYQALFSDTFGATSVELLQTYTSPDVIAALDTELFTSFLKSVSHGRFGKTKAEEIQSVAKNTFGSFLFADSASLAIRQFIQQIKLLEEQIAEIEDFIAEKLALFNCKLDTIVGVGTTLAASFFAEIGDITRFDSPDKLAAFAGIDPSVKQSGEFNGTRNKMSKRGSPYLRRTFWLAAVSGIRTNPALKAIYDKKRAQGKHHAVAVSAVMHKLCNIVFAILKTNEPYKIVLPE

SEQ ID NO: 301513 - protein, 344 aa, unidentified
MGEVITIGLDIAKSVFQVHGVDEAGAVVIRKRISRAKMLGLFADLKPCLVGIEACPAAHHWGRELQALGHAVKLMPPSYVKAYLKRSKNDANDAAAICEAVTRPTMRFVPIKTKEQQAALMLHRARQLLVRQRTMLSNALRGHLAELGIVSAKGRNGTGALLEIIADAGDSRVPPAARGILEVLARQYCAIGAEIGSIDRSILAWHRSCEASRRLEEIPGIGPIVATALVAEIGDWKAFGSGRSLAAWIGLVPKQQSTGGKDKLGSITKQGNRYLRWLLVAGAMAVIRYAQKHGTLKRPWLGRLMARRPTKVAAVALANKIARMAWAITVHGDRYREPKPLLAA

SEQ ID NO: 301514 - protein, 362 aa, unidentified
MKTIGVDLHKDSLTVAVLDETGQLERRERMATKCRNQILEFFASYGPQCQVAVESVGFYHWFWDLVQPRVGRMLLANATAVKALRPYRDAKTDPRDAAFLARLLHEGRLPTAFAPPPHLRQLKTLVHLRCHVARSLSHARRLLRWVSLQLNLPGPSTLTSDRAQKWILANDPKLSPAQRTYTRKNLDQILLFERQEIDLDRDLEAFFAAQSDLGQRATLLQTIPGIGPLASATILAETAGTDRFPDGGRIGSFAGLVPRVNKSADTVHHGSITKAGSPLLRWVLQQSAWVAYRCDPNARRIIGRIARRAGLNKAVTAYARKLLTYARSVLARNQPFAWPQPLAAASQPKVAQEKGGAWCYAI

SEQ ID NO: 301515 - protein, 429 aa, unidentified
MATQSTRHFVASVGIDWGDTKHDFCLQICGEDNVEFGCIPHRVECIDDWARALHQRFGGPIAVALELAKGPIVAALQKYDFFTLFPINPTTLAKYRQAFKPSRAKDDPSDAELALDLLRRHPERFTPLTPQSASMRSLASLIEQRRLLVSDKVRFTNRLRSALKQYFPQTLDWFEQIDTMLFCDFLSQWPTLLTVKRAHSKTLEAFFHSHNCRRALLIEQRIKSIRSAAALTNDTGIITPYRLHSLALVAQLRTTLAAIDMFDKEIAALAPTLPDFALFESLPGAGPHLTPRLLVAFGEQRERFHSAHELQQYAGIAPVTERSGKKSWVHWRWQCPRFLRQTFVEWADQTVNKSFWAGAYYRQQRAKGASHQAAVRALAFKWIRVLYRCWQTGRVYDESVYLNALRKRGSPLLLHAASNETLGCLAQIT

SEQ ID NO: 301516 - protein, 361 aa, unidentified
MGGPGVYVGVDVSKQRLDVAVRPSGEGFAEANDKRAVSQLVKRLEALNCTRVVVEATGGYETVVVGALYAAGVPVVVVNPRWVRNFAKGMGWLEKTDRIDAKLLALYAERAELKVQQLPDEVTRRLAELCARRIDVLEMIETERNRLEHASSAVRRAINSHIDYLRKQLKSIEHDIDGAVRGSELWRHKNELMDSVPGVGPTLRACMLAWLPELGQLNRGEAGKLVGVAPLPDDSGTIRGVRRIFGGRAPLRKVLYMATMGAMRHNPHLRAYYDHLRARGKPHKVALVATMRKLLRILNAIIKNDTPWSEPCPAKRLTRAQERCPQVHRRDTSRVPRACGPCGQRGSRPADHLTSKTVASL

SEQ ID NO: 301517 - protein, 402 aa, unidentified
MNNQTLFVGIDVSKLQHHIAIMNINKRLICHPFVISDNRDGYQYLSSKLQALASQPNTQQFKIGLEATSDYWKNIYYFLSQQSPQFQLTVINPVQTRHWAKTELRRAKTDAVDAKDIALFMVEKNPVASLTRAPLLDIIKDVDRQIYTIKKQQTTTINRLRLELTKVAPELEKATASLNAKRILAVLNTFPTAQDIAQARFEDLKQIRWGKKNWSLPTSFIEKLKSLTDQSIAYKTASGAGYVVQSLVRQIAHQQQEVSQLQQQMSSLYQQFSDQDSILTSIAGIRHQTAIVLEAYIGDVKRFANAKKIVAYFGLNPSVHQSGKAKGKSRLQKKGSPIVRQKLFMAVICIISNKTGPLYRYYQRLVDSGKPKLVAIGAAMRKLMVTIYAMLKNQQPFDENKM

SEQ ID NO: 301518 - protein, 358 aa, unidentified
MLGVLTVNTTKEAPVSAHYDGPQYVGIDLHRRRSVIVRMTEAGQQLEAVRIDSDPVALGLEIAKAGPDPEVVLEATYGWYWAADVLQDAGARVHLAHPLGVKGFAYRRVKNDVRDAADLADLLRMGRLPEAYLAPPAVRELRELVRHRTKLVALRSGLKAQVHAVLAKQGVHVRVSDLFGVAGRSLLDDAPLDPPYRARVNALLRLIDGYDFEVELVSSQLRGRLATDPGYRALLTLPGVGPALAAVFRAEIGDVSRFPTARHLTSWAGLTPRHRESDTKVHRGSITKQGSTLVRWAAIEAVQKLPADAGWLVASRARLTAHKGRNIATVAVARKLLTLVYYALRDGQVRALHRSQAT

SEQ ID NO: 301519 - protein, 445 aa, unidentified
MVRKTKKQHLKIIHPHCAGIDIGSREHWVAVDPERCKDSVRCFTTFTDDLHRLADWLKSQEVKVVAMEATGVYWIPLYELLDARGFDVQLVNSRATRQVSGRKSDVLDCQWIWQLMSHGLLKGAFRPGEAVCALRSFVRQRAGKVQEQSRCIAHMQKALTQMNIQLDNVVSDLMGKTGTAILRAIVAGERDPQKLAQLRDQRLRADEATVARSLHGNWRKEHLFALAQALAHYDFLNEQIGACDQQITQALATLPRLSKEEAPKPVKPLRSPHRTATQQKELHQALHAVMGVDLCAIPTLGIDTVLVLAGEIGADLSRFPNEGHFCSWLSVAPPTNISGGKALPGRKPKVFNRAGQALRQAAANARRSESYIGACHRARLARMDSAKAIKATAHQLARLIYAMLTKGQAYVEKGIEAYEALSKDRQLRALQRKASKFGLTLSEAA

SEQ ID NO: 301520 - protein, 343 aa, unidentified
MYYIGLDVHKKTISYCMKDAAGRVHQEGKIGSTRRELDGWIKTLPQPRMMAMEATIFTGWIYDYLLPHAEKVKVAHPLMLRAIAAAKRKNDRIDASKIADCLRCDFLPECYMASTEIRDRRRTLRYRNLVIKQMVQMKNRVSGLLMETGVSYNKQRLHKVGYFADLMTSNEEVNESIRPLLKLSREMIHRSQKLEYALASSLERDPLLKERLRRLRTVPGVGSITALTWALEIGDYTRFTSIKQAISYCGLCGDEKSSADKVMRMPISKQRNKHIQRVLIEAAKLAPRECHELALVRQRALEKGNPNRATLAVARKMVGYMLAVERRKQDFVPAEEFISTAAA

SEQ ID NO: 301521 - protein, 357 aa, unidentified
MAEGTLVGIDLHARSAVAGVLDQVSGELRIERVPAASELLVEWLRLLPQPVRVGYEAGPTGYELARACARAGIGCIVAAPGKIPRAPGDRVKNDRRDAERLVRLLRLEELTAVRVPDELEEAARDLVRAREDARADLMRARHRLSKLLLRHGLVWPGSAWTLAHERWLRSLSFAPRPLLLAFDESYGAVAQAKARRDALDRAIAETAADERFAAVVARLCCLRGVSTLTAFALTVELGDWHRFQPGRLGAFLGLVPSESSSGERRRQGAITKTGNSHARRLLVEAAWHQRRPLRPSLALSGRRSGQPAAVRAQAEAAARRLHQRWWDLERRGKRRTIVAVAVARELAGHCQQLATMD

SEQ ID NO: 301522 - protein, 371 aa, unidentified
MEESSKTLYVGLDVHKESIAVAYAPEERGTEVVSLGAIGTRQCDIDKLIRKLQSKGAPLVFVYEAGPCGYWLYRYLTRQGLRCHVVAPSLIPRKPGDRVKTDRRDAVLLARLMRSGDLTAIYVPTMEDEAIRDLSRGREDAMRDLKATKYRLKAFLLRQDIRYEGRANWNAGHLRWLSEVVCPTPVQQIVFQEYVRAVTEQHERGQRLETELHEHVKTWRLYPVVEAIQALRGVELTGAVILVAELGDLTRFDTPRQLMSYLGLTPSEYSSGERRRQGGITKAGNTHARRALVEGAWAYRYPAKVSRHLQLRLEKLPAEVQAIGWKAQVRLCKRYRRLLARGKHANQVVVAIAREMAAFAWAIARTVPLTP

SEQ ID NO: 301523 - protein, 380 aa, unidentified
MKAITLYIGLDVHKDSIVIAIAEPGRNGEIRIFGTITNDLQALEKVLNRIRKAHPDAILEIAYEAGPCGFGIARRLKQLKVSCLVAAPSLIPRQPGSPFKTDKRDARGLARLLRAGELTGVYIPEPTDEAIRDLCRARTDAVDDHRRCRHRLKGFLLRHGFRYQGKANWSQPHMRYLRELVLPHPAMKTILEEYLQGIDAAHNRIERIEASMLTLLETWRLKTAVQALMAFRGFQLVASMITVSELGDIHRFEHPRQLMTYLGLVPTESSSGPHQRLGSISRCGNSHQRWLLTECAEHYAIPPKISKELSRRQQGQPQAVRDLSWKAQNRLHTRFVRLLARRLQRNKAKVAVARELCGFVWALLRSQDCYKQSTSTSTPS

SEQ ID NO: 301524 - protein, 368 aa, unidentified
MPRIAEQAGPFTGGVDTHADVHVAAVVDQVGRVLGTQVFPATAAGYRAAVAWMSSHGELAKVGVEGTGSYGAGLACYLAACGIEVAEVIRPNRQARRQRGKSDAADAVAAALAALSGEASAMPKTRDGAAESIRALRVARAGAVKARTQAGNQLRDLILTAPEQVRRQLAGLPSKRQAETAARFRPGDLTSPAEGAKAAMASVARRHQQLTAEVARLDAALEDLVTRAAPTGFLAKQGVATVVAATLLATAGDNPGRVRTDASFAALCGASPVDASSGKQRRHRLNRGGDRQANSALWTIAMTRLAHDQRTKAYAARRTAEGKTSKEIIRCLKRYIAREIYKALCRPPQPGTVSTPQAKQDLSAPALT

SEQ ID NO: 301525 - protein, 410 aa, unidentified
MSESPYAFYVGVDWASETHQFTVLTPERHLEAERRIEHTGRALSEMADWLTALADGEPARIAVAIEVPRGPVVETLLERGFHVFAINPKQLDRFRDRHSPAGAKDDRRDGFVLADSLRTDRPAFRQVHVDDPLLIQLRELSRAEEELQTELRRLSNRLWEQLQRFYPQVLRLSPAVDEPWIWALLQLAPTPVAARALRRATLARLLARHRIRRVTAATVLAELHSPALRVAPGTTEAAREHIALLLPRLQLLHEQRGRCARRIEQLLDALEGSDAEHRDVTVLRSLPGVGRVIAATMLAEAARPLAERDYHAVRTQGGVAPITRQSGKSVLVRMRYACNHRLRNALYHWGRVSAQHDPSTRRHYRALRQRGHGHARAIRGVIDRLLVVLMAMLRTGTTYDPARRRVPAAA

SEQ ID NO: 301526 - protein, 391 aa, unidentified
MIYVGIDVAKDKHDCFITNSDGEVLFKAFTITNNLDGFNDLYQKIETVMKDITKVKVGLEATGHYSYNLLGYLIDKGLPTYVINPLHTNLYRKSLSLRQTKTDKVDARTIASILMSDVNLKSYSDISYHNEELKSLTRYRFDKVKERAKLKSSVSRLICILFPELEKLVPTLHMASVYALLSEFPGAKQVANAHLTRLTNLLSEASKGRYSKDTAITFRDAARTSIGSNMPAKSLELKHTIKLIKELDSEIDEIENEIKIIMDEINSPILSIPGINYRMGAMIIAEIGDFSRFDSPDKILAYAVFSPSTYQSGHLYGAYAHMEKRGSRYLRYALYNAAKYVCHWDPTFTAYLAKKRAEGKHYNVAISHAVKKLIRVIYHLEKTNQQYIKAS

SEQ ID NO: 301527 - protein, 343 aa, unidentified
MSGVVTIGLDLAKSIFQIHGVDDAGRTMLRRRLSRHELVPYFAKISPCLIGMEACSAAHHWARELSRFGHSVRLIPPQYAKPYVKRNKTDAADAEAICEAVARPNMRYVPIKTLDQQSVLSLHRVRALFVRQRTAAINTVRGLLTEFGIIAGKGIGRIAELRHRANEADNEALPDEARAAITEVFEHIDALTKRIDATEAKIVAWHKSSEASQRLASAPGVGPITASAIVASVGDARQFRSSRHFAAWLGLTPRLHASGGKEHIGRISKGGDRYLRALLIHGARAIVGTSFRKDVPPRLWLKQLLTRRSVNVAAVAVAHKTARALWAMITREEGYRRIAVQAA

SEQ ID NO: 301528 - protein, 391 aa, unidentified
MIYIGIDVAKDKHDCFITNSEGEVLFNAFTIPNNADGFHDLFQKISSLTNDFSNVKVGLEATGHYNYNLLGFLIDKGLPTFVINPLHTNLFRKSLSLRQTKTDKVDAHTIALMMMSGVNLQSYSNTSYHNEELKSLTRYRFDKVKERAKLKTSVSRLVNILFPELEKLVPTLHMVSVYTLLSELPSASQIASCHLTHLTKLLESASKGHYNKEKAIEIRNAAKQSIGSNMPAKSLELKHTIKLIQELSSEINEIEDSIKSIMDNIHSPITSIPGINYRMGAMIIAEIGDFNRFSSPDKILAYAGLSPSTYQSGQLDSSYSHMEKRGSRYLRYALFNATKFVCIWDNTFAAYLAKKRAEGKHYNVAISHAAKKLVRVIYRLEKSQQLYNRAA

SEQ ID NO: 301529 - protein, 464 aa, unidentified
MTAGKKLWRNRKERKEWARRLQSEDPGLEVVHPHAAGIDVGNSTHYVAVRPDRDPEPVRRFECFTADLHRLADWLKSCGVKTVAMQSTGVYWIPLYEILEEHGLEVYLVNARHTKNLPGRKSDVQESQWLLKLHTYGLLNNSFQPVSEIRVLRTYWRQRGEHVRGAATCIQRMQKALTQMNLQLANVISDISGLTGQAIIRAIMAGERNPLKLAALSDPRVHASQEEIAKSLEGNWRPELLFVLQQEVDMYDTYKKRIAECDQRLQKHLASLTHPLPVQSPTQKPKTKKPAAKNAPRFDLSSELQRVTGVDLTRIDGIDVMVAQTLLSEVGLDMSRWKTESHFASWLGLCPDNRISGDKVLSRGTRRVVNRASTALRQAANTLMRSRSYLGAQYRRLRTKLGSPKAITAMAHRLARLVYRMLKYGQAYVDKGTEYYEERFRQQQIQLLRKRATKLGLQVAEIRA

SEQ ID NO: 301530 - protein, 403 aa, unidentified
MSFNGAPVMAATVVAVDVGKNTAVLSVTDSARHRLLGPVGFAMTAAAVAAVVERVSAVLPAAPVKVGVEAAGHYHRPLLESRLWPVGWEVLELSPVRVSEQRRVQGRRRVKTDAVDLEAITELVLAGYGVPVTARSGRITELSGWAMHRSRRIWTRTATKNQLLAQLDRCFPGLTLALPDVLGTQIGRLVAAEFADPHRLATLGVTRFVRFAANRGLRVRRSAAERLVAAARTALPASEAVVARQVLVDDLGLLGDLEVQIAGAEAKIAQLLPETPFAVLLTVPGWGMIRAGNYGAAVGDPRRWPGASQIYRASGLSPAQYESAGKRRDGSISREGSVQLRRALIDLGIGLWRSDPAARRYGQRLRARGKKSGVIGCAMAHRANKIAYALVRDQAGYDPDRWA

SEQ ID NO: 301531 - protein, 435 aa, unidentified
MDEVTDEPLYRDRVCGIDIGKAGMAATIRVPSDNNPARRMQETRSFGTTKREVLALADWLRCWQVDAVVMEATGDYWRPVFYRLEAEGFECVLADPKQVRKLPGRPKRDPSDSRWLAACFERGAVTSCFVPTPEFRVIRLHTRYRRDLTGERTREKQRAEKLLESAAIKLSSVVTDLHGTTGRDIMDHLIAGQRNPKVLAQLARTRARRKIAELEAALEGAEFFTPEIAALLKSMLERIDQLNTHIDELTTVIDRLLAPWEEQLAQAGSMPGWGRRAAQDVIAETGTDMTKFPTGAHLASWAGRTPPGNSSGKRSGSAAHKKGNRYIAAVTGETAVAAGKTATREGARYRRISRRRGKTKANVALGNTQLRVLHALLSKPGSRYHDLGPDYYDRQRNHHRHVSQLVGKLGALGYEVTLCRIPGPDPTEPSPTQAA

SEQ ID NO: 301532 - protein, 355 aa, unidentified
MDSKKYIGMDVHKESISIAVMNGVGKIVMESVIETKASMIVQFIDGLRGDVEVTFEEGTSAAWLYDLLKPRVTKLVVCDPRKNASMREGSQSDKIDARRLAELLRLNHLNPVYHGEHGLRSLKELVRSYLTITKDLGRVMSRVKAIYRSWAIPCTGKQVYAARHRAEWLGKIGEPGVRRRAEFYYQQLDALRTVRQEVRRELLAEGKKHQAWKRLCQIPSIGPIRSAVLLGILQTPHRFRTKRQLWTYSGFGIETQSSADHRRVNGQLQRVKKQSSIRGLNRNCNHDLKNLFKGAAIVASSKPGPFQEFYTALLTKGIRPEMARLTLARKIATIVLMVWKRGACFDAQHLKPQTA

SEQ ID NO: 301533 - protein, 319 aa, unidentified
MMAQNNLVVVGIDVAKDKVDACIRPSSARQTFPNSSIGQRQLAAWLRRHKVGKAVMEASGGYERHWAKVLRQLGVEVLVDPKRVRSFARSAGRLAKNDKIDAAMIAWFAETFDQAPSQAYDAAREELVQMVNARQGLLDLQTTLQNRDEHSEVSAVQKMHARLLKRVAGEVLRLEAAIAALIKMTKRFAELAEIIASVPGLGDITCAGLIAAMPELGQVTNKVAAALLGVAPYDDDSGKRRGERQIKGGRRRMRNLFYMACLGAATRHNPVLKAFYRRLIANGKPPKVALVACMRKLIVILNIMIARRQKWDASLYPAS

SEQ ID NO: 301534 - protein, 403 aa, unidentified
MNAVGIDVSKGKSIVTILRPFGEIVSSPFEIKHTSSDIHSLIKLIHSIEGESRVVMEHTGRYYEALAHQLSAADLFVSAVNPKLVKDFNNDSLRKIKSDKADSVKIARYALDKWQSLEPYSITDELRAQLKVMNRQFHFYVKQKTAMKNNLIGLIDQTYPNANTYFNSPTRSDGSQKWVDFVSTYWHVDCIRKMSLNAFVEHYQNWCKRKKYAFNKSKAEEIYTKTKELVPVFPKNEITKHIIRQAIDQLNSTSVTVETIRTLMNETASKLPEYSIVMQFKGIGPSLGPQLMAEIGDVTRFTHKGALTAFAGVDPGVNESGSYAQKSVPTSKRGSSNLRKTLFQVMDVLIKTMPQDDPVYQFMDRKRTQGKPYYVYMTAGANKFLRIYYGRVKEYLSVLPDPS

SEQ ID NO: 301535 - protein, 317 aa, unidentified
MARKGTIVGIDVAKGKIDAAIRFGAEASFANSAEGRRELQAWLKEHGVCKAVMEASGGYEKSWAALLRGAAVEVVITDPNRVRHFAKSAGQLAKNDPIDARMIAWFGEVFGHVSGQPHDEERQELDQIVTARLGIGRLKEQIENWGEHEQPKAVQKAQQALLKAVATQLAKLETIIAAKIDKTERFAQRAEIIQSVPGLAGTAAAGLIAFLPELGLVDRQAAAALLGVAPFDADSGRRRGERHIQGGRHKLRKLLFMPILSAATQHNPVLKACYQRLIAKGKKAKVALIACMRKLIGILNTMLARGEKWDPARHAIA

SEQ ID NO: 301536 - protein, 410 aa, unidentified
MVERFVGIDVGLREHRIAILDRDGEAVGPSFTIAASTDGVATLGRTLAARDATAAQTLIGLEASGHLWENLEAALVGVGYRVLVLNPLQTRRYRDVVRRKAKTDDIDAHVIAGLLRSGVARASYVPDEQIQSLRELARLRARLMADRQDYQRQLVAQLDVVLPEHRAVLGDLLTARARGILGQFPTAQHLANANPRAIRRAAEDAGARGFSLDDATGVRDSARRSLYRGKAAAARAHVVRTLVSQLERLTSAIDEVDHAATTLLPPSEPGTGPSDAELLQTIPGIGPQTAATLLGELGALTRFTDARALVAYVGFYPVISESGDRAAPPRLSRVGSRIARRSLYLAAVNAVRGSGEWRTIYLRKKAQGKTAKQALVVVAVKLLHAVYAMLKHRQPYNPSRLLVAPATIGS

SEQ ID NO: 301537 - protein, 345 aa, unidentified
MEYFAAIDVSLELSSVCVVDGTGKIVREKKVASEPEALAEFFRGTGLTFTRIGLEAGPLSQWLHAGLTAAGLPAMLIETRHVKAALKAMTVKTDRNDARGMAQLMRMGWFRPVHVKTLPAQEVRALLTGRKLLLGKLRDIELGIRGLLRGFGLKVGKISKGNYEKRIRELVTGHPMLEPIAAAMLQARASLRAEFGKLHRMLLAIVRDDPVCRRFMSAPGVGPVVAVTYKTAIDDPGRFRKSRDVGPYFGLTPSKYQSGEVDWTGRISKVGDAMVRTALFEAANVMLSRVTRFSALKAWALRVAKLRGLKRAMVALARKLGVVLHRMWIDGSQFRWNKAPAAVAA

SEQ ID NO: 301538 - protein, 372 aa, unidentified
MQENSEVFVGLDTSKQKISVAIANTGRSGEVRFFGDIESTPSMVEHMVKKLAKHHHRLRFCYEAGPTGYGLHRQITALGHECVVVAPSLIPRRPGERVKTNRRDAVSLAKLHRAGELTAVWVPDPAHEAVRELARARETAMEELRRARQHLQSFLLRHGRIFTGRTAWSKAHTRWLCEQKFDHPAHYIVLTEYRQAIADAEVRLERLTQQVTEIVATWSMAPVITAYQALRGVGFMTAVTFAAEIGDVCRFDNPRQLMAYLGLVASESSTGERVRRGGITKSGNRRARRVLIEGAWAYRFPARISSTLQQRLNGLPKSVREIAWKAQVRLCGRYRKLMANGKRRTVVVAAIAREMSAFLWAIGQQVKPLSVS

SEQ ID NO: 301539 - protein, 309 aa, unidentified
MEHFIGIDVAKDRLDVHTRPGGEVFAVARDSNGLAMLVERLQRLAPALVALEATGGYETVVASALGAAQLPLAVVNPRQIRDFARATGKLAKTDRIDAAAIAHFAEAVRPPARPLADAEARALGELVARRRQVIEMIIAERHRRRMASQRRIIRAIERHLALLQAELSELEGDIDDAIRKSPAWQADADLLVSVPGVGKVTLRTLIAELPELGHLNRRKIAALVGVAPINCDSGTLRGRRTIAGGRPAVRTALYMAALVASRANPVIAAYYAKLRAAGKTGKQALVACMRRLVVILNAILRDRKPWQPA

SEQ ID NO: 301540 - protein, 339 aa, unidentified
MQVTTVGLDLAKNVFQIHGVSENGEIAFNQALRRAQLLAFFEKLPPCLVGMEACGSSHYWARQLVMLGHDVRLIPAMYVKPYVKRGKSDAVDAAAICEAVTRPTMRFVAIKSEEQQAVLFLHRARDLIVRQRTQLSNMLRGLLAEFGVVIAQGIGSAVKFAKGVLDGDSPGIPDVAIDVLGNLSNQLVALHLRVRWYEMRMRLQARQDARVMLLRTIPGVGPVTASAIVATAGDASQFKNGREFAAWLGLTPLNRSNGGKERLGRISKMGDRYIRRLPVTGMTSRLRQMKTHPERVDPWAQALLERKPVRLATVAMANKTARIIWAVLTKNEYYRPHTA

SEQ ID NO: 301541 - protein, 352 aa, unidentified
MLIIGCDYHPSMQQIAFVDTETGERGERRLMHRDGEAERFYRELKQRRVEVRVGMEATGYARWFERLLAELSFELWIGDPARIRARRVRKQKTDRQDAQLLLRLLLEEDGFPRIWVPSPENRDLRQLLWHRHRLVQMRTRIMNQLQAVAMNEGLRRKRALWSEAGRKQLESFLLAPWATRRRKDLLELMDRLNPTIRELTGAVEKEAENKPEVQLLMSHPGVGPLTALAFVLIIGTPQRFHCGKQMGSHLGLIPCEDSSADRQRLGHIRKQGSSLLRFLLVEAAQVAARVDAEWRRRFLHLAMRRGRKIAKVAMARRVAVGLYWMWRKEWDYQQVVKFGSHVGQLELRHGVQ

SEQ ID NO: 301542 - protein, 392 aa, unidentified
MICVGIDVAKDKHDCFITNSDGEVLFNPFSISNNRDGFETLFQRILSVSDDLTKVKVGLEATGHYSYNLLGFLLDKGLTTFVINPLHTNLYRKSLSLRKTKTDKVDSRTIATMMMSDMNLKSYSDTSYHNEELKSLTRYRFDKVKERAKLKSSVSRLVCILFPELETLVPTLHMASVYALLCEFPSADAVANAHLTRLSNLLSESSKGRYGKDTAIMFRDAARSSIGSHMPAKSLELKHTLKLIRELTIEIDEIETAIKRIMDEEIQSPILTIPGISYRMGAMILAEIGDFSRFDSADKILAYAGMSPSTYQSGQLDNCYSHMEKRGSRYLRYALYNATKYVCHWDKSFGAYLEKKRSEGKHYNVAISHATKKLVRLIFAMEKSGKAYLPTA

SEQ ID NO: 301543 - protein, 347 aa, unidentified
MTTIVEIERAHVGGVDTHADVHVAAVIDPQGGLLGVESFRANPDGYKELSRWMRNFGTIGMVGVEGTGSYGAGLSRHLRSVGLVVVEVDRQNRQARRRQGKSDPLDAVEAARAAQSGRAFGVAKTRDGSVEAIRALMVARRSARESRTKAMNQIRQLIYTAPDELRERFVGTPPWRLAEGVAVLRVHADADPVRMATKTALATLGRRAVALDEEGSRLDALIARLVDNVAPELVQLVGVGYDTAALLLIAAGDNPSRLRSEATWAKLCGVSPLEASSGKVTRHRLNRGGDRQANHALWRIVLSRMSCHPPTKTYVARRTVEGKSKKEIMRILKRYVAREVYHYLPRE

SEQ ID NO: 301544 - protein, 412 aa, unidentified
MEDFGATTPELIRMAKWLKERNVESVAMESTGVYWIAPHEVLEAESLEVLLVDTRQLARVPGRDKKTDPVDCEWIQRLHSCGLLMGSFRPQQAVCMLRTLVRDKGNLVAEAGDWLRRMQKSLDQMNVRVHRAVADLQGATGMAIVRAIVEGERDPQKLAKLRDPRCHQSEAAIAEQLTGHWREDHLFSLRQALKMYHSIQERISDYDKELLEKLAAMEREECRGQDAPKVKNPNKANAIRKRGEEPMRQALYRMSGVDLTGIDAIGVATVETVLTEYGPDLSRFPTEKQFVSHVTLAPHRPTSGGKPVKKKKRNSASTRVAAALRMAALSLRHSDTALGAYYRNIARRTKGDVAVFATARKLATLIYRLLRWGQPYLDEGAEAYENRYQQTRIRSLTERAKELGYQLTPTTV

SEQ ID NO: 301545 - protein, 315 aa, unidentified
MPNDKAHYVGIDVAKDWFDVAIMGEKHTRQFANTKKGIRELVRWMSQLKPKLIVVEATGGYEEALVLTLFEAGLPVALVSPQRVRQYARAKGRLAKTDPLDAQLLAEYGKAIQPRLFVGKSEERKQLSALVGRRNQLNAMLQAEKNRLRAQSAAIRSSLEKVIACLEAELKQIDQEIRTLLQQHTDLQTQEKLLRTAKSIGAVTAATLLADLPELGQLDRQAIAALVGVAPMNSDTGKKRGYRKTKGGRPEVRRTLYMATLSGIRFNPVLKPHYEQLRTRGKEKKVAITACMRKMLTILNAMLRDQQPFRYPATT

SEQ ID NO: 301546 - protein, 349 aa, unidentified
MNDTVIAIDIAKGVFELAVSTQPGRVDERKRLVRAQLVPYLANVRPCIVVMEACGSAHHWAREFEKLGHVVVLIPPHLVRPYVRRNKTDRTDTKGILEAYRNKDIKPVPVKTLGQQAVGALHRMRSGWIKERTGRLNTLRGLCREIGLVIPLGAEKVVPSVRDFIGDADRDLARSFRLVLSEACDEVREIERRIAVVDHELCALPRELPAVKAWMSIPGIGEITATALFAFIGDMRRFPTARHFASFVGLTPRESSSGLRRHLGRISKRGDVYLRTLFIHGARAALNAAKRSTAHEPDRLRAWALDLDRRLGHNKAAVALANKLARLAWVVASRNDSFRSVPRSATSAA

SEQ ID NO: 301547 - protein, 337 aa, unidentified
MEQQKQYVGIDLHRKRSVIVRRNAAGETVDTVRIDNDPLTLASELAKAGEHPEVVLEATYGWYWAVDVLEECGASVHLAHPLGNNWGRRRVKNDERDATDLVDLLRLGRLAEAWIAPPPLRELREYIRYRAKLVHQRTSLKAQVHSVLAKEGVRVPMTDLFGVRGHALLNEVHLGDAYRVRVESLRDLIEACDREITMLEEHIAPILAGDLGYQSVQTIPGVGPILASIFVAEIGDISRFSSARHLCSWAGLTPTHRESDEKVRRGHITKQGSRLVRWAAVEAVARQRADSPIRAHHRRVGERRGKQVGRVAAARKLLMLVYYGLRDGEIRCLAKTE

SEQ ID NO: 301548 - protein, 335 aa, unidentified
MWYVGLDVHAKQSTYCVLDERGKHLQTRTVKGPWDRVLLDLAAIKEPWAVCFEASIGYGVLATRLEKLAQRVVVAHPGQVRLIFRSKRKNDRVDAEKLAKLLFLDEVPTVYVPGVDVRSWRALIQHREGVVEKRTQVKNALRSLLRGQGIVAPTRLWTRKGLAWFQSVELPTEADRLRRDLALEELQHVQKQLKRVEKALKEVAQQHPGVALLMTIPGVGIRTAEAVVAYIDDPKRFARSKAVGSYFGLVPLQDASADKNRLGHITKQGPTTVRRLVTEAAWQGIRRSPEVRAFFERVQRDDPQRKKIAIVATAHYLVRVMHAMLRDGRGWQQAA

SEQ ID NO: 301549 - protein, 384 aa, unidentified
MAYIAEEHGAEVTSLGTIGTRQCDMDHLIRKRPSKAKHLVLVYEAGPCGSWLYRDLTQTGHVCWVVAPSRMPKNAGDRITTDRRDAVPLARLMRSWDLTPVYVPTVEDEAMRDLPRAREDALRDRTSAKFRLNAVLLRQDIRYTGQATWGPAHRRWLSDVVCATPAPQMVFQAYVRAVHAHTERLQRLEHARHDQVNTWRLPPVVEALQAVRGVQFTVAVTLVAALGDLTRVEHPRQLMTYLGLIPSAYSRGERRRQGSITTAGHTHARRTWVEGAWADRDPAKVSRHVQRRLANQPTIMQDISWKAQVRRCQRDRQLLARGKHATVVTVAMARELAGFLWARAKQVPVTPEGHDRSRLHDELRRVAHVHRMRRSPGVVFPSAA

SEQ ID NO: 301550 - protein, 341 aa, unidentified
MEKLSTVGLDIAKRVFQVHGADSRGAVLFRKRLKRGQVTAFFASLSSCTVAMEACASAHYWGRQIGKHGHLVKLMAPGYVKPFVKRQKNDAADAEAICEAAQRPTMRFVAVKTEEAQAAAILFRARDLLVRQRTQAINALRGHLAEFGMIVAQGPRHVPELIAIVEDPASELPTMARQTLALLVDHLRGLENRTTELDREISRRAKADDVARRLMTIPGIGSVTATALTALAPCAHTFKRGRDFAAWLGLTPLQHSTGGKERLGRTSRMGERTLRRLLIIGASAVARWASRKGAPAGSWLDRMVRRKPPMLVRVALANKMARTVWALMAHGGIYRTPVATA

SEQ ID NO: 301551 - protein, 340 aa, unidentified
MSEITTIGLDLAKNIFQVHGVDETGTAVVVKRLRRSQVIGFFAGLPPCLVGMEACATAHHWARELTGLGHEVRLMPPQYVKAYVKRNKNDAADAEAICEAVKRPSMRFVPVKTIEQQSALLMHRVRDLLIRQRTMLVNALRGHMAEFGLIEAQGLHKVAGLIAIVMDDSNERIPDMARQALKMITGQINELQARVAALEMQVLAWHKNNPVSQRLATIPGIGPIIATAIAATVADANVFRNGREFAAWLGLVPRQNSTGGKARLGGISKRGDSYLRRLLVNSAHTVLLCAKAAKVDPWIVSLRGRKPRLVVAVAMANKTARVAWAVMSRQDTYRRAAMPA

SEQ ID NO: 301552 - protein, 262 aa, unidentified
MIDGILGIDVCKNTLDVSISSYTKVRTKSFTNSPDGWRHLLDWLIAQKIQRVHACLESTGRYSLGIACALYEADHVVSIINPAQIRDFVRTKLGRNKTDGVDASHIREYCELFKPSPWAPPSKAHRRLGELQTIRSGIIAGLTEWKNRKNSGIVDAEAQALADATISHFTSQLGAVDKAIALTIDNDCDLRSKRDLLLSISGVGETLAGVVLAELPGPDVLRSSAEVVAYAGLNPRQHQSGTSIDPAPPSGGMMSLAGRWMR

SEQ ID NO: 301553 - protein, 424 aa, unidentified
MDEVNRNRLEEFRQLRQEIRQSEEHLIVGIDIAKDRHHAFFGTATGRVLLRRLVFSNDGEGFGKLLDQTEALRVRHGLKKVVYGMEPTGNYHKPLGEYLIHMGRMVVLVSGVTAKHNRESLDGRWDKHDDKDSANVADLISQGKCLYYEYPPAQLRGLRGLLSLKRRLKRQEQSYRVRIRNHLIAQYFPELDSHYGRSEAQGLAIVRWCFPASHITEIDVDPFIERVTSRRVRVEKRRRLEALWEKAGESIGCDEVPGLDHEVKVMVEGLRQVREMIQETKDRIEELCKRYPEYPFLLTIPGFGPDVSAKVLGAIGDPDRFENGKQVLKQAGLDLSANRSGKNSAQAIPQISKQGKADLRYALYQAAFITSTKNRGFMRYYTSKLRGREKEKGIDGKRLVKLSAKMLLIAWTLMKKRRRLIRLI

SEQ ID NO: 301554 - protein, 408 aa, unidentified
MNVMNERCAGLDVHKALIVACVRTQTTSKVSEEIREFGATTSELVKLAEWLESEQVNTVAMEATGVYWRPVWHILAEQFDLILANPARIKNAPGRKTDVKDAAWIAKLLAHGLIEHSFVPPPIIQEARDLTRTRKQLTREVVQHTQRIQKVLEDANIKLSSVLTDTLGVSGRAIIAALIQGVTDPEALASLARGRAKNKHDDLREALWGRVTDHHRFMLKQHIDLILHLENAQLRIEGRLDEILQPFREDVERLSTIPGVSTIVAQVIIAEIGLDMSQFHSVAHLRSWACLCPRNDESAGKRRSTAVRKGSTWLKTALVQSAWAGSRTKRSYIRAQFHRIRGRRGTKKAAIAVASSILTAAYFIIRDKVEYNELGSDYFDRRDKTAVAKRHVRRLQELGFDVEISPAA

SEQ ID NO: 301555 - protein, 353 aa, unidentified
MTTIAAPTNIVTVGVDTHMDVHVAAALDGLGRMLGSAGFATTPAGNAELIRWAEQHGRIGQVGVEGTGSYGAQLTRDLQRAGHQVLEVDRPDRTARRARGKDDHLDAEAAARAVLSGRASTTPKTRDGQIEAIRALRIARRSSVSGRTAAMNQLKALMLTAPAELREQLRTLTSTQLVKTAARLRPDQDLADPLAATKYAMREISLRHQFLTEQLKRLDKHLEALVAAAAPSLVARHGIGTDTAGALLVALGDNPGRLRNESSFAHLCGVAPLPASSGKTTGRHRLNRGGDRRANNALWRIVLVRMGTDQRTKNYVARRTAQGLSKPEIMRCLKRYVAREIHTALVTAGLDRQ

SEQ ID NO: 301556 - protein, 408 aa, unidentified
MQVTHPVCCGIDVHKDTLTACLRRVDANGQVSKERREFATTYTSLLTLSDWLVEQHCPIVAMESTGVYWKPVYHVLVGTVEVYIGNAHELRSRPGKKTDKRDAAWIAELLAHGLIQPSFVPPPEIGALRDVTRTRVAFVQTRSQSKNRVHKLLEDTNLKLGSVVSDLFGVTGRRMLAALVAGERDPQVLASLALGALKHKRPQLELALTGQFTAHHGTLLGLLLELIEMLDRQIATLDQQIGELVAPLQAQIAQLDSIPGVDIIAARDILAEIGTDMRRFGDAARLASWAGVCPGNHESAGKRYRGKTRKGNRYLRRVLVQCAWGTRKTPTFLGRTFRRLEVRIGKKKAALAIAHKILVIVYHLLAAGTCYEEARYDHYYPKQEARERRRAIKALERLGYTVIVERAA

SEQ ID NO: 301557 - protein, 322 aa, unidentified
MQQATTTVAGIGIDVSGAKLDLAVRFSNLSYLDGSFDNNVSGIKSLLSVLKRQETARAVPLVIESTGNCHLQSALMIKQRNYSVKVINPVLTKKFQKSSVRNAKSDKIDARRLADIAVLEADLPDFTANTDVIASKKLASYLSHLEKTKQQLLASLKQLQQTTEILKINVNLKPIDKALDKIDEQIKVLQMALVKKLPEKARQLAMNTKGVSMEKIAVLISLVDGKKFENRDQLIAFVGLDIALRQSGSWRGKQKLSKRGNAYARKILYQIAWGLKQHNQLYRDYYNRLRLERKKHYNTAMVATARKFLRYLFAYYFNEQNV

SEQ ID NO: 301558 - protein, 422 aa, unidentified
MSYCPVAGIDVSKRFSDMCILSPDNKIFAQEKIYHDETSINRANALLQKAERLFFSKPVIVMESTSHYHLILFQFFSGHGYDVIVVNPLQSNSMKDFSIRKRKTDRVDAFKLAMMYRTKTLRPSKIPQTATRALRQLCRHRAELLNDVSSYKNRLTALLDQTFPGYDKVFSDVGGVTSCAVLVRFPTPTILLVEKESELVEVIAAASKSGYSFAKKKAGLLISAAQKAQTLGIHSCADETLIVCTIQMLRTLSESVLQIETAIDNLLAQIKEMRNNVSLLQSIPGVGSHSAALLLGEIGDISLFKKPKQLAAYFGLDPTERQSGSFRGTKNKLSKRGSPYARAALHMGVVNSICKRGKDSAANPVLLSYYEKKCKNKPAKVAQAASMHKLVFIIFAVLRDQKPFELKTPEQHAVEQGFVKAA

SEQ ID NO: 301559 - protein, 404 aa, unidentified
MWYAGIDWANDHHDALVIDEKGHQVGSVRVDHNPEGLMKLNTFLEQIIGAESKEQMACIIETTHGLLIARLLEAGWPVYPINPRTVDRRRGASGAKTDRIDAYLLAKTGRADLADLHRLTPDSEKIAELKMLTRDQNSLVQMQTRLVNQLTACLKAYYPVALELFTKLQQKSTLQFLQTYPTPEQAMAASQQQIKETLKQAKYPNPTAGARTIFEQLHQPHLQADALTARAKSRLMVALVSQLLPLIEQIASYDKEIETLFLTHPDHEIFASLPRAGQRLAPRLLAEIGDDRNRYQSASSLQALGGTSPVLFQSGMYSKTHRRLGCIKPLRNALHQFAWQTTLCEPWAADYYQRKRAQGKSHTMAVRALANVWVRIIFAMWWHHTIYERATFEQAQQEHAPRAA

SEQ ID NO: 301560 - protein, 345 aa, unidentified
MKFVGVDLHKNTISVCVMIQDGNQRKVVNRERFACSETERIATFFRELGPFRLVVEATSSYEWFLQLVESGADRIVLAHPKKLRVIAESTRKTDKIDAEVLALFLMLDMIPEAYRPTPRQREHRTLVRQRRSIQGRITSVKNKMRHVLAGYNADRASLFSQAGRKYLRQASVSSADRYVLGQLEEALDFHSEQMAAIDKQLRAFAKTAPIAEKEAREVLDTIPCVGPVTIDVVVSELGDVRRFRSQKKVGAYAGLAPGIRESSGRRKELGITKEGSRLLRWALVETAWRLVGKTRRWGLIYDRFKKRMGAKKAIVAVARRVLCVMVAMLNSGKRYNTALEALTPP

SEQ ID NO: 301561 - protein, 355 aa, unidentified
MAGLVPHLTRQPLKKLKSDPLALLALLRRWRDQSTKAGGQIRRMVLAFEAGRDGFWLARWLRVRGIEAYVIHPTSIPVSREHRRAKTDRLDTSLLMRALLGWLRGEPKHCSMAAIPTAAEEDACRPTRERETLVRERTRVVNRIKSTLIRFGIRSFKVKLRQARQALEALRTPEGEPLPPNTLAELRRDVARLELMREQIAEIERTRLERLKQAPHKGTHPMIRMLARVMGIGIETADMLVHEVLRRNLRDQRAVARYSGLTGSPDESGSKRREKGLARAGNARVRRGMIQLAWRWLMFQKNSALAQWYQARTADGRPGLRKTMIVALARKLLIALWRYVTSGETPAGAVLRPAT

SEQ ID NO: 301562 - protein, 346 aa, unidentified
MLIIGCDFHPGFQQVAIFDKQTGEVQERRLCHRDEAEQFYGSLAAPARVGMEACGHYPWFERWLAKCGHELWLGDAAKIRAGVVRKQKTDRRDAEHILQLLIEERFPRIWTPSLEERDARQLLVHRHKQVVRRTQVKNQLQAIALSHGVQKKWRLWTEAGRAELEQLELLPYAAARRQQLLQALDQLQVEIGRLNRQVEEEVKQRPPAVKLMSHPGVGAVTALAMVLTLGPAERFHSPKQVASYFGLIPSEHSSGGRQQLGRITKQGSSFLRFLLVEAGQSAARYDSELGRFYRRLSARKHRALAKVAVARKLAMRLYLMLREDWTYAQLMRAVVQASPSHSVVES

SEQ ID NO: 301563 - protein, 404 aa, unidentified
MPKTASTQIAVIGIDIGKNSFHVAGHDKRGSIVLRQKWSRGQIEARLANLTPCLVGMEACVGAHHLARKLAALGHDTRLMPAKYVRPYARGQKNDFNDAEAIAEAVQRPTMKFVAAKTADQLDLQALHRVRERLVSQRTGIINQIRAFMLERGIAVRQGIRFLRAELPIILASRSDVLSPRMLRVIEELAGDWRRLDERIENLSREIETIARQDAGCDRLMSVPGIGPIISSAVVAAIGSGDVFSKGRDFAAWLGLVPKQISTGDRTILGKISKRGNRYLRVLFVQAAWVVLIKPMSWERHGLKSWIEAAKKRLHHNVLAIALANKLARIAWASSPRDVALKRRGRSMVRPNLHDPGAVLGTVKAKPCGRPWRAGLDRACARRLPRVQAGMKERPSARTKELTR

SEQ ID NO: 301564 - protein, 411 aa, unidentified
MLEVKVEKCAGIDVGKKFLAVCVLIGLANQKPVREVRRFGTSAKELERLRAWLLESGCTEAVMESTGSYWKPVFNILEGSLKIILANAEQVKALRGKKTDPNDSRWLASLLRHGLVQGSFIPPRDIRELRDLTRRRRRLVGDGAAERNRVQKVLEDANVKIGNVLSDVFGTSGQAMLEALLENKRSAAEIAELGHWSLAPKIPQIVEALEGHRMSDDHRFMIRQSLRHMRNIEEMIEELDKEIAVRLKPYQQQMKLACTVPGIKPTAAASILAETGMDMSPEGPFPDCHHLASWGTVCPGNNESAGKRKSGRTRQGNRWLRATLTQTAWAGAADKKSLFQMRYQRLKLRRGGQRAVIAIAHAQLIAIYWALRNGTPYPEQVQRLQEDRREAQIRHHLQRLTKLGYEPNMHG

SEQ ID NO: 301565 - protein, 456 aa, unidentified
MDTYYLGIDVSKGYADFMILDRSKQPVEDSFQLDDTFSGHCLLYERLVDFFDNHQGCLLYAALESTGGYENNWFNSLVKFQGTLNIQTARLNPLGVSANSRADLKRNITDQISAQNVAEFMIAHAEKIIYEQQDALANLRRQWSFIKLLTKQSTQLLNQLESLLYIANPELLAYCQDKTPKWVFRLLEKYPTAANLSKAKAKTVATIPYVSIQRAEKLIAAAKNSVASATDKTTGQLITTCVKQIVHINQTIEAQSKMMAEQCRCDEVDLLKTFTGISDYSAIGLILEIQSIKRFSSVKKLASFFGLHPVFKLSGDGSGGFHMSKKGRKEPRRILFMVTIVAISHNPLIAGIYKERIEKGMSKMAAIGYCMHKILRIIYGMLKTNRAFDPQIDQTNRTKNTQRQKKIRKDRSRRYQDYDAKAPVSMRQRKKRKERKESQSDKITENGIIESAPNHT

SEQ ID NO: 301566 - protein, 394 aa, unidentified
MRFVGIDVAAERHVVAVVDETDRVLIKATSFTEDADGYAKLLEVLGAPIDALVAMEATGHYWKNLFAALVAAGFAVALLNPLRTRRFAGEDLQRTRTDAIDAVGIARFAAQKRPPASRLPDRATEELRELVRFRDRLRQDFGDRVRQLHRLVDLGFPEFTRHVRDLGSELATALLRDYPTAASFRGVPVRRLAALRSDGRHKVGDALAAALIAAAAGSVGRHHGEAYRIQVRYTCEDLDVLRRRLRDLERDIDRLLEQHEIGRLLTTIEGIGPQTSARLVATFGDFSSFPSGGALASYVGAVPALKQSGKRTFQRASLTPIGAARLRAKLWMPVLTAVRTNPWLRAYYERLIARGKLPKVALVAAMRKLLHAVYSVATHRRPFVANLVPAETRP

SEQ ID NO: 301567 - protein, 350 aa, unidentified
MVTLGGDSHKQTHTLVAVDDNGRQLAQKTLPATKAGHLEALQWARRWSERRWALEDCRHVSRRFEADLLVAGEVVVRVPSKLTGGARKVARTSGKSDPIDALAVARAALREPDLPVAKLEGPGRDVRLLLDHREDLVGERTRIQNRLRWHLHELEPEAAIPARMLSRYHSLAEIEQRLRRHRGVVAEIALELVVRVRELTRRINQLETDIEHRVGGLAPTLMKLSGCGALCAAKVVGEAAGVSRFRSRAAFAMNNGTAPVQASSGNQQRHRLNRGGNRQLNVAMHRIAITQLSRPGPAKDYVAKRLAAGNTKTEAIRALKRRISDEVFRRLLQDERASLTNNVSACKAAA

SEQ ID NO: 301568 - protein, 424 aa, unidentified
MNLTQNDRLNQVTADTLVVGVDIGSQDHFARAFDWRGFEFSKRAFRFSNTSVGFLSFLRWLYELQGKTDTKKVIVGCEPTGCYWLTFQKFLKDHGILLVTVNPYSVKKCKELDDNSPEKSDLKDPKTIAGLVKDGRYSTSYLPSGIYAEIREASVCRDMVMKQHVRLANQIQGWLQKYFPEYFECYKDWNSTSGLMVLKNAPLPQDIIKLGSGGINQIWREAKVRAAGIKRATTLVEAAQNSVGLEGGEAARLEIWILVNDYASKVEQLDRLDAFLKEKIMEVPNVEKLLAIKGVGLSTVIGFVAEVGDIGRFTDPRQVQKLAGLEITKISSGKRKGQPGISKRGRRKLRRTMYESARALINWNSAFLDVFLYYRNREHRPLGSMQAKIAVACKAIRVFFVIMQTGCDFDEERFRKDILRPEVA

SEQ ID NO: 301569 - protein, 432 aa, unidentified
MYRELQPLRQALSVELKANLSPAEPGIDPEHLLQSYLDRLTMYVGCDVADQTFTLMALDAAGEELGHCLNVPNTPVGFERAWEWLEDLRSQGRLRIVLLAMETTGVYYWAWWDFLAGRPNLARVLYNPRTTEHMTEVLSKKVRNELVDAYALAEQVRLGGTPEVVLIEDADLLTARFCSRAARDLAQQINRKKNQLRSLLRAYNPAISQVFPRAKFHHQAVYALLQHYVFPDEYATAGVEAITTILQHHCRTAFGRAHAEQLVSLCRESLTREIGRETIRQRILHLIADISTCQKRKSYFNKTGYRLIEDRPETNLLRNAIGAGISNTLALVSEIGDVQRFQSGEHLASFLGLTTSKHISGTTLFRSKHITKQGSPNGRYAAVNLAQYLSQRVPKYIQMYQRIKNRKPPRKGHFIALVAIARDFITNVLYDM

SEQ ID NO: 301570 - protein, 323 aa, unidentified
MTKDIKYFGIDISKDVFDVCDNNAKYYQFKNSVSGFKKLVKLLDLNSVCVMEATGYYHSRLAYFLLESGFGVSVVNPLKIKRYIQMDLSKIKTDKSDAKMIQLYGKDREPKLWTGQSKTQQESLQLSRTLSIYSKQSTQLKNKIHGEDVLGNPSKIVVSSLKRSLKYLKKEMDTLEKALDKNVKKEYQESLTLLKSIPGIGDKTALMLLVFTDGFQRFESSKELCSYAGITPIIRQSGSSVKGRPRISKMGNPKLRNLLFMCSFNACKYNRACKALFDRIVAKGKSKKLALIAVCNKLLKQAFSIVKNGVPYNDEYRSTLVKN

SEQ ID NO: 301571 - protein, 332 aa, unidentified
MIVIGVDAHKRTHTLVAVDEVGRKLGERTVRATPDGNMEAATWSTRWPQVKFAIEDCRHVTRRLEADLLTAGYQVVRVTTQLMAGQRRAGRERGKSDPIDALAVARVALREPDLPVARLDGLSREVKLLADYRDDLVTQRTRVCSKLRWHLHELDPELQIPSRGLRRRCVQDQVEQHVAAMPGVVAQLARELLERCRELTVRINQLEKQLKQLVQAMAPQLLEIAGCGVLGAATIIGESAGVDRFRSKAAFARFTGTAPIPVWSGNSSRVRLNRGGNRRMNCALHMIAVTQARGIGPGKDYIDKLAKTYGRAPVSVGTSKKSQAKQRIGLTA

SEQ ID NO: 301572 - protein, 423 aa, unidentified
MENTAARKRKQVPEGYLIIGIDPHKKRHAAVAITQDFSIRDKFKFDNTREGLEFLLRRARMEMMKSGCRGVMFAIETGGHYWRNIAYFLDEQGIPFRFINQYTLKRRREGKDLNHKKNDYRDSEVAAQLLCTGEFTESKIPQGVYAELRSAHNAYRRLVKERTRITNLVKGLLDGLFPEFTHVFKDPCGLTALSILSTCSIPSVIARMTEDEFVATIEAQHQGRLMRRKLRALHYSARTSIGIDAGARSVSSEISFLVEKLELIRRHIRIIEGTLIKLVDETEEGKYLLSIRGLHYIAVGGLLAELGCFKSYRSAKQMIKMAGSNPTESESAGKKGTHTPMSKQGRPVLRYCAWTSVIPMLRLNSDFRAWAKQRRERPAHANPLNGREVVGAALNRLFRLAFAMVKNQTYYRVSKPELTLVAV

SEQ ID NO: 301573 - protein, 386 aa, unidentified
MDNRKDTAPAVVRDVATVYVAIELSMKSWLVALQSPRQEQASRHKLGPGDARGLWAAIERERSALLRSGHSEVRVVTCYEAGRDGFWLHRFLVAQGAESQVVDPGSVLVNRRGRRAKSDRLDVEGLLRLVIRHDAGDRHLGRMVVVPSVAQEDARRPTRERQRLLRERTAHNNRIKGLLATQGIYDYQPLRADRRVRLAGLRRADGEPPAPALQVEIERELARLEVIEAQVATLEKARRAALAGAGADDREAQAMRLLMRLKSIAIEFASVLTREVFYRDFANRRAVGSFVGLAPSPFKSGAVDHEQGIGKAGNRRARSTMIELAWQWVRLQPHSDLTLWFKARLGDGRSGRRKRQLIVALARRLLVALWRYVTTGVIPAGAQLKG

SEQ ID NO: 301574 - protein, 402 aa, unidentified
MTTKLKVALTGIALAVVAATANAQPYYPQYYPGSGYPYPLGWTASRHLVPKFGRQNTNWRPSMSEIKRIAIDTSKAVFTLHGVDDAGRPMLRRNVRRRELLPFFEKLPPVEVVLEACGGSHHWGRALSTIGHRVRLLPAQYVKPFVKRSKNDRNDAEAISVAASQPSISSVPIKSLEQQAAAMLLSVRELLVRQRTQLVNALRGHAAELGMVAPLGEKGLAELRTEIAAADERAVPAAAKQALMLLGQETHRIETRLAAIEVKLMQQHRANPVSRRLSGIPGVGPIGALNFALRIDPAQFRSARHLAAWLGLVPRECSTAGRQRLGGISRAGDERLRQLLVLGATAVIRHAKPGRPATSPWLLSLLGRKPRKLAAVALANKMARIIWAMMTSGQAYRSQPAA

SEQ ID NO: 301575 - protein, 391 aa, unidentified
MKSSHRIDTPAAGSKDGTLYVGFELGKSKWLIGLLVSCEKKLSRHVVAGGDTAAVWQLISKKRAAAAKKLGRPVRVVSCYEAGFDGFWLDRWLAGQGIENRVLDPSSIEMPRRARQAKTDRLDLERLMRVLIRHEGGEPRVCSVVRPPSPEQEDARRLSRERERLIGERTAHGNRIKGLLHGQGVRDVEPRRKDFGERLARARTGDGRALPARLVAEIEREHVRLELIVEQIAEVEGQMQAEREAATPDSRAAQVNRLIEVKSIGAIGGEGLVSEAFWRDFRNRRQVGAYFGLAGTPFDSGQSAREQGISKAGNGRARTLAIQLAWLWLRYQPDSALSRWFRQRVGDQKGRVKRIAIVALARKLMVALWRFLTQGLVPENAIVRAAAPAGR

SEQ ID NO: 301576 - protein, 400 aa, unidentified
MLSIGIDVSKGKSTVCGMKPGGEIVYTPFEVQHTREGMSELVSLLRSSGEEVRAVLESTGSYHCPVVAALLENGIFVSVVNSLRMKRFCSQSIRKVKTDRIDAMQIALYGLAYWQELQPTKLPEDTYRELQLLARQYYQMTSMLIKAKVDFNAICDQVLPGMQELMSDHAGRHKLSDFVLRYRHTTHILEMGETRFRKDYCKWAEKKGYRNCERMAALIFATAQNGIPVLPNAPSTQIVITEAIRVLHTVEASRDAILTQMQALAKTLPEYSLVREMPCIGDTLAPRLIAEIGDVRRFHSKRALIAYAGIDAPPYQSGKFCANNRHISKRGNRYLRKTGYEVMQSYVMHKPANDPIFTFIEKKRGEGKSGKLAMVAGLNKFLRVYYGKVTELYRSLPAIE

SEQ ID NO: 301577 - protein, 339 aa, unidentified
MLHYQNLGIDLAAKSFRVCLKVKNGDLNVKIKGQRKFDNTTSGFEALNSWLKKKVDTGLTLTVTMEATGVYYERLAYFLHGAGYKVHVLLPNRIKGYMKFLNLKSKTDKLEAKALAELGLGTKLPEWKPASPQMYTLKRLSRERNNLKEEKTALSNRLHAEESCQKPEKLAIKRLKQRIALIDKQIGQVEKQMHQLAAKDQELQSRIENICKIKGVAFITVLAVIAETNGFELVEHKSQLVSYAGYDIVERESGSSVKGKTRISKKGNRHIRHALHFPAISVVKYHEEFRSLYERVFDRTKVKMKGYVAVQRKLLVLIYTLYKKNIPYDPAYYKTLAVG

SEQ ID NO: 301578 - protein, 418 aa, unidentified
MTKKLDTTFIQIIHPICCGLDVHKEKISACLITIDEQGLEQYEIKEFGTFTDDLLMMRKWLTDNKCPIIAMESTGIYWRPVHNVLEGHMNIILVNARHIKNVPGRKTDIGDSKWLAGLLRHGLLRASFIPSKQIRQWRELTRLRRTYTESLADYKRRVHKLFESANIKIDSVVSDLFGQTGRNLIVLLCKDSELSLADIRANTKRGLKSKVLELHRSVNGFFEDHHRFELTGMMEIISTFEKHIAEITGRMDLLVSGHQDVLTRLDEIPGIDKKSAQSIVSEIGITLDEFPSMAALASWAGLCPGNNESAGKRKSGRTSVRSHPLKTILIEVAWASVRKKGSYYRTKYFQLKSRRGAKKAIVAIAHRISKAIFNIIKHGETFMDLGEDYLSAQTRQRVINNIKKRAEQLGYELVPCMN

SEQ ID NO: 301579 - protein, 462 aa, unidentified
MGHARARKIPAQLVEDEEYQLRHERVAGIDIAKAKADVCTRLPPQRDGGRRASRVEEVPATAKAILALAVRLIADGAELVVMESTSDYWRMWYYLLEGAGLSVQLVNPAHARQLAGRPKTDRLDAQWLARLAEMGLLRPSFVPPPEIRALRDLTRTRLQLVRDRSREWQRLEKLLEGALVKLSSVVHSLAKVQSARAILEAIAAGERDPKALAALAHPNVKGGRAAVEEALGGMALGDHHPMLIRVHLGHITLLDRSVAAVEDEIEAALDAIPAAWGTDPGGETGPDAGRGPDPAVLPAAERLAEIPGVSPALARAIIAETGLDMTRFQTADHLVSWAGLAPVARQSGPRTRKPKKGQGDAYLRGYCTQAANGAARTDTFPGERLRRLSRRLDGNRARCAVARSILVIAWHLLASPEARYADLGPGWHQRKADTDRRTRSLLNQLRALHPEADITITPATAA

SEQ ID NO: 301580 - protein, 328 aa, unidentified
MTATLLEATTLVGGADTHADTIHVAAIDALGRELDDREFPTTPDGYHSALRFLTDLGVVTVIGIEGTSSYGAGFTRAAREAGIEVREVIRPERSVRRTRGKSDPIDAYQAARAALSGKAEAAPKTEETEALRALHNARRSAVRARTAAMNQIHHMLITAPVAVREKYRPLKEKPLVSALAACRPTSQEPIGRAVLSALKALAKRHQFLAAQADELEGQIRDLTRSANPHLLSLHGVGPNTAAQLLITAGGNPDRLRTEASFAALCGTAPVPASSGKTTRHRLSRGGDRAANCALHTIALVRMSSETRTRTYVSAQRDRAATTPRSSGC

SEQ ID NO: 301581 - protein, 343 aa, unidentified
MQSISTIGLDIAKSVFQVHGVDAAGQVVLRRQLKRRHVLAFFEKLPPCLMGIEACASSHHWSRELQALGHTVRLMPPAYVKPYVKRQKNDTTDAEAICEAVTRPNMRFVPTKTVEQQGCLMLHRARHLFIRQQTAVINSIRAYLAEFGIVAPVGRRGVEQLLEVVADTADRRLPEVARACLAALGSQLRALKAQILEFDRRIIAWHRSNATSKRLDAIPGVGPALATALVASIADPRAFRSGRDFSAWVGLVPKQNSSGGKDKLGSISKQGDRYLRSLFTAGALAVIRYAKIHGTGHRPWLTGLLARRPTKIAAIALANKLARMAWAMMARNERYREPAALAA

SEQ ID NO: 301582 - protein, 357 aa, unidentified
METKSKKLDFSNQSFFLGIDVHKKSWKVTIRSNRMELCTFSMNPSPEELVKHMQKHYPKGKYFSVYEAGFCGYWIDRKLRAYGIENIVVSPADIPTRFKERTTKSDTIDSRKLARELENGTLDSIYIPDNLQEKLRAYCRLRYQLVGNQVRLKNRIKGYLMFSGIQMPENYKIRNWSGKFINHLEKIEFENEVGRECLLVYLEDFKQSRVRLAKALIRLRKYSEEYNFKPLINKLMSIPGIGFINAITIYTELMDIKRFRRPDDLASYVGLVPSVSSSGEKEKILGLSHRYSKFLRCLLVEASWIAVRKDPAMTLKYNELIQRMSKQKAIIRIAKKLLCRIQHVWNSQEVYEYAVIA

SEQ ID NO: 301583 - protein, 343 aa, unidentified
MQAVKTLGLDIAKSVFQVHGVDADGQVVIRRQLKRRYVLAFFQKVPSCLVGMEACATSHHWSRELQALGHRVRLMPPAYVRPYVKRQKNDAADAEAICEAVTRTNMRFVETKTTEQQSCLVLHRTRHLFIRQQTSVINAIRAHLAEFGIVAPVGRKGLEQLLDVVANAREQRIPALARACVAALGAQLRALKGQILEFDRQIMLWHRSHETSKRLDEIPGVGPALATALVASIADPNAFRSGRNFSAWIGLVPRQHSSGGKDKLGSISKQGDRYLRSLFMAGALAVIRYAKIYGSKHRPWLTALLARRPTKVAAIALANKLARMVWAMMSRGERYKEPVALAA

SEQ ID NO: 301584 - protein, 347 aa, unidentified
MNFYTQQHKHYCGIDLHAKAMYVCILDQAGTILVHKNLPTTPEAFLRVIAPYREDVVVGVECIFTWYWVADLCAKEGIPFVLGHALYMKAIHGGKAKNDKIDANKIAVLLRGGMFPQAYVYPAEMRATRDLLRRRCHLVQKRAELLAHIQNTNSQYNLPEIGKKLAYKANREGVEEHFPDPSVRKTIEVDISLIDHYDKLLGEVELYITRSAKGHDVQTFSRLQSVPGIGQILALVILYEIQDIARFPRVQDFVSYCRLVKCAKESNGKRLGTSGKKIGNVHLRWAFAEAAVLFLRQNPLGKEYFTRLEHKHGKAKALTVLAHKLARAVYYMLTREQAFDLQRFVTA

SEQ ID NO: 301585 - protein, 356 aa, unidentified
MKQDIRLDFTGQRIYTALDVHKKSWKVSIFTEHFEHKTFSQSPDVDVLIKYLRRTFPGGEYHVVYEAGFCGFWIHDQLMAQGVTCLVVNPADVPTTDKEKKTKSDPVDSRKLARSLRNGELRGIYVPSRDQVEDRNLVRTRQVMVKKQTRCKNQIKALLHFYGIVIPEHLGEGRWSRKFVAWLEEIHMVRPSGTIALKTLVAELLYLRQTIADVTKEIRRLARTPHYEENHRLLKSVIGISTLTAMTLLTELVDLKRFKNLDTLASYVGLIPGMHSSGEKEVVTGITPRRNPQLRWILIEAAWIAVRKDPALTLAFSKLIAKVTKKIAIVKIARKLLNRIRYVLNTQQEYVPAVVQ

SEQ ID NO: 301586 - protein, 354 aa, unidentified
MQQSSTLYVGLDVHKESIAVAYVAQDHGAEVLSLGTIGTRQCDIDKPLRHLQSKGQQLVFVYEAGPCGSWLYRYLMKKGYVCWVVAPSLIPKKPGDRVKTDRRDARQLARLMRSGDLTPVYVPAVDDEAIRDLSRAREDTLRDLKAAKLRLKAFLLRHDIRYTGRANWSPAHLRWLSEVICPTPAQQIVFQEYVQTVTEQTARLQRLEHELRDQVTTWRFQPVVEALQALRGVQFTVAVTTVAELGDLTRFDNPRQLMNYLGLTPSEYSSGPRRQQGSITKTGNTHARRALVEGAWAYRYPAKVSRHLQLRLEKLPAAIQAISWKAQVRLCKRYRQLMAKGKNAHQVVVAIARE

SEQ ID NO: 301587 - protein, 313 aa, unidentified
MPQDTFVGIDVSKDTLDVHVLPTRRRLQCSNSAGDIQTLAAQLASLEPALVVLEATGGYQTQLAATLHDHGLVVAVVNPRQVRDFARATGRLAKTDRIDAAILAQFAQRIQPPPRDLGNENDRQIKALVTRRRQLLDMHAAESNRLGQARHQAVTASIQAVLKLIEVQLKDTDATIDEFIRHSPIWLQKATLLDSTPGVGPATIRSLLAHLPELGRLNRRQIAALVGLAPMNDDSGKRGGYRAIRGGRTAVRNALYMATLVATRHNPRIRAHYQHLLTQGKKKMVALIACMRKLLIILNSMLKNNQPWRCQMT

SEQ ID NO: 301588 - protein, 351 aa, unidentified
MKEFIAFDCHKRYTLMERENIQTMKAKQYRVEHEPGAIKRCLQGREPGTLVAVEATGNWYWIVDEIEQAGLQPKLVHPRKAKLMMGLINKTDKLDAHGLNQLQRNRTLPTVWIPPKELRDLRELTRTRMVLGAQRTRLKNRIQATLNKYGWVLKDYSDPFGKKARVELNLRIGHLPPQTAYVTGVLMNQLDALEVQIAEMEKRIRALAQETPEMKRLMTLPGIGWILAVVVVLEVGEILRFPSAQHLASYSGTTPRIHQSGDKTRYGRLRPDVNHYLRWAFIEAAHSVCLNQGCHPEWHVTRLYQRIRGRKGHAKAVGAVARHLAEATYHVWSTGQPYRDPVLKQGRSTEV

SEQ ID NO: 301589 - protein, 485 aa, unidentified
MAVMLAVVLGLLMLEVAMSPRKPHPTSPDPASLALLHTLHPHAAGIDVGAAELWVGVPPGAVAVPHPPAVLPAHVRRFGAFTADLHAIAAWLRQCGVTTVAMESTGVYWIPLYDVLESAGFEVLLVDPRQVQRAPNRPKTDVHDCQWIQRLHSLGLLTAAFRPEEKIRVWRSYQRHRTNLIEDAGRHLQRIEKALEQMNVKLTEVVSDITGVTGMSMVRAMVQGERDPKALAKLRDHRCKESMETIAQALQGTWQPEHLFALRQSLELYDYYHQQIRDCDRVIEAHLQGMALPEVTPLEPTRRVRRRKDNEATFDARQRLHHVAGVDLTAIEGIEESTALVVLSEIGTDMSRWPSEKHFGSWLGLAPNPRKSGGKVKSSATRPGVNRAAQALRLAAKNLQRSRSALGAFFRRIAARRGLAKAITATAYKLARIVYALLKYGTAYVTQGLEAYETAYRERVVRQVKRKAMELGLVVVEREAVAQPS

SEQ ID NO: 301590 - protein, 428 aa, unidentified
MKPEDTIRREQFCQIKSEIRGSEKYLVVGIDVAKDKHHAFMGSATGKSLLRKLVFENNREGFDKLLERSEAIRTQNALSKVVFGMEPTGNYHKPLGAYLIRNQHHVVLVTGKAVKNNRELLDGRWDKNDIKDPANVADLICQGKCLYYDYPSASINQLRQLLSLRRRLKKEEHSLRMRIRNNLLAQYFPELDRFYSACETESLAIVRWFLDPEMIACMPFDEFFSLVTRTKRGIAQKLRLEKIHRLAAESVGCPMGAAVEFEAILLVEKLDQVRQQLKKTADLIEDYCMEFTEYSNLLTIPGFGPYIAARVLASISDPWRFETSNQLLKIAGYDLSAQRSGKRSDDAVPVISKRGNSELRYALYQAAHVASTRNPEFIRYFTRMLRGRERERGIKTKMKVKLAAKMLKIAWALMKKNQGFDPDYLITD

SEQ ID NO: 301591 - protein, 454 aa, unidentified
MSSREDWSISTTQRLCRPDVLTVTATEGVAMLGVGIDWSEEFHLVALGRVEEGVIEVCRVEHTPAAVASLVARIGALQADPAEVRVVIETRHGLLVEALLDAGYTVLPVNPDLIARRRGPAKKKDDTEDARLACLLALDRHVGLRALIPHGELAGELRAIGRDDARAARDERRLLNRLRADLQATFPAALTIAGDDLGAPTVLRLLERWPSTGALRAAGRDELVAFARAGRHGWPERFADRVAQALAEDQFVARDYLVRAKTDTIRLTVSQLLAVAAQRRSWEKRMGELLLGGPRTGRDRTVKDPDPGNAFPGGEIYLSFPGLGDRLAARVAGEIGDHPEQFATPNALACYAGRAPVTRQSGKTQFVVARRLAYNRHLGDALDQWAFCSLSRSGWARDFYDGQTAKGKTHHGALRALGNRWLEVLWHCLRKGVRYDEATHVANRVKAARPRAAA

SEQ ID NO: 301592 - protein, 418 aa, unidentified
MEVIHERVAGLDVHKKTVVACVRLQSSSKVRRESRTFETTTAGLEVLLAWLSEMGCTHVAMEATGVYWKPVWNILSAGDFELILANASHIKNVPGRKTDVKDAEWIADLLACGLIRASFVPDQVIQDLRSLMRTRKQFVREQTRHVQRIQKTLEEGNIKLDAVISDILGVNGRRMIEAMIAGESNPQKLAALADRRLKASPGELRDALHGRLTDTHRFLLRTHLKQWDELDETIAEIDRQVDVVINGMAKPAVFRALILLLCTIPGVGKLAAITILAEIGPDMSRFRTAGHLVAWSGLCPGQNQSAGKRKSSRLRKGAPWLKTMLVQCAWAAKRQKNSYYRAQFYRLSGRRGPQKAICAVAASILTAVYHMLKDGTPHVDLGADYFDRRPTEAKARRLVAQLNKLGYEVQIQPIAAAA

SEQ ID NO: 301593 - protein, 350 aa, unidentified
MTMVGGFDVHRKQITFDYVDTGTGLVRCGEIRPATRKTLRGWLGEHCPAGDAEIAVEGCTGWRYVVEELAAAGATAHLADPAETAGLRGRKKRAKTDRADARLLRTLLLQGRLPESWIPPGHVLEVRTLGRLYCALMDERRAWRQRIHAQVFHQGCPPITALLTEAGREALSLAELSAMGRQYVDTALRRIDELTAEIDPVRRQLINFARRQTGCQALQSRQYGVGWLCAAIMWAEIGDARRFHSSDQLVRFAGMDVTVYSSDGKRSPGHLSRQGSPELRWATFEAAKCAARRGSPDYAYYQRLAARRDNGKNPTLAVERKILRRSYHTLRELGDAALAMPVPEAKGVAA

SEQ ID NO: 301594 - protein, 476 aa, unidentified
MNVKSRRTKKVNVENQAINLLSKEELDKKIEVVEKELRSYTWRELEANGKFAKNDKLSFITDDMLIVGCDIGSETHYIRAIDVRGRELSSGAFEFSNTSEGFANARAWVLALAAKNDKKQIVLGLEPTGHYWFALAAWMISNGISVVQVNPYAVKQSKEIEDNSQLKDDRKDPKLIANLVKDGNYGMPYLPEKVYADMRRLSMFRDQLTEDRIRNINRLHQELKIYFPEYMDAFGKIDGAFTLEVLKVSAIPTDITVLGAEGMKNIWHNAKLRGRGYSRANEIVSYAEKSVGLTDGTDAGREAVKWYAEQILRLDEQLSEIESALHEKCREIPYAENILAINGVGENILAGILAEMGDISRFDDVKEIQKLSGMGLVACSSGKHKGQTKISHRGRKRLRYWLFQAAKSAVSHADEFKQLHEYYTTRSNNPLKKMQSVIAVACKLIRIFYTILTKGIDYDGQKMLRDIVRPGMQSAA

SEQ ID NO: 301595 - protein, 361 aa, unidentified
MLYSTSIGLDVHARSISAAAFVFETGEVVQRTFGYDPDAVAAWAASLPQPAGCLYESGPTGFDLQRRLVALGLPCHVGAVSKMVRPSGDRVKTDRRDALFLSRLLAVGEFVECAPPAPAMEAARDLSRAREDAREALMRARHQLSKFLLRKGHVWPKGRSTWTKAHREWLRSIELADPCERLVLEEYVAQVRECEERRDRLDSAIAERSRADDLAGVTSRLRALRGVSTVTAFGVAVEVGDFSRFASPRALMSYVGLVPSESSPGETTSRGRITRTGNSHVRRLLVEAAWHHARPLSPASETDVASSAGLPAEAAGIAARANRRLHRRYLDLRARGKGANVTNVAVARELVGFCWALALCG

SEQ ID NO: 301596 - protein, 425 aa, unidentified
MLAVGIDWSEEFHLVALGRPGEGVFEVRRVEHSPAAVDALVAHIAALEPDAAEVRVVLEARHGLLVERLLDAGYVVVPVNPDLVARRRGPARKKDDAEDARIACLLALDRFERLRPLIPHGELAGALRAIARDDERAARDERRLLNRLRQDLIATFPAALEIAGEHLGAPSFLRLLERWPTAERLAQATHDELASFARAAHHGWPDRFADKVSQALAADHFQPRPYLVRAKADTIRLSAAQLLAIGTQRRSWERRMGELLLGAPRRGRARQPRERERGQSFPGGEVYLSFPGLGDRLAARVASEIGDHPSQFESPNALQCYAGKAPVTRRSGKSEFVVSCRLAYNRHLGDAVQQWAFCSLKRSLWAREFYDGKRAAGKGHHAALRALGNRWLEVLWHCLQKDLLYDETTHIANRTRAPQPLARAA

SEQ ID NO: 301597 - protein, 430 aa, unidentified
MTKLTSTPAGAVLVAIDMSKNRQEVLIERPEGGRRRRITVMATKEDYDGFVEQLAAIGRPIIVGFEATGNYHRTLAHRLLTAGFELRLISSVALARTREALHNGWDKNDPKDAQVILHMLRIGATQRYVDPLAAGINDLQELSKTHETISRMKTQTWHRILTHYLPLYFPEIARFAGNSRSDWFLALIERFPTPATITALDREAFSAAAWPLIGRKVSKARLINDIYETAFASTALPVPEDSAAVTMFRMVIAQGRSLIHQRDEIERLAHARLADDVDYQLLRNIPGIGPINALTILAEAGDLRRFNHHRQFLKFCGLDLATCQSGTFRGRTRLSKYGNARLRRTFWMAAQVAARQRDNSFRDKLGRYIAGHADDADRRRKAMTALTAKMARVAHAVIKTGTEYRPFLERSDARWKDPSLMCREGARATL

SEQ ID NO: 301598 - protein, 421 aa, unidentified
MEEITEEPVALVERVAALDIGKATLTACVRVPHETKPGGRLQEVRTCTTTTGSLLRLRDWLVCQGVTRVVMEATSVYWKPPFYLLEDDIAECWVVNARDVKNAPGRPKTDKLDAVWLAKLAERGMIRPSFIPPRPQRQLRDLTRYRRTLTHERTREMQRAEKLLEDAQVKLSSVISSIFGKSGRDMLDALIAGQRDPYVLAGLARGSMRGKKRVLAEALTGHFTEHHAFLLAMMLARIDALTAQTDQLTARIEQAIAPFAHQVAQLDEIPGIGIIGAQEIIAEIGTQMSRFPTAGHLVSWAKFAPKARQSAGRSKAATTGEGNPWLGGTLGEAAVSAARTSTFLAARYRRIVKRRGKKRALVAVGNSILTIAWHLLSDPDARFTDLGPTWHDHLAPLRRKRQLIAELERLSGMKVTLHHAT

SEQ ID NO: 301599 - protein, 412 aa, unidentified
MDVIVERCAGLDVHRDSVVAAVRVPGTGKSRRRRAQQTRTFGTTIAQLEQLADWLAGFAVSLVGMEATGVYWKPVFWVLERRFECWLINAEHLHNVPGRKSDVIDSRWLCELLELGLVRPSFVPPPEIRRLRDLTRLRSTQAEERTRAIQRLEKVLQDAGIKLTSVASKTYSVSARAMLEALLGGVSGPARLAELAKGRLRAKIPQLTEALANRFDTAHHGVLVAGLLAQIDALDQAVATLDARIAAATDAELIELLSTIPGVKRRIAEVLIAECGLDMSVFGSGEHLVSWAAICPGTNQSGHRRRSGKTRHGNRWLRTALTHAAHAAARSKNTYLASHYWQIRGRRGDAKAIGATRHDILIAYNHITRDRVPFRELGPDWLTRRHSPEHRTRRLVKQLGALGHTVTLETAA

SEQ ID NO: 301600 - protein, 416 aa, unidentified
MTDAAETPSAYIGIDWADAKHDIHIHPVDGSKASKELIESKPEALQAWILKMRERFGQAGKKVFVCLEQSKGALIYQLMEYDFFVLYPINPKTLANFREAFRPSGAKGDVSDADLLCEVVRLHHHRLKAWTPDDAQTRMLAAYCQKRRQAVQMGVRLAQQLGAELKNYYPFVLEALDLHTILACDFLERWPRLEELQRAKPQTLRKFFYAHNYRRGDKLEELLKRVATATAVTSDSAIIEPAVTHVRVLLAQLRAVLAAIPEYDEKIAELFQAHPDAPIFASFPGAGAQLAPRLLTAFGTDRTRVESAEQMSVISGIAPIHIASGKSAVTAKRWACPKFMRQSFHEFAGCSIRCCAWAKAYYDQQRARNKQHHTVVRALAFKWMRILFACWKNRKPYDDALYTAQLQKNGSLLACA

SEQ ID NO: 301601 - protein, 343 aa, unidentified
MQAIRTIGLDIAKSVFQVHGVDVEGNVVLRRRLKRRYVLAFFQKLSPCLVGIEACASSHHWSRELQALGHRVRLMPPAYVKPYVKRQKNDATDAEAICEAVSRPNMRFVETKTPEQQSCLMLHRTRHLFIRQQTAVINAIRAHLAEFGIVAPVGRRGVEQLLGVVADADDKRLPEVARTCVAALGAHLQMLKAQILQFDRMITAWHRSSEVSKRLDAIPGVGPALATALVVSVPDPKAFRSGRDFSAWIGLVPKQNSSGGKDKLGNISKRGDRYLRSLFTTGALAVIRYAKIHGTTHRPWLTALLARRPTKVAAIALANKLARMAWAMMARGEQYREPAALAA

SEQ ID NO: 301602 - protein, 344 aa, unidentified
MLMVRNVVGGVDTHADAHVAAVVDSNGGLLGVESFPADEAGFEDLFGWLVGFGPVLRVGVEGTGSWGVGLARFLAGADVEVVEVDRPNRQQRRKVGKSDPTDAVSAARAALSGAAAGIPKTRNGPVEQMRVLLVARRSARTQRIQTLNQLRHLVFCAPEPIRVRFKDRYKTGLVTEAAAMRPRKGSDPVEFTTNTVIRSLARRIQGLNAEMRAIDQALVVLINQTAPTLLELYGVGVDSAASLLVAAGDNPDRLRSERSWAHLCGVTPIPASSGKVIRYRLNRGGDRNANAALYRIVLTRMSSHQETRTYAARRRAEGLSTPEVMRCLKRYVARQVFKQLPRAA

SEQ ID NO: 301603 - protein, 410 aa, unidentified
MEVLHAHCAGLDIHKDSVVACVRHMVEGKVTSQVKTFKTTTQELMALSDWLWAEGVTHIGMEATGVYWKPVWHILSDGEFELVLANAAHVKNVPGRKTDVNDATWLADLMAHGLIRPSFVPDEPTQQMRDLLRTRKQFVRERTGHTQRIQKTLEDANIKLDSVISDIVGISGRRMIEALIAGRTDPQALAELADGRLKATPAELEASLRGRVTAHHRFMLRLHLDQLDALDAAIGRIDKEVDCNVEPFRVAIEMLKTIPGVSRLSAEVILSEIGVDMSRFPTEGDLISWAGLCPKNDESAGKRRSTRMKKGAPWLKTTLVQCAWAATRTKQTYLHAQYLRIRSRRGAKKAIGAVAASILTAAYHMLKNGTLYQDLGANHFDKRAQGKHVLRLVNRLKNLGFAVQITPMAA

SEQ ID NO: 301604 - protein, 310 aa, unidentified
MEHTTVVGIDVSKDRLDVHVLPSEQAWAVSRDADGLAELCRRLAGMSGVVAVEATGGYETIVAASLSSAGLPLVVVNPAQVRAFAKALGQRAKTDPIDARVIARFAEATKPVVRPLPDQATRLLADLLARRRQIVEMMASESQRLRRTDVARVRKSIERLVVAMKRELGDVEHDIDDTMRGSPVWREKEDLLASVPGVGKVIARTMVADLPELGTVGRKQISALAGLAPFVRQSGKWKGQARIGGGRPTVRTALFMGAQTAKQHNPLLKAFYQRLIASGKSKMAATIAVAHKLLTILNAILRDKKPWQIA

SEQ ID NO: 301605 - protein, 336 aa, unidentified
MERTQQYVGIDLHRRRSVIVRKTSTGEPIETVQIDNDPDVLAAELRKAGEHPKVLLEATYGWYWAADVLQAEGANVHLAQPLGNNWGHRRVKNDERDATDLIDLLRLGRLAEAWIAPPEVREVREHVRYRAKLVHLRGALKSQVHAILAKEGVAVPMSDLFGKHGGQLLDDVALATAFRVRVDSLRELIDRVDLELAMVEECAHGALSDDPGYRAIQQIPGVGPVLAGVFVAEIGDATRFRSPSHLTSWAGLTPMHRESDSRSVATTSPSKARASCAGPPSAVIRQRGHTVVQAHHRRVAERRGSQIERVAAARKLLVPVYYGLRDGEIRCLARAG

SEQ ID NO: 301606 - protein, 340 aa, unidentified
MKRNHFIGIDVHSQFCEVAVMTPAGQVVQRERCATTIPALSELLDKAPRPCSVVLEEGPMAGWLWRNLHDKVNTLVVAEPRRNRLIVRDGDKDDDIDAEKLALLHRGGFIKPVHQSGSLEQAVFKQLVALYHYRVRQRVREAHRITHLFRQHGIVIRERAYADRADRPALVQRLPAEGLLPELVRSMWTSYDALVQQEDQWRKRLLRAAKQVEVVCRFQDLPGAGWVRAATLYAYLDTPWRFRSKAALWKYLGIGLERKHSGKGKEYLGVPKQAHRLLKCTILGAARSAATARDNPFADMYRRWVEEEGLSPARARRNVARRLAATAWGMWKNGNAYVNA

SEQ ID NO: 301607 - protein, 346 aa, unidentified
MEVVIGVDPHKGTNAVAVLNDRGGLLEYAVFATDRAGLRSLVRWAKRFGERRWAVEGASGLGRPVAQHLVAAGETVVDVPAKLSSRIRLLSVGNERKNDQVDAICVAVAALRGERLTEVGEEEEQATVLRMLSERRKDLTKERTRALNRLHGLLRDLVPGGAPKNLSAHKAALLLRGVRPRVEPVLTRRRLAADLIGDVRRLDRGLSDLERCIREAIEQASTSLIGLFGVGPILAAKIIGEVGTIARFPTKAHFASYTGTAPIEASSADVVRHRLSRAGNRQLNHALHLIAICQIRHDTEGRTYYRRKLAEGKSEKEALRCLKQRISDAVFKKLYADLEGGISNVA

SEQ ID NO: 301608 - protein, 316 aa, unidentified
MYLGIDVSKRTIDCCLISDGIFFERRFENGQSGFKKLQDWLTEHGATDKLHCCCEATGKYYEALADCLAERYTMSVENPRKIKGFATAVLLRSKTDKQDAKLIAQYCKAVSPEPWRKPTPEQTRLKELTQYLGRLKRQKASEQTKKQTAPDYLAVHLQSTIDHLAAQIKFVQKLIQDFFRQNPQYRQQKERLQTIDGVGDNAANSLLAVLSRNQRFKSAAQFVAYLGLDPKIRQSGTSVNGKAGISKVGNTQLRTALFIPAMHAYRSETFRSFTNRLKVNGKRPKQIIVALMRKLAIIAYHLIKTGKDFEPERYTG

SEQ ID NO: 301609 - protein, 366 aa, unidentified
MSDVPISFASFAGVDLHKQTVTLRAVDPAGRPIAALTCDTRCVDRIRDWMLALPRPSHLAVEAVGFVEWFIDRFRPCVDRMDIADATELANRRGKRRKTDRNDALDIALRLARGECPLGWIADEPVMQLRKLGRHWRCLSRTLSRAKHCMRSMLLAANLRGPRLDGAGAQKWLLANGHLLKEVQRQAFGNFLDIVCLIERQRESLRRKIIFANRQERFTVLVDLLKSVPGIDEIWACIIAAEVGDFSRFPNADALEFWAGMTADMKESAGRTQSGHITKAGSPSLRWAICKAALTLCRSDAKQEAIRRRLIHRLGKPKANVAMGRRLLRILFAMVRDGTVYQGQQPTGHQKAANKARMAKRKRTAA

SEQ ID NO: 301610 - protein, 413 aa, unidentified
MEQGLITAVGVDVSKGKSMVAVRRPGGQIVMLPIQVNHTAEELAGLAERLQGFGGDIRIIMEHTGMYWRPIAHSLKEAGFFVSVVNAILIHNFSDNSLRKVKTDKADALKIANYGLTFWTELRNFSDEDETRQMLKMQCRLYERTQKTSVELRNGLISLLDQTFPGINEILPAHYCTKRGHYKWVDVSKRFWHKDCVKKLSESAFTNTYQKWCKKEGYRFSRIEAEKIYRAAQNTVATFPQNESTKTLIVQAVDCLNAVYESMAVLRTEMKRLASLLPEYEVVMAMQGAGDVTGPKLMAEIGDVRRFTNKNALVAFAGVDAPPFQSGSFEAKSRHVSKRGSPHLRRTLFQVMSVVLQRSSTDNPIYSFMDKKRAEGKHFYVYTVAGAAKFLRVYYARVKEYLLALETKQETAA

SEQ ID NO: 301611 - protein, 419 aa, unidentified
MKPLSDEFTAFIGIDWADRKHDICLQGAQGERREFSRIEHKVDAIDQWAISMRQRFGGPIAVALELTKGPLVYALQKYDFFVLFPINPATLAKYREAFKPSRAKDDPTDAEHALQLLMHHRERLAALNPQSVPMRTLLHLVEQRRRVVDDKTRFTNRLGYALKQYFPQALDWFDHTDTIVFCDFLTRWPTLLQVKRARATSVRAFFWSHNVRHVNVIDERIQAIKVARPLTQDVAVITAYRLQALILVDQLRVTLKAIDRFDAQIAEIAPTLPDYALFKSLPGAGTQLTPRLLVAFGEQRERFATAAEIQKYSGVAPVTERSGNKCWIHWRWQCPTFLRQTFVEWAAQTINKSFWAGAFYRQQRDKGSSHQAAVRALAFKWLRILYRCWQTRTPYDESTYLNALKQRGSPLLNQLGTQT

SEQ ID NO: 301612 - protein, 340 aa, unidentified
MEFRFFIGIDVSKDTLDIGLLDAESSETVTHQQVGNNDSGITAMVSWLQQHNEFSIESSLFCLEHTGMYNYPLLQFFSKQGASVWVENPIQIKRSLGLQRGKNDKVDAVRIAQYAYRSKQQIKLWQPAREVIERLKHLSALRERLVETRKRLLTPVEELSKVGNEAMAKILEKAMSKTMKALDKDLEAIEAQMKEVIDKDDNLRNMYELITSVVGIGFVTAVNLIVYTNEFKLFSCHRQFACYSGIAPFEYRSGSSIKGKTKVSHMANKKIKRYLHMASLTGIRLDEDLKSYYKRKVEEGKNKMSVLNAIRNKLLARIFAVVNRGSVYQKINYQNSLVLS

SEQ ID NO: 301613 - protein, 456 aa, unidentified
MPRKTKSRKTTATLPVLHPDAAGVDIGATEIYVAVPPDRDPESVRSFQTFTEDLMALADWLLRCRICTVAMESTGVYWIPLMQILEARGVEVFLVNARYAKNVPGRRTDVSDCQWLQYLHSVGLLRASFRPAPEVCAVRSLLRHRDGLVGLASHHVQHMQKALDQMNLQLHHVISDITGTTGLAILDAVVAGERDINKLASLRDPRVRATKETIAKSLVGDYRPEHLFTLRQSLSLYRNYQKEITECESEIQRFLKQLETKVDPVAEPLPPAKDSVKKCTVMPPVRALALREEGYRVLGVDLTTIPGMSVLHVQAVVAEVGPDLSKFRSAAAFSSWMGLCPDNDVSGGKILWTGTRKVKNRLAATLRMAAQSLQRSQSALGEFYRRMRTKLGAPKAITAAAHKLARIIYHMLKTRESYDDGVFARLEIRYRLRVENRLKAQAHALGFSLVPAPSHE

SEQ ID NO: 301614 - protein, 388 aa, unidentified
MIYFGIDIAKFNHFASAINSDGVVLIEPFEFLNDNDGFYMLLSKLNSFDKDSTIIGLESTAHYGNNLVSFLVSKDFNVCVLNPIQTSSLRKNRIRKTKTDKVDTLVIAKAVALMENPRFVTLYDIALMQLKNLGRFRLKLVKQRTRTKIQLTSYIDQTFPELQYFFKSGLHQKAVYAILKEAPSASQIASMHLTHLKNLLVSNSHGHFKKEMALELRVLAQKSVGHSDKSLSVQITQSIAQIELLDSQINTASDEIKDIVESIDSVILTIPGIGPINGGMILGEIGDINRFSKPRKLLAFAGLDPSVYQSGNFSATKTRMSKRGSGVLRYALINAAHNVVKNNATFKEYYDSKRAEGRGHYNALGHCAGKLVRVIYKMLTDDVEFNLD

SEQ ID NO: 301615 - protein, 376 aa, unidentified
MHTSPFEFHHTQPELDAFIKYILNSNQSATILMENTGHYHYPVLKAFREAGLPVCMVNAYQIKKFGDMDLRKAKTDKKDAVRIARYALEKSYSLVPYTSMEQKYEDLKFLARQYNQRMLTLKTNKVFLLNLLDETMPGITNILPLTTRTPETSLSVLFINRFKSYDRIKKMGKSRFLDAFEKITRKSRNRQTKTYGLAIYEAALRNITTRGENEYTLAAQDQCLELVCESQKAADSIILKMQTLAETLPEYAVLRSMAGVGDRLGPLILAEIGDIRRFHSGKALNAYAGNDAPPYQSGTFESHNRHISKRGNAALRKYCFEVMQALKLTQPQDDPVYLFLLKKEQEGNPYNVAKMAGVDKFLRIYYARAMETLKQQ

SEQ ID NO: 301616 - protein, 365 aa, unidentified
MQKISTMRTSEKNIFQGQLTIGLDLGDHSSSYCVLNGAGEIVLEHKVATTPEAMKPVFASMPRCRIAMETGTHSPWVSRLLTELGHEVIVAHAQKVRLIVKSRRKDDRLDARTLARLARIDPELLSPVQHRSAQAQLHLTEIRARAELVSARTALVNAARGLVKSYGERLRKCGTQQVGREITSGLSTGLREALEPLLREVESLNERIQEYDRRIAKMGKETYPETALLKQVKGVGDLIALTYVLTLDDPRRFRKSRDAGCFVGLQPGRRNSGQSEPQMHISKEGDRYLRTLLVQGAHYILGPFGEDSDLRRWGLKLAERGGKNAKKRAVVAVARKLAVLLHRLWLGGEVYEPLRNNQREIPAVA

SEQ ID NO: 301617 - protein, 378 aa, unidentified
MKAVCGLDVHKDSVYLCILSEFGELIEKVFGVLTYQLEEMRDLMLHHHVVEVSMESTSVYWIPIWRVLSPHFKLNLANPYFIKQLPGRKSDVKDAQWIAECTMKELIRGSFVPPEIIQQLRQYDRRIFDLNEEIVRKLSKLDAVLQRCNIRLSNYVSNVDSKSYKAVVRAISQGITAPEELVKLIHGRIINHHGTDVITASLKGVVSLAEIDMISQLRDELDMAEAHKEKCQARMLEICEREFPEELRRLQTIPGIKERTATSLIAEIGTDMNKFETANHLASWSGLKPRNDESNKKIKSRSITHGNVYLRKTIIECAWAASRTKDCFFSRFSYHQTQVRKKNKMKVLVAVARKMLIAVWHVLHDNTIYIDSSFGFRL

SEQ ID NO: 301618 - protein, 423 aa, unidentified
MKGEIFFMKIVRPICCGMDVHKNIIVATIGITNKKTRITEYIQETFSTLNPDLLNLKQWLINHKCFDACMESTGKYWIPIFNILEDEINIYLTHPKYVKAIKGKKTDKKDSKWICDLFKHDLIKFSFIPPKEIRALREISRYRYKLVGMRSSERNRYQNCMTVSNIGIGSVFSDPFGKSAQAIMKEVLESDIIEDEKILKCIHGSCKNKDKILDSIKHCNIETDQRFKMNESMTHMEELQVHINNCEIEMMKRAAPMFDQFMHITQLPGISTLSAILIISEIGVDMKQFESDKQLTCWAGLAPANNESANKKKSVRISKAGQYLKPLLVQCALGAIKDKDGYFGIKYSRIKKRRGHKKAIIAIARMMLVSIYHMILTGETFNPSDYESFRNPNPPIKQQVLTEESAIEFLKKSGFDVSKLTKP

SEQ ID NO: 301619 - protein, 337 aa, unidentified
MGGRYVGIDLHRRRSVIYTMNADGEKLDCVRIANDGLGLLEQVSRAGADCEVVIEATYGWYWAVDLLRDAGFSVHLSHPSGNDWGNRRVKNDERDARDLADLLRLGRLAEAWIAPPHVREARELVRYRAKLVQLRSGLKAQVHAVMAKEGVLPQLVDMFGPGGQRLLDEMELADAYVVRVESLRDLIEVYDREITMLERKIHERLRDDRGYQAIQALDGIGPTMAAIFVTEIGDVTRFRSPEALCSWAGLTPRHRESDTKVTRGRITKQGPKIVRWAALEAVVRYHGGERLRVDFHRIAERRGKNKARVAVARKLLTLIYHGLRDGEIRCLRTTVAA

SEQ ID NO: 301620 - protein, 425 aa, unidentified
MGQAQRPGSDTDVAVYVGVDWAGEHHDVFVTNERSEKLGAFRIAHSIEGIDLLTKRLRELGVAPAAVQIAIERPDGLLVAALVEQGYAVYPINPKAVDRYRDRHHTSGAKDDARDAQALADILRTDGERFRPLAAESELAAELRLTIRAYRDLVAEGVRFTNQLHSCLGDYYPSALGLFSDLDAPISLAFLVAFPTPDAARVTGRDGIVGWLKEQGYAHPKRAEQVAERATAKGLTAGGGVVRARSRQMLGLVAALQAVVAAKQAHVKALEELLGQHPDGGLFLGLPGAGVVTAAALLGELGEDRDALPNAQALQSVGGTAPVTIQSGKSRRVMRRHACNRHLHEALIQFARCSLMRAGCGDEGAAWVKDAYLARRQAGDTAQQAYRVLANRWATILWAMWTRREAYDHARYAKARAARALPKAS

SEQ ID NO: 301621 - protein, 337 aa, unidentified
MDHYAGIDVSLECSSVCVVNAEGKIIRETKVASEPEALIAWFGSLGVRLARIGLEAGPLSQWLFTALKQAGLPMELLETRHVRNAFRTMPVKTDRKDARGIAELMRLGWFRPVHCKSSDAQETRALLTARKLVDAKLHDVEMSLRGTLRGFGLKVGPTTPRRFAARVRELVAGQATLEAIAESLVAVHEVLLRELNVLEKRVRLMARTNPVVRLLMSAPGVGPIVGLVYVSGIDDPARFQSSKAVGAHFGMTPSKYQSGETDYSGRISKCGDEAVRTACFQAAHIIVTKPIKGGWLKSWALKLAKRVGMKKAKVALARRLAVILHRMWVDGTTFKFA

SEQ ID NO: 301622 - protein, 344 aa, unidentified
MKITTVGIDLAKNVFQLHGVDRHGKTVLRKQIKRDQMAVFFANLPTCLIGMEACGSAHHWARKLQGMGHTVRLMAPQFVKPYVKTNKNDAADAEAICEAVGRPNMRFVPIKNIEQQSVLALHRVRQGFVKARTAQANQIRGLLGEFGLIIPQGIGHIARRVPELLEDAGNELPDTFRALVQRLLEHLQALGRQVEEVEAQIQSWHRSNALSSRLAHVPGIGPLTASALVASLGDAKNFDSGRQVAAWLGLVPRQHSSGGKSNLLGISKRGDRYLRTLLIHGARSVIFRAVQKAGGSPWIKAVVERRNKNVAAVALANKNARIVWALLAHDRHYEAGFTRMAAAC

SEQ ID NO: 301623 - protein, 266 aa, unidentified
MQTITTIGLDIAKSVFQVHGVDAAGQVVIRRQLKRRYVLAFFQKLSSCLIGIEACASSHHWSRELQALGHTVRLMPPAYVKPYVKRQKNDATDAEAICEAVTRANMRFVPTKTPEQQSGLVLHRTRHLFIRQQTSVINAIRAHLAEFGIVAPVGRQGVEELLNVVADPNDKRVPEIARVCLLAFGAQLRRTKEQILEFDRLITAWHRSNEMSMRLDEAPGVGPVLATAVVATVADPRVFRSGRNFSAWIGLVPKQHSSGGKDRPRR

SEQ ID NO: 301624 - protein, 351 aa, unidentified
MNILAMDIAKSKTVVCYYDSESGRHEYGKVKTSPQQIHDLVAEYSPDRVVFEICSSAGWLHDIVTALGTEVQVANTNTQAWRWKNVKNKNDKKDALKLAQLSAMNQLPTVHMPKPNVRQKRALIQYRQTLVARVVQIKNNIRSILDKQGYSMAAGKSGWTNKSIEQLNQMALPIERCGVHDLWRGQLYVELTMLSSTQDALAHVTSKLDKLAESDSQVNLLQTVDGVGPRLAEAIVAFLDEPERFKSSKHIGSYAGLTPRQYQSGSTNRQGRISGQGNKLLRALLVEVSWIGLRYNRWIRETYQRLLRGSASRKKIAITAVARKLLVRCWAMLRDGQPWRDMGVKTERQAA

SEQ ID NO: 301625 - protein, 464 aa, unidentified
MARQNRQTGTWEGLSVVHPHAAGLDIGSEEIWVAVPPTSTGEAVRCFGTYTPDLMALAAWLRACGVDTVAMESTGVYWIPVYEILEAQGIQPYVVNARHIKNVPGRKSDIQDCQWIQGLHSVGLLSASFRPAGEICTLRAYLRQRATLIEHRAAHIQHMQKALQQMNVQLTQVVGDISGQTGLAIIRAILAGERAPETLAALRHVRCQQDGAQFVKALTGNYRAEHVFALKQAVALYDVYTEQLHECDGEIERQFANLKPVAGDPLPPLPPHSKPNSRSKNGPAYDARSLLYRITGVDLCAIPGLNVLTVQQIITEIGTDASRWPSVKHFCSWLRLAPHNDISGGKVLKSRVLKGANRAGLAFRLAAQAVARETHSALGAYYRRMRARKGPQQAIVATAHRIARTFYCMLKTRTPYDGMAAEEYTHQAQEREIVWLKKAAAKHGLTLTAGSASASGPACEPITT

SEQ ID NO: 301626 - protein, 315 aa, unidentified
MVTGIDCSKDYFDIAVLKDHKVVFEKRFSNDSIGFGEALGHVLGSHIAMEATGPYYFQLARFFHEQGQSVSVVNPLVVRRFSQMQLSRTKTDKKDAVLIAKFTALTRPKEWVMPSKEILHIRNLESYLEGLKARRRMLYNQLHAFEAAATIDAKLNEEITTELEQYDKKILEKEKEIENLIAKSYARLSQNLRSIPGIGPRSASLLIILTDGFKMFENHKRLISYFGLAPRIYESGTSIKGKNHICKMGMGQVRKVLYMAATSAIRCNKACKELYERLRAKGKPHKVALIAAVNKLIKQSFAIAKTGREYQLQPS

SEQ ID NO: 301627 - protein, 333 aa, unidentified
MGFEPEPSKEGSWMMAQNGLVVAGIDVAKDKVDACIRALSQRRTFESTAEGRRQLISWLRKHKATKVVMEASGGYEREWAKALREKEMAVRIVDPKRVRHFAQSAGRLAKNDAIDADTIAWFAETFGEAPGQAYDAEREKLLQIVNARRGLLETETMLANQGEHSVPDVVRKMQARLLKKIALEVAKLDAAIAAMIKATPDFAKLAEIIESVPGLGEGASAGLIAGMPELGQVSNKVAAALLGVAPYDDDSGNRRGERQIKGGRRRIRNLFYMPCMGAATRHNPVLKAFYDRLIAKGKLKKVAIVACMRKLIVILNTMIARREKWDASRYALS

SEQ ID NO: 301628 - protein, 359 aa, unidentified
MQTQFKELDFTGQNIYTGIDVHKKSWQVSVVSEALFHKTFNQPPKPEVLHGYLKKHFPNGTYYSVYEAGFCGFWIHDKLQSLGINNIVVNPADVPTTDKEKKRKTDKVDSNKLARQLRNGDLEAIYTHKRAVLEDRSLLRMRRTLVKDLTRNKNRVKSDLHFFGIEIPEQFTKNPSYWSKKFITWLEEQEEHQQWTGKDSFKILMDQVKSLRAQLLEVNKKVRILSNENYYQKRVALLGSLFGVELITSMTFLTEIDDIHRFANLEKLRSYVGLTPTSHASGDKDLHGEMIRRGNKFLKSAIFESAWIAARLDPVLHMDYINFCKRMKPNKAIVRIACKLLDRVHYVLKNEVPYKSGIR

SEQ ID NO: 301629 - protein, 409 aa, unidentified
MDVIYQRCCGLDVHKRTVTACLLTPKSEGGRNQETRTFGTMTDDLLALADWLAQAGCTNVAMEATGVYWKPVYNILEGQFETLVVNAYHVKAVPGRKTDVRDAEWIADLLQHGLLRGSFIPDRPQRELRELTRYRTSLVRERASEVNRLQKTLEGANIKLASVATDILGATGRAILEALAKGTGEGPELATLARGSLRHKRAELERALKAETSDHQRLMIREHLAHINYLDEAIGRLNREIEERLRPFDHTLSHLQTITGVGRRTAETILAEVGTDTSRFPTHRHLASWAGLCPGNNESAGKQRSGRTRKGSPWLRSALVESAWAAAKTKQTYLSAQYHRLAARRGGKRAALAVAHSILVIAYYIMARGQTYNDLGGNYFDERDRRQVEHRLVKRLEGLGYNVTLEAVA

SEQ ID NO: 301630 - protein, 405 aa, unidentified
MNAVGIDVSKGKSMVAALRPMGEVALTPHEVPHTAVDLENLGYQIIDLGEDTRVIMEATGRYHEPVAAALHEMGIYVCILNPIVIKQSGAGSVRKVKSDKKDALKIAKYGLDNWTHLREHTPMDTVRQQLKLFSRQYNLYMKTAVSLQNNLISLLDKTWPGANEMFDSPARADGHQKWVDFVADFWHCDCVTRIAHRAFIERYQKWCKRKGYNYSEEKAEDVYAESAGHFPTLPKNDNTKLLITSAAAELTAATKVLMTVKAEVIRLAKLLPEYDTVIAMYGVGEITAAQLMAELGDVRRFENRGSIVAFAGIDPEVNESGSYVSKSNPASKRGSPHLRKTLFLVVSTYLKKSPANEPVYQFLDKKRAEGKPYYVYMTAAANKFLRIYYAKVKECLNKLDSNGNA

SEQ ID NO: 301631 - protein, 427 aa, unidentified
MKYTQNEKILQVTEDTLIAGVDIAKESHYARAFDYRGVEYGKYLRFENNREGMTKFFKWAKDLMERHKKNKLIVGIEPTGQYWLCFAQYLKDNNIKVVLVNPFHVKRSKELDDNSPTKSDRKDPKTIAMLVKDGRYVEPIIPEGVYAELRVAMDIKDRLNKQIGMTKNQITRWLDIYFPEFNTVFSDWEGKAALITLREFPTPEKIAKKSAEEILSIWKKEVQRGVGEKRAIKLIETAKESIGKKQGIKMAEYEIKTLIEQYEFLKKQIEEVEKKIEELIVEIPGVKELLEIKGIGINTVAGFIAEVGDIEKYEHPKQIQKLGGLNLIENSSGKHKGETTISKRGRKRLRRVLFNAVMALVAKNEEFRELHKYYTTRAQNPLKKKQSLIVLCNKLIRIFYVILKKGVKYDPIKMMKDIKRPALQEAA

SEQ ID NO: 301632 - protein, 492 aa, unidentified
MARRSPRRKQPPSASAPSGQAPAGATGFGKKRPQRRVGHAVPAPGLPKSLQQVHLNAAGIDCGATEHFVAVPEDRDLQPVRAFSTFTAHLIALADWLEQCGIDTVAMESTGVYWIPLYELLEARGCAVKLVEPGKLKMIAGRKTEVLDCQWIQQLHTFGLLSGSFRPDDQICVLRSYMRQRDMLVRYAAQHIQHMQKALEQMNVKLVEVIDDITGVTGTRIIEAILAGERDPQKLARLRHERCQHDAETIALALQGNWREEHLCALQQALELYRFYHHTRDELDQRLEAYLLTFEDKSQDEVLEPRPRQRKLSNNEPRFDVRQYLFQMTGVDLMTIDGFRTGYLALDLLAEIGMDMAPWPTEKHFCSWLCLCPGNKKTGGRLISGRTRKNASRAARIFRLAAYALARSQTALGAFYRRLKARLGPAKALTATAHKLAQIVYSMLKYGKAYVDRGVEYYEQQYRARMIKNLTRRAKQLGFELVPVTVTPAPAQ

SEQ ID NO: 301633 - protein, 333 aa, unidentified
MNKSETTFLPCGIEISAAILVVDLSGKAPCEFPNTPVGHQSLIRWLQLAGSEIRVCMEATGLYGLDLALALHAAGIAFMIANPRSVRNFARAMMQRSKTDRLDVIVLREYAARMPFEPWRPPSSQALHLMAIAHRLQALTRMITAEKNRLHAASLSRALPALVRRDLLRSIQSMERALKRLTQAALDLVLSDPQLARRNQLLLSVPGIGVTSALNVLAEILRLGPDCGVRQWVAYAGLDPRHYTSGTSVAKKPVISKSGNAHLRRALYMPALVTVQHEPHFRGFYQHLLDRGKTKLQALVAVMRKLLHAIFGMFKHNQLFDGTKVYALETSCA

SEQ ID NO: 301634 - protein, 412 aa, unidentified
MKDLLEICCGLDVHKDKIVACILSGAIGEAAQSEIREFSTLNPDLFALRDWLASRDCFHVAMESTGIYWQPVYEALEDSSDNIELLVVNARHMKNVPGKKTDMRDAEWIATLLRAGLLAGSFIPDKDIREFRRQTRYRKSIVHETTAQKNRIEKFLQSTGFRLSSFISDVFGTSGRNIIAHLIKHGQISYEALDGCLKTQTRNKIDDILIAVNGTLSGSQRAFLQMLMSHLAMLESHLAEIDDAINKSIRDFDGAVKIVCSIDGIGVTSSSAIIAEIGIDMSRFKTAEHLCSWAGLSPGNNESAGKKKSAHITKGNPYIKSMLCEVAWVIASKRNLYLSRWYWRIKQKKGAKKAIIALARKLLVIIYTMLRNGTFFDEELFESRRVAAEQQRTNRYIHELQKLGYTIGLQQA

SEQ ID NO: 301635 - protein, 396 aa, unidentified
MDRAWAGVDIGKQHHHAVVVDDQGTRVLSRRVANDQAALVELIGQVTDLAAAVTWAIDLHSSEAALLVALLVEHDQTVVYVPGVMVNRAASAYRGAGKTDAKDAYVIAEQARMRRDLQVLRAADELIVELRLLVARRQDLRGDRTRAVNRLHDRLVAVCPALERVLDLGNRGALVLLTGFQTPAALRAQGVTGLEAWLGSRRVRGAGKLAAAAVGAANAQTISLPGEQLAARLIADLAEGVLALDEQIKDADELIEGRFRRHPAAEVICSLPGIGVLLGAEFLAATGGDMAAFGTPDRLASLAGVAPVPRDSGRVVGNLHRPQRYHRGLQRVFYTSALISIRCCPESRAFYDRKRAEGKRHTQAVLALARRRVNVLWALLRDGRCYALTPPESQAA

SEQ ID NO: 301636 - protein, 446 aa, unidentified
MPVVHPNAAGIDIGSEFHVVAVPADRDSEPVRTFKSFTGELHSMAKWLQSCRITTIAMESTGVYWIPAYEILESYGFEVFLVNARESKNVPGRKTDINDAQWLQKLHQFGLLRASFRPSSEIVAMRAYLRQRERLIDYQSSHIQHMQKAMMQMNVQLGHVVSEITGITGMNIIRAIVAGQHDPKELVKYRDVKCKNSEETMIAALSGNYKPEHLFALKQSLELVDFYSEKIKACDEAIKLIMQQLRQHTEPPEKPLSKSKKRTNQGPNALSFDVRSDLYHVLGLDLTEIDGFGSTLALKMISECGADMSRWPTSKHFTSWLCLAPGSKISGGKVLSSKTRKSSNRAATLLRLAATTVGKTNTALGAFYRRLAFRAGKPKAVTATARKLATIFYNMLRYGMAYNDPGATYYEEKYKARALVNLRKKADAFGFILQEKTGSTVAVGVS

SEQ ID NO: 301637 - protein, 348 aa, unidentified
MAHFVGLDVSVKETSVCVVDDTGKVTWEQKVATEPAAIIALLSSLGATFGRIGIEAGPLSQWLVNALTAVELPVICVETRHMKALLTAQQINKTDRNDARGIAQMMRVGLFKPVHVKTLAAQEQRMLLTSRKLLQRKLLDVESDLRGTLRNFGLKVGVVSRSRYEARVRELVEGFPRLAAIVEPLLSVRRVMRQQFAVLHKMLLDMVRGDPVCRRLMTAPGVGAVVALTYRATVDQPQRFVHSRAVGAHVGLTPKRYQSGETDYDGGVSKCGDALLRTMLYEAAHSLLTHSRRWSWLKAWGIRVAQRRGMRRAVVAVARRLAVVLHRMWVDGSEFRWRKDNAAVPAVS

SEQ ID NO: 301638 - protein, 347 aa, unidentified
MSEISIIGLDLAKQVFQIHGADPAGRCVLRKQLKRREVLQFFAKLRPCTVAMEACGTAHYWAREIGKLGHCTRLIPPAYVKPYVKRGKNDAIDAEAICEAAGRPTMRFVPVKAMENQAIVMLHRSRDLVIKNRTMLVNALRAHLAEFGFVAGKGIWKLPDLVKIVSQAPAEALPELVRTTLSGLLDIIAAISSQLDAIEKRLREWHKKDARSKRLDTVPGIGLIAATACRALVPDPKLFRNGRHFAAWIGIAPKLDGTGGKTRLGRISKAGDRYLRRLFVLGATSLLRSLENKSTRLALWVQALLARRTKRAVTVALANKLARIAWAVMTRDEAYKPLAAAQPAGCA

SEQ ID NO: 301639 - protein, 403 aa, unidentified
MIFVGIDWAEAHHDICVLDGQGAVLATGRVPDSMEGLARLHAMVAEHAEEPAEVLVGIETDRGLLVRGLVAAGYRVYAVNPFAVSRYRDRHATSGAKSDPGDAKVLADLVRTDRHNHREVAGDSELAEAVKVLARAHQSLIWTRQRQVNALRSTLREFYPAALRALPELGTVEACSILGMAPTPERGRGLTQARVRRSLAASGRSRNLDRRAAEIHEALQGSELEAAPAVAEAFGAVVGSLVVVIDGLVHQIARLESELAQRFERHPDAEILRSLPGLGLVLGARVLAEFGDDPTRYVDARARRCYAGSAPITRASGKRLVVLARVARNRRLADACYLWAFSSLSSSPGARRYYDTRRAAGKTHHQALRAVANRLVGILHGCLGHRQLYREDIAWPTPLDAAA

SEQ ID NO: 301640 - protein, 367 aa, unidentified
MKKVSTAVAKQSRNISRQKLTIGLDLGDRNSWYCVLDEAGRIQLEQRVRTTGKALQEVFGAMPRGRVGLEIGTHSPWISRLLSALGHEVIVANARKVRLIGESRKKDDRLDAQTLARLARIDPELLYPVKHRSAPAQADLMMIRARAGLVRARTGLVNTARGLAQSYGERLRGCNVRNMDPEKAEGLSPELQRALEPLLAAMEEVSERISEYDDRIEALAQASYPQVELLQQIKGVGTLIALTFLLTLEDPHRFRKSRDVGSYLGLQPGRRNSGQSEPQMHISKEGDPYLRTLLVQGAQHLLGPFGIDCDLRRWGLKLAEHSGRNGKKRAIVATARKLAVLLHHLWVSGEVYEPLHNSSSVSVAAAA

SEQ ID NO: 301641 - protein, 428 aa, unidentified
MKYNQNHKISQIAENTLVVGVDIAKKKHYARAFDYRGMELDKVIKFKANGGGFESFINWTESVAKAHGKKKIVVGIEPTGHYWYTFGRAVIDRGLMLVQVNPYHVKKTKELDDNTPSKSDYKDPKTIAFLVKDGRYQIPYMPDGKYAELRKANNLREEWVQKKIKVKNKITRWLDIHFPEFLNAFSSWEGKTALMTLGKIALPEKIASKTPEEILCIWRKEVRRGVGIKKAEKLVKEAQNSVGIREGAQMAEYEIKLYIKEYMEIREVLEDMERKLEKIVLTIPGANRFLEIKGVGIKTVAGFFAEIGDIKRFTSAKQIIKLAGLNLRQNSSGQHKGETTISKRGRSRLRALLFRAILPIVATNEVFNKLHHDNISQKERPMKKMQSLIALCCRLIRIVYSLITKDQEFDPDKLIRDIHRDDALQGAA

SEQ ID NO: 301642 - protein, 321 aa, unidentified
MSTPSPVFVGVDVSKASLDVHVTPAGRSFSLPNDAPGCEKLLKELAPLGVSLVVMEATGRYQRRAAADLISAGIPVAVVNPRQARDFARSLGKLAKTDAIDAQVLARFAAVGHLRASEKPRENAAILDDRITRRRQVIAMLNAEGNRLAGMIDKATIRMIQKVIRLLEQQREDLDRQIAELIEADDDWRGKRELLQTVPGVGATTANGLVAELPELGKLSREQIAALVGVAPMNCDSGTMRGKRAIRGGRASVRSTLYMAAFNAMRYNNVIRAFADRLSAAGKPFKVVVTAAMRKLLIILNAILKTNTPWRNKTCAVQNAL

SEQ ID NO: 301643 - protein, 407 aa, unidentified
MYCLSFDIAKGKSVVGLFNGQLEPLIVPYEIHHVKEEFVALASKLDVSQTEIILESTSMYHYPVVSFFKNLGFVVIVLNPIISREHKRNLRKTKTDLIDCANLAAIFFERKFNLQKEHLPIYHQMQSISRHIFTLNESMVRYKNRYHQLLELIFPLYEYTMKNEMKFKSDHMALLKAFPHPELLVNTRVDRLATVLASMHKRMDRRFLKTAQRIKDLAKMTLYSVSQDDVVVAEFVELSNLILDLDDKITNHQNQLIDLAQTRPDFHKIDSIFGISPYMAALLVAELKDLSSYRTVKQLTAACGLDPTIIQSGKSIDYHGHISKRGNKHARKALFNAVSTIIRSSSRLNPQNPMLIYYRKKRSENKHHYASVIACTTKLLRIIFTLCKNDLTYLNQYNQNHLVTPIV

SEQ ID NO: 301644 - protein, 418 aa, unidentified
MEVLVERGAGLDVHKKSVTVCVMTTDGRSVVKTIKRFSTFHRDLVALRDWLLEQRVTHVAMEATGEYWKPVYEILEEHFQLLVANAQHVKNVPGRKTDPEDAAWLARLLRHGLLQSSFVPCEQIRDLRDHTRMRRKTVEMTSRVENRAQKVLEASGVKIGSVVSDVFGATGRAILAQLAEHKTDPKKLAALAKGSLKNKRTEIELSLEGTFSVHDAQLLAHQLEMHRELETRREAIEKEIETMIVPYEHLIKRLDQIPGINQVAAIEILGEIGPDMSPWKHHRFFAAWSGLCPGNHESAGKRKKVSVRKGNPFLKAILVQCATAAVRQDGSYFQAKFHRLLRRRGYKRAVVAIAHSMVIAIYHMIRDDRDYYELGAAHLDKRTNESKALALAKQIEKLGFQVNLKLSAPAELSVPAAG

SEQ ID NO: 301645 - protein, 424 aa, unidentified
MQNTVAKKLKQVPEGYLVVGVDPHKKRHAAVVITQDFTTQAKFKFDNTREGFEFMLHRAKEEMVNSGCRGVIFAIETGGHYWRNLAYFLDEQGLPYRFINQFTLKRRREGKDLNRRKNDYRDSEVAAQLLCTGEFVESRLPQGVYADLRAAHNAYRRLVKERTRITNLIKALLDAVFPEFTHVFKDPCALTALSVLSTCAIPRVITGMTDGEFIATVEAHHQGRRLMRRKLRALHGIAGTSIGIEAGARSVSTEISFLIEKLGLIGRHIRNIEGTMTVLVDETEEGKYLLSIRGLNYIAVAGLLAELGCFKSYRSAKQIIKMAGSNPTESESGGKRGTHTPMSKQGRPVLRYCAWTSVIPMLRLNPDFRAWARNMRERPVHANPLNGREIVGAALNRLFRLAFALVKNHTYYQLSKPERAMVAV

SEQ ID NO: 301646 - protein, 315 aa, unidentified
MNTGEIFSKAIKRAKFIEFFTNRSPCLIGMEACGGAHHWARQLSRLGHQVKLMPGEFVKAFNIRNKNDTADAQAIWRAVQQPGKAVAVKTEDQQAMLALHRIRSQLLKFRLMQTNALHGLLAEYGEVMRTGRASLIKNVPDILARLSGRLPAVLIESLREQLGEVERTDGRIADIERRIRELSRDDPSVKAVSAIPGVGFLTATAAVASMGSADAFRSGREFAAWVGLVPRQTGTGGKIQLLGISKRGDKYLRKLLINGAHSVIQNAREPGAWVTDLLKRRPVNVASVALANKMARIIWAVLAHGRPYQKETALY

SEQ ID NO: 301647 - protein, 343 aa, unidentified
MELYIGLDVSLASTAICVVSSHGKVIKETTAASEPEELERALQSLPGTVVGVGLEAGPLSQWLHRHLTEAGFDTILMETRQVKGALKAMPIKTDRRDAEGIARLLQMGWFRQVHCKSISAQELRALLSARKAIQQAIINLELSIRGVLRNFGLKMGRVAKGRFEDRVRELADGNVMLQAAANPILTARKVLRTELAGLEKLSRDHAKSDPVCRQFMSMPGVGAIVALTVKSAIDDPDRFRSSKDVGPWVGLTPRREQSGERDILGAISRAGDVGLRTALYQAALVMLNLGRPSWLTAWAWNVAKRRGKRRATVALARRIGVILHRMWQDGTEFRFKRIETAAA

SEQ ID NO: 301648 - protein, 343 aa, unidentified
MQITTIGLDLAKSIFQVHGVDASGQILVRKSLRRSQMLPFFTKLPPCLVGMEACGTSHYWARELIKLGHEVRLMPPAYVKPYVKRGKTDAADAEAVCEAVTRSTMRFVPVKSPEQQAALSIHRTRDLLVKQRTQLINMIRGLLAEFGVDIPKGLERALLMARQIVDGKAAEVPFEAAKVVGTLSQQALDTHVRVREIDRDLAVLLRSNDVARRLMTIPGIGPVGATALAASVTDPHQFRSGRQFAAWLGLTPLQKSSGGRERLGRITKMGDKYLRKLLIVGMTSRVRRAKQNPTVDPRLADLLARKPTRVATVAMANKTARIIWAIMTRGETYRAGHRPALAA

SEQ ID NO: 301649 - protein, 404 aa, unidentified
MYNAVGIDVSKGKSTIAVLQPGGTVIRKPFDVSHTSQNLNELADYLGSLEGPSKIVMECTGRYHEPILKTLSEAGLFVSVVNPHLIKNFGNNSLRKVKSDPADARKIARYTLDNWTELRQYSGMDNTRTQLKTLNSQFSFFMKQKVAAKANLIALLDNTYPGVNKLFDSPTREDGSEKWVDYAYSFWHADCVRKIGLKAFTERYMSFCKKHHYIFQQDKPEKLFNASKELVAVFPKEKTYKLLIQQSIQQLNLASGHVERLRQEMNALASTLPEYNTVMGIYGVGKTYGPLLIAEIGNVSRFTHREALTAFAGVDPGVDESGQHKSKSNRASKVGSARLRKTLFQIMTTLLQNAPVDDPVYRFLDKKRAQGKPYYVYMTAGANKFLRIYYGKVKECLRNLEQAE

SEQ ID NO: 301650 - protein, 399 aa, unidentified
MTNQDHRVGGIDSHKDTIHVAVITAIGQPVTDREFPTTVAGYRRAVAWLIEHGPLSAVGVEGTSSYGIGITTELLAAGIRVVEVNRTRAAEKRKQGKTDPLDAYRAARSVLSGEASTEPKNPSIEPLRALTIARRSAVKSQQAAWRQIGSLLVTTRPALRDRFRDLPETKLIATLRDCRPDQIHDVDDADTLYALRTLARRYLALQDEITALEERMLRRATRANPALMAIKGVGPAVGAQLLITAGDNPDRLRTSASFAALCGTAPIPVSSGRTDKHRLSRGGDRQANAALHHIVKVRMSYEQRTRAYRDTRLANGWTTKEVFRALKRAVAREIFHALAGHTLAPDYSDLRPARHAKNLTLTAAAQHLGVWPARIGELELGRRPNDELATRYRAWLAAA

SEQ ID NO: 301651 - protein, 359 aa, unidentified
MAIKVQRNKINFKGKMISIGIDMHKRSWRITALAEGDIVMSITLARPNYDSFRKILSHFEGNYVRIVYEAGPGGFDLYDRLTADGIECIVTPPSLIPTESGNKVKTDKKDSYKLAKLLANNMLKKVWVLTPKERAQRQLVRTRRQIVNHRSDVMRQIKSLLLFNSIEIPFPHRQQWTRSFITWLHELDLKDEYLNTSLKALVHLFDYLSSEKKRLTHAVIHLAREEKYASRVKLLKSIPGIGALSAMEILVEIQDMGRFETADELAAYLGLTPSQYSSGEHIRMGHITHMGNSRVRTALIESSWILITKDQDMREKYENIKYRRGGKRAIVAAARTLSARIRRMLLDQVPYEIGFQKAA

SEQ ID NO: 301652 - protein, 334 aa, unidentified
MKQVTQVGVDVDSEELVCAMQRAGQRQPLARFANTAAGHKKFIRWATKGGRPARICLEATGIYSLEFALALHHAKNVEVMVVNPRAIKDFTRACMQRAKTDAVDAGGILDYLERMPFVAWQPPAAEVLQLQAINRRIVQLNTELAREKNRRHASEFAGACADAIAHDIEVNIHHLERRIERMHDSGLKLVRGVPALATKLAHLVSTKGIAEASAMRLLGELLVLPDELAAPQWVAHAGLDPRPYDSGTSVHRPRRISKVGNRHLRAALYMPALVAIQHEPNVKAFYDKLVAAGKKPMQAVVAVMRKLLHAIWGMLKHDQDFDGNKFFKIAPETA

SEQ ID NO: 301653 - protein, 357 aa, unidentified
MMNTGTIRQSIGIDCAKDEFVAAYCCSMELRGSECKETRAFKNNKQGFARFIAWQGKLRESGLALPMVMEATGVYHEQLACALYDGGHQVHVVLPNKAKAFTKSINLRSVDDGSSARTLALMGMERKLDVWEKPRELYSKMKHLTREREDIQQTLASAKNQLHAEETSAFTNRGTVRRLKGRIRFLTKQILEVETDLRSLIQTEKDVKERIDRVCTAPGLGWLTMAVLLAETNGFHQVQNQRQLTKYAGLDVEKQDSGTSVHKPGRLSKKGNRHIRKALYMPALTRIRSEARSKEFFKRLVSKHGVKMKAVVAVQRKTLVLAYTLWKNNATYDQQHQASAGAKERGQPLEAALNELA

SEQ ID NO: 301654 - protein, 390 aa, unidentified
MERPMQKLNDLSRSLIVLEPAVTLIAVIEMSLSSWLVAGIVPGVERQPLKKLAVDESALLKLLHRWREEAEKAGRRIERIVVGFEAGRDGFWLARWLKARSIEAHVIHPASVAVSREHRRAKTDRLDTALLKRAFLGWLRGERDHCKVVAIPTLKDEDAKRPNRERESLVGDQSRIVNRMKAALIRLGIRGFNPKLKRAAGRLDSLRTPEGEPIPPNTLAELRRDMERRRLVSNQIRQIEKARLKHFEQAPNDGPHAMVRLLARVIGVGIETADMLVHEVLSRNMRDRRAIARYAGLTGSPDESGRKRREKGLARSGNGRVRRGMVQLAWRFLTYQKQSALAQWYRARTENALGARKPMIVALARKLLIALWRFVRQGVVPDGLVLRPAQ

SEQ ID NO: 301655 - protein, 341 aa, unidentified
MLIIGSDYHPSMQQIAWLDTETGEYGERPLTHRVEAEQFYRALQLQDSRVRIGMEATGQSRWFERLLAELHFELWIGDPAQIKAKRVRKKKNDREDARLLRRLMLEDNFPRIWIPDPENRDVRQLVWHRHRLVQMRTRVMNQLQAIAMNEGIRRKRGLWTQSGRVQLEALLLSPWTTRRRQELLELLDRFDPKIEELTKAVKQEADRRPEVERLQTHPGVGPITALTYVLVLGTPERFHCGKQVGSYLGLIPCEDSSAAHWRLGHISKQGNSLLRDLLVQSGISAARCEPDFRRQYLHLTMRRNQAIAKVAIARKLAVRLFWMWRRGWDYEALKKFGSHVG

SEQ ID NO: 301656 - protein, 342 aa, unidentified
MTISTIGLDLAKHNFHVHAVDAAGSVVRTAALRRGEMIKFFQNAKPCLVGMEACATAHYWARELMKLGHEVKLIPPSYVKPFVRRGAKNDAADAAAICEAVRRPHMRFVSIKSESNQGFLMLHRARGLLVRQRTMTVCAIRAHLAEFGIIFGQGRQRIETIMPSIEDVAASLPEQARFALNSLIRMVGELNTQIEGIEMKLAEVGRSDPVSSLLSSIPGVGPITSTAIAATVPDARMFRSGREFAAWLGLTPRQNSSGGTTRLGAITKQGDAYLRHLLVIGARNIVRYPKARAKVGGAWIDALLHRRRPMIVAVAVANKLARIIWAMMTSGEMFREAHAKIV

SEQ ID NO: 301657 - protein, 360 aa, unidentified
MQTQKTQLDFKGQNIFVGMDVHLKSWTVTILTEELTHKTFNQPACADTLSNYLKRNFPGGSYHSVYEAGFSGFWTHYKLKEMGINNIIVNPADVPTSQKEQLQKDDPTDSRKLARSLRAGELRAIYVPSGSTLEDRSLVRMRATLVKDMTRFKQRIKSFLYFYGVPFPPQFEKSGSHWSNRFMKWLTQEVVLQHDSGNQTLKILIQEAEQQRLLLLDVLRKIRLLSRSEKYAANVALLSNIPGIALITAITFLTEIENIERFVNTDHLAGFVGLVPNYHSSGEKSNKGEMTFRGQKSLKKSLVESSWFAVRFDPALAMSYHELLKRMESNMAIIRIARKLLNRIYFVLKNKQEYVPGVVK

SEQ ID NO: 301658 - protein, 405 aa, unidentified
MEILVDRGCGIDVHKATVVACIMGTGIKKEIRTYTTMTNDLLRLKEWLKGHGITHVAMESTGVYWKPVFNILEDSFEVILVNARHVKNVPGRKTDVKDSEWLCKLLRSGLVRASFIPPKEVRQLRDLTRYKRKLIHTITSEKQRVEKILEDANIKLSSIASDTFGASGKRIIQELMKGELRPDEMADLSKGKLRNRKAELKEALVGNMEDHHKFMVQASLSHIAMMEELLSTIEQKIQKKIERHFKEEYELLKTIPPVKDSASVLIAEMGVNMDLFPTEGHLSSWSGMSPGNNESAGKKKPGVTTHGNKHLKTILTEFGWIASKMKGTYLWSKYHSLVGRRGKKKALVAVGHKILIMCYHILKHKVPYKELGPRYLDERRKDRIAKSYIKRLTSLGYAVTVKEAA

SEQ ID NO: 301659 - protein, 396 aa, unidentified
MPRKRILVKSIDTSISYQVIGIDLAKHLVSACLITGAGEIFGIDRLTYDDLLKSAERMSPTLFCMEPCPEVHYLAEKLQGYGHHTKVIDGAAVKEYIKTHFGGQKTDLNDAQAIAFLSLDTNLPEITPKNTSNSVLSSIQAVREQFRKEYIQSFVSLKGICQRWGLPISKGVMNKNKVEELVSESKKIPQEVKDWLLELLQSCRELQKRLNKISKYLKEYADNDEICQKIMSVPGIGPITATRLKATIGDIQRFEKPKSIVAYYGLVPKSKATGHNEKKGGITRRGDRVARSLLIEGAGVVLNLAAKGFLRSKPLNKWIEKKRKLKMPWGKLCCALAAKMLRIVRAILIQGTSFNAKIAGVARCSLPKESRNNVMGNNKLSEIPSPNGSVCIHRKF

SEQ ID NO: 301660 - protein, 346 aa, unidentified
MEISTIGLDLAKNVFQVHGISATGEVVLRKALRQSQMLPFFQKQAPCLIGVEACGTSHHWARELTRLGHEVRLMPAAYVKPYVKRGKNDAADAEAICEAVTRQTMRFVPIKSREQQAALSLHRVRSLLIKQRTQLVNMMRSVLAEMGIAIPVGIVKALQMAREIVDGEAELDLPVEATNVVALLAEQLLQLHTQLRKLDLRLAALQRSDDRAKRLATIPGIGPIGATALAASVTDPGQFSSGRQFAAWLGLTPRQSSSGGKERLGRITKMGDRYLRQLLVVGATALVRYAREKPGTVDPRFVALLARKPARVASVAIANKMVRIAWAVMARGGVFERGHAPMLAAA

SEQ ID NO: 301661 - protein, 358 aa, unidentified
MNNITRVGVDLAKNVIQVCAVDAAGKVVLNKPLPRDRFFTWCAELPKGCLIAMEACSGSHHWARELNKLGLNAKIIAASHVSPYRMEGKGGKNDANDAAAVCEAASRPNMRFVPVKTSNQQGILCVHRMREGFKEERTGCINRIRGLMAEFGIVVSKSPNKLREKLQDILEDAENGLDWLARLAIQELYTHWCAIDEKIDWCDKRINAHISDDMQAQSAKQLIGVGALTASAAVATVVDFKQFKNGAQFGAWLGLTPKQSSSGGKTKLGRITKRGDTYLRTLLIQGAKAAVMSAHKRQDPISKWLFQLKEKSGWQKAAVAMANKNARILWAVMTKGINFDPAYVSVKPGGSIGTALAV

SEQ ID NO: 301662 - protein, 451 aa, unidentified
MVKNSKQTTASPQLAIINRHTAAIDVGSMLMMVAYTDAHGHQHLMETDGFTESLDELAKTLQGEGVTHVAMEATGVYWMALYEKLEQHGLVVTLINPQHFKNVDAQKTDVKDCQWLQQLHAHGLLRASHIAPELYRELKSYLHERNILQKQKSDTLNRIHRLLTQMNIKVQHLISDLEGVAGMKLLRAIALGISDPQELLSRIDVNNLKATNEDLLKSLRGCYKEQYLFILQQALKAYDFFKEQMKSYELKIEAVLKKLLPENEQGSTPVIARKKGLVRKNQYSINLKEYLRHITGVDITKIDGLDEITSLEIVSVTGIDMNKWPSADHFTSWLNLSPRPKISGGKILGHQKRFTNNKATQAFRMAAQSMWKHKGGLGQLYRRLSAQKGSKKAIKAIARKLAVIFYTMIKNNQEYDKSKMLIDSEKQQLKRITRLRQEAIKYGFTLQTATS

SEQ ID NO: 301663 - protein, 417 aa, unidentified
MKTMTMQPFAAFVGIDWADTKHDVCIQSADSSRREFAVIPHKVEEIDEWAQSLHRRFSGPIAIAVELSKGPIVYALQKYDYFVIFPINPSTLAKYREAFQPSRAKDDPTDAELALDLILRHPERFESLRPQSVEIRELAELVEQRRRLVSDRVRLTNRLRSTLKLYYPQTLEWFNRIDTKLFCGFIERWPTLMQVKRARTTTLTTFFRAGNTRNPALLEARLASIKSSQHLTLDEAVIAPNKLRVLMLVGMLRVMLDAIKSYDQTIAELAPEHDDYHLFSSLPGAGPSLAPRLLVAFGEQRSRFKNAAELQKYSGIAPVTERSGTKHWVHWRWRCPNFVRQTFVEWAAQTINKSYWAGEYYYQQRKKGSAHQSALRALAFKWIRILYRCWQTSTPYDEATYLKALERRGSPLVTKAV

SEQ ID NO: 301664 - protein, 398 aa, unidentified
MRKVAGIDVHKGFLEVAYRLPSGRIMTRRIEYTPKGIDRLIRLLRRHNITDVYMESTGDYYLPLYYTLKGANVKPHVMNAYKIRRPESNKTDTKDAVWLLEIGETELFSDSYVPDKNMQALRFLVRKRMKLIDRISDIKREINSIFWRLGLQAARYTKKLRSRKKRMLLLALLEGQLKPNKVDDDIRGLYNILSQPEFRAYIFVLKSRLADLAHYESQLDEFDREIAALAGKFEDAIRILMTVPGISFTLAVSILAEIGDINRFPSPANLASYAGLAPTARNSGGKRRSGRPSRKSNKYLRRYMFLAGMAAVRSSSSVVREFFTRLLGRGKHYKVAVVAVARKLLCVIWYLLRRGESWREDGYFKRPSRLPRGRRVRISVRDAIAILVRAGYEVRKKA

SEQ ID NO: 301665 - protein, 336 aa, unidentified
MRYLGVDLHTNSFTVCYLTGNRNRLRTYRLKDLLQFKRGLRESDILAVEATGNTRYFVESVLSSISGVSIVNPKQFSIIRKSVKKTDKNDAKSLAYFLSKDMLPEIRMKSKKQAQISSLVGTRDKLVKLRTSLFNKIHNIFNSYGINIKKESLSTRKGLDSVLGYCLDDTVELELSVITDQIRGLNEGIKKLDKEIEQQGKDNFKGHENLTSIKGIGDKAATILLSVIGDVNDFKTEHKLAAYFGIVPKVSQSNNHVHYGRITKWGSKIGRTTLVQCTLIAIRYSPYLRKFYDRIKSRKGSGKAIIATARKFLGIIYNTLKNNWIFEDFPNFVLAN

SEQ ID NO: 301666 - protein, 354 aa, unidentified
MIIIGADYHPGFQQIAFVDTDTGELQERRLEHREEAEKFYRDLGAQGASVRVGMEASGHARWFERLLTELRFELWIGDAAEIRTKRVRKQKTDRQDAQLILRLLLEDRFPQIWVPSGENRDLRQLLWHRHRMVQARTRIMNQVQAVALNEGLRCKKRLWRDAGREQLESFRLSPWASRRRRDLLELLDRLTPTIAELTAAIEREVEKCPEAQRLQTHPGVGALTALAFVLIIGRADRFQCGKQIASYLGLVPLEDSSGQRRRLGHITKQGNSLLRFLLVEAAQVTVRSDQEWRSKYFHLALRRGRKIAKVAMARRLAVRLYWMWRKGWDYGQLTKFSSHAGQPGHRDGVQSNTE

SEQ ID NO: 301667 - protein, 352 aa, unidentified
MIVLGADTHKRSHTIAGVEMATGQVLGDKTVGVGTRGFSALLIWARALDCERVWALEDCRHVSGALERFLIARGERVVRVSTRLMAGTRRCSRERGKSDRIDAISVARAALATGIDTLPTAALAGPELDLRLLVDHRERLVRTRVALNSTLQWNLHDLWPELSLPGGALFSNKWSAKIARRLARAEQTMRVRIARDELRRLRELTATIKALEAEIAELVTALAPQLVAEPGCGPLTAAKLVGEIAGADRFASDAQLARAAGTAPIPASSGRTDRHRLDRGGNRQINAAIHRIAVTRARCDPQTQDYIARKKAEGKTNRDAIRCLKRHLARRVWNLLRTPTPITGEALTQSIS

SEQ ID NO: 301668 - protein, 348 aa, unidentified
MLHAGLDLSRKRLDYCLVTEEGELVEDGAVSPDAGGLDGFARRVELRHGPSDITAAIESMTGARFVHDTLERCGWEVELADARKVKGIAPLACKTDKIDARVLAELSRRDLVPAIWLPSFEQRAERERARWRLHLGRHRTALKLRVHATLMSFGHACPMSDLFGREGREMLDRLDFPDPWRSDVLAAVQLVDDINDQMRQIERELKQLGADHRYIPLLTTVPGIAWTLGYTIASEIGDIERFVTPKKLTGYTGLCPRVYQSGSSDRRGPLSKQGPKYLRWALMEAATTACRHPVYRDRYLRTKQRLGRHRGAKVAQIDIARKLTEAIWHMLSRNQPFAPASAVLPLAA

SEQ ID NO: 301669 - protein, 360 aa, unidentified
MTRSTKHVGLDVHQATTVTSVREDSGKVIARGVLPTEEAPLLEYFRGMRGTVHVAIEEGTQAQWLHDLLAPVVDRVVVCDRRGESKRGNKADQVDADELSDLLRCGRLRPVYHGGRGAPHRLTLRELAHGYQNLVEDATRLMSRLKALFRARGIKTPGQQLYQPARRAEWLARLTEPGARFRAETLFAQLEPVQALRPGVKRALLAEARRDPSWDVLRSIPFLGPVRVAQLLATAQTPWRFRTKRQLWAYVGLAVVTQTSAQYEMRDARPVRRKRAPLTRGLNRNHNRVLKNVFKGAATAAAAREGELRGWYEARLAQGMRPEMARLTLARKLAALTLRLWKTGERYDATKLTTPAAHAR

SEQ ID NO: 301670 - protein, 366 aa, unidentified
MSQPTRFVGFDVHAKSISIAVAEEGREPAVHLATIPNDLGRLLRTLDRLGERARLRCAYEAGPTGYGLQRALKEKGIDCVVIAPSKMPRASGERVKTDRKDAVRLAHFLRSGDLVSVHVPDEVCEAMRDLLRAREDAKRAQLRARHQLSKYLLRHGRRWPKSNWTRDHIEWIERQSFGHEAQDRVLQEYLHTINEATARVSRYDQLLAELVPTSEQAELIHALQAFRGIQLLTAASIAYELGDLRRFPSAKKLMSYLGLVPGEDSSGDRVRRGAITKAGNGALRRLLIEAAWSYRHTPREAYRLKKRAEGVAPGVRAIAWKAQVRLNGRYRCLNARGKAKQKTLVAVARELAGFIWDAGRQEVLTV

SEQ ID NO: 301671 - protein, 348 aa, unidentified
MQSKSQIRSIGIDLGKTTFHLVALGSRGQVVVRKKFSRQQLLLYTANLPSSLIGMEACVGSHFLGRALREQGHEVRLIPAQFVRPFVKSNKNDYRDAEAIAEAVERENMRFVPIKTEDQLDVQALHRVRERLVSRRTSVINQIRAFLLERGISFAKGPASLRRQMPEILENGDEKLTTRMRRLLDFLWQEWKHLQLQIESLSEDLELIASSDEACARLQQIPGVGPLVATAVVSAIGNGAAFHKGREFAAWLGLVPGQWSTGGKTKLLGISKRGNPYLRKMFIHGARAVVLRAKREGSYLGQWMKSLEGRAARNVVIVATANKLARISWAVLSSGENYHPMPAVAVAS

SEQ ID NO: 301672 - protein, 423 aa, unidentified
MKTRLLNLTPSQTFSRSIGLDVHRDRIYVTELFILEGTYKQYEISTQEKEFEAFLATLRSDDQVALEATRGSNYYVRRLLTRVASVSVANTSKLPSSHAKNDRNDSYHLAFLLSIGMLPTIWMADKETQEDRELLHYRANLVQDQTRLKNRIRALLAEHGMNWDGSDIKSACAQRFLMRLKSLLSSASREVLANQLEQLDFLDTRLQRLEPIIQVRAARWPEVALLMTIRGINVLTAFTIMAIIGRMDRFPSADSLANYSGLVPRQYSSAGKSRLGKITKAGSKMLRWALTEAVQSLCKADGPYRNLCKRLERKKKGKGIAATACARKLLTAIWCMVTRGETFRHAEPKLTESKVQRREQRLKAARPFVEEQKQRHHQIIMSQLALVQALASRRALMPVPDQLLASLGRLSLPERPVAAMATG

SEQ ID NO: 301673 - protein, 369 aa, unidentified
MPSMPHPAQPSQDDSANGEVVLGVDTHKDLHVAAVITALGALLCSKAFPATAAGYRQLLAWARTFGTLRRAGVECTGSYGAALARHLRAEGMQVIEVNQPDKATRRRRGKTDAIDAETAARAVLSGRATGSAKTGDGPVEMIRMFKLAKASALKARTQTINQLKAVLVAADPALREELAGLSNPILFRRCAQLEPATPSDVTSAAAYTLRLLARRIHELTGEIHDLEQQITAAVTIHTPVLLERRGIGPDSAAAMLIAAGDNPDRLHSEASFAALCGASPIEASSGKSQRRRLNRGGDRQANAALYRITLSRLRWDQRSRDYLDRRISEGKTRREAIRCLKRYIVREIYHLITAPIPESDAPTTQPKAA

SEQ ID NO: 301674 - protein, 340 aa, unidentified
MTITTVGIDLAKNVFAVHGVDQNGRTVLVKPKVSRAALPELIASLPPCVIGMEACSGAHYWARLFRQYGHEPRLMAAKFVSPYRMAGKSGKNDAADAQAICEAVRRPHMRFVPVKDESQQAMQCLHRTRQGFIEEKTATYNRLRGLISEFGVIAPQSADALRHMVSVQKSSLPLQVQQCVDDLMEHVDRIEANITEYDRILSHIAKTDHRSQRLMELKGVGPTTACALVASIGNAHDFKNGRQLAAWLGLTPSQYSSGGKSKLGRITKAGDSYLRTLLVQGARSVLIGAGKRTDSFSRWVCMLVERRGYWRAVVAIAAQNARLCWASLHYGDDFRLYSVN

SEQ ID NO: 301675 - protein, 362 aa, unidentified
MLKSTTIIAFDHHAATTVAAVLLPDQRTPALHPLASDPATIRRFVNRLRRQGPVTCCYEAGPCGFELQRALTTHGVPCDVIAPALIPRRPGDRVKTDRRDAAQLATLYRAGALTAIHIPTEQEEAARDLLRCREDIRADLLRARHRLSKFLLRHGRRFTATKKAWTKRHAAWLQAQGWPLAALEQTHRAYVRAVDEAVGRLQAVDTELRDLLTIEPLRARIERLRCFRGLDDLTALTLAAELGDPRRFPTAPSLMGFTGLVPSEHSSGTKQARGAITKTGNAHIRRVLVESAWHYRHHPFLGRSLQQRQRGAPAAVIQQAWTAQHRLHRRYRRLAARGKPKQLIVTAIARELTGFLWTALTP

SEQ ID NO: 301676 - protein, 344 aa, unidentified
MKVVSLDVHAEASQLAVVDESGEVQFEMKVPTEPEALRAVVAGIRGPKRVVFEEGPLSAMVHDALKDLCEEVVSCDPAHNALIAQSEDASDERDARRLGQLAQLNAVRPVYVPPEPYRTLRSVLAHDHRIQETMTEIRNRIHALCRRQGIRCRGPAIDRRRERGEVLSQMANPALRWQMESLYRQLDALRIERIGGRRVVSRWTRKLPQIARLEGIPGVGPITARTLVGWIAGPERFKSRSALTSYGGLGLGQGRTNWKPVGRARASTRGNREIKRVLFLAAHAAAKSDSRLAERYAARLQAGWKPDKAIRDLARLILQIACVLWRKRLDYDDRRVSVPIAPAQ

SEQ ID NO: 301677 - protein, 320 aa, unidentified
MQTPTEVLNIGADVAKDEIVVACSQGSIPVRKLANQRSALLAFLKDLPAGSRIGMESTGAYHELLADAAHKLGFVVFVLNPKDARHYAKAVGLRGKTDRVDAELIARMVAHEHTKLHPWIPPTAEQREMARLIKRRAKLSSLRQALAMSLKGLEGFATDLKALRARFDQVLVRIDQRVKALVEASPDRKQHVTHLRTICGVGPVVSAALVNTLERVPLKSADAFVAFTGLDPRPDDSGQHRGKRRLSKRGPAELRRLLYVAAMSAKKKQAWKPLFEHYRAKGLSSTAALVIMARRIARTAWSIYTYKTDFDPARLTKSLT

SEQ ID NO: 301678 - protein, 393 aa, unidentified
MSLDQPREEPTAIQTQFGAIFVSLELSRSTWLITSISPGGGEKMSKHSVSAGDIAALLARFSELKEKAFARTKKSFPIIVIQEAGLDGFWIHRVLKREGIESYVVDAASIATSRRRRRPKTDKIDGEALVRALLAYKRGEPRVCAMVQTPTPDDEDRRRLCRERKALTVERIQHVNRIKGLLFSQGVADYEPLLRNRRQRLDELKTGDGRPLPPHLKAQISRELDRLELLLEQIKTVETERDASLVASPTSDETPAPQAMVMCLKGIGPEFAAVLWSEGLFRRFANRRQVAAYAGLAPTPWQSGSVAHEQGVSKAGNPRLRTTMIQLSWLWLRHQPESALARWFHERAKRNAGRLRKTMIVALARKLLVALWKYVNAGVVIEGAIVKAAQQAI

SEQ ID NO: 301679 - protein, 402 aa, unidentified
MIFINCLGIDIGKSESVVAHYKDEVLVKEMVIQNNQNGYRYLKNYIKHLDSLFILFESTGIYSRGMKRFCEIHKIDYLEMNPLEAKFKTSSLRSWKTDKSDAHKLALLAFRMKDSKVQRQSEEIYFELRERARFHLEMEINQNRLKVELVETLHQTFPGLEKLFTNRYSKIALSIAKAFPHPDFVSTLTHDELVEKVLHSTDKGISVNKAHKYVQKLIEIQINSFPNVDKSSFLLQKVLYLCDKLLIGIEEMKEFDQEMIDLAKNTTEFENIISIPGIGELTAALLIGELGNIREFKTNKQLNAFVGIDIKRYQSGTSKSRDTINKRGNKKARRLLYLIIMNIIRGRNHYQSHIVDYYYKLREQPHGKTHKTAVIASINRLLKTIHYLIVNNKLYDYQKAPH

SEQ ID NO: 301680 - protein, 344 aa, unidentified
MSEVSMIGLDISKHVFHAHGVDGRGRAMFRKRISRGKLLDFFATQPSCTVALEACGGAHHWARQLAQLGHQVRLIPPAYVKPFVKRQKNDAIDAEAICEAAQRPSMRCVAVKSEEQQAAGMVFRTRDLLVRQRTQLINAIRGHLTEYGWVAPKGPSHVAMLADLIDEEEMASSLPGAARMMFRVMLDLLSGLSRKIADLDKEIARRAREDEVSRRLMTVPGIGPISATAIVALAPPAESFAKGRDFAAWLGLTPLQRSTGGKQKLGAISKMGERTLRRLLIIGSSAVVKQAGKRGAPRGSWLEQMLARKPRMLVTVALANKMARIVWALLVKQETYRAPVAARA

SEQ ID NO: 301681 - protein, 424 aa, unidentified
MMRLAYPICCGLDVHKKVIVATIVTTDSNGISSYSQKSFSTMNSDLKEFHDWLIKNNCRHVCMESTGKYWIPVFNYLENDITVCLTHPKYVKAIKGKKTDKKDSKWIADLYKFDLVRCSFIPPKDFRQLREIARYRFKLVCMKASERNRVQNCMTVSNIALANILSDPFGKTASEIMTYLLSQSADTIKDDDVKKLIHRKAKDKTDEILESIKGYLIESDQRTKLRLARAHLEYLDAMILQTQEDLYERIKPYWNYVQIVSSLPGVTELSAAIILAETGVNMDVFEDADHLASWCGLTPRANESAGKKHSTSIMKAGAYLKPLLVQCALAAVKSRKQPYFAIKYNRLARRRGKKRAIIAIARMMVVCLYHMIKDKQAFSPSDYDELINPSAPKQPKVVLNDANVFAYLQEQGYDISSLVKSDNN

SEQ ID NO: 301682 - protein, 368 aa, unidentified
MKEQKNAVTRFVGIDLGKRTYEMAIVGKGGKVTKSNGKTFVAGRQSLYRKLRPGDKVALEAGNLAFIMAKEIEAAAGCRVYVLNPSQLAIIYASMKKTDKEDSLKLAHILEDCREERLPTVPVPDDQEMRRRKLLASYRRAQASRNRAINQLHSLFVSQGITTKVRKDLSTADVCGTAIQELTGIELQEASYLVESLALYEKQLAVLEQQMESESAGDELIELLQSVPGVGPKTALAFVAYIAVQRFSNASQVSNYIGLVPRVYISGEMVRYGRITKRGNGYLRALLVQAAWALTRTKAGGTLKARYEYMTKEKSVSKKKAIVAIARRLAELLYTMMKEGTRYEARPFQPESKKAETGVTLAQLAMSA

SEQ ID NO: 301683 - protein, 367 aa, unidentified
MFQLLTRQEESEMNATTVAVDLAKNVFELALADGNGRVIERHRLTRTQFERWFDNRKVDRVVMEACGSAHHWGRWLEARGIAVKLLPAQYVRAYVKRNKTDAADAAALLEAARAADIKPVAVKSIEQQALQGLHRLRSGWMATRTRRINTLRGFCREFGLEIRVGAVQGLAAIARLIADDRSAIPALLRTPMRLALEEIRLMEARIERLERELAQLARQSPACEALTSVPGIGLLTSTAMVAAVRDPRSFDSGRRYASFFGLTPREYSSGQHRYLGRISKRGDRYIRMLLTHGARSVLRAATAAQRQGRKLDRLRTWALQVQERTNHNKATCALANKLARIAWAVWVKHEKFQSTPAHPSMAAEVAT

SEQ ID NO: 301684 - protein, 347 aa, unidentified
MLIIGCDFHPGFQQVAIFDNLTGEIQEKRLQHRADAEGFYRRLAGQEVLVGMEACGHYPWFEGLLQELGMGLWFGDAAKVRASVVRKQKTDRRDAEHLLDLLRQDRFPRIWVPSLEVRDVRQLLVHRHKQVQARTRTKNQLQAMALSHGVQKKRKLWTKAGRAELEQLPLLAYAAQRRKKLLEALDELDVEISELDRRVAEEARERPEAVRLMTHPGVGSVTALAMVLTLGPAERFGSGKQVGSYFGLIPSEESSGGKQRLGKISKQGSSFLRFLLVEAGQTAARYDPQLKRFYRRLAVRKNRSVAKVAVARKLATRLYLMLREQWTYAQLSQAVMQVSPSHSVAGE

SEQ ID NO: 301685 - protein, 472 aa, unidentified
MAHKQAGEAPRREHAKKARRPRPSLLERIQPDAAGVDCGERSHLVAVPVERDPEPVREFRTFTGELTRLADWLTQCRIKTVALESTGVYWIPLYEILEARGFEVVLVNARDVHNVPGRKSDVKDCQWLQELHSVGLLRASFRPAAAMVPLRSYVRQRQTLVEEASTRILRIQKALTQMNLMLHVVVTDLTGATGLAIIGAILAGQRDPELLAAHRDYRCHASHAEIAAALTGNYRAEHLFALKQNFDAYQFLLKQIAECDTAIEALLATLAAKQPQPQAALPTARRRRPPKNREPRFDIRTPLHRLTGGTDLSQIDSIGPHAALQLIAEIGTDMSRWKTAQHFTSWLALAPNNKISGGRLLSSKTAPSANRAAVVLRRCAMSLSRTSTALGAFYRRLAARVGKAKAITATARKLAVLVYRALCGRLVYKDPGAVRYHLINRTREIKSLRKRAKLLGLELLDPATGEVLNPVS

SEQ ID NO: 301686 - protein, 365 aa, unidentified
MKKNNTCQQSSKGNKTRKRSLTIGMDLGDKTSHYYVLDSEGELVREGTLTTTKKGMKQRFGSLQRCRIAMEVGTHSPWVSRLLGSLGHEVIVANARQVKLISASSRKSDRLDAQTLARLARMDPELLRPIRHRSEKAQGHLMQVRVRSALVETRTGLINTARGLAKAMGERLPACDADQMGVEKMQGLPAELAEALAPLLETVESLTERIKEWDQKLEQLAGSEYPETELLRQVSGGGSLIALTFVLTLEDPNRFGKSRDVGCYLGLRPRRSESGERQPQLGISKEGDVYLRKLLVQGAHCILSQRSPDTDLKRWGLKLAGKGNKNAKKRALVAVARKLAILLHHLWVSGEVYEPLRNSQQQAVA

SEQ ID NO: 301687 - protein, 422 aa, unidentified
MSYCPVAGIDVSKRFSDMCILSPDNKIFAQEKIYHDETSINRANALLQKAKRLFFSKPVIVMESTSHYHLILFQFFSEHGYDVIVVNPLQSNSMKDFSIRKRKTDRVDAFKLAMMYRTKTLRPSQIPQTATRALRQLCRHRAELLNDVSSYKNRLTALLDQTFPGYDKVFSDVGGITSCAVLVRFPTPTILLVEEESELVEVIAAASKSGYSFAKKKAGLLISAAQKAQTLGIHSCADETLIVCTIQMLRTLSESVLQIETAIDDLLAQIKEMRNNVSLLQSIPGIGSHSAALLLGEIGDISLFKKPKQLAAYFGLDPTERQSGSFRGTKNKLSKRGSPYARAALHMGVVNSICKRGKDSAANPVLLSYYEKKCKNKPAKVAQAASMHKLVFIVFAVLRDQKPFELKTPEQHAVEQGFVKAA

SEQ ID NO: 301688 - protein, 440 aa, unidentified
MNDLRVLDAHAALVDVGSEQMLVSIAGGSREVFGTVTSQLHALRDWLLTHEVRSVAMEATGVYWLPLYAVLEAAGLEVLMVNGRQMRNLPGRKTDMKDCQWGATLHAHGLLHAGFVPPAHIRRLQDYLRLRANHITSAAAHVQHMQKALERMNVKLHHVISSLTGTSGLAVVRAILRGERNPEQLLALCDTQIQRAKAQRVKESLRGTWAEEHLFALRQALASWEHYQNQIAECDRQIEALLPASADHHTPPNTAVHTRPRKRAGPNAPEIPKLREILTQMCGGQDLTRLPAHTEYSVLQIVSEVGTDLTKWATEKHFTAWTGLAPGSHQSGKRKGSVKRQRNRAGRIFCVMARSLARSKDIALGGFYRRMAARRGGLIANIALARKLAVLFWRVMVKGTDYVEHGLAQYEAKVLQTKQRALRRLARQLGQQLVPSPVPT

SEQ ID NO: 301689 - protein, 352 aa, unidentified
MKITTIGIDLAKEVFQIHGVDEYGKAVLRKQLRRGQMTEFFANLGPCLIGLEACGSSHHWARKLGEFGHTVKLMSPQFVKPYVKTNKHDMADAEAICEAVTRPNMRFVPIKTVEQQAILSVHRARQGFVKARTSQANQIRGLLSEFGIVIPQGIQSIGKRMPDILEDAENGLPGTMRRVLERLNDHLKELDRQVKELELQIKLWHKESEASQRLEAIPGVGPITASAIVATVGNATEFKSSRQLAAWLGLVPKQHSSGGKQLLLGISKRGDTYLRTLLIHGARAVIRFAEKKAEPESWLRKLITRRNKNVAAVALANKNARIIWALLTQKATFHPDHTMATYCCGSLIVRVD

SEQ ID NO: 301690 - protein, 389 aa, unidentified
MNGQTDFTVKAEPEDFKNTLFLAMELSRATWLVATFAPRLGDKINVHAIPGGNTKRLLELIGRLQAKLRDKGVSRVRTVCCYEAGYDGFWLHRVLVNHGVENHVLDAASLPIDRRAKHIKTDNIDAKRLLRAIVGFVQGDPQSCRVVRAPTPEEEDARRLHRERQRLVRERTGHLNRIKALLITHGIRALRITDAKWCERLDKMQTGDGRPIPARLKIEIEREWKRLKVVAEQVREVEAERDRLVKGSEPSGDGCTEKMRRLVKLHGIGAEFATVLTREVFYRPFQNRRQVASYVGLTPAPYDSGDTKHDQGINKAGNTRARVIAVQMAWLWLRYQSKSELSLWYYSRVGDLKGRVRRIMIIALARKLVIALWRYVETGKVPTGAIVTA

SEQ ID NO: 301691 - protein, 392 aa, unidentified
MYIIGIDIGKNHHEASIVSPEGKQIGHSLRFATTHKGADSLMSFIFNNIGNSSCIFGMEATGHYWYPIYSFLKARGYTIYVINPIQSDSLRKMYIRQTKNDSIDSFLIAEVIRFGQFTTTSMADENILAMRQLCRYRDSVISSRTEIKLRISTIMEQIFPEYEKQFSSLWLSTSMGILEKYLTPENIENAPIDELFEIIKDKSHNKLTMKKAISIREAAADTFGIKIAQDAFSFQLKQLIDRMNFLDKQIEALDCQILEYYEKFDCYLHTIPGIGMIAAATILAEIGDINRFKSSSALVAFAGIDPTVRQSGEFSSTHNHMSKRGSPYLRHAIFLVATTCSFHNSPLNAYYKKKRDQGKHHLTATGAVARKLTTIIYAVFRDGKPYEPKKFC

SEQ ID NO: 301692 - protein, 317 aa, unidentified
MLKIVYPICCGMDVHKSFLVACIASTDERGVTTYKSRRFSTFTKDLKLCADWLKGNNCRDVCMESTGKYWIPIYNILEPSCKIVLAHPKYVKAIRGKKTDKKDAKWIADIFKHDLVSGSFIPPVDIRQLRDLVRYRWKLNNFIVGEKNRAQNCLTVSNYKLDDVFSDVFGKAATNITSYLLEHPNEPLPDISSFRTKGVKATDAEIRVATDGNMCAEQAENLRIIRSHIHDLNRCMANLESLIISTVEKYTSQLSLVMSVPGIQTFSAISVIAEIGVDMSVFPSSKHLCSWAGLTPQNNESAGEEKDYQNFQSRRLH

SEQ ID NO: 301693 - protein, 445 aa, unidentified
MFIQSQDDSHCCYSFFIKVVILMMKLKYSICCGLDVHKNVIVATIVTTNKDGISEYLQKSFSTINSDIQRFHNWLIENNCYHVCMESTGKYWIPIFNYLENDIDVCLTHPKYVKAIKGKKTDKKDSKWIADLYKFDLVRCSFIPPKDFRQLRELSRYRFKLVCMKSSEKNRIQNCMTVSNVGIASVLSDPFGKTATEIISYLLEHTADSMDEKAVRKLIKKGAKSKSDEIIEAIKGYTIETDQAKKLELARGHLEYLDDMITQTEVELYVRIKPYYKFVEFVSTMPGMTELSSTIVLAETGVDMDIFDDAKHLCSWCGLSPANNESAGKKKSVRIAKAGDYLKPMMVQCALAAIKSKKQPYFAIKYGRIKKRRGHKKAIIAIARMMMVCIYHMVSEKKPFTPTDYEELMNPQNHVERVVLNENNVFAYLESLGYDSSKLVKRNDN

SEQ ID NO: 301694 - protein, 345 aa, unidentified
MEIVTLGIDLAKNIFALHGVGADGKVVLQRPAVKRAKLLELTASLPPCLIGMEACSGAHHWAREMTRQGHTVRLIAPKFVAPYRMSGKRGKNDAADAAAICEAVARPAMRFVPVKSIEQQSELFLHRARQGYVEQRTALINRIRGLLSELGIVLPQKADTIRRELVNLLEDLPGHCNTVAADAITDLERLDVRIGEYDRHIATCAKNNADARRLMQLSGIGPTTASALVASIGDGHDFASGRQFAAWLGMVPGQYSSGGKQRLGRITKAGDRYLRTLLILGARSVLQSGKKKEDAISRWTRDVESRRGYWKAVVAMAAKNARLAWAVLRRGEDFKLYGQEVPAGA

SEQ ID NO: 301695 - protein, 435 aa, unidentified
MGSASGPASPILTEYGRRVGSLGPGLTSESADAVRAVLRDDLSAGSQVFTAPTSGAGLICPAWTRGLGFPGPTGQRVRAIPQPQKGMAVTIVEEARPITGGVDTHADTHVAAALDSVGGLLGVGEFPATAAGYARLLGWLGGFGTVCLVGIEGTGSYGAGLARHITAAGVRVVEAARSDRQDRRRQGKSDPLDAVSAARAAQSGRARGAPKGRDGAVEAIRALMVARRSAAGERTQTINQARALALTGPDDVRVRFAGHTAAALVAALASLRPRPGSTVGYATRIALRELGRRAQFLDTQLERLDELIIPLVTARAPGLLALYGIGPHTAALLLIAAGDHPQRLRSEAAWAHLCAAAPIPASSGKTVRHRLNPGGDRQANHALWRIVFTRLGSHPATRAYAERRTAEGKSKAEIIRCLKRYVAREVYPHLRTTAG

SEQ ID NO: 301696 - protein, 406 aa, unidentified
MKQIVSVGIDVSKGKSTVCAMIHPNTIIKESFEVLHTVEEMSMLADYIGSLDGEIRIVMESTGHYHLPVAQFLYQKGFFVCVENAYIIRQFSRIMLHGAKTDPLDAKKLAKYGLAYWSELKPYKFHPSCYTELSLLSKQYQTYIKLLIAAKQNVIHLMDEMLPGFKEALDTASSVQFSKVKYVDFAKEFYHVDMIKTMGKEIFRENYKQWCKEKGYRFQSEKADELFHLAEDGIPTLPTEFPSTRLCMEVATEQVSQLGYALEQILSQMQNLAKTLPEYQTIRQMGGMGEKLCVRFIADIGDVRRFHNGKALVAYAGIDAPPYQSGQYTGTKRRISKRGNSALRKTGYEVMKSLKSHPPKTDTRVYDFIIKKENEGKNRKQAKIAGLNKFLQIYYARVMEIYKNIV

SEQ ID NO: 301697 - protein, 351 aa, unidentified
MSHKTAATGAHTIGIDTGKNTLHLIGLDDKGAIVLREKIARGRIAARFANVPRGLIGIEAGMATHYVARELIALGHDVRQVPPAYAKPFRQGHKNDFRDAHAIAEAVQRPSTRCVPVKTDDQLDLQALHRVRSRLVGQRTAVINQIRGFLLEHGIAVRQGLRFLRQQLPDILAKRGDVLSPRMIRIIEDLSGDWRRLDERIQHITEEIEVLANSSESCRQLMTAPGIGPLIASAMVAAIGNGAAFAKGRDFAAWLGLVPKQMSTGDRTILGRISKRGNRYLRTMLMQGARVILLRPANWAKHSFGLWLTAAAQRLHHNVLATALANKLARIAWTVLAQGRSYEARVEPKVA

SEQ ID NO: 301698 - protein, 405 aa, unidentified
MRVIHERCAGMDVHKKTVVVCAITPEGRQVRTFATMTESLLALTEWLEGLECRVVAMESTGVYWKPVYNLLEAANFKAMVVNAQHIKAVPGRKTDVRDAEWIADLLRHGLLRASFIPDRGQRELRELVRYRRSLVQERSREANRLQKVLEGANVKLSSVATDVLGRSGRDMLRAIVQGTEDPAALASLARGRLKQKSDQLEQALRGLVGSHQRFLLREQLDRIEEIEARIARLNIEIEGRLRPFEPILQRLETIPGVGRRVAEEVLAEIGTDMSRFATARHLASWAKVCPGNRRSAGQAKPEHVGRGNPWIRSPLLEAAWAASRSKDTFLAAQYHRLARRLGSKRAAMAVAHAILVIIYNLIRDEKTYQELGATYHDQRSQDIVVRRLTKRLEDLGFQVTRKEAA

SEQ ID NO: 301699 - protein, 480 aa, unidentified
MNVKTRRTKKQVNVENQAIKLLAKEELGRKIEVIKKELRSYTWRDLETNGKFAKNDKLSFITDDMLIAGCDIGSETHYIRAIDVRGRELSSGAFEFSNTSEGFANAKAWVLALAAKNDKKQIVLGLEPTGHYWFALAAWMISNGISVVQVNPYAVKQSKEIEDNSQLKDDRKDPKLIANLVKDGNYGMPYLPEKVYADMRRLSMFRDQLTEDRIRNINRLHRELKIYFPEYMDAFGKIDGAFTLEVLKVSAIPSDITALGAEGIKNIWYNVKLRGRGYSRANEIVSYAEKSVGLTDGTDAGREAVKWYAEQILKLDEQLAVVESTLHEKCREIPCAENILEIKGVGENILAGILAEMGDISRFDDVKEIQKLSGMGLVACSSGKHKGQTKISHRGRKRLRYWLFQAAKSAVSHADEFKQLHEYYTTRTNNPLKKMQSLVVIACKILRVIYTILNTGMKYDPERMLRDIRYPQGNTVQAAA

SEQ ID NO: 301700 - protein, 426 aa, unidentified
MNFTQNEKLNQVTTETLVIGVDIGSETHYARAFNWRGIELGKVFRFANNGEGFGQFKAWIDSLSGKTAKSSIMVGAEPTGHYWFSLASYLKDHDIRLVLVNPYHVKQCKELDDNHPSKTDSKDPKTIAKLVIDGRYNIPYIPEGIYAELRIAMNCRERIVRELVVIQNRIERWLKIYFPEYHEVFKDFEGQSSLLILSNMPLPADVVNAGADGINQLWRKNKLRAVGMRRAQTLYDAAKRSMGCSEGSGAARMEIRLLLEDYHTKKAQHDSVMAVVAELCMQIPAVQKLLAIKGIGILTVAGFFAEVGDLGRFQSPKQIQKLAGLAIRENSSGKHRGQSGISKRGRRRLRALLFRAVLPLVATNREFAEIHSYYTNRKENPLKKKQSLIALCCKLIRVFFALATKDEDYDPVRLLGDIRHPAALAA

SEQ ID NO: 301701 - protein, 462 aa, unidentified
MNENNNQSKKKVVEFDVLEQINLNAAGLDIGSEEIYAAVPKGRDKESVRAFPTFTADLYQLASWLKKCNVETVAMESTGPYWIPIYEILESRGFEVYLVNARHIKNVTGRKTDVLDCQWIQQLHTYGLLEPSFRPPEKICAIRSLVRHREMLIKCRSSHIQHMQKSLNLMNLKLTNVLSDITGVTGMKIIRAIIAGEHNPEILASYRNQKCKHNEADIAKSLEGHYKREHLFALKQAVELYDFYDQQLADCDSELEKLYEEFEPRDGSSNKPPKKKTSKRRKNQPHFDLSESLYRMAGIDLTVVDGLDALTVQDVLSEIGIDVSAWPTYKHLSSWLHLSPNNKVTGGKVKSSRTQPTQNRAARALRLAAQSLARSDCALGAFYRRIRARSGAPKAITATAHKLARIIYSMLKYRRDYIDPGSNYYEEQYRKRAIRNLQRKASKFGFRLEPTAVLDPDCAAVS

SEQ ID NO: 301702 - protein, 382 aa, unidentified
MSAERVNDCYVALELSQRTWLIGFLLPGTDKVQIMTVAGGDAEALLSALGRIESLAGTRLAAECTMVSMRVCYEAGYDGFWLARYLIDRGIDTTILDPSSFLVSRRGRRVKTDRIDVEAMVFTLKAYLLGDRSVCRPVRLPSVAEEDAKRLSRERTQLKKERTRHVNRIRALLVLHGIRSVPGLWGGRWKEALSNIRTGDGRELGRFIFRELCRQFERLDLVHSQLKSLEKERIQACETEGAINDSGKIRVLKQLDGIGEVGATQLVAEVYHRTFKNRKHLSSYLGLSPSPYSSGEVHRDQGISKAGNKQARVMLVELAWCWLKYQPQSELTRWYRARFSGHGSRSGKVGIVALARKLAIAFWRFIEDGVVPEGATLAVATK

SEQ ID NO: 301703 - protein, 358 aa, unidentified
MQSNKISFKGQKIFIGIDVHAKSWKVAIAPEVGAVKGHSQKPSAKELFDFLKKNYPDGEYQAVYESGFSGFSTYYALREVGIDCIVIHAADVPTTQYEEVMKTDRIDAAKLARSLKAGQLKGNYVPEKQYIDDRSVVRIRRTIQKQLSGYKSRVKHLLHCHGVEMPERFSKIQTHWSRAFITWLMKDVKLMSDTRTSLDLLIRQVEVIRGTLLEATRQLRKMSQLERYKRRHDLLRTIPGIGPIVSMCILTEVCDVKRFHNENEFAAYLGLVPTSHSSGEKTVHGEKTFRGNKQLGPMVVEAAWVAISWDAGLGSQYFQYKKRMEPQEAIVRVARKLSNIIFSVLKNEKEYVPYQTGN

SEQ ID NO: 301704 - protein, 326 aa, unidentified
MTASQSSDNTFIGIDVGGASFEAAWHRGECAHYANRPDAIAAFVKRLPTGPSIVRIAIEPTGGYEKPLVAALRGAGLPVEMVHTSRFAAYRNLVGAKAKSDTSDARLLAAYAAAPDEVRGRKADHIALPADAEREELAELAARRDQLKRMIHAETCRLATVRSPFVRQAITDHLDALNKEERQTHAAMAAIVRQRDDLRKAKQLLQTITGIGDKTALICLAMLPELGRIDNKAAAALVGVAPFVRRSGTMNAPARIHGGRAPVRNIFYMAAVTASRHNRILKPFYDRLIAAGKPVKLALVAVMRRLVVFANAVLRTGQSWKGAVLP

SEQ ID NO: 301705 - protein, 343 aa, unidentified
MHVNTIGVDLAKNVFQVHGVDSAGKVVITRQLRRKQVLEFFSKLPGCLVGMEACGTGHHWAREISKLGHTVRLMPPSYVKGYVKRSKNDAADAAAICEAVTRPSMRFVPVKSTDQQALLMLHRTRDLLIRQRTQLINALRAHLAEFGLVAETGREGLAQLGAIITDESNHEALPSAMKQALQAIVDQLAALELQVGALDRAIHAHHRANDMSCRLETVPGIGVIGATAIASTVADPSGFKSGRDFAAWIGLVPRQHSTGGKERLGGISKQGDRYLRRLLVIGATAVVRQARLHPQKHVWIMRLLAKKPAKLVAVAVANKMARIAWAIMAKGGHYRAPELAAAT

SEQ ID NO: 301706 - protein, 322 aa, unidentified
MAMLSFGGIDVSKDRLDITVLPDEQCSSVSNDAAGWAELIEQLRGSSITAIGVEASGGYERGVVRALLAAGMSVRQINPFKLRQFAKASGILAKNDRLDARMIASFVAIMPTRPAQRQAPMIEQLAAMLTVRRQLSDHKVATENASRLLEGAMLQRLSRRRVAGLTADIDLLDQRLVEIVTADAALAHRFRLLTSMPGVGAVLACTLIALLPELGQMSRKQVAALVGLAPYDFDSGKLKGRRCIWGGRARVRHVLYMAALSASNWNPALKAFHDRLAATGKKPKVVIVAVMRKMITTLNAMLRDGTAWVDRYSGRRSASTAR

SEQ ID NO: 301707 - protein, 409 aa, unidentified
MNAIGIDVSKGRSTVAIIRPFGEIVRRPFDVYHSRSGLDELAKLILSLEGESRVVLEHTGKYSQPVIKVLCEAGIFVTAVNAKLLHDFGGDTIRRDKNDKLDAKKIAGYCLVKWENLRRHIPEDETRWILKTYNRQLGEFMKIRISQRNNLVSLTDQVFPGVNRLFTSVARESDGHEKWADFLMQFWHIERISKISYAAFAEKYRCWCNKHGYNYAESKAKSIYDTAKNAVATLPMNDFTKVLIRNSISQLNHLYEAIAEIKSQMTVLAKSLPEYEIVIAMHGVGKILAPQLIAEIGDIRRYPKRASLARFAGIEPPENQSGSYNQYSRRISKQGSPHLRRALFQVMRCVLQNSNPNEDTFRFISRKRSENKPFKVYMIAGANKFLRIYYARVKELFDSFYPSEISLTA

SEQ ID NO: 301708 - protein, 417 aa, unidentified
MDVFVERIAAIDIGKAELSVTVRTPQPGRPGGRRQVTRTYRTMTNALMTLREWLAAEGVTRVVMEATSVYWKPVYYLLEDAAVFEVWLVNAHHVKGVPGRRKTDHIDSAWLAKVGECELIRPSFVPPEPIRRLRDLTRQRTSLVRDRTREAQRLEKILEDAGIKLSVVASEVLGVSARAMITALINGQRDPHTLADLAKGQLRIKHRDLVEALTGRFSEHHGFLCRHMLEHITYLDTLISQYDQRIDQAVAPFRDRLTQLDTIPGIATTTAQRLIAELGTDMTVFPTPQHLTAWAHTAPRPRSSAGKTKHGGTGKGNPWLAGVLGEIAATIARSQTFLGVRHRRLAARRGKRRAIVATSRHLLVIAWHLLSDPTATDTFHDLGPDYHLTRLDTNRRTRNLIHQLEQLGHKVTLETAA

SEQ ID NO: 301709 - protein, 353 aa, unidentified
MPSKADTAIARTIGIDTGKNTLHVIGLDEKGAIVLRERVSRTRIAARFVNVPPCLIGIEAGMASHHIARELVALGHEVKQVPPGYSKPFRQGHKNDFRDAHAVAEAVERPSTRCVPIKTDEQLDLQALHRVRSRLISNRTAVTNQIRGFLLEHGIPVRQGHHFLRRQLPQLLGTRTDVLSPRMIRVIGDLMSDWNYLDERIERVTDEIESLARADEGCQQLITVPGIGPIISSAMVAAIGTGAAFCKGRDFAAWLGLVPKQMSTGDRTILGRITRRGNRYLRTLFIQGARAILLRPTGWAKHSFGSWLAAAARRMHRNVLAVALANKLARIAWTVLAQARCYEARVEPRVEPA

SEQ ID NO: 301710 - protein, 321 aa, unidentified
MAQASTKVAGIDTGKHWLDIAVAVGEQAEAPGFRVGNDPAGWQLVIEQLTAAGLERVGIEASGGYEAGVVSALHQAGVPIQVYQPLQVRLFARLRLRHAKTDKLDAALIAAFTASCHFDRLPAEARMAELAAHLGYIEQVEDDISRLKTRLEQQREPRLRAIMQADIKALAQRRSRERQRLEDSLRQHKDLACRLDLLLSIQGIGRPTALTLIIRLNELGKLSRTQIAALAGLAPFDRQSGQSRRSCHIKGGRPQVRTALYAAALPAAFRWNPALVRLYKRLTANGKPHKLALTACARKLLIFANTVLARQSPWKPQTSQS

SEQ ID NO: 301711 - protein, 348 aa, unidentified
MIIIGVDFHPEFQQIASVDTDTGEFQEKRLAHREEAEQFYRALAGQKVRIGMEASGHARWFERMLAELQFELWIGDAAEIRSKRVRKQKTDRQDAQLILRLLLEDRFPRIWVPSWENRDLRQLLWHRHRMVQARTRIMNQLQAVALNEGLRCKKGLWRERGRQQLESFHLAPWASRRRRDLLELMDRLNPTIAELSQAIEQEVEKRPEARRLMTHPGVGALTALAFVLIIGKTERFHCGKQVASYLGLVPLEESSGNRRRLGHITKQGSSMLRFLLVEAAQVSVRSVPEWRSKYLHLMMRRGRKTAKVAMARKLAVRLYWMMRQGWDYQQWNKFGSHAGQPGNRDGVR

SEQ ID NO: 301712 - protein, 357 aa, unidentified
MLALGDSAPRKGADAMTFVGCDLHTRMQQVAVLDTETGEVSERQLAHDGSAVEEFYAALPGPVTIGIESTGYATWFHTLIQRLGHTLLVGDAAKIRAMVVRKTKTDRRDALHLLDLLHHDRFPTIWIPDPATRDLRALLMHRMRLVRIRTMVKNGLHAIALNYRLTRGSRLLRQAGLAQLHALALPPHTAQRRDQSLELLAGLTTQIRALDDAITTAALAHPDAPRLLTHPGVVALTALATVVVLGPVARFHDSKHVVSYVGLAPAVNASAGTYHLGRITKQGSPLLRFVLGQAAAHAARMDADLKRTYFTLVHRRGRPKAKVAVARKLLVRLFIMLRDQIDYDEFRRRGRPAPAST

SEQ ID NO: 301713 - protein, 453 aa, unidentified
MCLEDRPVLEPNAAGIDVGAREMFVAVPPGRDENPVRVFATFTEDLERLTDWLEQCGVTTVALESTGVYWIPLFEILEQRGIRPCLVNARHMKNVPGRRTDWHECQWLQFLHSVGLLRAAFRPGQDVCAVRTLLRHRNELVAAASQHVQPMHKALRQMNLQIHHVISDITGLTGRAIVDAILAGQRDGAELAKLRDPHIQADTETIRKSLEGNWRPEHLFTLGQSRDLYRIYQQQIVNCDLEIEKMLQGFAPRIDPVERPLPPDRKRNRAGSKRRRKNGHPHPEFDLRTETYKLFGVDVSQIPGLEENALPLFSEVGRDMSRWPSAANFVSWLALCPDNDISGGKLLWRGARRVKNRAGHLFRMAAYALHRSPTPLGNYLRRMKAKLGPQAATMATAHKIAVIFYTMIKNQVEYDETIWDARDAQREKRLEAKLKRQAKQLGFELVPVELKAA

SEQ ID NO: 301714 - protein, 312 aa, unidentified
MKIICGVDVSKARLDACIEPGAAFASFDNTPAGITELAAFCRQHQAELAVMEATGGYERPAFLLLWEAGMPCAMTNPRSVRLYAEAMGVLEKTDRIDASVIARFADAKNLQPTPAPTSAQQRMKALVARLRQVTDDLIVQKQRRSSLLDNAEILASLDEVITLLKRQSRTLEGEIASMIDDDPLWAHLSDTFRSIKGVADRTVAWLAADLPEIGTYSNKAIAKLVGVAPIANDSGKRRGKRPVRGGRAGVRSILFLVAATAARYDKSLGDFRDRLLAAGKEKMVVRIALARKLLVRLNAKARDARAQYANAT

SEQ ID NO: 301715 - protein, 389 aa, unidentified
MIYVGIDVAKDKHDCCIMGTDAQKLFPVFTISNNMAGFNELYEKVFSVEKDISEIKVGLEATGHYSMNILSSLINKGLATYLINPLHTNLYRKGQSLRKTKTDKVDAYTIAMMLMTDRTLKPYSESSYHNEELKSLTRYRFEKVRERAKLKSAVMRLVNILFPELEKIVSEIHSPSVYSVLEEMPGASFVAKANLTHLKFILSSNSRGRYGREMAILIRNSAKDSIGIIMPAKSMELKHTLHLIGVLTEEINEIDASIKKIVDESLSPILSIPGISYKMGAMILAEVGDFSRFSNADQVLAYAGLSPSTYQSGQLESCYAHMEKRGSRYLRYALYNATKYVCLWDERFATYLAKKRAEGKHYNVAISHAAKKLVRTIYRMELTCQPYNK

SEQ ID NO: 301716 - protein, 346 aa, unidentified
MTIVEERTAITGGVDTHSEVHVAAALDRLGGLLGTAEFPATAAGYASLLGWLAGFGDVTLVGVEGTGSYGAGLTRYLAAHGVRVVEVDRADRQDRHRRGKSDPLDAVSAARAALSGRAAGAPKGRDGAVEAIRVLMVAKRSARHERTQAINQARALILTGPDELRARFAGKRAGALAEAIAALRPRPGDAADYSVRIALRELGRRVEFLDAQIERLDDLVIPLVTARAPGLLSLYGVGPDTAALLLIAAGDHPGRLCSEAAWAHMCAVAPIPASSGKTRRHRLNRGGNREANHALWRIVITRMGAHPATRAYVERRTAEGLSKKDIIRCLKRYVAREVYPYLRPGA

SEQ ID NO: 301717 - protein, 315 aa, unidentified
MPSETTVYVAIELSVSSWLMAARLPGINKPRLHRLEGGDAAALLKAIVDLKAQVSTRLGSAADVVCCFEAGRDGFWLHRLLTAHGITAYVLEPTSILVNRRARRAKTDRLDAEGMLRVLATWLGGDRQVCSMVRVPTPDEEDAKRPHREREHLVQDRLRIENRIEALLFTQGIRGRPSLCSWNRDMAALRTGDGRPVPPLLRTELDRLRRRLVLVLELIRELETDRAHALEEAKATDTMVDKINALQRIRGIGENFAAVLAREVFYRSFGNRRQLASYVGITPMPYQSGGMDRDRSISRTGNPRACTTMIQLAWL

SEQ ID NO: 301718 - protein, 381 aa, unidentified
MDQKQATPEKELTTRFPILYVAFELGNSTWKMACSDGRKVRQVTVTARDLEQVQRALLRAQTYFGMAGTSAVVSCYEAGRDGFWLHRYLQSREIDNVVVDSASLEVDRRLRRAKTDRIDAGKLLRMLIRYHGGEKQLWRVVRVPSREDEDARHLHRELEGLKRERTRQRNRIHGILMQQGLCLPNPSKKRFLKDLEALRTWDGQKLPVGMKARIVRAYQQLRLVEDQISALAKEKREQLKEVDNAKMRQVAQLLRLPGIGPVSSWAFVMEFFGWRQFRNRREVAALAGLTPTPYDSGRKLREQGISKAGNRRIRTLAIEIAWAWLRYQPRSKLSQWFSDRFAGGGTRMRRVGIVALARRLLIDLWRFLEYGVVPEGALLIT

SEQ ID NO: 301719 - protein, 307 aa, unidentified
MFVGIDIAKDRLDVHVRPAGESFAVTRDGEGVEELAKRLTAMTPALVVLEATGGFETIVAAGLAAAGLPVAVVNPRQIRDFARATARLAKTDTLDAAVIAHFAEAVNPPVRPLADPQQRLLGELMARRRQLIDMMVAEGNRRRLLTARRTLKSVDRVLATLKAQLEEIDHDIDIAVRGTPAWREAEDLLVSVPGIGPKIARTLLAEMPELGRLDRRQIAALTGVAPFNRDSGTLRGRRAITGGRSVVRSALYMSVLVSIRRNLPLALTYHRLRASGKPAKVAIVACMRKLVTILNAILRDKKPWVTA

SEQ ID NO: 301720 - protein, 359 aa, unidentified
MKLYMAIDLHSTNNYVAAVSEDGKPIMNKRLRNDPRVILETLAPYKEELDGVVVESTYNWSWLVDLLMDEGYRVHLANPTAIRKYSGLKYADDRHDARWLAELLRLGILPEGYIYPKDQRPLRDLLRKRQQLVRLRTSMMLSLQNLITRNHGIKLGGSVLKREGNPLEGYLESSDDLKLAGTVSKQTIDYLTGQLSTVESHILRQLKELDAYRNLTTIPGVGKILAMTIVMETGPIDRFAKVGRYASYCRKVQSRWLSNEKAKGKGNEKNGNKYLAWAFSEAAEIARRYDPACQAFYERKRRQSNRMVAHNALAHKLARAAYHVLRDNVAFEATKLFCEKPGRNGKPESVVGIPRRLIG

SEQ ID NO: 301721 - protein, 337 aa, unidentified
MNVTLIGLDLAKNIIQVCGVNQAGKAVFNRAIKRAELLKFLAQYPTSPVAMEACSGSNFWGRTLQELGHESLLIPPQHVKPFVKGNKNDRNDAFAICEAARRPHMKFVKPRSLEQVDMLWVHRQRERVVGQRTQLINQLRGMLSEYGVVVAQGKERLRRELPLLIEDAKNGLTFNARCYAQQMLEEWIELDRKIKGFDQDIKQQCRQSEAASRLIEVKGIGQTIATAAVAFAGDAKHYDSPRQFAANLGVVPKEHSSGGRQKLGGITKRGNRYLRRLLIQGAWSIIQHINSGEDRLTRWARSLVGRVGKQKTAIALANKMARIIWALLTKGERYQPV

SEQ ID NO: 301722 - protein, 523 aa, unidentified
METQTEFVVAERRCIGLDVHREFAQVAVWQGGLVWQAGRFATTPEGVRGFAEQLGPADEVALEATGNTWAIATVLASRAGRVVVSNPAKTRAIAEAKVKTDKVDAEILAQLLAADYLPAVWRPDPATAALRRQVLRRAHIVRQRTRLKNQVHAILHRNLIPRCPAADLFGHKGRRWLAEQSLPPDERGAAIALLRQLDFHAQELREIDTDLGKVALDRPEVLRLMTVPGIDATVALSIVAAVGDFTRFRTPEKLVAYLGLNPRVRQSGGQPASHGRITKAGPAHARGMLVEAAWSACKAAGPLRAFYQRVAARRGMQVAVVATARKLTVLCWHLIIKGEDYAYAQPSLVAHKRRKLELRAERTRGPRAERQSGRLLPQGRARRRARPRRPGRAGLPGHRRHLATHPPNGSGDSRPRRGPQIRGGRGRHQRGATIQALSGQRGAAGLTAPYPALRDGVEPRPPSPNLRRSSPGSRPSSLRCGRTTLTPAPGRRPHAATANAEEHGPRATTDDIQRKGLTISSVV

SEQ ID NO: 301723 - protein, 336 aa, unidentified
MGKYIEVFVAFDVAKKKHAVAIAEGGRTGEVRFLGDVENSPLPIERTIKRLAGRYDRLHICFEAGPTGYGLYRQIQALGHECMVVAPALIPKRSGERIKTNRRDAVTLARLHRAGELTGVWTPDAAHEAVRDLVRAREAATDDLRRKRQQLLSFLLRHSRIYSGGGHWTMAHRRWLANQKFEHAAQQIVFQEGIDAIEDAVQRLRRLEKQLALIVPEWSMAPVVEAYQAMRGASFLVAVTFAAEIGDVRRFETPRQLMSFLGLVPAERSTGDTIRRNGLTLAGNRRARRALIEAAWTYRYPARVSETLRARLEALPKPVRDIIRRRCFRKMGCSMS

SEQ ID NO: 301724 - protein, 358 aa, unidentified
MSNIKSSRLDFTGQPIYIGLDVHKKSWSVSIFSKYGEYKTFHQPPEPDKLVHYLSHYFPGALYYAVYEAGYCGFWIHDQLREQGIQCLVVNPADIPTKNKERRTKRDPVDCRKLARSLRNGEIKGIYVPCRSKLEDRTLIRTRQSMVRKQTRCKNQIKGMLLFYGVVIPEQREMGHWSRRFIQWIERIRMERASGDIALKAHLEELNHLRQLIASLSRAILHLARTEEYRPLVRLLKTVPGISTLTAMILLAELGEITRFPSLDELSCYVGLIPDTQKSGEKEHVGAITQRRHAQLRWLFIEASWVAVRKDPALLMAFQEYCKRMRKTKAIVKVARKLLNRIRYVLKNQAEYVPCVVE

SEQ ID NO: 301725 - protein, 344 aa, unidentified
MEYYVGLDVSLRSCAMCIVDNKGKVYLERELPCEVEDIADCLAAFEHPIERVGFEAGAMSQHLFFGLQSKGFEVVCMEARQVSAALSAMRNKTDKTDAKGIAQILRTGWFSPVHMKSREAHGLRALLSTRKALLKKTMDLANEVRGLLKIFGVRLPRTVKHGSFDGLVRPMIEMDDVLAHAIIPLLDARAVLFQHYLELDRRVKRAASQDEVSMRMMTVPGVGPIAALTFKAAVDDPNRFKRSRTVAAHFGLTPRRFQSGEHDNPGRISKAGDRDVRATLYAAANALLMRTMAGSQIKSWGMRLMRTKGRRRAVVAVARKLAVLLHRMWIDGSEFRQEQVGGTA

SEQ ID NO: 301726 - protein, 490 aa, unidentified
MSRPKRSAAPARPSATQAPSKPAPQPPRAQPAALPVLNPNAAGIDVHSDMHMVCVPADRVAPAPAQAAGAPANVRSFGANSCDLTAIADWLAECGVTTVAMESTGVYWVPLFELLESRGFEVWLVEPGQLSRCGARPKTDVLDVQWIQRLHSYGLLRASFRPPDSVLALRGYHRQRQMQIRYAGSHTQHMQKALEQMNVKLTEVVSDITGLTGQRIIAAILAGERDPAELARLRDPKCKNDATTIARALEGTWRPEHLFALRQAYELYRFHHQQIADCDAIIQEELAQLPNRAGDKSFTAKPRRCGRKPNDLGLDACEPLFQALGVDLTRIEGIEVGTALIILAEIGVDVSRFPTEKHFASWLGVCPRQQESNKTKKKRSPRKGKNRVAIALRMAAQSLGRTQSPLGLFYRRIKSRIGGKGAVTATAHKLACLVYRMLKYGTEYVQQSMQEYERKVRGQMERALQRKAAALGYQLIRTQALSAEPVQAPM

SEQ ID NO: 301727 - protein, 433 aa, unidentified
MGKKRKYQAIPVNDDRVESLIAAVAGQRVVVGIDIAKTKEFAAFMTEDGRVHATVRWAHPKQSPQFLQVLARMRQQGSRVELAMEPSSTYGDALRAALLEAGFPVFRVSPKRSHDAAEVYDGVPSLHDAKSAAIVAKLHLDGLSEVWGPRSEYERGLAAGVSVLRVFETQYRGNCNRLEALLARHWPELFRELEHGSATSLELLMEFGSAREVAERREEARGLMRRVGGARLASERIDAVLDAAESTFGIDPTAEEREAIQAIAAEARRCQQASRKAKRTLEKRTEHEGAAREMRHVVGKTTAAVLIAMLGEPGRYESAAAYEKALGYNLREKSSGESRGGLHITKRGPGLARMFLHMATLRLLQEDPIVDAWYTKKVRRQGGQAKLKAVVAVTRKLVRALWHVAQGAAFDARLLFDTSRLRLTAEPTPEPIA

SEQ ID NO: 301728 - protein, 453 aa, unidentified
MARKRKKDTKANNSMMPVMRPDAAGIDIGATEIFVAVPVDRAAENVRSFPTFTQDLYALADWLKQCGVKTVAMESTGVYWIPLFQILEDRGIEVCLVNARHVKNVPGRRTDVCDCQWLQFLHSVGLLRASYRPEQEVCAIRSLLRHRESLVQMAATHVHHLQKALDQMNLQLHHVISDITGQTGLAIVEAILAGERNPQVLAKRRHDRIKASEAVIAKSLVGDYRPEHLFTLRQSLAAYHHYGKLIDDCDREIRRCLEEFKPPHLPDASQGGSQKAPSLTTSTDGVLRSELKRVFGIDLTKIPGIRVGIAQTLFGEIGPDFTKFRSASAFASWMGLCPDNEISGGKVLWVGTRKVKCRAATALRLAAQSLHHSKSALGDFYRRMRAKLGAPKAITAAAHKLARIIFHLVTTAQEFDDSRFAADQLRYQKRQEAKLRAKAKALGFKLILLEQAG

SEQ ID NO: 301729 - protein, 326 aa, unidentified
MVIIGIDVSKNKLDCALIDNLNVDKFKFKVISNSEVGFIALIDWLSKHATSTVSDYHFVMEATGVYHEKLADCLFNMGSKVSVVNPAHIKYYGKSLGVRSKNDKKDSVVIARYGLTQKPMTWQPEAPEIKVLKALASRLDAIEKDILREKNRYEKSSVNPCSDSILESIQKMLSVLNEEKTSLEKLIDVHIKQYNYLKTNDALLQTIPGVGPVVSRYMLIVIGSRSFKSASQCAAYIGLVPIQNESGSSLRGRSRISKAGDPVIRAKLYMAAISALQHNPDIKIQNQRLLKNGKSKMSALCAAMRKLVHICFGVIKHQEPYQVQAN

SEQ ID NO: 301730 - protein, 391 aa, unidentified
MISVGIDVAKDKHDCFIISSEGEVLANVFTIQNNMEGFCCLLQRIRDCSSPQDKIKVGLEATGHYSYNILGFLLDNGLDTYVLNPLHTNLYRKSLSLRKTKTDRVDARTIAAMLLSDVGLKPYTETAYHNEELKSLTRYRFNKVKERGQLKQSIARLVCILFPELEKLVPTLHLASVYALLEEFPGAKQIANAHLTRLKTLLQDASKGRYGRDMAVTIRDAARGSVGSVMPAKSLELRHTIHLIHEFDNEINEIESEIQAIMDEIHSPITTIPGIGTRMGAMILAETGDFSRFESPDKLLAYAGLSPSTYQSGQINNCYARMEKRGSRYLRYAIFNAAKYVCHWDPSFAAYLAKKRAEGKHYNVAISHAAKKLVRLIFALEKSGQPYCSAA

SEQ ID NO: 301731 - protein, 419 aa, unidentified
MSFKILKFNCCGLDVHKTWIYACIGITDSNNRTEYKQARFSSFTKGLNELCDWLAKYNCTDVCMESTGNYWIPVFNILEQHNLWVTLSHPKYTKPMKGNKTDRKDAKWICDLYMCGMVKPSFIPPADIRELRDLVRYRYKLTCMITGEKNRAQNCLTVSNLKLDDVFSDVFGKSSRSITEQILQHPGEKFDVAPFVHRLCKTPIEEIQAAVDGAISKEQAIKLRQCLDHIDELNKHISEVEQEILRLSDKYEAALNLIRTVPGFDKNPMTAIQVLSEIGGDMSVFPTAKNLVSWAGCCPRNDQSNHKIKSTRISRAGSYFKPVLVQVANALIKSKKHPEFITRYKRIKVRRGHKKAIIAICRMILTAIWHILSDLKPYTPEGFLESRPVKKEKILTTSQALNLLKLRGYVIKDDPLPTS

SEQ ID NO: 301732 - protein, 440 aa, unidentified
MKLKIVNPNAAGIDIAYGEMQVCVPEDRDGENNRCFGSFTCDYEEIASWLKACGITTVAMESTGSYWVGLYFFLEEKGFDVLLANAKDVKNVSGKKTDEADAEWIMLMHSYGLLKPSFHPDAAARNIRELARHRDNMLRSAGKEVQHMQKSLVLMNIKVDTVISDILGKSGKAIIEAILEGNHDPKSLAQLADRRCKASRETIEKSLEGTWDAVHLFELKQSYDLYKYIHTQIADCEAEMDRMLSDYTDGCGTDMTGYKATEKRVAKKNAISFDAEKHAFSMWGVNVMEMPGMSLGGLSVLMGELGSGFVEKFPSAKSFCRWCNLVPNNKISGGKLLSSKVPKQKNRVGQVFRLCANSVKGVKTGLGVYFRRQKSKGGHLQAIVATANKMARIFYTMVVSKKTFDETKVGIDEKTLLQRKINIAQRSLEKLNLRLSVAQG

SEQ ID NO: 301733 - protein, 357 aa, unidentified
MSMLAGQVDVVIGVDTHRDTNTAALVDATTTGVLAHTACSTDALGYKRLLAFADKHGRGRRVWAIEGSGSYGAGLTTFLLERGEWVVEIDRPGRPARRNGAKTDELDAVRAAREALSREHLAAPRARGDREAMRVLLAARHGAVVARTKAIGQLKALIVNAPEGLREQLRRGSTDQQLDRCARLRTLPSHSVEHRATVRAIRAVARRALLLEAEAAEHESELEELVTAACPGLLELPGVGAITAAQFLVSWSHSRRLRTEAAFAALAGVAPIPASSGQTVRHRLNRGGDRQLNRALHTVALSRLQHHAPTKAYALRRTAEGKTPREIKRCLKRAIAREIYRLLEAHAKTQKKINQVA

SEQ ID NO: 301734 - protein, 355 aa, unidentified
MIKYSIGIDISKSDFHACLSTIDLGQHVKVTRSGKFANTKAGFAEFVKWVKASCSLKELQVSIVMEATGVYYENCALFLFLHGHSISVVLPNRSKKYIAAIGIKTKNDKADAKALSRMGAEQALDKWQPMGEFFYKLRSFTRHGQALKEMETAVGNQIEAAGHCMYENKAVIRSLKKMAALLEAQVKENLKAISGHIASNEEIAGRVANITAIKGVGELTVAVILAETNGFELFKNISQLVSYAGYDVIENQSGTHTGKTKISKKGNSRIRRALHMPALNMVTWDIKIFRDLYDRTLEKHGIKMKSYVAIQKKLLCLIYTLWKKNELFNPDHPSANTISDEEADVSLSGSFAEAE

SEQ ID NO: 301735 - protein, 312 aa, unidentified
MTEHCYCGIDVAKDRLDAQVLPHRQRFSVDNNATGWAELVERLHALPIAAVGIEPSGGYERGIIRILLAAGLSVRRINPSKLRQFARARGILAKNDRLDAQLIAEYVSIMPTRVVQRVATAERLAEVVTMRRQLCDEHVTIENQAAHVEDAILRRLNKRRLARLKADIHLLDKRLAEIVAADVILAQRYELLTSMRGVGPTLAFTLIALLPELGQMSRKQIAALVGLAPYDFDSGKLKGHRCIYGGRMPVRNILYMAALSAARYNPALKVFHNRLAAINKKPKVIIVAVMRKMITTLNAMVRDNAAWQPRAA

SEQ ID NO: 301736 - protein, 424 aa, unidentified
MQNTAAKKRKQVREGCLVIGIDPHKKRHAAVAITQDFTIQAKCKFDNTREGLEMMLRRVKEEMVGSGCRGIMFAIETGGHFWRNIAYYLDERGIPFRFINQFTLKRRREGKDLNRRKNDYRDAEVAAQLLCTGEFVESRLPQGVYAELRTAHNAYQRLVKERTRITNLVKALLDALFPEFTQVFKDPGGLTALSVLSTCPIPKVIAGMTDDEFVATIEARHRGQRLMRKKLKALHYAATKSIGIDAGARSIASEISFLVDKLELIRRQIRIMEGTLVRLVDETEEGKYLLSIRGLNYIAVAGLLAELGCFKLYRSAKQMIKMAGSNPTESESAGKKRAKTPMSKQGRPLLRYCAWTSVIPMLRVNNDFRAWAKQRRERPAYANPLNGREIVGAALNRLLRLSFALVKNKTYYRDVKPALTPVTV

SEQ ID NO: 301737 - protein, 338 aa, unidentified
MEHFAGIDLHSNNSYIAIIDNENRRVFKKKVSNDLQNVLHVLEPHRKQIKGIVVESTYNWYWLVDGLMEKGYKVHLANPSAIKQYEGLKHSDDVTDAFHLANLLRLDILPEGYIYPKEERPVRDLLRKRLQLVQQRTALILSFENLLTRNLGTRLNVNEINKLTEEDVEDIFQQEYLILSGKASIATINFLGTRIQQIENAVHKAAKLRSEYKLLMTVPGIGKILALTIMYEAGPMERFAKVGNYTSYCRCVGSERISNGKKKGKGNRKNGNKHLSRAHVEAAHYAIRHYEYVKRYHQRKMVKTNNVVARKAIAHKLARACYYIIRDQKAFDPGKLFV

SEQ ID NO: 301738 - protein, 330 aa, unidentified
MTVYFGIDVAKERLDCAVIVHGRERPIGQKSFPNTLDGIERAAAWVMKVSKAEVLEVHAVLEPTAAYHELAARLLASKGMTVSLVNPAQIRSFARGMAVLSKTDQIDAVLLARYGCLTRPKAWIPPAEPLIELQALLARLDDLEGDLRREQNRYEQACVRGCSGAIKRSFVTNIRALKAQCKLLQAAIAEHFAAHTDLQADLERLRTIPAVGPKTAMRMLALLRSHPFETARQAAAFLGLVPIERQSGKSVRGRPRLSKAGNSRLRAALYMAAVFATKLNPDIKAQQQRLLERGKAKMSTLGAAMRKLVHICFGVLRSGTVYQFPLAHRT

SEQ ID NO: 301739 - protein, 369 aa, unidentified
MADRISYIGLDVHKESIVVAVASGGLRGEVREFGRIANTATALDRLLRKLGSDGTTLRFCYEAGPSGYGIQRRLSAQGQECVVVAPSLIPKRAGDRVKTDRRDAASLAKLHRAGELTAVWVPDARHEAMRDLVRARLDTVHSLRRARQQLCGFLLRQGCHYGRPAWTKLHRRWLAGLKFDQAVHHLVLEDYIAAVEAAAARRDRLTAQIEAMLPDWNLAAVVAALQTMRGMALVNAATLIAELGDLSRFADPRQLMAYLGLVPSEHSSGASVKRGGITKAGNGTARRLLIEAAWSYRFPARLSRELLLRQENQPRPIRDIAWKGQVRLCARYCRLARAGKPANVVTTAIARELSGFVWAIARQVTVTAG

SEQ ID NO: 301740 - protein, 345 aa, unidentified
MNKISVVGLDLAKNVFQVHGLDTDGEVVVRKQLRRSEMRKYFARLEPCLIGMEACGGAHFWSRELTRSGHTVRMMAPAFVKPYLKSNKNDRNDAEAICEAVQRPSMRFVQPKTPEQQAVLHLHHGRQLLVRQRVALSNHMRGVLSEYGIVVPQGVKVLSRQLPEILEDAENTLPMLTRHLLAELKAEHDQLIERVDRFEKQLKAWHVSSVVSQRLASIPGIGVLTATALAATVGEGQDFKNGRQLAAYLGLVPRQASSGGKDRLLGISKRGDGYLRSLLIHGARAVIHHIRRRLKAGRPGGNPWVEQLLQRCHVNEAAVALANKMARTAWVLLARNETYYPAHPA

SEQ ID NO: 301741 - protein, 388 aa, unidentified
MVMWPVGVTLFRLSAIEHVGQIGAPARFILLVRTVSWAIAVLCVSPHTREVKMEAMREVLGIDVSKSKLDIELLMNGKVKTKVLQNTPAGHKSLLEWIDKSKASRSSLHVCMEATGVYHEALALTLYDAGIKVSIVNPACIKGFGHGENIRNKNDEIDAGLIARYCLAMNPELWTPPPLEQRQLRGWTLRVQALKDIRQQEENRLEAHTIGGMDDVAMHVKTHITWLDIEIKKLEKEIDDHIDRHPGLKNDAQLIASIPGLGTTTIARVLGHIGDIRRFKNAKAFAAFLGVTPKQRTSGSSVRGRTVMSKTGSSSLRAALFMPSMVARRHNPILRQFADRLLATGMAKKAVIGAVTHKLAHLIYGVIRTGKPFDANFLSNRLAIQDGI

SEQ ID NO: 301742 - protein, 327 aa, unidentified
MQGWAREAGHSITNIAGVDVSKKELVVVITGHAALRRYANDATGRRRLCHDLAKITGSRTLRVGLEASGGYERKIVAALRRGGFEVIVFQPIQVRAYAQYIGQRAKTDPIDARLIALATAAYEGEIRRSDDRLAPLAEHLTLIEQVEEDIVRLKTRLDGFTVSAFKTKVETEIQRLTARRNAEIRSLRKKLCQHSDLAFRLDLVISIEGIGERTALTLIIRMPELGTLTREEAASLAGLAPLDDQSGNTDRPRHIIGGRAKVRRSLYAAALPAAFKWNRALVDLYHRLTVRGATHKKALVACARKLLIFANTVLARGTPWVKSATAP

SEQ ID NO: 301743 - protein, 458 aa, unidentified
MDKVKKEKETKSESIKKISQFTIINHYVAGIDVSATEMMVAYPINEEELEIRAFNCFTSDLKMLVKTLKDNSITSVAMESTGVYWIPLFLMLQDEGIEVYLVNAKHVKNVTGRKTDEEDAEWLCKLHRCGLLSASFQPDNMTRTLRSLVRHRKALTRTKTTYVNRMQKALELMNLKIHTVISDIDGKTGMLIIEAILNGERDAEILADLRDKRIKASRETIIKSLEGHYTTEHMFELKQCLGLFRTHQAMIEECDLEIEKILQDKLAKINGGVLDDIEQLFKPKKKQKKVSGKNKIAFDVKKYIHSILEVDVTLIEGISEISALGIYSEVGDDLSKFRTEHHFTSWLGLAPNTQISGGKIISSKIQKKKHYAGQAFRMAASSLKSSKGPLGDFFRRIRAKAGTPKAIVATARKIAIIYYKMVVTKNTYNPKAMIEYQENQKEKKIIQLKKKLELLEAS

SEQ ID NO: 301744 - protein, 294 aa, unidentified
MKKLTTTMMQETLNKHDGRLTVGLDLGDRSSFYCVLDGAGDVLLEQKVSTTPKAINEIFGAMPRSRIAVETGTHSPWVSRLLSELGHETIVAHARSVRLIGESRRKDDRLDAMTLARLVRIDPRLLCPVKHRSAEAQADLTVIRARAVLVRTRTMLVNAARGLTKSYGERLRGCNARGMNPKSAQDLSPELKYALEPMMQQIESASERIRQYDQMLESMARNRYPEAERLKQIKGVGTLIALTYMLTLEDPHRFRKSRDAACYVGLQPGSRNSGQSEPQMHISKEGELPHATGT

SEQ ID NO: 301745 - protein, 369 aa, unidentified
MGEDSTVFVGLDVAKDRHAVAVAEAGREGEVRYLGEIGADTTSVRRLVARLAKRHGKLHFCYEAGPTGYGLYRMLTAMGHGCSVIAPSLMPRKPGDRIKTNRRDAVQLARLLRAGELTEVWVPDGAHEAMRDLLRLRDAAVNDVRRKRQGISSMMLRTGRVFEGKTSWTRKHRQWLQRQRFDYPAQDLVLQDMLVALQQAEARLEQVEDKVREFVPQWSLAPVVAALQALRGIRLVAAASIMAEVGDLGRFATARQFMGYLGLVPGEHSTGDKVRRQGITKAGNTRARRTLIESAWSYRHLPRTSPRQRRAQEGVSPAIKAIALKAQSRLCGRFRKLAAKGKPLTVANTAVARELAGFVWAIGRAALAV

SEQ ID NO: 301746 - protein, 388 aa, unidentified
MTGTKYIGMDVHKESISIAVRNDAGKLVMECVIETKANVILDFMHGLRGELHVTLEEGTWATWLYDLLKPHVTRLVVCDPRKNGRQGNKNDRIDARELADRLYLNKLSSVYHGGAGVRTLKELARSYLTISKDLGRVMSRVKAIYRSWGIPCAGKQVYAPGHRAEWLAKITEVGVLRRAEFYYQQLDALRVLRQAVRRDLLAESKKHKATKLLRQIPSIGPIRAALLIALIQTPHRFRTKRPFWNYSGFAIEMHSSADYRSVQGALQKSKKQISVRGLNRDCNHDLKNLFKSAATIASVKPGPFQEFYAALVAKGMRPEMARLTLARKIAAIVLNRMEERSELRRPTSETTNSLSVSERFRSIPGIFSGGGRGVLETLWFESESQLVS

SEQ ID NO: 301747 - protein, 344 aa, unidentified
MQNDTLVAVDLAKTVFQVAVSHHPGQVSKNKRLSRTQFAEFLAQLPKATIVMEACGSAHFWARRMQALHHTPVLLSPHTVTPYVGRNKTDRNDTKGMLEAHRNEEIRPVPVKTLAQQALCSLHRIRAGWIAERTACINTLRGLLREFGIAIPVGAQHAVPNAWLHIEDAESELPDSIRPALAEICTEIRELERRIKMIETQLAALAAQTPAVARLMTIPGIGLIIATALVAFVGDIHRFPSARHFASYLGLTPKEHSTGSRRRLGAISKQGDVFLRTLLIHGARSVLNAATRQKTPDRLHAWALSRHAARGHNKAATAVANKIARIVWAVWKRDQPFHSVPVAA

SEQ ID NO: 301748 - protein, 326 aa, unidentified
MATIGIDVSKKKLDLCWLRDAQAGKVKTRVFPNAHDHYPALLAWLLKQTNEEAGDLQVYLEATGIYHEPLAYWLHQAGVTVYVLNPARVRYYARSLGDQGKSDKKDSKRIVHFAQANPELTPWQPEPEEVRTLKQLAKRLETVQKDIQREQNRLEKAQFNRDTQAEHSITHVLALLRREAKRLIKEVDDHIDRHDGLKRDRRLLESIPGIGEVLSVHLLVTLRSRRFKSGRQVAAFMGLVPVEWTSGSSVRHAPRLSKNGDPALRQKLYMGAVVAMRHNPSIRRQYQRLCAAGKRKMSALGAAMRKLVHIAYGVLAHQKEYEPQPT

SEQ ID NO: 301749 - protein, 430 aa, unidentified
MKSNTQNAKIEAITEKTLVLGIDVGSETHYARAFDYRGVEYSKKPFKFSNTEAGFVTFKEWILDLKERYEKDKVVPGMEPTGHYWFNLGKFLQDNEMKPVLVNPHHVKKSKELDDNNPTKNDRKDPKVIAGLVREGRYMIPYLPDGVYADLRTASNIRFQLQAELTRIQNRISRWFNIYFPEYKTVYGKPDAKSGMLILKAAPLPEDILTLGIDGVNQIWRDAKLRAVGKARAKTLIEAAEHSVGSKEGAVSARMEIRMLLEDYESQNMRLQEVMVLIEELVRKIPMAEKLLEIKGVGIRTVSGFLAEVGDISRFNNPKELQKLAGLALVENSSGKHKGETTISRRGRKRLRYLLFEVAMSLVSKNQEFRELHNYYTTRRLNPLKKMQSLMAIAAKLIRVFYAMLTKGVDYDPKKMVSDIKRPAVYLQAA

SEQ ID NO: 301750 - protein, 386 aa, unidentified
MRAVCGLDVHKDSVFLCILCETGEIFEKVYGVLTHELQSMCREMKSRGVTEVSMESTSVYWIPIWRVLEPHFRLKLVNPYFIRQLPGRKSDVKDAQWIAECTLKDLIRGSFVPPERIQQLRQYDRRIFDLDAEIVRKLSKLDAVMQRCNIRLSNYVSNTDTKSYKEVVRKLCEGVTDPEELIKVIFGRIINRHGRETILAALTGVVSDAEKDAMRQLRDELDLAEKHKQECQDRMLHICKTYYPDELRRLMTIPGIKERAATSLIAEIGVDMTKFQTAAHLASWSGLKPRNDESNKKIKSRRITHGNVFLRKTIIECAWGASRTRDCFFSRFSFHQTQVRKKNKMKVLVAVARKLLIAVWHVLHDGTDYKDFGANDCDASAVENNG

SEQ ID NO: 301751 - protein, 355 aa, unidentified
MQSKALANQSEVTIGLDIGNRFTEICAIDASGTVIDRDRVRTTLESLKQRLTTSDPARVALEAGGDSPWISRLLRDLGHEVIVANAGAVALIHRSDRKTDRSDAEKLARLARVDPQLLRPIQHRSEETQGHLAIARARDQLVSVRTALINHVRGTCKSLGERPPMCSAEAFATKALRSIPKLLRLALRPLMAQIMYVNKAIAQYDRQIERLSKERYPATQVLRQVRGVGPVTAYCYVLTIEEPSRFARSRQVGAYLGLTPRKRASGDSDPKLSITKAGDPMLRKLLVNAAQYMLSRNGTDCDLRRFGQRICEAGGKTAKKRAVVALARKTAVLLHRLWVNGAVYEPLRNSHPANV

SEQ ID NO: 301752 - protein, 347 aa, unidentified
MNFYNSTHQHYCGIDLHARSLYVCIINQQGETLLHKEISANPDALIELISPYLDDLVLGVECMHCWYWVADFCDDHDIEFILGHALYMKAIHGGKTKNDRVDSFKIAALMRGGNFPLAYVYPRNMRATRDLLRRRTNLVRHGADLKAHVANTTSQYNLPPNKVNLKNVGAREQLNTTFHDPVVQRNINLDMAVLECYHRELSQVEWFLEKQAKKHQPAYFYLLKTIPGIGRILALTILYEIGDIQRFESVQKFASYARLIKCKAESAGKTYGTQGNKIGNAHLKWAFSEAAVLYLRGNSGAQQLLQRFQKRMSKAKALSALAHKLGRAVYFMLKNEKIFDEKRFLTS

SEQ ID NO: 301753 - protein, 422 aa, unidentified
MNESKQFKATIGLDWADQKHDLWIRPADGSKSEHLRLEQSPEALHEWAAKLRKRFDTGQVALGVETSRGPVISALMSYDFIVLFPINPKALKDYRAAFSVSGAKNDRTDAQLIEEFIRLHSEKLKALQPDTELTRKLSGFVQDRRHLVDERTRVVNQVHSKLKTYYPLAETLIGSEMNSLLAAEFLSRWPDLESLMAAQASTLRAFFYKHNSRSAKKMEQRLEAIKTAKALTADPGIIEPARELVLALAGMLKCLQKSVARLEQAIELAMDQHPDAPIFRSLPGAGPALAPRLLVAFGTQRDRFESAQEVAQFYGVAPVVIQSGNSELVRIRRRCPKFGRQTFHENASCVAKTEPWGRAYYEQQRKKHDDKHHQACRALAYKLIRIYFSCWKTRTEYKSNAYLNALQKHGSPLHNRLNRIGE

SEQ ID NO: 301754 - protein, 346 aa, unidentified
MKILSLDLGKYKTVGCDYESESGAHQFKRGFTTPTGLAKMVQEVKPDRVVIEVCSIAGWVCDLLWGLGIEVQVANTSDDAWRWRKVKQKDDRRDALKAARLSAVNQLREVYIPAHEVRQWRALITYRQQVIRRRTKIKNHIRDLLLREGQILGRGSSCWSQVGIAALAAQARPFSECGPAELWRGELQLELEQLKEIQRQVATVTAQLDKIGAGDARVQLLRTVPGVGPRLAEAIVALLDQPQRFRKASQVSGYIGMVPKAMDSGETERRGHITRQGSRLVRSLLVEVAWAGLRHNAWVRQTYQRLSGGKKARKKIAIVAVGRKLLVKCWAMLRDNRSWDWQPQIT

SEQ ID NO: 301755 - protein, 355 aa, unidentified
MKVSTLGIDLAKNVFQLHGVDHEGHTILRKKLTRAKFVQFVIQLEPCLIGMEACSSSHYFARLFTRYGHEVKLIPPQYVKPYVKTNKTDAADAEAICEAVTRPNMRFVQIKTEEQQAVLALHTERGILIRERIACANSLRATLAEFGITIAAGQSHLTRELPAILEDGENGLSPFVRTSIYRQSKHIRELEEQVKQVEEALASWYRTQEACQRMAKIPGVGMLTATYVVAAVGNARQFSTAKQFASWLGLTPKEYSSGGKQQLGGISKRGDGYFRYLLVHGARALTAWVNRNGAVEENSWLQGLLERKHYNVAVVAMAAKTARIMWSMLSHNTEYQPRQLAWHKVSQSDEVLKKS

SEQ ID NO: 301756 - protein, 334 aa, unidentified
MSINDILVVSLDIHKKVHYAHSELKSSAKTIGKDFSFPNSAQGFNTFFSKTKDRLCNCQAQSIAVVLEPTGPYWKPFGYAVVNKDWPLYTVSTEQVYHQRIADDPSASKLDTLDPKTIAKLFRDGKATLARLPQGVFKELQKLHREYLDLTKKLAREKIQLKSILAEVNPEFTSFFRNMFGKIALAVISNAPTPSEIVSLGIENLTDIFKKHGNGIIGRKKLGDPLTIHSPKAMVKLAGLIPKEFQSGSSVRKKAVISRKGNPYLRTIAYYMAISCVKRNHRLSAYYKHLISKGKPKMVALCAVARKILIIIYHVIHNEPYISEKVGIGLNKRK

SEQ ID NO: 301757 - protein, 417 aa, unidentified
MLKIVFRKCAGIDVHSTQITVCIAITDNNDITSYETRTFPTFSENLRECRDWLLSKGITDACMESTGKYWIPVYNILEAKIHCIITHPKYVRTILGKKTDKKDAKWIADMFKHGLVEPSFMPPKDIRELRDLMRYRNKLVNIRTGEKNRFQNSLTVSNIQIANVLTDTFGKTAQSILTSVLENPNITLDDIRPLLRKNIKSTPEEIYKAIDGNFSEYQSSKMSICLSHYDAINSCIDNLEQYILKLAINYSTEINLLLTIPGIREISAIFIIAEIGTNMDVFLDSKHLVSWAGLVPRCNESNNKKKSVKITKAGIYIKPLLVQCALNAIRDSSTDYFKLRYESIKRRRGHKVAIIAIARLLLTCVYNILKTGEVFDAERCNKLIERNFKSHKKTYSKPEDMISYLSSLGYTITLSDN

SEQ ID NO: 301758 - protein, 422 aa, unidentified
MQTLLSQNFTAYVGIDWADAKHDTCLQIAGETQRSFEVIDHKPESIDRWAKSLHQRYGGPIAIAVELDKGPLIAALQKYAFFCLFPINPSTLARHRKTFVPSGAKDDPTDAQWALELLLNHPERFPQLIRQSPAMRSLASLTEHRRGLVDDRVKISNRLVCMLKQYYPLALELFHDHDTLVFCEFLARWSTFETLKRARPASVLKFLHAHNGRHAQLNQERLALIANAMPLTEDPGVVSPSALYVLALVPQLKGIITAIKDFDREIEKTANTLADYRLFKALPGAGQHLAPRLMVAFGERRDRFKDASAVQRYAGIAPVTERSGKKKVVHWRYQCATFLRQTFVEWAAHSINQSVWAEAYYRQQRAKGCSYQAALRALAFKWIRIVYRCWKTSTVYDENVYLQALLRHGSPLISEPDTAKSS

SEQ ID NO: 301759 - protein, 335 aa, unidentified
MQLNYYIGIDISKAKIDMAVISPTYENVLHQVCDNNIASLKACFSKLLKKLKAGVSELLICCEQTGIYGRPLEQVCTAMQLPLWVEPAIKIKYASAGMRGKSDKKDAFRIAEYCLRYADRVKLYKESPEACQKLQTLLGCRETLLLQCNQIEQQLNEASVFDKEKYQLLKSCFETPLKALKRKILQIEKEIARIKESNSEIKANAELIKSIPGIGEQTALHFIVYTKNFTTFHTANHLACYAGVAPFPDESGTIVKRARVSSLANHKLKKLLHLAAMAAIRCKGELRDYYIRKVTEGKNKMLVLNNIRNKLIKRMFVVLKNRTPYQPVKSQEALA

SEQ ID NO: 301760 - protein, 386 aa, unidentified
MPVSVSCHAAVSTQLNAIFVSLELSRSTWVTSLSPGRGERISRHQVKGSDVPALLERFAQLQAKARERTGEQYPLVVIQEAGLDGFWIHRCLVREGIESYVVDAASIAASRRSRRAKTDKLDGEALVRTLLAYKRGEPRVCAMVAVPSVEDEDRRRISRERRALVVERVRHVNRIKGLLFAQGVGDYEPLRADRRARLDELVTGDGRPLPRHVRREIERELDRLEMVVGQIKQVEAERDALLEPRSDAAGEADTGPRLIQLRGIGPEFAGVLHAEAFFRSFSNRRQVAAYAGLAPSPWQSGSMDREQGVSKAGNKRLRTTMIQVAWLWLRHQPDSELTKWYAERVGANGGRARRVMIVAVARKLLIALWQFVSAGVVPAGALLKAA

SEQ ID NO: 301761 - protein, 422 aa, unidentified
MLGIGIDWAEDFHDIALGTQEQGVIHQFRIDHGPAGVSTLIERALRLEPDPAEIRVVLETRHGLLVEALVDAGFTVVPVNPDVVARRRGPARKKDDAEDARICCLLALDRHAALKTLIPHGQIGGELRAIGRDDERAARDQRRLLNRLRADLQTTYPAALQLAGKDLGAPTVLRLLERWPTQPELAQASRAELVEFARLGRHGWPQRFADRVVAALAAPSLPTRDYLVRAKAAGIRLAAVQLLALHEARRGWQARMAELLLGGPRTGRDHTAKDPDPGKAFPGGEIYLSMPGLGDLLAARVAGEIGEHINQFDCPSGLQCYAGSAPVTRRSGKSDFVVARRLAHNHYLGAAVHQWAFCSLLHSVWAREFYDSKIAAGKSHHAALRALSNRWLEILWDCLTKGVLYDEATHVTNRNRALGHAA

SEQ ID NO: 301762 - protein, 375 aa, unidentified
MSKHSEAFVAFDTSKLRNAVAIADGGREGEVRFLGEIDSSMAAITQLVCKLEANYERITFCYEAGPTGYELQRHIKALGHECIVVAPSLIPKKPGDRVKTNRRDAVGLVKLLRAGELTAVWVPDRRHEAMRDLTRARETAVIDLRAKRQQVSAFLLRQGRWYPAGKRTWTKVHMEWLAQQKFEQPERRMAFEEMIFAIRQAQERVARLEQAIRAAVPDWSLAKMVTAFMALRGIDLVSAANLLAELGDLSRFPTAPEVMGYLGMGCSESSTGDTIKRGPITKSGNRRARRTLVECAWSYQHPPRIGVAKQQKVAAAPPKVREIAWKAQSRLNRRYRALIRRGKRKNVAITAVARELAGFVWAVAREVASAERAAK

SEQ ID NO: 301763 - protein, 344 aa, unidentified
MSEVSMIGLDISKHVFHAHGVDGRGRAMFRKRISRGKLLDFFATQPSCTVALEACGGAHHWARQLAQLGHQVRLIPPAYVKPFVKRQKNDAIDAEAICEAAQRPSMRCVAVKSEEQQAAGMVFRTRDLLVRQRTQLINAIRGHLTEYGWVAPKGPSHVAMLAGLIDEEEMANSLPGAARMMFRVMLDLLSGLSRKIADLDKEIARRAREDEVSRRLMTVPGIGPISATAIVALAPPAESFAKGRDFAAWLGLTPLQRSTGGKQKLGAISKMGERTLRRLLIIGSSAVVKQAGKRGAPRGSWLEQMLARKPRMLVTVALANKMARIVWALLVKQETYRAPVAARA

SEQ ID NO: 301764 - protein, 403 aa, unidentified
MRTRKPARPKKMNLPKHLQHINPHAAGIDVGSRSHFVAVPEGSCEQPVREFTSFTDDLHRMADWLLACGVTTVVMESTGIYWIPVFEILESRGLEVRLVNARHVKNVPGRKSDVLDCQWLQRLHSYGLLEGAFRPAEQVCTLRAYVRQRMNLVRYASAHIQHMQKALSQMNLQLANVVSDITGVTGMRIIKAVLAGERDALVLARLRHPRCKNDESTIARSLRGNFRSEHLFSLKQAVDLYEFYQHQIGECDRQILDQLASFDAADGPANGPPANLEQALLRMSGVDLTRIDGIDTNSALKIISEIGTDMSRWKTAKHFASWLGLCPGTKVSGGKVLSAKSKPVANRAAAALRMAAFTLLKSKSALGAYFRRQRSSPEGHYGDRPQTGSTGLQHAETRHRLCR

SEQ ID NO: 301765 - protein, 337 aa, unidentified
MTLFCAIDLHSNNSVAVVLDENDSVLYQERLPNDLPTIERALQPFQNDLYGVAVESTFNWYWLVDGLQAAGHHVMLVNTHAVQQYKGLKHTNDVSDARWLAHLMRLGILPTGYIYPYEQRTLRDLLRQRLFLNRERVMHLLSAQCQIRRCTGLQVACTELKRASTQLLELHQHPNLQFALRCHLAMLQVLNGQIESIERQVTKQTQDNPYLQSLLTVDGIGPILGQTIALETGDIDRFPTVGQFASYCRCVNSQRLSNGKAKGRNNTRNGNKYLSWAFVEAAHSIIRHNKVAHRFYQRKRAQKNGALATKALAHKLARACYYVMRDGVAFDETRLFA

SEQ ID NO: 301766 - protein, 407 aa, unidentified
MKKIAGIDVHKQVLMVVIADAANPELVLQKGKFGTGQAELERLRMVLQQAEVTEVVMESTAQYWRPVWSEWEPHFTLHLAHAQSNRAPKGRKSDWADAKRLVKRFAAEELFLSFVPEPEQRDWRMLTRARYALIRDHVHLQNQIEALLEQASIKLSSVVSDLFGVSGLRILWALSQGQTDPAKLADLADGHLRCGREVLVDALRGHFGEVHRHLLEQALQRLRMLSEQVAALNKLAAKRMQPHASTVQRLIEVPGVGAEAAQAIVAEIGPTAAAFPSSAQLASWMGVCPGTQESAGQNYSGRCAKGNRYIRSVLCQVAHAAVRTKGSHLQTVFRRFLAKLGCYNKAIWAVAHKICKIIWHILHNGARYLESGGALNPKAAQKAIQHHLKALSRLGYVLPSPTPDPQV

SEQ ID NO: 301767 - protein, 349 aa, unidentified
MLLIGCDFHTRFQQIAMLDSTTGEMREHRLEHPEEARRFYSALPSPARVGMEATGPAQWFERMLRECGHELWIGDAAEIRASVVRKQKTDARDALHILDLLVSDRFPRIWIPSPAERDTRQLLRHRGKLVRFRTSVENQLHALAMSEGVCRRKKLWSKAGRNELEGLALGRWASRRRRELLEMLDRLHAGIEELDQAVRNEAASRPAAVRLMQQPGVGPVTALAFVLTIGPVERFRRSKQVVSYLGLNPRESSSGGQQRLGSISKQGNSMLRWLLTEAAQTASQFDPELRRDYLRLQFRRGRGVAKIAIARKLAVRLYWRLREAAQLAPPARMQGSPARALVEETLSRK

SEQ ID NO: 301768 - protein, 358 aa, unidentified
MRIIGVDLHTRQQTIAMLDMKTGEVVEKTLQYEGENVREFYAALPGPVRVGIEATGSMHWFLNLMEELRIDCQVGHPAKIRTAETRKQKHDRRDAALLLKLLAEDRFPSIWMPSTEQRDLRALLLHRYQWVRMRTIVRNSLQAIALSNGLRRGSSLWSQGGQHTIESLPLAPHAAKRRTELQTLHRQLDEQIEKLHEQIREQALQRPGAQLLMTHPGVGPVTALATEVFLGDTSRFGNGKALASYVGMIPSEYSSAGRQRLGALSKQGNSFLRFLWGEAAMHAVRKDPNLKRFYRRKLIQKGLGKARTAAARKLGIRLWIMLRDQIDYEEFCRRGQMRQKNGGAYAGIPESDTGPAEQ

SEQ ID NO: 301769 - protein, 427 aa, unidentified
MNDTHDSRVERFRQFKKRIRGSDTDLIVGIDIAKSKHHAFFGTANGRTVLKGLIVENSASGFEHLVTMVKFYMDRDGFKEMVFGVEPTSVYHKPLAEFLIEHGYLVVYATNEAIKKNRSLLDGRWDKNDTKDCANVADLIAQGKCHYYDLPDHGLRDIRSLLLFRKRLKKQLHSCRVRIRNNLVAQYFPEMDRLWNQAEAENLAIVRWCLSPQRINDLTFEDFYQMVTTHNRGLRQHRRLQKIWEMAPYSIGCRASGASQFEAKLLVDGLDYLKDQIAQVEGAIFTMCRSYEEYEDLLTIPGFGPYVSAVVLAAIGDPHRFDNASQVIKMAGFDLNAHRSGNKSDTTVPVISKKGKADLRYALYQAALIASSLTAHFRAYYHRLLEGRQKEKGIRTKMRVKLATKLLVIAWTLMKKKEPFNPAYVKI

SEQ ID NO: 301770 - protein, 387 aa, unidentified
MAGVVIGVDPAKRSNTIEVLDSAETVLLTARFENTREDYRRMLALVKRWPARKWAVEGATGVGLGLAQRLVADGERVLDVPSKLSTRVRAIDTGHGRKNDPTDAHAVAVVGLRTTGLREVVVDDEAVVMRLLSQRRRDLVRSRTQAVNRLHQALMQLIPAGARKKLTVDKAKTLLATVRARDAAGKARRQLAVDLIDDVAVLDRKLDAVDKRIAEAVKSSTTTLTDIVGVGPVTAAAIIGEVGDVARFTTSNQFASYTGTAPLEVSSGDVVRHRLSRAGNRRLNNALHVIALSNKRHDPRGKAYYQRKLAAGKGKKGSLRCLKRRLSDVVFRTLVEDRARANPGGQMGATLTASAVDQIPKANTSDKPQPGFTAEASPVTRPAKAAS

SEQ ID NO: 301771 - protein, 372 aa, unidentified
MKKNNTDAGSINQERKAWKGPLTIGMDLGDRSSRYCILDGSGEVLKEGSVGTTKPAMTQVFGALKKCRIALEVGTHSPWVSRLLKSLGHEAIVANPRQLKLISQSSRKNDRVDAEMLSRLARTDPKLLRPIQHRGEEAQLDLMMIRARAALVEARTSLVNAVRGFSKATGERLASCDADQMGTEKMAQLPEILQRVLKPLMEQVEVLTSGIRKYDVDIEQIARVKYPETMLLTQVGGVGTLIALTFVLTVDDRDRFRKSRDVGCYVGLKPKSSESGESRPQLGISKEGDVYLRKMLVQGAHFILSARSKDSDLRRWGLKLAERGGKNAKKRAIVAVARKLGVLLHRLWVTGEVYEPLRNSHAAERQSMKVAA

SEQ ID NO: 301772 - protein, 311 aa, unidentified
MPSPLIFGVDVAKDTLQIASAQSPTGLPLVNRRSSISAWLAKLPQGSCIAMEATGRHHLLLAELAHAVGMLVYVLNPCDLRHYARAVGLRGKTDRVDARLIARYLLREQAELHPYVPPTPVQREIDQLLRRRATLVNTKTRLQLSLHGMASYAADLRSMLKQLEALIAKFDQRLRQLATHQAEPQRRVESVLGIGPLLGVALTNTFERVPLHDGDAAVAFVGFDPRAKDSGQFKGRRRLSKRGPAELRRLLFNGARSASKTKVWRPFYERYRARGLSATEATVILARKLLRTAFAIYRHGTTFDPERFAHA

SEQ ID NO: 301773 - protein, 372 aa, unidentified
MKQNIIYVGIDVDDTQYHGSALDKNTGEIITFKCRPTLKGLLNQLDRIHKRFPESAFKLCYEASYIGYTLQRDLVEKGYHCDVVAPTSIPSPRGKQVKTDRIDAAQLVQFYANDLLTLVTIPEPEQEQDRDLIRSRQKLLAQQTELRKHIQALLRRNGRHYKVETQNITHWTLHHYCWLDRTIEASSGSLKVNLELLVRQLKSVNSTLLEYGQQIEALAKTPRYEQLVQALTCYKGIKNLFALTMITEIGDIKRFPHPRQLVSWIGMDIREYSSGGKHNRFGITKHGNRYLRTAFVEANQRGYRTARISKDLKARRKNTAPELINIADRCLRRLNKKGNRLLLAGKHPNKVKVACAREMVGFVWESLNKAAA

SEQ ID NO: 301774 - protein, 323 aa, unidentified
MVNLEKKVVGIDVSSKFLTISFKNAQNQEIVMNIGNLKKDILSCLKKLDQKDYKIVVEATGSYSSKILYYAYSKGFDVYQVNPLTIKKYAEVRNLISKTDDEDAKLIRDFGEKMEIYPFEPKKENLEFLEQELNLLQDLEQEKARFSLKLKSLRQKARLNKEVVKHYETLINNLQKEIEKLLKRLPKLEDEELQENKTLLKSINGIGEKTSLLLLVATNHFKSFEHSKSVSKYFGVAPRMYHSGNKKITIGKCRTTKEYIRSVLFICSWSAVKCNPQCKALYERILEKGKCKKLALIAVCNKLLRQAFGIIKSKNKYQLDFAK

SEQ ID NO: 301775 - protein, 306 aa, unidentified
MREKLRFLGLHVHAETIAVAVAEPDGEVRSLGTIANREDSIRKFVRKLGPTEHLRACYEAGPTGFVLYWQLTQLGVECAVVAPSLVPKKPGDRVKTDRRDALKLARSHRSGDLTAVWVPDEDSEALRDLVRQREAAKQDQLRARHRLTKLLLRTGQRPPQGLKPWTERYMRWLAQVRYSQPAQEVTLMDCLNEVEHMCARVKRLEEAILEVVKLAPRPMQEVIRGLQALRGVAHISAVTIAAELGNISSRFESARKLMGYCGVFPSEDSSGKRIRKGGITKAGNAHLWRIVVESAWSYRHLPRVGE

SEQ ID NO: 301776 - protein, 364 aa, unidentified
MYDSTTTVTVGLDVHARSIRLAVLRADELLEERTLAYDEEAVERVLRRWPVVRCCYEAGPTGFGLQRFLAGRGIDCQVVAPGLVPQRPGERVKTDSRDARKLARLLAGGLLQAIHVPTPELEAARDLVRAREDARLDRMRDRQRLSKFCLRHGLRMPTNSWTVVRRKWLGEQRFEFPAQQQTFDSYVHTVDLVDARIEQLERAIRETADQQPWRQLVARLRCLRGIDTLTALALVAEIGGFDRFHTAEEFMAFVGLVPSEQSSGEKRRQGSITKVGNSHVRRLLVESAWHARRRPKVGYELARRQRGQDALVVERAWRCQQRLYQRWQRMAGRGKPQQKIVVACARELAGFVWAIATEQPLRPT

SEQ ID NO: 301777 - protein, 473 aa, unidentified
MTVVGVSRGDRNRNARLDRLRALVPVSNAIVGIDLADRKQMVVVTDHDSKVLARKTFRCRAWDLGAALDWAAERARAKGWAAVTISCEPTGHRWRVVGQLAADRSMPFVCVQPMVTPWARRAEDLTRDRTDEKDAVLIARLTAQLRCYEPEPADETWARLRHLGARREQLITQTSSQVQQIRDLLECVWPAALEAAQQPFRSNTWLAALTVIVDGDGGDLARTRRLGAARFEHAVRRQIVKRGRQKPCLRIVTKLFCALTDPAGVRAHRAGAMERVQLLLEDWIHAHRRLTDTEDRMLAVLEDLQLTRLVTSITGVSAIGAAAILAQTGDPRRFATARALVKHAGLAPREKLSGASVGRTKLTGQGRPGLRLAAWRAVWGAQRANPVYAARYTHLTTRQENKLKPTQAQTCDRRGDPAALARRDHHRPGMGPGHRDQRHQDSDIRTRRRLTQAKSRCIKLAAGASPTRHPDTR

SEQ ID NO: 301778 - protein, 347 aa, unidentified
MNFYTQQHKHYCGIDLHARAMYVCILDQHGTKLVHKNLPTTPDAFLRLIAPYREDLVVAVECIFTWYWLADLCQQEGIVFVLGHALYMKAIHGGKAKNDKIDAHKIAVLLRGGMIPQAYVYPAEMRATRDLLRRRCHLVRKRAELLAHIQNTNSQYNLPEIGKKLAYKANREGVEEHFPDPSVRKTIEMDVSLIDHYDQLLGEVELYLTRSAKAHDSQTYARLQSVPGIGTILALVILYEIQDIARFPRVQDFVSYCRLVKCAKESKGKRLGTSGKKIGNVHLRWAFAEAAILFLRQNHPGKEYFTKLEHKHGKAKALTVLGHKLARAVYYMLTREQPFDLQRFVSA

SEQ ID NO: 301779 - protein, 416 aa, unidentified
MGEEVYYERCAGIDVHKKLLVVCLRIGRKSEVKEFGTLTHEIREIVAWLKANGCQMVGMESTGSYWKPLYNIFEQEGLPAMVCNAYHIKNVPGRKTDVGDAQWIARCLSQGLLNPSFVPDREQRELRDMTRFRKSQIEERSRNINRLQKFLEGANVKLGSWLSDIEGKSATALLELVIGKPDFTINDVAERMHGRMKATAQELFLSLEGALTPSQREFFTHVMAIIREQTAQIEKTDAMIQRSLSDNYKAAVNALDAIPGIGRVSAEQILAETGVDINHFRNQHALSKWAGVCPGNNESAGKRKSGRTPPGNKTLKSTLTQCAKSAKKNKRSFFSAQYNRLVSHRGKNRATMAVAHSMLIAIYFVLSGQQFEDLGADYYTQFNREKKINSHVRQLSKLGVSIPDDFLRDAILAASG

SEQ ID NO: 301780 - protein, 323 aa, unidentified
MTYIGIDISKDSFVAAFPKVSGYQTQTYPNSVKGIRKFIGSLSITEHHCVMEATGNYGFLLLYLLDRQGIAASMVNPKQIKHFSRMMMTVTKTDPKDACMIAMYGEKMNPPVYKMPSETVMLLKQKKTIIRQLKKQLTASKNLKSSLVVLPFQDKNGMKALDKTISFLASQIESLESELADLASSEFDRQVKLLTSIKGIGITLATALIVATGGFSYFNNAKQVSRFIGICQTYQQSGTSVHIKGGINRNGDASLRSLLYVASWSALRGNTTCKECYARLKANGKPSKVALIAVANKLVRQAFAVIKSDAPYVDGFVSTHQTK

SEQ ID NO: 301781 - protein, 342 aa, unidentified
MTIMMLGIDLGKNSCSVAGLDAAGKVVLLRRMQPKTIVSFASKLPACVIAMEACCGAHHLGRLLANLGHEVRLMSPEYVRPYVKAHKNDDRDAEAIAEAATRPTMRFVQLKSQEQLDVQSLHRVRSRLVGARTNLTNQLRAILLERGTTIAQGRRKLEHVVDMQLADPNFMANSRIRRLVAEMREEWSDLDRRIEALDREFIELARDNEAAHRLVSIPGIGVLSATALVAAVGDGTTFARARDLGAWLGLVPRQHTTGGKPRLLGISKRGNKYLRTLLIHGARAALPSLAQSQTRLGTWLRNLLARRHRNTVVVALANKLARIAWAALRYGVTFEVTKPAAA

SEQ ID NO: 301782 - protein, 338 aa, unidentified
MNTVTLLGIDIGKNTFHLHGQDARGHQVLRKKLNRNQLLPYLAQIPTCKIAMESCGGSQWLARKIKEQGHQVQLIAPQHVKAYVTGNKNDFIDAEAICEAASRPRTRSVQVKTVEQQVLCTEHRLRKSLVSRRTAVINQVHGFLLEFGVIFPAGYAALDRVSGLMQSRELPIRLINAIERMLGDIRQLTCEIKKLDVEIKQNLVQNDAGQRLQSIPGIGPLIASALVADVGDASVFKSSRDFAASLGLVPRQYSTGDETVLLGISKRGDKYLRSLLVQGAHAVLCRVDHRTDALGMWAKNLLARKPLNKVACALANKLARIVWALLTKGGTYSSHLQA

SEQ ID NO: 301783 - protein, 376 aa, unidentified
MEIIYECCAGLDVHQNNVVACVLDGPLTSTRPKKHLKKFDTTTKGLLGLHEWLTEFNCEVVAMESTGIYWKPIWHILQGSFDLVLANPYKIKNIPGQKTDKKDASWIAKLLRIDLIPKSFVPEEPIQDLRELTRLRKMWIESRNREKNRAHKILQTAGIKITSYMTDIFGMSGRNLLNLLISEEEITEEKVEKAVYTSLKFKVPELLEGLTGFFRSHHRFLLKQVLDVIDMYNDKIKELEIKIAECLEPYREYVDNLVTIPDISEDSAAVIISEFGINMNQFSSAEKLASWVGLCPGNNESAGKRRSTRISKGNSYAKKILCQCAYSACRSNHLRFKNYYQRISQNRGGKRATIAVAHLITRIIYYMISRNEVYHE

SEQ ID NO: 301784 - protein, 399 aa, unidentified
MLAVGIDISKSKSVAAILNQDGSMHTSPFEFHHTQPELDAFIKYILNSNQSATILMENTGHYHYPVLKAFQEAGLTVCIVNAYQIKKFGDMDLRKAKTDKKDAVRIARYALEKSYSLVPYTSMEQKYEDLRFLARQYNQRMLTLKTNKVFLLNLLDETMPGITNILPLTTRTPETSLSVLFINRFKSYDRIKKMGKNRFLDAFEKIARKSRNRQTKTYGLAIYEAALRNITTRGENEYILAAQDQCLELVCESQKAADSIILKMQTLAETLPEYAVLRSMAGVGDRLGPLILAEIGDIRRFHSGKALNAYAGNDAPPYQSGTFESHNRHISKRGNAALRKYCFEVMQALKLTRPQDDPVYLFLLKKEQEGKPYNVAKMAGVNKFLRIYYARAMETLKQQ

SEQ ID NO: 301785 - protein, 357 aa, unidentified
MIRSLPAFGTTINSIAIMKKTKNTTPIQAVGIDVSKADLHIALDRNQGLEPILRIKNSEEAIKTFMKTHLGNYEGKIILESTGDFHILAAVLMSEAGLDVRVINPLMSAKYAQSNIRKVKTDKADARLLAKIAIVESDLPHTFACSRQEVNYRKKMKLLDTLSDQITRLQLALKNYQSTLAQLGLPLSQGEAGLHETIKLLKIQKKQLLQELGPNAPTTNPEEAEMRKRLQEVPGVSAHTAAAVTMLMAEGPATTAKQWIAYTGLDISIKESGQWKGRCKISKRGNSVLRRWIYGAAWGAAINNDQFRSYYEHLKNKGRHHFECLMIIARKLLRIMFNLVKNKTKFNPAIPLIPAAA

SEQ ID NO: 301786 - protein, 364 aa, unidentified
MEEPTHIGLDVHKETIAVAVLRLGTVACDERMIPNTPEALRRLFSRYPDGAALRTCYEAGPTGYDTQRLITSLGIACDVIAPSLIPRRSGVRVKTDRTDARNRARLHRAGELVAVRVPTPAEEALRDLVRAREDLKNDRRIARQRIRSFLLRYGKRYPAPGSRWSFRFEVWLRALRFSEPASQAAFEHLLGAYFMRDSQLGAVDAQITELALLEPLAEPVARLRAFRGIDTLTAVTLLTETCDFRRFGSAGSFMAFTGLVPSEHSSGQSRHQGSITKTGNAHLRRVLVEAAWAYRYAPAVRGKLRGRQIGQPPEVVAYSWAAQCRLHGTYRRLAAKKGPNKAVVAVARELSGFVWGAMSDRMAV

SEQ ID NO: 301787 - protein, 461 aa, unidentified
MAPARKTPKQLQLDGLPTIHPNAAGMDIGAELIVVAVPPDRDPEPVRAFRTFTPDLQEMVSWLLACGIDTLAMESTGTYWVAIYELLEAAGIVPYLVNARHVRMVPGRKTDWNDAQWLQKLHALGLLHASFRPDAEIVALRTLVRYRATVVARRSPHVNQMQSALKVMNLQLGEVLTDITGLTGMSIMRAIVAGERDPVTLAQFRAPSCKSSVETIAKALTGTWKDEQIFVLEQTLALYDAYTAQLEVCDRRIEQFLQQMESRGEPNAPLPDLPPSKHDKKAKNEANFNARAQYARIVGVDLVAVLGLSSGHVQTIITEVGTDMSCFPTSKHFCAWLGLAPRNAISGGRVLHSHVAKVANRATLAFRMAAYAVSRSETAVGAYYRSMRARKGPQQAIVATAHKIARIVYHLLKTGEAYVEQSAGEFEEQRRERELRQLTRRASKLGLTLTPAAPTTALPAA

SEQ ID NO: 301788 - protein, 425 aa, unidentified
MRLVYPVCCGVDVHKTFLVATIITTTNNIFPKYRQKRFSTYYSGLLDFKQWLLDNNCKDVCMESTGKYWVPVWNVLEAASIHVVIANPKWVSAVKGNKDDKKDSKWIGDLFRMGMVPGSYIPIKDIRILREFTRYRSKLVSMRSSEKNRFQNAFTVCNLTLDAVVSDMFGVSATAIENYLLGTDTVDPNYCVFLLRGSLKKKASDVVEAVKGFNMTAEQKERVRIIQGHFDDIDKRVAQIDIVISRLVADYEAQISLLSTIPGIDRRLAITIISEIGTDMSQFGSSKRLCRWAGLTPGNNESAGKKKSVRISRAGVYLKPALVEAAHAAIKATQKSPYFRSKYERIMRRRGKKRAIIAIARMMLTAIFAMLQSGEVFNPCDLHKFDMPEVLRKKQTLSSAKDAVKLLVSLGLVPEGSISLEPLAG

SEQ ID NO: 301789 - protein, 370 aa, unidentified
MKEYSEAFIGFDTAKKKHAVAIADVGREGEIRYLGEIDSSPLTIERMIRKLAGRYEKLHFCYEAGPTGYGLYRQVRGLGHHCTIVAPSLIPMKSGERVKTNRRDAVSLARLFRAGELTSVWVPDTVHEAVRDLVRARETASQDLRRKRQQLLSFLLRHGRIFSGRQHWSRAHLRWLAQQKFDHPAQQIVFQDAVDAIDDAAARLRRLDAQVAAIVPSWSMAPVVEAYQAMRGVSFAVAVTFVAEIGDLRRFDNPRQLMAFLGLVPSERSTGERVRRAGLTLAGNKRARRVLIEGAWSYRYPARVSQTLQARLEGLPKAVREIAWKAQIRLCARYRRLNAAGKKLPVVIAAIAREMAAFLWAIARHVAPAA

SEQ ID NO: 301790 - protein, 411 aa, unidentified
MPETIQWWLGIDWGSEKHRLCEVDADGKILHQKWVEHSGSALAEMVDWLRQITGDVPERLAVAIEIPRGAVVETLVENRFQVFSINPKQLDRFRDRYTPAGAKDDQRDAYVLADALRTDRHCFHAVRLDEARLLRLRELSRLEDSLTADLNRTTNQLWQQLHRYFPQPLALCSGANEPWLWDLLEIAPLPAQAAKLSPARLRQILGHRHIRRFDAEQLKTILAATPLRLAPGAADAASEHTLLLLPKLQLLYRQREQVNQRIATLLNELAAPGDDDGQSKEHRDVTILLSLPGVGRKVAATMLSEATQALGDRDYHALRCYAGAAPITWQSGKKKVVIMRHGCNDRLRNALYYWALNTLAWDEKSKRTYREMKGRGMTHGRALRGIADRWLEVLISMLKHKTLYDPKRRAA

SEQ ID NO: 301791 - protein, 335 aa, unidentified
MYYLGIDLHKDESHVAVLDDDAEVVEEIHVPNANLDEVAEEYAGAKAAIEATSNYYTVYDTLDEHLDVVVADPSQTKAIGYAEVKNDRLDAKLLAQLRRAGMIAESYVPPEELRERRALVRGRKRLVEKRTDFKNEVHAVLDQHGITYDWDPFSVNGREILAGEDFSLGVVGDQLMESFLSIIDELTAQIKELEEMIEETAASLEETQLLMTIPGVSFYSSLLITSEISEIDRFDEADQVVSYAGLDPVVRESGDSRTEGSISKRGKADLRWILVQCVQTAVHRCNDPYLGRFYARLKQRKNHQIAIVATARKLLVSIFHMLDRKEVYDPPEVSA

SEQ ID NO: 301792 - protein, 465 aa, unidentified
MRTDKKLWRNRKARKELARRLQSENPGLEVLHPHAAGIDVGNSAHYVAVRPDRDPQPVRRFECFTADLHRLANWLQSCGVKTVALQSTGVYWIPLYDILEERGFEVYLVNARHTKNLPGRKSDVQESQWLLKLHTYGLLNNSFQPASKIRILRTYWRQRLQHVTGAATCVQRMQKALTQMNIQLANVISDLSGVTGQMIVRAIVGGERDPLKLAELSHPRIQASRGEIAKSLEGNWRQELIFVLQQEIEMYDTYQRRVAECDQQLQKQLTSFADTVLPPVNEALPPKKKKKQNKNNPHFHLADELQRITGVDLTRIDGVDVIVAQTLVSEVGLDMSRWKTEAHFASWLGLCPDNRISGDKVLARGTRHVLNRAANALRLGASTLLRSQTYLGAQYRRLRSKLGAPKAITAMAHRLARLVYRMLKHGQHYVDKGAEYYEQRNRQQQIDFLKKKAAQLGLQVTPAHA

SEQ ID NO: 301793 - protein, 350 aa, unidentified
MDATTVAVDVAKTVFEVAIANRQWHIVARHRFNRRQFAHFLATASPTHVVMEACGTAHYWGRCAQRHGHTITLLPPAYVRPYVRRNKTDRTDAEALLEAMRSGQIPSVPVKSVAQQTLVALHRIRAQWMATRTARINALRGLLREQGVLLPAGAGPALRAIPALLEDAETALGNPLCRMIALIYKEVRELEACIDALERELRAVAAVDPVAARLRDIPGIGLLTATALVGTVGHIHAFRRARQFASWLGLTPREYSSGAHRRLGGISKRGDVYLRCLLTHGARAVLRAAHRRTNAHEPLTRLHQWALTVQARRGHNKATIAVANKLGRIVWAVWTRDVQFDPRPALPETA

SEQ ID NO: 301794 - protein, 321 aa, unidentified
MTPPQTFFGIDVSKSQLDVAQLPERRSWSVSNDIEGIRDLVRELAALAPALVVLEATGGYESPVFAALITAKLPAVVVNPRQVRDFARAKNRLAKTDKIDALVLAAFAEAVRPEVRPVPDAALQELSGLLRRRRQLVEMLTAERNRSLMATPTVGKNIRAHVRWLERWLQDIETDLGQAIRSTPAWQERDKLVQSEKGVGPVLSMTLLADLPELGRLNRKEISALVGVAPFNQDSGRFRGKRKVWGGRRNVRAVLYMAALAASRHNPEIKPFYQRLLAAGKPKKVALTACMRKLLIRLNAIVREGQSPEIMPVRLAFQHSC

SEQ ID NO: 301795 - protein, 343 aa, unidentified
MQAVTTIGLDIAKSVFQIHGVDAAGNVIVRRQLKRRYVLPFFQKLPPCVVGIEACASSHHWSRELQALGHTVRLMPPAYVKPYIKRQKNDAADAEAICEAVTRANMRFVATKTPEQQSCLMLHRTRHLFIRQQTSVINAIRAHLAELGIVAPVGRNGVEELLGVVADPSDKRVPEIARACLAALGAQLRVLKAQILEFDRMINAWHRSNETSKRLDEIPGVGPALATALVASVADPKAFRSGRNFSAWIGLVPKQHSSGGKDKLGSISKQGDRYLRSLFTAGALAVIRYAKIHGTKHRPWLTALLARRPTKVAAIALANKIARMAWAMMAKGERYKEPVALAA

SEQ ID NO: 301796 - protein, 418 aa, unidentified
MNEDGNTRGTRRYVALDIHKHYCVIAGVDREGRVLLPAVRVEHADLEGWLKKNLCSTDHVVIESTTNAWHVYDLLAPLAARVVVANPIKVKQIATARVKTDIRDTLILARLLAANLVPEVWVPPVHVRQMRQLLSQRRQLVETHTQILNRMHSVAHRHHLQHERGKRFNEKTTGWQKDKTLSSLEQFQLTLEMENLAYIEKQIERISKEVRKLCHQKPWAESMTYLMQLPGFGVITAMTVLAAIGDIQRFETAKHLASYSGLTPGLEQSGTKHRGKGITKEGRRELRWALVEAAQMAVKSDPLLKMKFQALQKRMHRNQAIVAIARHLLELVWYVLTRRQPYRHFSHERIAYKYLTWAWRMDEEARGGLTRQQFTRYYLMRLGIGHDLTRIALDPKHPRRLASEAEMLAIHPELAQIE

SEQ ID NO: 301797 - protein, 353 aa, unidentified
MEREKRERRFVGIDLGKRDYTMAIIGVDGKARFHCGKTCNKGRQAMYGLLKATDKVALEAGNLAFIVAREIQERVGSTVRVLNAAKLPYIWDAPTKTDKEDALKLAHLVEERRDEKLPIVPLPSDKELARRKVMASYDRTMRHRVKHINTLHAIFVHQGNTEIVKSDLATDSRRREAIEMLSGHEREEAEWILKYLELFEERLKELKKVIHAEAKEDEDMIVLQSIPGIGPLIAYAFVAYVGNGSRFSKGSQVSNYLGFVPRLDYSGTIQRHGHISKRGNGYLRALLVQAAWALVRSEQGGALAERYLYLIGRGASKKKVIVSIGRRMAELMYSVLRSKTMYEPRQWVVPKSA

SEQ ID NO: 301798 - protein, 389 aa, unidentified
MIYLGIDVSKFKHNCYLAVEDNFDKGCHFEIKNSRDGFDFLLKKLSDFDKDKIRIGLESTGHYHLNLSRFLLDLNFNIHFFNPYQTSLYRKADSFRNTKTDKVDAFFIAKLLRATDSNPTHNELYHNYELKSLTRYKSSLKSDRVKLKNAIVSHLDLVFPELSSICNDVFCKYTLEVLKEYPSADKIAKANLTRLSNIIKKASKGSHSKDKAIEIRNAARRSIGIDSSAVSFRLVQDIKSLEFLCKQIKEVNEEIKPLLDCLDSPIMSIPGVGIEIGPSLIAEIGNIEKFENPSKLLAYAGLDPSISQSGTMHSNYSSMSKRGSSYLRDALFIAAFLICQNDETFRIYYEKKKNEGKHHYVALTHVARKLTRVIFHLLNRNQKFVSQTS

SEQ ID NO: 301799 - protein, 372 aa, unidentified
MDQHSRLFIGLDVSKLKISVAVADGERGGEVRFLGDISSDPASVSSLVHKLAKRGAKLHFCYEAGPTGYELYRQLTAMGHDCVVVAPALIPKRPGDRVKTNRRDAVSLARLHRAGELTAVWVPDRGHEAMRDLVRAREAAQEAQKRARQQLQSFLLRHGRVYSGRSSWSLAHRRWLSTLRFEHPAHFIVLQEYCQAIEDAEVRLKRLTDLISETVKSWTMAPVVEAYQALRGVSLIAAVVFVAEIGDIRRFDNPRQLMAFLGLVPSESSTGEHVKRGGITKAGNSRARRMLVEGAWAYRFPARVSRTKQAQLEGLPRSVREIAWKGQLRLCSRYRTMILSGKHKAIAITAIAREMSAFLWAIGQEVQPAHHA

SEQ ID NO: 301800 - protein, 341 aa, unidentified
MEQYVGLDVSMRETSVAVRQNGKRVWRGKCPSDPKALADVIRQRAPDAVRVVLETGPLSTWLYHALKAEALPVVCIDARHAKAALDMAPNKTDANDADGLAQIAEVGFYREVRVKGYAPMLARTLVGARGQLLRISIQLSNQIRGVMKTFGLIVPKGAGRVFEAHARALLGTNEAVARVVLPLLEAWRAVRARAAELDRQLIAAARTSPACRRLMTIPGVGAVTAASFVAAVEAPENFGTSRAVGAWLGLTTRRHQSGEADYDGHISRRGDGHLRALLYEAAAAVLTRTRTDSALRSWGLELKEKVGFKRAAVAVARKLAVIMHAMLKTGAAFDPAPNTTA

SEQ ID NO: 301801 - protein, 457 aa, unidentified
MYRELTPLRQALSAELKANLPPAVPGIDSEHLLQSYLDRLTMYVGCDVADQILTFFAVDAAGEELDHLSAANDPQGFEQIWDWLETLRTQHGLRIVLLAMESTGVYYWACWDFLAQRPNLARVLYNPRTTEHMTEVLSKKVRNELVDAYALTEQVRLGSTPEVVLSEDADLLTARFCSCAARDLAGQINCKKNQLRALLWAYNPAISQVFPGTKFHHQAVYALLQQIVFPDECVDAGGEAITAILEAHCRTAFDSQHAERLVALCRDTLSRPIGREEIRQRIHHLIDDITTCQKRKSYFNKAGYRLIENRPETPLLRDATGAGSSNTLALVSEVGDVQRFKSGEHLASFLGLTTSKHISGTTIFVSKHITKQGSPNGRYAAVNVAQHMSQRVPKYQKMYQRIKNRKPPRKGHFVALVAIARDFVTNVLYDMWRYQRPFFLEVEDYRAYRCKNPRSDE

SEQ ID NO: 301802 - protein, 436 aa, unidentified
MDSVKYIGMDVHKEAICIAVLNSSGKLVMECVIETKAITILDFLKGLRGSLHVTFEEGTWAAWLYDLIKPHVSELVVCNPRRNALLKEGSKSDRIDARKLAELLRSNLLRSVYHGEQGVRKLKELARSYLAISKDLGRVMSRVKAIYRSWGIACSGKQVYAQRYRSEWLDKIQEAGVRRRAEFYYQQLDALRPLRQQVRQELLAEAKKHSAWKLLRTIPFIGPIRAALLIALIQTPHRFRTKRQLWSYSGFGIETHSSAEQRFINGELRRAKKPVSIRGLNRNHNHDLKNLFKGAATVAAAKAGPFQEFYNALVAKGMRPERARLTLARKIASITLIIWKKGAHFEAQHLKPQTACVSQTIRSIPGIFPERWPEFLRHSGSRASLSRLVRPCVPRARSVSYPTLVPLGQPEKAMDHESPMEPWLAPNHLAACWSQN

SEQ ID NO: 301803 - protein, 365 aa, unidentified
MLYLGIDLHRKQLTVSVRNEKGDVILRRQVSTRWERVREFLEWIKAEAEPEGGFVAIVETCGFEDWLIELLKEHGCREVVLIQPEKRSKKKTDQRDAHAMSELLWVNRQRLLAGQKVQGVRRVRLTSVEEQEDRRITAARQRAGRQRTRIINQIKYILRRHNLEWECPTKTFETKKVRKWLREMALSAVERLEMNHLLAQWDLWDQQIKELEKVIGECFYKNATAQILATAPGVSAYSGLALAARIGPIENFPRPRSLANYWGLTPGCRNSGEATDRLGSITKQGSPMARFILGQLVLHVLRKDAWMRAWYGRIKRRRGSKIARVAVMRRLATIFWHMVKHQEPYVAGGPPRLRCQRTEAVQAVA

SEQ ID NO: 301804 - protein, 339 aa, unidentified
MNEVTVIGIDLGKHSFHLHAQDAAGRMVFRKKLSRQQLLRTLANVPSCRVVMEACAGSHWLARQLAGMGHEPRLISPQFVRPFVVGNKNDFGDAQAICEAACRPSMRFVSPRNEAQQTVSAMHRLRERLVRERTATVNQIHGFLLEFGISLPRGAALMSRLPTVLDHETLPPRLVGLVVRLHAQVHYLEEQLRQVEQDLKASLREDDKSRRLLEIPGIGPITASALAVELGDARQFANARQFAASIGLVPRQYSTGGKPTLLGISKRGDRNLRRLLVQCARAVMQHTDSRTDAMSLWVKTLSTRRHSNVVACALANKLARIAWAVLARGTHYQARALTT

SEQ ID NO: 301805 - protein, 345 aa, unidentified
MKQYVGLDVSQDQTSICVVDESGRVLWQGKCASTPEAIAATLSSKAPEAERIGLESGPLSIWLCHGLTALGLPVVCLDARHAQAALKLQLNKSDANDARGLAQIVRTGWYREVAVKSLDGQLVRALITARAQLVAQRVDLGNQIRGLLKPFGLLAGKGEGKTFAEKVRSLVPDGPLHDVVEALLRAWEAINKEVATLSRRLVTEARQDDTVRRLMTAPGVGVLVALTYVSTIGDPARFPHSSSVGAYVGLTPRRFQSGETDYTGKISRCGDRLTRTYLYEAAGIILNRVSRWSTLKAWGTRLARKIGHKKATVAVARKLAVILHRMWRDGTEFRWSNKEAAVTAP

SEQ ID NO: 301806 - protein, 427 aa, unidentified
MNYKQNEKILQLTDKSLIIGVDIAKNKHVARAQDFRGVQFGKPLYFENALEGFQTFIHWMDELAIQQEKSDFIIGMEPTGHYWLPLAYWLMEKQLKVVVVNPAHVKKSKELDDNSPTKNDVKDARVISRLIQDGRYSEPHLPEGIYADLREGMNMYDQLRKDLQAVQGRVHQWIDRYFPEYTTVFANWEGQSSLQVLKMGLFPDEISQKDEMEILSEIRKEVKRGVGLKKVRQLKEAARHSIGIQEGKTMAKLKIQTLMDQYTLLHEKINELWGMIEGLTSRILCVQEMAAIKGVGDVTIAAFLAEVGDLHNYSHPEQIIKLAGLNLKLATSGKWQGKTVITKRGRPKLRALLFKVILPLVNHNPAFKAMHAYFTTRKENPLKKKQSLIALCCKLIRILFKVGKQQVAFSPEKMLRDIPHFRLQSAA

SEQ ID NO: 301807 - protein, 389 aa, unidentified
MKIYVGIDIAKLNHFAAAISSDGEIIIEPFKFTNDADGFQLLVSKLESFDKNSLIIGLESTAHYGDNLVRYLVAEFYQVCVLNPIKTCQMRKNNVRKTKTDKVDTYVIAKTLMMQDNLRFVSFFDLDMMDLKALGRFRQKTIKQRTRLKIQLTTYVDQVFPEIQYFFKSGLHQHAVYALLKEAPSPKEIASMHMTHLANLLKVNSHGHFTKEQAKELRVLAQKSVGANDSAISIQITQTIQQIELLDSQLEKIEAEMTDIMKFNDSVIMTIPGIGYINGGMILGEIGDIHRFSNPNKLLAFAGLDPSVYQSGNFQAKTTRMSKRGSRVLRYALVNAAWNVVRNNATFKAYYDAKRAEGRSHYNALGHCSGKLVRVIWKMLTDNVEFNLK

SEQ ID NO: 301808 - protein, 313 aa, unidentified
MNTLARSVTGGVDTHLEFHVAAALDERGGLLGIERFDTTTRGYKKLLAWLEAFGPVVLVGVEGTSSYGAGLTRHLHAEGIAVVEVDRPNRQRRRRQGKSDPKDAVSAARAALSGDADGAAKTQDGNVEAIRVLRVARTSARSARSQALNQMRSLVSTAPEPIRGELRGLSVHRLLARASTYRPGTGRDVVSLTKFTLRRLARRAIELEDEIKGYDSILEPLVSETAPELVSGLGIGPDSAGALLVAAGDNPHRLRSEAAFAHLCGAAPLDASSGKHQRHRLNRGGDRQANSALWHIVITRDSPPPEVLVDWSA

SEQ ID NO: 301809 - protein, 352 aa, unidentified
MDATTIAVDLAKDVFEIACATSAGRIVERRRLSRPQFHRFLSKLPPGVEVVMEACSSAHYWGRQCQALGLVPVLLPPQYVRPYVRRNKTDRTDAEALVEARRCGGILPVPVKTAEQQALQSLHRVRAQWQTARTARMNVIRGLLREYGLPLRAGAVTIRRAVPRLLADESAALPQVVRQLVEHLLEEIGELEARVRALDHQLRAVADADPVTRRLQTVPGVGPLVATGFLGSVPHIHAFRRGRSFASWLGLTPREAASGTRQWRGGISKRGDVYLRALLTHGARSVLFNALRRARVHADRLTALQRWVVQLANRRGYNKAVSALANKLARIVWAVWRREIDFKAESSLQAAM

SEQ ID NO: 301810 - protein, 460 aa, unidentified
MEDTLAQRNRISPPRSGKTRAALSLTHPNAAGIDIGSASHYVAVPADRDDEPVREFQSFTADLHRLADWLAACGVDTVAMESTGVYWIPLFELLDARGFTVLLVNARHVKNVSGRKSDVLDCQWLQQLMSFGLLRGAFRPADEVCALRALSRQREMLLRSQSRHVQHMQKALTQMNLQLANVISDVVGATGQKILRAIVAGERDGRTLAALKDARIKASTNEIAQSLQGSWRAEHLFALKQALALFDFYATQLAECDAAIEAQLQVLAAHSADPQPGKKRSRSRNAPKFDLRSRLFRMCGVDLTRIDGIDVTTALVVVSEIGTDMSRFPTVKHFTSWLGLCPGTKITGGKLLSGKTKRCANRAAQALRLAAAALRSSKSALGAYFRRMCSHMDKPKAVTAAAHKLARLIYTLLTKGEEYTDQGQAYYEERYRQRVLHNLNRRAQQLGMALVPTAPAVQTA

SEQ ID NO: 301811 - protein, 341 aa, unidentified
MEQATTIGLDIAKHVFQLHGADAAGHVLFRKRITRVRLLSFLAAQTRCVVAMEACAGAHYWAREIAKLGHHVRLIAPAYVKPFIKRQKNDAADAEAICEAAQRPSMRFVPVKTEEQQANGIVFRARDLLVRQRTQCVNALRGHLMEYGYVFPKGITHVETLIALVEDLQSSLPDSVRVILKLLIDTFTALEAQIAVLDAEINQRSKSDPTARRLMTIPGVGPIASTAITALVPAAEGFPAGRDFAAWLGLTPLQKSTGGKQKLGAVSKRGERTIRRLLIIGASAVVQQASRRGAPKGSWLAQMLARKPKMLVTVALANKTARIIWALLVKGGTYRTPAAVA

SEQ ID NO: 301812 - protein, 381 aa, unidentified
MSKSYDYFVGLDVSQRMTSICVIDTDGKKFCEGKCNTRPDDIRGWLSNRVDADRTMKIGLEAGNMSSWLYSGLVKSGFDVVCMETFQAHRFLATYRNKTDRNDARGLAQLVRMGGEDFLRVVSIRSQASQETRVLLAMRDHLVSQKVGLENHISGVLKPFGVIVERGNVTADTFYKRTLEGLAEAERNGVHVRPYVLPSLNLYMEAVEKIAPLTEKIHAIANSIEMVKRFMDIPGIGPVTALSFYAAVDNPQRFQKSSDVAAYFGLTPRQFQSGETNFMGGISRRGDPATRRVLVIAATVLLSGSQEWNSLKAWGVRLAKRIGFSNARIAVARKLAMIMHKIWLNNDRFRPKKLNPQERVKLKQELIVVASKSGRVASAPV

SEQ ID NO: 301813 - protein, 331 aa, unidentified
MDIHKQFTVAVVKNEMGKEIENEKFENSKEGFRKFLSVYKPEETKIVMESTSVWEPIYDMIEEMKYPIKLANPVKTRAIAEARIKTDKVDASTLADLLRANLVSESYIPSKDVRMLRDIIRARKSLVQGKVKIKNKIQSILTKTGLKLPYKTLCKSSMAWIVEEIETKHFNMKSITVSYINMLEHYNFEINKINEKLSEIALKDNRVQLLKTIPGIGNTIALTIIAEIGDINRFESSKKLTSYAGLVPGIRQSGSTLKFGRLIKQSSKDLKTCFIEASWVLVRTKEANRFKWFYGNLSKKKGKQKAICAVARKLCCISYAMLKKNQEFMLL

SEQ ID NO: 301814 - protein, 421 aa, unidentified
MQVVAPRCAGLDVHRSVIAACALISDGRGRARKEIRQFVTTRAGLERLAEWLRELGVTHVGMESTGVYWMPVYAVLEAAGGFELIVVNAQHAKGMKGRKTDVKDAEWLADLVRHGLVSGSFVPPKPIRELRDLTRYRRTLVENQGSERRRLIKLLEAADIKLAGVVSDIFGVSGRAILRALIEGGHSAAEMSQLARGHLRKKRGQLIEALAGELALHQRQLLAMQLARVEADEADIGALDRQIKQRLVPYAAQLELLMTIPGIDWVVAATVIAEIGVDMSAFPSSRHLAAWSGTCPGNNESAGKHKPSGARKGNPYLKTALCNAAIAASRKRGCFYKAKYHRLKSRRGGGRAALAIAHKLLVCTYHMLSDNTSYHELGEDYFDMRDTERATRRYVRRLEDLGFTVILQAHPQTQAQEVNAL

SEQ ID NO: 301815 - protein, 531 aa, unidentified
MLAKRSLKGRSRGGKRFVTTVHKPQGVIQPRVQRVGPEHFGIVSVDCAKCRFKWMLCDFFGKVLIPPATVEHNRPELDFAVTQLEAARREHDLRDLIVAVERTGRYHHIPQRLFAANGCEVRIVHPFTTKQYRQTTDPGIKTDDIDLAAIHRAAAGGCALSQAPVDPRYGELQLLIRQRRDWVRKASLLCCQIREYLHSAYPGYVGCFARPWHGEVMLALVRRFESAAAMHQAGRAGLANALRQQQVRFLQATLDAVLAWAAQAPAADAAAALLRRIALALENDRQRKAQEIQALERDIAARFVHTPYVLLLSFPGVNVVSAADFAGEMGPIENYLTGKAITGRAGLFPSRYQSDRVDRPDGSLVRCANHLLRAAIMNIADNLIGCNHYFRLMSERWKATGRDPRDNHVRVACRFCRIAFQMVAGRQVFRHPGMQHRHYILEKLNVFHREHQTGMPQVMADLLAATGQLPRSAHAEEARPLVEEQARIRAGRCRGPQLLGDILPIVLARLGVLGVQSNPSGDVPSAPPEPA

SEQ ID NO: 301816 - protein, 345 aa, unidentified
MEQISRIGMDTSKHIFQLHGVNTAEEPVLRKKLRRKEMFAFLEKLAPTVIAIEACGASHHCARLLQSFGHSVKLIAPQLVKPYIKRGKNDAADAEALCEAMSRPTMRFVPVKTAEQQAALMLVGVRDRLIRNRTQLTNAIRAYAGEFGFTAAKGKAHLDPLLERIQADESLPALARELFAAQAKEYAQLQAQIDEVDARLMAWHRADECSQRLTKIPGVGPIGAVLLKMKTPEPELFRSGRQFAAWIGLTPKDHSTAGKVRLGVITRAGDEGLRAVLVVGATSVIQHVQRGGRPSPWLTELLKRKSPKLAAVALANKMARIAWKLMVTGENYVAKSAPATLAGAA

SEQ ID NO: 301817 - protein, 351 aa, unidentified
MRTSQNTAETINTIGIDVGKNTFHLVGLDKRGAIVLQQKVTRHQLGRRLSNISRCLIGMETCSGTHFIARQLAALGHDVRLIPAQYVKPFLKGHKNDYRDAEAIAEAVQRPTMHFVSIKTPEQMDLLALHRVRSRLVRQRTGVANQIRGFLLERGITVRQGFMPLRKALPEILSSKSDALSPRMINLIGELMQDWRRLDERIASVSTEIEAMAKRDESCQRLMSVPGVGPIVSSAVVAAIGNGTGFKQGRDFAAWLGLIPKQESTGDRTILGKISKRGNKYVRTLFVQAAHVVLERRPRTARQGLWPWIEQASKRLHRNMLAIALANKLARIAWAVLARGHAYQPRIIANA

SEQ ID NO: 301818 - protein, 411 aa, unidentified
MDKIYDKCCGIDVHKKLIVACFRCGKQQEVCEFGATTRELLELADWLKEGGCEMVAMESTASYWKPLYNILESSDLKAMVVNARHMKAVPGRKTDVKDAEWIADLLQHGLLQPSYIPGKDQRELRELVRYRKSLVGERTRELNRLQKMLEGANIKLSGTVSDINGKSARSILEYLLTGKSIDGSKYDEMYEQKIIAHNLKATKEQIVDDLNGVMSPLQRRMMKELLVHLDELNVHIKNLNDEIDNFMKPEEKQASQAIQDVTGIGNTSAQAIISVIGSDMSRFPTDRHISSWAGLCPGDNESAKKRKSGKTRKGNALLRTTLITCAHAAVKNKKSYFYAQYMRISAHRGPKRAYVAVAHSMLISIYHILKDGVMFKDLGADYYNQFNKERKINAYLKKLKTLGWEAPIVAA

SEQ ID NO: 301819 - protein, 388 aa, unidentified
MAQVNDLSRSLASFEQSGTLVVVLEMSQSSWLAAGVVPGVERRPLKKISPDPAALLRLLERWRDQAVRAGQTVTRAVLAFEAGRDGFWLARWLRARGIETYVVHSTSVAVSREHRRAKTDRLDTEMLIRVFLGWLRGEPRHCKMVAIPTLEEEDAKRPSRERESLVGERTRIINRMKAALIRLGIRGFKPELLKAPERLEAMRTPEGVQIPPNMLDELRRDMARLAWVREQINAIEQARLGRLEQAPARGPDAMVRLLARVVGVGVETADMLVQEVLSRNLRDRRAVARYAGVTGSPDESGAKRRERGLAKAGNARVRRGLMQLAWRFLRFQKESALAQWYYARTEGAAGKRKTTMIVALARKLLIALWRMVTTGEIPAGIALRTVAA

SEQ ID NO: 301820 - protein, 316 aa, unidentified
MNETIVEKFVGIDVSKSTLDVCIEPAVQTLHVAYDESGIKQIVVRLKEVNPTLIVMEATGGLEIRIATELASKGLPVAVVNPRQVRDFAKATGQLAKTDQVDAAVLAAFAKAIRPQARTLKDADTRALDDMVSRRRQLIDMRVQETLRLGTAASKPLEKSLNKHIAWLDKRIGEIDTDLTQRLRKSDVWRTKDDLLRGIPGVGPVTAVTMLAKCPELGMLNRREIAALTGVAPLANDSGKHSGKRFVWGGRADVRAVLYMATVSAIKHNDAIKAFAERLGKAGKPPKVVIVACMRKLLTIMNSMLKNNTPWSPKIA

SEQ ID NO: 301821 - protein, 346 aa, unidentified
MRFYNRQHTYYCGIDLHVKTMYVCILDGVGQVVVHRNVPSTPAAFLEAVGPYREGLVVAVECMFTWYWVADLCAAEDITFVLGHALAMKAIHGGKAKNDRIDSHKIAVLLRGGMLPQAYAYPATMRSTRDLIRRRLHLVRKRGQLLAHIQNTRAQYNLPVFGRKLAYRTNRDGVAEHFPDPSVQKSIAVDLALIDQYDALVIDLDLAIVREAKRHNADAFHRLRSVPGIGKVLALTILYEIHDITRFDRVQEFASYARLVKCKKQSGGKTLGTGGAKMGNVHLKWAFSEAAVLFLRHTEGNKLIARIEKQHGKGKALSILAHKIGRAVFYMLSRGTVFSMEKFLAA

SEQ ID NO: 301822 - protein, 407 aa, unidentified
MYCLSFDIAKGKSVVELFNGRLEPLIVPYEIHHVKEEFVALASKLDISQTEIILESTSMYHYPVVSFFKNLGFVVIILNPIISREHKRNLRKTKTDLIDCVNLAAIYFEKKFNLQKEHLPIYHQMQSISRHIFTLNESMVRYKNRYHQLLELIFPLYEYTLKNEVKFKSDHMTLLKTFPHPELLIHQRVDRLATVLASMHKRMDHRFLKTAQMIKDLAKMTLYSVSKDDVVIDEFVELSNLILDLDDKIMHHQNLLIDLAQTRTDFHKIVSIFGISSYMAALLVAELKDLSSYKTIKKLTAACGLDPTIIQSGKSIDYHGHISKRGNKHARKALFNIVSAIIRISSRVNPQNPILVYYRKKRSENKHHYASVIACTTKLLRIIFTLCKNDLTYSYQYNQNHLVTPIV

SEQ ID NO: 301823 - protein, 361 aa, unidentified
MFTERTSVGLDVHARSVVAAAIDGVTGEVFRARLTPGNEEILGWVRALPGPSVVVYEAGPTGFGLSRAFTAAGIRCEIAAPSKIQRPAGDRVKTDARDAMLLARLLRMDEIVAVAVPSVEQEDARDLVRAREDVRGDLMRSRHRVSKLLLRQGIVYYGGHAWTGTHLAWLRAQHFDTPGLALAFDAEHEAVLAAEARRDRLDEAIGAMAADSQFTPVVRRLGCLRGISTLTAFGLAVEIGDWDRLTGASIGAYLGLVPTESSSGQSRSQGSITKTGNTHARRLLVEAAWHHHKPYRTPGATMRARWELAPAAARARGHAGNRRLHERWLRFTERKKRPVVANVAIARELAGWCWSLAVMDP

SEQ ID NO: 301824 - protein, 310 aa, unidentified
MEQICVGIDVAKDRLDVHVRPSGEAFTVSRDHEGLSALTDRLQALAPALVVMEATGGFEVTVAAALSAARLPLAVVNPRQIRDFARATGRLAKTDALDAAAIAHFGEAIHPEPRPLRDAQAQELAELVGRRRQVIEMLVAERNRRRLLRSNRLRERIDRHLANLNKELTEIERDLDETIRGTPVWREKEELLSSVPGVGSATARSLIADLPELGTLGRKAIAALVGLAPFNRDSGTLRGRRTILGGRACVRTALYMATLVASRHNPVIAGFYARLRAAGKPAKLALTACMRKLLTILNAVLRDRRPWQNA

SEQ ID NO: 301825 - protein, 400 aa, unidentified
MDKRQAQVWAGIDAGKGHHWAAVVDETGATLWSKKIDNDESAILTALGEILDLADEVSWAVDICGTSSALLLALLAAHGQQAVYVPGRTVNRMSGAYHGEAKTDARDAYVIAETARHRRDFAVIGVPAQLAADLALLTAHRADLVADRVRMINRLRDVLTGVFPALERAFDYSSHKGALVLLTGYQTPAAIRRRGRARLTAWLANRSVRGADAVAATALEAAQAQQTALPGEDVAAQIVADLAAQILALDDRLKRIDKQIRETFRSHPQAEIIESLPGMGPILGAEFVVAAGDLAAYADAGHLASAAGLVPVPRDSGRRTGNLHRPKRYSRRLRRVFYMSAQTSIIREGPNRDFYLKKRGEGCKHVQAVIALARRRASVLWALLRDNRVFTPALPVAQQA

SEQ ID NO: 301826 - protein, 338 aa, unidentified
MTYYAGIDVSLESASVCVIDAAGKTIREGKVTSEPTTLTDWLKDVGVSLERVGLEAGPLSQWLYAGLRQEGIAAELLETRHVRRAFEIMPVKTDRKDARGIADLMRLGWFRPVHCKSIDAQETRATLTARKLVQKQVQEVESSLRGILRGFGLKVGKTTPVRFEARVKELVAEHPNLERIAGSLLATRAVLRREFNGFERQLRSMARNDTRARLLMSTPGVGTIVALTYASAIDDPSRFTSSKTVGAHFGLTPKRYQSGQTDYTGRISKLGDASVRAALYEAAHVILTKPLKGCTALKSWAMRIARRAGMNKAKVALARKLAVIMHRMLADGTTFKAA

SEQ ID NO: 301827 - protein, 424 aa, unidentified
MNDTQNKKIMQVTDKTLIVGVDIGSDKHYARAILARGLEVSKKPFEFENTYEGFESFITWSYSLAATNKLTKIFVAVEPTGHYWFNLADYLKKYEVKLVLVAPQHVKHSKEMDDNTQMKNDRKDPLVIAKLVTEGRYMFPYIPEDIYAELRAAFNRRCDLVEALNRNTNRMIRWFDIYFPEYREVYGKANALTGLMVLMRTPLPADILELGVDGICRIWREAKVRAAGINRAQKLIAAAEKSIGRKGGEAVRQELWQLMEEHNLLSKQLGDMMQIITNLLGQIPGADKLLRVPGAGIVTVAGFLSEVGDINRFTDPKQIQKLAGLAIVENSSGKRKGLPGISRRGRKRLRWVLFQLARCMVKSNKEMKAYHQYYTTRKDNPLKKMQSLMAIAGKTTRIFFGILKNGTEYDPAIVMKNLNKAAAA

SEQ ID NO: 301828 - protein, 343 aa, unidentified
MKHYAGLDVSVEETSVCILDETGRICREVKVTSHPEDLRRILQDPIWHFERIGLEAGQLSQWLFDALADAGLPVVCIETRHAKAFLKAQVNKSDRNDARGIAQMMRVNLFRPVHVKPLTSQKRRVLLTARKLLQEKAIAIENDIRGLLLNFGLKVGVVGAAKFEERIHELIRDMPDLAEILERLLDARRRLREHFAGLHRKLLDLARGDAVCRRLMTIPGVGPVVSLAFVATIDTPARFRKSKAVGPVLGLTPVRSQSGNTDRVGRISLCGDGMMRTLLFEAAQTMLRQTTRWSWLKAWAMRVAQRRGSRKAVVALARRLAVIMHRMWSDGTEFRWTREAPVA

SEQ ID NO: 301829 - protein, 410 aa, unidentified
MIKENYIYVGIDLHKETHTAVMIDCYNQKLGEITFPNRPADFPKLVAKVKKCNTDGKTIVFGLENAYGYGRPLAVWLIDKGYFVKDVNTAISHRQAKHRGAMYRKSDSDDAEAIALATLNMLDKLPDACPNDAYWSLGQLVHRRDNIMKQRTRLVNQLHEQLCIAYPSYKSFFNDISRPTALYFWEHYPSKKYLKGKSVEDLRAELVPVSHNKCSTKTCEKILDAVASDKVKNNAYQDARDMVTLSIVSDLQHYDSQLAEVDKMLEQMYKMLGCTLTTIPGVNVITAVKILAEIGDIKRFSNANKLAQFAGIAPLHLSSSGKGKDLATKQGNRRLQATIYFLAIQMVQVSSKGTPRNSVVRAYYEKRKAEGKTSQQALICISRRLISIIYGMLKHGTEYRMPVVESAGEK

SEQ ID NO: 301830 - protein, 418 aa, unidentified
MQTELAGFTAIIGIDWADKKHDVCIQAAESGQRQRYQVQHKADKLDAWAQSLYRHYGGPIAVALELSKGPLVSALQKYDFFVIFPIDPTTLANHRKTFTLSGAKDDPTDAEYALNLLLTHTEHFKALKPQSVEMRTLMTLVEQRRRLMNDRVRLTNRLRNALKQYYPQALEWFDRIDTPLFCDFIKRWPSPAQAKRARKATLEKFFREHNMNRRALLERRMTAIKSAMPLTMDEAVIVPYRLQALTLVAQLEVALASIRIYDDEIATLAPQHPDYGLFSALPGAGPSLAPRLLVAFGEQRERFANAAELQKYAGIAPVTKRSGQSTWIHWRWQCPTFLRQTFVEWAAQTINKSYWAGLYYYQQRAKGCSYQAAVRALAFKWIRILYRCWVTRTPYDEARYLKTLQERGSPLLKMAEVA

SEQ ID NO: 301831 - protein, 355 aa, unidentified
MTVYKQCVGIDISKDTFTACVCSRDQIDQLTYSEVHCFDNDKKGFNQMMRWVRKNTSKQVPILLLMEATGVYYENLAHHLHKINQAVAVVLPNSSKHYFSSLNVKTKTDAVDAKVLSRFGVERAHRSWSPPSAVLLELRNLTRYHVQLLEQRTALLNIKHSKDAAHQVQSFILASNKKLVNNIDQQIEKCKKQIHLLIKSDKQLQSKVDKLLSVKGVGLITVATIIAETLGFEHVRNAKQLVSYAGYDVVQRESGTSIKGKTRISKKGNRYIRNALYFPAMVACRHNPELKSTYLRIIQRKPSKMIGQVAIQRKLLKLMFTLWKNDTTYIEDYQKKVARTKKAQATLDSPVMELL

SEQ ID NO: 301832 - protein, 452 aa, unidentified
MADLIGDDTPVEPFSHPIGDNTPFAPFPLPERTAYFGPHLRNRMILASRPIWRQIGMKNSKSGGYLYQTIGIAACTLRILLVWTAPDAASMCQNEVVADLKQRRPSVDQLIRIGMDTSKNIFQLHGVNAAEQPVLSKKLRRRDMVAFFAKLEPTEIAIEACAASHHWARLLRSFGHRVKLIPPQLVKPYVKRGKNDAADAEALCEAMSRPTMRLVPVKTAEQQAALMLLGVRDRLIRSRTQLANAIRGYAAEFGVTAARGIAHLAPLLERLQTEDGIPDLARELFADQAVEFEQLQARVAAIETKLMAWHRANERSRRLAQIPGVGPIAAAQLVMKTAEPELFRSGRQFAAWMGLTPKDHSTAGKVRLGAITRAGDEVLRSALVVGATAVIQHVRRGHNRNASPWLIELLKRKPPKLAAVALANKIARIAWKLMITGETYHRQSVTPMSGAA

SEQ ID NO: 301833 - protein, 379 aa, unidentified
MSDVIIGMDPHKHSATIEIIDSRERVLDHGRFATTTAGYRAMLAAGRRYPQRRWAIEGCNGIGRHIAQRLVADGEKVIDVPSKLSAQVRVFATGQGRKTDPIDAHSVAVAALRSTGLREVAADDATVALRLLVDRRDTLGRTRTDLVNRLHVFLLDLIPGGAKKDLSARQARALLSTVEPTDLVGRTRHRLAGELVGEIETIDGKIKAADRQLTQLVKSSGSRVQALHGIGPSGAARLIGDIADITRFASRGHFAAWNGTAPLDASSGQQQRHRLSRAGNRRINRVLHIMAVVQLRHDTDGRRYYDRRLAEGKTSMEAMRALKRRLSDVVYKQMIADAKPAGTGPGGHPGSDSDIQRGQPNPDSWHFGTVTSRTRQESP

SEQ ID NO: 301834 - protein, 356 aa, unidentified
MIILAIDLGKFNSMGCFFDTRTQEHRFLNAATTRRYLTAVLTSHEIDLVVMEACGPSGWINDLCHDLGLETLVCSTNENAWKWKNVKRKTDKDDALKLARLAMMGQLTPVHVPSHQVREHRTLIKYRKTLVERINRIKNSIRSLFANRAIEIDSGARAWRTGRELIDSYRKLLADCSMEELWRGQLDLELTQLDALDQQLAEVECRLEAIAKEDTRIQRLQTIPGVGRKTAEVLVTALDNVDRFDNARQVSAYIGLVPRQHQSGQVDRNGRITKRGSRLLRTMLLECAWVSLRYNPWARATYDRIHGGQKSRKKKAAVALARKIAVVAWAMLKHETDWDPKRMGIEPEPQAEPAMT

SEQ ID NO: 301835 - protein, 342 aa, unidentified
MSIYVGMDVHRKRSQVALLDEGGAQLANRNLPNDPAELTALLGQLDPGTPVAFEAAYGWGWLADLLDELGLEPHLVHPSRCKAIASARLKDDKVDARTLAHLLRTDLLPEAWIAPQAVRDQRALLRHRVALVQVATSLRNRVRAVLADRGIRHQQRLWSVAGRAWLASLALPPVARAIIDDCLALIDTIDPIVARLERDLRARTKPDPRVTALQVLPGVGPITAMTLVAEIGDITRFATARKLCAWAGLTPQVRNSDRTVRHGHITKQGSAAVRWVLTEAAQRAKTQSPFARFYAECVHRRGTQIATVAVARKLLARSFHILNQVHATTTTSGEGQPAGCAR

SEQ ID NO: 301836 - protein, 461 aa, unidentified
MPQPNSPSTVESLVGVHPNAAGLDIGAREIWACVPQDRAPESVRMFGTFTPDLNALVDWLIACGVATVAMESTGVYWIPVFEMLEARGLQVFLVNARHIKNVPGRKSDYLDCQWIQKLHALGLLTASFRPDAEMCALRAYLRHRAQLLQHRAPHILQMQRALHQMNLQLTQVLTDVTGVTGLAILRAIVAGERDPLTLARLRNPACKSSEEKIVKALTGNWQPEHLFVLKQSLELYDFYTAQVAACDVTLEQYFTALKPRYEPAAEDLTGPALPRAKPGSKSKNRPAFDARAHLVRLLRIDLVAVEGVSASLAQTLLSEIGTDMTKWPTVKHFASWLGLAPHNDISGGRVLRSRTLKTDNRAGQAFRQAAASVTRSDSAFGAYYRRKKAQIGPQQALVATAHKIARTVYHMLKHRMSYHETGARVYEQHQRERELAHLQRKAAKLGFTLTAHEPVLAPAAT

SEQ ID NO: 301837 - protein, 387 aa, unidentified
MRPISQTTTQKLSHCRRDDTTLYASLELSQATWLVTSLSPGSEKMSKYSTLGGNGAALLGLLRRLQVRAEQITGGPVEIVVIQEAGLDGFWVHRLLNANGIESHVVDPASIAVPRRRRRAKTDSIDGETLLRTLLAWQRGEPRVCAMVVPPTPEQEDRRRTSRERAVLMQERVRHVNRIKGLLAGQGITDYEPLHKDRRAHLAALKTGDGQPLPLRLKAELLREIELIELLIRQIAEVEVERDTVELDAEGNHSPVALLARLKAIGPQIAAVLYLEGLYRSFANRREVAAYAGLVPTPWRSGTIDREQGISKAGNRRLRHIMIELAWLWVRHQPDSALSRWFRARVGTERGRIRRVAIVALARKLLIALWRYVTHGEVPEGAVLKAA

SEQ ID NO: 301838 - protein, 355 aa, unidentified
MDSTKYVGLDVHTEATTVAVMNSAGKLIMESIIETKAITIRQFIQGLRGDLHVTFEEGTWAAWLYDLLKPYVTKVVVCDPRKNTLLKVGNKSDRIDPKKLAELLRNGSLSEVYHGENGVRTLKELARSYLTISKDLGRVMNRVKALYRSWAIPCAGTQVYAPCHRSEWLSKITEAGVRRRAEHYYQQLDALQTLRHEVRKDLLLESRKHNATKLLRQVPCIGPIRAAQLVALMQTPHRFRTKRQLWTYSGLGLETRDSAQYRYVEGQLQRSKKPQQLRGLNSNHNHDLKNIFKGAATMASISAGPFHDFYEALLTKGMQPTMARLTLARKIAAITLIVWKKGVRFDAEHLKQQAA

SEQ ID NO: 301839 - protein, 470 aa, unidentified
MKKSTRTTPLVSKGISKTEPIPKHLEQINQWAAGIDIGATSHFVAVPEGCTTTPVREFKSFTPDLYSLAEWLKECGIQTIAMESRGVYWLPVYELLEEKGFEVKLVDARRVKNVSGRKTDVLDCQWIQQLHTYGLLNGAFRPDNEICALRSYVRQRSMLIRSASRYIQQMQKALTQMNLQLHHVITDITGDTGMRIIRAIINGEREPALLANHRDPRCKSSKEDIEASLTGNYREEHLFTLRQSLELYDYFQEKIQACDSEIEKSLSGFSTNTLGKDFSVEKLKFNKKKVSKNAPAFNLREELYRLTGVDLLAVPGINNISALQLLSEIGFDMTRWKNSKQFSSWLGLCPGNKVSGGKHLSGKTKPSNNKAAATLRMAASTLYRSQTSLGAYLRRLKSRIGPMKAITATAHKLAIIIYNMLRHGVDYIESGQAYYDEKYRERMIKNLKRKATEFGMSLIENQINFAPNIN

SEQ ID NO: 301840 - protein, 357 aa, unidentified
MGHYIGMDIHRKFSTVCHMDEGGQILSERKLWHDEPEQMVRFFRESPAGTQVVMEATVGWMWISDLIEKQGLEVHLAHMAAVKLIADSRLKTDRVDARMLAHLLRTGFLPEAYLAPREVRDLRLQLRHRQGLIKDRTMLKNRVHALLIRHNIQLQQSDIFGAEGKRILRQLPLPAPSAPILQEQLDLIEVYDQRIEQTDRRLREHLAPDERCAWLDSLPGVGEVTATFLLAEIGCIERFAHPKKLVSYAGLCPSTRQSADTIHYGRIRGSGRRLLKWAFVEAAHTAVKKDSYFATIFQRMSRRKTRSEAYVAVARHLAEIAWRLLTEKRPYQPRRTCSQAGPRRPMVARTHASAPIK

SEQ ID NO: 301841 - protein, 350 aa, unidentified
MIIIGADYHPGFQQIAFVDTDTGELQERRLEHREEAETFYRGLAQPGRTVRVGMEASGHARWFERLLAELQFELWIGDAAEIRTKRVRKQKTDRQDAQLILQLLLEERFPRVWVPSGENRDLRQLLWHRHRMVQARTRIMNQLQAVALNEGLRCKKRLWRDSGREQLESFLLAPWASRRRHDLLELLDRLSPTIAELTQAIEQEVEKCPEAQRLRTHPGVGALTALAFVLIIGRTDRFRCGKQIACYLGLVPVEESSGERRRLGHITKQGNSLLRFLLVEAAQVTVRSDQEWRSKFFHLALRRGRKIAKVAMARKLAVRLYWMWRKGWDYEQLKKFGSHAGQPGHRHGVH

SEQ ID NO: 301842 - protein, 405 aa, unidentified
MNAVGIDISKDKSMMAALQPMGYVVLKPKEYLHTGTGLEHLALDILALGEDTRVLMEATGRYHEPVAAVLRKYGVWVSVINPLFIKQSGGGSIRKVKTDKADAMKIAKYALDNWVDLREYIPMENTREQLKLCSRQYNLYMKNVTALQNNLISLTDKAFPGVNELFSSPDRADGSQKWIDFIMTFWHCECISLVSETAFTERYRKWCKRRGYHFSALKSAELYAGSTRHIATPPKNNSTKFLITTAAKELAFAKATLAAMRTEMTRLAQQLPEYETVRAMYGVGEKTAPQLIAEIGDVRRFPRRSSIVGFAGVDPAVDDSGKHISKSNPTTKRGSPHLRKTLYQIVCTYLRKAPANEPVYQFLDKKRAEGKHYFVYMTAAQNKFLRIYYARVKECLNTTDSLYTP

SEQ ID NO: 301843 - protein, 371 aa, unidentified
MGRLAKVESFFKNVNLTSDDEVFVGVDVHKKSYHVALYLNDMPAIDFRMVAEPKQLNKKLQPMARSIKDIVYEAGPTGYGLARDLIKNKLPASVVATSRIPRPVGGDDKTDKLDSRKLAQYAAKGMLRPITIPTRRQEADRQLYRMRHRQALQFTKVKVQIKSFLLMHGIGEPDGLANWTIASVGELRDMRLIDTLKLSLDELLSDYDYFNNRIKGLNKTLADNLDKGVLGRRMDLLKTHPGVGSVVACQFATELFHYRDFGSTRPLYKYLGLSPRVSQSGEKSSRGSINRAANRRLTNNLIQAAWSWVRTDIEAKKCFYRICDNCGGIKQKAIIAMARKMSGHLWAMLMNDRPYDKNKAKCRHDLRKVKK

SEQ ID NO: 301844 - protein, 435 aa, unidentified
MEKKKMLAGKRIAGIDPAKEKHQAAVLNEEGIQMGRSFSFPVSHEGYSEKLWKEIGKILGDYGTEDLAFAVETSCALWKTLTDYLSQRGYTVLMVNPLTTYHSRPLMNHDFSKTDPKDALLIATNARNGNYTVYQNFTPEINKLHRLSITYDKLTKDRQKAIARLRAFMEEVFPEFLNCIPVDIETSLYLLDQYFLPEHFRSLSVHEEELNVRRISNGNHGTETLKKLKEYAQKSIGSSVHGEEDALRLTLDIWIMQVRQSGSGLAAIAKAIIELARKTEYFEILTSLKGISDISDARFIGECRDLSLYAHYKQIEKHAWANLRLMDSGKYHGARRISGIGNKRLLKLIYLMTTQTARFIPEVRIKFIKRQLKKKCYRKNIIASSSQLLKLLMALIKERRPYAFREEAAQELEKLEMKYSEIQNTQKKEAVRKAA

SEQ ID NO: 301845 - protein, 348 aa, unidentified
MEHYAGIDVSLEYSSVCIVDGGGKIVCEGKVASEPAALIGYFQSLGFALSRIGLEAGPLSQWLYAAMKKAGLAVELLETRHVHDAFKAMPVKSDRNDARGIAQLMRLGWFRPVHCKSIAAQEVRAMLTARKLLQSKLRDVENHLRGVLRGFGLKVGHTTARSFAGRIYELVSGQANLETITQALLAVHAVLLREFNGFEKRVRIMARTHVQAKLLMTTPAVGPIVGLTYACAIDDPARFKSSKQTGVHFGLTPKKYQSGQTDYTGRISKIGDAAVREALYQAAHVMLTKPVKGCAQLKSWAMRIARRAGMRKAKVALARKLAVIMHRMLADAKQFDPAATTKPIAAAA

SEQ ID NO: 301846 - protein, 342 aa, unidentified
MAIVAGFDVHRAQITFDALDTETGEVTRGRIDATPAAVGRWAGRFAGRDVDVAVEACTGWLFVCDALEAAGATPHLAEPVETRALRGRKRRPKTDREDARWLRELLADGRLPEAWIPPEHVRQWRSRARLRHTLIGERTQWMQRIQATLFHHGIHGTPDKLRTAEGRAFLERLELPADARERIQIALAMVDALEAQLAPLERELRQLARRQTGCRALMRLYGMGELTSLVTLCELGDVQRLSASRKAVRLAGIDIGVHRSDRRARAGKLTRQGSPQLRWALYEAALSACRPSSPDHADYLALKARGLSHTRASLTIARKLARRSYHVLHQLGPAALDPIPTT

SEQ ID NO: 301847 - protein, 354 aa, unidentified
MNIKYIGMDVHKETISIAVMNGEGKLVMESIIETKAITILQFIQGLRGDLHVTLEEGTWAAWLYDLLKPQVTKLVVCDPRKNALMKEGNKSDKIDARKLADLLRGGYLRSVYHGENGLRTVKELARSYLTISKDLSRVMNRVKALYRSWGILCGGQQVYAPRHRSEWLNKIGEAGVRRRAEFFYQQLDALRALRQAVRRDLLAESRKHGATKLLRQIPYIGPIRAALLIALIQTPYRFRTKRQLWTYSGLAIETRDSAQHRYVAGQLRRSKKPQQVRGLNQNHNHDMKAIFKSAATMASSREGPFNDFYQGLLTKGMKPAMARLTLARKIAAITLIVWKKGAHFDAEQLKPQAA

SEQ ID NO: 301848 - protein, 341 aa, unidentified
MYYVGVDLHKKVITACVMDANRKIVRRGKLYPNEPHRIVEFFESLGACRVVFEATASYRWFAELVEPIAEELVLANPAKLRVIAESTKKTDKLDAQILAEFLARDMIPRSYMPTPRQRQHRALARHRNHLRKRETSVKCKIRHVLADYNADRKDLFSAQCGREYVETVKLDDVDRFRFEDLWSEWESIQERKKKTAAKIRAFAKKAPQAEKEARRLVKTAPGVGVVTAEVVLSELGDVRRFKNAKAVCAYAGLVPTVRQTGGKKSKDGRVTKQGSGLLRWALVEAAWRLKNSSPQWESKYERIMKRSGKKRAIVAVARKLLCVLYAMLRDSRPYDMLASAA

SEQ ID NO: 301849 - protein, 340 aa, unidentified
MRYYIGIDVSLKSTHICVLDDDRSVIWRGVADTHPEMIFDKLKRWRGDIELLGLETGSLTPWLYHGLKRFGLPVVCMDARRASDAVKARTAKTDRADAQALAEMLATGWYSEVYVKSEESHRIKALLGARDQLVRVKRQLYGQIRGLLRPFGIKIASRQGTKRFDEAVRMAINHDDLLYGSISALLEALAAIEMQVAAMDALVRQIVQKSKACWHLMSVPGVGPITALAFVATIEDPDRFASNRDVGPYLGLTPRRYQSGERDITLGISRQGDAMVRHYLYEAANCLLTTVRSRSALKSWGLRLVKRLGAKKARTALARKLAVVLLRLWKSETHFEAGTA

SEQ ID NO: 301850 - protein, 319 aa, unidentified
MAQNDLAVVGIDVAKDKVDVCIRALALRQSCPNTAQGRRKLVGWLRKHQVGKAVMEASGGYEREWRKVLHDADIEVRIVDPKRVRSFAQSAGRLAKNDTIDAEMIAWFAETFNETPSQTHDAAREELAALVKARLALVELKIRLQSQSAHAAPGPVQKAQARVLKSLAAEIEKLELAIAAKVKATPHLAERAKIIESVPGFAETTSATLVAGMPELGQVSDKIAAALVGIAPYDDDSGKRRGERHIKGGRRWVRNAIYMPCLGAATQNNPVIKAFYRRLIAKGKAPKVALVACMRKLICILNVLIARRQKWDTTRYILA

SEQ ID NO: 301851 - protein, 335 aa, unidentified
MTKKAQSELANFAGIDVGAQQLHLVRRSNGVSSKPQAFANTPRERRELAKKLAKVPNLIVCLEATGVYHQDLALALHDAGMRVMVLNPKVAHHFAKVLRRDSKTDPLDADTLAQYPERMPFEPWARPSTAALQLRAFSRRIEAVKDKKRAAKNQLHALRFSPETPKSVLQDALKEIEQLEQRLVTLTKEARTVIASNPTLHGCYELLLSVKGIAQTSAIALLGELAMLPAGLTHKQWVKFAGLYPRHNDSGTSVHKQPRLSKAGNLHLRKGLFMPALSARTHDPHVQAYFEHLVAAGKKPLQAICAVMRKLLHAIHGMFKNNQPFDNTRFYALPA

SEQ ID NO: 301852 - protein, 365 aa, unidentified
MNKNSNPAKTNSQSKEVFAFYIGIDLGDKYSDVCVFDAGGEVSKQFRLAMKEADIRKHFSSIGRSRVAMEAGGQSRWVAEVIESCGHEVYVSNTRKVPYIHDSDDKDDAGDAHKLAELVHFKPRLLHPIQHRSKQAQADLSWIRARQALVDVRTQLINTVRGISKSFGERLGRCSTEAFTAKMAEKIPGAIGGAVAPLLELIDQINKRIRYYDEMEEHIARERYPKYGLLEQVNGVGVHTALSYMLTIGDPERFEKSRAVGCFLGMRPRKRDSGSSQPQLGITKAGDEYLRKTLVNCAHYILGPHGKDSDLRRAGQRICKRGGKNAKKRAVIAVARKLAVLLHRLWVSGEVYEPLRNSKKVAAAA

SEQ ID NO: 301853 - protein, 333 aa, unidentified
MRFYTQQHRYTCGIDLHARSLYVCILDDTGQTRVHKNVKASPEALKKLIADYQDNLVIGVECMFSWYWIADFCAHNGIDFVLGHALYMKSIHGGKAKNDRIDSEKIARLLKGGMFPYAYVYPRAMRSTRDLMRRRIKLTRKRGDLMAHIKNTLSQYNLPAHPENLRYAKHRQPMRSAFPDPSVQRSIDLDLARIQFHDEQLAKLEWYLKRTAKSFDPKAVILLKSIHGVGDILSLVLLYEIHDIERFPRVQDFVSYCRLVKCQRESAGKVKGTGGARIGNPYLRWAFGEAAVLFLRGNPDAQCWLEKKTPKLYLNRCSYPLKLLAPVASIYCS

SEQ ID NO: 301854 - protein, 355 aa, unidentified
MNDTKYIGLDVHQATISVAVLDSAGQLVMEAILETKAETILQFIHGLRGSLHVTFEEGTCAAWLHDLLKPHVAQVLVCDPRKNALIKAGNKSDRIDARKLADLLYLNKLNPVFHGETGNRALKELARSYLALTRDTTRVMNRLKALYRSWAIPCAGQRVYAPRYRSEWLAKISEAGVHRRAEIYYQQLDALRSLREQVRRDLLAEGRKHSAMNLLRQIPSIGPIRAALLIALLQTPHRFRTKRQLWAYCGLALKTSSSGEYRIVEGQLKRSKKFLAIRGLNANHNHDLKNIFKGAATRAAAVPGPFQEFHAALVARGMKPTLARLTLARKIAAITLIVWKKGVRFDAEHLKPQAA

SEQ ID NO: 301855 - protein, 343 aa, unidentified
MQAVTTIGLDIAKSVFQVHGIDAEGNVLIRRQLKRRYVLAFFQKLSPCLVGIEACATSHHWSRELKALGHNVRLMPPAYVKPYVKRQKNDAADAEAICEAVTRANMRFVETKTPEQQSCLMLHRTRQLFIRQQTSVINAIRAHMAEFGTVAPVGRKGVEQLLAIVADGSDQRVPELARACLAALGTQLRTLKAQILEFDRRILAWHRSNETSRRLDAIPGIGPALATALVASVANPKAFRSGRNFSAWIGLVPRQHSSGGKDRLGSISKQGDRYLRSLFTAGALAVIRYAKLHGTQHRPWLTALLARKPTKVAAIALANKIARMAWAMMAKGECYKEPVALAA

SEQ ID NO: 301856 - protein, 351 aa, unidentified
MITIGCDFHTRIQQIAMLDPTTGEIIERCLEHENDDVERFYAALPGPARVGIEATINARWFEKILDRYHHELWVGDAAEIRAAMVRKQKTDSRDAAHILDLLLTNRFPRIWMPSPADRDLRQLLRHRHKLVGYRTSVMNQLHGLAMSQRLCRKRKLWSQVGRRELEALVLDLWASRRRQELLQLLDQLNPWIADLDREVQKQAEGSPEATHLMKQPGVGPVTALCFVLTMGPISRFQRSKQVVSYLGLNPSEESSGGKQRLGSISKQGNSLMRYLLVQAAQTASQSDPELRRFYQRLKFRRGHSAVAKVALARKLAVRLYWKLREAAQPIPPARMQGSSRNPMVDPSPSRS

SEQ ID NO: 301857 - protein, 338 aa, unidentified
MTSKISILAIDLAKGSFQVCAVGCDGTVLYNRALSRNRLATLLGEQPVCVVAMEACATSHHWCRMAQSHGHEVRLVPAAYVKPFVKRQKNDRADAEAIAEAAMRPTMRFVAVKSAETQGHAVAFRTHQCLVRQRTQLINALRGHLAEFGLVAPKGPASLKLLENALADESSDLPDPVREMGAVYLEQIARLTDEIERLANELEDASKTDFELRRLCTIPGIGPVTAGAVAAFAPDLDTFDSGRNFAAWLGLVPRQRSTGGKARFGAVSKMGQTDIRRLLIVGAMSVIRWVVRKGGSSNRWLAALVARKPRMVTAVALANKMARMIWAMSTKQEDYRMA

SEQ ID NO: 301858 - protein, 411 aa, unidentified
MDTLYPRCAGIDVHKGNVVVCVRCCDRPGKVFEEVRTFSTMTADLLALADWLAEHGVTHVAMESTGVYWKPVFNVLEGGVQVILVNAEHIKQVPGRKTDVKDCQWIAQLLQHGLLKASFVPPPPIRALRDLTRQRTRLIQERSAAANRIQKVLEDANIKLASVATDVLGVSGRDMLEALIAGETDPAQLADLARERLREKIPALQLALQGRVTDHHRFLLRMHLDHITHLEELIGRLGARIEESMAPFAEAQERLQTIPGVNQRVAETVVAEIGVNMEQFPSADHLASWAGMCAGNNESAGKRRSGRTTQGDRWLKRILVQAAWAASHTKGTYLAAQYRRLARRRGRKRALVAVGHTLLVIMYHVLKRQTTYAELGPDFLDRLEPERLTRQLVKRLEALGHKVTLEPGQAA

SEQ ID NO: 301859 - protein, 447 aa, unidentified
MRATEPEFQQVHPYAAGIDIGSAEHWVSIPVELDPQPVRRFSCFTADLYAMADWLKQRGITTVAMESTGVYWIPLFQILETSGLEVRLVNAHFVKTVPGRKSDVLDCQWLQKLHSYGLLSGSFRPDNQVCVLRSYIRQRDRLTKSASVHVQRMQKALTEMNLQLHRVVSDITGVTGMAIIRAIIAGERDSQILAALKDPRAKRSIQEISEALKGDYRTEHLFVLKQELNLYDIYQQQIEQCDQQIEQCLLTFESQSDEQLSPRPKGKKPSRHAPAFDLRSHLYRIAGVDFTQIDGLEALTIQIIISEVGLDPSRFPTVKHFTSWLGLCPGSRISGGKVLSSKSRKVINRASHAFRMAAQSLANSRTALGAFYRRIRSRLGAPKAITATAHKLAKIFYLLWTTGKDYVDTGADAYEQQYQQRSLKNLKQRAKQMGFDLVPKEELPQVS

SEQ ID NO: 301860 - protein, 411 aa, unidentified
MNNTLFVGIDISKRSNVATFMNCEGKVVGRLTFSNSGSGADRLVAKILSYYEKEDFEAIRIGLENTSVYSKNLVWFLYEHEALNEHKLSIIPLNALMVANYKKSFLDMDKDDITDSFAMADFIRIRPGLLPFKLDDRQEALKIMTRSRYNYVQALSRMKSQFLTRLFLSFSEMEAGKLFYSIFSKTSLSLLEEAFTLDELAEKPIPELVEFLQEKGGGKFQNPEEIAKVLKKAASSSYRVPAMVRESLNRTMASDMEIMRILENEIHNCDKNIEKLMKSVPAILVSIPGIGPVLAAGIMSEIGDISRFQKQESLGKMAGFKWKRNQSGKKESEDKAAVLSGNKKLRYYLVEAANRVRIHDPVFEAYYRKKYAESKTHAHKRALILTARKLVRVIFYLLKENKLYKPDVGIS

SEQ ID NO: 301861 - protein, 486 aa, unidentified
MATQTSVYERLTGGNRKQRKDLQRRLHSDDPGLGVVHANAAGIDIGNESHFVAVPPARDAEPVREFGSWTADLERMAAWLKSCGIETVAMQSTGVYWFAVYDVLEKNGLKVFLVNARHTKNLPGRKSDVQESQWLMKLHTYGLLRNSFRPPEEIRPIRAVWRLRDRHVEEAARSIQHMQKALTSMNVQLANAISDIGGVSGQAIIRSILAGERDARQLARLRDRRIKASEEEVARSLEGNWQEDQLFELQQAVDEYDFRQKQLTECDRKLQAYLAVLPSRPVPAADTGTVIPPPAAPGKKKRRAKKTGGGNAPQSFDLAAELRRVTGVDAIRIEGVNLMTIQTVVAELGTELGKWWPTEQHFASWLSLSPKRDVSGGKVIRHTHEKSRNPVAGVLRLAATSLLRSDSYLGARYRNLRARLGAPKAIKAMARYLACIIYRLFTKGQAWVDRGAEQFEQKRQTRDLAKLQAQAHSRGLRLVPATDPIA

SEQ ID NO: 301862 - protein, 310 aa, unidentified
MEQVFIGIDVAKDRLDVHVRPSGEAFAVARDGEGVARLVERLRAMAPALIVSEATGGFEQVVAAALGAAGLPVVVVNPRQIRDFARALGRLAKTDRIDAEAIALFAERIRPELRALPDAQARLLGELVARRRQVIEMFVAEGNRARRLESRRLKKRIERHRCVLQDELSEIESELDEAIRGTPIWRETENLLKSVPGVGDALARTLIAELPELGSLDRKKIAALVGLAPFNRDSGTLRGKRTVWGGRATIRAALYMAALVASRFNPVIARFYRRLLAAGKPKKLALTACMRKLLTILNAMIRDHKSWQTA

SEQ ID NO: 301863 - protein, 427 aa, unidentified
MEMTGMGVPAADFAAYIGIDWADEEHDVYILAGDQLVPDEVPLEQYPEAIDHWATQLHKRFGGQPVAVCLEQARGALIYALQKYDFLVLFPINPKQLSCFREALDPSGSKDDPLDARRLAEFLRNFHTQLRPWRPDDEITHSLRLLTESHRKLVDQRTAIGQQLRQALKEFFPLSLEFLGSQQICAPWFLKLLAKFSTLTDLQRASTRTLQRHFPSRRTTVDDAGDPRIARIRQAVPLVTDPALLLAGRMLVRSLVPLLAEVNQAIQRYEKEIEKLMAKHPDAAIVRSFPGAGAALAPRLIAALGTERERLSDASELQELSGIAPVTVQSGKSRKVRRRYACPKFLRQTFHELADHSRLRSTWARAFYDMRRKAGHRHHATLRALAFKWIRIIFRCWKDRTIYNEQTYLQELRNKNSPILKFIPAIP

SEQ ID NO: 301864 - protein, 362 aa, unidentified
MTNFIFAGCDLHEETLVNRIAIGQEPSERKTVGNSRAGREKLIAALKRESNKHGGARIIFGYEASGQGFGLHDQMVEAGIECYVLAPTKMESSVKQKRNKNDDRDAERILKRLRAHKLAGEELPSVWVPDLQTRDDRETVRARQDLGDKLSSVKVQLRSLLQRHGIEKPTGVGKPRTKSHQQWLEQLSCDSQQGIGVRTALGSLLRQVRHLEQEIQQLDEAVDQLSRKPHRQAVVDALDQETGIGRLTATAYAVEVADFTRFRRGRQIGAYWGMTPSSDESGEVNDRKGHITRQGSPRIRKLLCQATWYRVQKDPQVRAIYQRLVIRNPKKKKIAVVACMRRLAVRLWHIGRQAQLAMKEAK

SEQ ID NO: 301865 - protein, 339 aa, unidentified
MFYVGLDVSVARTAVCVIDAAGQVVREQSVASTPEAIAAMVKASGTEVERVGLEAGINSAWIARGLLEAKLPVIVIDATHAAAALKTGFRNKTDKNDARGIADLMRVNKFRAVAVKSVAAQRDRALLTVREQLRRQSLDARNIIWSILQVEGLKPPKLTSPAFQVLVAQALDDEALAPLLRPLVAVVEHIDGQVAGLDKVIAARAKASAACKRLMTVPGIGPLVALTYAAGVDDPARFSDSRTVGAHFGLTPRQFQSGEMNWSGGISRAGDAGVRRALYQAANVLIHHSRGWCALKSWAVRVAKRRGLAKAKVALACKLAVVLHKMWTTGEDYRLKAAT

SEQ ID NO: 301866 - protein, 427 aa, unidentified
MKYNQNEKLKQMDLSTMVVGVDVGSELHYARAFDYRGIELSGVLEISNDAVGFKAFEEWTHKLMNTHAKSRLIVGMEPTGHYWFNFGYSLQEKNTKIVLVNPMHVKRTKEFDDNSPTKNDRKDPKTIAMLVKDGRYLEPYLPEGVYRELRIAMETRERYVKQMTVIDNKVQRWLSIYFPEFKTVFKDWTGQGSILALKNFPTPEKVIEKGVEDIAAIWKAHIKRAVGIKHAVRLVKAAETSVGIREGIRAAEYDLSSLIEEYEFVLKKLETTMKMIEEFISQIPNVEQLLAIKGIGVVTVAGFIAEVGDIGRFEHSKQIQKLAGLNLKENSSGKQKGKTTLSKRGRKRLRRVLFQAVMVLVAKNPEFRQLHLYYTNRSENPLKKKQSLMAISCKVIRVFYALLTKGLIYDGEKMIQDIQRPQQKVAA

SEQ ID NO: 301867 - protein, 415 aa, unidentified
MRVHRNCCGLDVHKKIIAACLIKEDGEGNSIQEKRLFGSMTRELQELAQWLCAARVTAVAMEATGVYWMPVWNVLERYGMQLLLINPEHYKAVRGKKTDLKDGRRIAELLQDGRLEGSYVPAVAIRVLRDLTRYRTKLVQYQSSLSNRIQRLLEQCNIKLAAVASDVLGVSAMAMLRALAEGETDAVRMADMAKKQLRKKIPQLQLALEGCVLPHHRWLLRELIEDLDHVGTKITRIEETIEQQMRPFQSAVDRWVTIPGIKHRLAWTLVAEVGPTVEAFSSAADIVSWAGVCPGNNQTGGKRKSGTTRAGNPWLRRALCEAAWAASKTKGTYLQAQFRRLAALRGPKRALIAVANSILTAGYYMLQRATTYQDLGPDYFDKRNTVRATHRLVKRLEALGHRVILEPRFIADPNT

SEQ ID NO: 301868 - protein, 446 aa, unidentified
MLDTIRAVQQEPEWAAFAAIDWADQQHTWTLVPAGSSLPQRGKVENTPEALHLWATALSVQFGGRPIAVCLEQCRGLLIYALSKYAHLVLFPVHPTTAARYRQTFSPSGAKDDPRDADSLLDLLLHHRDHFPRWQPDTVTNRHLQRLVEQRRLMVHEKTRQSNRLTACLKTFFPQILQWFDDITAPVVADLLKRWPTLEQLQHSHPGTLKKFFLQHNSRSEKRIQARLNAIYQAVSSTHDEAVLESESIAALGFLRLLKTLRENIEILDHRIQQLVATHPDAPIFASLPGAGPATIPRLIVAFGSRRERWTSAYEMQCYSGIAPVKEASGRHEWIHFRRSCPKFLRQTFHEYAFLSTNKSPWAQAYYRHQREKGIAHPAAVRSLAYKWIRIIFRCWKDSQPYDEARYAAAQQKRNSPLAALGIDTKEVAGFQKPALKKSCSKRLTE

SEQ ID NO: 301869 - protein, 371 aa, unidentified
MEHTRFVGLDIHKERISIAVAESGRSGAVEYLGEVANDPGAISKLCDRLGRPGRPLAFCYEAGPCGYGVYRQLTSLGHRCDVVAPSLIPMKPGDRVKTDRRDATMLARLHRAGELTPVWVPDADHEAMRDLIRLRSVVRQIVTRTRQHLQGFLLRHGRKHGQGTAWRMAYRRWLSTLAFQHPAQQIAFQDYVDAVMDAERRLQRVEEQISCLLPEWNLCPVVDAVQAMRGIALINAVVLVAEVGDFTRFSNPRQLMAYFGLVPGEHSSGETIRHTGITKTGNSHARRALVEGAWAYRMKPRIGRHKVDRIEALPKIIRDIGWKAQVRLCARYRRLSARGKNANVVNIAIAREMVGFIWSIACTIQSAPRTA

SEQ ID NO: 301870 - protein, 427 aa, unidentified
MNTEDLIRLKKYRQMKDAIRGSDQHMIVGIDISKDKHDAFLGTATGKTLLKRLIFKNTIDGFNKFLTHVDAIGDQNGLDETIFGMEPTGNYHKPLGSHLIRCNKNVVLVSGVMVKHNRELLDGRWDKHDSKCAANIADLISQGKFLFYESPSTGIEQLRELLSLRRRLKKQEHSVKMRIRNGLITKYFPEMDRFFSRCEAEGLAIVRWCLDPNKIIGMEFSRFLQIVTTRDRGEAQRRRLRKIYDLAVNSVGCPMGEAAEFEAKLLVERLKESRKRIKETADQLEAYSSEFPEYTYLLTIPGFGPYISSLVLAKIGNPYRFENRKQVIKLSGYDLSAIRSGKSSDQAVPVISKRGNSELRYGLYQAAFVASTRNEHFIKYYTRTLKGRERERGIRTKMRVKLAAKMLVIAWTLMKKHQPFNPDSLNK

SEQ ID NO: 301871 - protein, 408 aa, unidentified
MDRLFVGIDVDSRNNSVYLMMPDGSKHSSFSVQNNIGGAQSLSKRVVSALSSSGLCAVSIGIEATGVYGENLMCFLREDGALARFERKLHVLNPRQVSKFKDAYSDLPKNDAVDAFVIADSLRFGRIGACAVYMDDYRYKALQTLTRARFTVVQNLVREKMRFMNHLFMKCSGLAQEDVFSNTFGAASLALIEEFATPDDIVGMGVEDLTAFIVDKGKNRFPDPASVAKAIQAAASGSYRLPKTVNDSVNQVLSISISSMRAMQTQIKVLDKEIDRQFANIPNTLTSIPGIGPVLSAGIIAEVGDINRFGGQAALAKYAGLAWSQHQSGAFEAQNTRLIKSGNRFLKYYLCEAAQCVVRCDTEFRRFYDLKVKEVNKYQHKRALALTARKLVRLVFRLLKDNRLYIPA

SEQ ID NO: 301872 - protein, 419 aa, unidentified
MGRVVIGTDPHKRSATIEVRDEREVLLATGRFGMDKAGYRQLLGYVRQWPARVWAVEGANGASRPLAARLLADGETVWDVPAKLAARVRVFDTGHGRKTDATDAHSIAMVALRTRGLRQLAADEDLAVLRLLADRRDELSRSRTRTLNRLHRLLADLVCGGAPRHLSVLQAKAMLATVRPRDAAGRTRRALAAELIGELEGLDGKLKALKRRLADAVTAAGSGLMDVYGIGPAGAARVLADVGDVARFTDRNRFASWTGTAPIDASSGEQIRHRLSRAGNRRMNHVLYIAAVVQIRHDTPGRAYYRRKLTEGKTPLEALRCLRRRLSDVVYRQLVADSANANQDDRDEAGPGGQRGAADTQSSAAGPTPNTGTSDKPQPGPAPATLPADPAGLEPPPASAATTTRRRDRGVNLQRWVSP

SEQ ID NO: 301873 - protein, 281 aa, unidentified
MQHYVGLDVSVKQTSVCIVDKAGKVIREVKVATKPAEILAVLTEEALAIERIGLEAGPLSQWLYGALAEAGLPVICVEPRHMKAALSAQINKSDRNDARGIAQMMRVGLYRPVHVKTLASQKRRMLLTSRQLLQAKALDIENDLRGTLRNFGLKVGMVGTVKFEARIRELVADHPDLAAIVEPLLIARRVLREQLGVLHRQLLEIVRQDEVCRRLMTTPGVGPVVALTFRATVDVPSRFNNSKAVGAALGLTPRRQQSGEIDRMGGISKSGEPFPGRPHRS

SEQ ID NO: 301874 - protein, 371 aa, unidentified
MKKNNTVTKSPRRKETVRPTGRITIGMDLGDKTSRYCMLDGGGEAVKEDGVNTTKKGLAQTFGSMRRCRIAIEVGTHSPWVSRLLKSLGHEVIVANARQVKLISTSSRKDDRLDAQTLARLARVDPQLLRPIQHRSERAQQHLMRIRVRSALVETRTSLVNTARGLAKSVGERLPSCDTDQMGVERLEALPVQWQQALQPLLKEVESLTEEIKQSDVAIEQIARTEYPETELLRQVSGVGTLIALTFVLTIEDRDRFPRSRDVGCYVGLRPKRSESGESQPQLRITKEGDVYLRKLLVQGAHYILGYRGPDTDLKRWGLKLATRGGKNAKKRAIVAVARKLGILLHRLWVTAEVYEPLRNNQARQRPQVAA

SEQ ID NO: 301875 - protein, 388 aa, unidentified
MIYVGIDIAKLNHFASAISSEGEILIEPFKFTNDADGFHLLASKLESFDKASTIIGLESTAHYGDNLVRYLVAGLYKVCVLNPIKTSQMRKNNIRKTKTDKVDTYVIAKTLMMQDTLRFISFYDLDLMELKALGRFRQKAIKQRTRLKIQLKTYVDQVFPELQYFFKSGLHQKAVYAVLKEAPSPNRIASMHMTHLATLLKTTSHGHFTKEQAKELRVLAQKSVGANDSTLSIQITQCIEQIELLDSQLKKIEEEMTDIMKFNDSVIMTIPGIGYINGGMILGEIGDIHRFSNPNKLLAFAGLDPSVYQSGNFQARRTRMSKRGSRVLRYALVNAAWNVIRNNFTFKSYYETKMDEGRTHYNALGHCSGKLVRIIWKMLTDKVEFNLK

SEQ ID NO: 301876 - protein, 346 aa, unidentified
MTHSTTVGVDLAKNVIQVSVVSGRGKELSNRSFSRRKFAEFLGKQKPSLVAFESCASAHYWARAAQRHGHEARIIPAKAVTPFRQGHKTDSNDALAVAEAACRPNIKEAPMKTAEQRGLQAIQRSRELLIGECTALSNHMRGILLEFGVTIPQGFASLMRALPDILEDGDNELPDLYRPTLHRLYGRMLELREDIEAMTKEVDGLVKQHPVCKRLTAIEGIGPIGALSLYAVLGTGKAFTKSREFSAYLGLTPRQFSSGGKTNIVGISKKVGNRRLRSILIQGARAYVYRMKEPKSLKDHWLKDLIERAGPNRAAVALANKNVRTAWAMVTQGTEYQRRLQLEMAA

SEQ ID NO: 301877 - protein, 389 aa, unidentified
MKIYVGIDIAKLNHFAAAISSDGEILIEPFKFTNDADGFQLLVSKLESFDKNSIIIGLESTAHYGDNLVRYLVAEFYQVCVLNPIKTCQMRKNNVRKTKTDKVDTFVIAKTLMMQDDLRFVSFYDLDMMDLKALGRFRQKTIKQRTRLKIQLTTYVDQVFPEIQYFFKSGLHQNAVYALLKEAPSPKEIASMHMTHLANLLKVNSHGHFTKEQAKELRVLAQKSVGANDSAISIQITQTIQQIELLDSQLEKIEAEMTDIMKFNDSVIMTIPGIGYINGGMILGEIGDIHRFSNPNKLLAFAGLDPSVYQSGNFQAKTTRMSKRGSRVLRYALVNAAWNVVRNNATFKAYYDAKRAEGRSHYNALGHCAGKLVRVIWKMLTDEVEFNLE

SEQ ID NO: 301878 - protein, 421 aa, unidentified
MLAESTDEEQIIARVAALDIGKAELVCCVRVPAEGNPGKRLQEVSTHSTMTRSLTELANHLVELGVQRVVMEATSDYWKPVFYLLEAHGLDPWLVNARDVKHLPGRPKTDVLDAVWLCKVAERQMLRPSFVPPWPIRRLRDLTRYRIDLVGVRTAEKNRVEKLLEDACIKLSVVASDIFGVSGRAMMAALIAGERDPQTLAQLARSRMRTKIGRLEEAFNGHFGEHHRFLLTRMLDRIDGINADIAAVDAQIEVHLAPFSVAARLDEIPGIGPVAAAIIIAEVGVDMSRFPTAGHLCSWAKFSPGISSSAGKTKGNGSTGHGNRYLARVLGEAAVVAGRTDTFLGERYRRIARRRGKKRAIVAVGRSILVIVWHLIANEDTRYTDLGSDHFTKHVNPDAKKRNHIRQLEALGYSVTLTPAA

SEQ ID NO: 301879 - protein, 315 aa, unidentified
MGTQVFVGIDVGKDVLFVAIRPFGENLEVPNREDGIADLVKRLRFLEPVLVVMEATAGYETPVAVAIYRAGIPVVVSNPRLVRSFARATGRLAKTDKIDAGVIAHFAELIRPEPRRLADPDEERLGQLVKRRKQLLRMIVMEKNRVAKGPFEMRKDVQRHLDWLAKELERIDQTLNDFIQSSPLWSAKNELLQSVPGIGKVGAQAIMSDLPELGKLNRKQVAALVGVAPMNRDSGSYKGRRSIWGGRANIRTILYMVAVVASRCNPVIREFYKRLCDAGKPKKVALTACIRRLLAILNAMMRNGTRWGEFKPAVT

SEQ ID NO: 301880 - protein, 406 aa, unidentified
MRLFAGDDWAEDHHDVELMDATGQVLARRRLPEGVAGMARLHELTGQQLGEAGEDAEVVIGIETDRGPWVAALVAAGYTVYAVNPLQASRFRERLGVSGAKSDPGDPHMLADMVRTDSRQLRAVAAGSAEAGGIKVVARTHKTLIWERTRQVQRLRHQLREYLPAALEAFEDLAAPDALELPGKAPDPARAARLTRAQVSAALKRARRRAIADQTTQIIAALRSQQLARPAALTAAYAVTVRALAAVITTLNEQVKALESQVEAHFGQHPDAEIYLSQPGLGRILGARVPGEPGDDPHRYPGGRARKNYAATSPLTRASGKKKTVTARFIHNDRLIDALMAQAFSALNVSPGARALYDDLRARGIEHNDALRRVANRLAGILHGCLKTRTLYDEATAWSHRQNLAA

SEQ ID NO: 301881 - protein, 460 aa, unidentified
MNRKKSADKQKESVQKKDWKALEIVHPDAAGIDVGGSEHWVAVSPDRDPEPVRRFGCFTADLHEMGQWLVQKGVRSVAMQSTGVYWMPVFEVLEQHGLEVYLVNAQHTKNVPGRKSDVQECQWLLKLHAFGLLNNSFQPTDEIRVARTLWRQRGNLVAEASSVIQRMQKALTEMNMQLSNVLSDLSGVSGMKIIGAILHGERDPWTLAALVEPGVKATPEDIAKSLEGNWREELLFVLRQHVELYRIYQEKISDCDLQLRKHLESLSSKRDLKTQPIGPKPKGKKGSRNAPQFDLRTELYRITGIDWTQINGIDVLTAQTVIAEAGADLSAFPSEKQFASWLGLCPTNEQSGGKILNRRTRKVVNRATVAFRNAALTLLRSQSYLGAQYRRLRTRLGAPKAITAMARKLACLFYRLIKHGQPYVDKGTEYYEGRYREQQIRSLTKRAQKLGLQLVIPTTA

SEQ ID NO: 301882 - protein, 352 aa, unidentified
MEKNNKLDFGGQHIYVGMDVHKKSWSVSIHTEQFEHKPFTQPPEVEKLTYYLERTFPGATYHTVYEAGFSGFWLHDQLRAKGIDCMVVNPADVPTKDKERAGKRDRVDCRKLARGLRNGEINGIYVPPRVKVEDRTLVRTRQSMVRKQTRCKNQITSILFFYGIVIPEEGRWSRRFINWIESIRMESASGDFALKAHLEELKHLRQIIANLNKAILSLSRTEEYMADVLLLKSVPGISTLTAMILLTELADLSRFSSLDKLASYAGLVPDIRSSGETEYSTGITFRRNAALRALLIESSWVAVRKDPALTMAFNKLSARMKKTKAIVHIARKLLNRIRFVLKNRQEYVPAIV

SEQ ID NO: 301883 - protein, 411 aa, unidentified
MERVYDKCCGIDVHKKIIVACFKKGNEQEVRNFGATTRELLELADWLKEGGCEMVAMESTASYWKPLYNIFESSELNAIVVNARHMKAVPGRKTDAKDAEWIADLLQHGLLKASYIPDRAQRELRELVRYRKSLVGERNRELNRLQKMLEGANIKISGTITDINGKSARNILEYILSGKQIDSVEYDILYKKKVISHNLKATKEQIIDDLNGVMSDVQRKMMRILLAHLDELNAHIKELDDDIDNSMKPDEKKAVTLLQDIPGIADTSAKGIISVIGTDMERFPTNAHIASWAGLCPGNNESAQKRKSGKTRKGNALLRETLILCAHSAVKNKNSYFYAQFARISAHRGKKRAYVAVAHSMLIAIYHILKDGVVFKDLGADYYNQFNRERKINAYLKKLKALGWEAPVVAT

SEQ ID NO: 301884 - protein, 325 aa, unidentified
MTPSSLPDSSYFVGIDVAKAKLDLARSDTGEILVLTNDFDGIRWIVDSLRLTAPKMIVIESTGGLERPLLEALLDADLPVALVNPRNVRHFAIGMGILAKTDPIDARVLMEFAKLASPRLAEKRSANQVELDALITCRRQLTQTRAIQTNRRGTTTSKAALKTIDAVLKALTREIQRLDKKIRALIESDDDFDSTDKLLRSVPGVGAVVSATLLAELKELGFTNRRRIGALVGVAPYNHDSGKMKGQRSIFGGRPSVRSALYMAAVTAIRFNPVIRSFAQRLEKQGNAKKVQIVACMHKLLAFLNVMVRDRLNWNELKVVQALEN

SEQ ID NO: 301885 - protein, 375 aa, unidentified
MGEITRALIARVGVDLAKRVIQVHAVDAAGRRVVSRAFKREQFIAWCVQLPVGCLVAMEACSSAHHWARKLRALGLQARLIPANFVSPYRMQGKSGKNDANDAAAICEAASRPNMRFVPIKSCEQQGVMSLHRVREGLKEERTGCINRIRGVLAEFGLVFGQGPKLLRAELADVIEDASNELSAMARRVLQRAFDHWRELDEHMRWCDRQVGQHVRTSAAAQRAAKITGIGELGASALTAGVGDFNQFKGGHQFGAWLGIVPSQNSSGGKTSLGRITKRGDDYLRTLLIQGAKAAVMSAGKRDDPISRWLVQLVARVGWQKACVAMANKNARILWAVMTRDQGFDPRHVSEKPQAKKPANERIAAVAPPQAGCPA

SEQ ID NO: 301886 - protein, 347 aa, unidentified
MRFYSQQHRHTCGVDLHGRNLYLCILDEQGQIRLHRKLRCDPKLFLEAIAPFRDDLVIGAECIFCWYWLADLCADEGIPFVLGHALYMKAIHGGKAKNDKIDSRKIAILLRSGAFPYAYVYPRQMRATRDLLRRRLHFARKRAELLTHVQNTFTQYNLPKPAGRLTPSAAREGLAELFDDLAVRASIRADLSLLDHYDDLIPQLEHTALHLARVHDPDTLRLLMSIHGVGKILGLTLLYEIGDITRFPSAQDFSSYGRLIKCTKESDGKPLGVSGAKIGNAHIKWAFSEAAVCFLLRNPPGQVYLNRLRKKHPKGKALSVLAAKLGRATYFMLKQQTTFDMNRFLSH

SEQ ID NO: 301887 - protein, 342 aa, unidentified
MKGYHYVGLDVHKKTIAYCVKQADGTVLNHGTINATRKDLYCFADSLPRPWAVAMEATLFTGWIYDFLRPHADDLKVGHSYMLRAICASKKKNDRLDAEKLADALRCNWFPEAYMPGENIRQLRIALRYRNLLVREHVRMKNKTAGLLMEMGAEYNKQKLHGRKYFNALLDDIDYIPDSIKALTRTSHESARYFDALQKRIIAELTANPLLNERVEKLMTISGVGQITALTWALEVDDPHRFANIKKAVSYCGLCSGQDESAGKARRSPLSKQRNKHLQTILIEAAKLAPQWNPALARVRQKAIDSGANKNEATILVARKLVAYMLAVDKSGKEFIEREITD

SEQ ID NO: 301888 - protein, 277 aa, unidentified
MLYVGLDVHTNRSSLCILNDAGAVVNRQEVKGGWPKLLEVVKGIAQPFSLCYEASCGYGYLYDRIRPLAARVAVAHPGKLRLIYRSKRKNDRFDAEKLGKLLLLEMVPQVHVPKVDVRNWRSLITWRQRLIEKRVSCKNLIRSALREMGVEPLPGGGRSLWTRKSIAWLKQLSEAQLGPVGLLRVQMTLDELASLKQRISRVEKELAKIADTHPGVALLRTIPGVGIRTAEAFCAWVDDISRFTRTGQLGAYFGLVPCQDSSAEKNRLGHITREGPR

SEQ ID NO: 301889 - protein, 356 aa, unidentified
MNHNQNLDFNNTNLYIGIDVHKKNWEVAIRCNGIQLKRFNMEASVKHLAAFLNKTYPKANFIAVYEAGFCGFWICRQLCDLGIHCTVVNPADVPTSQKEKVNKNDRIDAGKLSRELENNSLDEIYVPDPFHEQLRSLMRFRKQLAKERTRTKNRIKALLFYYGYTIPAEFADRNWSGHFINWLKQLPFQYEAGKQTLDRLIKMLEYIRLAIKDTLKALREMARDPLINPTIKALISVPGVAFITAMTFYTEIMDISRFSNFDKLACFVGLVPTRKGSGEIEYDRGITFRKNKILRPLLIEAAWVATAADPALTMKFNQLCKTMTRQKAIIRIAKKLLSRMRYVWINQKEYVKAVIK

SEQ ID NO: 301890 - protein, 389 aa, unidentified
MLHDHLSDGPAAIRTQFGAIFVSLELSRSNWLVTSLSPGKGEKMSKHSITAGDVAGLLKLFADLKRKALARTGQSYPIITIQEAGLDGFWLHRALQQEGIESHVVDPASIATPRRHRRAKTDRLDGETLLRALLAYKRGEPRVCAMVVAPSPEEEDRRRLCRERRTLIDERIAHVNRIKGLLFAQGISGYAPLRRDRRARLEALRTGDGRALPSYLKTQISRELDRLELLLDQIKAVEAEQDALLAAAGKGAGEQAAPDPVTMLLALKGMGANFTAVLWSEAFYRQFSNRRQLAAYAGLAPTPWRSGSIEQEQGVSKAGNPRLRSTMIQLAWLWLRHQGQSALARWFKAHSQRGRKTAIVALARKLLVALWKYVTAGVVIEGAVMKSAA

SEQ ID NO: 301891 - protein, 360 aa, unidentified
MLYLGIDVHRKQLTVSVRNEAGEVIVRRQVSTEWPRVRAFFTELTERARPEGGYVAMLEVCGFHDWVLKMLTEYGCRETVVVQPTTRTKKKTDRRDAQALSETLWVNRQRLAAGQPIRGLRRIQPPSAVDAENRQLTTLRARMKQVRTRTINKVHHILLKHNLHQHCPTKGLATKGARAWLTALKLPELDRLEMDLLLAQWKLWNHQLEKVEAQIARRQKQSPTATLIATVPGAGAFGSLALAARMDNIERFPRPGSLANYWGLVPSVRNSGETTDRLGSITKEGSRLARFVLAQMVLHVLRRDPTMKQWYQRIKRRRGAKIARVAVMRRLATILWHMVKHQEPYQVGGLPRRQLSAAAG

SEQ ID NO: 301892 - protein, 456 aa, unidentified
MAARKTKTKVKVKAGKAQPALSITHPNAAGIDIGSASHYVAVPPDRDDEPVREFACFTADLNALADWLVACRVDTVAMESTGVYWIPLFELLDARGFKVFLVNARHVRNVSGRKSDVLDCQWLQQLMTYGLLSGSFRPDDQICVLRSLWRQRDSLLKNQARSVQHMQKALTQMNIQLANVISDVAGETGQKILRAILAGERDGHALAALKNGHIEASVEEIAKSLQGNWRSEHLFALKQAMASFDFTGTQLIEVDREIEVQLKSLETHDGKPGKPKRRGRSRNAPKFDLRTHLFRVCGVDLTRIDGIDVTTAMAVISETGADMSRFPDAGHFASWMGLCPGTKITGGKVMSGRTKRCANRAAQALRMAAAALRTSQSALGAYFRRMCARMDKPKAITAAAHKLARLIYAMLTKGEEYVDQGQEYYEKRYRDSMVKNLTQRAAKLGFTVVPAENACV

SEQ ID NO: 301893 - protein, 456 aa, unidentified
MPGSKTTRGKSAGRLLTINPDAAGIDIGATFHVVAVPPDRDERPVRTFRTFSSDLHQLADWLKEVGVKTVAMESTGVYWIPAFEVLEAHGFEVLLVNARHVKNVPGRKTDVTDAQWLQQLHQHGLLRGSFRPRDGVVRLRAYLRHRERLVDYAASHIQHMQKALMQMNVQLHHVVTDITGVTGMRIIRAIVSGNQRPEQLAEFRDVRCSASKETIREALTGNYRPEHVFALRHALELYDVHQAKIAECDVEIAAVLRTLNEERPAPEEPLPAVRHAKGRNEPKFDARPALYTLLGADLTQIHGFGPYTVLRLVAECGDDMRKWPTAKNFTSWLTLAPGNKISGGRLLSSKTRRSASRAAALLRIAAVNIGRTQTALGAFYRRLAARIGKAKAVTATARKLAILFYRALRFGMTYADPGASYYEERHRQRVIHNLHRRARELGFSLVANAAADSGVS

SEQ ID NO: 301894 - protein, 343 aa, unidentified
MHIKRIGLDLAKYVFEVHAVDAQDEVVLRKTLRRDSVAQFFAELEPCIVGMEACCGSHYWARVLTDLGHEVRLISPQFVKPYVKYNKNDRNDAEAICEAIGRPSMRFVPPKSAEQLEIQAVHRIRQRVVANRTRLVNQVRGLLGEHGVVVARDITRIRRALGEIADSHESAFGDIFIDMLRDMRDELAELDIRLAGYNRRIKNLFRSNEMCQRIGQIEGVGPITATALVAAIGDKSCFKNGRQFAAWLGLVPKQHSSGGKARLLGISKRGDRYLRTLLIHGARAVLGKAAGKTDARSQWIGRMRERRHPNVVAVAIANKNARIIWSLLSRDQEYRPDHKMSFT

SEQ ID NO: 301895 - protein, 426 aa, unidentified
MSRVVIGMDPHKRTATIEIMASDETVAGRGRYTTDAAGYRSMLAEARRWPERMWAIEGCQGIGRHIANRLLADGEQVVDVPPKLSARTRVFATGQGRKTDVTDAHSVALAATRMQGLRPVVDDAQLAVLRILADRRRSLGEDHTRMVCQLHQLLLELIPGGAKKALSAAQAKALLARVRPRDAAGKARRRVAAELISDLERIYQRKKDANKELNALLKATATTLTDLNGIGPSGAARLLVEVADVTRFPGKAHFVSWNGTAPIDASSGDQVRHRLSRAGNRQINRVLHIMAVVQLRHRDSEGRAYYDRKVAAGKTPMEAMRALKRRLSDIVYRQMITDAQAVVTGPGGHVGAATGSSAAGSNPSTGASEKSLPGPAIHEPMPASRPILQVAPGASGPRRTAAVVKRRLLDDGEDRRTLARREQPPS

SEQ ID NO: 301896 - protein, 298 aa, unidentified
MGSRWLDVCGPDDRPFRVANSAAGIDELLHKISEDSVVVLEATGVYYRGLAFAAAQRGISVRVVNPWQVRAFATSRLARVKTDRTDARLIRDFGERMLPDLRRWWPSPPGLDRVQLVVRLADGLLRHRVAAGNRAHAAHWTSTEVAGVARELEDVLNEERAKLMARAVELAYGDELVGEWLRRVAQLPGFGEVSGLRFLAYAGDLRRFPNARAFAAYTGLAPRVDQSGTGEGTARISRIGSRALRGVLYWVAVSATRSNSPQGAHYRRMVANGKPKKVALCALANKLARAGWAVCAGD

SEQ ID NO: 301897 - protein, 406 aa, unidentified
MNENLSLPQRYIGLDVHKHYLVAVGVTPDRQRVFGPQRVELSRLAPWIAKTLTAQDAVVLEMTGNSYQLYDELLCHVQSVTVVHPPHVKLITAMPVMNDKIAAARLAELHAAGLLAGIWIPPQPVRELRALIAQRSKMVKLATQAKNRLHAVLHRYHLTPPEGDLFSAAQQAWWEHLALAPVEQVRIACDLSTLECARTQSAQIETLLTELAAQDERVVYLVQLPGVGVLTALTLLAAIGDITRFPTAPHLVGYAGMGSRLHDSGQTTRRGRLTKDGRRDLRCAAVEAAHSAARTHPHWQAELARLEPRLGYNKAIVAIARKLLVSVWHVLTHQCVDRFAEPELLARKLFAFAETLTVAHRPEHQTAAAYTHQLLVRLGCGADLATFRRGAKTIRLLPPDPDTPEP

SEQ ID NO: 301898 - protein, 428 aa, unidentified
MAEDTTLTSQTWLVAIDIGKAFHAVLVEGGDGKRQQFRMANHVEDYDRLVVFLRGLPGPARIALEPTGDFHRTLAHRLLREGFSVVSVSSVAGARYREALFNSWDKNDPKDAHVILQLLKHGLVQHYHDPLLAGDHDLQELAKTYHQIVLARKRLADSLLNHYLPLYFPEMGRYWESTRVEWFVAFLEQFPTPAAVQALPKEAFVRAAWSVVGRKVNKQAKLEELYELAQRSIALPVAVDSVAIETFRLQLAQLRRLAELRQTLEARAHALLKDRADFQRLCSLPGVAAILALVILAEGGDLRRFPHHRQFLKYCGLDLAKCQSGQFRGRERLSKRGNARLRMAFWMAAQRAVRMNENSFRDKYERYTRHDSGNPDVRRKALTAVAAKMARVAYAVVKHDQPYRGYHEQALPSGSIPLKRAVGARATP

SEQ ID NO: 301899 - protein, 470 aa, unidentified
MGRKKNTTMPIINPDCAGIDVGSKTHHVAIGQSLSDVREFGVYAEDLTALANWLKSKGITSVAMESTGMYWQNLFIELVNAGIHVILTAGKFTKNINRKKTDVLDCQWIQKMHALGLLPSSFLPDETTERLRTLCRHRDNMVTQKVNCTHKMSKFLKWLNFRLDVVVRDITGLTGRTIIADICNGNLDPHSLAKHRHGNCRKSEEEIAKALVSNENPEYLFGLKQEFARFNFVLKLIEECDAEIVNLLQVIITSDPNPIDDMPCKKPDKRVNKNTIKGIDLNITAYQFFGGVDLLTIPGVSYSTVLTFMSEIGRDGIRKFDTAKRFASWLRLAPNNKISGGKTLSRHIPKGSNRLKIALRNAANAVGNLKESDLGRFFKKIAYRKGRQAAITATARKIAVILWHMLTKKEPYKPKTEYVFLDEKRRAIARLRKKISKFGIDPNDLGLFTKPEYKLAHIKRVNVNNDLGKR

SEQ ID NO: 301900 - protein, 355 aa, unidentified
MSVPFSHSYFSLDSSLGVGSLFLRLISHDKNCCDPQLDTNMVTGIDCSKDYFDIAVLREGKAAFKSRFSNNVKGFGDMLPHILGTHVAMEATGPYYFQLARFIHNSGIRVSAVNPLVIRRFAQMRMSRAKTDKKDAMVIAEFVQMASPKLWEPPAGAIQRIRNLETYLEGLKQRRHMLSSQLHAFEASGTIEETLREEIREELEIHDKRIKEKERQIEGLISENYAEMASNIRSIPGIGPRSVSMLIIATGGFGMFDNYRQVISYFGLAPRIYESGTSVKGKGHICKMGMGQIRKVLYMAATSAIKCNKACKDLYERLRAKGKPYRVALIAAVNKLIKQVFAIAKSGEPYKCQFG

SEQ ID NO: 301901 - protein, 420 aa, unidentified
MEQATPFAALIGIDWSDAKHDICLVETATGTQELSVVKHTPESLNEWARALRSRFGGAPVAVCLEQSRGSLIYALLKYDFLTLYPINPQMLSRFREAFTPSRAKDDPTDAEYLVELLIHHRERLKAWMPDDERTRTLQLLVEHRRRLVGDQTRISNRLTALLKGYFPQVLQWFPDIRTPMVSDFLLRWSSLDALHGVRRTTLEKFFREHKSQRTETIEKRLAAIKSAVGLTTDVAVINSSVVMVKALASQMKTTLAAVKEFDREIEALCCAHEDFELFSSLPGAGKVYASRLLTAMGSNRERWATASELLSFSGVAPVIERSGKSSWTRWRYFCPKFTRQAFVEYAGESIRHSEWAQAFYLSQKAKGKSHQAAVRALAYKWIRIIWKCWQTREKYSEARYVECLRKKGSKLVAESVSVEA

SEQ ID NO: 301902 - protein, 358 aa, unidentified
MSTIQIGVDLAKSVFEVAVSGEPGVVQSRHRLTRTAFPRFLAGHPPAEVLLEACGSAHHWGREAQRLGHRVRLLHPADVARYRDGNKTDRADAKALLEAVRNQGLTPVPVKSVEQQAIVALHRVRAGYLRTRTARINALRGHLRELGYAIPIGARHVTVDARMALADETVPGFLRQVLLDLIEEIRSLEAKAESVRTSLSSLIPQMPDAQRLLTVPGVGVLTATALVAFVGDIHRFKSGRHFASWLGLTPREHSSGTSRRLGSITRKGNSYLRMLLIHGARSALRAGVVVERPDDLRIWAKEVSVRHCHNVAAVALANKLARICWRVGVTAGISSDGRVRSRAAERSSRWRPVGPAWG

SEQ ID NO: 301903 - protein, 411 aa, unidentified
MEEIFIECCCGLDVHQSSLVACVLNGSPYRKPSKQIRSFGTMPADLAALREWLRQTGCTAVAMESSGVYWIPAYAALEADFELFIANPLRIKQIPGRKSDVKDCEWLAKLLRQGNMPKSFVPPKPIRQLRELLRFRRKMVQRAASQRNRVIKELEVAGIKLASVASNVFGASGRAMLKALAQGKASPAEMAALAKGSLRGKLPELEQALSVPLEEHQRFILTIALESLEYDEGRIERVEREIERRLQPYDAQRQLLMLIPGIDRIIAASIIAEIGVDMSVFEDVAHLASWAGICPGLNQSSDKRFSTHIGHGNPFLKAVLVQAAVSASHKRGSYLKDKFFRLKARRGFRRAAVAMARKLLVIVYHMLKFGRPYQDLGDTYLDRLSRTRTKRNLVRRLEGLGYSVHLTPFAA

SEQ ID NO: 301904 - protein, 311 aa, unidentified
MKQSVVYIGIDVAKTHLDVAWAGTFRRLPNERSGHAALVRWIKQSATPVQLICEASGGYEQALLESLEKSEVKVTLVQAVRVRQYARAAGILAKTDRIDAKVLAAFGSAMQPQPSRPLSAEQKRLRQYEAQRRHLSRTLVAEENRLAQLSCAELRTLSRSLISKIKTQIKTIDRGISDLIAQDQTLCVKAQKLTAISGVGVRTAALLLAQMPELGQLNRRQAAALAGLAPFNHDSGSVRGKRAIFGGRPASALRSGLYMAALSAARFNPILSNFYQRLRAKGKPHKLALTAVMRKLLLALNQTLKPLPCSA

SEQ ID NO: 301905 - protein, 422 aa, unidentified
MKIVYPICAGLDVHKKEIVATIAITNSQNVTTYKLRKFPTFTSDLNALADWLLSHDCRLVCMESTGKYYIPVYRVLEQRGLKPYVAHPKFLRSIPGKKTDPKDSKWIADLFKHGLVPTSYVPSRDIFELRDLTRYYAKLTNIRTGEKNRIQNSLTVSNIMLSSVVSDTFGKAASAILRYVLDHPNEKDIDFSQFMTKNLHATPAEFAKAMDGAFSPEQADKTKVALSHFDYINSCLTQLDSAISVLARRYRPQIELLVTHPAVTHHSAVRILAEIGDDMSVFPDSKHFCSWAGLAPQCNESGGKKKSIHISHGGMYLKPVLVQVALAAVKDKSNPYYAYKYQALSKRRGKQRAIIAIARMILTSIYHMLSQNVPYSTDLYQSYHHKQTAKSIRLSMPKIFAFLSSKGLSVVNNDGVVLNPTG

SEQ ID NO: 301906 - protein, 343 aa, unidentified
MQVTTVGLDLAKRIFQVHGVDAAGKVVIRRRLQRSEIAAFFADLPACLVGIEACATAHHWARLIGASGHQVRLIPPSYVKPYVRRSKTDAADAEAICEAVGRPSMRFVPVKSAHQQAALLHHRARDLLVRQRTMLINAIRGHLGEFGIIAPAGRHRVADLLNLLQGADDAEVPALAREALQSLFAELSALEIRIKAVEAVIMREHRSNAVSRRLTTIPGIGPITASALAGTIADPFAFKSGRELAAWIGLVPRQHSSGGKQKMGRVSKQGDRYLRRLLTVGATAVMRRLPGKTDGLSLWVRALLDRRPFRLVSLALANKMARIAWAIMVRPETYKASAMTAAA

SEQ ID NO: 301907 - protein, 401 aa, unidentified
MKRFAGIDIGSERHVVAVVDDHREVLIKPKPFGEDAAGYQRLLELVGSPQDCLIAMEATGHYWRNLFAYLVGAGFMVALINPIRTRRFAEEELERTKTDAIDALGIACFAAQKNPPASPLTEEELDELREVVRLRERLLQDCGDHLRQLHRALDLSFPEFTRYVRGLDSELATTLLGHYPTAAMLAKVSVKRLAGLRYDGRHRVGEELAQALRDAARISVGRHHSEPYQLRIRYACEDIVRLQQRLRELEADIALRLERHQVGKLLTTINGIGPQTAACIIAELGDPARFGSVKALASYVGVIPRLRQSGKRRVSGRRMLPLGNARLRRALWMPTLSAIRVNPWLRAYYLRLRGAGKRAKVAIIATMHKLLAAIFSVARRRQAFVTSLSFPPAVSVTAGAR

SEQ ID NO: 301908 - protein, 354 aa, unidentified
MTSTKYIGMDVHKESISIAVMNAAGKIVMECVIETKANTILQCIDGLRGDLHVTFEEGTSAAWLYDLLKPHVSELIVCDPRKNASMREDSQNDKIDARRLAELLRIDHLHPVYHGEHGLRTLKELVRSYLTVTKDLARVKTRVKAIYRSWAIPCNGKEVYAACHRAEWLEKIKEPGVRRRGEFYYQQLDALRVLRQGVRRELLVESKKQKAWKRLCQIPAIGPIRAAVLLGILQTPHRFRAKRPLWKYSGLAIETCSSADHRSVNGHLQRSKKTSVRGLNRNCNHDLKNLFKGAAVIASSKAGPFQEFYAALLAKGMRPEMARLTLARKIATIVLIVWKKGVCFDAQHLKPQTA

SEQ ID NO: 301909 - protein, 399 aa, unidentified
MLAVGIDISKSKSVAAILNQDGSMHTSPFEFHHTQPELDAFIKYILNSNQSATILMENTGHYHYPVLKAFQEAGLPVCIVNAYQIKKFGDMDLRKAKTDKKDAVRIARYALEKSYSLVPYTSMEQKYEDLRFLARQYNQRMLTLKTNKVFLLNLLDETMPGITNILPLTTRTPETSLSVLFINRFKSYDRIKKMGKNRFLDAFEKIARKSRNRQTKTYGLAIYEAALRNITTRGENEYTLAAQDQCLELVCESQKAADSIILKMQTLAETLPEYAVLRSMAGVGDRLGPLILAEIGDIRRFHSGKALNAYAGNDAPPYQSGTFESHNRHISKRGNAALRKYCFEVMQALKLTQPQDDPVYLFLLKKEQEGKPYNVAKMAGVNKFLRIYYARAMETLKQQ

SEQ ID NO: 301910 - protein, 457 aa, unidentified
MSKRGKRTRGMEEAHPFAGMSQVNPNAAGVDIGAVEIVGCVAGDETTQIVKAFGNYTVDLQAIGRWMKEHNIRTIAMESTGVYWIPLFEEMERQGFECLLISSRSLRRVSGRKSDIADAQWIQTLHSYGLLESSFRPQAELVALRTMLRHRGQLLEHRSPHIQQMQKALLQMNVQLSQALSDVTGETGQAIIRTIVAGERDALKLAAFRDRNCKKSAEEIGKALTGTWREEHLFIVKQSLELYDFYTKQVEDCDAEIDRIYAMTRVDWEGGALKPLPQKKRNSHSKNAPQNREEIRKHLKRISGVDLSVVDGFGVSLAQTVIMEVGTDMGKFPSEKHFCSWLGLAPKHEISGAKVLKNKTMKTKNRAGQAFRMAAQSVKRADCVFGSLYRRLKSRLDKAQATVATAHAIARVVYRMLKYKVEYEKISVEEYEKKYQEAQIKYMKKKAEKFGFQLVPA

SEQ ID NO: 301911 - protein, 304 aa, unidentified
MFGIGIDVSKATLDVAVHGEQFRQFSNDKRGFVRLIRWLKKWPIKQVVLEASGGYERAALDVLHAAGLPMVRINPARARRFAQGTGRAAKTDRLDATVLAQMAHLLPLTRYVPPAPWQQRLSEFAQCRRHLVQMRVSEMQRLRRLVDPDLIAMKQRHISQLSDDLKQLDKAIAEQLEGQPGWKNIGALKGVGPILISTLACELPELGSLGSKAIASLVGLAPMNRESGTWQGQRRISGGRAVVREALYMAALTAIRYEPRLRAFYAGLKAKGKASKVALVAVMRKMLVILNARKRDAEVTPGCP

SEQ ID NO: 301912 - protein, 346 aa, unidentified
MKYSVGLDVSVKETAICIVDEAGKVVRESKVATEPQAIIAFLNGAEFEYARIGLEAGPLSQWLVNGLAEAGLPVICVETRHMKAVLKAQQVNKSDRNDARGIAQMMRVGLYKPVHVKTLASQQKRMLLTSRQLLCDKLQDMENELRGTLRNFGLKVGVVSAGHFEARIKELVAGQPPLEMIVVPLLTVRRVVREQLAKLDKMVLDQVRDDKLCRRLMTVPGVGPIVALTFRATVDQAQRFARSKTVGAHFGLAPRRFQSGERDYDGRVSKCGDAMMRTALYEAAQVLLTRTRTWSWLKAWGMQVARRRGAKKAIVALARRLAIVMHRMWVDGTEFRWRKEADTAAT

SEQ ID NO: 301913 - protein, 413 aa, unidentified
MEVVYERGAGLDVHKKTVVGCAIVPGAAGHPRRAIRRFETMLDELAALAWWLAEQGVTHVALESTGVYWQPVWNVLEAHGGFALLLVNARHIKAVPGRKTDVRDSEWLAELLRHGLVRGSFVPDRAQRELREVTRYRTALIEERSAHVNPLQKTLEAANIKLGSVASDVTGVSARAMLAGLVAGPAAPATLAALAVGRLRDKLPALERALAGRFGDHQRYLVPRILAAIDFLEAEIADLDARVAELERPFGAAVDRLDAIPGVGRRVAESLVAEVGPTVDRFPTAQHLASWAGLCPGNHESGGKRLSGKTRKGNRALRRVLVQAAHAAARAPQTYLSAPYRRLAARRGKKRAAVAVAHSILVITYHLLLDPTVPFHELGPDYFDRRTSDATRRRLVERLEHLGFDVTLTRRVA

SEQ ID NO: 301914 - protein, 402 aa, unidentified
MPSMPRPAQPDQDATATGEVVLGVDTHKDVHVAAVITALGALVASRSFPTTAAGYRKLLIWARTLGTLRRAGVECTGSYGAALARQLRAAGIEVVEVNQPDKATRRRRGKSDPIDAQAAAQAVLSGRATATAKTGDGPVEMLRMFRLAKGSAIKSRTQAINQLKAVLVAADPAVRESLSGLSTPILIHHCAQLQLQAALPSEPAAAAAYTLRLLARRILALTAEIHHLKQQITQAVNRRTPKLLARPGVGPDCAAALLIAAGDNPHRLASEASYAALCGASPVEASSGKTQRLRLNRGGDRQANAALYRVTLSRLRWDQRTRDYLARRIGEGKTRREAIRCLKRYIAREIYQIITESNPDPTSAAAAAALAERYAAAVTIADIFIWLRARPDQPRGDPGNTA

SEQ ID NO: 301915 - protein, 378 aa, unidentified
MSVVASATSKIFCNNQKLRPMVKLKEKVNFAGQNIYVGMDVHLRSWSIALVFEGHFIRRFSQPPNVESLCTTLERDYPGASLHVAYEAGFCGFGIQRELSNRGCYCIVVNAADIPKSDKERKNKTDSMDARSIAENLAANKLTAIHVPDTKTESDRQLVRCRLSILRDLQRTKNRIKSALYFKGIQIPEKFDNSNWSKAFVEWLKGIETEHPSGKLMFTRMIEQLEWERSQLLQITRDARAILKEEEYDPNTKLLLSVPGIGPLNAVTILTEIGDIKRFTRAIHFNSFLGLCPTEHSSGEKEYKGGMTIRSNNMLRPMIIEAAWVAIRHDPALMLAFEKYKKKGINPKRAIVKIAHKLTNRIYHTLKEKELYEKGTVK

SEQ ID NO: 301916 - protein, 337 aa, unidentified
MEHVAIDLAGRESQICIRGTDGTILVECRRPTATLGQYLAERPPSRVVVETCAEAFAVADQALLAGHQVRVVPATLVRSLGVGARRTKTDARDARVLSEVSCRIDLPSVHVPSALSRRRKSICGMREALVSARTSMVNTVRGWLRGAAKGPLRSGAVETFVERVRRRIPEDERPRYVERQLETVEMLNRQIAEADDELAALAHKDEECRRLMTVPGVGPVTAIRFAAVVDEIGRFESAHQIESYLGLVPGESSSGDRVQRTSITKAGPPRLRRTLIQAAWSARRAGGVHPMVLWALEVEKRRGRRIATVALARKLAGILYALLRDGSRYDATRGAAM

SEQ ID NO: 301917 - protein, 405 aa, unidentified
MVDERFAGIDWASAEHAVCVVDGDGRIVEGRRYRHDERGLAALCARLLELGVELVAVERPDGLLIERLLDSGLHVIAVHPNQVAAMRPRFSAAGGKSDSFDSFVLAELARTDSHRFRVIVPDSDATKALRALTRAREDLVETRVALANTLREQLACFWPGAAAIFADVDSPIALAFLKRYPSPPDAHGLGELRLQRFLARHHYCGRRSAAELLGRLRAAACGRAAPLETEARRAIVLSLVAALEPIVQRVAELTSEIRAALADHTDGPTFRSLFADPKTAICPATMIAEIGDCRERYPRVAALAGDGGQAPVAVESGKSKRARFRWACDHRLRNAIATMADTSRHHNPWAADIYNRARARGCTHPHAIRILGRAWCAVIWRIWQDHDVYDPARHTALQQLIATTG

SEQ ID NO: 301918 - protein, 355 aa, unidentified
MLYFGIDQHARQLTISLRDEEGDVLQARQVSTEPDKIQAFFQHLTRERLGSDESFVAVLEVCGFNDWLIRMLRDYRCHKVILIQPEERKRQKTDRRDAAALSELLWVNRHRLLAGKPVRGLRQVDISSTTDQENRRLTTLRKDASRARTRLINKIKHILRRHNLQWEMPTKTFPTQPAIAWLKKLVLPEIDQLEMNHLLIDLEQAQQRMCELEEKLAQRCGNSEAATLLSSMPGVGHFTATALACRVGRVERFARSRSLANYWGLTPGCRNSGENNQRLGSITKAGSSMARWLLAQVAYQALRKDAKLREWFKRIKRRRGSSIARVAVMRKLATIIWHMLTKRKAYAACRALATD

SEQ ID NO: 301919 - protein, 350 aa, unidentified
MIHIGLDLHTKNSYVRAMLEDGGLFAGRRIYHNDIAALWQYLGQFGSEPKRVVFEATGNSRWLYRLLSKDHTIEPVAVTPHKVRIIADTVAKTDKIDATVLATLSRINMLPRAYLPSTDVEELREITRHRAGLVRVRTLAKNKITSALVRSGIMRPYNDIFGKLGRQWLEEIGLPQATRIQINHWLGTIDEMEKRIEQTEKKLYDEIARNNRWSKDIALLDSMPGWGKLTAITVLAELGDYRRFKSRSAVSCFAGLVPSSKRSDKSSRYGKITKQGPRALRTILIEVSLGGVRAVPRYKTLYDRVSAAKGGNVAKTAVARQMLEDGWTMLIKQEPFRFNAVEAESLTRAG

SEQ ID NO: 301920 - protein, 349 aa, unidentified
MRFYTKQHQFYCGIDLHASAMYCCILDSTGEVVVHKNIPTKPKAFLKLIKPYRDNLVIGCECMFTWYWLADLCTEEEIDFVLGHALYMRSIHGGKAKNDKIDSYKIASLLRGGNFPLAYTYPQKMRATRDLLRRRNHLARKRGELYAHIQNTATQYNLPEALGRIAKPSERDGLPAKFRDPIVRAMVEVDLATIEHYEELLGTLERHLEKIAVGHDPLTLALLKSIPGVGRILALVILYEIEDISRFPRVQDFVSYCRLVKPAKESNGKKYGHSGKKIGNAHLRWAFGQAVVLMLKGNKPLQTALQRLASRYGKGKALAILSHRLGRAVYFMLKNQVPFDMERFLRKST

SEQ ID NO: 301921 - protein, 548 aa, unidentified
MSCQRAFGKLAPQVVNNFAANRAATVSDWPMGFISGIGLLRFSRTGGPSLLTSSRFNDFELYRPARRAGLGPLTTTQEGVSIAGRLFYIAVAGSSRLREAATKNIMNTSHPYDLVIGLDRSDQKADLHLIDTRTGQRRSVVIATTPEALWEWLLELRQQQPQARVGLCLEQPAVHLIAFLEAYDWITLHPINPITLQKYREAFVTSRAKDDTKDAFYLAELLLTHHPQLKVWTPEDSATRAVQQRVFHRRAVVDERTGLSNRLIALLKQYFPQALVLCGEDLWRPLATRFLLKWSSLQAVQKAKPATLKAFYYLHGSRSAKLLEQRLALVQRAVPVTDETALIASFALRVQLICRQLQLVQQTITDYEKQIASAYAAHPDHAIFASLPGAGPVLGPRLLASLGSQRERFGAAADLQQYTGVAPVTKRSGGSCYIHRRYLCPKFHRQSFHEYAKESILWSRWAAAYYLQQRTKGSPHHTAVRALAFKWQRVIWRCWQDRTVYREETYEAALRKSGSPLVALFDKVELGKSPFKKPVNNLKKTVDGLPQR

SEQ ID NO: 301922 - protein, 392 aa, unidentified
MIYVGIDVAKDKHDCFITNSDGEALFNSFTISNNREGFESLFQRIESVSDDLTKVKVGLEATGHYSYNLLGFLLDKGLTTFVINPLHTNLYRKSLSLRKTKTDKVDSRTIATMMMSDMNLKSYSDTSYHNEELKSLTRYRFDKVKERAKLKSSVSRLVCILFPELEKLVPTLHMASVYALLSEFPSASAVASAHLTRLSNLLSESSKGKYGKDTAVMFREAARSSIGSHMAAKSLELKHTIKLIQELTIEIDEIETAIRRIMDEEIQSPILTIPGISYRMGAMIIAEIGDFRRFDSADKILAYAGMSPSTYQSGQLDNCYSHMEKRGSRYLRYALYNATKYVCHWDESFAVYLEKKRSEGKHYNVALSHATKKLVRLIFAMEKSGRAYIPVS

SEQ ID NO: 301923 - protein, 383 aa, unidentified
MNDLIRIGVDTSKSVFVLHGVNGAEQPVLRRKLRRRQFLEFFQELPATRVGIEACGAAHHWGRQLSALGHEVVLLPPQRVKPYVPRNKNDAADAEAICEAMSRPRMTFVPVKTAEQQAALMLVGVRDQLVARRTQLTNTIRGYAAEFGLVAAKGNDKIEPLLLRIADDESLPALARELFATLADEYARLKPELRKIEARLMAWHKGNELSRRLAEIPSVGPIGATLAVMKVANPHAFRSARDFSAWLGMTPKDHSTAGKVKLGAITKAGDEALRSVLVAGATSVIQQLHKGRGRHSPWLVALAKRKPPKLAAVALANKTARIIWKLMVSGERYNPQHTRQRFVPPTDSLAPGKRRQGQAACGGDLRSALTALAPGASSAPPSP

SEQ ID NO: 301924 - protein, 459 aa, unidentified
MNRKKSKPKIDRKMPMVHPNAAAIDVGATMHMAAVRPDRTPEPVRSFGTFTTDLHRLVEWFKECGVETVVMESTSVYWIPIFELLDAHGFTVLLVNARDAKHVPGRKTDVSDAQWLQRLHSYGLLRASFRPKGQISELRAYMRQRERLLEYAASHIQHMQKALIEMNLQLHHVVADITGATGLRIIRTILAGERDPKVLALLRDYRCHSSAETIEKALTGSYRAEHLFALEQALALYDAYHEKASACDARIEAVLKELSIGRGRCSGTELPSPRRSRTDQANALAFDVRAALFALLGKDITKIDGLGPYISLKLIAECGDDLSAWPSPKHFTSWLCLAPSNKISGGKVLSSRTRRSGSRAAALLRLAAVTVGRTDTALGAFYRRLSARIGKAKAVTATARKIAVLFYNAVRYGMEYVDPGASFYETRYRKRVVDNLHRRAKAFGFVLMPLEAPPSVVVS

SEQ ID NO: 301925 - protein, 338 aa, unidentified
MKTYAGIDLHSSNNYIGIINEEDQRLYGKRIPNELERVLMALEPFKDTLQGVVVESTYNWYWLVDGLQEHGYKLHLANPAAIKQYEGLKYTDDKWDSFWLAHMKRLNILPEGYIYPKQHRAVRDLLRRRLLFVRHSTSHILSLQSMITRNLGFKMSGNAIKKLKGKEVEGMFDSSNLVFMAKNNIATIQFLKKIIKDIAKKVKSQVKLRKEFNRLLTITGIGDILGLTIMLEVGDIKRFAKVGDYSSYCRCVKSERLSNGKKKGENNKKNGNKYLSWAYVEAANFAIRYSAKAHSFYQRKKAKRNGIVAIKALSNKICRASYYIMRDRVPFNEEMLFR

SEQ ID NO: 301926 - protein, 360 aa, unidentified
MNNHKYVGLDTDQATIIARVEDAKGNFIMEAAIETSASSIRQFFKGLDGTIHVAFEEGTQAAWFYDVIGPLVADVTVCDGRRNKLIQSGNKGDRIDAAKLTRLLRLGELHAVYHGERSTRGLKELVHGYESLVTDTTRAKNRLKAVFRSQAIRCRGDLVYSRQERKQWLGKLEAAALNARASILYEQYDCLTKLRDKAHKAMTTEARTHPAYKRIKKVSGLGEVRTAQLIAVVGSPHRFRTKRQFWPYCGLAVVTRTSSEYEIVDGQRRRKRNKQAQTRGLNQNYNRTLKAVFKGAAATAIERPPFKQYRQRLIDKGIRPELALLTVARKIAAITLTIWKKGEEFDPERVNQAVPGTGNK

SEQ ID NO: 301927 - protein, 350 aa, unidentified
MTMLTELVEVVIGVDTHSQTHTAAVLDARTGGVLARATVTADPDGYAELVALAEQHSGPRAWAMEGTGGYGAGLARHLAAGDELVVELDRPKRPARKAAAKSDPIDAERAARDALSRAQLAQPKKGPERAALQMLLTARRAAVEAATAAQRQLLAMVITAPESVRARFRGQTTRAMIATAAQLRPGASNGDIEVITALTVLRDLARRIRFLEAEALDHEKAIRAIVRSWRPDLLDLTGVGPIVAATVLTAWSHPGRCRSDAAFAMLAGTAPIPASSGKTVRYRLNRSGDRQLNRALHTVVLTRLQRDERTRAYADRRRTEGKTDREIKRCLKRYIARELYRRLESLPIAA

SEQ ID NO: 301928 - protein, 361 aa, unidentified
MKKPGQHLIAEVPRKRAKVELTIGIDLGDVWSHYCTLNQEGEVVDRGRFRTTAKAIEKWFAHVPHARVAMEAGVHSIWISEQLEQLGHEVIVANVRELRAISHSDRKSDDVDAEKLARYARLDPEILRPISHRTVEQQEALTLIRARELLVRLRTAAVHAVRGLTKACGHRMPASSTKCFAQPGQAAMPPGLKLALGPILAQIAEMTLKIKQYDREIQRMTQTEYAETQPMMTIHGVGHITALTFVLTLGDKTRFGPSRDVGCYLGLRPKRSQSGERDPQLGITKAGNAYLRSLLIECANHILRPHGRDSALRQWGLHLAARGGKQAKNKSVVAVARKLAVLLHHLWTTQQPYIPFDQQAA

SEQ ID NO: 301929 - protein, 368 aa, unidentified
MTEGITWVGLDAHKVSISVAMLLPGHGQPMEWQIANQPAAVRRLARKLARESPSEVRCCYEAGPCGYALQRQLLAEDVVCEVVAPSLIPVKPGDHIKTDRRDAKKLAELFRAGLLTEVQPPTEEEESARDLCRCREDAVEDRARCRHRLLKMLLRRGLAYPGKRPWNRGHEEWLRSIRFERAAEQAVFEDYQLAILQVDERIKTLDERLAKLACEEPYREPVGWLRCFHGIDTITAMTLVTELHGVERFHTARQMMAYLGLVPSENSSSDKTRRGGITKAGNSHVRRVLVESAWHYRHAAGVGKVLLQRRTGQPARAIAIANRAQQRLCRRFRRLTERGKPSAKVVVAIARELAGFVWSALYEQALSH

SEQ ID NO: 301930 - protein, 360 aa, unidentified
MRYCTSIGIDTHAKKNEVCALDTQTGEVFSATLSDDPAQLIIWIGQHNFAQPLCCCYEAGPTGFDLARKLKAAKIRCIVVATSKLPQRIDRKKNDRVDAEWLARMLAAGSVRPVHVPTVEEESLCHLSRLRGEVAMDLRKSKQRVQSFLLVTRTNYTLTKTYWSKTFYRWAESYEFSCPADTLVFRHKMSAVLRLSERLAQIEDEICRIIEVDPALASKMTRFRCIHGIGKVTAFSLVCEVYDFDRFSSGRALAAFMGLVPSESSSGQKITRGRLTKTGNAHLRRILVEVSNCYSKPFKIAKSEDAGVPEGVRAKAAKCSSRLRKRRLALKERGVMANKAKVAVARELCEWIYYIAVMPA

SEQ ID NO: 301931 - protein, 362 aa, unidentified
MNDIHYIGFDVHKKSVSYCVKTASGEMVQEGQLVARREVLRAWAAAQAQPWRGAMEATLFSAWIYDTLKPYAQQLDMGHPARMKAITAGKKKSDRLDARTIADLLRCNLLPTCYVLSPEMRDLRRLLRYRQLVVGQSVRMQNKMAGLLMETGAPFVKAKLHGKKYFTQLLETLQEVPESVKDLLRMSRGAMEMFEASQKRLVKRLLTEPALQARVERLASIPGVGPITALTWALEIADPQRFPSIGDAVSYCGLTTAFRASAGKEQRGPISKQRNAWLQTALIEAAKLARRWNPQLAAVHQQEIQHGHRNRATLEVARKLVAYLMAVDKSGRPFQLRSTPQVATAPPTRKKEKARRPALQLT

SEQ ID NO: 301932 - protein, 407 aa, unidentified
MGPGEGEALSRVESALEPLMPQHNDLSRSLLALDQASTLIAVIEMSQSSWLVAAVVPGVGRHPLKKISPDEAALLGLLRRWQDEAAKAGRAITRIAVAFEAGRDGFWLARWLRARGIEAYVIHPNSVAVSREHRRAKTDRLDTELLKRAFLGWLRGEPKHCSMVAIPTLDEEDAKRPSRERETLVSERTRLINRMKAVLARLGIRSFKPELRNAPQRIEALYTPEGLPIPPNTLDEIRRDLARLAIIRAQIKAIEQARLECLEQAPNTGPHAMVRLLASIIGVGVETADMLVQEVLWRNLRDRRAVARYAGVTGSPDESGSKRREKGLAKSGNARVRRGLIQLAWRFLRFQKDSVLAQWYRARTEGAKGARKTTMIVALARKLLIALWRMVTTGEVPAGVVLRQACA

SEQ ID NO: 301933 - protein, 338 aa, unidentified
MGLYGAIDLHSNNSVLVVQDERDQVLYEKRLPNGLGRVLEVLLPYREQLVGVVVESTFNWYWLVDGLMAAGYRVHLANTTAIQQYKGLKYTDDAHDARWLAKMLRLGILPEGYIYPKEARAVRDLLRRRAQLVRQRTTNLLSMINQFTRLTGRGVTVRTLKQLSEVQIDEWVGDPNVASALRANLAVVRVLDCEVERLEGEILCQAKIAAQFSPLLSIPGVGEILALTIMLETGDIGRFAKVGQFSSYARCVDSKRMSNGRKKGEGNVRCGNPYLAWAFGEAAAFAVRFNPRIKRFFERKRSKANAPLAYKAVAHKLARAAYHVMRERVPYEERRAFG

SEQ ID NO: 301934 - protein, 353 aa, unidentified
MKRDKYMGLDVHQAMTVVVVMDAEGKVVLETMVATEAAALLRLVKSLSGPLRVTFEETTQAQWLHEILRSHVTEVVVCDPRRNKLLSEGSKADKVDARKLADLLRTGMLRSVYHGHQATRKLKELVRAYETFSLDTQRTMNRVKAIYRGRGIATPGRGVYQASQREQWLAKLAESGLRQRATWLYELLDQLKPLRKKAKQAMLAESRAHRAVSLLRTIPQLGPIRAAFIVATVDTPHRFRTKRQFWSYVGLAVVTHMSAEYEMKAGKVVRRRKPVATRGLNRHCNRRLKEVFISAATGGSGDESYKPYLERLIDNGMRADMARITLARKIAAVALILWKKGKEFDRKELNRTT

SEQ ID NO: 301935 - protein, 388 aa, unidentified
MQAANHQLEDQAVIRTDLGAIFVSLELSRSTWLITSLSPGGGEKMSKHSVQGGDVAGLLTRFSQLKEKVRGRTGKDYPIIVIQEAGLDGFWIHRVLEMEGIESHIVDAASITTSRRRRRAKTDRIDGEALVRVLLAYKRGEPRVCAMVRVPTPEDEDRRRISRERKTLTAERVAHVNRIKGLLFSQGGEYEPLHRNRRARLEELRTGDGRSLPDHLKRQICRELDRLELLLDQIKAVEAERDALLATAKNDEIPTPARMLMDLKGIGAEFATVLWSEGLFRHFDNRRQVAAYAGLAPTPWKSGTVDREQGVGKSGNPRLRTTMIQLAWLWLRHQPDSALSRWFHERVDRNGGRFRKTMITALARKLLVALWKYVTAGVVIEGARVRTA

SEQ ID NO: 301936 - protein, 403 aa, unidentified
MVRYHVGVDVGKYRHHISIRDLSQDDHCKAFSFTNDRDGFIELIAVLEKLSSERSDFLIGVEACSYALNLSYFLMAMGFTLVEVNPFRAGQFRKAQGKKAKTDKIDARTIAAILPLGDHKSLSIPDPILDNLKELTRFRVDLVDEKSTNIIHLREALSTLFPEYEKVFRQLDSAGSLALLAAYPGPEHIIGAGEETVGRTLSLASPRRMSIGMARRIIEAAKRTVGVVQRQPSLGVKISVLAKRIAGLQSTIRDLDRQITTLFNSLPCKPQGFPVGRAPSLATIISEIGDIHRYPTLKKFLSHLGWCPQSFQTGNYRLKHPKMSHAGNKYVRRLIWMLSIFAVQFVPRYREYFQRRVSEGKAKMHIIVAVGRKLLSVLYAMLKSGMAYDPNWEENSRPALARH

SEQ ID NO: 301937 - protein, 356 aa, unidentified
MSQKLNSVIAVIGIDIGKNSFHLIGQNKRGAIVLRQKWSRGQVEARLANMQPCLIGMEACVGAHHLSRKLQALGHDARLMPAKYVRPYSKGQKNDFRDAEAIAEAVQRPTMKFVAIKTADQLDLQALHRVRERLVGQRTGIINQIRAFLLERGVAVRQGLGFLRAELPAILAKRTDVLSPRMLHLIEGLLDDWHRLDARIEALSNEIGALACQHPACDRLMSVPGIGPIIASAMVAAIGDGSAFSKGRDFGAWLGLVPKQISTGDRTILGSISKRGNRYLRVLFVQAAWVVLTRVRPENWERYGLKSWIEAAHQRLHHNVLAIALANKLARIAWAVLNKGRAFECVKSHASASQSA

SEQ ID NO: 301938 - protein, 418 aa, unidentified
MLSIKLFVCCGMDVHKKFVVATIALTDYRGVTSYVKKRFATFNSDLNSLKKWLLSFNCTEICLESTGKYWIPIFNILEDSCHVVVANPKYVRAIKGQKTDDKDSAWIADLFKFDIVPSSYIPCKQIRMLRELFRYRQKLIGHRSSEKNRLQNALTVSNIALASVLSDTFGKSATAIVDYILTCEVFDPEYCKSLLLKKAKDKADDVVTSIIGYELRRDQSVKIKVCRKHFDEINECVSTLEETISDLAKPYHKFIELATTIPGITEQSATFIIAEIGVDMAVFKSSKRLCSWAGLAPENNESAGKKKSVHVSRAGVYLKPLLVQCANAAIKSKNPYFRYKYDRIKKRRGHKRAIIAIARMVLTCIYHMFQKQEVFNPADTDYSAIPEEMYRKFQEQYDRNAIKRLEKRGYMITPPAMA

SEQ ID NO: 301939 - protein, 444 aa, unidentified
MAGSGMILIREVADAPVIMGISKPAGLKSPCGEVKIVNPLFVGIDVSSRSNVAYLMKPDGSKHSSFSVQNNLGGAKLLSERIVSALNAMQLERVVIGLEATSIYGDSLVYALREDGSLSRFQRKIHVLNPKQVKKFKEAYPDLPKNDFVDAFVIADHLRFGRIAKEVYMDDYRYLALRTLTRARFDVIQNLTREKQRFANYLFLKCSGIAQEKDIQNTSATTIALMEHFETVDDLANTDLDELTDFIAQAGRGRFVDPDATARAVRAAAKGSYRLPKTVNDTVNQAMSVSIASMRALKEQVKVLDKAIEQQLEIIPNTLTSIPGIGKVYSAGIIAEIGDIHRFDSQASVAKFAGLVWTQHQSGEFEAEHSRMIKSGNRYLRYYLLEAANSVRRCDSEFRRYYDLKFKEVNKYQHKRALALTARKLVRLVFRLLKDNRLYLPPDG

SEQ ID NO: 301940 - protein, 456 aa, unidentified
MGHARARKIPAQLVEDEDYQLRYEKVAGIDIAKAKADVCTRLPAARAGGRRASRLEEVPATAREILALAGRLLADGVELAVMEATSDYWRIWYYLLETAGLHVQLVNPAHARQLAGRPKTDRLDAQWIARLAEMGLLRPSFVPPPEIRALRDLTRTRVQLVRDRTREWQRLEKLLEGALVKLSSVVSRLSRVKTARDILEAIADGRRDPKSLAALAASQIKGGRAAVERALEGMLLGAHHPMLIRVHLDHVTFLDRAVAAIEDEIDAALDAIEGAWGISADGVPSPDPGPGAAALTAVQRLAEIPGVSPKLAMAIIAETGLDMTRFPTAAHLVSWAGLAPVAQQSGPRNRKPKKGHGDAYLKGYCTQAANGAARTETFLGERLRRLSRRLGGNRAKCAVARSILTIIWHLLASPETRFTDLGPDWHDRKTDRDRKIRAHLRQLHALGLDVTITPAA

SEQ ID NO: 301941 - protein, 421 aa, unidentified
MKSTIPTILAGVDTHSTTHTLALLDEHGRVTDTETFNADPKGYERLIAMIGDPALCLGVGVEGTNSYGAALSRRLAAAGYTVHEVLRPKRSVRRSDGKSDPIDAIAAARSVLAGDGISTPKASDGWCEALRHLIAAREQLVTSMTAISNCLAELLTTAPEGIRERYRSLPSKRRIGKLAACRPSGGIVERNVLSSLKTLASSWRELHDRADVLECRMRQILEENARPLLDVYCMGTMSAAQLAVIGGDNPERIRSEAAFAKLCGACPLPASSGKTNRHRLNRSGNRQGNRALYNVALVRMSHHQPTKDYVVRKTKEGKGKLEIMRCLKRYIAREAYRALIAIRNGEAGREPAVERGARLREVRVSLGKTQQQVGDALGVPSSRVSEIERGVRDLPELERQIIEWMDSILGQSQHSNTFDNV

SEQ ID NO: 301942 - protein, 482 aa, unidentified
MKKKNIFQNRSQQLLQLFEKAGNRLKMMCVPIDYAKKDHMVMFCNGYGDILRKPFSVKNTLEGVKYLIDQVMRSCCQRHIKKEYVFFGGEDVNSYAENFAKAIRAKGFLVANVNAHNAKKQRENLQASTDRIDLMGIATMLLNLRTKCSPAQNGIYRNLRTLVRHRKKLVVMKTEVKNRMHTLVDRLFPGFLNEKNTGINPFSKSSLVLMEDRFSAQQIRRRQKSTLIKILKRCATPNAENIAAKLHSYAAQVITTPDEYAATLQLSLQHHIGHYRCLQENIDQLISEIALLLAQTQAAFLTSIKGVGIVLAAGVSSEIGNPVKQKPLNNLTSYCGIIPRVKQSGGIEGHTHTGRISKRSNHILKDYVVQSALQMGLRGPEPLLQDYKRREAAGQHADFGIARRFLRMAMCLMRSSQVYLPPTLRSPKTQMQERAGYYLTTWPLLRDKWKKAQAHQLAFAKDQPLGQWRQVVQELYEIKLKL

SEQ ID NO: 301943 - protein, 335 aa, unidentified
MSYFVGLDVSMEETAYCARNADGRILGQGKTATDPDAIAAALARFGRPARLVLETERMANWLYRQLIARDLPAVCVDARQAHAVLSQMPNKTDANDAAMLAELARTGFYRAVRVKSEAAQGMRALLKARALVLRQRMDLDNTIRGLLTSMGVRLPKGPRRWADRVELALEANEALALALRPLLRLREDLARSLAELTRRLLTEARGSDLCRRLMGVPGVGAITAYAFLATIDDPTRFAHSRSVGAYIGLTSKRYQSGEVDYSGRITRRGDGMLRTLLFEAASSLITRAGGGGALREWGLRLRAKVGHKKASVAFARKLGVILHRMWVDGTEFRTA

SEQ ID NO: 301944 - protein, 384 aa, unidentified
MARNIRRSPGPSSTLITPDRAGNVVGVDPHKRTLTATVVDPRGGIVCSEHFRVSGDGHRSLEAWSEQFGQIVRWGIEGASGWGRHTAIFLVSRGYDVRDVCPNRTGRQDRARQRGKSDMLDSERVARETLAHPLLPRAFKRAGQDAGPDEQAELLTVWWQARCSLLKRRQHVLSEAEALLRGLPLALIEQLPDSQAVRPRLAALARVTRRRRFDPPTRLRLTLLSGYRAEIAKLDTDEKQVTRELATLVQASGSTLEQLCGLSTVSVAELLVEVGDVRRFTEGGFARFNATAPLAASTAEGPGEPVRHRLNPGGNRRVNAVLYRMAITQLRCEPRAQALYANARAHGHTKKEARRILKRHLSDVVHRRMTRDLVAHSAQPLLAA

SEQ ID NO: 301945 - protein, 344 aa, unidentified
MSEYAGKQFVGIDLHRRRSVIVRTTESGEVLESVRILNDVESLERVIARGGEDPEVVLEATYGWYWAVDALQAAGANVHLAHPLGVKAFEYRRVKNDFRDATDLADLLRLGRLPEAWIAPPATRELRELVRHRAKLVALRSHCKAEVHAVLAKCGIQVLMSDLFGIDGTALLDRLQLPAPYAARIASLRRLLEDLEFEIDLFTNLVQGQVRTDPGYVALQQIPGIGPVLGAVFLAEVGDVSRFATAPQLACWAGLTPKHHESDTHVHRGRITKQGSRLVRWAAVESVQLVGPRTRVGALRDRVAARRGRNIGKVAAARLQMEYVYYALRDGHVRALQHPSRESA

SEQ ID NO: 301946 - protein, 381 aa, unidentified
MWIAPPDALIECARICAAIELSKKAWLLAIYRPSLDRTSQHRVKPGDAANLLALLERARRQEERALGQTIGIGCCYEASYDGFWLHRQLEAAGVENFVIDPTSLLVNRRARRAKTDRIDVRGLLRSLIAWLRGDKDVCRMVHPPSSVEEDARRTHRERQRLIKERIGHVNRIKGLLATQGIYDYHPIHQHHRQRFAELTTACGEPLPPRLRQELERELTRLQLVLDQIRQVEAERDAVLEASRHDQTTAMAQLIKLKSIGPEAATILDREMFYRNFANRRQVAAYAGLTPSPFDSGVKNRDQGISKAGNALVRKTLIEIAWMWLRWQPDSALSQWFKQRTTHQKSRGLRINIVALARKLLLALWRFVTTGVVPEGAVLKAA

SEQ ID NO: 301947 - protein, 430 aa, unidentified
MKSNTQNAKIEAITEKTLVLGIDVGSETHYARAFDYRGIEYSKKPFKFSNTEAGFVTFKEWILDLKERHEKDKVVPGMEPTGHYWFNLGKFLQDNEMKPVLVNPHHVKKSKELDDNNPTKNDRKDPKVIAGLVREGRYMIPYLPDGVYADLRTASNIRFQLQVELTRIQNRISRWFNIYFPEYKTVYGKPDAKSGMLILKAAPLPEDILTLGIDGVNQIWRDAKLRAVGKARAKTLIEAAEHSVGSKEGAVSARMEIRMLLEDYESRNIRLQEVMTLIEGLVKQIPMAEKLLEIKGVGIKTVSGFLAEVGDISRFNTPKELQKLAGLALVESSSGKHKGETTISRRGRKRLRYLLFEVAMSLVAKNPEFRELHNYYTTRRLNPLKKMQSLMAIAAKLIRVFYAMLTKGVDYDPKKMVSDIKRPVVYLQAV

SEQ ID NO: 301948 - protein, 482 aa, unidentified
MKSKPREKANKTTNPTQRYWHDMNRKQRREMIREIQSEDLSLEVVHPDAAGIDIGNESHYVAVPPSRDSQPVQRFGCTTGELKTMANWLKQCRIRTVAMQSTGVYWIAVFDILESAGLEVYLVNARDTKNLPGRKSDVQESQWLMKLHTYGLLRNSFRPSQEIRMMRTYWRQRNDLVQSASRHIQRMQKTLTQMNVQLANVLSDVSGVTGQAIIKSILAGERDPHTLAAFRDPRVKASELQIAQSLEGNWQQDLLFVLKQEQDGYEFCQKQMAECDRQLNQYLEQREDRSHGASLPEEKRKGRLTKKRGNTPQFDLRTGLFRLTGTDLTRIDSIDVITASTVLSETGYDMSKWETENHFVSWLRLCPDNRISGEKIIGKGRLPTNNRATIALKMAASTLRQSNTYLGAQFRRLRTKLGAPRAIKAMAAKLARLVYRMLRYGMKYVDKGADFYDAEHRQQQIKHLKRKAASLGYELTPTPAAA

SEQ ID NO: 301949 - protein, 380 aa, unidentified
MRILALDVGKCKTVSCLLDTDTGEVAYHTDPTSPCGLSTLLAERRPDRVVLEVGPMAGWIRDVASASGAKDIQVANPTHEAWRWRNVKRKTDRLDAVKLAQLSAADQLPTVWLPEGNVRQWRQLIHYRNALVERRTAIKNNIRSVLDTQGLTLRAGRCGWTAQSLEGLRSQARPLAELGMTELWRGILDVEVRALQQVEQQVREVESALDALGAADERVQLLQTIPGVGPRLSELLVAMIDDPHRFRSGRQVGSYFGLVPRQHQSGQMDRQGHITRQGCRLARKLLVEVAWVSLRYNPHLRQVYQRVHGASRTRRKIAVVAVARRLAVIGWAMMRDRKAWRPPAAPPTAAETPAEPPRVRPPRPRAKGARKRTATATARN

SEQ ID NO: 301950 - protein, 399 aa, unidentified
MEQIVIGVDPHKLSATIEVVDQHEQLLGSGRFTTDQAGYSAMRNYARAWPDRVWAVEGANGAGRPLAQRLLEAGEHVMDVPAKLAARVRLFDTGHNRKTDALDAHSVAVVAVRTSNLRVLKVDGELEALRMLADRREALTRRRVQTVCRLQALLAELLPGQAKRDITTGQAKAMLATVRPRDIAGKTRRRIAAEELAELIAVETKIKKATAELKAMVLARQSRLMDIHGVGAVVAARILADVGDVARFADRNRFASWTGTAPLDASSGEQNRHRLSRAGNRRVNHMIHIAAVTQLRLDTEGRAYYRRKRAAGKKPQEALRCLKRRISDVIYRQLVADAARAAGTGPGGHCGATQGSSAADLPPHVDTSDKPLPGPAKPTLQPTTRRRKATDSGALKPAP

SEQ ID NO: 301951 - protein, 359 aa, unidentified
MIVIGIDPHMKTHTAVAVDAASGRTLAEKTVSSDARGHEELLLWARALGSERCFAVEDCRHVSGRLERHLLPRGERLVRVPPKLMARARSSARTYGKSDPIDAACVARAALREPGLPEAHLAGPEQDVRLLVDHRDDLVGERQRIQKRLRWHLHDLELDLELPPRVLDRYVWLDRIAEALQAVSPDTRRRIALEQTRRCRELTAEIRALEREIRTMMRALAPELLTLPGCSALSAAQLVGQVAGASRFAGEAAFAMHVGTAPLPVSSGKSTRHRLNRCGNRRLNAVIHMIAITQARMHPPAIAYMERKRAEGMSSREARRCLKRHITRMVFKTMLRSERARAGQVLQAKFGPEVLAVAV

SEQ ID NO: 301952 - protein, 428 aa, unidentified
MDYTQNEKIAQVTEKTLVIGVDIGSEKHFARAFNWRGQELSKKIFRFNEDIQGYLAFEQWICGHKETLNAEKVIIGCEPTGHYWFPFARYVKEAGIMLVLVNPYHVKQIKELDDNSPKKTDFKDPKTIAKLVLEGRYSIPYIPEGVFAELRQAVSSRDRIVKELNALTNRIKRWLKIYFPEYLKVYKVFSAESGFLLLEHVPLPKEILELGAEGINQIWREHKLRAVGMKRAKTLVEAAQKSVGIDGGICAEMELQLLLEDYRTKQEQLEKVTKVLEAETLKVPNVEKLLTIKGIGIITVAGFLAEVGEIGRFTSPKQIQKLAGLELKESSSGKKKGQTSISKRGRKKLRRILFQAVLPLIRSNAEFADVYEYYTTRQNNPLKGKQAVIVVGCKLIRIFYVILTKGVEYDADRMRSDINRPQGLPQVA

SEQ ID NO: 301953 - protein, 396 aa, unidentified
MLRENEGTISTQDQPTGSDIFVSVEMSRSKWVVGIHTPLADKIGLHTMACGDVEALMALIDRARVKLVASGSNSPAAMICYEAGYEGFWLYRRLIALGIRVVVIDPASLLVDRRAKRAKTDRIDARAMVRALMAWARGERQVLREVRVPTVEQDDARRGLRERQRLVKERTGHGNRIKGLLKTQGIMDFDPRAADAAARLDAIVTGDGRPLAPCLKREIVRELERLALVMRQIDQVETERDAVVQACAAGAGTDALAAEPEREAAMIGELNRLKGIGMNDATILVREAFWRDFRNQREVGGWSGLAPSPWASGSVLRDQGITKAGPPMLRAHMIQMSWRWLLWQPDSDLAQWFRKRTEGATGRMRRIMVVALARKLLIALWRYATTGMVPHGAIVT

SEQ ID NO: 301954 - protein, 339 aa, unidentified
MNKVVAGIDLHSNNLVVGILDKDGQRVGSRKLDCDLKAVTQYLAPFKPQLETVAVESTYNWYWVVDGLQDNGYTVHLANPAAIQQYEGLKFTDDKWDALWLANMLRLNILPEGYIYPKADRAVRDLLRRRMMFVGQRTAQILSLQSMITRNRGLNFSGAVVKNIMDFFVDKLFDSPHLRFTAKKNLAVIRFLGEAIKDIEAEVKSQAKLKKEFELLLTMTGVGDILGMTIMMEVGDISRFEAVGNYSSYCRCVESKRLSNGKLKGKNNKKNGNKYLSWAYIEAANFSRRFCPMAKKFYQRKLAKSNKVLATKALANKLSKASYFIMRDQVPYDPEKLFK

SEQ ID NO: 301955 - protein, 321 aa, unidentified
MATCVKALQIGVDVSKAELVISVDGQAPFALENSTKAIKGWLKQLPSQCQIAMEATNDFHMSLATLAHAQGHRVYLLNGYRLNRYREGVGGRAKTDCADALLIVRYLQREQEDLREWEPAVKGYRELQVLLHRRATVIRAKTQIQQSLEGISVLDGVLKSLLKQIERVDQLIRKHILKIVAQAQWQGHLQRCQQIEGIGPITAAGLTMAYNRGYFKDSDAFIAFLGMDVRVRDSGAKQGKRKLTKQGDPELRRLLHLAAMQAKRQPAWEQLYQRYIDRGLAPIQVLNILARKLARVAFALMRNQTDYEPRRLPDTQAMMNC

SEQ ID NO: 301956 - protein, 306 aa, unidentified
MSLMLSSIPQLTVGLDLGDRTSRTYEVDQDGRRQAEASVATTRQGMQRYFSERAPCRVVLEASTHSPWVSQELAALGHEVIVANPAAMFKQARRRRRRNDALDAELLARQGRADPKLLHPVTHRRPTAQRHLEYLKARDQLVRTRTQLINHVRSVVKVSGARLRTASAPAFVTRAATEIPAEVRGAAQPLVHIIADINRQIRDADREINRLIHEVYPVALRLQQIQGVGPLTALAIVLLVDDPARFDNSRDVGAYFGLVPRLDESGHSQPQRLPAATPHHQVRRCAGASTARHCGPLHPRTVRSPV

SEQ ID NO: 301957 - protein, 411 aa, unidentified
MSYKIAGIDVHKKVLMVVVIDATTPEEKPERRRFATLPSDLQRFLIWLREQGVEEAVMESTAQYWRSVWLELEPYMRLHLAQAFSNRAPRGRKHDFKDAERLVRRLIANELILSFVPGGEQRTWRNMTRMKLQLTRDRVRLQNQMECLLEEMRIKLSIVVSNLLGASGIRMLRALAKGETDPKQLAQLGDERLQCTEEQLVDALTGRAQPLHREMLALQLERLQLIDTQIAKLNGMIAQAMKPHQEAVMRLAEVPGLGVDSAQQIIAEVGEQASTFPSAAELTSWVGTCPGKDESAEQNHSSRSAKGNKYLRRVLNQAAHAAVKRKGSYFQVVFRRLLPRLGYQSAIWAVAHRLCRVVWKILHEGVRFIEHGIEPDPKAKMRHARRLAQALRKLGYQVTITPTNLASGMQM

SEQ ID NO: 301958 - protein, 354 aa, unidentified
MTIVAHSRPFVVGVDTHARNHVYAIITAGTGELIATRDFPATGAGIKRSIAWVARHTGADMGVLWVIEGTGSYGALLAGAAGAAGYHVAEAARMDARQRIGKSDALDAHRIAAAVLPLDEQHLRQPRLNDGVRAALRVLVTARDSMTTERTRAVNALTALLRVTDLGQDARKPLTGAQITDVTRWRARDEPLAASIARSEAVRLAQNVTRLDAEIKTNTGRITELVKISDAAPLLQETGFGPVTAAICLTAWSHHGRVRSEAAFAALAGVNPIPASSGNTVRHRLNRGGDRTLNKALHMIALSRMTFDPDTVDYVRKRQAEGRTTKEIRRCVKRYLARRIYRTLNTPNPGPCHA

SEQ ID NO: 301959 - protein, 285 aa, unidentified
MSTWILLQWPLLRMGAKGEIRFHGIIANSANAVLRLTKALVKNGHMPSFCYEAGPCGYGLHRHLVKLGFECAVVSPAMIPRKVGDRVKADRRDAEMLARLWRAGELTPIWTPDEEEEAMRDLIRTRKQAMDAVKIAKQQLLSFLLRHGLQYESGKYWTQRHRRWLAELRRFPFPHQQLVFEEMKRAVDQAEERVATLDQAIETAIPGRHFTPVVDALRALRGVNTTIAATVVAEIGDITRFENPRQLMSWLGLVPSEHSSGSTVRRGRLTKAGNALARTMLVEAG

SEQ ID NO: 301960 - protein, 312 aa, unidentified
MNTEIFVGIDISKEHLDVAFGPDQAPQRFPYTPEGVNRLLAHLQALSPTLIVLEATGGLEADLMDALSRAGLPFSRVNPRRVRDFARASGVFAKTDGLDARILAEFGQKMRPPVTVLPDEQTRHLEILVARRRQLVEMRAIEEHHWRTAPETARPYIRKHLEWLDAEIATLEREMADWVNQTPLAETVEILDSAPGVALVGAATLVAEVPEIGRLNRKKIAALVGVAPYNRDSGTQKRQRRVTGGRQAAREVLYMLTIAGIRCNPVLRTFYQRLRAAGKPPKVAIVACMRKLLTILNAMVRDRRKWCLELAG

SEQ ID NO: 301961 - protein, 395 aa, unidentified
MISVGIDVSKGKSTVCILKPGGEVIKPPFDMVHAVENLDFLVSLINSFDEETRVVLEDTGHYHIPVASYLSSHGIFVCCVNALRMKKFCAQSIRRAKTDKIDAVRIASFGITYWSELTRAYDAPDTYGELRFLARQYYQITSILVKAKVNLSNLLDQVMPGISNLLQNQKDNHKLTEFVDRYIHFQTILDMGEKKFTADYCKWAKKKGYRCNERKAADIFALAQNGIPSLPNSQSVKIAVSEAIKVIRSTEESRNTILAQMQEICKTLPEYSVVRDMNCIGDVLAPRIIAEIGDVRRFKNKHSLIAYAGIDAPPYQSGAFNASERKISKRGNSYLRKTGYEIMQSLIKHKPAGDPVYDFIQKKRSEGKCGKEAMIAGLNKFLRIYYGKVMELYSE

SEQ ID NO: 301962 - protein, 402 aa, unidentified
MYTVGIDVSKGKSMISVMRPGGEEVLRPFEVHHTSHDLTLLCDKLKSQGDETRVVMEATGSYHLPIAWLLDHEGFYVSVVNPVLIHGYGNNSIRRGKTDRKDALKIAGYGLQYWNELPRYMPQDPARQLLKTCYRQYQEYSKTSSVFKNSLISLMDLYFPGVNDLFTSPVRPDGSQKWIDFVAAFGHCDCVRSLSERAFITRYQRWCAKHSYQFSPDKAKKIHAFALNCVAVSPNSKTVRILVDTAVSQLRTNLISLAAVRAQMQALASSLPEYPVVMSMFGAGPSLGPQLMAEIGDVRRFHSKKALVAFAGIDAPPCQSGQVNVLSRSISKRGSPALRRTLFLVMNVINMCSPAEDPVYQYMAKKRSEGKKYQVYMMASANKFLRRYYASVNAYLGTLGSN

SEQ ID NO: 301963 - protein, 394 aa, unidentified
MIGIDAHSEKIVASFIEMHDGVEGKPRNLVTTVEALEPTFKKRIQGGEVAVLEASTNSFSIASRLNAIGIDVRVVTSDCLAGRQRSDKINDRIDAENLARAFISGDTQLVWQPSPKFRGMRDLFFAYRNAVKNATQASNRIWGFMNGHGFKSPSRGKQKKLSTLEKLLKERTWNADEKFLLEQMVGDYEHAIRQRDACEVKIKEHVAASEDMRRIMQVLGIRFIVAFALLAFIEDIRRFETAKSLVRYIGFNPSECSSGTKEGRHDMSRFGRHDLKGLMIQGAQAAMRTGKGNMHKWARHLCVSGKNRNLATCALARKMTVYVWHILMGHPTPNAAPDPAFVRKLSKLASELGKDALEKLGFKSAKEYVETVSNTIYANKKKPPELQTGPLASA

SEQ ID NO: 301964 - protein, 429 aa, unidentified
MNYTQNEKIEQVTDSTMVVGIDIGSQIHYARAFDNRGRELTKRVFSFHNDLEGFNSFNLWAETLKTENNKTSILIGCEPTGHYWFAFAKYVNDHQKRLVMVNPFSVKKIKELDDNSPKKTDSKDPKTIAKLVVDGRYSIPYVPEGIYAEIRDLVYSRDRIMKQHNISANRIQRWLAIHFPEYLGLYTRFDAISGLAVLEKAPLPKDVIALGVNGIRKIWHDKKMRGRGVTEDRAKTLVEAAHNSVGLDGGIGTKSELYMLLEEHRLWTSQLEAVNKVLEEMILKVPHVEKLLAIKGVGSITIAGFIAEVGDIRRFDSPKQIQKYAGLELVENSSGKHKGRTRISKRGRRKLRKILYQVMVPLLARNKEFRGIYDYYVTRVKNPLKRRQAMVAVSCKLIRVFYAVLTKGMEYDRFKMMSDIHRKSDIIAA

SEQ ID NO: 301965 - protein, 408 aa, unidentified
MKTLHKRCAGIDVHKTEVVACLRVITHRKVEREVRRFPTTTHGLLELAEWLESARCTHVAMEATGVYWKPIWHILDGRFALILANAAHVKTVPGRKSDVNDATWLADLLAHGLIRPSFVPPAAIQELRDLTRSRKQLTREVAQHSQRIQAVLEEANIKLCSVITDIMGASGRRMLKAMIAGEADAHKLAAMGSERLGCAPETLVEALTGRMREHHRFLLAQHLQTTDQLEKTIAAFDARIEEKLVPFRDTVERLKEVPGLGSTVTEFVIAEIGLDMSLFPSAGHLLSWAGFVPRLDESAGKSRSTRIRKGAPWLKPVLVQAAWGAARKKNSYFQAQFLRLKARHGAKKAAIAVAASILTTVYHMLRDGTCYQDLGPEYFTRRNPAKAAARLANRIRNLGYYVEIRPAA

SEQ ID NO: 301966 - protein, 326 aa, unidentified
MALAKPLTVDPSAGSLSRYLQRQYPGGKYHAVYEAGYSGFWPARDLFTHEIDTIVVNPADIPTMHKERSTKTDSVDSRKLARSLENKELRAIYIPERKAEEYRLLNRYRSQLVRDETRIKNRIKAILAEFNYRVPVELEGNRWSGAYLQWLQKVNFETPYAQIAYNERLEQLAESRKRLAKVLRELKLMATQEPSIGSLVKLLQTVPGVGFLTAILFVVELIDMHRFKRFDELVSYIGLAPSVHQSDERSYSGGLTKRQHHHELRSRLLESAWIAVRKDPVLTLKYGQLCKRMNKNKAIIRIAKMLVSRIRTVWKTQTPYVYGVIE

SEQ ID NO: 301967 - protein, 340 aa, unidentified
MNVTTIGIDLAKEVFQVHGVDEHGKLLFNKPLKRAQMTTFFANLPPCLIGMEACASARYWAATLLSLGHTVKLMAPQFVKPYVKTNKHDAADAEAICEAVTRPTMLFVPLKTPEQQAVLALHRIRQGFIKQRTAQANQIRGLLAEFGIIIPQGIHHVRQQLPAILEDADNRLPELFCEQLSLLQAHMVHLCEVTTTLDKQIEQCHQHHPLCQRIGKIPGIGPITASALIATIGNARNFKNGRQLAAWLGLVPRQHSSGGKQVLLGISKRGDTYLRTLLIQGARAVLQSVKRKQDALSGWASRLLARSISNIAAVALANKNARIVWALLAKDQEYCAPMRT

SEQ ID NO: 301968 - protein, 320 aa, unidentified
MSESSVVIGIDVAKAQLDVAVVGTAAKPAQFTNEVDGHTALLAWIQPLAPQLVVMEATGGHESLIACALQAAGLAVAVVNPRQAHAFAKAIGHLAKTDRIDAAALAELGRTLLARDELARYLRPLASPEQQDLAALVTRRRQRVTMLHMERQRLALARPAVRSSVQTLIAAIERQLDEVDGDLTRHVSQHFAELDQLLRSMGGIGPVASATLIAELPELGRLGRRQIAALVGVAPMACDSGTMHRRRHIRGGRFELRRTLYMATLAATRHNPIIRDHYRRLVDAGKFKKVALIACMRKLVTILNAMARSHTEFNQNHARA

SEQ ID NO: 301969 - protein, 358 aa, unidentified
MEKLIRVGMDTSKSVFVLHGVDAAEKVVLRKKLRRQQVIEFFGKLKPTKIGLEACGAAHHWARELEALAHEVVLLPPQYVKPYVKRGKNDAADAEAICEAMSRPTMRFVPVKTAEQQAALMLAGTRDRLIRMRTQLTNAIRGYAAEFGLTAAKGLDKIEPLLARLTAATELPKLAKELFAAHAREYAQLKVEIQKIEAKLMAWHKHNELSRRLVEVPAIGPIGASLVVMKVPDPHAFRSGRDFSAWIGLTPKDHSTAGKTRLGVITRAGDETLRSTLILGATAVIQQVRRGRGHPSPWLIDLLKRKPPKLAAVALANKTARIVWKLMISGERYNPMRLRDTRSPSARCGSEPTAITQA

SEQ ID NO: 301970 - protein, 482 aa, unidentified
MKSKPQEKNERATNHPTQHHWHEMNRKQRRETMRKIQSEDLTLEVLHPDAAGIDIGNESHYVAVPPSRDTQPVRRCGCTTAELKAMADWLKQCGIRTVAMQSTGVYWVAAYDIFEQAGLEVYLVNARDTKNLPGRKSDVQESPWLMKLHTYGLLRNSFRPSQEIRTMRTYWRQRNDLVQSAGRHILRMQKALTQMNVQLANVLSDISGVTGQAIIKAILAGERDPHKLAQLRDRRVKASQEQIARYLEGNWQEDLLFVLKQEQEAYEFCQQQIAECDRQLAQYLQQREDRSQGAPLPEEKRKGRLKKKRANKPQFDLREGLFRMTGTDLTRIDSIDVMTAMTVLSEAGWDMSKWKTEDHFVSWLRLCPDNRISGNKVIGKGRLATNNPITIAFKMAASTLRLSKTYLGAQFRRFRTRLGAPIAIKAMAAKLARLVYRMLRYGMKYVDQGAAFYELQHRQLQVKQLKWKAAKLGFQIVQATAA

SEQ ID NO: 301971 - protein, 410 aa, unidentified
MGYETLIRRAHVMTKKNTLKSLPTDTEFRVVGLDLAKSDVSVAAIPVDDNTPSLVDRMTYADLLDWAGKISPTLFAMEPCNGYSLLCLQLENLGHEIKVISGWTVSMWINTHLSGQKTDLNDAIALARLAVSDAELTPIRHKSITEIRIQTVQAVRQQLMSQRSKSIVSFKALAQQWGIPCAAGHRNLKKLRESIEAKVDLITRPVANAMLFLLDAVKSLDRQIGQLNQTLQELVMSDERGRLLQSVLGVGTQISARVITVVGNIERFNSPRSLVAYVGVAPRNFITGHKNLTKKKHGNCPDLSHKGQGKISRRGDKLLRSLFIQGAACLYMQFCKDQLPECQLKRWILKQLASQKPYGKLIVSLAAKLIRIVWAVLTYGEKFNIQKAGMTRSMWSEMALETPLNKEVPA

SEQ ID NO: 301972 - protein, 389 aa, unidentified
MDSPPPRHHSATVAFEEANGSEGETMKKHSSKNDSLSSTDVELCTTISVDLAKQVFQLAGEDAAGRVIYEDRIKSRQSFHDFLLKLPATVTVLMECGPGAQAWARLLQAKGNAVRILPAQRVAEHRSGAKNDRNDAHAILRAGRDISIASIPIKSTTALAIQALHRIRRGNIKRHTALGNQIRGLLLEHGVSMPQGDTAISNHVPRALEDASLPLPDLLRELLDELLTDWLSLGQRIAGLSKRLETTAQEDQVAQRLITIRGVGPIIATAIVAKQTEPSRFASGRMYSAFFGIVPDEHSSGNKVRLGKMSKRGDGYIRSLMIQGAHAVLTQLRPDSDEPDDRRLLRWLSRLGARRRRSDWLIEICASSGLCCRATRFTNANRTIMRRLQ

SEQ ID NO: 301973 - protein, 338 aa, unidentified
MVYGAIDLHMRDSQIRIVDAEGRVLRDARVRTTAERLVAVFTGYGPMRILWETGTESDWVAEALEAAGHAVIVADPNYAPMYGEIRRKVKTDRRDVAALAEANRQGWYRATHRVSRAQRDVRQVLRSRRHLVRMRAGTISLIRSLLRQDGYRLPSGSSAQAPDRLAALALPARLRATIAPLQRMVETLTTEIATVDTSLATVADADPIVERLQSVPGVGPVVALTFRAFVDDVSRFAHAGQVSAAIGLVPREDSSAERRHRGHITKAGPRELRSLLVQAAWACWRSKASGTLRAWVERLAGRRGKRIAVVALARRLSRILFALWRDQSVFTTATLAAA

SEQ ID NO: 301974 - protein, 348 aa, unidentified
MEHFVGLDVSVKATSVCVVDDGGKVILEQKVLTEPADIIALLTSLDVSFCRIGIEAGPLSQWLVNVLTAADLPVICVETRHMKALLTAQQINKTDRNDARGIAQMMRVGLFKPVHVKTLVAQKQRMLLTSRKLLQRKLLDLECELRGTLRNFGLKVGVVSGFRYEARVRELVAEFPGLAAIAEPLLSVRRVMRQQFAVLHKMLLDVVRGDPVCRRLMTAPGVGAVVALTYRATVDQPQRFVHSRAVGAHVGLTPKRYQSGETDYDGGVSKCGDALLRTMLYEAAHSLLIHSRKWSWLKAWGVRVAQRRGMRRAIVAVARRLAVVLHRMWVDGSEFRWSKDSTAVPAIA

SEQ ID NO: 301975 - protein, 409 aa, unidentified
MSMDVYHERCCGLDVHKQTVVAVVLTPEGQTTRTFGTTTAALLELGDWLAGLGVSHVVMESTGVYWKPVYNVLELREWTVLVVNAQHVKALPGRKTDLNDATWLAQLLQHGLLRGSLIPRREQRELRELVRYRTSLVGVRTAEINRIHQLLEGANLKLRPVVSDITGVSGRAILTALAAGETDPAALAALGEGRLRSNRAAREAALRGTIGAHQRLVLRQQLAHLDLLDAQIAALSAEITTRLAPHSDTLARLDTVPGVGLRTAEVIVAELGTDMTCFPSAQHAASWAGLSPGQRESGGVRRPARTRHGNRPLRAALTEAARAAAKTQTALGRRYHRLARRIGANKAAVALARHILVLAYCLLRDGTIYHDPTPADLPPRRQARRRQRALADLRALGYHVTLTPVGAGP

SEQ ID NO: 301976 - protein, 388 aa, unidentified
MIEAVIERCAGIDVGKKFVVVCLMVGSLESEPKTELRKFGTIMSELEQLRDWLARENCTHAVMESTGSYWKPIFNVLESDIKVILANAFDVRNRRGHKTDPNDSRWLAHLLRHGMIRPSFVPPRQIRELRDLTRRRRQLVAEGTRERNRIQKVLEDANVKLGDVLRDVLGLSGRLILNALLEGKLSAEEMAQLAQRSARKKIPQITAALERHRLTDHHRFLLQHALRHLDFLEQEVEALNQEIRARLRTPLFEQPHALLQTIPGIKEEAAAAILAEIGPDMTQFPSGSHLASWAGVCPGNHESAGVRKTGQTNRGNNWLRSILTQCAWAASSQKNSSLQNVYFRLSPRCGRQRTIVALGHRLLRIAYQVLWRLQPYSETRSYPLPVTS

SEQ ID NO: 301977 - protein, 394 aa, unidentified
MKLIGIDIGKNKHFFCIMDKDSGEIVSQPASFSNDKEGFDFLLQKIKSYPKDSILIGMEDTGHYHFALLKYLLDLQYTVALINPKTTDFNRKMQGGITKNDKLDTINICDVLDTPERKKQYRITKVNSFDLYEQKQLTRHHHNLKEELNVYKNRLQKSIDIVFPEFNSLFKSKYATVYMNILKTFGSAENIANTDIRTIRKCFEIDGRGNRISLTPERLKERARSSIGISSIAEVIQIKHLSAQIELIEEQLSEIDKKIEEFSIQNNSPILSIPGISHFSGTSILAELGDISNYSKPSQIIKFAGVAPLHYESSQFNAQHTAITKKGSKYLRKTLYQIILPVIRHNPVFNKYYQLKISQGKGHRCAQGHCVRKLLRIIYHLLKTNQQFDPQLLR

SEQ ID NO: 301978 - protein, 390 aa, unidentified
MKVTYQTCCGVDVHKSFLVATIIKTTAGIEPSYQKKRFSTFNNSILDFKSWLLKNECHDVCMESTGKYWVPVFNLLEDQINVTIANPKWVKAVKGNKDDTKDSKWIGDLFRLGLVKSSYIPCRLIRILREYTRYRYKLVSCRSSEKNRYQNALTVCNIALDSVVSDIFGKSSSSIIDYLLEQSGTTINHEEIASKLLKSLKSKEDAVIESIEGYQMTDAQKYRMRLIRAHMDYITAEINDIDKQIESLISSDPDYDKAIRLLTTIPGVKRDSAITIISEIGIDMSQFCNSKRLCCWAGLTPSNNESAGKKKSVRITRAGVYLKPALVQCAHAAVKSDKSPYYKTKYESLVKRRGKKRAVIAIARMILIAIYRRGMESKRSLQNRYACTFS

SEQ ID NO: 301979 - protein, 344 aa, unidentified
MKKVLIGIDFSKEKFDVAIIVKSTSTQEHALFDNKVSGYRKMIKWINSVVEDVPCSSWLFCGETTGGYSRMMSDWLYAQGYDVWIENALVIKRTFPLKRLKNDTVDAFMIAEYALRFEDRVQLYEPMSQALTELREIFLYRHHLVRHRCSFEVRRIEKRFTQQKSANKNVISQSARHIITEINKEIAKCDEKIKEYIESDDQLSSIFAIVTSMPGIGTINAVSLMVYTNNFTKFAYNPRKIACYYGIAPFGRDSGTSVHTDPRVGFIANKMLKSLLTQAALASVRTCPQIAKYYQRLIERGKKPMVALNNVKNKMIAIITAMVRTGCMYQPDNICLATQSVNVK

SEQ ID NO: 301980 - protein, 402 aa, unidentified
MPMLSIGIDVSKGKSTVCGMKPGGEIVYVPFEVQHTREGMLELVSLLRSSGEEVRVVLESTGSYHCPVVAALLENGIFVSVVNSLRMKRFCSQSIRKVKTDRIDAMQIALYGLAYWQELQPTRLPEDTYRELQLLARQYYQMTSLLIKAKVDFNAICDQVLPGMQELMNDHAGRHKLSDFVLRYHHTTHILEMGETRFRKDYCKWAEKKGYRNCERMAALIFATAQNGIPVLPNAPSTQIVITEAIRVLHTVEASRDAILTQMQALAKTLPEYSLVHEMPCIGDTLAPRLIAEIGDVRRFHSKRALIAYAGIDAPPYQSGKFCANNRHISKRGNRYLRKTGYEVMQSYVMHKPANDPIFTFIEKKRGEGKSGKLAMVAGLNKFLRVYYGKVTELYRSLSAIE

SEQ ID NO: 301981 - protein, 370 aa, unidentified
MQFIGIDLHTNKFTCSYRDEHSPPDAKKGNRTETFELNSVGLCDFYRTLTGDTYVLVEATITTFAFVRLIRPLVKEVTVANTYELKQISLARNNTDKIDANILSRTIKMQVLSGEQAVSPVVVPPEGIQELRGLFTTYRLYRKQTTQIKNRIHSLLKEKLYGFTQEEIFDRKSREKIRKIESGTPLAFQLNELFDVLEYVESRIDPLKDQIMAQAEPYMREIEILTSMKGVSVFIAIAVIADIITVDRFKNSKTFTSYLRSAPRVSNSNTSVSVKGTNKKGRKMSATLMTQVLNHVLGASEKLNRWYTRLTVYKKAGLVRTGLRRRVFAEIYQMLKKGEYHYARDRQNHDAKLLQYRRFLKKRKILFETA

SEQ ID NO: 301982 - protein, 311 aa, unidentified
MEADCIAIGIDVSKHRLDFATLGSQQRGSEPNSVSGIAALAKTLAAIGPHRIVLEATGGDERAVARTLFDAGLPVCVINARQIRHFAKALGVTAKTDSIDAEVLARYAAMVCPPLRPMKAENEEEMADLMARRRQLLTMTVMEKNRLQAPSRTQAIRIAAHLRWLEREVARVDRDLDRWIAADPERVATDAILQSTPGVGAVVARTLIADLPELGKLGKREISALVGLAPFNRDSGAMRGKRKIRGGRASVRGILYMAALTGARFNPVLAAFYKRLCDAGKPKKLALAAVAHKLLIILNAMMRDRSRWAHQ

SEQ ID NO: 301983 - protein, 329 aa, unidentified
MQIYGIDLASEKFDVSFVDFEGKIKHIVVKNRKPQIEKFLDKLPVNCRIVAEHTGVYGDLLLMLADIRNIQVSYVSGYEIRHSMGLVRGKSDPVDASRIREYGERYADRLEDTHFPSETIYELRELYATRRLLVEQRKQLRTMLKSDEHRPEKSAMAQEVKLRMMEQLSTQINAIEDKMTELIDNDADLLKNSAIAQSIPGIGPVTAIELIIKTDNFRRVRTAKKCATLAGIAPFPNSTGKSDKGTHVSNMGDKQLKSLLYMCARSAVVHFEKMRIYKMKKHEVEHKHIFVVLNNVANRLLKILYALVKKGEMYDASYLPRDPRLKLAR

SEQ ID NO: 301984 - protein, 404 aa, unidentified
MKGPIVSIDVSKGKSDYQTFKDLNVKYTGSRSIKHNKEGFDEIVNLVREMEKKLETEVCVVYEATGVYHRVLKKVLEDNNIKQFIINPLLSAKTRKNDSLRSPKTDKLDPKSIAKTYYSHSLHNSHKQETIYIELRELSRYYEDILVHIRKDKVAFRAQLDIVFPGYDTLYDDLYGPVALAIIEKYPHPEMLQKKKINTVSKVIQNKTCHRQAVSDTMADKAIEYSKTIYSGCDKDDIEVLILQRFIKKLNEDMAEAERTIGEMIKLAQELPDFNIIKSIPGIGDNLAARIIAELGDMTRFKKKNELVAFAGLDPRISESGQNDGDHMHITKKGNKRLRCLLYLAVTCSIRLKRDDNSIKDFYIKKKQQSNPMCSKAAKTACASKLVRIIYSMCKTGELYQYNK

SEQ ID NO: 301985 - protein, 321 aa, unidentified
MLETSTHVGIDVSKAELEVAVGEETWTTSNDETGIAKLLERLDQRTVKLVVLEATGGYETAAVAALAEAGQPVVVANPRQVREFARSMGKLAKTDRIDAQVLALFGERVRPEVRPLPDAETQEFTALLARRRQVIEMIVAEKNRLKMAPKPVAKDIRKHIEWLKRSLKSVDSDLDRRIKTSPVWRAKEDLLRSVPGIGPVVSRTLIGELPELGYLNRQQIAALAGVAPLNRDSGTLRGRRMVWGGRRTVRVALYMAALTASQRNPTIRVFYQRLRARGKPPKVALTACMRKLLVITNAMVRDGVPWDPTFHASEAQLAHSC

SEQ ID NO: 301986 - protein, 410 aa, unidentified
MWASSMLRKTFGVDVHRDLIVVTKLGEEGKETRSFGVDFEALHRCINWLRLDGCMDGAMESTGIYWVPIYTTLREAGFNICVANAYQVKAIPGRKSDVKDSEWLAYLLRAELIKPSYIPDRNHQDLRTLTRLRTRLAETETDFKNRAHKVLQLCNIRLASKLSDLFGESGLRILEALLNNGGVDGAINASDRRIQAKAEEIKASIMGTLNETDIFELKIILENIKLLQTQIQQVDERISTLADRNLVDKLSKIPGVAPTSAYTFIAEIADPNRFENQKKVGGWSGLAPSRYQTARRDRHGHVTKRGSSWLRRIATQSAKAASKSKSKLAQSYNRIAGRRGKAIATVALARQIVTIAWDTIKTGREYSEEHYAKKTKYRIKHGKAEKYNLNQTSRILSQATRIINPNTSCW

SEQ ID NO: 301987 - protein, 365 aa, unidentified
MDRYVGLDAHAETCTLAVVGPSGRRLTSKVVETNGQALVEAIRSIPGRVHLCLEEGTQSAWLHEILEPEVLEIVVVSPPETRGAKDDLRDAWSRAEELRVGAIRTRVYKAPKHWAGLRSAATTYRMATQDVVRVKNRLKAVLRGRGILADGGVYEGKKRGKWLKELPTSGHRPMAEWLGRELDQLVPLREEAEGWLLKEAKAHPIIKRLSTAPGLGPLRTAQLAAVVITPHRFRTRRQFWSYCGLAVVTRSSSDWVPGTNGKWTRAVVRQTRGLNRKRQPVLKTVFKGAATTVITQLHGHPLHMDYERMLQSGIKPNLAKLTLARRIAAAGALEKGSRESIQPSAGPLDTTGRSQMQAMPPRSTD

SEQ ID NO: 301988 - protein, 315 aa, unidentified
MNTQKIVGVDTHKDTIACYCDGKFKEFRTNINGFKQAIKWAGKANWAIEGAYCFGRAFTAHLIKNGCEVYEINPLLTKNWRGALNVASPKNDYGDAKVISIFANTSNLEKVSFETVKLKEKLSARKALVKQKTKTTNFIKMLFFTRGEQLPFKKLDTQKAVRYLINSDDVIIRTNGKILKEVLEGIKIIEKKIEKETPEKAKKLMQLKGVSFITASTIYTETKGKITTPAKLASYCGVAPLDCSSGKTTRKRNNKGGNRVLNSLFYSFSIAQKRYNPIAKTYYEKKISEGKTPRHARKCLARQLINIVFKILKED

SEQ ID NO: 301989 - protein, 356 aa, unidentified
MNGDTLVDVIVGVDTHKHTHTAVAINAFGVRLGSLAVPVTCKGYRMLDAWARSLGPVRAFGVEGTGSYGAGLSRFLGEEGHTVLEVNRPNRQLRYLKGKSDTVDAESAALAVLSGQATALPKAGTSAVEMIRHLKVARDTAVKARTQAMLTIKAIIIRAPSTLREQLDLISGKMALLRHLAALRPGPITSTTTSAKTSLRAIARRWLALDEEIKSHDLQLQPLTAACAPELVQAHGMATGTAAEMLLLVGDNPERIRSEAAFAKLCGACPVPASSGKTNRHRLNRGGSRKANAALYRVVVTRLRGHQSTLDYVRRRTAEGKNKAEIIRCLKRYVAREIYGYLCAKRRPFNAASSSP

SEQ ID NO: 301990 - protein, 341 aa, unidentified
MPAIGIDTHKRTLAACAVDDVGSVLDERTFSCDRAGFVELAAWAAGVALDVRIGIEGSASYGAPVAHHLIAAGFAVREVPPQLSRRERGRSRRPGKSDPGDALAIARVTLREPDLPPVRLEDRSTELGLLADARDDLVHAQTRARNRLHAHLVVLLPGYGRTVAQLVSGRQLETIERALAGSTGVRAELARALLTEVRDLGRRASELERSIAPLVAGHPLLELPGVGILTAARLVAEAGDVERFRSPAAFAMLAGVAPIPASSGEVRRMRLNRGGNRRLNRALYTIALSQAWHHEPAKAYIARKRAAGKTWAEALRCLKHRVSRPVFRLLQAGQMEWARAA

SEQ ID NO: 301991 - protein, 348 aa, unidentified
MTLVGCDLHSRKQQVAVLDTTTGEVLEQELPHDGDAVERFYRALRPPVTIGIETTGYTQWFHALMHRLGHTVLVGEAGKIRAMVVRKTKTDRRDARHLLDLLKHDRFPTVWMPDPDTRDLRALVAHRVRLVRMRTMVKNGLQAIALNQRLALRSALWTQRGLAQLRGLALPPHTTRRRDDSLELLAWINVRIDQLDAQLAAVVDADPRARRLLTHPGVGPLTALTTVLVLGPVTRFPDGKHVVSYVGLAPAINASADKQHLGKITKQGNALLRWVLGQAAPQAARADDELRRRYFAVLHRRGRPKAKVALARKLLVRLYVMLRDQIDYEEFRRRGRAGQASRAPVTVT

SEQ ID NO: 301992 - protein, 353 aa, unidentified
MRKMQEFIVRGKRIFVGLEDSKKTWRLCVRCDGMVVQTTCMPARYESLSAYLLNRYPECTIAVMYEAGFQGFWLHDLLEEDGIRCEVTPPNKVSCPKDERVKTDKRDAYRLAMNLDTGDYVSCRVPDRERREDRQISRTLSQMQKNIRAEKNRIRRFLDYHGLNGGLPTDTWTDKDYLRLKDMKLPRSLKVSLDVYLRVLDTLFATEKELETELKALCEKERYKESVRIKRSVPGVGWLSAIRFTLEWGNLDRFPTGKRFAAFTGLTCREYSTGETIRRGRITGQSSEYVRSWLIECAWRAIRIDPALLATFRRVWRNSGSKKKAIVAAARKMAVRMRAIELAGQLWCRSVVE

SEQ ID NO: 301993 - protein, 399 aa, unidentified
MVNYVWPFRVIPIRKRAAVTWNGLILIQASSAAPCSGMVAVPKIHPPRRRPVMRFYTQQHKHYCGIDLHAKAMYVCILDQAGTILVHKNLPTTPEAFLRVLAPYRDDVVVGVECIFTWYWLADLCSKEGIAFVLGHALSMKAIHGGKAKNDKIDAHKIAVLLRGGMFPQAYVYPAEMRATRDLLRRHCHLVRKRAELLAHIHNTNSQYNLPEIGKKLAYRANREGVEDHFPDPSVRKTIEVDVSLIDHYDKLLGEVELYITRSAKAHDVQTFARLQSVPGIGQILALVILYEIQDIARFPRVQDFVSYCRLVKCAKESGGKRLGTSGKKIGNVHLRWAFAEAAVLFLRHNQPGKEYFTKLEHKHGKAKALTVLAHKLGRAVYYMLTREQAFDLQRFVAA

SEQ ID NO: 301994 - protein, 375 aa, unidentified
MGEITREAIVRVGVDLAKQVIQVHGVDAAGRRVVARAIKREQFVAWCAQLPPGCVVAMEACSGAHHFARQLQTMGLTARLIAANFVSPYRMEGKSGKNDMTDAAAICESASRPTMRFVPVKTCEQQGVMSLHRVREGLKEERTACTNRIRGVLAEFGLVFGKSPKVLRAVLTDVIEDASNELSTTARLVLQRAFEHWRELDEHIRWCDQQVGQHVRNNAAARRAATVIGIGELGASAFTASVGDFKQFKSAGQFGAWLGIVPRQNSTGGKANLGRITKRGDDYLRTLLIQGAKVAVMTAGKREDPISRWLVQLTARVGWQKACVAMANKNARILWAVMTRDQHFDPKHVSVKPVAKQPVQPSAAPALSAHASCIA

SEQ ID NO: 301995 - protein, 315 aa, unidentified
MNSREAFVGIDVSKEHLDMSVRPTGKTWRLVNDEAGKEQLCRELRKLKPDLIVMEASGGLESALAVKLQEAKLPAVVVNPRQVRDFAKAQGILAKTDRIDAQVLARFAERIRPEVRPLPDEAQRALEGLMVRRRQLVNMMTAEKNRLRRASEEVAQGIRDHIEWLKRQLDGVDRDISRRIQRNDVWKQKEKLLKSTPGVGPVVSRSFLSGLPELGTINGKKISALVGVAPFNCDSGKFKGRRRIWGGREHIRSVLYMGTVAAVRWNPIIRSFFLRLVKAGKSKKVALTACMRKLLVMLNAIIASNEPWKYGKVVY

SEQ ID NO: 301996 - protein, 416 aa, unidentified
MYFVGIDIAKKFHIACLLDENNNLIKKNYRIEADTSSFELFVEFLNNIDKDKSKFLIGMEATGTLFENLYITLKDLGYNVVLLNPYQTSKFREMDTMKFTKNDNIDSQMIAALIKSGRYSKGYVSEELYQSIKSLYRHKATLMQEMKNAKRQVSTLLVVVFPEFEQIIKDPFSVSGIALLNKYPTAKHYKGASGDRILKLFRNIKGNNFNIDKANRLLDLAHNSIFQGNAKDERAYVIQSNLRRITFLKDEIEQCEAEMFQLLNDTNKSIETSKDDEVYIADLVDNLRSIDGVSDKTIFALLSECGDISRFKSGQAFVGYLGLYPVTYQSGNSTKSGKLAKRGAKLAKMALYQASVACVRHNAELKKIYLDRKSSGRASKECIIIVARKLAMIIYSIYKHNKPYDPIRVFNSATTV

SEQ ID NO: 301997 - protein, 345 aa, unidentified
MMVTLGTDAHKKSHTVVAVDDVGAEIASVTVAATPEGHLRLVKWAARWEQRRWAIEDCRALSRRLEADLLRIGDQVVRVPPKLMAGVRRSARTRGKSDPIDALAVARAALREPDLPVAQLDGPSREVRLLVDYRESLVKDRTAAQNRLRWRLHELEPGYDPPPGSLNRYKTLDAIDQLLAAHSSMVAVLAGREVTRIRELTREANQLQRDITQRVTDLVPSLLKIPGCGALSAGKLIGEAADITRFKSRDAYAMWAGVAPIPVWSANNQRFRLNRGGNRQTNAALHRIAITQLRIHPDAQAFIKRRLETGSTKREAIRLLKRKLSNVVYRTLLTDTQQPALAAAA

SEQ ID NO: 301998 - protein, 345 aa, unidentified
MDSMYYIGLDVHKKTISYCVKDASGQVHQEGKVGATRCELDTWMRTLPRPWTVAMEATIFTGWIYDHLLPHAAGVKVAHPVMLRAIALAKKKNDCMDASKIADCLRCDFLPECHMVSSEIRDRRRTLRYRHLLVRQMVQMKNRVSGLLMETGVGYNKQRLHKVGYFRELLSTNEEVNESIRPLLKLSRETIVRLQKTEYALVSSLQRDPLLADRIQRLRTVPGVGPITALTWALEMGEISRFRSIKQAISYCGLCGDEKSSAEKVLRTPLSKQRNKHIQRALVEAAKLAPRQDHQLALVYETEKQKGNANRATLAVARKMVAYLLAVDRAERDFVPVENHRGAAA

SEQ ID NO: 301999 - protein, 342 aa, unidentified
MKRSKNSLAMHPQGVIPVLGIDVSKLSLDACMITETVIAHHRVRNDEGGHRQLHAWARAFSPQYCACLESTGSYGEAIAKYLFAEQVAVSVVNPSQTAAFAKAHLLRTKTDKVDAESIARFARAMLLEGQLPRFEARSEEQNELQELVRHRDALVTQRQQMINRNGDAEHTAIKRSNQELIEMIDRQIKQIEAEIRKLIGSQQRLKAQVELLTSIPGVGPVTATTVLAELPAIERFSKPNQVAAYAGLTPRTRHSGSRTPLSQPISKTGNQRLRKSLYMAALVALRANPVMKQFAARLHQKGKAPKKVIVAIMRKMTHLMYAILKHGIPFNPDHIKNIAITN

SEQ ID NO: 302000 - protein, 393 aa, unidentified
MQRDTKEVLAELVGKLKEKLDPTKVAATSAGEKHQRGELRPNLDRLTVGVDLGDQWSHYCILGLEGERLAEGQLRTTQEDLATFFQGLNEARVVVEVGTHSAWVQEVIRGCGHEVLVANPRLMDGSKRRKRKNDRIDANKLARLGRVDPESLYPIQHRSREVRQDLVMLRARDALVAARTEIINTTRGLVKSMGTRLPKCSSRSFAQKGEEAVAVEMREALLPLVRLAATLSADIKEYDKKIEELGREKYGHTALLRQVKGVGPITALAYVLTLENPQRFAKSRDVGPYLGLVPKQEDSGESQPQLGISKAGDTMVRKLLVGSAQYILGPFGPDTDLRRYGLRLCERGGKNAKKRAAVAVARKLAVLLHRLWVSGEVYAPLHHAMAAPIVAAA

SEQ ID NO: 302001 - protein, 379 aa, unidentified
MKRTQVIQENNSTREGILYMAMELSDKKWKLAFSEGSKERLRNIDAGEMLALCKEIAEAKEKFGLDEATKVISCYEAGRDGFWIHRCLISKGIDNKVIDPASVEVNRQRRRKKTDRLDAKKLLKALMRYMWGDKQACSVVRVPSIEDEDDRQLHRELESLKKERTRHSNRIRSLLILHGIRIENPGRRDFKKYLDSVRLWDGSEIRENLKDRLKREHDRYSQVEEQIKELERIRKKLVRNKASESMARVRQMLKLKGIGIESSWLLEKEFFSWRKFRNRKEVGSLSGLSPTPYSSGDSKREQGISKAGNRRVRAIIVEISWGWLRHQKESKLTKWFNERFANGGKRMRRIGIVAVARKLLIDIWRYIEHGVIPEGAIVV

SEQ ID NO: 302002 - protein, 392 aa, unidentified
MSKASSEVAILVNGERVHGYTMSNDIIGFSRLLKDLKTVSNPEIIFEATGVYSRRLQAFLEENSYDYTRLNPLEAKKQLDSLRVRKTDKIDAEKLASSQFVLNRKPTYVQEKVYQNLHDLSRFYQNLTEDIVRTKNRLHKVLQVAFPEIEILLSTPAGEQYWNLVSIFPTKHWVLELSEVELKETIRQSTSKRISENRVDNLAEKLVGLAKQSYSAISKTSPIIEEVKYNAQELIRLTNRREQVLEQLIELAKPLPEYEIFLSIPGIAETTATSVIGELGDIRRFTSANQINAFISIDLKHYESGDFLGQEHITKRGNPYARKILYKCIHNIASASHTNPCYIADFYEKRKRQSTIASTKPHTIASIHRLIRTMDYLITHNKLYDYSLTQNR

SEQ ID NO: 302003 - protein, 345 aa, unidentified
MSVYVGIDVHRKRSQVAVVDQSGEVLTNRNVPNGVEPILKVIGGLPPGTPAAFEAAYGTSWLVELLEDYGFAPHLVHALRCKAIASARLKNDKAGAAILAQLLRADLLPEAWIAPPPVRALRALLRHRVALVRLRTLLRNRIHAIVADYGHDRPAGGYWTGPGRAWLACLALPAVSRELVEDDLGLIDALQGRIDRLDWEIHQRARSDPRVKILTQLPGVGPFTALVILAEVGDMSRFASARKLASWAGLTPTVRGSDRVAHYGHISKEGSVWLRWVLCEAAQTAKRHPQFAATYQAIAKRRGKKIATTAIARKLLTHAWHLLTDAEATTICQATTTAAPQTGMR

SEQ ID NO: 302004 - protein, 431 aa, unidentified
MEQSTRFIGMDVHKDTIVVAVTATGDIGKATAYGTFPNTAAALEKLVRRLRQAGDGPLKFCYEAGPCGYGVHRTLTKLGEDCVVVAPSMIPRKSGDRQKNDRRDAASLAVLHRGGLLTAIWVPDAAHEAMRDLIRARLAAVRAVRAARQQLSAFLLRHGRLYPGNRKPWTKAHRGWLADQSFAQPAQQIVLEESIDVVRLGEQRRDRVDDYLRAQIPNWSLFPLVRNLCALRGLDTIASAGLAAAIGDPSRFASASNFMAYIGLIPSEHSSGTQRHLGAITKTGDVHARTLLIEAAHCYRFPARIARHKLAAVDAVPDAVRVTAWKAQTRLCQRYRRMMAKGKPRQLVVTAIARELAGFVWAIACITSDAPAKTPASEEVGLTGRRTIIVSSRNGSERRNEVARPAMRHGDARHRRLAEPEEMIAQHRSTG

SEQ ID NO: 302005 - protein, 343 aa, unidentified
MQAITTVGLDIAKSVFQVHGVDAHGNVIFRRQLKRRYVLAFFQKLPPCLVGIEACATSHYWSRELQVLGHRVRLMPPAYVKPYVKRQKNDATDAEAICEAVGRPTMRFVETKTPEQQGCLMLHRTRHLFIRQQTSVINAIRAHLAEFGIVAPVGRRGVDQLLNIVADASDKRLPEVARACVAALGAQLQMLKARILEFDRMIRHWHRSSEVSKRLDAIPGVGPALATALVASVADPKAFRSGRDFSAWIGLVPKQNSSGGKDRLGNISKRGDRYLRSLFTAGALAVIRYAKIHGTTHRPWLTALLARRPTKVAAIALANKLARMAWAMMARGERYKEPAALAA

SEQ ID NO: 302006 - protein, 346 aa, unidentified
MRYSTTVGVDLAKNVIQISVVSGRGKELSNRSLTRKKFAEFLGKQKPSLVAFESCATAHHWARAAERHGHEARIIPAKAVAPFRQGHKTDSNDALAVAEAARRPNIKEAPMKTVEQQGLQAIHRSRELLIQECTALSNHLRGILLEFGIAIPQGFASLLRTLPEVLEDGDNELPDVYRPTLHRMYTRLLELREDIEAMTEEVTRLVKEHPVCNKLTALEGIGPIGALMLYATMGSGRAFSGSREFAAYLGLAPRQYSSGGKTNIVGLSKKVGNCRLRSVLIMGARAYTYRMKEPRSSKDKWLKAITERNGVSRAAIALANKNVRTAWAMVTQGTEYQRRGQLEIAA

SEQ ID NO: 302007 - protein, 491 aa, unidentified
MTVPLEILERVAAAGVAKAPGMVCTRVPHPSRPGRRLTRVWEAGATAGAVVELAEQLAGEGTEMVTLEATSDYWRIWFYLLESAGLRVQLVHARDVKNVPGRSKSGKPDSVWLAKLTERGMLRPGFVPPSEIRELRDYTRLRTDLTWDRARYWSRLEKLLEDSLIKVSSVAGSLDTRPVRDMLEALIAGERDPAVLAGLARGKMKARRAALIEALTGRLDDHHAELARMLLDQIDALTAQVERLTSRIEELIAAIPAARGVDAGGATGPGAGEAPDAVVRSAAARLDEVPGISRHTARVILAEVGPDMSRFPAAGHLVSWARLSPRTIQSGPESSSGRTGKGNPYLKGALGEAAAAAARTSTFLGERYRRVVRRRGRLRALVAVARSILVIVWHLLAGPAAASASSAPAITPAGPTPTARPAVMSASSRRSASPSPWPRPPPEKGPTTQTVPAITGRGPLPPAWPRWVISRSEVRGSNTRSSTGQTCNSKT

SEQ ID NO: 302008 - protein, 388 aa, unidentified
MFFLGIDIGKNTHVASLLDEKAKVIFKAYSFANTLDAAEALLVKLEPYKASLEIGMEATGHYWLSLYSFLTEHNFIVHVLNPMQTDGWRKGIEIRKRKTDVIDSVLIADLIRYGDFLETSLADEDILSLRNLTRFRAYLVNSISDLKRKAIAVLDQIFPEYASVFSNVFGQTSKELLKSLSLPSDYENLSATKIEEVLSNITHKKKASETISTLSDKASRSFGISFCKDSFAFQLKLIIEQICFIEEQIASVELEIEQLMSKLGTNIKTIPGVGNVIGAVILGEIGDIERFDNPSKLVAYAGLDASISQSGEYEASSGKLSKRGSPYLRKALYMAAQRAEFCDPVFHAYYEKKRNEGKHHLVATNAVARKLCHTIYAILKKDIPYEVQ

SEQ ID NO: 302009 - protein, 277 aa, unidentified
MGEISMIGLDLAKNVFQIHGVDASGQVVLRRQLRRNAVEKFFAQLPACKVGMEACGSAHHWARVIGQYGHQVRLMPPGYVKPYVKRNKNDGRDAEAICEALGRPTMRFVPVKSVEQQATLAVQGTRALLVRQRTMVANALRAALSELGIVAAQGLEGLRELMAKLEAPSGEIPEIMRGALLLLAGHWQALDVDERALERQIAKAARCNQDARRLMAVPGVGPIIASTVLAKVPDAKVFRSGRDFAAWIGLTGRDHGTGGKHRPGRISNREIVSCAPC

SEQ ID NO: 302010 - protein, 356 aa, unidentified
MMVVGVDPHKQAHTAVAADELGRRKAQKTVRARRDGHRELIAWARQACPGGRTWAVEDVRHVAGGLVRDLLAAGEAVVFVPPKLMAGARRGGRERGTSDPIDALAVARAALREEIALPAARLDGPVLEVRRLGDYRDDLVAERTRVINQLRWMVHDLDPALAPAPRSLGSARARAKLEAGLAALPACAGRAVALSQLARVAALSAEITGLEQDLAGLVTPLVPDLLAMTGVAVLTAAKILGEAGDIRRFTSPAAFARHDGTAPLPASSGTGDGASDGPHRLNRGGNRQLNAAIHRIALAQARCHPGARALLERRGQDKHETRKASFRALKRHLSDAVYRALKADAWRLDDTAQHAA

SEQ ID NO: 302011 - protein, 503 aa, unidentified
MSAPTTRRKAASSSPASAQEAQAHRQAYGRRKTRAKVKSEARHQKEAAQVEALPVQHPHAAGIDIGSRSHWVCVGFATEAGSCLIQEFPAHTAGLKAIAAFLREHQVNTVAMESTGVYWIPLYELLQAEGFEVLLVDPSYTHQLRGRPKTDRRDCQWIYRLHSVGLLAAAFRPDEKTCQLRAYLRQRANVIRQASRHVQHMQKALEQMNLKLTEILSDITGVTGRSILRAILRGTRAPEKLAKYRDKQCKASEAQIAQALTGSYREEHLFALKLAYEAWQFSLGQVAKVDGQIALQLGRMKCDRALPPLKSKPRPKRRVNSPGFDVRTALYYVVGLDLTEIEGISELTALTVISEIGPGVSRFATVKKFCSWLGLCPNWKKTGGRVKSSRTRRGVNRAAQALRLAAQSLHHSQGALGGFLRRMKGRLGAQAAVTATAHKLARIVYLALKHGLTYVRQSQEEYEAQMKEKQIKALRRKARQLGLEVIDKTANSVPTAVAAPVEG

SEQ ID NO: 302012 - protein, 384 aa, unidentified
MNKHSILFIGLDTHKEFNEVAYIEEHRGSQPVHLGRVSSSKVAVQKLVRQFESKYPGATLHFVYEAGPCGYWIYRLITSLGHCCYVVAPSLIPKKPGEKVKTDKRDALKLAKLLKSEDLTPIYVPEPEDEAVRDLSRAREVAMKDLKDAKYQLKALLLRNNINYKGTANWSQKHLRWLTELVLPHPAQHIVLQEFLHTITERISRLERLDNELTHHVHQWRYYPVVKAIQAMRGVRLLVATGVVAELGDLSRFDHPRKLMSYLGLVPSEHSSGGKRHIGAITKCGNGRARRLLVEGAHTYRYAANISTDMQKRQEGLPKDIIDIAWKAQLRLCKRYKKMIAKGKHYNLVVTAIAREMIAYIWAIAKEVVLTPVNTKLRLARVPA

SEQ ID NO: 302013 - protein, 347 aa, unidentified
MIVVGIDPHSRLHAAAAVDEQGRLLEGIQVGSGPGELARLQAWIERLPRPRLVAIENARGYGLAIVRLLLAQGEELVDVPATLTSSGRRGSGQRGKTDQGDALVVARIGLRDQDRLPRLDATLLDDELKLLADTRDQLIVEAGRWRNRAHALLRVSSPGYQSKTGALASAGSVRRARTIAKRSVAEDPVRGRLAVQALDRLASLERDAGKLEREIRELLRVRGCTRLLAIRGVGPIVAATILGETRGIGRFRSAAAFAAHSGTAPVPASSGRTQRHRLNRGGNRQLNRALYTIAMVQARWDPAARAYLDRKLAEGKSAAEARRCLKRHLANVIYRALTADTEAATLT

SEQ ID NO: 302014 - protein, 317 aa, unidentified
MSIPATQFVGIDVSKQQLDVAVRPSGETWTVAHDEAGLNTLVARLRTLAPALIVLEATGGLEVALAGALATAALPVAVVNPRQVRDFARSTGTLAKTDRLDAQSLAHFADALRPQPRPLPTAQAQELRALLQRRRQLVEMLTAEKNRFQAAPRRIRPQIQTHIDWLQHQIRQFDDDLRALVRSSPLWRDKEDLLRSAPGVGPVLATTLVAALPELGTLTRQQIAALVGVAPLNRDSGTLRGRRTVWGGRAQVRTVLYMSTLVAVRHNPVLAAFYQRLRAAGKAPKLALTACMRKLLTILNAMLKHQTRWAPVVAQHA

SEQ ID NO: 302015 - protein, 346 aa, unidentified
MILIGCDFHPSWQQVCWLNMADGETNNQKLVHASGDAEKFYRRLAVPVRVGIEATGNCQWFLELLGKLGHEVWVGDAAKIRACDPRQQKHDPRDARLLLQLLVENRFPRIWTPSSEEKDLRQLLLHRYKLVRMRVQVKNELQHLAMNKGITKGRRLWSAAGEKVLCELPLAPWASRRREDLFKLRSMLNEQVAALDEAVKHVAEENDRARLLMTQPGVGPITSMAFVLTMGDVSRFPRGKQVASYLGLIPREYSSGGHQRFGSISKQGNRFMRMLLVEAAQCVVRYDEGFRNEYLHRCHTKPRGVAKVAAARKLAVRLYWMLRTNTAYPEIARVGSSSRVPLAGAS

SEQ ID NO: 302016 - protein, 456 aa, unidentified
MARRSKAKGSRRQTKLNIIYTRAAGIDVGSTFHVVAVPPELSAEPVQTFQSFTGDLYRLANWLVEIGVTTVAMESTGIYWIPVFDILEAHGLEVLLVNAQHAKTVPGRKTDVNDAQWLQQLHTYGLLRGSFHPAQDWSALRVYLRHRERLVEYAAAHIQYMQKALMQMNLQLHHVLSDITGMTGMKIMRAIVAGQHDPAVLASYRDARCKASEETLRAALTGHYRREHVFALRQALELYDSYQARIEACDQEVKSTLESLQNDEIAIETLPAARHKKQQSHEPQFAVREALFRVLGVDLSQIDGFSAYTALKLVGECGMDMSRWPTEKHFTSWLTLAPGNKISGGKVLNTKTRRSANRAAAIFRLSAMNVGQTQTALGAFYRRVASRSGKAKAVTATARKLAVLFYNTLRYGMAYEDPGAAYYEDRYRQRVLNGLHRRAKEFGYKLTEVGALEGVS

SEQ ID NO: 302017 - protein, 301 aa, unidentified
MTIHQTYIGCDIAKAMIDVFDPLSRRFSRVANEPAALAGFAAGLVPGSFVVFEATGHHDKALRHAFARAGIPCARLNPMMVRRFAQARGRLAKTDRVDARILSEIGAMFRPDADTPPCPGRERLAALARRRDQLVATRALELRHRDETGEATVVADIEAAITNLSLRIAALEAEIASHVETLDGLAEQAARLTSAPGIGKVTAVTLLAHMPELGTISPKAIASLAGLAPFANDSGTRTGRRSIRGGRPRLRRALYMAALGAIRANQRFKAFYQAIAQRSGSKKCAIIAVAMPMAREAGRMV

SEQ ID NO: 302018 - protein, 399 aa, unidentified
MEKEENELSRPCVGLDVHRNSITATYLDPRGSSKRTWTFPTTRSALAAMSKELDKKVPVILEASTAGKAVAEVLKEAGHELHMAAPAKVALIGKADVKTDERDSATLAHLYQAGFLPECYIPPPEIDRMRQMVRQRQDLGYKVTLVKNQVHSVVTRNLLDAEMNRYTDWFGVGGIRAMARLPLPDAHRAMLGRCLRQLRMLAEQEEELQRELARIAVDREDVRLLMTIPGIDYYSAMAIVAEIGEVERFPNKRNIASYAGLVPRADNSGEKVSQHRGVKGGDRLLKRFLCLAVRGIVRTQQESTIGRFYEKKAKQIGAAKAQVAAARKLSAVIWHMLTFQHPYTEQDGELSDRKAQNVERVARRPSMAMSAAEVEFEAEQLLAKADVLVRMGEEASDNG

SEQ ID NO: 302019 - protein, 366 aa, unidentified
MKKISTVRVNGNMIFKGHKLTIGVDLGDRWSCYCVLDEAGEILLEQKVATTPEAMKQIFEKIPRGLIAMETGTHSPWVSRLLTELGHQVLVAHAQKVQLITKSNRKDDRHDARTLARLARIDPELLGPVRHRSAQAQIHLTVIRARAELVSARTSLVNAARGLVKSYGQRLPKCGTQQVSRELAAGLNAELREILEPLLKEIESLNEHIQEYEVRLEKIARESYPQVELLKQVKGVGTQIALTYVLTLEDPHRFPKSREVGCFLGLRPGRRDSGESQPQMHISKEGDRYLRTMLVQGAHCILGPFGEDSDLRRWGLKLAARGGKNAKKRAVVAVARKLAVLLHRLWVSGEVYEPLRNSHQAMRVVA

SEQ ID NO: 302020 - protein, 337 aa, unidentified
MTDFSLRVGVDISAQQVSATWGTPPDEHRRVVEVEQSPQGYQQLIHQLHQTGHDPAHCQVVMEATGTYWMRLAYTLHDAGFVVSVVNPVQAHRLAQAQLRRAKTDAIDAHLLMELGFKLEPLPWTPPPPLYDALYQRLRQRDAFLEIRTQERNRLHALPQWPEAQAAVIERYCLHIAFLTEQIKTLQTEIEQLLRSDSEWASATHSLLSIPGIGPITAAWLMVATLNFTTRQTVGELVAFAGLAPYPQQSGTSLHRTRGVGRGGHVRLRSALYMAALAAVHSNPMIRRFYTRLRERGKPAKVALCACARKLVLLAWALVTKHLVFDPDFEKPIRCPA

SEQ ID NO: 302021 - protein, 410 aa, unidentified
MRKENIIYVGIDLHKETHTAVMLNCWNQKLGEITIENKPAEFHKLTRKVSRFVTEEKTSIYGLENAYGYGRILAVWLIEKGNIVKGVNTAISYAQRKSVPMYQKSDNYDAEAVALVLINMLDRLPDAIPDDKYWTLSQLVNRRDNINVHQQKLKNQLHEQLCMAYPSYKKFFEDIGRPTALYFFGEYPSTVHLRGKTAEGLAGELRPVSHNNCSVKKAEKILELVRTDGETLRDCQESRDIITRGLVRDLQHYREQMLEVETAIKELLPYFHCTLMTMPGIDIVTAAEILSEIGNIERFPNASKLAKFAGIAPVNFSSAGKGKDVCPKQGNRRLQAIFYFLAIQMVQVSPSGTPRHPVFREYFQKKQDERKNKQQALICIARRLVNIVYGMLKNHTEYREPERRTEEETV

SEQ ID NO: 302022 - protein, 404 aa, unidentified
MISVGIDVSKGKSTVCAMKAYGEVLLSPKDYKHTTEELDRLIKNLSKFNEEIHITLEATGNYHLPIYMYLKSKGYFISIINPLEMKRYRCQGIRNPKTDRIDSMIIAQYGIDFWYRVKQQNDRVQERQELRLLGRQYEQFMKSRVARCQALNGLLDQTMPGVYELLSGFNRNNGKDKLSDFAYDYWHNDNIIKSSEKVFIKKYLNWLKKKEYHQNEKEARQLYVLAKTSISTLSSTAQSTKLLVQEAVNVLKGINLSLFTILNKMRELAKTMPEYSTVLSMGGVGETLAPRLIAEIGDTHMYHSGKALVAYAGIDAPPYQSGQFIGTKRHISKRGSSTLRKIGYELMDSINKHQVKLNEDAVCQFFMKKRAEGKAYRVAMIAGYNKFLRIYYAKVKEVLNKTIQ

SEQ ID NO: 302023 - protein, 418 aa, unidentified
MTRTDPLFVGVDWATELHQVCVLDAQGAPLGVRQVKHRGDELAALCAWLLELAGHQPDRVYVAIEVPHGAVVDTLLEQQFHVPAINPKQLDRFRDRFCASGAKDDRRDARVLADSLRTDRKAFRHLVADSAWTIELREQSRMHDELTAERTKLGNRMREQLRRYFPALAVIVDDPTTAFARALFKLIPTPDKARAVRPARVTKLLRDHRIRRHTAESVLDALRQQPLTVADGVVRAAVVHVEMLAARAKLVVEQQAQVRKTIDAMLTGEPPSNEDTEGTEAEGKQRDAAILLSVPGIGSIVAATLLAEASRLLDDRDYQRLRSLSGVAPVTKRSGKRLCVGMRKACHVRLRNALYHASMVASQHDPTTKARYAALRARGVSHAQALRTVGDRLLRTICAMLRDRTTWTPRNAAEVNAA

SEQ ID NO: 302024 - protein, 373 aa, unidentified
MQFIGIDLHTNRFTCCYRDEHSPTDMKKGKRLETFELNSSGLSAFYQTLTADTYVLVEATITTFAFVRLIQPLVKEVIVANTYELKQISLARTNTDKIDANILSRIIKMQILSGEQAISPVVVPPVAIQELRGLFTTYRLYRKQTTQVKNRIHSLLKEKLYGFTQEEIFDRNGREKIRGIESGTSLSFQLNELLDLLEYVEARIEPLKEQIMAHAEPFIREIEILTSMKGVSVFIAIAIIADIIDANRFKNSKAFTSYLRSAPKVANSNTSVSIRGTNKKGRKLSATLLTQSLHHVLDASLKLRRWYSRLCEYKKAGLVRTGLRRRVLAEIYQMLKKGEYHYGRDVRNHDAKMAQYRRFLAKHKNHDVLKKTS

SEQ ID NO: 302025 - protein, 396 aa, unidentified
MDEAGRRLSSAKLPEGIAGITRLHTMIAARLDPDADLDVHAARVLIGIETDRGPWVQALIAAGYQVYAVNPLQAARYRERHSVSGAKSDPADAHLLADMVRTDHHQLRVVAGDSQLAEAVKVVTRTHKTLIWERTRHTLRMRSTLREYFPAALEAFEDLTAPDTLELLGKAPDPAAAARLTTVQIMAALKRAHRHHRDRRAGEIQAALRTPQLGQPAIVTGAYAVAVRAQVAILGVLNEQIDLLQGQVEAHFGQHPDAEIYTSQPGLGQILGARVLAEFGDDPTRYTDTRARKNYAGTSPITKQSGKKRVVLARYVHNDRLLDALGGQAFAAISRSPGARAYYDKQRARGLGHHAALRQLANRLVGILHGCLKTATRYDETTAWSHHTQEDQLSAA

SEQ ID NO: 302026 - protein, 354 aa, unidentified
MKKLFIGIDFAKEKFDAAIIEAIGLKEFGERQFGTFPNDKKGYRQFIKWVKSHAVNHPETDWLFCGEDTGQCSQGLSKWLYGKGLDIWIESPYAIKHSSGIQRLKTDKADAAMIAEYAWRHQDKASLFKPLSESLEQLREVFLYRHKLVQQRVAMEIRDKGKECEDSSRGLSFIRRKARHLIAELDRTIKECDFMIDRLIDSDEELKANYRIVTSIKGIARQNGACLLIYTNNFSRFDMDARKIACYYGVAPFGKESGTSVHSPAKTSHFANKLIKSLLTQGANIAKMFNPEIRTYYDRLIKRGKHKSVALNNVKNKLLRIIVALVRDKTTYDPKTFQYYQQRWKEKNQESFAL

SEQ ID NO: 302027 - protein, 460 aa, unidentified
MRRKKLAGQSKESGPKKVDWKALEIVHPDAAGIDVGGSEHWVAIGPERDPEPVRRFGCFTVDLREMAQWLVDRGVKSVAMQSTGVYWMPVLEILEQHGLQVYLVNARHTKNVPGRKSDVQECQWLLKLHAFGLLNNSFQPTDEIRIARTLWRQRGNLVAEASSAIQRMQKALTEMNIQLSNVLSDLSGVSGMSILNAILDGERDPWTLAAFVQPGVKATPQDIAQSLEGNWREELLFVLRQQVELYRVYQEKIADCDVALQEHLESFGSKIDVQAQPIGPRPKKKSSKNAPQFDLRTELYRITGIDWSQVNGMDVLTAQTVIAEAGADLSAFPSEKHFTSWLGLSPTNEQSGGRILNRRTRKVVNHAATALRNSATTLLRSQSYLGAQYRRLRTRLGAPKAITAMARKLACLFYRLIKHGQQYVDKGTQYYEAKYREQQIRAVTKRAQKLGLQVVVPNPA

SEQ ID NO: 302028 - protein, 401 aa, unidentified
MATMQANVQRVKRFRELKATLRTDRSRLLVGLDIAQAEHVAQLRHAHTRVVVPTLTIPNTRQGFATLWARIEQAQRATGCREVVCGLEPTGTYHQALASFLEAQGADVLLLSSSVAYWHRRLQDGTWDKNDRKDAANCAELLEEGKVLFYSQPDGPLAELRRLVKCLRRARRELAACKGRWRTTLRPALGPMGEPLPHRLRAELPEVLQAWEPPAPGRPAVAKGRLPLGLATACADLAAQVNAVQTRIRALEQACTPLAERLPAYALLRTIPGVGPTVAAILLAEIGDVAWFTKFSQLRKLAGLDIIRVKSGQFTGQWRISKCGRGLLRWALYQAARGCARTAGGRARLAALTAKRAGDRYAGLKATVELAAKLLRVVWGVWRSGTPYDPQRAGGLQRQPR

SEQ ID NO: 302029 - protein, 364 aa, unidentified
MAQEHPRAEASSSVTIGIDPHKGSHTAAALDGRQRVIGQIRVLATSAGYRELRRWAADWPERRWAVENAGGLGRSVAQWLLGDGETVIDVPPKLSARIRVLSTGHGRKTDQADAVSTALAACGPADLQAATLEGHATTLRLLSDRRDDLVARRTQVLNRLHALLADLVPGTVPPRLSADTAAALLRRSRPPAGPRRVRRVLASDLVREVRRLDSEVAALEDRIAEAVTESRTTLTELFGIGPILAAKILGRVGDVRRFPSAARFASYCGVAPIEASSGDVVRHRLSRAGDRQLNFALYVMALCQARQHPEGRAYFLRKRAAGHSDKEALRCLKRRLADVVYRQLVRDARPAPPTAPSAAPAPRA

SEQ ID NO: 302030 - protein, 426 aa, unidentified
MERIYDNCCGIDVHKKLMVACFIRGREQEIREYGATTRELLEMADWLQQGNCEMIAMESTGSYWKPLYNILESVGLNAMVVNARHMKAVPGRKTDQKDAEWIADLLQHGLLKASYIPDKAQRELRELVSYRKSLVADKTRELNRLQKMLEGANIKISGTISQINGKSARNLLELLVKGQRIDSKKLAWMKENKQLANNLKATPEQLAEDLNGVLSKLQRQMMKELLRHIDELDKHIANLDDQIDDHMKPEEKQAVEAIQNVTGIGPDSAKAIIAVIGTNMERFPTDSHISSWAGLCPGDHESAKKRKSGKTRKGNKLLRSTLVVCAHAAAKVKTSYFYAQYKRISAHRGKKRAAVAVAHSMLIAIYHMLKEGVAFEDLGADYYNQFNTERKINAYLKKLKALGWQEPRATQAGWRLSRSPTKLCEI

SEQ ID NO: 302031 - protein, 417 aa, unidentified
MKCFVGLDVSSTKLDVCIMLSDTSTPVTASLSNDLSGATEIKNHILDLNHTYHFERIVIGMEATSLYSFHPAMFFHEDSQLKELHVEIMVEQPNKIKKYRDAFEENKNDTIDAFYIADYFRIERFSPSFLKEEKYMALQHLTRTRLQIIEQLTRTKQHFIENIYYKCNTLAYQFKKEELSTNLWSSTMMTLITDEMTLDELANMPLQELADWLQKLGKGHFKDSEKLAQTIQAAIRGSYRLSKLQQDSVNVILGLLAREIRNLEKMIKEIDKAIEDMVETIPEYQCLTSIPGVGKVYAAGIIAEIGQIERFKDHPQVAKFAGLNWREKQSGNSNSQHTSLVNRGNRYLRYYLVEAANSVRRYDDEYKDFYKKKYHEVPKHQHKRAIVLTARKFVRLVVVLLRNHQLYTPPRRLMEDN

SEQ ID NO: 302032 - protein, 365 aa, unidentified
MPSFAQPETIYLGLDVHKDSISVGILNPGHEVPDVEKIFHDEASVRRLIARLGDPGLLRACYEAGPTGYDLARLLKSVGVATEVIAPSLIPRAPGDKVKTDTRDCRRLARLHRAGELVAIRVPSPVEEAVRDLCRTRGDMVQDLTRARNRLTKFLLRHSRVWREGSNWTVKHDAWLAAQRFDERALQTTFEHYRSVVLSRDAQLAAVEADLSGWMDQEPFAIPVRRLGAYRGVTSMGALCLQAEVCDWRRFARAASMMGFVGLVPSEYSSGAKTHRGHITKAGNMHLRAQLVESAWAYQHRPYVGPEIAKRQAGLPPQVVARSWAAQLRLCGRFRHLAARKDAKSVVAAAIARELSGFLWAEMTA

SEQ ID NO: 302033 - protein, 416 aa, unidentified
METCMKVIGIDWAQAVHDVCLLAPDGSVVERWRAPHDAEGVRKLLARMEREGGPTAVLVGIESGAPLLLDQLLAAGYTVYALNPKVADRMRDRHSIAGAKDDTLDAYVLADAVRTERGRFRPVARDSDLAEEIRARDRARSRRVQERARLQNQLRDVLRRYYPVLLDLDRPMTDRFLLELLTKYPEPAKAQGARVATLEKLLASHRIRVLKAAELAERLRAPALVCSVPVASACRDEAVDLAAQITLLSSQIEAADAALEALLERHPDRKILRSLPGLGDCLAVRVIAELGDSRDRFADRSSLQSFCGSAPVTRRSGKGRPRVAMRKGCNRVLQAALYAMARASRARSAWARAYYDSYVARGGRKGAAARALSNKWAKIIWTLLRTGEVYAEAKHLATLKAYGVPWVKDVRVPEAA

SEQ ID NO: 302034 - protein, 346 aa, unidentified
MLIVGCDYHPKWQQVAWFDTETGEIGEQKLVNGDGEAERWYRQLPVPSLIGLEATGNSQWFLDLLNQLGHEVWVGDAAEIRASYVRRQKNDRRDAGHVLKLLREGRFPRLWVPSAEQRDLRQLLIHRHKLVQIRSRVKNGLQHLAMNQGMQKKSRLWSVAGQKAFRQLPLVGWAQCRRQDLLQLLVYLDQQIAPLDQAAQQAAEQDPQARLLLSQPGVGPITALAFVLTIGDVTRFPRGKQVASYLGLIPREHSSGGRQRLGAISKQGNSFLRMLLVEAAHSVVRLDEGFRKQYAHRCHSKPKGIAKVAAARRLAVRLYWMLRTNTPYPEIVRIESSPRVPLVGKS

SEQ ID NO: 302035 - protein, 316 aa, unidentified
MPLYGGIDLHANNSVVVLLNEQDQRIYHKRLPNDLATIVEQLAPYHADIEGLVVESTYNWYWLVDGLMDAGYRLHLANPAAIQQYSGLKYTDDHSDARWLAHLLRLGVLPEGYIYPKAQRPIRDLLRKRAHLVEQQTANVLSVQNIILRNTGARLSTNRIKSVSQAEVEALLPDADQALAVSSALAVLHCLAEQIKTVETRVRTRIQSTPLYELLQTVDGIGPILAQTILLETGDIGRFPSVGDYASYCRCVDSTKVSNGKRKGQGNVKNGNPYLAWAYAEAAHFARRFNLRVQRYYQRKQAQTNVPVAHKTVAHK

SEQ ID NO: 302036 - protein, 373 aa, unidentified
MKKAKYYGSIDVDDSNFNVALIKTVGEELLHFKCSSNVGAMIKKIKQKNIHLKDIQLCYEATYLGYTLYRELKSKGIMCEVIAPSLIPKAPGNKVKTDRLDCIKLAKYYLKGMLTPVHIPDEEDETVRDLIRSRKLLVDQVKRIKTHIISLCKRMGFDYRKQRGISSAAYWTQIHYKWLEKEINQLPENSPLRLNLSGLLSTCNNIETFISSYDEQISVIAERPKYKDKVKALNCFRGLKTLSSLTLTTELGDIRRFPHPSKVTAYSGLSIREYSSGGKELRFGITKQGNRILRTVVIEACQFSFKPPKVSNNLKERRIGADPEYINIADRCMHRLSKKSIRMFMNKKHRNKIKVACAREMLCFVWEALHKAA

SEQ ID NO: 302037 - protein, 370 aa, unidentified
MSKTITSFVGLDVHIDSNAIGVAEAGREAPRFLGTVGPDLPQLLKALKKLGKPESQLVVYEAGPCGYGLARQLRTRGYHCEVVVPGKIARRPNERIKTDRRDALTLARLERSGDLVHVVVPDERDEAIRDLSRAREDAVAARLKARQQLKAMLLRHGRRYTGKSSWTLAHERYLADVSFAHPAQHIAFTEYRQAVKDGHERVERLTEALRAQSEQWRLKPVVQALTSLRGIDFVAGVTLVAEIGDFSRFARPRELMGFLGLVPSEYSTGQTRRQGEITKCGNSHARRVLVEAAWNYRFPARISRLLQIRQEGQPKAVREIAWRAQLRLAHRYRRLTARKLHQNKICVAIARELAGFVWDIARQVTPHCVS

SEQ ID NO: 302038 - protein, 440 aa, unidentified
MQSRLERRCIGLDVHRDFAQVAIWQGGVVKQAGRFATTPEGVRAFAQGLGPADEVALEVTGNTWAIATVLTSRAGRVVVSNPAKTRAIAEAKVKTDKVDAEILAQLLAADYLPAVWLPDAATSALRRQVLRRTQLVRQRTRCKNQVHAILHRNLIPRCPAADLFGHKGRAWLAEQDLPPDEQAAAVALLRQLDFHAEELRLLDTDLGQAGLDRPEVLHLMTVPGIDATVALSIVAAVGDFTRFRTPEKLVAYLGLNPKVRQSGGQPAKHGHITKAGAAHARGMLVEAAWSASKAAGPLRAFYQRVQARRGMQIAAVATARKLAVLCWHLIIKGEDYAFAQPSLVAHKRRKLELRAGRASARGRKGTASGYSLTAVRTAERQLAAQAETAYRTMVSAWQPRRPTTPTTASKTRAAGSAVSVAATNGARQFSPSPGNAARQG

SEQ ID NO: 302039 - protein, 359 aa, unidentified
MMVIGIDPHKQTHTAAAVERATGELRGERTVKARAQGHEQLLVWARALDGERLFALEDCRHVSGSLERFLLARGERVVRVPPRLMGEARKGGRSVGKSDAIDALAVARAALREPGLPAAFLAGSEREIRLLHDHRADLVAERTRIQNRLRWHLHDLDPEHEIPAGALDRRLWLDRIGRRLARLAQTAQVRISRGLVGRCRELSRRITELERELEALVAAEAGELLELVGCGPLTAAQLVGEVAGVERFATDAKLAKHGGSAPLPASSGQKQRHRLNRKGNRQLNCALHRIAVNQGRHYEPARAYLARKEAEGKSRREALRCLKRHLTRVVFRILKAIAARRTSQPSTTPTVPQIAVGLT

SEQ ID NO: 302040 - protein, 405 aa, unidentified
MPYILALDVSMGHSYSVLYKDDTCLFEDEIEHTQRGFHALLEEIQHLPERPLIVFEATGIYSRPVEKFFQDHHFSYCLLNPLEAKKQMEESTLRSWKTDKSDAHRLAQTHLKNQRQPKEVQSNFYLGMRDLARFYQEIEKKITRLRMDLHNCLQLTFPELEQFFSNRLTPYALTLIRLFPHPDFVLASTRTKIKNKLINETRKKISANRAEQKADQIIHYAQCAYPAVEKDSIHCQKTIYYAELLQDLLEQKKALATQMIKKAEGSPCFLLYQTFPGIGALTAALLLGELGDITRFKTHKQLNAFVGIDIRRYHSGKYTGQDRINKRGNPKARKIIFFTIRNMIRQQRAAPNHIVDYYYKLKKQPIPKKEKVATVACMNKLLKCMHAMVRAHTEYDYAYAVSVDH

SEQ ID NO: 302041 - protein, 337 aa, unidentified
MKLYGGLDLHANNTVVVLNEQDQVVSQQRVSNELALVLKALAPYQPDIQGLVVESTYNWYWLVDGLMAAGYIVHLANTAAIQSYNGLKHTDDHSDARWLAHLLRLGLLPTGYIYPKADRAVRDLMRKRSQLVRQRTTNLLGMQNLFARNTGIGLNSNRLKQLTPDAVQQLLPDPDLALAVLSNLAVVRCLDEHIAALERVVKARVNLHPAFQPLLSVDGIGLILALTIMLETGEIRRFPTVGDFASYCRCVGSTQLSNGRCKGHGNTKNGNKYLAWAFVEAAHFAIRYNAQIRRFYQRKVAKTHRMVALKAVAHKLARACYHVMRAQVPFDVNRAFA

SEQ ID NO: 302042 - protein, 385 aa, unidentified
MTATEQFSSFVPRDYDIFVGLDVDKKKMAITCSDHGTMRRSLSMSYSASQLLNYTRKHFPGQRVAFVYEAGPTGFGLHDELTAAQYPCLVVSPSMVPSAPRNRVKTNRLDSKKLSEGLRGGQLRGIHVPPPIYRELRHLVQLRDTQVAQLKASKCRIKSLLLYEGIPFPAANEKWSGRVLRELETIPCNASVRFKLDRLIDALQFHFQTAARVQKEIRRFCKNEPGLQQSITFLTSLPGVGTITATHAVARLGDWRQIQNVRQIAGFLGLVSKEHSTGDKENRGEITRIGDPRLRNKLIQCAWTAIRKDPELRAFYRQIYERQPKKVAARKAIVAVARKLTTRMYAVLKEQRPYVIRAASSIAPLTAEETAGLRERLDSAQNDEP

SEQ ID NO: 302043 - protein, 411 aa, unidentified
MIKENYIYVGIDLHKETHTAVMIDCYNQKLGEITFPNRPADFPKLVAKVKKCNTDGKTIVFGLENAYGYGRALAVWLIDKGYLVKDVNTAISHRQAKHRGAMYRKSDSDDAKAIALATLNMLDKLPDACPNDAYWSLGQLVHRRDNIMKQRTRLVNQLHEQLCIAYPSYKQFFNDISRPTALYFWEHYPSRKYLKGKSVEDLRAELVPVSHNKCSTKTCEKILDAVASDKVKNNAYQDARDMVTLSIVSDLQHYDSQLAEVDKMLEQMYKMLGCTLTTIPGVNVITAVKILAEIGDIKRFSNANKLAQFAGIAPLHLSSSGKGKDVATKQGNRRLQATIYFLAIQMVQVSSKGTPRNPVVRAYYEKRKAEGKTSQQALICISRRLISIIYGMLKHGTEYRMPVVESAGENR

SEQ ID NO: 302044 - protein, 422 aa, unidentified
MERMIERCAGLDVHQATVVACVLINERGKRPGKQLRTFGTMTHELEELRDWLVAERVTHVGMESTGVYWRPVHAVLEEHVEVIVGNTRHIRNVPGRKTDVKDAEWIADLVCCGLIRTSFVPPKPLRELRELLRYRRKLTEAQAAERNRLQKLLETANIKLGSVATDVFGASGRAILRALIDNTASPAEMAELARGRLRRKRGELTHALNGRMDDTHRFLLSMQLRRVEDIEALIETLDQRIDEKLTPYRTEMALLTQIPGVDWVVAAVLIAEIGTDMSVFVSVHHLAAWAGLCPGSHESAGKRRSTAARKGNVHLRTILVGAARPAARTKGSYFKDKYYRLKARRGAMRAGVAIAHKILVAAYHMLARRVDYRELGEAYLDQIDQTRTAPNLKRRLERLGYVVSMLLKPPGPDTDPTVAATA

SEQ ID NO: 302045 - protein, 366 aa, unidentified
MEKGITSVGLDAHKVAIIVAMLLPGRSVALLWECANEKASVRRMVRKVMREAPGEVRFCYEAGPCGYALQRWIREAGAECVVVAPSLIPRKSGDRIKTDRRDARKLADLYRAGVLTEVHPPTEEDEAVRDLCRAREDAHEDLVRSRHRLSKLLLRRGWQWLEGKKAWSKGHRLWIRSLRFEHPEDQLVLDDYLLTIEQVEARLAALDQQIEKVSQQERYALVVGTLRTFRGIDTLTAMTLVAELHDFMRFDSARGLMAFLGLVPSEYSSGGKQSRGPITKAGNGHVRRLMIEAAWHYRHRPSTVSLKKRRTGQPTQVIALADKAMLRLNRRFNRLLERGMPRPKVAVAIARELTGFVWAAMRLRPQ

SEQ ID NO: 302046 - protein, 332 aa, unidentified
MNDSGRVLDKSILYHENKEEMRNYFSSIEKPATVAMEATRSWYWLYELLEEEGINVKLAHPLKTKLIGEAKIKTDSIDAHVLAQLERTGFLPESYIPPKEVREQRELLRYRILLVSTRTRIKNRVHDIIDKLGIVHPFSDLFGKKGVDFLKSLSLPPTYQEELNRCLEIIFYLNEKIKEVELEIKKILKEDERAELLITIPGVGNLTAFLLLSEIGEIERFNSSKKLCCYCGIVSGTHRTGGKEYHTSITKQGNKYIRWALIESAQIAIRKDPALYAFYEKLKRTKGSGVAIVAVARKLLTAIYHVLRNGEPYKFNSLTKIHMGKPALDSAH

SEQ ID NO: 302047 - protein, 387 aa, unidentified
MPQLNDLSRSLVALDQDSTIIAVVELSQSSWLVGGVLPGIERQPQKKLEPSAERLLGLLHRWQDEAVRAGKKITRIALAFEAGRDGFWLARWLNARGVEAHVIHPSSVAVSREHRRAKTDRLDTELLKRGFLGWLRGERGHCSMARVPTIAEEDAKRPNRERECLVGERTRIVNRMKATLARLGVRNFKPTLRKAAERLATVHTPEGMPLPPNTLAELQRDMARLGFVVSQIREIEQARQKRLEQETETEPHAMVRQVARVIGIGIETADMLVNEVLSRPMRDRKAVARYAGLTGSPDESGARRREQGLARAGNARVRRGMIQLAWRFLRFQKESALAQWYRARTADSRLGTRKTMIVALARKLLIALWRFVTTGETLEGVILRPAG

SEQ ID NO: 302048 - protein, 387 aa, unidentified
MLQTVAALIPAAVDYERTLVLAIEVSNKSWVLAAQVPGLPHTKAKRTINPEAEALLAAIAGYRARAAAMGRSIERVIAVYEAGWSGFWLARWLMRHGVEVYVVQPSSVPVDRRMRRAKSDGIDSELLLRILLAWLRGEPRVCSMVPVPDEADEDARRCVRERTELISERVGLTNRIGAVLATLGVNDYNPLLRNRGHRLAELRTGLGEPLPANAHAKIKRLLARLELVLTQIAELERERDAVVETEASDKASKMIQQLTALRGIGVQSATVLVREAFVRRFANGKALGSYAGLASSPYSSGGIDREQGIGKAGNRRVRTVMVELAWLWTRYQPGAAQVCWFRERVGSTGRRVRKIMVVALARKLLIALWRFVIDGVVPEGAVLKPAA

SEQ ID NO: 302049 - protein, 333 aa, unidentified
MKNEPIKEFVGIDVSKLTLDVHLYVKNLHCVFSNDSKGHRLMFSWIRKQCIKIEELRFCFEHTGIYSLELAMFLKKNSQVIYIVSGLAIKRSMGLKRGKSDKTDAKEIAKYLFQNHYAIKPTELASDAIQELQMHLSFRSNLVKKLASFKMHRKEFGKINESKGYDQIEQVTAEIMDALKKGIKVIEKQIQEIIYTDEALKNTFENISSIKGVGPILAATMIVITRNFTSFETSRKLACYAGIVPFEHSSGTSYRGKNRISSLGNRDLKSLLTMTAISSITYNPELKIYYQRRISEGKSKMSTINIVRNKLVSRIFACANRNSKYVEIYKFAA

SEQ ID NO: 302050 - protein, 337 aa, unidentified
MKNIKVLGIDLAKNVFQIHGTDAKGNRVCSKRLNREKLVTFVATVSPCLIGIEASTGAHYWARLFESMGHTVKMMAPQFVKPYVKSNKNDQNDAAGIAEAVTRPNMRFVPIKKIEQQDVLLSHRARELAVKQRTAQANQLRGLLAEYGVILPKGIRYIKNLPEILEDNANKLTQKSKIIFMRLYDQFKIYNEQVKNYDKEIEYEANQDGCCREIMKIEGIGPLSASAVVATIGDAKLFKNGREVSAWLGLVPKQNSSGNTIRLSGMSKRGDCYIRTLLIHGARSVVKSCEKKVDKRNIWIADKKRRSNYNIAAVALANKNARIIWAMLSTGECYRGA

SEQ ID NO: 302051 - protein, 430 aa, unidentified
MKRVYSLKRLCAKDFNSIAALAGAKSCVMGIDVAKRELVLMIRCDDAQFIGPYKAANPHQVGDIAELARRLAARGPVQFAMEPSGTYGDALRQALAEAGLALQRVQSKRSHDYAEVFDGVPSQHDGKDAAVIAELCAIGKCDPWTYEPCDEKESLMRFLVEWMDGQSRIHRLWIGRIEALLARHWPEATQCMELRSGTLLRTLAHYGGPAALARDNDAARNLRKWGRRLLNAAKAAALLDSAGKTLGVKQNQADQLRIRRVAREALRASLEAKRANRQLRTLARDNPIIQAQAQAIGVGSACVLWCRLGNPRDYFCAGAYRKAMGLNLKERSSGSYRGPLRISKRGDSMVRRWMHLAALRLIQQSPQVQSWYRDKRLRDGGDHKRAITAVVRRLAIALHKIANGSEPFDSRRLFAGLTAAQSAGGVQRNH

SEQ ID NO: 302052 - protein, 345 aa, unidentified
MENMYYIGLDVHKKTISYCVKDGSGRIYAEAEIPATRLDLDMWMKTLPQPWTAAMEATIFTAWIYDHLKPHAAAVKVAHPLMLRAIAAAKKKNDRIDAHKIADCLRCNFLPECYMASTEIRERRRTLRYRNLLVRQAVQMKNKIAVLLMEAGVSYNKQKLHKVGYFRELLATNQDINDGLRSLLRLCRETVVRLGKTESALVRSLQCDSLLVERVERLMTIPAVGPITALTWALEVGDVQRFSSIKKAISYCGLCGAEQSSANIIKRTPLSKQRNKHLQTMLIEAAKMAPRNSPDLAMIYDREKQKGNANRATLAVARKLVAYLVAVDRRQKDFLIVERENRTAA

SEQ ID NO: 302053 - protein, 372 aa, unidentified
MESIIYVGMDVHKDTYSVCCYKSSEDRNYYEKKMKATSSNIIKYLKSVEKEFGEDTVFVCGYEAGPTGFGLYRDLQKAGYICVVMAPTSLKKAPGNRVKNDTVDARYLAKTLFTKDYSEVHVTTKHEEAIKEYCRMRLSIKKELKTAKQLLQAFLLRQDKKYSDGTTYWTWNHRMWLTTVTFEDGYLQEAFNEYMITINTLEDRLKNIENRIEEIAKDSAIKEKVEKLVCFCGIETLTAVTIAAEIGDFNRFKKAYHFANYIGFGWAEDSSGKKEKVLGMSKCGNINIRRLLTESAKSIKKTNSRGKKSKRLIDRQKGKDPQVIAYADRCRYRLKNKMIHLECRGKNSNVSSTAAARELACFIWGMMTDNIA

SEQ ID NO: 302054 - protein, 370 aa, unidentified
MLNTTTFVGLDVHARSIKAVALDAMTGEVRSATFGYDAAEVAGWVSSVDPSAKCVYESGVTGFDLQKRLASMGIDCVVGAVSKMIKPPADRKRKNDRNDAEFLARMLSVGNVVEVWVPDDGCEAARDLVRALDDAREDLKRCKQRLSKFLLRHGCVFSETTPTGRRKGSWTAAHWAWIKSISFPEKADNDVLAYYVDAVRQAMEDKARLERLVEAEASKPRWKRRIDSVRCLKGIDVTSAADLVFEAGEFSRFKSARSFAAWLGLTPSEHSSGESARQGGITKAGNKHLRRVLVESAWHYLGCSPRSKDLAKGQVPDPAARRHAAKGVRRLVERRRAMLERGVHKNKANVATARELACWCWAVGRMIENG

SEQ ID NO: 302055 - protein, 414 aa, unidentified
MFYIGIDIAKDFSVCSVIDDKEEMIIKPFPFNSSTAGFKKLINNIISLNCDTKDIVIGMEATGLLFENLYRYLKDLNYNVILLNPYQTSQYRNMLTMKYVKNDNIDSLIIALLIKSGRYSKGYVNEEQLQSLKVLFRHKENIKEKLKSLKRETSSLLAVVFPELDKVIKDPFNVSGLILLEKYPTAKHFEYVSVDRILKLFRKTKGNNFNQAKAEHLLSIAKDTIYSGVAKDARAFFIRSNIKLIRALQEEIKSLEEEMIKIFDKQIESIQETKEDENYISSVLDNLRTIPGVSDKTLLALLAECGNLDRFKDAKSLIGYLGLYPTQEQSGNTLKYGHLAKRGARYAKKALYLASVAAIRHNSELKQIFRNQVASGRAKKEALIIVARKLAYIIWAIYKHNQAYNPTRVFVAHP

SEQ ID NO: 302056 - protein, 411 aa, unidentified
MVKENFIYVGIDLHKETHTAVMIDCYNQKLGEITFPNRPADFPKLVTKVKKCNTDAKEVVYGLENAYGYGRALAVWLIDKGYFVKDVNTAISHRQAKHRGAMYRKSDSDDAEAIALATLNMLDKLPDACPNDAYWSLGQLVHRRDNIMKQRTRLVNQLHEQLCIAYPSYKQFFNDISRPTALYFWEHYPSRKYLKGKSVEDLRAELVPVSHNKCSTRTCEKILDAIAGDKVKNNAYQDARDMVTLSIVSDLQHYDKQLAEVDKMLEQMYKMLGCTLTTIPGVNVITAVKILAEIGDIKRLSNANKLAQFAGIAPLHLSSSGKGKDLATKQGNRRLQATIYFLAIQMVHISSKGTPRNPVVRAYYEKRKAEGKTSQQALICISRRLISIIYGMLKSGTEYRMPVVENAGENR

SEQ ID NO: 302057 - protein, 314 aa, unidentified
MRTPVFVGIDVSHAQLDVAVRPGTRFSASNDEPGIVTVVEELRALAPTLIVLEATGSLEVPLTSALAAARLPVVVVNPRHVRDFAKAAGQLAKTDALDAQILAQFAQVMRPAPRPLPDEQTQALAALLTRRRQLVEMLTAEKNRLSLAPRPVRNSVRAHITWLERELLHTDTDLAQTIRQSPVWREKEDLLRSVPGVGPVLTTTLLANLPELGTLTGKQIAALVGVAPLNRDSGTLRGKRTVWGGRAQVRAVLYMGAIVAARFNPVIRVFYHRLRAAGKAKKVALTACMRKLLTILNAMLKHRTPWCAEVAQHA

SEQ ID NO: 302058 - protein, 383 aa, unidentified
MNCVGIDVSKGKSMIAVMRPFGEVVVSPFEVLHTNSELSELARLLKSLDGETRVVMESTGNYHAPVAWLLHDAGLYVSVVNAMLVHDYGNNSLRRAKTDKKDAVKLANYGLDHWLTLPRYVPEENTRIMLKTCYRQYQQYSKVQTMLKNNLISLLDTTFPNANRLFTSPPRADGSEKWVDFVAAFWHCECVCGLSEKAFTAKYQKWCRKLGYNFSEDKALDIYTFACGQFGVMPKTDTAKFLVEQAISQLRTTSAALAALKQEMQSLAASLPEYPVVMEMFGVGPTLGPQLIAEIGDVRRFHSKKALVAFAGIDAPPYQSGQMDVRSRSISKRGSASLRRTLFLVMGVLLQCAPVDEPVYQFMNKKRSEGKPYRVYIDRKSVV

SEQ ID NO: 302059 - protein, 524 aa, unidentified
MATRSPSKNRHPSKPHALHKPRGVIHPRVQAVGPEHFGLVCIDCAKARSRMMFADFYGQVLLEPTTVQHNQSDFENAVTSVRAAMARHRIQDVIVVVERTGRYHGPVQRSFRNAGFEVRIVHPYATKQYRLPADPGNKTDDTDLSAIHRAAVNGFGLLEPEPDPLYAQLQLLARHRRTLVQKRVVLQQQMLEHLQSFMPGYSKCVGDLFGSPAILWVARELGSAAAITPIDLAGLSQQVRQAGLRVYRSTLEKIVAWARSAPAAEEPASLHHRIFLELDADQLAKAQRIQAVEGDLAGLLAGTPYVLLLGIVGINVVSAAEFAGEMGPIERYAKARAITGRAGLFPSRYQSDQVDHRDGALVRQANRDLRSAILTIADNLIKCNDHFAVLAAGWRLRGKDARSIRVQAAGRFCRIAYQMVAGRMTFQHPCAQRRDSVLHKLIRFSYEHDTPPDQLARNLDAAVAQLPRTAHREEAAALAEELTRAPKSRGTGPRPLDTILPAVMAKLEVNLVRSPESGEADPTE

SEQ ID NO: 302060 - protein, 415 aa, unidentified
MEDLGLRALYRRVAGIDVHRMLYVVTVLIELADGSMQRQTREFGGFRRDCRALAAWLTELGVELVVMESTGIYWKSLHAHLENAGVPAWVVNAHMIKHVPGRKTDMADSEWLAVLARFGLVRPSFIPPKDLRELRLVSRYRRKLAAMCASEINRLHKILDDAGIKLGAVVSDINGVSARAMVSALIQGQPIEQMLGLARGKLQQKREDLSASLEGDLSARHLFVLGHIHAHIETLQREIAEIDRYLLSAMQPYACAHQLLQTIPGIDEIAAAMILIEIGDDMTRFGSAARLASWAALSPGNNESAGKRKSGRTRHGNSIIRFILCECANAARMTKSTLAAKYRSLMVRKSHKKAIIAVAHKMIRLIFLMLSRRQPYIDQAIDYAAMSAKKNAPRWIKQLKAIGRWPSSTATAASH

SEQ ID NO: 302061 - protein, 406 aa, unidentified
MDVIYPRCAGLDVHKQTVVACARIAGAGAPRQEVRTFETTTSGLLALADWLESFGVEQVAMEATGVYWKPVWHVLEGYFELILANAAHVKNVPGRKTDVNDATWLADLLAHGLIRASFVPPAAVQELRPLTRTRKQFVRERASHVQRIEKLLEDANIKLTSLISDITGKSGRAVLQALIDGQTDPERLVARIGRVKATRAELLEALRGRVSPHHRFMLKLHLAHIDALDQAIAAIETEVGLGLEPFRQAARLLSTMPGISTISANVIVAEIGVDMSRFATAGHLLSWACLCPRNDESAGKRRSTRLRRGGNWLKTTLVQAAWAAVKVKNSYLQAQFQRLRARRGTKKAIVAVAASMLTAAWHMLRNGTEWQDLGAAHFDRADARKTANRLIRRLEQIGYQITAVPA

SEQ ID NO: 302062 - protein, 347 aa, unidentified
MEKVIRIGMDTSKSVFQLHGVSAAEQVVLRKQLRRRKVLEFFAKLAPTKVGMEACGGAHYWARELRALGHEVLLLPPQYVKPYVKRGKNDRADAEAICEAMSRPTMRFVAVKSAEEQAALMLAGLRDQMVRRRTQLTNAIRGYAAEFGLVAARGLSKIEPLLLRIAEDESVPELAKDIFAAYGQEYAELERRIAKVEVRLMAWFRQSEPSQRLTQIPGIGPIIASMLVMKIPDPGAFPSARHFAAWLGLTPTDHSTAGKHRLGVITRAGDEDLRRLLVGGAMSVIQQADLGRGSPSPWLLGLLKRMELKPAAVALANKMARIAWKLLISGENYDPRRSKVRALDKAA

SEQ ID NO: 302063 - protein, 381 aa, unidentified
METLHSHCAGLDVHQKEIVVCIYIGNSETELTKEIRTFPTFTKHLFEMLQWLEELHITHFAMESTGIYWKPVFNILEDYFDITLANAQRIKNVPGRKTDVADAEWIAKLLRYGLLEKSFVPPADIRELRDLTRLRKKMIGNMTAEKNRIQKTLECSNIKLGSIISDVFGVSGRKLLTRLVEQGYVNSHEVEENIHGSMMPKASQITESLFGTLNPHQIFLIRQSWNHILFLEESIQQIEEKIDELLSPYPEQVELLLTIPGVKKHAVASIIAEIGVEMRQFPSAQHLASWAGLSPGNHESAGKKKSTRTKKGNPHIQSMLCEVAWAISRTRHTWLSGKYWSLAARRGKKKALIAIAHKVIKIIYHILDQRSGFIEYSKALS

SEQ ID NO: 302064 - protein, 353 aa, unidentified
MAVYIGVDLHVRTETVCWMNTADGEIHQHTLDHSRDDLRAFYAQFTAPAVVGIESSGYALWFHQLMEQAGHRLLVGDAYAIRQFARRRQKNDRRDAELLLDLLRREEFPVVHRPAPPSQDTLALLRYRHRLVRMRTMVKNGLQAVALNHQLRLGFRLFTVRGQQQFAALPLSGAYATQRQQSQVLLTTLEAQIAAVNQELATRAAADPRVVRLRTHPGVGLQTALAVVHTLEPVTRFDRARRIAAYCGLDPSEHSSGDTTRYGHISKQGNRLLRFLLVEAAWSAVQHEEDLGRFFRRLRARKKPHAVTVVAVARKLVLRLYRMLREGIDYEEFRRRGRDARRARQCASPAQRG

SEQ ID NO: 302065 - protein, 401 aa, unidentified
MAPTAGIDWATEAHEVCISDEGRVTGRFSVAHDEQGIATLAAELVKIGVARVAIERPDGILVERLLDARIEVLAIHPNQVKAARPRFAVAHGKSDRFDAYVLAELARTDAHRFRVLVADGDETKALKALTRAREDLVGVRVELANQLRAQLAAFWPGALIFAEVDSPISLAFLERCPSPADAKGLGPRRLAGFLARHRYSGRRDAEELLERMRQAPVGRAGELETEARRAVVLGLVGALEPIVAEISVLTSQIRGALAAHPDAAVFAPLFRDRKTAISPATLIAELGDCRGRYPTEAAMAADAGMSPVALESGKLRVATFRRACDKRLRAAVARLADSTRHWHPWAREVYAKARARGQDHPHAIRTLGRAWIRVLWRCWCDRVPYDPARHGNLNRLQTVGG

SEQ ID NO: 302066 - protein, 400 aa, unidentified
MLSVGIDVSKEKSTVCGMRHLGEIVFGPFEIAHTESDLSELARMIVRLDDDARVVMEATGIYHLPVATFLREQGLFVSIINPYEMKVYRSQDIRKVKTDKRDSMVIANYGVDKWINLREFTPQEDVYAELRLLGRQYRFFMESRIEQLLNLTHLLDYTMPGLKSCFSGWSEYSGKDKLCDFVEEYWHYDNIIKFSESKFVERYQKWTKKKGYQFSETKAVQIYRLAKEGIPTVPSNAPSTKMLLLEATKALREINSALFAILTRMKELAKTLPEYPVVRAMSGVGDVLAVKLMAEIGDIRKYHSSKSLVAYAGIDPPPYESGKLIGTNRHITKRGSSTLRKIGYEVMRCVKANGRSEDDPAVYDFMLKKESEGKAKKAAKIAALNKFLRIYYARVLEVYA

SEQ ID NO: 302067 - protein, 423 aa, unidentified
MRGFGLDVHRDFCEVAIAEGSEVRSAGKVPTRVPALELFAESLVASDVVALEATSGAEKVTSVLQARGIRVIVANTRRLRSISQAKAKTDKLDAQTLARLLMSGLLDEVWTPDERTRTLRRLTNRRERIVRARSRAKNEAHGVLARNLCERPPVTDAFGKAGRRWFATLELPVDERLTLDGCLRQVDFLEAEVEALEREIARHALAWPEILRLMSVPGVNVNTAATFMASVGDIRRFSSPRKLVSYLGLDPRVHQSGGTPARHGRISKEGPSEARHMLGEVAWKVTLTAGPLRAFFERIRARRGSQVAATATARKLVVLFWHMLTSEEDYAFARPAMTRNKVRQLELTAGAPSQKGRKGIAGRKSKRLFEAERELSRQAEVAYRRFISDWTASGPSKGGAGATPGRASQKPLKGKAARQATSP

SEQ ID NO: 302068 - protein, 394 aa, unidentified
MIYAGVDIAKTDHVIGAVDERGAEACRPMPFKNTEAGLERAVAWLEGLAESPSDVVVGMEATGHYWMACYSFLVARGYSVAVINPMQVRAVRKLRGLDKVKNDRVDAGLIAETLRIGRYDETRLATDEVASLRSLSRYLQSLRGMVAELKTQCICLMDAHFPEYAGMFSDMFGAGSRAVLSKSPLPFELARRRASSLARDIAEASRRPGGSAGRAAEIKAAAKSSIGVRLGQEAASFQIKSLVRQIEFADSECDKVEAMVRALLDEVEPLVLTIPGVSYVTGAQIVSEIGDVSRFRNASALVSYAGLNSSVSQSGQFDSGGGPITKHGSPYLRRALWLAANRARQYDPGLRAFYDKKRAEGKPHRVAVTAVARKLCHIVFAVMRDQAPYDRERR

SEQ ID NO: 302069 - protein, 402 aa, unidentified
MRAGLVTSNHFKYTAPKILPPLFYLFESEQNVRRIAEQYSQDIQPGEKTKKGYHLIGLIKKNMTAPLKQTAGIDVAKNELVVSLGRMNYNTEIIIFAHKTFANTKAGFAALLAWTQKQMHKEVKVTYVMEATGVYHEALAYYLSDNQQQVCIVLPNKISNYFRTLDIKTITDKSASQAITRFGLERKLDLWEPRQKVFRDLRQLTRERDQLVQERTMLKNQLHAEQAEAFPNEGSVTRIEERIALLNRHEKEVNKEIAAIIKRDEKLVNQAKIISSIPGIGLLTAIIILAETNGFELIQSKKQLASYAGFDVKEKISGISVKGVPKISKRGNRYLRKAMHLPSITAIRMDERFKAIFGRLISRHGIKMKAVVAIQRKMLELSYTLWKNNVCYDKAYLQQPVL

SEQ ID NO: 302070 - protein, 406 aa, unidentified
MSLSEVFCGIDVHKDLLVATVLSSQLKETKRFVNDQNDINNLKSWLKTHECKRAAMESTGIYWILLYLALEESGFDVMLANAHQVKAIPGRKTDQSSSEWLAHLLRGGLIKPSYVPEKRVRELRELTRLRVKLVENRTAFKNRVQKVLNRVNIRLGSRLSDVFGKAGREILEGLMAGKSVEAILEQTQNRWMKNRCDEIKAVAKGALSDNDIFVLKQLTEMVNHLSGQIREVEARIEVLVNQRDVEIVSSVPGVGKRSAAAIVAEIGNVKRFADCKKIASWCGLAPSVYQSAGTFITGSITKMGSKWLRRVMVEVAHSAVMVRDSKLRLFYLRVKDRKGAKTAIVAVARKMLSIIWHLLVNGEVYVEVGFEKSLKIEKKAYGGRIPLAEMASVLRAAGYVVSGPSG

SEQ ID NO: 302071 - protein, 441 aa, unidentified
MPSYVGLDVHKQLIEACFIDEQGKQLQRCRVAVTRQSIQTFVTHCLQPTDQIVLEATTNTWAISELIRTHVAKVTIANPLKVKAIAEAKVKTDKIDAAVLAQLLRCDFLPEVWIPDQTTRLLREKCAHRAALVADQTRLKNRIQSLLAQRLIPVCIPVLFNGRGRNWLSKLELNAQDRAAIDGYLRVLDQSESEEIALEKTLAQLSYDNDQVRLLMTLPGVGPAGAQALYAALGDWHRFKDGSHAASYLGLSPSTRQSANHCHHGSITKAGNSLARWLLTQAARQVVQHPGPLGVFFRRIHQRKNFNVAVVATARKMVTIAFLMLKNGEPYRYSLPAPTQRKLSAFRVAATGSRRSKSKHRLPMQSREPGTRVDSIPSLNEVYHSENLPPIVKADALQSAERRMLEQMEIADFPERIQVVQMRTRKCKKHAPKPNPNQLSK

SEQ ID NO: 302072 - protein, 361 aa, unidentified
MANSISLVGLDVHAAQTHAAVLDLSTGELRRRRLNGPPGEVVGFLAGLHGQVRAVYEAGPTGFGLARAAREMGIDVQVVAPGKIPRAAGDRVKTDKRDAERLVRLLAAGELRFAFVPTVADEQFRDLIRAIEDVRGDLMRARHRLSKMLLRREVRWDGPGSAWTVTHMQWLRSLRFDDVCSQATLVDYLSSVEMLLARRQTLLVALEQAIPDTRHAPVIAALRCFRGIDTLSAAGLCAEVGDWARFRPKQLSGFLGVVPSERTSDTKRRQGSITKTGSSHARRLLVEAAHHYRHQPAIGYALAKRQDGQDPRVIAVSWRAQHRLSQRWRMLHGQRRKPAGVVAIACARELAAFCWEAATLT

SEQ ID NO: 302073 - protein, 406 aa, unidentified
MEVVYRCCCGIDVHKKIIVACLIKGGKQELREFGTTTSEIKILANWLSEEECEMIAMESTGVYWKPLYNLFELLNLNAMVVNASHMKALPGRKTDVKDAEWIADLLRHGLLKASFIPDREQRELREIARYRKSLIEERAREISRLQKILEGANIKLDSVVKDINGKSARKLLDLIIADRAPDADEVSHLFHGRLLPKLDQIMLSIDGITTPLQRKLIAQIVDHIDDMTKRIADMDDLIKGYMEQYEAAIAAISELPGIGRRSAEVIISEIGMDMSRFPSAAHLCSWAGVCPGNHQSAGKRQHGKTTKGNKTLRSILTQCAKAARNCKDTFFSAQYQRIAARRGKNRATIAVAHSMLIAIYHVLKNGVAFHDLGAEYYNSFNREHKIKSHLKRLYALGWSAESPLPA

SEQ ID NO: 302074 - protein, 468 aa, unidentified
MKYTQQRKRTGKSEQRVSLFERIQPDAAGVDCDCRQKSHFVAVPPERGPEPVREFRTFTADLQRLAQWLAQCGVKTVAMESTGVYWIPLYEILEQRGFEVVLVNARDVHNVRGRKSDVSDCEWLQQLHSVGLLRASFRPAAAMVPLRSYLRQRAILVEELTARIQRMQKALTEMNLMLHTVVSDITGVTGLKIIHAILAGARDPERLAVHRDGRCHASHQELVAALTGNYRGEHLFSLRQNFTAYQFHLQQIAECDAAIEALLNTLAAQQPPPSAALPAPRAKTTKKHAPAFDIRTPLHVLTGGVDLSQIHSIGPQAALQLVAEIGTDMSRWPTEHHFASWTTLAPNNKISGGRLLSSRTPPSANRAAAILRRCAMSLGRTSTALGAFYRRLAVRIGKAKAITATARKLALLVYRALSGKLAYRDPGATAYLKLHRARELKSLRKRAKLLGFELVDRSSGEVLLDPVS

SEQ ID NO: 302075 - protein, 344 aa, unidentified
MEISTIGLDLAKNVFQVHGVDAQGTAVVRKALRRSQMLVFFEQLPPCLVGIEACGTSHYWARELVKLGHEVRLMPPAYVKPYVKRGKTDAADAEAICEAVTRPTMRFVPVKSEEQQAALSMHRTRDLFVKQRTQLINMMRGLLAEFGIDIPQGINRALEKARAIVDGEALDVPPDALRIVERLSQQALDVHAQVREIERDLIVWQRKSDVATRLMTIPGIGPIGATALAASVSDPSQFRSGRQFAAWLGLTPLQKSSGGKERLGRISKMGDRYLRKLLVVGMTAVVRTAKRKPEAVDPNVLALLARKPARVVTVALANKTARIVWAIMARGEVYRERHVPALTA

SEQ ID NO: 302076 - protein, 360 aa, unidentified
MFVERTSVGLDVHARSVAAAAIDGATGEVFRARLVPDAEVVLGWIGGLPGPCAAVYETGPTGFGLARAMAAAGVRCEVAASSKIVRPAGDRVKTDARDALLLARLLRLDEVSSVRVPTEAEESARDLVRAREAARADLMRARHRLSKLLLRHGIVYSGGKAWTCAHDAWLLRQSLPLAGTRAAFEDAYETVVLTTGRRDRLDARIIAMAMDGPFTPLVHRLACLRGVSTLTGFSLAVELGDWDRFTGASIGAYLGLVPCEHSSGGSRSQGSITKTGNAHVRRLLIESAWHHRKPYRPSAVLRRRWELASPAAVARAQAGNHRLHQRWVTYAEHKKRPVIANVAVARELAGWCWSLAILPD

SEQ ID NO: 302077 - protein, 352 aa, unidentified
MKSTFIGVDFSKQTIDVAILKQSKKSQKEFASLKFSNDEESYKELFQWIKEQTHTPQEQWLICGENTGLYSLGLQRFLNLRHIFFWLENPLQIKRAQGMVRGKNDKMDACQIALYAYRFQDKACNVELRNDTLDMIRDLLVLRERLIKNKKQLLTASKELVRVKNNQTSAFIDEHTNKLIKCIIDEIKETEKKILELIKEDEQIEENFDRLCSIKGVGFVNAIWMIIATNNFIDFNDPRKFGCYAGCVPFNYESGTSVYRPDRVSAFANRRIKTILTCAATSAIRYNENIKAYYWKKKTEGKPWRLIVNNVRNKLIHLMFAIIRSQRTYQENYVPAFNQKNADSTRLNLAQS

SEQ ID NO: 302078 - protein, 388 aa, unidentified
MPNGREEKAVRSFGTMTADLLLLGDWLRAAGVTHVAMESTGVYWKPIFNLLEAEFVIILVNAKHIKYVPGRKTDVKDAEWIADLLQHGLLKASFIPPAPQRALRELVRYRLQLTQERTREVNRVQKVLEDANIKLGMVATNVLGASGRAMLEAIVSGAEDPHALAELAKASLRKKIAELERALTGRVQDIHRLLLQLHLEHIDDLNAMIHTLGQEVDRLVVAFNTEDQIQRLDAIPGVGPEVAHMILAEVGTDMTRFPSSAHLASWAGLAPGKNESAGRNQSSRTSPGKRFLKVSLVQAAHAASCAKNTYLSALFRRIAARRGRKRAAIAVARSILVIAYHMLRDGTEYRDLGSNYFDMRDEQQVQRRLVKRLEQLGLKVTVQPASSA

SEQ ID NO: 302079 - protein, 344 aa, unidentified
MDHYAGIDVSLECSSLCVVDASGKIVREAKVASEPEALLDWFRSLRFDLTRIGLEAGPLSQWLYAAMKKAGLAVELLETRHVSDAFKAMPVKSDRNDARKIAQLMRLGWFRPVHCKSITAQEIRAMLTARKLIQSKLLDIENSLRGILRGFGLKVGKTTKRSFAARISELVTGHPALETIAAAMLAAHMVLLREFNGLEKRVRAISLLDAKARLLMSTPAVGPIVSLTFACGIDDPSRFTSSKRAGPHFGLTPKKYQSGETDYSGRISKNGDASVREALYEAAHIMLTKPIKGCAQLKSWAMRIARRAGMNKAKVALARKLAVIMLRMLKDNVPFNPAAKAATA

SEQ ID NO: 302080 - protein, 356 aa, unidentified
MSNITRVGVDLAKNVIQVHAVDAAGKLVTSRTLKRDKFLQWCAQLPAGCMVAMEACGGAHHWCRKLRERGLDARMIAAQFVAPYRVQGKTGKNDMNDAAAVCEAASRPHMHFVPPKTLTQQGMLCVHRLREGLKEERTACINRIRGLLTEFGIVLPQRPQVLRQQLSEILEDASNDIAGMARLVLQRAQEHWRELQAHIQWCDQRIAAHQKDDEQVQRAAELKGVGPITASAVVVTVGDFRQFKNGAQFGAWLGLTPRQNSSGGKSSLGSITKRGCTYLRSLLIQGAKAAVLTGKHNDDPISQWAQRLKERSGWQKAVVALANKNARILWAVMTSNRRYDAQHVSAPPASATPAAA

SEQ ID NO: 302081 - protein, 386 aa, unidentified
MPKVDDLSRSLVALDQDSTLIVVIEMSQSQWLVGGIVPGLEREPQKKLTPDAPALLALLHRWREEAAKAGRGVKRVCVAYEAGRDGFWLARWLHEQGIECHVIHPTSIAVSREHRRAKSDRLDLELLKRAFLGWLRGEKKHCSMAAIPSLAEEDARRLNRERQSLTGEASRIVNRMKASLARLGIRDVNVKLPGAAVRLDELRTGEGAALPPLTRAELRRELARLALIRAQLKEIEAARQQQRQQAPAAYRRKVGALSQVHGLGAATADMLTVEVFSRALRDRRAVARYAGLTGAPDESGKKRREKGLARAGNARVRHGMIQLAWRFLKFQPDSALAQWYRAQTASGRSDIRKTMIVALARKLLIALWRLATTGEVPHGIRLRPAV

SEQ ID NO: 302082 - protein, 349 aa, unidentified
MTMTIVEAARGITGGVDTHRDVHVAAALDPLGGLLGTESFSTDPAGYKALLSWLASFGDVTKVGVEGTGSYGAGLARHLRRVGVEVIEVDRPNRQKRPSSGKSDPLDAVEAARAALGGRATGSPKSRDGAVEAIRVLVVAKRSARQARVKALIQMRHLGYSAPEQLRCRLKGLSVPALVAEGAKLRPGRSPDPVTAATKASLSSLAHRIEALDRELAELDERIEALLVATVPDLLELFGVGPDTAAALVMAAGDNPERLHSEAAWAHLCGVAPVPDGSGKTSGRVKAHDGGDRQANSALWRIVMVRIAHDPDTRLYFDRRVKEGKTKHEVIRILKRYVAREVYRYLPRR

SEQ ID NO: 302083 - protein, 341 aa, unidentified
METKRHIGIDLHRNCFTACMRLENGRNYLSEWKLEDLPRFIKKLRASDEVAVEMTGNTRFFHEAVAPHVARLVTVDPNQFKVISQSVKKTDPNDARNLALYLAKDLLPEVRMKEKTEAQIASLTQTRDTLVKLRTALKNKINNILAAHGINLAKEALCSEKALAGVLEMHFDEMVELELEVIVEQIRGLNQSIGKLEQTIKDRGQKLKGHRNLTSIKGIGNLGASILLSVIGDIGDFADEGKLAAYFGIVPRVQNSNETQRSGRITKRGTKLGRTTLVQCALVAKRYSAYLARYYEKIKSRRGGGKAIIALARKFLGIIYRTLKNNWVFEDFPNFVLAEVA

SEQ ID NO: 302084 - protein, 365 aa, unidentified
MGVPTMAQAKTFVALDVHVSKTVAAIIDRESGELRRQRLSGRASQVAEFVAGLPGPVRATYEAGPTGFALARRLEAAGVDCLVCAPGLIPRGPSDRVKTDQRDAERLVRLLIAGELHRVAVPTIEAESLRDLVRAREDLRSDLMSARHRVAKLLLRHDVRFEGSERNWTQPHLRWLSTVRFEHPGTQAAFDDYRGAVDALVIRRGELERQIAEQLPLSPWAQTARRLMCLRGIDTLTAAGLCAEVGDFERFRHPEQLMSYLGVVPSEHSSGARRRQGSITKSGSQHARRLLVEAAWHYRQPPRVSEPLRRRQAGADPAIVALSWKTQRRLHRVWTRMEQRGKRRTIIAVAAARELAGFCWAISTA

SEQ ID NO: 302085 - protein, 392 aa, unidentified
MYIVGIDIGKNHHEASIVSPKGKQIGRSLRFATTHKGADSLMSFIFKNIGNSPCVFGMEATGHYWYPIYSFLKAKGYTIYVINPIQSDSLRKMYIRQTKNDSIDSFLIAEVIRFGQFGTTSMADENILAMRQLCRYRDSVISSRTEIKLRIGTIMEQIFPEYEKQFSSLWVSTSMGILEKYLTPENIENAPIDELFEIIKDKSHNRLTRAKAISIKEAAADTFGIKIAQDAFSFQLKQLIDRMNFLDKQIEALDCQILEYYEKFDCYLHTIPGIGMIAAATILAEIGDINRFKSSSALVAFAGIDPTVRQSGEFSSTHNHMSKRGSPYLRHAIFLAATTCSFHNSPLNAYYKKKRDQGKHHLTATGAVARKLTSVIYAVLRDSKPYEPKSFC

SEQ ID NO: 302086 - protein, 313 aa, unidentified
MNKCFVGIDVSKATLDVAVLPEDRCWQVARTPSGMAALVETLRSADVHLVVLEATGGLEAPVVAACAAAMLPVVVVNPRQARAFAKATGSLAKTDVMDARLLARLGQTLQPDLRPLKDADTQALQALLTRRQQLVDMLTMEKNRWQQASPRVRPDIRAHIDWLSRRLKDVDGDLAAAIADLPAFRLKDDIIRSLPGAGRVLSMTLLASLPELGHLNRRQVAALVGVAPFNCDSGTLRGNRRIWGGRAAVRAVLYMATLSAIRCNPIIRAFHQRLRDAGKKPKVAITACMRKLLTILNAMVKTNTPWYVDDAIC

SEQ ID NO: 302087 - protein, 367 aa, unidentified
MKNHSSIDQSLSSTDLSACTTLAVDLAKQVFQVAGEDVLGQVRHEQRIKSRVAFYEFLRQLPPHVVVLVETGPGAQAWARQLQEQGNPVRILPAGLVAKHRSGPKNDRNDALAILRANRDEKICAVPVKSVAALAMQALHRARQGYVRRRTAVSNQMRGLLLEHGVALAQGDVAISQKIPRVLEDATQPVPDLLRELIDELLAEWRHLGERISVLTGRLEVAANADMTAKRLMTVRGIGPVTATALVAKETKPERFPNARKFAAYFGMVPDQHSSGETIRLGDMSKRGDVYLRSLMIQGAHAVLQQLRPESQQPDDRRLLRWMSRLGRKEAAIRLANRNLRIVWVLLQNDQTYRRHAGDGQQATMSH

SEQ ID NO: 302088 - protein, 450 aa, unidentified
MNRSRAYKRTDVKRVNLTALRERTLEFGNAGVTVGLDIGKSEIVACLRWPHGEFERPWSIRNPDQIPACMDVLQLVKSAGDSLTVGMESTGYGEAIRRGLTEQGIEVHRVSGKATYDYHEIFDGVPSQHDGKDAAVIAELTAFGKGRPWPWQADSELLALVKHQVFRAEAYRSQQTQWSGRLEGLLARHWPELTNLLKLESPTLLRMIEHYRSPARVAADAEAAQRLAGWGGPKLQESKIRQVIESARLTQGVPTSDAESLWLGEVACDSLAAYRQIQSAKREISALLAGDPSWSRYTPIGAGTLGAIWAHAGDPRDYDSGGALLKGLGLNLKERSSGRRQGQLAISKRGSSEARRWIFFWALRAVQREEVSPWYAEFTQVGRKASEHGQQEARRMKGVVAVMRKLVRGLRCAMIHEEDFDYSKLFADQPVKKKRRRQRRSRHGRSDGLS

SEQ ID NO: 302089 - protein, 358 aa, unidentified
MVDKVTKAAVVGGVDTHKDLHVAAVVDQNNKVLGTQYFSTTRQGYRQMLAWMTSFGTLKRIGVECTGTYGSGFLRYFQNAGLEVLEVTAPDRMERRKRGKSDTIDAECAAHAAFSGIRTVTPKTRDGMIESLRVLKTCRKTAISARRVALQIIHSNIISAPDELREQLRNMTRMQLIRTLGSWRPDASEYRNVTNVYRISLKSLARRYLELHDEIADLDVMIAAIVDELAPELIKRNAIGYESASQLLITAGDNPQRLRSESGFAALCGVSPVPVSSGKTNRYRLNRGGDRAANSALHIIAIGRLRTDAKTKEYVARRVAEGHTKMEAIRCLKRYISREVYTLLRNQNRRINNIPITA

SEQ ID NO: 302090 - protein, 381 aa, unidentified
MSEITRGTMSAIVRVGVDLAKQVIQVHGVDSAGRRVVGRTLKRDQFAAWAAQLPPGCVVAMEACSSGHHWARRLRAMGLDARLIAAHFVSPYRMEGKSGKNDATDAAAICEAASRPSMRYVPIKSCEQQGVMSLHRIREGFKEERTACINRIRGVLAEFGLVFSKSPKALRARLADVLEDADNELSGVARLVLQRAFEHWRDLDEQLRWCDRQVGLHVRGSADARRAAKITGIGELGASALVAGVGEFRQFRGGAQLGAWLGLVPSQNSSGGKASLGGITRRGDEYLRTLLIQGAKSAVMSAAKRNDPTSRWLVQLTARVGWQKACVAMANKNARIVWAVMTREQGFDPQHVSVKPQAKLPAKALQAQHAVTLPELAGAPA

SEQ ID NO: 302091 - protein, 356 aa, unidentified
MSRDIKYIGMDVHQEAIVIAVLNGSGKLVMETILETKASSILQFIHGLRGELHVTWEEGTWAAWLYDLLQPQVQQVLVCNPRRNALLKEGSKSDKVDARKLAELLRTGMLRAVYHGENGLRTLRELGRSYQTISKDLTRVMNRLKAVYRGWGIPCAGTQVYAPRYREEWLSKIAQAGVRRRAELLYQQLDGFQALRRNQRPEILSESRKHKAAKLMRQIPSIGPIRAARLIALIQTPPRFRSKRQLWTYSGLGIETHDSAQYRYVGGQLQRSKKPQQLRGLNQNHNHEMKEIFKSAATRASCGRGPFHDFYAALLAKGMKPEMARLTLARKIAAITLTLWKRGEGFDAEQLKTQAA

SEQ ID NO: 302092 - protein, 416 aa, unidentified
MDAIRICCGGLDVHQETVVACVLKGPLEKKPQSFMRTFGTTTRELLELQDWLREQECREVVMESTGVFWKPVWNLLEGNCELVLANARRVKNMPGRKTDTQDAKWLAQLHRCGLIEASMVPDQEIRDLRDLTRYRTKMVQAVTSEKNRIHKILQDGNIKLTTFISDLYGVSGRALLQKIMNGEVLEEAEVRSLVKTTLKKKVPQLLDALNGKLRRHHREMISEHWEHLTYLEQKIARLEERIEACIGAYAEMIEQIDSIPGIERTSALTIFAEIGPHVAEMFPTDAQFASWAGLSPGNNESAGKRKKAKTKQGNKHLKTALCQAAWANSRSNNRIGQFFRNPKEARREESECSNGAFVDPYLACYDARANALQRNRRTLRRRYVQQEDIGYVFDVYSSNGIQRDVTGNYRIVCPFF

SEQ ID NO: 302093 - protein, 392 aa, unidentified
MYIVGIDIAKRKHEAAVIDGDGAVIIKPFSFTNNCSGYNRLLAMLAKAKLPLDEVSFAMEATGHYWLALFTRLQKEGFRVQVINPVQTNSIRSFYIRQAKTDPRDALLIAEVIRFGHFSESTLHPENIYELRELCRGRHAIVSMQADVKRKVVALLDQVFPEYETAFTNMFSDTSMAILQTCPTPKELSEMPLEELCHLIEVSSHKRFRMAKARELQELARNSFGFAMAGDVFSTMIRLYAKHLDFLKQQVREMDRKIAEIMDTLDTPITTITGIGPTLGAYILSEIGDISRFSSAAKLAAYAGIDPTMRQSGEYNGVRNRMSKRGSPYLRHAIWLAASSAVLHDPALKLYFQKKRDEGKPYMASVGHACRKMVSIIYWKCQEMCSRETPKI

SEQ ID NO: 302094 - protein, 412 aa, unidentified
MQTLVERGCGLDVHQATVVACLLIVRKDGRVQKQLRTFGTTTRELLSLREWLLSEGCTHVALESTGVYWKPVYAILEGAFQIVVANAQHVKKVPGRKTDVKDAEWIADLLCHGLLRSSFVPPQPIRELRDFTRYRRKLVESRSAERNRLLKVLETANIKLASVATDVFGTSGRLMLRALIEGKSTPQEMAELAQKRLRSKIPQLELALEGKLEEHHRFLLKLQLDRLERVESDLAALEQRIQEKLQPYAAQFALLQEIPGVERTLAAVIIAELGVDMSVFQSVSQLASWAGVCPGNNESAGKRKSSRIPKGNVYLKTALVEAANSAARAKGTYLRDKFYRLKARRGYKRAAVAIAHKILVSIYHMLSQNVSYNDLGDRYLDNLNKHHLTRNLVHRLERLGYSVTLTLQQEVA

SEQ ID NO: 302095 - protein, 407 aa, unidentified
MGEGMVAGIDWASEVHVACVLDGHGAVASRFSFTHDGPGIAAMAGRLRAADVAGVAIERGDGPVVEALMEAGLAVFVVPSRQIKGLRSRYGSAGNKDDRFDAYVLADTLRSDGHRWKPLRPDTDPTRALRAACRSRKDLVETRVQVLGQLRANLELAFPGAIGLFTKLYSTISLAFLQRFPTAAKAAWLSPKRLASWLRSMGYTGGVSARILHDRLAAAAPGLAGAEGEARGQITLALVTVIGTLNTQIAALDAEIGRLFAAHPDQHIFASLPRSGTIRAANLLAEIGDCRQRFPTDDALAALAGACPSTRQSGKRTPGRVPLVLQQETPCRGDGLRQRQPHGRPLGRRHLRRRDRPRLPALARHPDPGPRVAAHHLALLAGRHRLRPSPPPQPPLDIGHSYDSSRA

SEQ ID NO: 302096 - protein, 362 aa, unidentified
MAHGIRWVGLDVHAHESTIAIFDQDAGELTTRRVVGRPHELLPWLRGVARPARAVYEAGPTGYGLVRRARAEGIEVEVCAPTRTDRGPSDRVKTDKRDAIRLARRLAAGELTLVTVPSVEHEQLRDVVRCREDIRVDLMRARHRLSKFLLRHEIYYEGSGRAWSRQHRGWLASLRFANRASQLTIGDYLHAHDVLIARRDGIESELEQLAGSSPWAAAIARLRCLRGIDTLSALGLCAEIGQFDRFEHPDQLACYLGIVPSENTSGERRRQGSITKAGSTHARRLLIEAAYHYQRHPGIGIALERRQRDQDAAVIDIAWRAQRRLNARWRQLRHTRHKPNGVVAVAIARELAGFCWEIALAA

SEQ ID NO: 302097 - protein, 328 aa, unidentified
MFYLGMDVAKAKLDCCLLLDEASSKRKTKVVNNTQSGIVDLLAWVAKQNVSPEELHIVMEATGIYHEQAAMALADAGVMVSIINPAQVKDFGRGLAVRTKTDGVDSVVLARYGALLKPKAWVPPPQEARVLQALLVRREAIAQDLQRERNRQEKADATDTPALIHKSLEEGIGFLVKQLAQLQKDIDAHIDKHSNLQKDRALLQSIPAIGPQVGSNILSVMHNHDFGSAEQLAAYLGLVPVERQSGSSVLGRARMSKAGPARIRAVLYMAAVVGTRYNPHVKAVYERLLARGKSKMSALGAAMRKLVHWCFGVLKTQQPYQHDYLKNA

SEQ ID NO: 302098 - protein, 387 aa, unidentified
MNKSNRVIGLDVHPDSFAGAVLLKGKDAASARVVSTSRRVELPELEKWAARHTGEQDVLVLEASGNAFAVAERLRVLQRQVVILDSHRAGKVGKAYCANDRVDAIKIARIYLTALSPVVWQPDAKTRERREVFSAYQAVVKEATRLKQQLRSMLNEHCVRLESGFRLSHPSAINRLLKLREWTPVRAMLLEQLHSGLVSARVRRTRLRRYMAQEVLDEPELLRLTRLCGISLITLYGLSASIGDIKRFSNSRKLSAYFGLNPSVEQTGNWEGEGALKRHGRGALRALLVQSAKKLLRVNNPLQKWGLAVATRRGCNKAAVAVARKLCVAVWHVTQGHVIGAIERMTTLHTKLHKLATELGLNTIKSQGYETKEAFVQKKLFVLRSYA

SEQ ID NO: 302099 - protein, 346 aa, unidentified
MENRNIIGIDLAKNVFQLHISDSGGEKLKGMRLRRDQVVETFARLPPSLVGMEACGGAHHWARTLEALGHEIKLMPPQYVKPYVTGGNKSDSRDAAAICEAASRPSVPSIRVKSVDQQQMQALHRTRELFMKQRIQISNQIRGLLAEFGVVIAKDYSKLRQAVPIWLSEEGNPGILSGLVETLYSKMLKFDDDISELEKKIKFLHDQCEASKCLATIPGVGLITATAIVAGIGDGSQFSSGRKFSCAMGLTPREYSSGDKRTQMGITKRGNSYLRKLLIHGARSVLASRRRNPKGDWIDSLLERRGFNIAAVALASKNARRAWAMLRSGEKFDAKRDEMQRMKRAA

SEQ ID NO: 302100 - protein, 476 aa, unidentified
MKEHKKAKAKTKSEALKPIGEQERDSAGIDIGAKEIWVAVPPERAENAVRKFGAFTRDLNAIVQWLVQCGVRSVAMESTGLYWIPLYQLLEDAGLKVCLVNARHVKNVPGRKSDVRDCQWLQYLLSVGLLLGSFRPAQAICASRSIYRYRQNLLSMAGQHVQHMQAALDQMNIKLHHVIDDLTGATGQAIIAAILSGQRDPLQLAKLRHPRIQAAESTIVKALEGDWRKEHLFVLQKAWDQYQQLQQQLQDCDKELWQYTRELEACIRVVKAAKVVRLRPELVGVEPVNNQSGSKARKMRKKTSKNQPEGPWQQELERFFGVDLTAIPGISVLTGLTLMTELGNDLSTFKTEHHFASWLCLCPDNETSAGKVLRRRTRRSQNRVRYALRMAAYSLHRDKSYLGDKYRRLRTRLGAPKAITAMAHQLARILWTLITRQVPFDLSVFAHQQKLNEHRRLKHLVANARQMGYQLTPIAA

SEQ ID NO: 302101 - protein, 406 aa, unidentified
MEPASSKHTGGIFMICVGIDVAKDKHDCFILSSEGEVLADVFTIPNNAEGFDTLLQTIHRCARPEDKIKVGLEATGHYSYNILGFLLDKGLHTFVINPLHTNLYRKSLSLRKTKTDRVDARTIAAMLMSDVDLKSYTDTAYHNEELKSLTRYRFDKVKERAKLKQSVSRLVTILFPELEKLVPTLHMASVYALLSEFPGAKQIARAHLTHLKALLNDASKGRYGRDMATELRDAARCSVGSVMPAKSLELQHTIRLIRELNTEIEDIESAIQTIMGEMQSPITTIPGIGFRMGAMILAEIGDFSRFDSPDKILAYAGMSPSTYQSGQLSLSGTYSHMEKRGSKYLRYALYNATKYVCLWDSTFEAYLAKKRAEGKHYNVALSHAAKKLVRLIYAMEKSRQPYNSVA

SEQ ID NO: 302102 - protein, 464 aa, unidentified
MGTLQRTCAGLDVHKDTVVACVRWLDDRDRVHSEVRTFGTTTPDLLQLLDWPRARQVPIVAMESTGVYWKPLFNLLEGAMEVLLVNPEHIKKVPGRKTDVKDCAWIAQLLQHGLLKASFVPGRPIRALRDLTRQRTQLTGEKASVANRIQKVLEDANVKLGSVASDVLGMSGRDMLRAIVAGQTDGSALANLARGRLRDKLPQLRKALTGRVTDHHRFLLRLHLDHLTHLEALIGQLDQRIHQEMEKGRPPEPPSGEGGASETVAANAAPAPATAVAPRGVPEQPQACQPPPPSDGPRLPLWSALWLLTTIPGISRRTAEVVVAEIGSDMSRFATGGQLASWGGLCPGNNESAGQRRSGRTVHGNRWLRTALVQAAWAASRAKKTYLAAQYRRVARRRGKKKALIAVAHTLLVMCYQVLKKGQPYQELGPDYLDQLEPGRRTRQVVRQLESLGHKVTLEPNAVA

SEQ ID NO: 302103 - protein, 431 aa, unidentified
MAVARQTFLQENPLMLYLGIDQHSRQITVCVRDQDGEVILRRQVSTKPEKIESFFGEITDQDRDFAAIVEVCGFNDWLIDVLRTWNCKEIVLIQPEKQSKKKTDRRDANKLSETLWLNRERLQAGQRPQGLRRVYIPTQEELANRQITAMRKRLAELRTRTLNRIHRILHRHNLMWEYPTKTFQTKRGRAWLTQVALPQVDRIEMDLLIEQWDLWERQIVQVDEQIVARAGKCAPGDVFSDTDLLTTVPGVSHYSGLALVSRIGPIERFPRPRSLANFFGLTPGCRNSGNAQHRLGSITKEGSSIVRFHLGQLVVHVLKKDRVIRQWYRKIKGRRGSKIARVAVMRRITTILWHILTHREAYSSGGPPLRLRKPDAIHADQLSAATCTANEQAASSARAPRMAQGSSLSPSLTLHRTARHLGPRQSRGPGQ

SEQ ID NO: 302104 - protein, 351 aa, unidentified
MIIIGVDYHPSDQYIAFTDTETGECGERRLNHSDQEAEKFYRELALRGVSVRVGMEATGYSRWFERLLAELGIEVWIGDAAEIKTKRVRKQKTDPNDARLLLKLLLENTFPRIWVPSPENRDLRQLLWHRHRLVQMRTRIMNQLQALAMNEGQRRKKKLWSEQGRAQLEKLPLATWASRRRQDLLELLDRMNPTIEALTAAVEQEAKKWPEVLRLITHPGVGPLTALAFVLIIGTPERFHCGKQIGSYVGLIPSEDSSAGHQRLGHITKQGSSLLRFLLGEAAQAAARCDSDWRRRYMHLAMRRQRNIAKVAMARRLAVRLYWMWRNGREYSQWVKFGSHAGQLGTGHGVN

SEQ ID NO: 302105 - protein, 343 aa, unidentified
MLYAGCDLHKQTISVCVMNPAREVVKRARLLCANEESIRRFFEELGEFEAVVEATASYEWFVRLIEPFARRIVLAHPKKLRVIAESTRKSDQLDAQVLAEFLALDMIPSSYRPTPRQREHRQLVRQRDRIVSRLTSVKNRIRRMLANYNADRPALFTAEGLVFLKQVRLSQADRFSMNQFLEEYDFGSRQLKMAKQQLEAFAASGPIREREQRELLRTIPGVGFVTAEVILAELADVTRFRSQSQVVAYAGLAPGQRESAGKRQELHLEKTGSRLLRSTMVEAAWRLVRHSPRWKGIYEKLKARVKAKKAIVAVARRQLTLATAILQTGQPYSASYVPGRATA

SEQ ID NO: 302106 - protein, 356 aa, unidentified
MSRDIQYIGMDVHKEAIVIAVLNGSGKLVMESIVETKASSILQFIHGLRGELHVTWEEGTWAAWLYDLLQPHVHQVLVCDPRRNALLKEGNKSDKIDARKLADLLRTGMLRSVYHGEHGLRTLRELGRSYRTISQDLNRVMNRIKALYRGWSIPCAGTQVYAPRYREEWLHKIEHAGVRRRAELLYQQLDGLQTLRRTLRPELLAESRKHKASKLLRQIPCIGPVRAARLIALMQTPHRFRSKRQLWTYSGLGIETRDSAQYRFVRGQLQHAKKPQQIRGLNQNHNHEMKEIFKEAATRASCGVGPLRDFYLSLLAKGMKPEMARLTLARKIAAIALTLWKKEERFDAEQLKPQAA

SEQ ID NO: 302107 - protein, 443 aa, unidentified
MKSKIFHLKRQTIAQNFVLGVDPGKEKHSGVVLDPSGLQQGGAFSFPVTRAGYDHTLWQHLERRVKDSGPDLMVVAIETSCNLWVTLAHYFHGKGYRVLLVSPLTTRHARPMMHRDFSRTDPRDAFLVADSAQKGSYDLFRTFEPHLEAAHELSIAYDKLRKDVTQHLLRTRSLMERVFPEFLHAFNIHTKTSLYLLERYFLPRHFKDIDIEEEGRQIHRISRGSYGVPTLEKLKAWARTSIGIPVEGQEDAFRIILDGWIEALRQAEAQLKTVKLAMIARTQEDPTFQIVDSIPNINKNLAAQFTAETRGATRFTHFKQIEKLAGTNVRIADSGKYKGKRRMSKIGNPRLRRIIYQMTVQTARVVPQVRRRFLKRELTKKCYRKNIVAASSQLLRLVVALLKENRLYEERADPAASLETLERRYNKRYKKKQHSRRRVRAAA

SEQ ID NO: 302108 - protein, 453 aa, unidentified
MPAQPKFKAKSNSQLPTLHPYAAGIDIGATQIQVALPHDADPKPVRTFSTFTDDLLKLRDWLKACAIQTVAMESTSVYWIPIFQILEAAGIEVCLVNARHCKNLPGRKSDVSDCQWLQYLHSVGLLRPSFRPPEHICAIRSLLRHRAALVRYAATHVQHLQKALAQMNIQIHNVISDLTGVTGLAILDAILAGQRDPQQLAALKDHRIKASRDLIARSLQGDWRPELLFVLQQALATWRHYQSLITQCDGQIQSQLAALDSPRHLHPLPPSRLQHKKPQRNEPTFDARSELYRLAGVDLTQIPGFQINTSLVLFTELGPDFVRRFPSAKCFASWLGLCPDNRITGGRVISVKTRDVKSRAALALRLAAQSLWRSKDYLGDCFRRWKARLGTPKAITAMAHKLARILWHLVRFQVPYDPVVWAKAEEKLRQKKIKRLHQSAAALGFKLSSTPTT

SEQ ID NO: 302109 - protein, 412 aa, unidentified
MDVVYTHCCGIDVGKKEVVACLVVPGDDGRAKKTIRRFWTMTEDLESLARWLREAGCVQVAMESTGVYWQPVWNVLEEEAAFELLLVNARHVKIVPGRKTDVNDAEWLADLVRHGLVRGSYVPDREQRELRELTRYRTELIEERTAHVNRLQKTLETANIKLGSVATDVLGVSCRAILAALVDPAQTATAEDLANLARGRLRTKIPDLQRALIGRLRPHHRFMLAELLVMLDTLDERIDALSAEIAERTRPFAEDLARLDTIPGIGQRVAEIVVAELGPDLSHFPSPSQLASWAGLCPGNHESAGKRKTGKTRSGNAALRRALVEAARAASRSRTYLRAQYHRLKPRRGAQRAAVAVAHSIIRIIYVVLTRKTAYKDLGPDYFDRRDAAATERQLVTRLERLGNKVTIEKVA

SEQ ID NO: 302110 - protein, 335 aa, unidentified
MKKFDYYVGIDVSKLTLDVTVLYECENTTKTEYCKIENTEKSIARFVKKKFGNYSPEQILFCFEDTGIYSIPLAFYLSTNDFLYWKVPGLEIKRSKGISRGVDDKIASKDIADYAFTKKHKFSPSKMPAKAIQQLRLLFTEREKILKSLLSFEKTSEIKYFTSKEVFNSVVPINRMVIKQLKNALKRIENKMLVVIASEEELKQQYKLITSITGIGRQTAIYLLIVTKGFTVFENWRQLACYAGVAPFSEESGTSIKTRKKVHHFADKKLKSLLNMCAITAVQYDKELKAYYERKIKEGKNKMLVINNVRCKLLSRIFAVVNRKTPFVNRFKFAS

SEQ ID NO: 302111 - protein, 319 aa, unidentified
MSNIIIGVDIAKLKFDVARLCDGKYKHAKFTNDPQGYAGFIIWLISFGDENARICMEATGSYSLPLAEFMTDKGYFVSVINPAQIHAFGKSELSRAKTDKADAKLIARYGIQAKLNAWIPLPANIRNLQAMTRRIEHLLEMQQMERNRLDTADATIIDSINTVLNTLEDELKATRKAIHDHIDNDPDLKDRSKLLDSIPGIGSATIAHLLIALSLHHGYTSAKQAVAHAGLAPAIRESGQWTGKTRIAKNGDATLRKALYMPALVAWQHNPVIRAFCERLKANGKNGKAIACAAMRKLIHLSFAILKSGEPFDPNYSLA

SEQ ID NO: 302112 - protein, 393 aa, unidentified
MFNPLKVRLMRAVCGLDVHKDSVYLCILSEDGELIEKVFGVLTFQLHQMRDLLLAHHVETVSMESTSVYWIPIWRVLAPHFHMRLVNPYFIRQLPGHKSDVADAQWIAECTMKNLVSSSFVPPEDIQQLRQYDRRIFDLDEEIVRKLSKLDAVMQRCNFRLSNYVSNVDCKSYKDVVRKISEGVTDPEVLIEEIHGRIIKHHGRETILASLTGVISQAETDVLRQLREELDLAEEHKQECLERMLKICQEKYPDELRRLQTIPGVKERTATSLIAEIGTDMSKFETANHLSAWSGLRPRNDESNKKFKSRRITHGNVYLRKNIIQCAWAASRTKDCFFSRFSYHQTQVRKKNKMKVIVAVARKLLVAAWHVIHDKTDYVDFQKQDRQASVTNG

SEQ ID NO: 302113 - protein, 323 aa, unidentified
MSSFVGVDVAKNTFDVATHLPNGKHKTKAKLANETKGFKEFEAWLHKQVEPSALIVMEATSVYHLELAEFVYNKGYRVCVVNPATTNAYAKSELRRIKTDKSDAKLIADFAKEKHEKLQLWAPEPLKYRQLKAMVRRLDDLQEMEQMELNRLDVSDEKVKNSINSVLRHIEKEIAETHKAIKKHIDDDPDMRQMRDLIVTIDGIGQKTLERLLAELGDLRKYANPRQLVAAAGLNPKLQDSGLLKGRTVISKIGSARVRAGLYMPGLVALKHNKAIMAMKDRLKANGKAPKQIICAAMRKLLHFVYGVLKSGQPYDPKLALAQ

SEQ ID NO: 302114 - protein, 354 aa, unidentified
MFHVGLDIHTKHIAICALDEKGQVVHRSQVRTIQDLVRVLTGLPDRCEVCYEASCGYGHFHDLLRPLATRVLVAHPGQLRLIFRSKHKNDRNDAERLAKLLYLGEAPAVHVPSLEVRTWRELINCRSQVIAKRTRAKNTVRALLRSAGVTPPKSPGLWSKKGLAWLRQLALPTASQQLRRDLLEEIEGLIRPVRRVEQQLNRQAGQTGAVARLRSIPGVGIRTAEAMAAFIDDPQRFGDAKAVGCYFGLVPCQDQSGDKNRLGHITREGAPVVRQLVAEAAWQAQRRSPTVRAYFERVQRDDPQRKKIALVATAHYLVRVMWAMLKRGTDWQEGPALATASGAAAGGDPAPEVD

SEQ ID NO: 302115 - protein, 429 aa, unidentified
MNNLSLALQAHLDDGTTTLSWCWRISRSDGMAPGVTDHDRTLSFDGTVFEPESGFAASEIRAESDLAVDAQDTTAVLTFIEITTLGIDLAKSVFQLHGIDAGGKAVLRKRLRRNQVLEFMASVPRCLVGIEACGTSQYWAREIQALGHDVRLIPPAYVKAYVKRQKNGMADAAAICEAVTRPSMHFVPVKSAEQQGVLVLHRTRKLLSRQRTMMLNAFRSHLAEFGNIAPKGAYHVAQLANALRSGEHDLPEVARLALLGFADQLAALNTEIKSLEAQLLAWHRQSALSQRLQTIPGVGVLTATAMAAFVPDTTLFRSGRQFAAFLGLVPKQNLSGGKERLGRISKMGDPYLRTLLVNGGDLGGAPHHECRGADRDLDPQLAGEKADRPRHGGDSQQDCPHRLGRHGARRGLPEACRGLKQFAAMRLAA

SEQ ID NO: 302116 - protein, 393 aa, unidentified
MICVGIDVAKDKHDCFILSSEGEVLADVFTIPNNAEGFDTLLQTIRRCARPEDKIKVGLEATGHYSYNILGFLLNEGLDTYVINPLHTNLYRKSLSLRKTKTDRVDARTIAAMLMSDVDLKSYTDTAYHNEELKSLTRYRFDKVRERAKLKQSVSRLVTILFPELEKLVSTLHMASVYALLSEFPGAKQVSEAHLTHLKAVLYDASKGRYGSDMATTLRDAARCSVGSVMSAKSLELRHTIRLIHELDAEIEDIEAAIQSMMDEIQSPITTIPGMGVRTGAMILAEIGDFSRFDSPDKILAYAGMSPSTYQSGQLSLSGTYSHMEKRGSRYLRYALYNATKYVCLWNPTFAAYLAKKRAEGKHYNVALSHAIKKLVRLIYALEKSKRPYSTAA

SEQ ID NO: 302117 - protein, 400 aa, unidentified
MLPHKSLDIRVSIDVGCYQHSVAVGLSTGELIDEFEIDHNQQGFDRFFDKIHDIESRYLAPVSVAMEGYNGWARPLDQHILSHGYTLFNINNLKLARFKEVFPSAAKTDAIDARKGLELFTLSDHLPLAKNCLQRIKKPDQINIKLKRYSRRRRRLVDEKVRIKGAMHSDLQSISPELLSLTKNIDQSWFLNLLTSVTELSQLAKKQQRSLAKIKGVGTRYLARIKEWQQVASFSEDTSWVSPMLIEDAYKMLELRALIKALDDTMEALCEASEIGRLLKTIPGFGKTSCAELAGEVDDIRRFESEASLAMYLGMAPLDNASGVYRGSKTPKQINRRAKKAMMTAVDRHRANVTESQVFYDKKRKQGKKHNQSVRALGRYLTKVIFKMLIENRAYEIRLL

SEQ ID NO: 302118 - protein, 428 aa, unidentified
MSENSTTHPEPEFVAFVGIDWADQKHAWCSQRAGATQREHGEVEHTPEMVEVWVSQLAQRFGPGPIAVAVEQRKGALVYMLSKYECLHLFPVPSTMSASMRKSLYPSGSKDDPRDAELLLDLLLQHRNKLRRLMPDDEVTRRIQNLVEERRNLVDEKTTQLNRLTGYLKVYFPQMLEWFEKLDTKLVCDLLERWPSLEELQKVPPAELRKFFGQHRGRHQELTERRLEGIGQAMPAIRDRAVLEAKRAMVQVSAQLLRILLEGIANLDSKIEEAASAHPDFFIFESLPGAGSALAPRLLAAFGSQRDRYDSAEEVQTHSGIAPVMEKSGKKKWVHFRWACPKFLRQSFHEWAGHSISQSTWARAYYQQQRGRGKDHHAAVRALAFKWIRILFRCWQDRAAYDENKYLAALARRGSPLSSVLTVTAATL

SEQ ID NO: 302119 - protein, 339 aa, unidentified
MKRTTIGIDIAKNVFEIYVEDGATQSVERKRLARKKMLPWLANRPPALVGMEACGGAHYWARELTKLGHEVRLMAPQYVKPWVQTNKSDQADARAICRAVQEPGMRFVRIATEAQQDVQAMHRVRSRLIGNRTALVNQIRGILLEYGVAVPQGVASLRKVLPTLLAEERWSPLMRQFLTEQQAELTVCETQVAAVTGAITRESATQPVCQRLEQVRGIGPLGASALWLKLAGGAYQNGRHVAAALGLVPKHTGTGGKVRLGGISKRGDRYLRQLLIHGARAVVAQVGEKPDALSGWLRRLVARRGMNKAVVALANKNARVAFALLHGEQPYEVTKMCQA

SEQ ID NO: 302120 - protein, 330 aa, unidentified
MDKAVYAGIDVGLEQLTVAVHGHSSWDRPREFANTKRGHQQLIRFLQRCGAVVHACLEPTSTYHLALCYALHEAAGCMVYVADPKAVRDFALSRLRRAKTDRCDARELADYLRLLEPTPWQPPRPVVLHLRCLARRAADVTQRCTALKNQRHSAAYGLAPAAVLRDLKKELHEQTRRLQQLRREMLHLVCHDAELQQHYQLLLSVKGIAMITALKLLAELSMLPAGLGKGQWVSSAGLDPQPRESGKAVHRPRRLSKRGNAHLRYALFMPVLSATRHCPAVRAYYQKLLARGVAKLAALCAVMRKLLQAIWGMFQTNTPFNPARFCQPTR

SEQ ID NO: 302121 - protein, 338 aa, unidentified
MEKYSGIDLHSNNSVVVVADEEDRAVFQRRLPNNLTEILMALEPYREETVGVVVESTYNWYWLVDGLMDAGYRVHLANPCAIKKYEGLKHSGDFDDAAYLAHLLRLGILPEGYIFPRELRAVRDLSRKRMQLVRYRTMQILSIENILTRETGGRMSSGRIKAMTAENVTELGLPPDVALAMESNRVVCQTLQQQIEILENRLQAQVRLTPAYLLIKTIPGIGQVLATTIMLETGTVTRFAGVGNFSSYCRCVDSLRESNGKKKGEGNTKNGNKYLAWAFMEAANFALRYCPEAKRFYERKRSRTNRIVALKAVAHKLARACYHILREQQPFDVKRCFA

SEQ ID NO: 302122 - protein, 426 aa, unidentified
MKYRIAGIDVHKRMLAVVITDIAGDGEFQFERRKVGTSPSELCRLADWLAAEQVEEVVMESTAQYWRPVWAALEQRWRPKRLQEGAGARSGQLHLAQAQSNRGAAGRKKDFPDAERLVKRLAAQELRLSFVPDVEQRLWRTIMRRKHQLTRNRVQFQNRLECLLEEAHIKLSSLVSDLLGKSARRMLQAVAEGAASPEAIAALADRRLQATAQQLSDALGACRDIHPVYRQLLKMALEELKLIEAQIDTLDQEMARLLSAQRDVVQRLAEVPGLGADSAQQIIAEVGPAAAAFPSAKHLASWVGVCPGEQESAGVNYSHRSPKGNRQMKGLLNQAANAAVRTKGSIFEFVYRRLVPRLGHAQAIGAIAHRLCRLIWMILHQAIRYEERGPAVSRSKTERRAKLMIRELRRLGYRVEPMAAQAGVSE

SEQ ID NO: 302123 - protein, 311 aa, unidentified
MIDDSIGIDISKDKLDCHRLSDGAFEQFSNTKSGFQKLRRWIGPELPARVVFEPTGPYHVAFEAALAEHLPLVKVNPKHVRRFAESKGQLAKTDRVDARVLAQMGAAHALEPDAPVAKDRHVLRELQAARAALVKDKVRLQNQLDRQQQRLTTKLTRRRLRQVVADLAELDQAIRTQLETCPNRKRALRLIQSIKGIGAVAATTILVEMPEIGRLRKKAVASLAGIAPITRQSGKWRGKSFIQGGRKPLRDALYLPAIVATQYNPDLKAQYERMKAAGKPSKVALTAIMRKLLILANTLVKEDREWSEIRA

SEQ ID NO: 302124 - protein, 404 aa, unidentified
MWYAGIDWADTHHDTVVIDEAGHQVASKRVAHTKAGLDALIAFLTGSAGPDQKEQVACIVETTHGLLITALLEGGFAVYPVHPKTVNRWRGAAGGKTDQIDAYLLAKLGRAELADLRKLQPDSPAIAELKALTRDQESLIQMQTRLVNQLTACLKAYYPVALELFTKLHQRSTLLFLQAYPTPQAAQAATVAQLTQTLKQGKHSNPHAVAPKIFEQLHHPQLTADAITTRTKARLMQAIVLQLLPLVEQIAAYEKAIEDLFLSHADSAIFESLPGAGRRLAPRLLAELGDDRTRYASSQGLAALAGTAPVLYQSGNYRKAHRRHACLKHLRNALYQFAWQSTRSQAWAWEYYQRKRKEGKSHSVALRALSNVWVRIIYAMWLTKKNYDPAIFEKAQHEHALQAA

SEQ ID NO: 302125 - protein, 347 aa, unidentified
MKNTIAGVDLAKDVIQVCICKNNKVHSNTEMAHCEFLAWLFNSKPMTLIFEACGTSNYWKQRAIEAGHDARLISAKLVSSIRQNQKTDKNDALAIAQASQLADIQFVKGKSVEQQQLQSMMRLRELAIKQKTASSNQIKALLLEFNIRVSLKQKQGGLKGVIESLLEDAENGFSSEFRRALNAAWELHREILDSIRVYDRCLETTIGEHDDCKRLLKLEGVGTLNAINLYIALGCADLGVFSKGKDASACIGLTPLQHSSGGVTKLDHIGKGVKNSSIRSQLITGAMAVVNQVMKRTAVTKKEVWVQGLVARRGKKCAAVALANKTVRTAYVMLTQGTEYKAELVAA

SEQ ID NO: 302126 - protein, 311 aa, unidentified
MEHPCFVGIDVSKAHLDVHVLPIGESFRVGHDDAGFVTLIARVRPFTPTVVVLEATGGYEVTVAAALAGAGLPVAVINPRQICDFARATGQLAKTDALDARVIALFAEAVRPIARPLPDDQARALGDLVTRRRQLVDMLCAEQNRRRLLRDRGLQRYLEAHIAWLEDAISHLEGDLTTLIRSTPIWREADELLRSVPGVGRVTSSALIADLPELGHLDRRRIAALAGLAPVARDSGAFRGRRMIVGGRAHVRRILYMATVAAIKYNSVIRAFFHRLVPAGRPGKVAVIAAMRKLLTILNAMLRDRRPWQIA

SEQ ID NO: 302127 - protein, 338 aa, unidentified
MSMVIGVDTHKQTHSAALLSELGVVESGLEVAASAAGYRQLLAWARSNSASRIWVVEGTGSYGAGLTTYLSEQNEVVYEGDHPKRSWRGPAGKSDQLDAIWVAKEALAHRRPSLPRARGERELLRVLLTARNGAVEAEKQGLNQLYALVVSAPEPLRQRLGNLRAAALVQACLRLRSSADQESAVTAATLRSVARRVSALATEAAGYERQIGKLVSVLAPQLLALKGVGPLSAAQFLVSWSHAGRLRDHNAFAKLAGVAPLPASSGRIQRHRLNRLGDRQLNRALHLVAITRSRCDLQTQAYIARRTSDGKSVREIRRCLKRYLARRVFKLLEHLDKT

SEQ ID NO: 302128 - protein, 332 aa, unidentified
MEIIDVVGIDVSKLTLDVVIHKSREYHQFENSNRGFAKLSKWALKQSNVNRENLLYVFEHTGLYSYQLAQYLSEKSFHFVIVPGLEIKRSLGISRGKEDKVDATKIARYAYRLRDEIELTVLPSEELRRLKNLLSLRDRMVKQRAGYKTSLKEMRRVLKAKDNSILLNTQKRIISSFDKQITHIEKELDDIIKNNKKLKMFYDLIISIRGIGPQTALYLIVLTAGFTKFKNSRAFASYSGIAPFPNSSGTSIRGRTKVSNLANKKMKSLLDLAAKVAIQYNQEMKIYYNKRIKEGKSKMSTINIIRNKLLARVFAVINRQTPYVDVMKYIAA

SEQ ID NO: 302129 - protein, 421 aa, unidentified
MVDLLVERCAGVDIGKAEVVASVRTPDPGGRGRRKQTRTFSAFSADIEAMADWFAAEGVTEVAMEATGSYWKPVWYVLEDRGFELRLVNARHVKILPGRKTDVCDAEWLAELLEHGLLRGSFVPPQAIRELRDLTRYRKRLIQGRTAEFQRIEKHLEDAGIKLDVVASDILGVSGRLMLKALVAGERDPEVLAEHAKGVLRKKIPDLRRALRGRFRQHHALMIGMSLQHAEYLDAAIARLDTQVDTLIATHTSDTGVPFARARDRLATITGVGPLAAECIIAEIGVDMSRFPTAGHLAKWAGVCPGNNVTGGKRRSGRTVEGDKWLRDILVQCAWAASHTRDSYLGAQFWRLARRIGKKKAALAVAHSILVICWHLLTADSDYDDLGGDYFTRRTNPDRRRDHLIGQLHELGYNVTLRPVA

SEQ ID NO: 302130 - protein, 302 aa, unidentified
MGVDIAKSYLDAAIGNEKRRFANERIGHRELIKWVKQLKVPVQVICESSGGYERGLVRELVGAQLKVSLVQANRVRQFARAAGILAKTDRIDAKLLCDFAEAMQPGTISASQLEQEHLRELESQRRHLTHLLVMEQNRAARASDRCVRRLNRSLLGQIKKQIAKLDLLIKEYIETSPELSAKAQKLTAINGVGARTAALLLAQMPELGQLNRREVAALVGVAPFNRDSGKMRGKRSIYGGRRPVRHGIYMAALVAAHHNPILRAFYLRLRVAGKPAKLALTATMRKLLIVLNSALKPDLNYS

SEQ ID NO: 302131 - protein, 342 aa, unidentified
MREKRSIGIDLHRRRFTCCVRLENGRNYLSEWSLEQLPQFIKKLRATDEIAVEVTGNTRWFYEAVAPYVDRVVVVDPHQFHVISHSVKKTDPHDARNLALYLAKGLLPEVRMKEKEQAEVASLTQTRDRLVKLRTALKNKINNLLSARGIELDKESLSSEKSLTWVLEQKVEELAHLELEVIVEQIRSLNRSVARLERAIEDAGQKLEGYRNLTSIKGIGSLGAGILLSVIGDIDDFVHEGKLAAYFGIVPRVQDSNETEHRGRITKRGSKLGRTALVQCALIAKRYSPYLHRYYERIRARRGTGKAIIALARKFLSIIYYTLKNNWIFDDFPNFVLAEAKT

SEQ ID NO: 302132 - protein, 319 aa, unidentified
MAQNDLVVAGIDVAKDKVDVCIRSLSLRRTFASTAEGRRELASWLRRNKVGKAVMEASGGYERQWAKALRGAKIEVRIVDPKRVRSFAQSAGRLAKNDTIDAEMIAWFAETFDEAPGQAYDATREQLHQMVHARQALKDMQAKLENQGEHTVPATVQRMHARISKMIAIELVKIEAEITALIQATTHFAELAEIIESVPGIGRITSAALIAAMPELGQANNKIVAALLGVAPYDDDSGRRRGERHIKGGRRRTRNVFYMACLGAATQHNPVLKAFYDRLVAKGKEKKVALIACMRKLITILNIMIERRQKWDAKRYVVS

SEQ ID NO: 302133 - protein, 347 aa, unidentified
MHATTVAVDLAKSVFQIAVADDKWKVIEQHRLTRSQFERWFQNREVSLVIMEACGSAHHWGRWFNRLGIEVRLLPAAYIRAYVKRNKTDAADACALLEAARCADIVPVQVKSVEQQALQGLHRIRSRWMATRTSRINTLRGFCREFGLVVPQGARTGIEAMSRALADPGSAVPALIRESMKLLIEEIRLLEQRIGQLERELTALARQSPACTQLLTIPGIGLLTATAMVAATGGTVRHFKDARHFASWFGLTPKEFSSGNTRKLGRISKKGDRYLRMLLTHGARVLLRAAVVGRNAGRSLDGLRTWATNIQARTHHNKAACVMTNGNPLGITLPAASRLPLVAIGAP

SEQ ID NO: 302134 - protein, 312 aa, unidentified
MYHMKEELVYLGVDIAKAYLDTAIGNEKSRFSNDALGHRQLINWIKQKPAKVQVICEPSGGYERALVRALVGAQLKISLVPANRVRQFARAKGILAKTDRIDAKLLCSFGEAMQPGTISASQLEQQHLRELESQRRHLTHLLVMEQNRAARMSDLCVCKMNRRLITQIKKQIEQLDLLIKGHIDQSHELSAKAAKLTAISGVGARTAALLLAQLPELGELNRREIAALVGVAPFNRDSGRMRGKRAIYGGRKPVRHGLYMAALVAAHHNPILRNFYLRLRAAGKPAKLALTATMRKLLIVLNSALKPDLSYA

SEQ ID NO: 302135 - protein, 311 aa, unidentified
MGEYVGIDVAKERLDVALLPSGKEFSERNDAGAIKRLVKRLGALGCERVVLEASGGYETLLAGALGTAGLPVVVINPRQVRDFARATGELAKTDRIDARVLALYGERIKPPLRELPDQQVRALRELCLRRDEIVEMLVAEEQRLARASKALRRELAGHVDYLKQRLKRINHDLDRAVRNSPLWQERGELLSSVPGVGRVLCASLLARLPELGRLNRAEVAALVGVAPFNRDSGTLRGRRMIHGGRARLRTVLYCATVAALRCNPAIKRFYLRKRSQGKPAKVAIVAAMRKLLVILNAMVKTGTAWRPPCPA

SEQ ID NO: 302136 - protein, 349 aa, unidentified
MRYIGIDLHKTNFVVCFLAADETTRTETYPLTKPGLTRFIAQLEPEDEVAVEVTANIYYFYDRVRPHVSRVVLVDTYRFAVIAKSKKKTDKADAAALARFLKLDYLPSVPVPSERIRQLRHLLQARETMVGMRTKLKNMGHGALTRNGIALSRSAFASELSRMRLSKRADLAPADALIMQAALRQIAELDREVEALGAEIVRVGKGLAGIQRLLQIHGMNLLSAIALLAEVGDIALFETSKQLTAYAGLAASTRQSNETTRHGGITKRGRKRLRTVAIQAVLSMVNRTQTPLMEFYQKKKREKGSGKAICATARKLLTIIFVMLKKELDYWYLEDCLYNRKLRALNAAA

SEQ ID NO: 302137 - protein, 463 aa, unidentified
MVYTLLNHIQGKKGSRWAKFLQTAGLENILIVAVDAAKYTHKAMICTFYGEILKKPFEFDASLTGHNQLISQIEKVSQETGKQSIVIGIETTGHYYEDLVRHWQGNSYYVRIINAATTSEERKALLNRSKTDNLDLLAITQSVINGRGTSSELPSGSVHELQKLTRARRTIVQEKTALQNEIRVHIDHIFREFQGMSIWRDGKRVHVQPFEKLFGKAGRYLMRHFIHPSDIINLGVDGLREISIKENLKIRDSSIQLLLEFASNSISRPKEELEIDHFLLVHKLDRLELVNQQIDEMEQKIASLFIETEGAVLLTVPGVGLVTGAELYGEMGDISDFDHAGQLIKMAGTNPIVVQSGGRNPTYHCISREGRRTFRNSVYQIGKSLAMHNPKMKKQYQEMRDRGKYARQAYIALGNRMIRLAFAMIRKQTMYQSEEADYTLLAELTKKLKAQHVKRFYTRYFAV

SEQ ID NO: 302138 - protein, 365 aa, unidentified
MDKTSQPRTNLKLKLRNVCTSLTVGIDLGNRKSHICVLDAEGNIVCEESIVTSPRSFEEYFRKLPRAVVALEVGMHSRWASRVIKACNHDVIVANAGKVKLIFSNDGKNDVVDARSLARLARVDQKLLCPIQHRSEDAQAALSVLRARDALVRARTRIINCVRGLVKPTGVRLPASNAEGFPSRVNDHIPPALRPAVALLLEQIQFVSDTISVYDQYVDHMVATRFKQARVLQQVPGVGSLTSLAFILTLDDPWRFPTSRQVGCYLGLRPRQDQSGERDPQLGISKGGDEFLRRLLVNSAHYILGHFGPDCDLRRWGLRIAARGGRRAKKRAIAAVARKLSVLLHRLWITGEVYDPLYNSRAAAA

SEQ ID NO: 302139 - protein, 415 aa, unidentified
MGGRVGRRDLIGTCSECLVTVLSALPDQAALPDREDGMHSMTQEDTLVVGGVDAHADTHHAAALDQRGALLGTQSFPTTTSGYRELLDWLSGHGEIDVVAVESTGSYAAALVRYLRQHGVTVVEVNQPHAHTRRRVGKSDPIDAEMAARLFQAGKAKAVPKQTDGIVESIRLLRVARHSAVKSRSAALVQVRDLIITAPQELRDQLCCRKTLRGKVTVCARFRPSGRELRSPSQAAKFALRSTAQRIQALDQEIGALDRELEQLVAAAAPRTVQLLGISTGHAGQLLVTAGQNIERLHGESSYAALCGASPIPASSGKTTRHRLNYGGDRQANRALHLIAVCRLRYCERTRTYAKRRTAEGKTQREIMRCLKRYIAREVYNSLRADLADTAQPRPMISTTIMCGNPGFGINRTRT

SEQ ID NO: 302140 - protein, 444 aa, unidentified
MLPTLNPHTAGIDAGSTQFFAAVPDGTVTCFGSFTADLYRVRDHLQAHGVTTVAMEATGVYWLALYEVLEAAGLEVCVVNGAHVKNVPGRKSDVQDCQWLQQLHAHGLMRKSFVPPEQIRALRSYTRLRDDHIRTGAMYVHLMQKALDQLNVKLHTVISQIQGVSGLAVVRAILKGERDATKLAELCEERILKKKRAEVVRSLQGVWKDEHLFALKHALGGWEFCQTQVAECDAAIAGQLSALTRDLPKPPPPANDEAVPKKKHGPRHHVPQVPELHQSLLTLSGGRDAARLPGFTVTSWMKVLSEVGTDLSRWPNEKAFCAWLGLSPGKNQSGKLKRRTRRRAKTAAGQIFRLAAHSIARSKYLAMGGFYRRLKARTCAAVANVATARKLAVMYYYAMREGMAYVERGLDAYEAAYRQKQERFLQKRAAELGLTLITNPAQTM

SEQ ID NO: 302141 - protein, 319 aa, unidentified
MTPTPVFVGLDVAKATLDVALRPSGEQWQVPNDEAGVAVLVDRLRPLGPALVVCEATGGVERAAIAMLAAAGLPVVVANPRQIRDFARATGQLAKTDQIDAAILALFAERVRPAPRALPTDAAQLLDALLTRRRQLLEMLVAEKNRLGFAPRPLHKGIQQHIRWLERQLDDVTKDLADQIERSPVWRAKDDLLQSVPGVGAIVSAVLLAELPELGTLSHKQIATLAGVAPLARDSGTLRGKRMVWGGRAGVRTALYLAALCGRRWNPQLRRFYERLLAAGKPKKVALIACARKLLTILNAMLRDTTPWKAPELAVQHSC

SEQ ID NO: 302142 - protein, 327 aa, unidentified
MALPTLGIDLAKDKFDVAFLHHTRFVHKTFSNTVEGITQLLDWLKVQGPPQVHACLEATGTFGDDVAVKLHEAGHVISILNPAVLKAFRQSTLTRTKNDRTDARLLARYAALHHPKPWTPPAPEVRELQALARRLESLHQMRQQEHNRLTSNGRSTVVAESVQTILAALEAEIERVEQLVQDHIQQHPQLKAQHDLLCTIPGIGAKTATTLLAECGDLRTYSDARALAAYAGLTPKQHQSGSSVHGKPRLSKIGSDRLRKAMYFPAIAARRFNPVIQAFCDQLLERGKHKMTVIGAAMRKLLHLAYGVVKSGKAFDPNYGKPKPVTP

SEQ ID NO: 302143 - protein, 315 aa, unidentified
MTNLKKRKSVVNVGVDVGKFTLDIYIYETDVYWQENNSPEGIKRILKRLSHYEVERLVMESTGRYQLELAVAAHDKKLPVCIINPAQVSQYAKADKRLAKTDPLDAQLIAEYGAIMQPELTPEKSKNLLAIKDLIARRRQLMGMRTQELNRRQVMGKRFEVSCNRMIRHLDQEITRIENQLDKHVADESDWSEKRVILKSAPGVGNALIYTILADLPEIGTMDRKQVGALVGLAPMNRDSGRTKGKRRIQGGRYSVRTMLYMATLSATQCNPVIKAFYQQLVAQGKHKKVALTACMRKFITMLNAMVRDRCEWAY

SEQ ID NO: 302144 - protein, 410 aa, unidentified
MELLHPHCAGLDVHKESVVACMRHIEDGKVTTGVKTFQTTTHELMALSDWLSAEGCTHIAMEATGVYWKPVWHILSDGQFELVLANATHVKNVPGRKTDVNDATWLADLLAHGLIRASFVPPEPTQQMRDLLRTRKQFVRERSGHVQRIQKTLEDANIKLDSVITDIVGLSGRRMIEALIAGQTDPQALAALAHGRIRASKEELQAALRGRVKAHYRFMLRLHMNHLEALDAAIACIDQEVSAQFEPFRVAVEMLTTIPGISSLAAQVMVSEIGIDMSRFKTEGHLISWAGLCPSNDESAGKRRSNRMRKGAPWLKTTLIQCAWAASRSKGTYLQAQYLRIRSRRGPKKAIGAVAGSILTAAYHMLKNGTLYQDLGANHFDCRHKGKQVLRLVNRLQDLGFAVQITSMAA

SEQ ID NO: 302145 - protein, 413 aa, unidentified
MDVLHSRCCGLDVHKSTISACILLREAGRMQKHQRRFGAMTQDLQELAEWLRQFGVTQVAMESSGVYWKPVWNILEGQFTVVLANAQHIKNVPGRKTDQKDAEWIAQLLQYGLLRASYVPCKIIRDLRDLTRMRASLSQEASRLSSRIQKVLEDANVKLASVATNVLGKSGRAMLEGMITGEDDPEHLASLALGHLRVKIPQLKLALEGKIRAHHCFLLRRLLDQVQFVEHEIALLDQRLEEIGSQRPELAQAVERWDTIPGFDRVAAWALLAEIGDNMAQFPTAEQLASWAALCPGNHESAGKRLRGTTRQGGPWLRRMVCQCAWAAARTKNTYLSSQFRRLAARRGTKRAIIAVAHTLIVIAYHLQKNKNNYDDLGGNYFDRVHSDGLKRYLVKRLQQLGHKVTLEPMEAA

SEQ ID NO: 302146 - protein, 353 aa, unidentified
MPALATPVTVGVDTHLELHVAAVIDQTGRLLGTQAFPASTRGYVALVTWAEGFGPVERVGVEGTGTFGAGLTRFVRAYGLAVVEVARPDRSTRRRHGKSDPIDAQAAARATLAGVAVTTPKTRDGQVEMIRVLRVARRGAMKARVAAAEQLYGVLWSAPDELRQPLLGLTTKALVRACATMRPGPLTSPTAATKTTLRTLARRWQQLQAELDQLDLQLQKLVKAVAPTLVALPGVGVETAGQLLVTAGDNPQRLGSEAAFAHLCGAAPIPASSGRTNRHRLNRGGDRRANNALWRIALVRMRYHPPTRAYVERRTKQGLSKLDIMRCLKRYIAREIYHQLTSPPPITPTACPK

SEQ ID NO: 302147 - protein, 370 aa, unidentified
MGNASTLHVGLDVHKESIAVAYATEDGATAPVPLGAIGTRQCDIDALVRKLQSKSARLVFVYEAGPCGYWLYRYLTRKGLTCFVVAPSLIPRKPGDRVKTDTRDAVTLARLARSGDLTPVYVPAVPDEALRDLARAREDALHDLNAARFRLKALLLRNDVRYAGRANWGAEHLRWLARFVFPTPAQQIVFQEYVRTVTERTELLRRLEAELLEQAKTWRLSPVVEALQALRGVQFTVAITTIAELGDLTRFDTPRQLMSYLGLTPSEYSSGERRRLGGITKAGNRHARRVLIEAAKAYRHRAKVSEQIQVRQEHLPAVIRDIAWRAQVRLCGRYRKLLARGKHPNTVAAAIARELAAFMWAIAKARPVPA

SEQ ID NO: 302148 - protein, 360 aa, unidentified
MTGTMTWAAMDVHARSTYAASLDVITGELCRQRFDTGAVEPVIGWLAGLPGPVRACYEAGPTGFGLYRAAVAAGIDCQVIAPSKTPRPSGDRHKSDRRDTDLLLRQLMAGALTAVAVPSATCEAARDLARAREQVRLDLMRCRHRLSKLLLRHGRVWDRSAWTKVHREWLGSQTFAHHNTELAFIDTLAACDGLSARRDALDERLSRVATDPEFWPVVRRLRAFRGIDTLSALILLLEVADFARFPRAVQLGSWLGLVPSREQSGESDVHGSITKTGSKYARRILVEAAWHYARPPRVGKTLYERQEGLPDHVLQIARRAQSRLYRIHRRMRERKKPGNVITVACARELSCFLWAAATVP

SEQ ID NO: 302149 - protein, 348 aa, unidentified
MTLVGCDLHSRMQQVAVLDTRTGELVEQQLAHEGDAVERFYRALPPPVTIGIETTGYTQWFHALMHRLGHTVLVGEAAKIRAMVVRKTKTDRRDARHLLDLLQHDRFPTVWIPDPDTRDRRALIAHRVRLVRMRTMVKNGLQAIALNQRLALRSALWTQRGLTQLKALALPPHTTRRRDDSLALLAWLTTRIDQLDDHIAAVASADPRVQLLLTHPGVGPLTALTTVLVLGPLARFPDSKHVVSYVGLAPAVNASADKQRLGKITKQGNALLRWVLGQAAPLAARKDDDLRRRYFSVMHRRGRPKAKVALARKLLVRLYIMLRDQIDYEEFRRRGRAPRPQQLPVAVM

SEQ ID NO: 302150 - protein, 357 aa, unidentified
MLYLAIDQHRKQLTVSLRNEAGDVIERRQVSTEWPRVRAFFADLAARASTEGGWMAIVEVCGFNEWLLALLAESGAAEIVLVQPERRSRQKTDRRDANQLGELLWTNRRRLPAGQRVQNVRRIVPPSAEVAADRQLTALRQRLGELRTRTLNKIQHLLLKHNWQQQCPTKGLDTKRARRWLEELRLPEVDRLELDLLARQWDLWDEQLSHVNDRIAERQKACPVATLIATAPGAGAFSSLALASRMNDIQRFPRPGSLANYWGLTPGCRNSGDATARLGSITKEGSKLARFVLGQMVLHALRRDPEMKRWYARIKHRRGAKIARTAVMRRLTTILWHMVKHNEPYQIGGVKALRSTA

SEQ ID NO: 302151 - protein, 360 aa, unidentified
MPQQITEINTEKKKIYVGIDVHLKSWTVTILTENIVHKTFTQPPSAIILADYLKNNFPDCEYLSVFEAGFCGFSPHYELHRLGVNNIVINAADVPTTQKEQFQKNDPVDSRKLARALRARQLTPIYVLKSETLEDRSLVRTRDMLVKDLVKLKCRVKSFLHFYGIGLPEQFSNPYSHWTKRFLKWLKEDVQLLSPYGKDALNFLLIEVEGQRKLLLEVNKRIKNLCDEDRYQKKIGLLIGIPGIGRISAITLLTQFEDITRFKNTDTLASYIGLVPNTYSSGEKDRVGEITFRGQKTLKRILVECAWMTIRFDPALSTCYNEYCRRMQANKAIIRIARKLLNRVYYVLKNEREYVCGVKN

SEQ ID NO: 302152 - protein, 324 aa, unidentified
MTSSASSPLFVGIDVSKARLDIATRPQSARWQAENREPGITSLVDKLQQLKPTLIVLEATGGYETAITAALAAAGLPVAVINPRQVRDFAKSVGRLAKTDKIDAAVLAHFADAVRPELRQLPDEQTQELQGLLVRRRQLIEMLVAEKNRLPMTHKALKAGVKEHIQYLEHQLEDLDAEIQDRLRQSPLWREQEDLLRSVPGVGKVLSVTLLAELPELGKLNRKQIAALVGVAPYNCDSGQMRGKRAIWGGRATVRSALYMAALSAKRFNPVIRSFFEKLVAAGKPKKVALTACMRKLLTILNAMVHSGSRWQPQKAAPKSLATA

SEQ ID NO: 302153 - protein, 430 aa, unidentified
MSEMSVAQNEKIRQVTETTMVIGVDIARDTHWARAFDWRGLELSKAVKFENSAEGFHYFLCWASELAAEQKKGRIMVGLEPTGHYWFTLAAYLQGGSMKLVLVNPYHVKCSKELDDGHPSKSDKKDPKTIAKLVLEGRYVLPYIPQGLYAELRVAMNCRWRVQKELTSVQNQIQRWLKIYFPKHKTVFGEFEGIGSMALLHAAPLPSNLVALGVDGINQIWRQMKLRCAGLKRAQRAFEAAQNSVGCTTGIEAARMELQILLEDYDAKLQQYERIMKVVESLCRQIPEVEELLKIKGIGLITVAGIFAEVGDLRRFSSPRQLQKLAGLAITENSSGKHKGQTEISRRGRAHLRAILFRAVMPLVARNEEFQKLHHYLTTRAENPLKKMQSIIAICCKLLRVFYAVATKGCAYSAEKMLADIRRNQPLKAA

SEQ ID NO: 302154 - protein, 416 aa, unidentified
MDMEREVVCGADIHKQFLLATVLSNDGKKFQDRFDANFEGLLNFRQWLLDLGCQKLAVESTASYWLPIYLVVGKDVEFILANAYQIKHVPGRKTDVLDSEWIAELCLKDLIAPSRIFSEDERDLRSMTRTRESYVKLRTQNKNRIHQELESACIKLSSVLSDIFGKSGIHIIRGILKGSSIEDILDSIPSKKLKAKRKEIQDAIRMNMSPAQVDLISLLLDSVDILNREIESIDKQIQDLISKRQDDLKIAMSIPGMGFTTASAILAEIGDFKDFRTGDKLAAYCGLVPSVYQSAGKLITGHITKHGSPHVRRMLIEVAHAISRTKADSNLKRFYFRIKGRHGAKVAIVALARKVICILHHLIVNREMFEDVGTNKSKRNKPGRSFSSPEPTITDAIQILVRAGYAIQKRSEPEGG

SEQ ID NO: 302155 - protein, 369 aa, unidentified
MKKTNEEKWSNGSKQASVTDNGKRVLRLGLDVHYRQVTVAIQEDGGRIKAAGRMKHPVFVDWIQKKLDQGWEICSCYEAGASGYWLHRRLEQMGVQNLVVVPKAMGQGGKKQKTDKRDAGELCDSLDRYLRGHDKALSVVRVPTQEQEQKRALIRYHRQIMADRGRCEARGKGLLCAQGIEVQGRWWEGHGWLEVQSDPQLKDWMKEQLIGWRNKILSLNEEQSGLRERIAALAPALLPKGVGAYSAAVVYYEMRGFERFKNRRQVGSMTGLCPGVHLSDGRGKEGSINRCGIGIVRWTLVEMVWRLMIWQPQYPPVRRLAAGLVKGKRAKKRLVVQAARRVAIDLWRLSTGQTTPEKLGLIMHDTSVK

SEQ ID NO: 302156 - protein, 340 aa, unidentified
MEKVTTIGLDIAKSVFQVHGVDSAGEVVLRRKLTRGRLLRFFEKLPNCLVGIEACSSSHYWARELIARGHDVRLLPAQYVKPYLKRQKNDAADAEAICEAVTRPTMRFVPVKTPEQQSVMMLHRVRLMLNRQRTQLSNSLRAHLSEFGIVAPIGRRGIEQLLVVINDENDQRVPADARMCLRMLEAQLKVVKAQILENDRRVRASARETEVGRRLMEIPGVGPLLASAFVATVADPHAFKSGRCLSAWIGLVPKQNSSGGKEKLGSISKAGNRYLRQLLVVGAMAVIRYAERNGTKRPWLVQLMARRTTKVAAVALANKTARMVWALMTSGERYREPVVA

SEQ ID NO: 302157 - protein, 436 aa, unidentified
MAETGDTRQTIKHHTIDDHTVVIGVTLGREFHALCLMNKEGDTLGSYPELSNTRKGFDVFHRLVEETKQTYGFTHVVIGIEPTGHAVRKMVAFAQENGYDVRLVRTAAVRQDARTIALLVKEGHAQDTRMEEGVYRQLRCVAHTRESVLRRQTAAQRAFRAILDDCFPELSGIFPSLKSKGLRALLTAYPFPDDVLKAGCRGVTELLRKSAGKKALGRAQKVVAAAEESVGVTAGKADRMRLMISLDDYTRSAARLKELDRELTDLLTELPFSASVLSLPGVGPVTCGVFFGELGNPTSFTHPKKITSYAGYDPRTQNLRGKRAISKRGRPLLRKYLYLMSLGVVKRSSFFKQYYERKQKNPQGKKRAKKEALCAVAIKLIRVIFALVRDRRSFTETMDHGVEGGPEAPHRQNGLDEGVVAFHRPLRGSPHEGPLC

SEQ ID NO: 302158 - protein, 470 aa, unidentified
MRIIGLDLAITSAHKAVVMDERGKFLTPVFPVTTWAESLATLLQRAREGTEENSPLVVVMEPTGVAWLPVAVYLIMRAVTVYLVNGQQVADLRRFYKRHAKSDRIDARVLAKLYLVAQEKLHALSLSPAELFSLQRACKQLDWVVSESTKLINQIIALDRMTWLGSWEDLGFGDPFGTTACWCRDHYYSPVAVLEAGEERIRQDWNASGLAEVGEKDAWIPFLVDSAGKVLAVYGNPCPYVDFAALQAEAVLKQKWLSELKADREHLRESVIFPLYHQLHPSGNLESLYGVGEESAAVFLSFIGDPLRFPSERQMRGWSGMIPDSKQSSGSESKGLRISQAGPNLIKKFAFLDADVARRYDPQLAALYYDQMVNRGKHHTQAVCAVATHLLDRIWVVVAKDKPYELRDVDGRPVTPEQARQIITEKYTVPEEVRKRNNRKARRERSERNAERSFNHQEKVRESSPELVRG

SEQ ID NO: 302159 - protein, 375 aa, unidentified
MKNKVRFLGLDVHAETIAVAIAEPDGEVRSLGTIANRAESVRKLVKKLGPAEHLKACYEAGPTGYVLYWQLAELGVACEVIAPTLVPMKAGDRVKTDRRDAERLARSYRSGDLTAVWVPDEGSEALRDLVRAREAAKQDQLRARHRLGKFLLRMGQRPAMGMKAWTAPYMAWVRQVHFTQLAREATMLDYLYEVDHMGERVKRLEQSITEAVKLATPAVQEVVKGLQALRGIAEISAVTIVAELGSITRFENARQLMGYSGAVPSEDSSGQRTRRGSITKTGNAHLRRIVVEAAWSYRHRPALGPRLRKRQEGVPEPIKEIAWKAQVRLTKRYARLAAAGKDQRKIITAVGRELLGFIWAIGIKAEAAGKLRLAA

SEQ ID NO: 302160 - protein, 345 aa, unidentified
MKYYAGLDVSVKETSICIVDQTGKICREVKVTSHPDDLIVVLKDPAWNMERIGLEAGPLSQWLFEGLARAGLPVICIETRHTKAFLKAQPNKSDRNDARGIAQMMRVQLYRAVHVKTLTSQKRRALLTARKLLQDKAIAIENDLRGLLRNFGLKIGVVGSAKFEARIRELVEGTLDLVEIVEPLLDARRKLREHFATLHRKLLMIARDDEVCRLLMTIPGVGPVVAVAYTATIDIPQRFKNSKAVGPILGLTPVLNQSGESHRVGRVSLCGDGMMRTLLYDAAQVLLNRVAKWSWLKAWAMSVAKRRGLQKAMVALARRLAVIMHRMWSDGTEFCWSREKLPAGA

SEQ ID NO: 302161 - protein, 381 aa, unidentified
MNIIRYSVGVDVSKDNFHVAVLTTSDARAHKTQRSSSFDNAPAGFEAFIKWCRKEHKQPELPLAIVMEATGTYHERLALALHLAGFIVHIVLPNRAKAYIASFSTGSKTDKADARDLARMCAEQLLDRWNPPGDFFYTLRTLTRHYQSIQELITVTRNQLHALEVSMKPLQAVIDSQQHLIGVLETQLKEIKAAIARQLRSDKAIWKRAQHAISIPGIALLTAAVVLAETDGFELFKNVGQLVSYAGYDVIENQSGKHVGRTRISKRGNSRLRRALHMCSLVTVTTQTPSMVALFERTFGRHGIKMKSYVAIQKKLLILIYTLWKKEQDFDPDYTPGNTQGEQLAAAKLSTDDKEAGHSSRDSEPGDADLPHKKLALTEQG

SEQ ID NO: 302162 - protein, 351 aa, unidentified
MVVIGVDAHKRSHTLVAADGAGRKLSEKTVAATPEGHLAIVAWAARWQERLFAIEDCRHLTRRLETDLLLAGEAAVRVPPHLMAGVRSSGRERGKSDPIDALAIARAALREPDLPVARLDGEARELRLLVDHREDLVAERTRIQCRLRWHLHELFPGLVIPSRSLRRYSMLARLEERLADVDGTVATIARELVARCRELTLRARDLEREITLVVRRLAPSLLAMPGCGVLSAAKIVGETAGAQRFHSKAAFARWNGTAPIPVWSGNSTRHRLTRGGNRQINAALHRIAVTQLRGVGALGQAYVERRMAAGDTKVEALRALRRRLSDQVFRRLLADEAARGRVVHDELAAAA

SEQ ID NO: 302163 - protein, 393 aa, unidentified
MIYVGIDVAKHKHDCCILGPGGEIIRNVFTFLNTRQGFQLLEKEIRTAASTQNDQEIKTGLEATGHYGVNLVAFLRSKGMEPVVFNPLRVKLYRQSLSLRRTKTDKVDARCIASLVMSEDSNPVTPSYQIGELKSLARHRFHLVQKLGKEKAQLNRLVDLLFPELPSVCCSITQKTMLVLLHALPGAQRIAHCRIDRLRNLIVSASNGRYDQTKASQISQLAKQSIGTASDSLEFQLVQTVESIYFLQQQLKTLNLRINPMLRDIDSPILSIPGIGNGLASLILGEIGDISRFSSPDKLLAYAGIEPSAYQSGNFTATRTPMVKRGSTYLRWALIQAARHVAQYCPEFHAFLEKKISQGKHYFVALGHLAKKLVRVIFHLLSRNESYLAPSER

SEQ ID NO: 302164 - protein, 343 aa, unidentified
MTISMLGIDIAKNTFQLHGADDSGKAVHKKRLARRELAAHVANLPACTIVMEACGGANYWARVFQSSGHTVKLISPQFVKPFVKTNKNDANDAMAIVEAASRPSMNFVPIKQVEQQDIQSIHRIRTRIVKNRTALINEIRGLCLEYGVVLIPGAARVKSSLCAAIADGDSELTVSSRESLQGLYEELVGIEARVKNLNTKIRQLCRQNENCQRILKIPGVGELTATAIVAAVPDPGEFRNGRHMSAWLGLVPRQSSSGDKQTLLGISKRGDRYLRTLLIHGARAVLSHYKDLDNDYAKWVGRKKATLSHNKAAVALANKNARIIWSILNTGEEFNIGAQATAV

SEQ ID NO: 302165 - protein, 352 aa, unidentified
MGNTDLKAVIIGVDTHKSTHVAVAIDTQGARLAVLSIPANSKGYLELESWSRSLGNVEAFGIEGTGSYGAGLSRSLLRKGYKVVEVTRPNRQLRYRHGKSDSLDAEGAARSVLSGQAVAEPKTQTGSVEMIRHLKIARDTAVKSRSQAMVTLKSLIINAPAELREVLDQIKGKVALIRHIAAFRPGEINSTTASAKAALRALARRWLALHEEIQAHDKELERLVAERAPGLLASHGIATMTVAEMLILIGDDPTRIRSESALAKLCGVCPIPASSGKTNRFRLNRGGNRQANAALYRVAIVRMKSHEPTLAYVRKRTREGKSKSEIIRCLKRYIVREIFSQICRPKTTHLAH

SEQ ID NO: 302166 - protein, 340 aa, unidentified
MGQVVRIGLDLAKSVFQVHGVDEAGEIVVRRKLRRSQLLAFFAKQPACLVGMEACASSHHWARELIALGHEVKLMPAQYVKPYVKRSKNDAADAEAICEAVTRPTMRFVAIKSPEQQCAMMLHRVRLVLCRQRTQLSNALRSHLAEFGIVAPVGRLGLERLIEIVADPADRRLPAGARISLRMLVAQLAVVKEQILENDRRIMADARSTELGRRLMTVPGVGPLLASALTATVADPRIFRSGRDLAAWIGLVPRQNSSGGKERLGSISKAGHRYLRQMLVVGSMAVIRYAERSARQRPWLAQLLARKKAKVAAVALANKIARIVWAMMITGDRYREPVAA

SEQ ID NO: 302167 - protein, 357 aa, unidentified
MEYIAFDAHKRYTLASVERLSGGQLCEQRVAHERGSIRHFLSQWGSGSPVAVETVGNWYWIVDEIEEAGMVPQLVHARKAKLMLAMVNGTDKLDARGLNRLQRTGTLPTVWIPSRELRDQRELPRTRMVFSQSRTRLKNRIHATLAKYALSVEGVSDLFGKKGRELLQRLLEQLPPHTRFATESLLEQLDTVEKHIQRFEGRIREVFASTPELALVMSLPGVGFILGIVILLEIGKVERFASAEHLASYCGTTPRVHASGGKIHYGQVRQDVNRYLKWAFMEAANIVCLNHRRYPQRHVHRLYERLAHRKGHQKAIGAVARHLAEATYWILKKGEPYREPLTRKKGFVHGRISASAS

SEQ ID NO: 302168 - protein, 289 aa, unidentified
MSVTVLGIDIAKQKFDAALLVDGKTKHKACKNSAEGFETLMVWLEKQGIQKVHACLEATGNYGEDLAIYLHEAGHIVSIVNPARIKGFGQSELIRTKTDKIDAALIGRFCLAMKPGPWIPPSPEIRSLRALVRRVDSLIDMRSQEKNRISTAHESVIFLIKEHIAYLNQEIEKIRQQIADLIGQDPNLKRKHDLLDSIPGIGKATIPHILAELDDLEKFDHVRQLVAFIGLAPKETLSGSSIKGKPRLCKIGHARLRKALYMPALVSIQCNPVMIAFYNRLKDKGKKGK

SEQ ID NO: 302169 - protein, 377 aa, unidentified
MLRALPRITNRINRGLATPYRMIVMKYYTSTTQFNCGIDLHARQMYVCVLDREGKKLVHTNIKNNDFDYFLKLVAPYRHDLTVCAECMFGWYWLADACAEAGLPFVLAHALYLKAIHGGKNKNDRIDSEKIANLLRANLIPPGYVYPAEKRPLRALLRQRLLYVWNRSELLARIQSHQLAHNRPTHRQNVYNREAWTGQLLASEADPVRQLALQNDLALIGHYDAQLAVLEKDLLKLTKQTAGRDFTLLQTTPGIGDYLGLTILHEIGDIERFPTVKDFLSYCRLVKGTVASAGKIKGLRGAKLGNPYLRWAFGEAAIVAKRDAVLGPLAQRLEARRNNKFKANAVLAIKLARAVYFMLKNKTVCEPDRLVAALSRN

SEQ ID NO: 302170 - protein, 329 aa, unidentified
MKSWNVILGVDVSKLTLDICCAERNLYLKIDNRTKGFNVFKKWCKTNTIDLKETLVVMEHTGGYEYRLIQFLESQSVSYCRIPGLEIKQSQGMTRGKSDQLDAFRIGQYGEEKAKRIVPSKPLDKNILTLKQLLSFRKRLVRERAGLESTIKERKHMYLAKKDTVTQIAQAKMKEDKKHIRQIEMEIMEVIKNNEEMMQTYRIITSIKGIGNVNAWMTIAYTENFTSFIDGRKYAVYAGVVPFEHTSGTSIKGRKRVSHLANKELKQELNQAAKTAITHDVELKAYAERKLKNKPYPVVLNNVKFKLILRMFALVKRGEKFVESYKRAA

SEQ ID NO: 302171 - protein, 360 aa, unidentified
MTIVAHSRPFVIGVDTHARTHTLAVLVAATGELVATEQFPATDAGMGRAVAWAARRTDGEMATLWVIEGVATYGAHLASAVQRAGFEVVEAAAMHARAHRGTGKSDPLDARRIAAAVLSLEPEQLRRPRSGDGVRAALRVLVTAREHMTTERTAAVNALTALLRVAALGIDARKPLTASQIGEAAHWRTRAEDLATSTARAEAVRLAKRVADLNEQLTANQAQMIDLIRASKAAVLLDKTGIGPVTAAVVYTAWSHAGRVRSEAAFAALAGVNPIPASSGNTIRHRLNRGGDRRLNRALHMAVITRMTHDPETRAYVERRRAEGRTTKEIRRCLKRYLARQLYRTLERLHTEPGAYPQAA

SEQ ID NO: 302172 - protein, 400 aa, unidentified
MRAVFGIDVSKVSSEVAILVNGEKVHGYTMPNDAIGFARLLGDLKTVHKPEIIFEATGVYSRPLQAFLEDNGYAYTRLNPLEAKKQLDSFRVRKTDQIDAEKLAQSQFVLNRKPTYVQEEVYQELRDLSRFYQNLTEDIVRAKNRLHKVLQVTFSELETILSTPTGEQYWNLVIAFPCKDFVLDLSKDKLSESIRQSTSKRISDKRVAYLAEKLITLANKSYCAVKKTSPILEEVRYYAKELLRLSEQRQAVLDEMVELAQPLPEYDILLSIPGIAETTATSIIGELGDIRRFQSANQINAFIDIDLRHYESGNFIAKEHITKRGNPYARKILFKCIHNIASASHTNPCHIADFYEKRKRQSQTTSTKPHTIASIHRLIRTMYYLITHNKLYDYTSTQNR

SEQ ID NO: 302173 - protein, 452 aa, unidentified
MAKKSKRRCDTLPVLHPDAAGIDVGASELYVAVSADRDPHPVRSFPTFTRDLHALADWLEQCGIHSVAMESTSVYWIPIYQILEARGLEVYLVNAQHVKNVPGRKTDVSDCQWLQYLHSVGLLRASFRPPGFICAIRSLWRHRSSLIQMAAEHVLHMQKALDQMSLQIHRVLNDITGVSGLKILDAILAGERDPPTLARLCHGGVKNSEDTIAKSLEGDYRPEHLFALRQSLAAYHYYQKLVLEVDQEIKLQLGDLQTAATAEKTTPARTKASAYQRRRYEPKTFDLRGELYRIFGVDLTNVPGISAITAQTILCEIGTDVSRFRNASAFASWLGLCPEKKVSGGKVLFTKSRRVRSRVATALRMGAQSLHHAKDYLGEFFRRITRKLGRPQAITATAHKLARIVYHLLGTKEAYNESVFHKSEADTIRRAEYRLRRQAAQLGFQVIPAENG

SEQ ID NO: 302174 - protein, 422 aa, unidentified
MNTNETDYAACIAIDWADQKHVLSLQAAGQAKKETGTLEQKPEAISAWVAKLQERFQGRPLALALEQSRGPLIHALLSYDFLVLYPLHPNMVSEFRKAFKSSGAKDDPSDTDLILEIVTKHRDRLKPLAPDTEQTRLLGRLVEDRRGAVDLRTGHLQALQASLKEYFPQAIELCSANLGSRLAADLLDNWPTFPDFQQAKPSTLRAFYYGHNVRSPEVLRNVLHLARSGKALTTDPAIVESGRRVSQLHARMIQTLNPLIEDYDARIQQVFEAHAEVKLFNHLPGAADALAPRLLAFFGTDRSRFESPESIQSFTGVAPVTQRSGKTQVVFMRRACPKFDRQTFHEFARLSIAKCQWARNYVTYYTEVKGKKFHSVIRALAFKWIRILWKCWKDRTPYDDDKYMETLKKRGSIFATLHLKNS

SEQ ID NO: 302175 - protein, 351 aa, unidentified
MKVTTIGIDLAKDVFGLHGVDGQGRVAFKKRLVRSRLLEFMSQLPRCLVGLEACSSAHYWARKIERLGHRVRLMSPRFVKPYRKSDKNDANDAEAICEAVTRASMRFVPIKSEAQHEVQALHRVREQLLKSRTALVNQVRGLLAEHGIVAPQGIARARRLLLEILADPERHGLSGLFRETLQEIAERLRFFDERVGAYDDRIERVFKEDERCRRLAKIEGVGPLVATAVVAAVGNASEFKSGRELSAWVGLVPRQHSSGNRSQLLGISKRGDRYLRTILIHGARAALRRADHKRDQRSRWAMRIKLARGYNKAAVALANKNARIIWALLTRGENYRPAAISVASAGSVESV

SEQ ID NO: 302176 - protein, 417 aa, unidentified
MAEEVEWFVGVDWGSQSHQVCLVDARGECLGERAVAHGGLGIEELCDWLIARTGAAPEVIAVAIEVTHGPVVEALLERGFCVYGINPKQLDRFRDRFTVAGSKDDRRDAWVLADSLRTDRHAFRRLSNDEPVIVQLREWSRMADDLQQERMRLASRMREQLWRYYPQMLEIADDLAADWFLDLWQRAPTPARAGRLRPTTIERFVRTYRLRRWQAPEVLRILKQKPLSVAPGVVEAASQHIGTLTARIRLVNQQLKAAHRKLDDLCAQLIPSAEDQPGQQCPHRDVAILRSMPGIGRTILAVLLGEVWQPLRRRDYYALRTLSGVAPVTRRSGKTSVVVRRYACNKRLANALYHWARLATQHDALSRRRYAALRQRGHSHGRALRTVADRLLSVACTLLKQQTLFDPSYEVRNAAGA

SEQ ID NO: 302177 - protein, 329 aa, unidentified
MDPAPLYTGIDVSKDRLDIALRPVSDAFSFSNDDPGIAQTVTLLADLSRLVGTLVVLEATGGLDLPLVGALAASDLPVVVVNPRQVRDFARAIGKLAKPVLSAAEGTDAIDAKILAQFAEAVRPQVRPLPDVATQELRGLLMRRQQMVEMVVAEKNRLRSAPRRVRPQIQEHITWLEGHLDGLDRELSDLLRSSPLWREKEDLLRSVPGVGPILTVTLLATLPELGSLNRHQIAALAGVAPFNRDSGTLRGRRTVWGGRPHVRSALYMATLVATRFNPVIHSFYQRLCAAGKPKKVALIACMRKLLTILNAMLKHGALWQQPCNLMSLT

SEQ ID NO: 302178 - protein, 357 aa, unidentified
MERILKQSLGIDVSKASLSLSFGTLYGNLKKEFVSHPDIGNDVSGFKSLRTWISKQVDRKEGFYVIMEATGVYHQRVCHYLYGLGYNVCVMQSGRVKRYAQSLDQRSKTDALDSRMLSMLGLERELRLWSPPGEELQQLKLLGRERSSLLKDRTTEINRQSAIDSSSCLGKRASKRHQRRLRPINEQIAAIEQEMRGLVKGDAVLRERIGHLESIPGVSFISAATVVGETLGFESMSNAKQLTSYAGYDVVLKESGRFKGKTKISKKGNSHIRAVLHMPSMACVRFNPTLKLFYSRIKPNKAKPMVALVAVQRKLLVLMYTLWKKEEDYDAEFEKKKQQRPEVLAAQDSAQIKLSAS

SEQ ID NO: 302179 - protein, 412 aa, unidentified
MEVLYPHCAGLDVHKDTVVACLRHMATGSVEREVRTFKTTTKDLLALSDWLAEHGCTHVAMEATGVYWKPVWHILSDGDFVLVLANAAHVKNVPGRKTDVNDATWLADLLAHGLIRGSFVPDEQTQEMRNLLRTRKQLVRECSRHIQRLQKTLEDANIKLDSVISDIMGLSGRAMIEALIAGESDPQRLAQLAHRRIKAPPEALCEALRGRVTRHHRFLLRLHLKQIDAVNVAIDDIDQEVDAQIEPFRTAIQLLITIPGVSELSACVILAEIGHDMNRFPTAAHLISWAGLCPKNDESAGKRRSTRMRKGAPWLKTTLVQCARAAARKKASYFQAQYHRLRARRGDKKAIGAVAASILTTAYHMLKYGTLYEDLGPDYFDKRGKGKHVHRLINRLQNLGFAVQITPVEAAA

SEQ ID NO: 302180 - protein, 359 aa, unidentified
MLGAQLYQKFLPQEYDVFCGIDVDKKKMLVTLTDHQDQTKSVQMPSDPGILIRYVDKHFPAKRIAFAYEAGPTGYKLHDQLTAQGYPCLVLAPSMIPQAPGQQVKTNRLDSKKIAESLRGGQVRSIHVPSSAYRHLRHLTQLRDTFVKEVVAFKCRIKALLLFEGIPFPKASVNGQWSQRVLEELKRLPVNESVRFKLDQLLSSLSFACEQALKTQKEIRRFCTSDPELSRCVRYLTTIPGIGWIVATHLLARIGDWRLLTHVRQIAGFLGLAPRESSTGERRRQGSITGIGDGRLQAKLIQSAWVSIHKDTELESFYRNIYQKHPRDRAARKAIVAVARKLTTRIYCVLKEQRPYVVR

SEQ ID NO: 302181 - protein, 441 aa, unidentified
MILIREVADAPVIMGISKPVDPKSQRRGGDNVKQLFVGIDVGSQNNAIYLMKPNGEKHSSFSVQNNQGGAKLLSEKIVSALESQRLERVVIGMEATSIYGDNLVYALREDGKLGRYPRKIHVLNPKQVSKFKEAYSDPPKNDDVDAFVIADKLRFGRINKEVYMDDYRYKALQTLTRARFYAVQGLTREKQRFANYLFLKFSGLAQDKNIPNTSATTLALVEYFETVDELARISLDELTAFLIKTGRGRFADLEATAKAIQAAAKGSYRLPRTVNDSVSQAMSVSIATMRALDNQIKSLDKAIEQQLEIIPNTLTSVPGIGKVYSAGMIAEIGDINRFHSHASVAKYAGLAWTQHQSSTFEAEDTRLIRSGNRFLRYYLLEAANSVRRCDSEFRRYYDLKYKEVKKHQHKRALALTARKLVRLVFRLLKDNRLYNPPEKRA

SEQ ID NO: 302182 - protein, 412 aa, unidentified
METLIERCAGLDVHKDVVVACVRRPGPKGQRDVELRQFGTTTPQLLELRDWLVEQGVTLVGMEATGVYWKPVYYVLEDAMECWLLNARHMRNVPGRKTDMADAAWIAQLVEHGMVRPSFVPPKPIRELRNLTRYRKAQIEERTRELQRLDKILQDAGIKLSSVASELEGVSGRRMLDALVSGQVEPAALAELAKGRLRSKRPELEAALTGRFGRHHALIVGEILAKLDYLDEIIGRLSQEVDQAISPFAPQVQLLDTIPGVDQRMAEALVAEIGVDMSRFGSSDRLASWAGLCPGQHESAGKSRGGKTRKGSKWLRSHLTQAAKAASRTKGTYLSAQYHRLRGRIGPAKATIAVAHSILVAAFHILDRLQPYADLGDDWFVRRQSPERHARRLVNQLALLGYDVTLTERAAA

SEQ ID NO: 302183 - protein, 425 aa, unidentified
MREHDTRAEAGTVNPPGRGTMFEIEDVGVFLGLDVGKSNHHGHGLTLAGKKVFDKPLPNSEPKLRAVFDKLTAKFGTVLVIVDQPASIGALPLTVARDAGCRVAYLPGLAMRRIADLYPGEAKTDAKDAAVIADAARTMPHTLRSLELTDEITAELTVLVGFDQDLAAEATRTSNRIRGLLTQFHPSLERVLGPRLDHQAITWLLERYGSPAALRKAGRRRLVELIRPKAPRMAARLIDDVFDALDEQTVVVPGTGTLDIVVPSLAASLTAVHTQRRAMEAQINTLLEAHPLSPVLTSMPGVGVRTAAVLLVTVGDGTSYPTAAHLASYAGLAPTTKQSGTSIHGEHAPRGGNRQLKRAMFLSAFACMNADPASRAYYDKQRARGKTHTQALLRLARQRVSVLFAMLRDGTFYQSRTPNDVELAA

SEQ ID NO: 302184 - protein, 331 aa, unidentified
MQARGTMEEPGTADRLVDCFVGIDVAKRQLDVHILPSAHTFSVARDAAGLERLVSTLRPHAPRLIVMEATGGLEVVVCAQLAAAGLAVAAINPRQIRAFAVALGRRAKTDRLDAAVIASFAERVRPDPRPLPDATTQALGELVTRRRQIVGMITAEGNRLQQAVDQRLQKRLKAHLVWLQRELSSIEDDLDRAIRNSPIWCAQADLLTSVPGVGPATARCLIAELPELGQLDRRRLAALVGVAPISRDSGARSGTRQIGGGRARLRAALYMATLVGVRHNKALAACHARLIAAGKRPKVALVACMHKLLLILNAIIRTNQPWHDDHSPASI

SEQ ID NO: 302185 - protein, 345 aa, unidentified
MVTIGIDAHKRNHTAVVVDENGRELAKTTTAGTTSSAHLGLIAWAAKQGDARLWAVEDCRHLSRRLERDLIAAGERVLRVPPKLMANAREGARTVGKSDPIDALAVARAALREPDLPSARLDGRERELRLLVDHREDLVAERTRMLNRLRWHLHELDPGCEPAARSLTRPCNLDRLDARLKGVDGIVARLARDLVSRCLKLTVEIIELEREIAALAQRLAPSLLLICGCGALSAAKIMGETAGVGRFRSPDAYARYNGTAPLPVWSSNHARHRLSRSGNRQLNAALHRIALTQTRCHPGAQALIARRKAQGDGSLEALRILKRRLSDVVYRALTADAASELPMAA

SEQ ID NO: 302186 - protein, 352 aa, unidentified
MRFYTKTHKHYCGIDLHARKMYVCILDAEGNVLLHRNICCNPQDFLRVIAPFREGLAVGVECMFAWYWLADLCCKEGIDFVLGHALYMKAIHGGKAKSDKIDAQKIAALLRGGMFPMAYVYPPEMRATRDLMRRRTHFVRKRAELLAHIQNTVTQYNLPVIGVNLSVESNRQGVAKEIAGLFPDPEVQKIVLVDLAMIDAYDDTLKALDWDIEKTARQHNCHALLLLRSVQGIGSILALVMLYEIHEINRFETVQQFASYCRLVKCSHESAGKKKGTGGAKIGNAHLKWAFSEAAMLFIRHNPPAKNLMENLTRIHGKGKALSILAHKLARAIYYMLKNNRPFDRKKFLATA

SEQ ID NO: 302187 - protein, 394 aa, unidentified
MCQQYKAEASMIKHNILFIGLDTHKTFTEVAYIEDQRGAKSIHLGKILSNKAAFKKLARQLQSKYPDATLHFVYEAGPCGYWIYRLLTSLHHCCYVIAPSLIPKKPGERIKTDKRDALKLTKLLKSEDLTPIYVPEPEDEAVRDLSRSRETGMKDLKDAKYQLKALLLRNNINSKVKDNWSLQHLRWLAELVLPHPCQQIVLQEAVSTITERLKRLKRLDNELTHQVKNWRYYPVVKAIQAMRGVGLLVATGVIAELGDLSRFDHPRKLMSYLGLVPSEHSSGGKRRLGAITKCGNSRARRLLVEGAHSYKHNANISKEMQLRQEGLSKEVIDMAWQAQLRLCRRYSRLMHKGKHRNVVVTAIAREMIAYIWAISREIILPVVDVKLRMARMPA

SEQ ID NO: 302188 - protein, 318 aa, unidentified
MTLPQVFVGIDVSKAQMEVALRPGDQFTVANEEAGWAQLVERLRAVSPTLVVLEATGGYELPVTGALAAAQLPVVVVNPRQVRDFAKATGILAKTDALDAQMLAHFAEVIQPTLRPLPDEQTQALAALVMRRRQLVAMLTAEKNRLRQASTRIRPNLKAHITWLEQAIQKADRDLAEAIRQSPIWREKDELLRSAPGVGPVLTTTMLATVPELGTLTHKQISALVGVAPFSRDSGTLRGKRTIWGGRAQARAVLYMGAIVATRFNPIIRAFYQRLCQAGKAKKVALTACMRKLLVILNAMLKHRTPWSHAVDTAGAGA

SEQ ID NO: 302189 - protein, 405 aa, unidentified
MKHVIAFDVSMGKSYMVIYNGLKKCIYEAEIKHTKPEFEKLRARIDELIEGYEDPPYIVFESTGVYSQQLERFMRDNYYSYCLLNPLEAKKQCDALRIHKTDKSDAHQLALTHFSVSRRETNGTDTLFQQLKSLSRFYSELDDELSVTRSRMHKVIQLTFPELEKLFTIKSDLFLNIVQLFPHPDFVQGLSKTIIKNKIRANTNKNISGAMAEKKAIALIEASQQSYPAVSSSDVLCEQLRSYARRYQELLQQKEQCINDMVQLAEKRSEYKVILSFPGIGPNTAVRLIAEIGDIHRFENNKQLNAYAGIDIRRFQSGKTYFKDKINKRGNKHLRKLLFLIIQNMIKQRRYGRNHIVEYYDKLKTQPYNKCHKVASIACVNKLLKNIFFLISHNMNYDYGLASKS

SEQ ID NO: 302190 - protein, 313 aa, unidentified
MELYVGIDVAKDTLEVATSGGESFSASNDAAGRAQLIERLLRLSPALVVLEASGGYEQALLVELVAAKIDCARVNPTDVRYFARMQRQFAKTDRLDAKVLVAFAEHRATDLIRAQLDLERDELKLLVNRRTQLLQMLTAERNRLAQAPKWLRKSIGRTIGALERELEAIDHEIAQRVNASARLKPLQQQLTSVPGVGPGLSNMLLARLPELGQLNRREIAALVGVAPFSHKSGRWQGHESIFGGRASVRTVLYMATLSAVRCNPTVRVFYRRLRQSGKPAKVALTAAMRKLLTVLNVMLKTQTSWRPPCTIPV

SEQ ID NO: 302191 - protein, 351 aa, unidentified
MIIVGVDYHPSVQQVAFLDTETGETGERRLNHSDGEAERFYRDLQRRQVKVRVGIEATGHARWFERLLAELKFELWIGDPARIKAARVRKQKTDRQDAQLLLRLLIEGRFPQIWVPSPENRDLRQLIWHRHRLVQMRTRAMNQIQAAAMNEGVRRKKTLWSKTGRRQLEALPLAPWATRRRQDLLELVDRLNTTIGELTAAAEQEARKRPEVLRLMTHPGVGPITALAFVLVLGSPDRFGCGHQIGSYLGLIPCEDSSADRQRLGHITKQGSSLLRFLLVEAAQAAVRWDPDWRRRFVHLAMRRDRRIAKVAMARKLAVSLYWMWRKGFDYPQTLQFGSHAGEPGYVHGVK

SEQ ID NO: 302192 - protein, 417 aa, unidentified
MNDERNWFVGVDWASEAHHVRLSDAGGAKVGERSFAHDGEGLAAMAAWLLELTKAAPAAVFVAIEVPHGPVVESLMERGFRVHSINPRQLDRFRDRFSPAGAKDDSRDAQVLADALRTDPRSFRVLEPVDPTVVELREWSRLAEELRQERVRLSNRIRELLWRYYPQILALADDVAAAWFLGLWRLIPTPEKAARVRVATVERLLKRHRVRRLSAEEVLKALRSTIISVAPGTVSAATAHVESVAKRLELVNRQIAEADGRLDRLVDRLAGAGEDAQAPSDEQRDVAILRSLPGVGRIVLATLLAEASDALRRRDYHALRCLSGVAPVTKRSGKSRIVLMRRAAHVRLRNAVYHWARVAVQRDETSRSKYVALRARGHSHGRALRSVADRLLAVACAILKSGTIFDAAILRNRTAIP

SEQ ID NO: 302193 - protein, 339 aa, unidentified
MELYAGLDLHSRNTYIGIMDKEFKRVFAKRVSNNLPLIINTLEPFQDQLKGIVVESTFNWYWLIDGLMDAGYDCLHLANPSAIKQYEGIKHTDDQFDSFFLAQMLILGILPQGYIYPKEERPVRDLARKRLFLVRHKTSHILSLQSLIARCSGKRVSANEIRKFTVEDLQQLLEQEYIVLSAQANLDTIVFLKQQIVQLEKAIKNKVKLSKAFQQLMTVPGIGLILAMTIMLEVGDIGRFPQVGNFASYSRCVSSQRLSDGKSKGHGNRKNGNRYLSWAFTEAAHLSRRYHEPFRSYYNRKVAQANTSLATKALSNKLARICYYIMRDQVPFQDNLLSQ

SEQ ID NO: 302194 - protein, 356 aa, unidentified
MEHFVGIDLHSNNSYIAIIDNDNKRVFKKKVSNDLQNVLHVLEPHRKQIKGIVVESTYNWYWLVDGLMEKSYKVHLANPSAIKQYEGLKHSDDVTDAFHLANLLRLGILPEGYIYPKEERPVRDLLRKRLQLVQQRTALILSFENLLTRNLGRRLKVDEINKLTEEDVGDIFQQEYLIVSGKASIATINFLRTRIEQIEKTVHKAARLRNEYKLLMTVPGIGKILALTIMYEAGPMERFTKVGNYTSYCRCVGSERISNGKKKGKGNRKNGNKHLSRAHIEAAHYAIRHYEYIKRYHQRKMAKTNNIVARKAIAHKLARACYYIIRDQKAFDPGKLFAHKIAATVNPYCCWDNHAT

SEQ ID NO: 302195 - protein, 356 aa, unidentified
MLYLGIDQHARQITISLRDDSGDVLQARQVSTQPEKIQAFFAKLTRERLRDGESFIAVVEVCGFNDWLIRLLRDYRCHQVILIQPEERKKCKTDRRDAAALSELLWVNRGRFLAGKPVRGLRQVDIACTTDQENRRLTTLRKEGSQARTRIVNKIKHMLRRHNMQWDMPTKTFPTQRAIAWLKQLVLPAIDRLEMNYLLVDLEQVEQRVQELEQVIIKRCGNSEDAQLLCSMPGVSYFTATSLACRIGRVGRFPRARSLANYWGLTPGCRNSGEHNQRLGRITKAGSNMARWLLAQVTHQALRKDARLREWYKRIKRRRGSTVARVAVMRKLATIIWHMLSKRQTYAECRAIAAAA

SEQ ID NO: 302196 - protein, 309 aa, unidentified
MKEQLVYLGIDIAKAYLDAAIGTERCRFTNDAAGLRELIKWVKQLKGSVQVICESSGGYERALVQALARAGVQISLVQANRVRQFARAAGILAKTDRIDAEVLCEFGKVMRPQRVTAATLAQEHLRELESQRRHLTHLLVMEQNRGARVSDVLVRRLNRSLINQIKKQIERLDQLIKEHIEQSQEHSAKARKLTAISGVGARTAALLLAQLPELGQLNRRQVAALVGVAPFNRDSGRMRGKRAIYGGRRPVRHGLYMAALVAARHNPILRGFYLRLRAAGKPAKVGLTATMRKLLIVLNSALKPDPIYA

SEQ ID NO: 302197 - protein, 450 aa, unidentified
MMQSQMHPKMKWTYVGADSHKSTHTLVFLDCFYTKLGELVVSSTPSEFEAFYQEALKFLQPHTEMVFAFEDISNYGRSLVRFLLNKGHTVKHTNAVLVANERKSYSPLHKSDSIDAECAGRVLINKFDDLPVASLDERYFILKVLVARRQSLAKSNRRLKGYLHSLLFEQYPSYFKFFGNLDAKSSLAFFYRYPSPHALLDSTVEELTQLLNKSSQGSLGEERAELIFSLVQSEGVPFCTYQKQRDFTVKSTVKQLKDSIDEKAKIEIELEKFLQCFDTPLTSMKGIDTITACRLLAEIGDVTRFKNASALARFAGVAPATYSSGSTSVQYATNRGNRTLSGIFYDLAQNLITLKGENKMALNPFFYEYYHRKLAEGKTKKQALKTVQRRLINIVFGMMKYKEDYINPPIAYVDEETGEIINDEEFDRQSNLNDNQRTHSQKQLATFKAS

SEQ ID NO: 302198 - protein, 411 aa, unidentified
MEQIHDRVAGLDVHRDQVAACVRTPGPRGGVQAEKARFDTTAGGLAALAEWLAGHAVALAAMEATGVYWKPVYYALEGRFLVWLCNAHHVKNVPGRKTDMSDAGWLADVAAHEMVRPSFVPPPPIRELRELTRYRKTQIDVRAAEIARLEKVLQDAGIKLTSVASKVLTQSGRAMIEALIAGQRDPAALAGLAKGKLRPKIPQLTAALRGHFGAHHAIVAARILAHLDFLDETIGALDAEVAARVAERYQSAARLLAEVPGLERRSVEVIIAETGADMSRFPSPAHLASWAGLCPGNHESAGKRRRVATTPGNQWLRRALIESARAAARTRDSYFGAQYRQIARRRGPNKAAVAVAHSLLDVIWHMLTTGEVFTDLGADYFTSRQDKEHQTRRLVSQLEKLGYTVQLTAAA

SEQ ID NO: 302199 - protein, 341 aa, unidentified
MQITTIGLDIAKNVFQVHGIDPAEKVVVRKQLRRGQVLKFFAALPPCLIGMEACATAHYWARELTKLGHEVRLMPAKDVKAYVKRNKNDAADAEAICEAVRRPTMRFVGAKSAEQQGRLMQHRTRDLLMRQRTQVINALRAHLAELGIVAAQGREGLKQLLTIIADEKDARLPIDARGSLIVLAAQLQALQTMIGSVEKRLTMQHRANEASKRLESVPGIGTIGASAITATVTDPNAFRSGRDFAAWIGLVPRQDSTGGKQKLGPISKQGDRYLRRILVVGAHSVLRRAKQNPEKYPWLTQLLARRPFKVVAIALANKMARVAWALLARGGTYRVPALAAA

SEQ ID NO: 302200 - protein, 382 aa, unidentified
MDVLHACCAGLDVHKKTVVACVRRVDPAGKVTKLVKTFATMTADLLDLADWLASQGVKAVAMESTGSFWKPIFNLLEGRFEIVLVNAHHIKQVPGRKTDVKDCEWIAQLLQHGLLRASFIPPRSTRELRDLTRQRTQLIRERTSVINRIQKVLEDANVKLGSVASNPLGVSGRLMIEAIIRAEYDPVKLADMARSRLRKKIPQLQRALKGSVTDHHRFLLRTQMNHLDHLERLIGQYNERIDEALDPFAATLARLVTIPGVDFRVAEVVLAEIGMDMNRFPAAGHLSSWAGLASGNHESAGKRYSGRTTPGNTWLKTVLVQAAWAAYRAKGTHLSKKFRRIAGNRGKKRAAVAVAHTLLVIIYHMLKGETTYQEFAGESEAA

SEQ ID NO: 302201 - protein, 336 aa, unidentified
MQVSVVGLDISKQVFQLHGVSAEGKIALRKRLRRAQVAAFMAQLPPCLIGIEAGAGAHHWARVLQQYGHEVKLISPQYVKPYVKGNKNDSNDAEAICEAVSRPNMRFVAVKSVAQQDLQMLHRVRERRIKARTALVNQIRGLLSEYGIVLPTGIHRLRQALPQVVETETLTPLGREVFSQLYEELVTVDEQVTKCEQRITRWFKTDPTCQRLAQVDGIGPLTATAFVAAVANPAVFKNGRQVSAWLGLVPRQASTGGKTVLLGISKRGDCYLRSLLIHGARAVMRYAKTKDEARYHWVRQVMHRRGVNPATVALANKNARRLWALMRDPLPDQQAA

SEQ ID NO: 302202 - protein, 409 aa, unidentified
MLKIVYPNCCGIDVHKTFVVAVIAITNNQGITEYHRKRFSTFTNGLTQLRDWLEYYSCFDVCMESTGKYWIPVFNILEEQTNVCLAHPKYVKAIRGKKTDKKDAQWIADLFKHDLVVSSFIPPLKIRQLRDLFRYRMKLTQLQVGEKNRYQNCLTWSNLQIASVVSDVFGKSAQAIIKSILDNPQDKPNIEQLVHKRMKNKVQDLEITMEGALTPEQAEKIRVIKAHYDALAICKEDLEQMIRELGQDYQHQVKLIQTVPGFKEDLSALRIISEIGCDMTVFDSAAKLCSWAGLVPANNESAGKKFSTRISKGGKYLKPFLVQVANAVVKSDKHPELRNKYLKLKKRRGHRKAISAICRRLLVSVYQVLRKQEDYNPVLQGLTEIRNPDKTMSVQDAVRFAQQHGFNVA

SEQ ID NO: 302203 - protein, 423 aa, unidentified
MISAVVECCAGIDVGKKWIAVCVLKGPANGEAQAERRKFETTNQALERLAEWLVECGCTHVVMESTGEYWRPIFNVLEEATDLEIILANSQQVKGLRGHKTDPEDAHWLAHLLRHGMIRPSYIPPLATRQFRDLTRRRKQLVRSEAQERNRIQKTLESANIKLGNVLTDVFGLSGQLMIDKLLEGEATPEEIAELAQKGARKKIPQIRASLEGHRMNAVHRRLINLSLDHMAFLEDQISTLDEEIGQHIKTHELEKPYQHLQTIPGVKETAAASLLAEFGPDMKVFGNAKKLSSWAGVAPGNNESAGKKKRAPALRGNHWERSTLTESAWSASRKKDSEFQDDYQKWKPRLGHKRAIVAVAHSLAETVFEVLSRGQPYTKSGASPMPETKAASLIRHHTRRIKTLAKRLKKKPEQQRGERTAS

SEQ ID NO: 302204 - protein, 349 aa, unidentified
MTDQRISYCGRIVYVGIDVHKETYTVTCVCNKQIVKTATMQADPAALAASLPRWFPGATLYSVYEAGFSAFVLHRVLTTTGITNIIVNPASVAVAANDKVKTDRRDAKKLAIDLADGRLRGIYVPTEAEELARLLPRTRAQIVKHRATIARQIKAKLHQFGLIAPSSRRMISSRYLREMAAWSLPPELSVSLTLLAEQWRFATRQLIEMRRLLRDQAQAQEGIEKVYRSVPGIGEVVARTLATELGDMTRFANERALFSYTGLTPSEYSSGASVRRGHISRQGSSRVRHLLVETAWRALPRDGVLKEMFDRIAATRGKKRAIVAIARRLTGRIRACFRQGTTYAVGTYA

SEQ ID NO: 302205 - protein, 319 aa, unidentified
MKTIHIADSRSTERNVGIDVGKDTLDIAIVELGTHWQVPNDDISIQELVKQLNRYKLTRVVVEATGGYERRIAEACAGKALPIIIVQPLKVRQFAKAEGLMAKTDKIDAYLIARFGKVMALEPRPLPDKKIRKVRDLLARKRQLNEQRTRELNRLHKAQKFLEASHRRSIKLMDKEIAWVEKHITEIVSTVEEWRETYSIITSVPGIGDGVAYTLLGELPELGQLTHKQIAALTGLAPFNRDSGSMRGKRRIRGGRAPIRTMLYMAMLCGIQHNPVMKAFYNKLVAQGKHKKVAITACMRKMMTILNAMVRDQKAWQVV

SEQ ID NO: 302206 - protein, 341 aa, unidentified
MKYVGVDLHKKTISLCVMVKADNGRQVVCRKRFACTQPELIRKFFAELGRFQVVVEATSSYEWFLLLVEEFADRCVLAHPKKLRVIAESKNKSDKVDAQVLAEFLLLDMLPEAWRPTPRVREHRVLVRHRRWLDGRITAVKCKLRNKLAHYNADIAGLFTERGAEYLAGIAMSAADCFEVRQLQVELDLFLTQLQQTDKQLREFAKRAPLVEREARAVLGTIPQVGPVTIDAVLSELGDWRRFRSAKRVVAYAGLNPGRRESDRKVKQLPISKEGSRILRWALIQAAWRLTNTSPRWQRIFETLQRNTGSKKKAIVGVARRLLCVMFALLRDGKRYDFAAA

SEQ ID NO: 302207 - protein, 376 aa, unidentified
MYSITKYVGFDVSKEKIAVAVADFGIAPARFLGLIENSPEKIRKILKRLGKPEELYVCYEAGVMGYELARFLKGLGVKCMVVAPSKIPQAPGPKVKTDRRDAMRLAELLRAGELISVWVPGEDDEALRDLSRARKARKEDLKRAKQRVKMFLLRHGIRKPDGMKAWGEPYRAWLRSIEFPFRATQMAFQEYLIVVEEIEQSVRRLELEVHEIATDSPHAPMIKALQALKGVQETAAVTIVAEIGDFTRFSNPEELMAYAGLVPREYSSGNKTWRGNITKTGSSCLRWILTECAWSYRYKPRISRDLMKRMEGLSPHIQAISWKAQVRLNKKFTKLLIRGKSGSVAVTAVARELLGFIWAIARQVNYEMEGGQGKVA

SEQ ID NO: 302208 - protein, 400 aa, unidentified
MAVAVGIDIAKEIHWVCLKITKTGQLLASHKVDNTPADIAGLVDEIRATAEQHGAATVGIDILGGIAALAEAMLLDAGITLVHVPGLAVNRARRATVGGEHKSDPKDAAVIADQVRMREDLRPVTAQRDVDVDLRLLVGRRSEIVTDQTRRAARLRDLLVSIHPGLERVVDVTAKAGLHLLTRYVTPAEIRAAGRRRLLAHLRTAGHLRETTMTALTDAAVAAAQAQRITVPGETVAAELIRALATEMLSAREQLKMIDARIEAILAEHPDAALVRSLPGMGATLTAEFLAITGGIDRYTSGDQLAAAAGLAPVLKQSGKSRYLQRATAGDKALKRVFYQSAFIAISCDPASKTYYQRKRTEGKVHHQAVISLARRRVNVLHAMLRNRQPYNAGHAASAA

SEQ ID NO: 302209 - protein, 304 aa, unidentified
MNGIGIDVSKRQLDVGTTDGEILQVSNSASGFAELDLWLRKHPASQIVLEATGGYEQSVLNFLHNAGHPVVRANALRARRLAQGMGQLAKTDRLDAYALAQMATLVKLPSYQPLEPWQQKMREFVRARRQTMDALTVARQQQEMVTDRELRRLLQANISRLQRIVGRLGKQIAEQVAQQPQLAVLKSMKGVGTGLQAVLASYLPELGKISGKAIASLVGVAPMSHDSGTMRGKRSIHGGRAEIRQVLYMASMSAMRHEPRLRDFYQSLRARGKEGKVAIVAVMRKMLVILNARVRDAQGGSIPA

SEQ ID NO: 302210 - protein, 341 aa, unidentified
MKNKSFIGIDISKNVIDASIFCEGAPIKDFPHAVFNNSRKGFGEMCTWLKKNHVVLSNCLFGMEFTGSYSMKLEKFLNAKKYQFCMLSTHVVKHYPMGPKDKSDKIDSAKIADFLYRYNGTECVKPYKMPDKTMQRLKTLMNERKFLVEQRTCFMNRRQLCITKEDAQLYDGYIKKFSRDIENIELEEQKLLATDDSLFTTYKNLLTIPGIGFVNAINVIVITRNFTAFETARQYASYIGVAPHFHTSGTSVKWRPRPSARCDGQAKADLSMAALIAVQYDAELQSFYNRKLGGKQDSDTKRKALNAVKFKLILRMFAIGKQNRKWEPLDSKSSNEKLAIS

SEQ ID NO: 302211 - protein, 371 aa, unidentified
MNACLTPKSTVVGVDVHKYSHTAVAMDCFGQEKARLDFSNERLNDYVLWLRELGDKEDIIVALEDVNGYGFHIVERLSKEKISMRYVPAILTERERKKSIHREKSDYEDAKRVGKVILTKFDETLPAKESIADDQERELSANLDLLTAERRILVQEKTILKNQLHAMLHQIYGDHYGEGFPKVFHKKAIKSFRQKLTQTKFDNPIRVALAGSSIRRFDRLALVEKQLKEIDGSINNIGQKSEAVMALSDNIHGCGIITAASIIAEVTTISRFCDKSRFARYSGIAPIDKSSGRHQRLYTSPFGNRKMNRALHTIALCQIACKGDDRGKIYFKKKLSEGKTKLWALRCLKRQISNKVFQALKEQKREETTAQ

SEQ ID NO: 302212 - protein, 311 aa, unidentified
MEHSCFIGIDVSKAHLDIHIRPTGAGFRVSHDEAGCATLLERLGALRPTVLVLEATGGYEVPVAATLASAGLPVAVVNPRQIRDFARATGQLAKTDTLDARGIALFAEAVRPAPRPVPDEQAQALGELIARRRQLVEMLGAEQNRRRLLRDRGLQRHVDAHITWLEEALRRLDHDLTTLIRSTPVWRETDDLLRSVPGIGPITAGTLIADLPELGRLDRRRIAALAGLAPFARDSGAFRGRRMIAGGRASIRRVLYMATLTAIQHNPSIRAFYLRLVAAGRPAKVALTAAMRKLLTILNAMLRDRRPWQPA

SEQ ID NO: 302213 - protein, 470 aa, unidentified
MIRHRSDSVLLGPLASVRKPVSQPVIAAVRFMQVELPLHVRLIPQEIESAMRNAGIHANSLLEVRRMYNAVGIDVSKGKSTIAVLQPGGTVIRKPFDVSHTSQNLIELAHYLGSLEGSTKIVMECTGRYHEPMLKALYEAGLFVSVVNPHLIKNFGNNSLRKVKSDPADARRIARYTLDNWAELRQYSGMDNTRTQLKTLNSQFSFFMKQKVAAKANLIALLDNTYPGVNKRFDSPPREDGSEKWVDYAYSFWHVDCVRRIGLKTFTERYRAFCRKHHYIFQPDKPEKLFNASKELVAVFPKEKTYKLLIQQSIQQLNLASGHVERLRQEMNALASTLPEYSTVMGIYGVGKTYGPQLIAEIGDVSRFTHREALTAFAGVDPGVDESGQHKSKSNRASKVGSARLRKTLFQVMTTLLQNAPEDDPVYRFLDKKRAQGKPYYVYMTAGANKFLRIYYGKVKECLRNLEQAE

SEQ ID NO: 302214 - protein, 458 aa, unidentified
MTLLAELSQTLPVRYYLGLDVGYREHVAVAISLQTFVRGDDRWQRARCLHFASTRAGLRQLQQYLDRFSLDPTAFLGLCEPTGGYYGATVGQYLLDAGYRLLLVDNGTTRHMREKIFGALPKTDDVDARVMARMGYLHEVVGEEYSLRPLCLPAAEDAELLALCRTSWKLNVMVCRLRNQFGQLAAVIFPELKEFFTSSVTTVVPVRLLAAYPCPAELAAAPAADVAAVLRRAGGYRHAGRVDELQALAADSSGLLPDPGRAWRLEWLSGMLGHCFAAQASLDTRLQDLVSRRDDYRLLAPIPYAGVATLGVIVAVTRDADRFHNYRQYVAYTGYFAGLEKSQTIDRTRMSKRGNRDLKRALFQIVAPLVWFDQGNNPYKALYERKKAEGRPWYEAMPFACAALARHIYHCLKFKEPYDVSKAFQGSAPRAASDEVLKDLQADLEARFEVMDAHLSSD

SEQ ID NO: 302215 - protein, 397 aa, unidentified
MIAVGIDVSKYKSTVAIISNTGEILLPPKVYTHTYSALLSLVSLLKKQNDDIRIVMEATGHYHYPILKLLLGHHFFVSVVNPYIIKKYNDNNLRKVKTDKQDAIRLAFYALEKSYCLNAYVPAGEKYADLKFLYQQYTQRIHIIQKEKINLCHLLEESMPGLYDMLSTSVRNPSKNLLYSFVKRFKSFNRIKRMGKERFLNSYFKMAAEIGSRRRKNYALDIYEMAKDCIATGSTEPYSTMAQEECLRSLILAEEAANRLCEQMNSIANTLPEYPLVRSMYGVGDKIAPQLIALIGDIRKFKSGKALNAYAGNDAPPYQFESKNRHISKRGSTELRKVCFEIMCCIKVHKSPEDPIYKFMQKKESEGKAKKVAIMAGINKFLRIYYARVSEVYQKAL

SEQ ID NO: 302216 - protein, 371 aa, unidentified
MNTVINIGIDVHKDSYSLCSYSFATKQAFGQTRIASNSNLVIKYVRKLQESQPNVEVLCGYEAGPTGYGLYRDLEKAGIGCVIMAPTTLPKASGNRVKNDKLDAMELSKHLAFGTYSAVHVPTSEDEAVKNYTRLRNTRVDALKKAKQNLLSFLLRCGRVFSEGRNYWTNIHYAWLKRQQFTDPVDQETFNEYLQEVYDQQDKVDRYNQRIEQLSQLEAYREKVARLRCFRGIETHTALSLVSEIGDFSRFANAQQFSAYLGLVPGEDSSGQREKRGGITKAGNTRLRLLLIEGANATLRSSLYGQKSKRLKARQDGNEADVIAYADKANRRLHRVYNNLTNRGVIKNKATVAVARELSCFIWGMMNNKID

SEQ ID NO: 302217 - protein, 411 aa, unidentified
MKVMHRRCAGLDVHQKEIVACRRRVVGRKVEVEVRRFTTTTAGLLELADWLAEGKVTHVAMEATGVYWKPVWHILEGRFTLILANAAHIRNVPGRKSDVNDATWIADLVAHGLIRASFVPPQPIQELRDLTRTRTELTREMVRHTQRIQVVLEEANIKLASVISDIMGGSGRRILKAIAAGETDAGTLAKLGSLRLKASRDELVAALTGCIRDHHRFLIAQHLQMIERIETAIADFDARIEAALAPFRDAVKRLIDIPGLSMTSAQIVLAEIGADMGAFPTADHLVSWAGLCPRLDESAGKRRSTRVRKGAPWLKPVLVQSALAAGRAKNSSFKARYHALKARVGPKKAAIAVAANLLRVIYHMLKDGTFYQERGEAYRRPNNPARAAANLANRIRALGYQVEIRQAACCG

SEQ ID NO: 302218 - protein, 346 aa, unidentified
MMIIGCDYHPSWQQVAWVETETGECGERKLVHATGEAKVFYQQLGSPALIGMEATGNSQWFIELVEDLGHAIWIGDAAQIRASYVRKQKTDKRDAAHILRLVVENRFPRLWTPDREQRDLRQLVLHRHKLVEMRSRVKNELQHLAMNKGMQKKATLGSQAGQQRLRELPLKPWASCRREDLLGLLGMLNQQVGTLDQAVQKAAEEHAQARLLMTQPGVGPNTALAYVLTLGDVTRFQRGKQVASYLGLIPREESSGGRQKLGAISKQGNRLLRSLLVEAAQIAVRFDPGFRKQYLHRCHQKPKGVAKVAAARRLAVRLYWMLRTQVAYPEIVRIESSPRVPRVGAS

SEQ ID NO: 302219 - protein, 344 aa, unidentified
MNILAIDLGKFNSMCCFFDTNTQKYRFQAAATTRQYLTAVLKNHAIDLVVMEACGPSGWINDLCQEHGIKTLVCSTNDEAWKWKNVKRKTDKDDALKLARLAMMRQLTPVHVPKHQVREHRTLIKYRKKLVGRINQIKNSIRGLFVCRGIEIDRGQKAWSSGRELIDSFRKTLVECSMQELWKGQLDLELTQLDSLGEQMAAVEKRLEAIAKADERIQRVQTITGVGRRTAEAIVTTLDDVDRFDNARQVSSYVGLVPRQYQSGETDRNGRITKRGSRLLRTLLLECAWVSVRYNDWSRATYNRIHGGQKTRKKKAAIALARKILVVAWAMLKNKTDWDPEKAE

SEQ ID NO: 302220 - protein, 343 aa, unidentified
MQTITTVGLDIAKSVFQVHCVDADGEVVLRRQLKRRYVLAFFQKLPPCLVGIEACASSHHWSRELQALGHTVRLMPPAYVKPYVKRHKNDAADAEAICEAVTRPNMRFVPTKTPEQQSCLTLHRTRHLFIRQQTAVINSIRAHLAEFGIVAPVGRNGMEQLLEVVADAKDTRLPEIARACVAALGTQLLALKAQILAFDRRIMAWHRSNETSKRLDEIPGVGPALATALVACIADPKAFRSGRDFSAWIGLVPKQNSSGGKEKLGSISKQGDRYLRSLFTAGALAVIRYAKIHGTKHRPWLTALLARRPTKVAAIALANKMARMAWAMMTRGERYKEPVALAA

SEQ ID NO: 302221 - protein, 490 aa, unidentified
MPVDITNPGTEVIVRSEGNQGIEVQVLKSYGVGIDCHSRFIAICVHVRNNQRIFKYMSEADTDWDSLIKAKEWVIDTIKAHSDPVPDLRQPLHYVIEATSTYHMPILRAWGGIPSVINPMLAGATKKKTDNLDAERLSFHDLTGVWPESFVVSDDLQELRVLIAERNHYAKLATQCSNRINNIIVRFGITIGRGTSVTRNPEVRAIVEDLASETPSFHENICPDPLPADIKTLIQQEYMLYDNYVVQAGSYLSRVRQKVYSINWETRDGTIPGTEMVRILCTTPGVGEITCFTWLAFVGTPRRFPNAKALAAYCGLDPSLKVSAGHVTSTKKRGGCRTLHAVLVTSADRIIRAHTEAFGRWGFLMAKSSGKWKKATNAVGRKLCTAMYHMMMSGQEFSYENYTIMKDAAIFNIPVDELPMLNPDFKRYIRILHDNGIHTTTDMITAYLSCSLGGVKGLGRKFFVTMQDYLSHQHKYQNEYKKLHSTETTK

SEQ ID NO: 302222 - protein, 441 aa, unidentified
MAMRKRSDEVVFPNAAGIDVGASSHWVAIPAHLAEEPVREFGAMTDDLNALAEWLLACGVDTVALESTGVYWIPVYEVLEQHGLKVWLVDARQMKYVPGRKSDVLDCQWLQKLMSFGLLRGAWRPGEQVCVVRAVVRQREVLLAEQADWVRRMQKALVQMNIQLGEVLTDVMGMTGQAIIRDIVAGQRDPAVLARHRDARVKAKESDIKRALTGNWREEHLFVLTQALLMYDSLAQRMLECDAKIEALLAPLGRHEVTLAGPAKPAGKNTPRFDLRRALARWAGVDLTRINGLAVSSVLTILSEIGPDLRRFANVKHFCSWLGLCPGTKISGGKVLSARTRRSVNRVRQALKLAAMSLSRNSSALGAFYRRLCARMDKPRANTAVAHKLARMIYFMITRGEDFVDRGQQRYEQQQRERSIAALKRRAADLGFQLSPTPLAP

SEQ ID NO: 302223 - protein, 344 aa, unidentified
MSSIVGGMDIHRKQVTFDYLDVVTGEVKCGQIAPADRANLRAWLKRFAGVPGVTFAVEACTGWRYVTEELQRAGIEAHLAEPADTAAARGRKRRAKTDRADARLQRDLLAQGRLPECWIPPSQILEYRALLETYHDLRREHTAWVQRVHAVLFHQGAPVFCDLGRAGAPQELAALARAHLSPAGQQQIALYLRMLEVTGGELDALRRQLVSAAGQLRGARALAGELYGVGPVTALALTCWLGGAGRFSSARKAVRFTGLDITVYSSDSKRSPGHLSRQGPAVLRWCVYEAGKTHARAGAPDHDYYAAVKDRKGGKRAALSEARKIVRRACHLLGELGDDAFATA

SEQ ID NO: 302224 - protein, 438 aa, unidentified
MKKVYSLKRLGDKEFESILTQVGLAQVGVRPVVMGVDVAKHELVLMMRCGDAQFGEARFIGPYRAMNPEQIGQVVELARRLGRNGAATVALEPSGTYGDALRQALSEAQIAVQRVQSKRSHDYAEVFDGVPSQHDGKDAAVIAELCAIGKGCPWTHQPSSETQSLMCHLVDWMDGHSRMHKLWIGRIEALLARHWPEAGGCMDLSSGALLRALKHYGGPAALSQDAGALKNLQRWGGPMLNAAKAVALVESAGKTLGVRQNQADRMRMMCCARQALEASLETKRANRQLRRLAGDNKTIGLQAQAIGLASACVLWCRLGDPRDYSSAGAYRKAMGLNLTERSSGQYQGKLRISKRGDSMVRRWLHMAALRLVRQSPHVKQWYRDKRQRDGNGHKRAITAVVRRLAVALYKIALKEEAFDSRRLFAGIAAARATGGCQD

SEQ ID NO: 302225 - protein, 367 aa, unidentified
MKKSSTTVAKQSRNISQQKLTIGLDLGDRNSWYCVVDETGQIRVEQRVRTSAKALQEVFGGMLRSRIALEIGTHSPWISRLLGELGHEVIVANARKVRLIGESRKKDDRLDAQTLARLARIDPELLYPVKHRSAQAQADLMMIRARAGLVRARTGLVNAARGLAKSYGERLRGCNVRNMNPEKAESLSPELQAALEPLLNAIESLSERIVEYNERIDNLARESYPQVALLKQIKGVGTLIALTFLLTLEDPHRFRKSRDVGCYLGLQPGRRKSGQRDPQLHISKEGDPYLRTLLVQGAQHILGPFGIDCDLRRWGLKLAERGGKNGKKRAIVATARKLAVLLHHLWVSGEAYEPLHNSSRTTVAAAA

SEQ ID NO: 302226 - protein, 430 aa, unidentified
MTKRISTPADAVLVAIDMSKHRQEVLIERPEGGRRRRMTVMATKPDYDRLATDLGNIGRPIIVGFEATGNYHRTLAHRLLTAGFELRLISSVALARTREALHNGWDKNDSKDAQVILHMLRIGATQRYVDPLAAGINDLQEMSKTHEAISKAKTQTWHRILTHYLPLYFPEIERFAGNSRSDWFLALLERFPTPASITVLGQEAFTCEAWSLVGRKVSKARLINDIYETACASVALPVDEDSVAITMFRMVIAQARSLIRQRDEIERTAHAMLSDNRDYQLLRMIPGIGPINALTILAEAGDLRRFAHHRQFLKFCGLDLATCQSGTFRGRTKLSKYGNARLRRTFWMAAQVAVRQRDNSFRDKLGRYVASHGNDPDRRRKAMTALTAKMARVAHAVIKTGTEYRPFLERADTRWKDPSLLCREGATATL

SEQ ID NO: 302227 - protein, 338 aa, unidentified
MEQQREYVGIDLHRRRSVIVRITESGEVLETVRVDNDPLSVVHAVMHEDPNPEVALEATYGWYWAADLLQAEGATVHLVHPLGLHWDSRRVKNDERDATELAKRLSRGDLPEAWIAPPQLRELRELVRYRAKLTALRTSAKAQVHAVMAKEGVLPAYGRMFGPAGQRLLDEMPVEGVYRDRVESLRHLLEIYERELLLVESHLSRRLKHHQGYSAIQAIHGVGPIMAAIFVAEIGDASRFPSARHLCSWAGITPSHRESDVKVHRGHITRQGNNLVRWAAIEAVARYHGGAPIEPTFQRVAKRRGTMIARVAAARKLLSLVYYGLRDGEIRCLTREAS

SEQ ID NO: 302228 - protein, 417 aa, unidentified
MKKNSKSPTKKEQTSKRTRSQRPVQRETKEVLAELVEKLRGKLELKATPASLGEAGQGPELRPNLDRLTVGVDLGDQWSHYCILGLVGETLSEGQLRTTQADVAEFFQAITPARVVIEVGTHSAWVQEIIAGCGHDVLVANPRLMEGSKRRKRKNDRIDANKLARLGRVDPQSLHPMQHRSREVRQDLVLLRARDALVAARTELINTTRGLVKSLGTRLPKCSSRSFAHKVGEAIPEEVRDALLPLVQLAEGLSVCIQGYDRRIEELAGEKYGHTKLLLQVKGVGPLTALAYVLTLEKPERFAKSRDVGPYLGLVPKQEDSGEIQPQLGISKAGDTMLRKLLVGSAQYILGPFGPDTDLRRYGLRLCERGGKNAKKRAAVAVARKLAVLLHRLWVSGEVYEPLGYRVSGTIVQPAAA

SEQ ID NO: 302229 - protein, 480 aa, unidentified
MSQQKKHSKPLGEEKTAAGTGKRGRKRKGMCLEDRPILEANAAGIDIGAREVFVAVPPDRDEHPVRVFSTFTEDLEKLAQWLVSCGITTVAMESTGVYWIPLYDVVEKYGVKACLVDARGMKNVPGRRTDWHECQWLQFLHSVGLLRAAFRPEGDVCAVRSMMRYRTELVEMTSQHIQHMHKALTQMNVQIHHVISDLTGVTGLAIVDAIIAGQRDPVVLAKLRDPRIKASEETIRKSLVGNWRAEHLFTLEQSRKSYQHYQGQISACDEAIEKLLVALVPRVDPTERPLPPDRKRKQRGRKKKNANPNTFDLRTESYKLFGVDLTQIPGLMAMVLMLFSEVGRDMSRWKTAGHFVSWLALCPDNDISGGRVLWRGMRRVHNRAGDLFRMAAYSLHHDATPLGDYLRRMKSKLGPAGATTATAHKIAIIFYTMVKKQVEYDATLWANRDAEREKRFEAKLKRQAQQLGYKLVPIEERPAA

SEQ ID NO: 302230 - protein, 371 aa, unidentified
MKKRNTSQQSPKRTPKGAARRSLTIGMDLGDKSSRFCLLDEEGAVVEEGSVAMTKQAMLRIFGARPRCRIAMEVGTHSPWVSRLLSRLGHEVIVANARQVQLISKSSSKDDRMDARTLARLARFDPQLLRPIRHRSEEAQQDLMAIRVRAALVEARTKLVNAARNLAKSVGERLPVCDADNLVPAKLSALPESLQQTLRPLLEQVEMMTVQIKASDQHIEQIARIKYPETELLRQVSGVGPLIALTYVLTVDDPHRFTKSRDVGCYVGLRPKRGDSGESQPQLRITKEGDIYLRKLLVQGAHHILHRGPDTDLKRWGLKLAGRGGKNAKKRALAAVARKLAVLLHCLWVTGEVYEPLRNSPAQKTGQHAAA

SEQ ID NO: 302231 - protein, 346 aa, unidentified
MTIVEAARGVTGGVDTHLDVHVAAALDPLGALLGTESFGTDSTGYKALLSWLESFGVVTRVGVEGTGSYGAGLAQFLRRAHVEVIEVDRPNRAERRRSGKSDPLDAVEAARAALGGRAKSIAKSKDGDVEAIRVLVVAKRSARQARVKALTQMRHLIITAPDQLRCRLKGMSVAALTAEAARLRPSRSGEAVTAAHKASLCSLARRIQGLEDEIAELDARIERLLVRTAPELLSRFGVGPDTAAAILVSAGDNPERLHSEAAWAHLCGAAPIPASSGKSSRHRLDRGGDRQANSALWRIVMVRIAHDPQTTAYFERKVKEGRSKRDVIRLLKRYVARELYRYLPRG

SEQ ID NO: 302232 - protein, 340 aa, unidentified
MGDITTIGLDLAKNVFQLHAVDEAGNVVMRKRLRRGQVLAFFAGIPACLVGMEACATAHHWARELIALGHEARLMPPTYVKAYVKRNKHDVADAEAICEAVRRPSMRFVPVKAVQQQSALMMHRARDLLIRQRTMLVNALRGHLAEFGLIEAQGLHKVARLVAIVMDENDQRVPDIARQVLKVIVNQIEDTQTRIAGLETQVLAWHKSNPVSQRLATIPGIGPIIATAIAATVADPSMFRSGREFAAWLGLVPRQCSTGGKARLGGISKREDSYLRRLLVNSAHTVLLCSKQAKTDPWLTSLLSRKPRLVAAVALANKTARVAWAIMSRQDTYRHAAVAA

SEQ ID NO: 302233 - protein, 381 aa, unidentified
MQVLGVDPHKGSHTAAAVAPDGTVLGRTRVVSSRRQVHRLLAWAAPWPERVWAVEGATGVGRLLAQQLVAAGETVLDVPAALATRVRVLSGQSGRKTDAHDAVAVATAAIHHPRLRAVQAEDHSGVLRLLSVRRTQLTASRTQAVSRLHGLLAELIPGGAPRNLDADHAAVLLRSIRPSTAVDATRKALARDLVDDVRRIDRKLDANKADIVEAVKASGTTLTEIQGIAEITAAKILGQTGRIDRFEDRAHYASYAGVAPIEASSGAVSRHRLSRRGNRQLNSAMHGIAITQATHPGRGREFYLRKRDEGKTEGEARRALKRHIIDLVFVTITADTERAQRSPGRQVGATRESSAAGQSPTANTSERSVPGLRKQTTPRVA

SEQ ID NO: 302234 - protein, 341 aa, unidentified
MEVTTIGLDIAKNVFQVHGIDAAEKVVVRKQLRRGQLKKFFGALAPCLIGMEACATAHHWARELTKLGHQVRLMSAKDVKAYVKRNKNDAADAEAICEAVRRPTMRFVVVKSPEQQGRLMQHRVRDLLMRQRTQLINALRAHLAELGIAAAQGREGIKELLAIVAQDGDSRLPVDAHASLIVLAAQLQAVQTTIGSIEKRIVSQHRSNEESKRLQSVPGIGVIGATAIVATVPDPKVFRSGRDLAAWIGLVPRQDSTGGKQKLGPISKRGDQYLRRILVVGACSVLRRARQQPEKYPWLIQLLARRPFKVVAVALANKMARVAWALLAKGGTYRAPQLKAA

SEQ ID NO: 302235 - protein, 338 aa, unidentified
MRTYAGIDLHSSNCYLAVIDEQQRRLFAKRLPNSLDLILSALQPFKDELSGVVVESTYNWYWLVDGLQEKGYRMHLANPSAIRQYEGLKHTDDKWDAFWLAQLLLLGILPQGYIYPKAERPTRDLLRRRLLFVRHRTAHILSLQSMVARCCGRGISVNAIKKMTPQEAAALFLDPQLGLTARFQVETIGFLTQQIRSIEKVVWPQVKLHPEFEILLTIPGIGKILALTIMLEVGDIQRFAKAGNYASYCRCVKSQKLSDTKKKGEGNRKNGNRYLSWAYVEAANFAVRHSPRAKAFHQRKCAKTKKVVAIKALANKLARASFYILRDQSAFDEKRLYG

SEQ ID NO: 302236 - protein, 397 aa, unidentified
MKNLFVGLDVSKDDFKAAVKDDQNNLVMPPKNYRHDRSGLESLDNDLETLKEQFECGAIFGMEATGIYHLSIYQHLIDSKEHVKVFNGLELKRFKGRIRKTKTDNLDAQSIAEALLLAREPSYHPSDRPELIQMRELCRLRDRLVKKASQCKNQAIRNMDILCRGYTEQFDDIFSPSSIAVLKATVRTTRLFEIDQEALTKLLMKFQHKSAAKKKAAKLHTLFQNTVIPEHMKDICILELHMLIQQYELLRQQIDRVEQKLEKRVKELNTHIISVPGIGELTTSVVLGELGDLSRFNSTGQVTAYSGLDPSVMESGRSHKTGHISKRGSPMLREALYNAALSAIRVNPVCKQLYQRLRAKGKHHKVCMVAVARKLLHIAYSVEKNKRDFYVPSYITE

SEQ ID NO: 302237 - protein, 373 aa, unidentified
MPKYSTAFGMDVHLRSTTVCALDADTGEAVTRRFPGNPWGEIAGWMDGFPGPSLAAYESGYLGFAPQRELAGLGVECVVAAVSKIPRSAADSASKNDRNDAARMAKAILAHDISPAWVPSPEVEGIRDLAGAYDGATARLATAKQRLLAFLAKRGFVYGGTTPAGNPRKYWTYDFLRWLDKVRPEDDGGVRALAALRNEVEAAAEARADLLSEYRAAVDASPIAAEAAALQSIKGCAFALAAAFSAEVGDFTRFRSGRQVTAYFGLAPSQRSSGDSVRLGGISGAGNALVRKLAVEGSWCYAAARHQPKLMPRDTGAPLEIRMHGRKGSERLLRRREGMLARGMPAAKANAATAAELVRWLWALGMMCREGAE

SEQ ID NO: 302238 - protein, 387 aa, unidentified
MPSAISPPKAVLGIDVGKSSHWACLVTREGEVALNRRVRNSEGDLDGLFSQVACDTIVVVDQCRNIGLLAISRARLAGLGVAYLPGLAAHQAARLFAGDAKTDERDALVIAKTALGIPDALLPVPEPDEALEAARSLAAQRSHMVACATKDKNRLRSILLESCPALEALADLGDRHWLNMLEKLGGPWGCIDAGKPAFGAVTKGANRARMDAAWNAAMASTRPSKRRVDAENPQVRMLARRIREALEEADGIDREIAALPAGDGTYECLVTIPGIGPRTASELVIGINIEDFPDHDHLASYCGIAPRNRRSGTSISSVSASRQGNRRLKNLLIFSCNSLVRSENRFGEYYRACRGRGMCHGEALKAVARKRLKVIYAIMRDKVPYSA

SEQ ID NO: 302239 - protein, 433 aa, unidentified
MTNQETIRRKQYCQIVKEITGSNEYLVVGVDIAKEKHHAFMGTATGKSLLRKLIFENNIDGFSRLLKTADAIKVQNGLSKIVYGIEPTGNYHKPLARHLIRCNGDVVLVAGLAVKNNRVLIDGRWDKNDKKDAANIADLVSRGKCLYYDCPTQSIIEIRVLLSLRRRLKKEEHSLRMRIRNNLLALYFPELDRFYSACESETLAIVGWCLTPDTIAAMEFEEFFHLVTKTRRGTAQALRLRKIHSLAIESIGCPMGPAGEHEAELLVEKLKQVRNQIKETNDLIEDFCLEFSEYSYLLTIPGFGPYISARVLASIGDPFRFENRKQLIKMAGYDLCANRSGRTSDKAIPVISKKGNSELRYALYQAANIAAARVDLFREYFAKLLCGRERERGIKTKMRVKLAAKMLVIAWTLMKKREVFNPDYIDILKFHRF

SEQ ID NO: 302240 - protein, 316 aa, unidentified
MNIPDKSEINIGIDTGQTILDIHVRPQGHFQSFENNPEGIRAAIRFIKPFKPTRILIEATGRLEMAFFCAAHKAGLPVCVCNPIKVRKFAEMTGILAKTDKLDAQVIAYYGETMKPALTELKPEKLRLLSDLLAVRSQCLDMSTMQKNRLIRMPKTVQKPIRNILKKITEEIAVIDRKLDQVIAEIPQFQARVDQLISAKGVGKVLAYTLLSELPELGSMNRKQIAAIVGVAPMNRDSGKHKGKRKIRGGRSKIRTVLFVSMLSAIQCHPKLKPMYQRLVAAGKPKKVAIVACMRKQLIILNTMVKNGTMWDENMI

SEQ ID NO: 302241 - protein, 341 aa, unidentified
MRMYAGLDIGGKRTAICVIDGSGKAVWQGTVDTHPEMIDGALQRFRGSLDKVGLESGPLTPHLFRSLEAIGYPMICMDARRAADAIKSRRIKSDKGDAWALAEMLRTGWFSSVYVKSVDTHRLKALLGARDQLVKLKRSLGNQVRGLLRPFGIKLPSRAGGKKFDEAAYLATRNDPILHAAIRALLESLASIEGQQARLDDELDELAKRNEIAWRLMSVPGVGRITALAYMAAIENVERFRRTRDIGAYLGLTERRYQSAETDVGMGISKQGDAMARHYLYEAANVLLTTVKKRFALRNWGLRLIKTVGPKRARVAVARKLAVLLGRMWKDGAHFAAAVAA

SEQ ID NO: 302242 - protein, 347 aa, unidentified
MSITMIGLDTAKSVFQVHGVDETGKMEIRRKLRRSELFLFFEKQEVCTVVMEACGAAHHWARVLSSLGHEVKLIAPEAVRPFVKKGKKNDPADAAALCEAASRPDMKFVPVKTIEQQGILALHSARSLLVKQQTMLANAMRGLATEFGLTVPQGIGRLAELFLLVDADKAFPEKARQVFTALFEHCPALAASISAFEAEIVAHARHDETARRLATIPGVGPITASLIAATVADIGLFKSARHFAAWLGLVPRQYSTGGKTRLGRITKTGNRDIRRLLVLGATSMVYRAPQWNSVVGMWTRGVLERRPVRLVTVALANKMARIAWALMTRKEVYRAKGRVAAATEAAV

SEQ ID NO: 302243 - protein, 358 aa, unidentified
MMYVGVDVHKKVCRAAVVDDEGELVDEFPFGNSSRGIEDFVMKIEAFGGKSLVAVESTANLWVCVYDALDERGIKVVLSNPYKTRLIAESRVKTDKIDARILAQLLRAEMLPACFVPTRLQRDRRQFIRHRIHLVKMRTEVMNRIHALLDKHGLRSPFKTVFSKKGVEWLRGLKLGFTDDAVLRSDLALLTLLDEQIEFMEAKVAAVAVNDERVRLLMTMPGLGYFGAFLLVAEICDINRFSSDKKLVSWAGLAPGIHQSGEVMVGGRITKQGNRLVRWVMVQAAHTARLHDERFRGFYERYARRNGDKKAVVAVAHEMLRIVYFMLKKNEAYRGGGRDLSGRKLKWLERKSLIGFQA

SEQ ID NO: 302244 - protein, 361 aa, unidentified
MAAKQRLTIGIDLGDRTSRYCILDEAGEVVSEDQLPTSQSGLSALLERMPCSRVALEVGTHSPWVSRHIASLGHEVIVANPHKVKLITQSVKKNDRIDAQQLARLARVDPKLLSPIRHRGAEAQADLGVIRARAELMEARTGLINSARGLAKPMGERLKKCDADQVKEGLADGLGEAVRRVIGPLLKSVEAISEQIGEYDKKIEAIAKRYPETELLTQVYGVGTLIALTYILTIEDAQRFKHSREVGPYLGLTRKQRDSGDSEPEMGISKSGDRLLRSLLVQGAHCILRQGAPDSDLKAWGMAHLENSGKKGNKKRKKKAVVAVARKLAVLLHRLWVTGEVYDPLYNRKAVTAGKAKGKAA

SEQ ID NO: 302245 - protein, 417 aa, unidentified
MSYKVAGIDIHKRVLMVVVAIAGDEVPDPAGEAIEFECRRFGTGASERNHIVSWLRAHEITEVVMESTAQYWKPVWLDLEPHFAKLHLAQAHSNRAPKGRKNDFRDAKRLTRRLLADELILSFVPDAEQRVWRTVTRGKHQLVRDRVRLQNQLEALLEEARIKLSSVISDLLGVSGRRILQALADGETHPDLLAELGNDHLRCSKRELADALNGSPEPIHRQMLKLYMERLHLLDQQIDKLDQMTAVALKQHQNAVIRVAEIPGLGVDSAQQLIAEMGVDAEAFASAGQFTSWAGLCPGSDVSAEENHSSRSAKGNRFVRRILTQAAQSAVKKKGSHFQSLFRKFLPRLHYNGAIWAIAHRLGRLVWKILHDRVRYIEQGQETNPAAKKRRAQKMVQALRKLGYAVALTSIPEYGQA

SEQ ID NO: 302246 - protein, 400 aa, unidentified
MISVGVDVSKGKSTVCILKPYGEIVCSPFEVQHEEGAMEAFVGLLAKLDGEIRVVMEATGIYHLPVLTFLQDKGYFVSVINPFAMKKYAKDNSIRGAKTDKLDSMMIANYGIEKWYKLQKYEGDEETYAELKLLGRRYRYYMELHVKALQELTHILDYVMPDIKKMFNSWNEANGKDKLSDFVEKFWHYDLITSMNIEEFTEEYLSWAEEKKYHRSRSKAEAVYELACNGIPTLSSNTPSTKMLVQEAVSVLRAVDSSLTLILARMQSLAKSLPEYSTVREMGGVGDVLAPKLIAEIGDVRRLHSAKALIAWAGIDPPPYESGQFIGSKRKITKRGSSTLRKVGYEVMRVLKSHPAPKDDAVYNYILKKEAEGKGKKHAKIAGLNKFLRIYYARVTEVYQ

SEQ ID NO: 302247 - protein, 346 aa, unidentified
MELDKVGIDLGKTVFHLVALNRAGETVVRKKFSRSQLLRFTANLQVRMIGMEACGGAHYLARTLCGQGHDVRLMPAQYVKPFVKTNKNDYIDAEAIAEALDRPRMRYVPIKSNDQLDMQSLHRVRSRWVKSHTSLVNQIRGLLLERGITIRKGRRHAEATLPAVLEDAEINLSGTLRFILAQLLSELRQLNSQIVEIDATIQRGADEQEACQRLMAIPGVGPITATAIVAAIGNGAEFRKARSFSAWLGLVPGEYTTGGKQKLLGISKRGSVYLRQLLVHGARAILQCREKQSPGLSAWLEKLISRAHPNVVTIALANKMARTAWALLSHGETYRPPMLSPAISAA

SEQ ID NO: 302248 - protein, 400 aa, unidentified
MSKNVSPLELRVGVDVGCYSHNVAIGLSSGEILDEFEVSHNPEGFHLFFSRIEKQQLKYDCLISVAMEGFNGYARPLDTLVRGRGYRLFNVNNMKLARFKEVFPGAAKTDRIDARKCLELFQLRDILPLAKDALQEVAATPVENEILKRLTRRRRRLVNERARVLSNMQGDLQAVCPGLLEITGEAGNLWFLRLLTSTDSLIKLAKLRRVTLLKIAGVGAKYATTIQSWQKRAHFSHEAELVGEMIQEDAFRILELTDKINVIEAKIEDVTRRSMIAQKISTIPGFGPVSKSELAGEVGTIGRFKNEAGLALYLGMAALDNSSGKQKGTKTPKHVNIRAKAAMMVAVDRHRKCVPESQHYYEKKRAEGKKHNQAVRALGRHLCRVIFKMLKQEKDYEIRK

SEQ ID NO: 302249 - protein, 340 aa, unidentified
MNHYAGVDVSLEVSHVCVVDANGKIIREGKVASEPADLIGWFGALGVAVTRIGLEAGPLSQWLYAAMRDAGLAVELLETRHVRNALKIMPVKTDRKDAQGIAELMRLGWFRPVHCKSMEAQETRAMLTARKLVQKMLHEVEMSLRGVLRGFGLKVGKTTPVQFEARTRELVAGHPSLEVIAQSLLAARAVLRRELNAFERRLRAMARCDTRARLLMSVPAVGTIVSLTYASAIDDPTRFKSSKIVGAHFGLTPRKYQSGETDRSGRISKIGDASVRAALYESAHIIITKPVKGCTALKAWAMRIAKRAGMNKAKVALARKLAVIMHRMLADGTTFSTQQG

SEQ ID NO: 302250 - protein, 385 aa, unidentified
MSLPNDLSKSLLPFDQKTTLGTVIEMSQSNWLVAGIVPGVERHPLKKLDPDERALLQLLKRWQAEAVKAGHTITRIAVAFEAGRDGFWLARWLRARDIDAHVIHPTSVAVSREHRRAKTDRLDTELLKRAFIGWLRGEPEHCHMAAVPTMEEEDAKRPNRERESLVGERSRIVNRMKSCLARLGIRNFKATLRKAPERLADLCTPEGTLLPPNTLAEMRRDMSRLRFVMEQIKQIEEARLARLVQATEKGPNAMVRMLARVIGVGVETADMLVHEILSRNLRDRKAVARYAGLTGSPDESGSRRRQKGLARAGNARVRRGMIQLAWRFLMFQKESALAQWYRARTENARGTRKTMVVALARKLLISLWRFVTTGEVPVGVALRPM

SEQ ID NO: 302251 - protein, 323 aa, unidentified
MPASEVFVGIDVSKAHLDVAISDSDATWRVANTEAGIEELVARLTGPEPALVVMEATGGFEIPTAAALSAAGIAVVIANPRQVRDFAKATGQLAKTDQIDAQVLAQFAARVRPRVRPLPDEETRALDAIIARRRQLIGMITAEKNRLGFALEPVRKRISKHIRWLERELASVDSDLDQMIRSSPVWRAKSDLLRDVPGVGPNLARTLIAELPELGRLSNKEIAALVGVAPLARDSGVLRGKRRVWGGRAPVRSTLYMSIWSASKHNPVIRVFYDRLRARGKPPKVAQVACMRKLLTILNAMLRDGRKWDPSIPLEQLRLQHSC

SEQ ID NO: 302252 - protein, 356 aa, unidentified
MSHKLNSAVAVVGIDIGKNSFHVIGQDQRGEMVLRQKWSRGQVEARLANLPPCLIGMEACVGAHHLSRKLQALGHDARLMPAKYVRPYSKGQKNDFRDAEAIAEAVQRPTMKFVATKTSEQLDLQALHRVRERLVGQRTAIINQIRAFLLERGVAVRQGLRFLRAELPTILAKRSDVLSPRMLRIVEDLCGDWRHLDERIEGVSNEITALADQDAACQRLMTVPGVGPIISSAMVAAIGSGDVFGKGRDFGAWLGLVPKQISTGDRTILGKISKRGNRYLRALFVQAAWVVLVKIGPKHWWRYGLETWIAAASKRLHHNVLAIALANKLARIAWAVLHKGRAFECVKTDAMASRPA

SEQ ID NO: 302253 - protein, 333 aa, unidentified
MEKKWFIGIDISKKTLDVVIYVPTKKHADETNYERFLNKEEGYKSLLCWLKKKNMAKKRLVISMENTGIYSFDLCLFLEAASIDYCSFNPLHLKRSLGLVRGKNDRVDAERIAYFAYLHRDELSYSKLSGSSIIRLRDFAAERKRFVKQQAEYKGFLTDRKDCEMTSTIERAAHMVKILDEEIASVEEEMLQIINSDPSILRNYELLNSIKGIGTINAMNTIIHTNNFQAFETARQYACYLGIAPFEHSSGTSIKGKTRVYPTGAKLLKADLSQAANSAIVWDKEMKEYYERKRKDGKAYGVVLNAVKFKLVGRMFAVVKRGTPFVELMTYKK

SEQ ID NO: 302254 - protein, 363 aa, unidentified
MSQSSWLVAARAPGLARDPLKKLAPEPEQLFKLIDRWREESRRAGRVVRRVCVAFEAGRDGFWLARLLRQHDIEAYVIHPTSIPVKRDHRRAKTDRLDTELLMRAFLGWLRGEADHCGMAAIATLAEEDAKRPTREHESRVKTRSRLVNRLKGALARLGIRGFNPKLRKAAEKLEELRTGAGEPLPPNTLAELRRDMAQLRFVADQIRQIEKAREARLEKAPREGAHPMVLMLASIKGVGLETAEMLVAEVLSRKLRDRRAVARYGGLTGSPDESGSRSREKGLARAGNARVRRGMIQLAWRFLMFQKESALAKWFEARTANGPRGVRKTMIVALARKLLIDLWRFVEDGTVPAGVELFDSAA

SEQ ID NO: 302255 - protein, 422 aa, unidentified
MRLTYPVCCGVDVHKTFLVATIIKTDGIVPKYSKKRFSTFSRDLLAFKQWLLDNDCKDVCMESTGKYWVPVWNILEDSIHVVVANPKWVSAVKGNKDDNKDSKWIGDLFRMGLVPGSFVPDRKIRVLREFTRYRYKLISMRSSEKNRFQNAFTVCNSTLDAVLSDSFGKSATAIENYLLETDTVNPEYCASLLKGSARKKSAEVMAAVEGFRMSAGQKERVRIIQGHFADLDERVASLDVAINKMTADYEDYLSLLRTIPGVDRNIAITILSEIGVDMEQFASSKRLCRWAGLTPGNNESAGKKKSVRITRAGVYLKPALVQAAHAAVKSTKSTYYKTKYERILKRRGKKRAIIAIARMILTAVFAMLKTGEVFNPCDLCKLDMPPHLKERQIVSSAKQAVRILVSLGLVQPDSISLDSLSA

SEQ ID NO: 302256 - protein, 369 aa, unidentified
MLESDQLQPRELPIVTTSTRIKCHLYIRLHDLPTIAQEELFTVDAILERCAGLDVHQDNIVACFLSGPLDQRPSKEIESFGTTTKELLRLQDWLQDRECTHVAMESTGVYWKPVWNILEDTCELTLANPTRIKNVPGKKTDYSDAEWIARLHRSGLIEKSFVPNEEIRDLRDLTRYRRKLLQNVTQEKNRVHKILQDANLKLTTYMSDVFGVSGRALLESIVNGEVLDAEQVRDMVKSTLKRKVPELIEALNGRLRLHHRKMIRRHLEHIAFLEREIQELEAEIEQLLAPYQREKELLETIPGIKQDAAASILAELGPDMSHFPSDAHLASWAGVCPANHESNGKKNEKRTNVEIKDLNPCSVNVAGQP

SEQ ID NO: 302257 - protein, 356 aa, unidentified
MTHDTTAIATAPLRTIGLDLGDTSSALCVMNAQGHIDEESVLPTTKSALRKRFTRAERFRVVMEACGQSHWISGFLEELGHEVQVVNPRRLQLITDSVSKTDRNDARLLAKLGRADLDLLRPIHRRSDVCVRVRALLNARRSLVQARTRLINSIRGTAKLFGHKLRTSSAEGFVLTAKQGVPADLLEILQPQLDTLTALAQQVERYDIQIEKLGREEFPQTQLLRQIYGVGPQVALAFVAAIEDPKRFRRSRDVGPYLGLTPRREQSGGRDPRLRITKHGDSMLRSLLVTAATHIMRKQAPDSDLKRHALRIARGSGPRDQGRARIATARRLAVVMHHLLLTGEAYQPFHAVALDA

SEQ ID NO: 302258 - protein, 343 aa, unidentified
MNKIATIGLDIAKQVFQIHGADALGATLFNRKLRRAEVSAFFEKLPPCIVAMEACASSHYWAREISALGHQVKILPAQYVKPFVMRGKTDAVDAAAITEAMKRPDIRSVPVKTAAQQAATMTFRTRTFFVRQRTNAVNALRGYMAEFGLVADRGIANFGRLVTALPERSDARIPPAARMMLDEILAEIETLTARIQRIEEQIAVNAKADEDIRRLTAVPGIGTLTAAAIQVHVPDPGCFKSARHFSAWLGLTPKQNSSGEKSRSGRISRMGNGELRSLLYVGAMGVLSAARRFGTRSAWLRRLMDRRPLRVVAVALANKTARVVWALLVKGGTYHAPAELAGN

SEQ ID NO: 302259 - protein, 416 aa, unidentified
MRDDARWFVGIDWASETHQVCLVDADGKIVGEREFPHGGSGLAEMCIWLLVTTRAEPTVIAVAIEVPHGPIVETLLERGFLVYAINPKQLDRFRDRFTVAGAKDDRRDAHVLGDSLRTDRHCFRHLAAEDAVIVALREWSRMAEDLQQERNRLANRVREQLWRYYPQALKISDDLGADWFLELWAAVPTPAKAARVRESSIDRVLKTHRIRRIAAAEAAQILRQQPLTVAAGTVEAASAHIRAVAARLKLVNRQIKQAHRCLDTLCGKLAVDEEKTASGQEPEQRDVTILRSLPGVGRIVLATLLAEAAEPLRRRDYHALRTLCGVAPVTKRSGKRCIVIMRQACHMRLRSAVYHWARVAIQHDPLSRCRYAELRKRGHSHGRVLRSVADRLLAVACAMLDRQTMFDPSRAEKQAT

SEQ ID NO: 302260 - protein, 312 aa, unidentified
MNRNAVQGAGQIIGLIDGRQVVGLDIAKNVFQLHTVDMSTGEIVNTQLKRAKVLEHFANLQPCLIGIEACGGAHHWARELTGLGHRVRLIHAKAVRPFVAGNKTDATDARAIWLAIQQPGTKFVGIKTLEQQATLVLHRQRDLLMRMKVMQINALRGLLYEFGATFAKGKNAMFNEIEATLERLAGDIPQYVADSLREQVQRIKQLAVDIKAIEVRLAQRLRDDEDMKRVSQIPGVGLLTATAAIATMGQASAFKSAREFCAWLGLVPKQHGTGGKVNLLGISKRGDTDLRALLIHVARSVLCHAKEPGPWL

SEQ ID NO: 302261 - protein, 315 aa, unidentified
MAMPVSAIKPIVGVDVAKNELMIYQAELDLLEPLPNNKPAIKKWLKALPAPVDVAIESTNIYHLEFADLAHEAGCTIYMVGGYELSHYRKGVKVRAKTDALDAKLLARYLKNEYEELHPWIPPSPLYRCLLSLFRRRAALVQARVGLVQSWTNEPLLKAAFAEQVASMQRLEGLVEKMINDRLKEAGLLAQLKRCMKVEGIGFLTGARLIAAFQRGDFRNADAFIAFLGMDLRVSQSGQKDGRRSLTKRGDPEARRLLHNAAMSASRTAAWKGFYQEQRAKGFSTTQALVILARKLARIVFALLKGQGEYQPKAG

SEQ ID NO: 302262 - protein, 360 aa, unidentified
MSFHGTSVGLDVHALSVVAHAVDEESGRVERARLCPDHGEIIDWLHRLRAPVRVAYEAGPTGFGLARALAAAQIDCMVAAPSKLIRPSGDRVKTDARDAAHLTRLLRLGEITAVTVPEQEVEAVRDLVRAREDARADLMRVRHRLSKLLLRQGRVYSGGNAWTGVHETWLRRQRFDDSHTAAAFDHHFDAVLSATAARDRLDEQIVTVAASPRWSDPVDRLGCLRGISALTGLALTVEIGDWTRFTGASIGAYVGLVPTEYSSGASRVQGSITKAGNAHVRRLLIEAAWHHRTDYRNPGPAMRTRWAKVDPALKARGHAGNRRLHQQWCRFNERKKPHVVANVAVARQLAGWCWSLATLQ

SEQ ID NO: 302263 - protein, 416 aa, unidentified
MKKGQNTRGYQRYMALDIHRDYIMVGAQNEKQDWVLTPRRVSLEKFPEWAKKNIRPGDIVVLETTTNVWTTYDIVAPLASRVLVANAAEVGEIANARVKTDKEDIKRLLKLLIGGIVPEVWVPPLAVRELRAFISYRSRLVTTSAAIRNRLQSLLHKHNLLLSEAGLLDQAWWEAQKNISALEKMQIRQELALLQEIEKLKAAVDEELQRQSTRSIWGKQALQLMQLPGVGFVVAMTVLSAIGDISRFEHAKQLVGYAGLGAGVHDSGKTHKDKKITKKGRRELRWAMVEAAWRAVRMSPFWKAEYEKHLHRMRKPNQVIVVVARKLLIAIWHVLSKEETDIHASEEELAYKMLLLSWSLNEDVRMGLTYKQFAKYALMKLGVETDITRFVRKDVPRRLAAREEVLARMTELGLTA

SEQ ID NO: 302264 - protein, 343 aa, unidentified
MKYKTITIDLAKNVFQACGVNEYIKPQFNKKLKRNELIDFMCQQLPTTVVMEACYSSHYWGREIAKLGHDVKLIPAQHVTPFVRGNKNDHNDAFAIAEASQRAHIRFVSVKSEHQQEISCLHRIRERLVKNKTAMSNQARGLLSEFGVVFPCGHKALLNGLTGVIDNPQYSHRLQNMVIGMLSEYEMTLKRLKGIEKQLNEFVEQNESGKILRSIPGIGVINASALLASIDKGQAFNNRKEFAVWLGLTPKQHASGNMNKMGGITKRGDRYLRKQLIHGARALVSRAAKSTDPLSVWATKLRATKPFNVVAVAVAHRLARLIWILLTRQERYRVAPTSIEMSA

SEQ ID NO: 302265 - protein, 377 aa, unidentified
MSQKPNTAIAVVGIDIGKNSFHIVGQDERGAIVLRQKWSRGQMEARFANMPPCLIGMEACVGAHHLSRKLKALGHDARLMPAKYVRPYSKGQKNDFRDAEAIAEAVQRPTMKFVATKTADQLDLQALHRVRERLVSQRTGIINQIRAFLLERGIPVRQGLRYLRAELPRIMATPSDVLSPRMVRVIEGLASDWRRLDERIEGLSGEIEAIACQDAGCERLMSVPGIGPIISSAMVAAIGTGEAFSKGRDFAAWLGLVPKQMSTGDRTILGKISKRGNRYLRVLFVQAAWVVLIKPKIWERHGLKPWIEAAKKRLHHNVLAIALVGHCHVKRKFADQRTMAETVHAATVAWRHVIIARSRNTRRVPREIRWRWVLNTL

SEQ ID NO: 302266 - protein, 412 aa, unidentified
MLLFLGDDWAEEHHDVEVQDETGRVLARAKLPEGMTGMARLHAMIGERVGDVEVEDVTVMVGIETERGPWVQALIAAGYRVYAINPLQVARYRERHSVSGAKSDPADAHVLADMVRTDHHQLRPVAGDSPQADAVKVITRAHKTLIWERARHTLRLRQALLDFFPAALSAYPDLTGADTLELLAAAPDPASAAALSVEKITAALARARRRNRAARAEQIAAALRTDQLGQPPVVAAAYAATVRAQTAILTVLNAQIETLEEQVQAHFGRHPDAMVYLSQPGLGAVLGARVLAEFGDDKTRYADARARKNYAGTSPITRQSGKKKTVIARWVHNDRLIDALGLQAFCALSVSPGARAYYDQLRARGAGHRAALRQLGNRLVGILHGCLKTGILYDEAKAWQHHSPPEDLAKAA

SEQ ID NO: 302267 - protein, 339 aa, unidentified
MNIKRIGLDIAKQVFQIHGVDRFEKVLVRKQLRRAQVLDYFKGIAPCLIGIEACGSSHYWARELSQLGHHVKLIPAQFVKPFVKGGKNDANDAEAICEAVGRPSMRFVTIKSVEQQVIQAEHRIRTRLIRARTALSNEIRGLLSEFGIAIGLGITQIRKALPMLLEDKETRLSARFKLLLSELVEELRQIDTHINEHEERLKAAAKEDDRIKRLLAIEGIGPISASALVAAVGDATQFANGRDMAAWLGLVPSQHSSGGKERLGHISKRGDTYLRTLLIHGARSVINHCEGKEDRRSQWVNQLSKRRNRNIATVALANKNARIAWAVLSRRETYLQSVV

SEQ ID NO: 302268 - protein, 463 aa, unidentified
MRTDKTLWRNRKAKKELARRLQSENPGLEVVHPNAAGIDVGNGAHYVAVRPDRDPQPVRRFECFTADLYRLAEWLQSCGVQTVALQSTGVYWIPLYDILEERGFEVYLVNAQHTKNLPGRKSDVQESQWLLKLHTYGLLNNSFHPPSKIRTLRTYWRQRLQHVTGAATCVQRMQKALTQMNIQLANVISDLSGVTGQLIVRAIIDGERDPWKLAELSHPRIQASRAEIAKSLEGTWRPELVFVLQQELEMYDTYQRRIAECDQQLQKHLACFANTVPPAATENVPPRKKKKQNKNNPHFHLADELQRITGVDLTRIDGVDVFVAQTLISEVGLDMSRWKTEAHFASWLGLCPDNRISGDKVLARGTRHVLNRAANALRLGASTLLKSQTYLGAQYRRLRSKLGAPKAITAMAHRLARLVYRMLKYGQQYVDKGAEYYERRNRQQQIEFLRKKAARLGLQVIST

SEQ ID NO: 302269 - protein, 353 aa, unidentified
MTDHHDTVDPATTITGGVDTHKDTHTAAALDGLGRLHATAQFPATRAGYTRLRDWLCSFGTVTAVGVEGTSSYGAGLTRHLLEHDIPVTEVNRPDRAARRRHGKNDTLDAINAATAVQSGHATATPKTTTGVAAAAAALRTVRTSASKSRTVAVNQLHSLLVTAPETLRETLSGHTGAALITHCARLRPGTDPTGPLTAITTALRRLARRIQHLTSEIADADAELKPLLQRALPRTTAVFGVGPDTAGQLLATASDNIDRITTDAQFAHLCGAAPIPASSGRTNRHRLNRGGDRRANAALYRIVIVRMRHDPATRAYVTKRTAQGKTKRDIIRCLKRYVARELFRTLTTDLTP

SEQ ID NO: 302270 - protein, 343 aa, unidentified
MKLHVLGIDLGKTVFHLVGLDSTGKVVIRKRCSRTQLLAFTANLQVDLIGMESCSGSHFLGRALREQGHEVRLMPAQYVKPYVQTNKSDFLDAEAIAEAVQRPRMRFVPIKTEEQLDLQALHRVRERWVMRRTAVVNQIRSLLLERGLTLPKGRSHVDEQLPRILEDAELRLSGSFRVLLAQLQVELNQLTARIEQMDAVIQKMAKENDACQRLTAIPGVGPVTATALIAAVGNGSAFRKGRDLAAWVGMVPRECSTGGKQKLLGISKRGNRYLRRLFVQGARSVLQQRHKQAPGLSAWLAQLLARTHQNVVVVALANKLVRMAWAVLCKNESYRAPDLAVST

SEQ ID NO: 302271 - protein, 322 aa, unidentified
MQQESSSQPVAGIDVSKSKLDCFIDVIDKSFSVLNDQRGIAELIEQLRAANVRLVLIEATGRYHRRCAAELLDVGIEVAVVNPQRAREFARSMGSLEKSDHIDSRLLAAFARASNAHRRLVKPSAQQTQIDDLVSRRRALVQMRIAEKNRLHDDLPRLARNQGNKLLRLIEQQIEDLDRAIARLIESDDDWQNKSNLISSVPGVGQSSAHQLIADLPELGKLNRQQIAKLVGVAPLNCDSGQHRGQRRIAGGRGPVRTTLYMAAFNAIHYCDRFRGYAARLKQAGKPFKVIMTACMRKLLITLNQMIKTNTAFNTSLTSSIA

SEQ ID NO: 302272 - protein, 368 aa, unidentified
MRVRKTKTEVVKQNVGIDISKADFKVCFFHLDSNGRKSIKGTRTYKNTAAGFEQFHNWICKKIVIEIGVHITLEATGVYYENLTYFLVENNYLVSVLLPNQSKAFAMSLNLKTKTDKVDARMLGQMGIERDLPKWLPLSDNMRILKQLTRDRVSLLDEKTALSNKLHALNHSYKPENSVIKRLKQHQKLIIKQLSQVEKEIRQNVEKDEVLNQKIANICMVKGLGIITVATIVAETNGFVLFTSRSQLISYAGYDVVQRESGSSIKGKTRISKKGNRFIRRALHFPAITMVKHEQQYKQLFERILDRTSIKMKGYVAVQRKALILIYTLFKNNEPYNPNYENKIEGNIEQVTEKCRQDINPAYSGCLS

SEQ ID NO: 302273 - protein, 408 aa, unidentified
MELTPMHRRVIALDVHQAKINACAIVEHDDGRVEITRCDFGAFKRDRRALAQWALQIGPEVVVMESTGVYWKSPFSALEAVGIVAWVVNARHVKAVPGRKTDVADAQWLATLARAGLLRASFIPPVQMRQLRLVARQRQKLVGMCSAEKNRLHKVLVDAGMRINVLVADIHGSSARAMVKALIAHKPMHEVLDCKGRLRASREELFEALDTEQFSAAHRFVAHEIMEHIEQIEQRIARLDAYLLEGLKSWQPQLKLLQTIPGIDEQGAAMLLVEIGSDMDAFGSAERLASWVGICPGNNESAGKRKTGRIRKGNAWVRRLLCEFAQAAARTRCALKAKFDALSIRKGRRKSVVALAHKMLRTVYAMLASGAHYQDKEVDYEALNVQRNAPRWLKMLRKHGFIATPAAA

SEQ ID NO: 302274 - protein, 358 aa, unidentified
MNYIGCDCHISTLDCAVVNERGQETKKQKMNTGVKGLMEFVKSIPKPRKIIIEEGTLANWLLEVCTDYGEKLIITDPKMNRWIGRAGQKNDAIDATKLAHLARGGYIKEIHHPIGHRRRFRELVLLYHDTVKSQTRIKNKLKAKFRQNGIKCSGETVYSVKYREEWKNKLPQDKVVQVMVEGLWQQLDQVHEVQEELLGHIRKQSRQYSEIKRFKQIPGIGTVHATTISAIVETPHRFANKKKLWMYAGLGLAERASGEKVYSRSLTRNYNRLLKNALKQATEAAIIAKDNQFRRQYLRLTIEKNIPSHRAKLTVARSMLATMFGIWKSGEDYDPNIDKRRTESDKTQVRAYHLVRSG

SEQ ID NO: 302275 - protein, 364 aa, unidentified
MYDSTRTVAVGLDVHARSIRLAAVRAEALLEERTLPYDEQAVERALRRWPAVRCCYEAGPTGFGLQRFLVERGFDCLVVAPGLVPQRPGDRVKTDSRDARKLARLLAGGLLESIHVPSRELEAARDLVRAREDARLDRMRDRQRLSKFCLRHGRTLPSSSWTVTRRSWLSEQRFEFAAQQQTFDTYLHAVDLVDARIAQLERAIRETAEQEPWRALVARLRCLRGIDTLTALALVAEIGDFNRFRTAAELMAFVGLVPSERSSGEQRRQGSITKVGNSHVRRLLVESAWHARRRPTVGYELARRQRGQDPAIVERAWRCQQRLHARWQRMAGRGKPQQKIVVACARELTGFVWAIATEQPLRNA

SEQ ID NO: 302276 - protein, 320 aa, unidentified
MMAQNDLVVVGIDVAKDKVDACIRALSLRQTFPSTAEGRRKLISWLRKHKVTAAVMEASGGYEREWAKALREKAVEVRIVDPKRVRNFARSAGRLAKNDAIDAEMIAWFAETFGEASSQAHDAAREKLVQIVNARCALIDLQTKLQNREEHPAPEPVQKMQARLLRQLAREITGLEAAIAAMIKATAHFAELAEIIESVPGLAEITSAGLIAAMPELGQVSNQAIAALLGVAPYDDDSGKRRGERQIKGGRRKVRNLFYMACLGAATRHNPVLKAFYGRLIAKGKERKVALVACMRKLIVILNTMIARREKWDASRYAVS

SEQ ID NO: 302277 - protein, 356 aa, unidentified
MNNISKLDFTGQHLYIGMDVHKKSWSICILTDQFEHKTFTQPPDVGVLVDYVKRNFPGATYHAVYEAGFSGFWTHDRLRELGVDCIIANPADVPTKDKERAGKTDRVDCRKLAHCLRSNQLDGIYVPSRTAVEDRSLLRTRRSMVKKQTRCKNQIKSLLAFYGIHIPEELAQSRWSKKFINWIDEIRMERASGNYSLKAYLDELNHIRRILAELNRNILALSRTDEYRANVLLLRTVPGISTLTAMTLLTELNSMNRFSSLDKLASYVGLIPNTNSSGEKNNTTGITNRRNPSLRGILIESAWVAARKDPALIMAFDRLSKHMTNTKAIIHIARKLLNRIRYVLKNQNEYVPAVVQ

SEQ ID NO: 302278 - protein, 496 aa, unidentified
MSAFLRRSGQNPHRWATKGMKSKKELLAKKKHIKRKSAKAKHNRVLGIHNPHAAGADIGATEIYIAVPPDRLEMNVRCFGTFTQDLRAIVQWLREYKVTSVAMESTGVYWIPLYELLEQEGFEIYLVNARHVKNVPGRKSDVQDCQWLQYLHSVGLLRGSYRPAQDICAMRAISRYRDNLVHFGAQHLQHMQAALDQMNLRLHHVIADLSGLTGMAIIEAILAGERDPRQLAKLRDPRIKASQETIAKALEGNWRVEHLFVLGQALQSWKQVQQQLGQCDQKLGELSSQLEGKIDLANSPLPPSAKYCGREPRSKNQPNGPWREELYRHFGVDLTEVPGLSLGVVLTLFVELGADLSAFPTPRHFAAWMGLCPDNAITGGKVIRRGTRRNRQRIRLALRLAATSLHHNKTQLGECFRRLRARLGAPKAITAMAHKLARIIWHLVTHQVGYDESIFAEREEQLLRRKQRQLRNLAHSLGFTLVPNPRPAATSNAEVS

SEQ ID NO: 302279 - protein, 400 aa, unidentified
MLSIGIDVSKGKSTVCGMKPGGEIVYTPFEVQHTREGMSELVSLLRSSGEEVRAVLESTGSYHCPVVAALLENGIFVSVVNSLRMKRFCSQSIRKVKTDRIDAMQIALYGLAYWQELQPTKLPEDTYRELQLLARQYYQMTSMLIKAKVDFNAICDQVLPGMQELMNDHAGRHKLSDFVLRYRHTTHILEMGETRFRKDYCKWAEKKGYRNCERMAALIFATAQNGIPVLPNAPSTQIVITEAIRVLHTVEASRDAILTQMQALAKTLPEYSLVREMPCIGDTLAPRLIAEIGDVRRFHSKRALIAYAGIDAPPYQSGKFCANNRHISKRGNRYLRKTGYEVMQSYVMHKPANDPIFTFIEKKRGEGKSGKLAMVAGLNKFLRVYYGKVTELYRSLPAIE

SEQ ID NO: 302280 - protein, 346 aa, unidentified
MKINRVGVDLAKNVFQLHGADRQGKTLWKRQLSRDKWLTVLFATVEPGTVIGMEACTGAHHWSRLLLDKGYEVKIIPPQFVKPFVKSNKNDANDAQAICEAMARPNMYPVKVKTIEQQDMQAIHRIRNEIKSHRIAKANQIRGLVAEYGLVAPKELTSLRSAIPKWLEDASNGLTMFFRRLLQGLYEDLCSMDKRMAELDKQIAVIAQQDPIAKRLQQLRGVGPLIATALVATMGDGKQYRKGRDMAAAIGLTPRQHSSGGKDRLLGISKRGDAYLRCLLVHGARSAMRTAKDKDDRLSRWITNLQDRRHANVAACAMANKMARMAWAMMTKGVDYDPDFSSVSAS

SEQ ID NO: 302281 - protein, 340 aa, unidentified
MTITTVGIDLAKNVFAVHCVDQHGKTVLVKPKVSRAALPELIASLPPCVIGMEACSGAHYWARLFRQYGHEPRLMAAKFVSPYRMAGKSGKNDAADAQAICEAVRRPHMRFVPVKDESQQAMQCLHRIRQGFIEEKTATYNRLRGLISEFGVIAPQSTDALRHMVSEQKSSLPLQVQQCVNDLLEHIDRIEDNITEYDRILSRMAKTDHRSQRLMELKGIGPTTACALVASIGNAHDFKNGRQLAAWLGLTPSQYSSGGKSKLGRITKAGDSYLRTLLVQGARSVLIGAEKRTDSFSRWVCKLVERRGYWRAVVAIAAKNARLCWASLHYGDDFRLYSAS

SEQ ID NO: 302282 - protein, 338 aa, unidentified
MKVYAGIDLHSSNNYVGIINEEDQRLYQKRLPNQLEHILEALKPFKESMKGVVVESTYNWYWMIDGLQAHGYKLHLANPSAIKQYEGLKHTDDKWDSFWLAHMLRLNILPEGYIYPKEERPVRDLLRRRLLFVRHRTAHILSLQSMISRNLGTGMSVRAIKRLDEGAAEILFDQPHLVLAAKSNIAVIHFLTERIKLIEKAVKTHITLRDEFKYLLTVPGIGDILALTIMLEVGDVNRFPQVGDYSSYCRCVKSERLSNGKKKDENNRKNGNRYLSWAYVEAAHFAKRFCPHAQAFYQKKMAKRNRVVAIKALSNKLARASYYIMRDQVPYDVKKLFT

SEQ ID NO: 302283 - protein, 360 aa, unidentified
MDFLPIHKDQETLVILGIDTHADVHVAVALDGHGRRLGHKSVPSTEAGYAALVAWVEEFGTLERAGIEGSGSFGVGLARFLRARGVEVVEVNRPNRQHRRRFGKHDTADAEAAARALQANTATGEPKSADGPAEMVRTLHVVRRSALKARTQAANQLRALLLTAPEELRAQLRGLSTAKLVATAACFRPGCFPDDVRSATKLAMRTVARRHRWLSEEIVELDEQIGRLVSEAVPALVALRGVGTDTAASLLVAVGDNPERLKSEASFARLCGVAPVPASSGKTVRHRLNRGGNRDANRALHVLALGRMSWDERTREYVARRTTEGKSKREILRCLKRYVAREVYRILTASGVLPSSVSVP

SEQ ID NO: 302284 - protein, 399 aa, unidentified
MQQPTTSHICGIDTGSFHVAAILPLDTFEARERWTVEGEILKIENNPLDYAALVQALPPGAPVFLEPTGYYCTAIVAYLQSKGFTLHYVAGSATKDARERWFNLNNKRDDIDARALAVIGFHWLTYGAYPVSTITSTALDLTLSQLTRSNSQAVKETTRAINRIRQLLRATWPEAEPWTENLIGTPGSTNGGPRPCLLATYTPPQIADLTDAQLAANFRRLADRDRIRQSAASTIGAQTPELHATLKQLAAQYTYWLNLSASLQAQITEQVKRHPHYELLSTLPYLGEITAAILCSSIRDIHLYTTKQALRVALGCYPEQKQSGSSINETRHGKKGNRLAKQALHLYALRLVAHQEGQFYRTMQRRQAQHQRHNLANLKQQIVDVIWSMLTHGQPYETR

SEQ ID NO: 302285 - protein, 343 aa, unidentified
MQTITTIGLDIAKSVFQVHGVDAAGEVVIRRQLKRRSVLAFFQKLPPCLVGIEACASSHHWSRELQALGHTVRLMPPAYVKPYVKRQKNDAADAEAICEAVTRANMRFVPTKTLEQQSCLMLHRTRHLFIRQQTAVINSIRAHLAEFGIVAPVGRKGVTELLHVVADPSDKRVPEVGRTCLATLGDQLLGLKRQILEFDRMIMAWHRSNQTSKRLHYIPGVGPMLATALVASVADPRTFRSGRNFSAWIGLVPKQHSSGGKDRLGSISKQGDRYLRSLFVAGALAVIRYAKIHGTKHRPWLTALLGRRPTKVAAIALANKIARMAWAMMAKGEHYKQPAALAA

SEQ ID NO: 302286 - protein, 422 aa, unidentified
MLAKTQDEEQIIARVAACDIGKAELVCCVRVPDEDRPGRRLQEVETYATMTRPLLGLADRLRCLGVTRVVMEATSDYWKPVFYLLEAHGFETWLVNARDVKHLPGRPKTDKLDAVWLAKVAERQMIRPSFVPPPQIRKLRDLTRYRADLVAARTAEKQRVEKLLEDAQIKLSVVVSDIFGVSGRQMLAALIGGQRDPTALAQLARGVMRRKITTLQEAFTGYFTGHHAFLLAKMLARVDAIDADIAALDASIGELAAPFAAAVKRLTEIPGISFTAACAIVAEIGTSMDRFPTAGHLVSWAKFAPGVKESAGKKKGKGTTGHGNRYLARVLGNAAASIARTDTFLGERYRRIARRRGSQKAVVAIGRSLLVIIWHLLADPTTRFTDLGSDFYDTRINPERRKRNHIRQLEALGYKVTVEPAA

SEQ ID NO: 302287 - protein, 484 aa, unidentified
MAKQRMSTFERLKKGRLNRAERRELGRRVVAGDPGLAIVHGNAGGIDVGNESHFVAVPPDRNENPVREFGCWTQALNEMAGWLTSCRVDTVAVQATGVYWIALYDVLEQHGIRVVLVNAQHTKNVPGRKTDVQECQWLMKLHTYGLLRDSFRLQQDMEYVRTIWRLRDRHVKDAGRAVQHMQKALTKMNVQLANVISDISGRSGQAIISAILRGERDPYELAALVDYRVKASREEVARSLEGNWRTDVLFELQQAVEACHFAHGQMQECDEKLKSYLADLPTRTLEIPAASEAAVESVVQKRKKARKPRDNEPRMDLKAELKRICGVDLTSIDGVNVMTAFTVISEVGTDLSRFADEDHFASWMGLAPSKDISGGKVVGSGKKKVKNRVAVVLRTAVTSLLESDTYLGARYRHLRRQLPTFKAAVKAMARHLAVLIHRLLTHGQAWRDRGSAQFEQKRTERELAHLHSRAKAKGFVLVPITETC

SEQ ID NO: 302288 - protein, 350 aa, unidentified
MNPLKQVIGIDCGQKELVCRFGELTPDLESTLKARKTCPNTATGIETLIRWADGLAGGSVAPVFVVEATGIYHQKLAYELYHQGRPIVVVLPSRASHFAKTLKVRTITDSSSAEALMQMGLEKNLDLWQPPHPIFATLKQLTRERKRLKDEMNRLKNQRHADEGSVEALPETLGRINQRLQLAEEHIVAIEKQIQTLIAENEELRQKFSCVCSIKGVGLMTAATVVGEADGFSMARNARQLVSYAGYDIVEKQSGTSVKGKARISKKGNTYIRRALYFPAITAARHDQHLGRFYERLHEKHNIKMKAYTAVQRKLLVLIYTLWTKQEPYDSNYQHKKVEQPEPAAPHELA

SEQ ID NO: 302289 - protein, 578 aa, unidentified
MGNYPSIAFALVSVVSVLMIACPCALGLATPMSLMVGVGKGAGSGILIKNAEAIERFAAVYTFVIDKTGTLTEGRPTLMDVKSANGFTEVELLTTVVGLERSAEHPLARAIVEGAAERGVSAPAMQDFESVISKGVRGTIEGRPVAIGNAAMITGADAGALQAMTEERQRCGETDMFVADDGRSDAIQHLNQRHRQLKHRHKSEQFAFRTKLRHFRRCGHWARSGRHCPGNPPKEMTAMPFYAALDVAMEKTALCVLNHEGQVVLEINVSSDPSAIADRLEPYQDALSRFGLEAGPLSEWLVRGLVDRGFAPLLLETRHVRAALSARIAKTDRNDARGMADLLRMGWFRAVHLKSLDAREQRTLLSARRTLINRLKDIENSVRGLLRGFGIRLPLALRLKWEGKVRETIAGHPTLSTALEPLLVIRKTLREQVAVLDKKVRDAAKDDPVCRRLMTVPGVGSIVALTYRAAIDDPSRFSSSKSIGACFGLTPRRYQSGESDRVGAISRAGDASVRVALFEAAHVMLTRSSKWSSLKAWAMKLAVRRGAKRAKVALARKLAVILHRMWRTEADFRFTAAA

SEQ ID NO: 302290 - protein, 332 aa, unidentified
MSSFVGIDIGATAFEVVIRKNDKNGAVKSYQQTPKDHEKLAAQLLKLKPACVVMEATGIYYLNLAVVLFNSGLKVSVINPNSFNHFAKLTLTHSKTDGIDAALLAEYAQRMTPRLWTAPDPKLLSLRDIGRQINRLIGRRTEAKNNLHALQAKDSTYQPLIDDELEGIEYLEHRIERMRNMALEIITNNENLKQKLENLTAAVGIGTNSAIMIICELELLPEHLKSSQISRFAGLDVRLTQSGTSINKPGRLSKAGNSYLRTALFMPALSAATHDANVRAFYQSLIQRGKKKMQALCAVMRKMLTGIWACLKLNLPFDSSKLFSEEHKKACA

SEQ ID NO: 302291 - protein, 346 aa, unidentified
MGNINTDLSAVVTVCLDLAKHVFQVHAIDAAGRVVTTRALRRKDVLAFFECLPCCLIGLETCGSAHHWARELMKFGHDVRLMPPAYVKAYVRRQKNDAADAAAICEAVTRPSMHFVPVRSVENQAALMHHKVRELLVAQRTQLLNALRSHLAEIGIIAAQGPNNARALAILVIEGNDMIPATVRSALLPLVRQLSELDAEIRQSDQAILALAKTDETARRLMTVPGIGPVTASALAASVQDISAFSGPREFAAFLGLTPRQNSSGGKERLGRVSKMGNRYLRKLLVVGAHAVLFHRKRSGDVLRNWADRLMETKPFRLVAVATANKLARIAFALMRDETHYVGTPA

SEQ ID NO: 302292 - protein, 358 aa, unidentified
MNRIAGMNAGQIIGTLNGQQVVGLDIAKSVFQIHAVNMSTGEIINQQIKRGKMLEHFANRVPCVIGIEACGSAHHWARQLTALGHSVRLIHAKAVRPFVSGNKTDATDARAIWLAVQQPGTKFVGIKTLAQQATLTLHRQRELLMKMKAMQSNALRGLLYEFGAVFGKGTKALFSAIEAALEKLIKDIPQFVADSLREQVSRIKQLETDIKAIERRLTQQLRVDADMKRVAEIPGVGLLTATAAIATMGQAHAFKSGREFCAWLGLVPRQSGTGGKVKLLAISKRGDTYLRTLLIHGARSVLTHAKQPGAWLQELKTRRPANVVIVAQAAKMARTIWAVTAKQQSYQRGYQSVRPQAA

SEQ ID NO: 302293 - protein, 411 aa, unidentified
METLIARCAGLDVHKESVEACVRRKEADGQLPKQTRHWGTMTRDIQAMADWIAAQGVTHVAMESTGVYWKPIYNILEGRFTVLLVNARHLKQVPGRKSDIRDCEWIAQLLQHGLLKGSFIPPRPQRELRDLTRHRTQLVEEKGRTINRIQKVLEDANIKLASVATDILGASGRAMLQALMGGQEDPRQLADLAQRQLRGKIPELERALQGQVTEHHRFLLQLLWKQLREQEELIAQLDTRIQEQTRPFAEAIARLDAVPGVDRRVIEVWLAEVGADMQPFPTHGNLASWAGMCPGNEESAGKRRRRRITPGNRWLKRTLAQAAWAASHTKNTYLASQYRRLAGQRGKKRALIAVGHSMLVIFYHMLKAGTTYADLGGNFFDTLQTQRLTRYYVRRLQALGHKVTLETGVAA

SEQ ID NO: 302294 - protein, 315 aa, unidentified
MVDVPCFVGIDVATAQLDIAVRPSGERWAVPNDASGVTTLVDRVQALQPTLIVLEAPGGLERLVASALATAGLPVVVVHPRQARDVARATGQLAKTDALDARALAHCADATRPTPRPVPDVQTQALRALLGRRQQLVAMRTAEQNRLAGTSGRLQADMTAPIAWLNARLTALDDDRDTALRSSPLWRENDDLFQSAPGIGPVCARTLLLALPELGTLTRQKIATLVGVAPLTCDSGTLRGRRMIWGGRARVRTVLSMATLVATRFNPRITTFYERWLAAGKVKKVALTACMHKFLTMLHAMLKHRTPWQGQAVQG

SEQ ID NO: 302295 - protein, 351 aa, unidentified
MPRPSTVQTVTTIGIDMGKNTLHMIGLDSRGAIVLREKVSRGRIILRLANLPPCLIGIEAGMATHYVARELAALGHDVKQVPPAYAKPFRQGHKNDFRDAHAVAEAVQRPTTRFVPAKTDEQLDLQALHRVRSRLVSERTAVINQIRGFLLERGIIVRQGLRFLRQALPDILAKRTDVLSPRMVRIVADLASDWRQLDERIEPVTDEIETLAKSDGSCRRVMTVPGIGPIISSAMVAAIGSGAAFARGRDFSAWIGLVPKQMSTGDRTILGRITKRGNGYLRTLFVQAARVILLRPASWPKHGFGVWLARAAQRLHRNVLAAALANKLARIAWTVLAQERNYEARIMKAAA

SEQ ID NO: 302296 - protein, 376 aa, unidentified
MKNVRFIGLDVHAETIAVAVAEADGEARVVGVIPNRPESIRKLLKKLGPAEQLRACYEAGPTGYVVYWQLAALGVPCEVVAPTLVPVRPGDRVKTDRRDALKLARSYRAGDLTPVWVPDAAHEALRDLVRAREAAKKDQLRARHRLGKFLLRQGRRPPTAMKAWTQGHLTWVKSAVHFAHAAQEATLLDYVHEVDHVAGRLERLERAIDAAVQAAPGHIRAVIEALQALRGIALVSAVTIVAEVGRLSRFVKPRQLMGYSGAVAREDSSGERTRRGGITKTGNAHIRRIVIEAAWAYRHRPAVGATLRKRQAPLDDEVKAIAWKAQHRLHGRYRTLTAKGKNPQRAVTAIGRELLGFIWAIGITVEARGHHAPAMA

SEQ ID NO: 302297 - protein, 335 aa, unidentified
MENYAGLDLSMESTQVCIVDEKGRKLASEKVESSPAAIADILERHTPVARAVIETGRMSPAICHGLRELGVPLVCIDARQAHQSLKAMKANKTDPHDAAGLAQLARTGFYKEAYVKSPAAHGVRSVIAARNHLVEARVKLDNMIRGLCATFGYRPGPGQGKAFLARIMEATHIPGLGEAIASLLSVRSAIVDQIKEMDRRLRVIASQSQACEILMAIPGVGVQTSAAFAAAIDEAGRFRQSRNVGAYFGLVPRRHQSGEIDWTGRITKQGDGMVRKLLYEAANSILTRSRETFALKTWAMKIAKRRGLKKARVALARRLAVIMHAMLRDGTLFQA

SEQ ID NO: 302298 - protein, 341 aa, unidentified
MDISVLGIDLGKNSCSVVGLDATGKVVVRRRMRRETVITYAASLPACVMAMEACCGAHHMGRALARQGHAVRLMSPEYVRPYVKAQKNDDRDAEAIAEAATRPTMRFVELKSEEQLDMQTLHRIRDQLVGDRTSLMNQIRSLLLERGYIVPQGRAKLAVRLGEMLEGDEPVLGPRIHRLVSDMRLRWIALDKRIADLDAEFTEAARSDERMRRLLTIPGIGALNATALVAAVGDARTFGRGRDLAAWLGLVPRQATTGGKPRLLGITKRGSRYLRKNLIQGARSSLPTMSKSDTRLGAWLRGLLSRSHPNTVVVALAAKMARIVWALLRHERTYEPIAQAA

SEQ ID NO: 302299 - protein, 402 aa, unidentified
MITCGIDIGKGKHAVAVIDESGRQLVRTRFYDNTKAGAEKMLAELLRHAEPSQIHVGMESTGNYWRAYYDFLANRGCIVDVINPIVTSASSAGDIRGRKTDRRDAETIAEVVLHGKYVRRRDEGLQERKLRALTRQRGFIVEERSAAKLHLASLVAEAFAEFESLFEDPYGTLALAVLSRYPTAGHLARARKSSLAKIVRANTRGRDADAEAQRLIGAARDSISLACEITDALARCITSSIRTIMDLDERVKDVEEAIKGFDPPDLASKLMSIKGSGKVMPMVVAAEFGDISRFRTNPKDGSEAGMHKRLLAYAGCEPRIRESGSWKGRKFISKRGSRQLRTALYLLANNIRQWDPYFKAVYERKIGAGKHHNVAVFYVVAKLIEVLCALYKSRRNYAAIQP

SEQ ID NO: 302300 - protein, 300 aa, unidentified
MSDFSYFCGIDLAKNHFSLHAVDQNGKVILHKSVTRSKLLTTIANMPLMRIGVEACGGAHYWAKTLNKLGHDARIMAVKYVIPYRTKGKNDLNDAVAICEAVQRPSTRFVPVKSPEQQAILSVHRMREHWVRERTALMNRMRALLSEFGLIIPVGRSSLMKHVPLMLEDAENELPHLARTVIADAYHHLGELNQRIADTEQVFESFAKVSANVQRVMKVRGIGPQTATAILASIGNGSQFDKSRDFSAWLGLVPKQYSTGGKPRLGRITKHGDKYLRTLLVHGARTVIANLGDKQDKLSQ

SEQ ID NO: 302301 - protein, 288 aa, unidentified
MNYVGIDIHKRYSVFVALDERGRELKRCRINGNTAFGFDQFFSGLDGKSKVVVEACWNWGRIYDLLSEIEQVEEVVLAHPLKTRLIADAQIKTDGLDAHGLATLLRGDLVARAYVPSKPTRQRKEVLRQRLYWARLRTRVRNRIHALIDRQGELSMPQCSDLFGRKGLNALNKLCLNEPDATLLREELALLELIQSQIKAQEARIVEFNSKDETTLRLQSIPGMGKILAAVAAVEIDCVERFSSAAKLCAYAGLVPRTHASGGRVYQGPLVKSRNKWRCNGPSLKRPG

SEQ ID NO: 302302 - protein, 438 aa, unidentified
MWWSSQWLLYLTLKGVLTMKVVYQTCCGVDVHKSFLVATIIKTISGVEPSYQKKRFSTFNNSILQFKNWLIENQCRDVCMESTGKYWVPVFNLLENDINVTIANPKWVKAVKGNKDDTKDSKWIGDLFRLGLVPGSYIPCKPIRILREFTRYRYKLTSCRTSEKNRYQNALTVCNVALDSVVSDIFGKSATSVIDYLIERSDNSINHEEIASRLLRSLKKKSDSVIESIEGYQMTDSQKYRMRLVRAHLDYITSTINDIDTMLDSLIAPYENAVQLLCTIPGVDRNSAITVISEIGTDMTPFSNSKRLCCWAGLTPGNNESAGKKKSVRITRAGVYLKPALVQVAHAAVKSDKSPYYKQKYERIMKRRGKKRAIIAIARMILTAIYQMLSTGEAWNPTDLYKIDIPEPLKEKQKEKAIKQAKKLLIREGILSESQLAS

SEQ ID NO: 302303 - protein, 433 aa, unidentified
MLKLNYMSTLFVGIDVSSKTNAVYAMDFEENKYISSSFGNNQPGADKLVNMIAECMHKHKNLNTILIVLESTSVYSVHISNFLSTSEVLMPYKPYVFCVNPKATSNYRKSYIGMEKTDPTDAYLIADFGRVGRTKKLEPWRGGQFISLKRLTRHRMHLSECITREKTYMVSNLYLKFSELQLLEGDDKPFGSLYGATSSAVLTEFLSPQEIIDMPEEDLLTFLAGKSRNRISDLSKTSELLRKAARDSYRLDKCMYEPLSISLASSFNCIHAYQKEIKLIEQAIEKCINGMNPNALLILQSIPGIGPIWASGILSEIGDITVFHSSDALAKYAGLYWPKGDSGDFTSEDNKMSKAGNPYLRCYLGEAANSVRKHIPEYADFYARKYAEVTKHQHKRALALTSRKLVRLVFGLLVKNQLYTGEKLDTEYNIESN

SEQ ID NO: 302304 - protein, 371 aa, unidentified
MNSIVYVGMDVHKEQYTICCYSYETDKVEYKQTIPSDYKLVLKYIDQVRSRYDGEVTFVCGYEAGCLGYSLYHQLKEHAVDCKILAPSTMAVTNTHHVKTDKKDAANIARCMAFHTYSEVYVPDNDDNDVKEYIRMRDDQKLYLKNVKQQILAFVLRQGKHFECGKTYWTIAHLKWLKTLELSALQRETLDEYLLTYEYLTEKIGRFDERIEELASAERYKEKVKHMSCLIGIKTHTAFSMIVEVGDFERFEKALKFASFLGLVPSEDSSDARVNRYSITKAGNCHLRRLLVEAAQSYTRGNVGHKSMALKQRQKRKSPEVIAHADKANERLRRRFYKMTLNKGVNRNVATTAIARELACFIWGMMTEHVS

SEQ ID NO: 302305 - protein, 347 aa, unidentified
MEYFAGLDVSLETVNVCIVNAAGDILLEKKIAAEPAAIVNLLKSFGSPFKRIGLEAGPTSSWLYGELRAAGYGAICLECRHVKAGLSAMRNKTDRNDARGIAQLVRLGWFRQVHVKSEEAQRTRVLLVNRQQLLTKALDIENSVRGSLKVFGLRVGVVARRGFEARVLELVADDPILLAVTEPMLRVRQALLEEFKRLDRLCQQLARRDPVCRRLMTVPGVGVVVALTYRTGVDAPERFSRSRDVGAHFGLTPKRYSSGQTDYDGRISRCGDEMVRTALYQAANVLLHHGRWSSLRSWAMRIAKRGSVKGAKVALARRLAVVMHRMWTDGTDFRWSDTRRMTVSTAA

SEQ ID NO: 302306 - protein, 360 aa, unidentified
MQRNKISFKGQKIFVGIDVHKDSWRVAIAPEVGVIKGHSQKPSAQELFDFLNKHYPDGDYLAVYESGFSGFSTYYALDAVGIACLVIHAADVPTSQYDEVMKTDKVDAAKLVKSLKSGLLKGIYIHKKEDLDARAVIRLRKTIQKQLGGYKSRVKHLLYNNGVQLPEKYSKPGTCWSRAFIKWLKEDVVLLSSTRDSLDLLIDQVESIRNVSLNATRKVRKLSNTERYRTNIELLTSIPGIGVNIAMGLLTEIGDVKRFHKETEFASYLGLIPTSHSSGDKIVYGEKTFRGNKDMGPQIIEAAWVAISRDRGLGCAYTHYKKKMIPQKAIIRVARKLSNIILAVLKTGKKYETYQWNEIQ

SEQ ID NO: 302307 - protein, 491 aa, unidentified
MQIHTIGVDLGKTVFHLVGLNLRGEVVVRRKFSRTQLLQFTANAQVDLIGMEACAGAHFMGRALREQGHEVRIIPAQYVKPYVKTNKSDFIDAEAIAEAVGRPTMRFVPIKTDDQLDMQSLHRVRERWVIRRTAVVNQIRGLLLERGITLRQGRRHLEAALPEILEDATARLSGALRMLISQLKHELEELANFIGEADGIMERTSRENESCRRLLAVPGIGPVTATALVAAIGNGAAFRKGREFSAWVGMVPRESSTGGKQKLRVRERWVIRRTAVVNQIRGLLLERGITLRQGRRHLEAALPEILEDATARLSGALRMLISQLKHELEELANFIGEADGIMERTSRENESCRRLLAVPGIGPVTATALVAAIGNGAAFRKGREFSAWVGMVPRESSTGGKQKLLGISKRGNPYLRKLFIQGARAVMLRGTKQSPGLRTWIENIAMRKHHNVAAVALANKMARIAWVVLARGETYRPSLLTESDQTDMACR

SEQ ID NO: 302308 - protein, 423 aa, unidentified
MKNSAAEKRKQVPAGYLVVGVDPHKKKHAAVFMTQDFMVHSKLKFDNSREGFEKVLERVRTEMLKTGCRGVIFAIETGAHHWRNLAYFLDEKGIPLRLINQFTLKRRREGKDLNHRKNDYRDSEVAAQLLCTGEFNAARLSQGVYAELRAAYGSYRRLVKERTRIVNLIKSLLDGLFPEFTQVFKNPCGQTAASVLCTCAVPQAIAGMTESEFVGAIKAACQGRVMKGKLRALHHVALTSIGIGAGAQSVSSEIAFLIEKLRLIEQQLRQIKEALTRLVHETMEGKYLLSIIGLSYVSVAGIIAELGSFSSYQNAKQLIKMAGSNPTESESGAKRHSHTPISKQGRPVLRHCAWTAVIPMLRFNPDFRDWAKKLRERPAGANPLSGREVMVAAVNKLLRLAFALVKNQTLYHIPESQPVEITI

SEQ ID NO: 302309 - protein, 334 aa, unidentified
MQNITLIGIDLGKHSFHIHCQDKSGKALLRKKFTRTKLMQFLATCPPSVVVMEACAGAHFMARCISDFGHETKLISPQFVRPFVKSNKNDFVDAEAICEAASRPSMRFVQPRTETQQAMRALHRVRESLIRDKVKTTNQIHGFLLEFGISLPIGDAVIKRLSLVLAEHEIPEYLSRLLVRLHTHYFYLVEQIAELESELSQSINADDTAQRIMTIPGVGPITASLLSSQLGDGKQFSCSRDFAASTGLVPRQYSTGGKSTLLGISKRGDKNLRRLLVQCARSFIMRFERKHGKLAEWVREQLNKKHSNVVTCALANKLARIAWAITTQKKEYQA

SEQ ID NO: 302310 - protein, 358 aa, unidentified
MAITTIAHAEATHVTVGVDTHGDVHVAHAKDQLGRRLGTVSITTTPAGYQDLLAWAQGLGQVEAFGIEGTGCYGAALVRFLHQAGQVVLEVNRPDRATRRRRGKSDPVDAEAAARAVQAGEVTVLPKAADGSAEMLRSLRVARTTAMRARTQAINALRSLLVTAPAELREQLRGRSAVRLVKAAAALDPGALTSPTAAAMLALRTLARRYQALDAEITTLGSELDRLTATAAPSLLALFGVGPEVAGALLVAAGDNPGRLRSEAAFSMLCGSSPIQASSGKTTRHRLNRGGDRQANAALYRIVVVRLRWHQPTKDYLARRTKEGKSKKELIRCLKRYVAREVFAVLKDIGQTDPTKTT

SEQ ID NO: 302311 - protein, 355 aa, unidentified
MDSKKYIGMDVHQASISIAVMDATGKVVVESIIETKATTILEFIRGLKGTLWVAFEEGTSAAWLYDLLKPRVAKVIVCDPRKNALLNAGNKNDRVDARKLSHLLRAGLLTPVYHGENGIRTLRELGRSYLTVNKDLTRVMNRLKALYRSWAIPCAGEKVYSPRQRNAWLEKLSQVGVRRRAEQLYQQLDALVQIRREARRELLTESQRHPATPLLRQIPRLGPIRVALLIALIQTPHRFRTKRQLWAYCGLALQTRASGEYRFSGGELQHCKRLPALRGLNVNHNHDLKNLFKSAATHVSTSTDPLGDFYRSLLAKGMKPTMARLTLARKMAAIVLSVWKKGARFDPGELKQQAA

SEQ ID NO: 302312 - protein, 364 aa, unidentified
MAISGLSPTELTKEAPIIMLHVGLDLSRKRLDFDLLCEDGSRLERGAVPPDADGLRGLARRVGVFGEPVSAAIESMNGARFVHDRLEELGWQVEIADAQKVKGLAPLACKTDRIDAWVLAELSCRDLVPAIWLPDPAVRAERERARWRLHLVRHRTSLKNRVHATLLAFGVPCPVSDLFGSRGRGLLQRLELPDPWAQTVNASLALIEDLDEQVRSCERELRALGADHEYVPLLMSAPGIAWVLGYTIAAEIGAINRFGSPSKLCGYTGLCPRVHQSGERDHRGSLAKNGPKYLRWAMIEAATHAVCSPVYRERYQKTAKRLGAQRGRKVARVDIARKLTEAIWYMLTRNQPFAPAGATTPLAA

SEQ ID NO: 302313 - protein, 346 aa, unidentified
MSKLYVGVDWHKRTSTWVAINEEREKVYERVWDCTPQAVEEAIISLPAKPGETTLAVEPVCGWRWMSDLCEQTGIVVQIANPIKLRQIADSGQKTDKNDALTLAELLRADYLPQAYKVPDDIYELRMLVRERAHFISQSTATKCRIQSVCTARGSHQTAEQPLHKAGWDTLYNQESGLYEMFLSLEEIKAHVTNLESLIVKTITGTATYTILLSMPGIGPVTAAAIYAEVGDFKRFKTPSNLISYAGIYPKERSSGDSKRYGSISKAGSRVLRYSIIEAAMRIRDTEKSHNLHTHYLAAKEDRHKTPKQARIVVAHKLLTISWYLIERGVMYDDHMVKPAQREMIS

SEQ ID NO: 302314 - protein, 366 aa, unidentified
MKKTSTVRVNGNMIFKGHKLTIGLDLGDRWSFYCVLDEAGEVLLEQKVPTTPEAMKQIFSRISQSRIALETGTHSPWVSRLLTELGHEVIVAHAQKVQLITKSNRKDDRHDARTLARLARIDPELLGPVRHRSVQAQIHLTVIRARAELVSARTALVNAARGLVKSYGQRLPKCGTQQVSRELAAELSTELRDVLEPLLQEVESLNERIKEYDERMEKIAKQVYPEVSLLKQVKGVGTQIALTYVLTLEDPHRFPKSREVGCFLGLRPGRRNSGESEPEKRISKEGDRYLRTMMVQGAHYILGPFGQDSDLRRWGLKLAERGGKNAKKRAVVAVARKLAVLLHRLWVSGEVYEPLRNSHQAMRAVA

SEQ ID NO: 302315 - protein, 408 aa, unidentified
MNPLYVGIDVSSKSNVVYLMLPDGSKHSNFSVANSHDGSTQLVKRILSAIKSLSLDTVIIGLEATSVYGDNLVYFLREDATLVPYDKKIHVLNPKQVKNFKEAYNDLPKNDYVDSYVIADCLRFGRINKEVYQSDYRYKALQNLTRARFFAVQNLVKEKQRFINVLFKKYSTMTQEKVFGDTFSTTALAVYEEFESAEALASMDLQELTDFIMEKGKNRFPNPDAVAKAIQKAARSSYRLPKTVNDSVNQVLSISITSIKALDAQIKEFDKAIKAQMELLPNVLTSIPGIGPVYSAGIIAEIGDINRFPSQAQLGKYAGLAWTQNQSGDFEAENTKLIQSGNRFLKYYLCEGALSLVKCDTEYRNFYHSKYKEVNRHQHKRALALTARKLVRLIFRLLKDNRLYRAAE

SEQ ID NO: 302316 - protein, 414 aa, unidentified
MLKIVYRVCCGMDIHKSFVVACIASTNEYGVTTYKRKRFSTFTGDLRRCAVWLAENNCKDVCMESTGKYWIPIYNILEPTCNIVLAHPKYVKAIHGKKTDKRDAKWIADIFKHDLVAGSFIPPADIRQLRDLFRYRWKLTSFTTGEKNRAQNCLTISNFKLDDVFSDVFGKAASAITARILENPTEKITDVSGFRTKGMKATNEQVLAAVDGEMCEEQAEKLRIIRSHMDSLELCKLNLESLILSVAEKYLPQLGLVMTAPGIQSFAAIGIISEIGVDMSVFPTSKHLCSWAGLTPQNNESAGKKKTTRISRAGAYIKPLLVQCALCAVRAKQFPEVRNRYLALKKRRGHKKAIIAVARMLLTAIYNMLKKNEPYNSELYRKGDRPPAHREVSVEEAVFILQRQGYLVSAPPTP

SEQ ID NO: 302317 - protein, 345 aa, unidentified
MATMPQTLGGVTVGVDTHGKIHVGAVADPLGRILGTIEVTTDERGFRQLENYAKGLGTIERFGVEGTGAYGATLCRWLTNRGHEVLEVDRPDRKIRRLRGKSDPIDACAAAQAVLSGRASGVPKARDGAVEAIRVLRMARGSAVRGRTQTMNQMHALVTSAVDPLRMQLRSCSPAKLVDRCVGMRPGKLDSPAAATKFALRELARRHRALDEEVERFDEELSRLVAMRAPRLVALVGVGTDVAGALLVTAGDNPDRLRSEASFAHLCGVSPIPASSGRIHRHRLNRGGDRSANQALWRIVMVRMSWDERTRAYAARRTSEGLSKREIIRCLKRYVAREVYEVLVA

SEQ ID NO: 302318 - protein, 353 aa, unidentified
MPSKADTAIARTIGIDTGKNTLHMIGLDEKGAIVLREKVSRTRIAARFVNVPPCLVGIEAGMASHHIARELVALGHEVKQVPPGYSKPFRQGHKNDFRDAHAVAEAVERPSTRCVPIKTDEQLDLQALHRVRSRLISNRTAVTNQIRGFLLEHGIPVRQGHHFLRRQLPQLLGTRTDVLSPRMIRVIGDLMSDWNYLDERIERVTDEIESLARADEGCQQLITVPGIGPIISSAMVAAIGTGAAFCKGRDFAAWLGLVPKQMSTGDRTILGRITRRGNRYLRTLFIQGARAILLRPTGWAKHSFGSWLAAAARRMHRNVLAVALANKLARIAWTVLAQARCYEARVEPRVEPA

SEQ ID NO: 302319 - protein, 393 aa, unidentified
MNNFSRFIGIDIHKKLASFATVDKEKNLLGQGTFLMAELAAWAKKNLTQEDAVVIEATGNSYYVYDLLIPYAGEVQIANPLAMHDRTRYRRKTDKADARNLAEQLAMGNVLPVWVPPKEARAWRETVSHRKGLSEDITAIKNRMRSLLYRYGISYDSKEILSDKALGFVQASDMPRGSKRAFQSYLGISAKIMEEIALIDRELAKQSLVDPRCLNLMTMPGVKPQAAIIVTSAIGDISRFPNPKQLASYAGLVPSVQQSGEGIHYGSITKQGSSLLRWIMVEAAHAAAATPGPLQDFFYRLYRRNQSYNKSIIALASKMLRIIWHMLTYGVPYRHPRLSSLNLKFRSVIRTAFGRCPRLAGKQLAMAVLDLVPGASLGHSSSFPNFALDVIHR

SEQ ID NO: 302320 - protein, 342 aa, unidentified
MDVYIGLDVSLASMAVCVLDEKGKVATEAQVASTPEALVSFMAKLPHEIAAIGLEAGPLSHWLHKGMTDAGFEAVLMETRQVKAMPIKTDRRDAEGIARLLQMGWFRPVHCKTVSSQGMRALLTTRKSVQDAIIRMEISLRGVLRNFGLKLGPVSKGRYEARVRELVIGNAMLEAAAEPILSARTALRRELADLEKLVGNLARQDRACRLFMTMPGVGHVIALTFISAIDDPERFRRSKDVGPWVGLTPGRDQSGERDVVGRITKAGDAGLRAALYQAATVMLNIARPNWLNAWALRLAKHRGKKRATVALARRIGVVLHRMWRDGTEFRFTREEAMALRTA

SEQ ID NO: 302321 - protein, 288 aa, unidentified
MAVQTAVQMWVGIDVSKDTLDVCLLRASGKEKHKDFSNDASGHAKLLRWVQHLVAQEPCHFCLESTGSYSTGLAQFLAEAEQPVSLVNPARIKYAGMAQGVGNKTDQADARLIADYCRKENPPLWRAAAPEVRELVALVRRLHSVQELLVQEQNRLEQPGLPGVVQGSLRKSVRFLEKEVKHLRRQIKEHTDNHSGLKADKELLLSIPGIGETTAHELLAEMPDVKEFSCAQSVAAYAGLAPREHSSGSSVRKKTRLSKQGNRHLRRALYFPAVSAVQWNPLVRAHYE

SEQ ID NO: 302322 - protein, 377 aa, unidentified
MAVHPEYPTRRQNEGRFSLFHFLKLIGMKKIVKQIVGIDVALKELVVCLGRMYDDWSPELYANKTFANTGKGMEALVLWVKKQTEQQVAVRFVMEATGVYHEALAYFLEERSYEVSIVLPNKISSYMRTLDVKTITDNTASRAITMFGLERKLDTWKKPKEIYRKLRQLTRERDQLVQERTMVKNQLHAEQAEAFPNNSSEKRIKDRIKMLDKQEQQIMDEVKIMIAQDEELKKMIVIICSLPGVGLLTAAIVLAETNGFDLIRNRRQLASYAGFDIIEKQSGTSVKGKPRITKKGNKYLRKAMHMPALTAMQRNERFKAIFSRIVSRHGIKMKAAVAIQRKLLEMIFTLYKTNKPFDKNYLAKAQMDTPEKELIKN

SEQ ID NO: 302323 - protein, 352 aa, unidentified
MQCIAFDAHKRYTWALVDDEQGRTLREERITHRKGTLIEFLAQCEPGSPVAVETIGNCYWITDEIEAAGMVPRLVHAGRAKGMMSSVNKTDKLDVRGMNRLQRSGTLPTVWIPPRQLRDARELPRTRMVLVGQRTKVKNRIHANLAKYGAPAIEASDVFGVRGLQLLRKRLDELPPETRYATERLLEELEHLDGQIHRFEERMAELFDPTQELELVKTLPGVGFILGIVILTEVGDVGRFPSASHLASYAGMTPRVHASGGRARYGSLRSDVNRYLKWAYAEAANAVVIHRRRHPQRHVCRLYERVRHRGGHQKAIGAVGRHLAEATYWILRKREPYQDPALDRAGVSRREA

SEQ ID NO: 302324 - protein, 409 aa, unidentified
MRIIGLDIHRAFAEAVAWEDGRLRRLGRVDMRRDLLAAFAAKLSPNDVVVIEATGNATSAAAVVAPHVKKVVIANPKQVRIIAYAKIKTDTIDASVLAQLYASGFLPEVWIPDESTQVLRRQVTRRNQIVRQRSRLKNVIQSILHSHLIPSCPHADLCGTKGRSWLSEQVVPQDERLAIDRHLREFDRLGEDLQVIERDLARSALADEGVKRLMTIPGVDMIVALAMKAAIGDVSRFDDPQKLVSYLGLNPSVRQSGPGPAYHGRITKQGRGHARGMLVEAAWAAARAPGPLRAFFLRVRARRGQHVAAVATARKLSVVIWHLLMKGESYAWARPSLHAKKLRDVELKAGSKAVRGQKGAAHAYNIKSHREEERRWVEQAEGAYARFVAGWNPRGPRKARTDAANEARR

SEQ ID NO: 302325 - protein, 402 aa, unidentified
MQETQARYVGLDVHKQFIMIALIAKDQKVILKPKRVDIHKFPTWAEEHLNKTDQVALESSTNAWWVYDHLVNIVGEVYVANTHQVKMISAGHVKTDQRDATILARLLAAGLLPTIWVPPQEVRELRSLIAHRKRLVRDRGAVKNRLHSMLHRHSVSLPKGDPFNHTNQSWWDQLALSNIEKLQVSHELKQLAQLASMIKEADEQIAIISVQAPWRDQVAFLLQFTGIGLNSAMTILGAIGKIERFPTAKQLVGYSGLGARVYASGQSHKTGKISKVGRRELRRIMIESAWSAVSFSKHWRTEYERLAYRIGKMKAIVAIARKILMIIWKVLTKRIANHLENIDKIIRSLMKWAETYRTASRLGLKRPEFVRIELDRLGIMASIEKYQYANKTYKLPPSPILA

SEQ ID NO: 302326 - protein, 387 aa, unidentified
MPQPNDLSRSLVALDQDSTIIAVVEMSQSSWLVGGVLPGIERQPRKKQEPSPARLLALLHRWRDESVRAGRTITRIAVAFEAGRDGFWLARWLEARGVEAHVIHPSSVAVSREHRRAKTDRLDTELLKRGFLGWLRGERGHCSMARVPTIAEEDAKRPNRERECLVKERTRLVNRIKGTLARLGIRNFKPTLRQATERLATMRTPEGTPVPPNALAEVQRDLARLRFVVGQIKQIEEARRQRLEEQPERGPHAMVRLLARVVGIGIETADMLVNEVLSRPMRDRRAVARYAGLTGAPDESGAKRREQGLAKAGNARVRRGMIQLAWRFLRFQKNSALAQWYHARTADRRGATRKTMIVALARKLLIALWRFGTIGEPMDGVTLRPAS

SEQ ID NO: 302327 - protein, 397 aa, unidentified
MNAVGIDVSKGKSTVAVIQPFGVVIAEPFDVFHTDSSLKELVRFIKSLSGETKVVMEYTGTYYEPVANALHNAGIFVSVVNPLLIDDYDTNRVRKVKTDKLDALKIASYALDKWIKLRKYEPAETVRKTLQIMNRQCIKLNKILVMQKNSFIALLDCCFPNANTLFTSPHRVSDGHEKWVDFVMKFPHVDSVAKLPLSVFRTKYQSWCKKEHYNYSESKAEQIHAYARTIVSTLPMTDAVRKMVSEAAKHLNSTLEALHSEMDTLATQLPEYETVMNLYGVGKVFCSQLIAEIGDVTKLKSNKSLTALAGIDPPPNQSGKDDPKSRRISKRGSPALRRTLFLIMTIYLQHQPADEPIYQFLDKKRTEGKPYKVYMIAAAHKFLRIYYARVKAVMPMQ

SEQ ID NO: 302328 - protein, 553 aa, unidentified
MGGTGPAPGALCYAPQKPWVVVTVWSMVLRARMLGWSREHATTSLVTGLVLIPFGRLLSFRRSRARGLVRVSRFPPLCIVEVGMTPRKDNFPHPDPPTRAPSLQVVNPHAAAVDIGAAEHWVAVPPDRDAQPVRRFGTCTLDLESLADWLLACDITTVAMESTGVYWIPLFEVLEARGFQAILIDPRQAQRAPGRPKSDPHDCQWLQRLHAYGLLAGAFRPADQVCVLRASLRQRRMLITYASQHIQHMQKALEQMNLKLPEVVSDITGVTGMAIIQAILAGERDPVRLAQLRDRRCKHGEEQIAKALQGTWRAEHLFALRQAVELYDFYHRQLVACDAQIAAHLATFPDQSDGHPLPPRPRKSKRKANAPRFEVRTLLYRMAGVDLTALEGIEEETALVILSEIGTDMSRWPSVKHLCSWLGLCPQHKVSGGKVLSRRVRPGANRVAVALRLAAGSLHHSQSALGAFFRRLRARLGAPKAITATAHKLARLVYSLLKHGTAYVQQGMEEYEAQYRERKMKAMARQAKAFGYALVPLAMPDGPTMPAVLGSTP

SEQ ID NO: 302329 - protein, 427 aa, unidentified
MNSPEQQAAGWLEQRGFGGLDWASQKHSVVVVDPKGKVIEDFEIEHSALGWKKFREQIQPYGSIPFAIETSQGAAVEQLLEAGMRVYPLNPKSAQSYRERKAPSGVKDDRLDAWSFADACRVDGQGWKPLRPEDPLIKELRLLCRDEVTLIEQRTAFINQLRHALAEYYPTALEAFEDWGSVSAWMFVQRFPTPQALKEAGKRQWEKFLHSRHLWRTESGPRRIELFAHATDLCGSLPMADAKSRLALSLVSILFALEKQLGIYRQRIEELFGRHPDHDLFGSLPGAGPKIGPRLMSEIGDDRGRFGEEPLPLQCLAGTAPVTRRTGKARTNPPRWPVHQRWACDKHLRHAIYLFAEQTLTRCFWAELYYRHHRQKGHSHADSLRRLGQRWLKIIYRMWMDRKPYDAMLHSQNQLKHGSWVLQLKTT

SEQ ID NO: 302330 - protein, 423 aa, unidentified
MAKLELTSTMKLVGIDWAAEEHAVCVVDSGGAEVAAFMIAHTKDGFAKLVTRLVSLGVPGEMPVAIERPDGRLVDRLLEAGHRVVPVSGRAIKAWRESEVASGAKSDPGDAEVIAEYLRLRLRHLRVLEPFSDQTRALRAVVRARDDLVHARVAAHNQLEACLDAFWPGAKAIFADVTSEIALAFLERYPTPSSANALGEKRMAAFCIKHGYSGRRSAAELLTRLGAAPDGIGAGPEAEARRDAVLGYVGVIRALNTSIKALARSVAAHLGEHQDSKIFTSLPRSGQVNAAQMLAEWGDCRQAYDGPDAVAAMAGLTPVTKASGKHKAVHFRWACNTRFRVAVTTFADNSRHDSPWAADIYKRATGRGCDHPHAVRILARAWVRVIYRCWLDRVPYDANNHTAAVRLAEQQSAADHSTRSEAA

SEQ ID NO: 302331 - protein, 456 aa, unidentified
MRKKKTQSNKIVRLDALKHINLNAAGIDVGDSQMYVAVPEDRDEQFVRVFGTFTRDLLSIAQWLKDCHITTVAMESTGVYWIPLFEILVEHGFDVLLVDARKIKNVSGRKTDIQDCQWIQQLHTYGLLHGSFIPEQNMRALRDMVRHRANLLRYRASHVQHIQKILQQMNIKLTNVISDITGTTSMHILRAIVAGKTDPTYLSSFRDPHCKKSQTEIELSLQGNYRTEYIFQLKQMLDLYDYYSSLVVQLDAQTETMYAHLPSLVNQKDRPLKPLKRNVHKKNKNAPTFDLRTQLYRICGVDLVQVDGLNTSTVQDIITDIGTDMSKWKTSKHFCAWLRLAPNNKITGGKVFLSHTPKSKNKANKALRLAAFSLANAKCALGAFYRRIRAKYGAPMANIATAHKLARIIYKMLKDKVDYVDLSENYYNENYKARLIRNLNDKAKSLGFQLIPTATQ

SEQ ID NO: 302332 - protein, 414 aa, unidentified
MDRMVERPGALDVHKAQVTAAVRLPPPPGKKRRVEAVAEFSTTVTGLLALADWLGRHGVERVAMEATGDYWKPVWAVLEERFDLLLVNAQHVKQVPGRKTDIADAQWLCRLLEAGLLRASLVPPAPIRAVRDLTRYRKTQIHERQRETQRLHKVLEDTGIKLATVATDILGVSGRSMLDALVAGTSDPESLAQLARGRLRVKLPALREAMQGRFGAQHRVLVGQILAHIDFLNASIERVSAAIAEHLAAFDPAIALLCTIPGVQRRTAEVIIAETGGDMTAFATPRHLASWAAMCPGNDESAGKRRSGKTRKGSKWLRAALCEAAHAAARTKGSYLQAHYHRLRVRRGPTRAVVAVGHSILTAAWHMLNTGETYRDLGGDYFQRRDPERTTRRLVTQLERLGHIVTLEPAPAQP

SEQ ID NO: 302333 - protein, 353 aa, unidentified
MTGTKYIGMDVHKESISIAVRNDAGKLVMECVIETKANLILDFIHGLRGELHVTFEEGTWATWLYDLLKPQVTKLVVCDPRKNSRQGNKNDRIDARELADRLYMNKLSSVYHGGAGVRTLKELARSYLTISKDLGRVMSRVKAIYRSWGIPCAGKQVYAPRHRAEWLAKITEVGVLRRAEFYYQQLDALRVLRQAVRRDLLTESKKHKATKLLRQIPSIGPIRAALLIALIQTPHRFRTKRPFWKYSGFAIEMHSSADYRSVKGGLQKSKKQISVRGLNRDCNHDLKNLFKSAATIASVKPGPFQEFYAALVAKGMRPEMARLTLARKIATIVLIVWKRGVSFDAKYLKSQTA

SEQ ID NO: 302334 - protein, 419 aa, unidentified
MKIIKTKKQKIVNGRTLLVAVDLAKNKHTGYYRCPDGTDIKPFEFSNNREGHQKFYDRICQAKAVHHLEEVVVGFESTGVYGEPLIHFLNNKGIKLVQVNPLHTKRMKELEGNSPGKTDRKDPKVIADIMELGHFLSVVIPGGVSAELRRLTQARERSVQRRTAFYNQLQDLVFIIFPEFLEVMKDIKARSAQYLLRHYPTPQAMLQCRVDELSSVLRSVSCGKLGRQRAEALHEAAGRSVGIQEGQRSIVLEIEEILSGIERDHCFIGKLEREMSCLLDQVPYNRSILSVKGIKTVTAAGLIGEVGDFRKFHTVSEILKLAGLDLFEISSGNYQGSRHITKRGRSLLRKILFFASLNMIRKEGVMHEPYQRYIGRGMPGSKALVAISRKLLRILFALVRDHREYVVHYSERENLKLAA

SEQ ID NO: 302335 - protein, 348 aa, unidentified
MYYAGIDYHKRCSFVSIQDEAGKIVLERQVPHNNPLMFEEIIREVGGPVAVVYEAGLNWTWLYEVLEKIGDVKSITLANAYKVRLIAEAQIKTDKIDARKFALLLRLGVVPVCHIPNRQTRDRKEVLRQRAYWVRQRTGLRNRVHRLIGRQHGLQMPQVSDIFGKKGKEALHKAVLPDPDGMLLKQDLAVLEQLDAVIKADEEKIKAESKPDRAVEIFTSIPGVGLIIASITAAETDGIGRFPSAERYTGYSGLSPTTHSSGGHTYNGRMMWMCNKWLKWAFIEAAWVAVGCSAYFGGLYRYHRRRGKKANTAITIVARRMCRIAYQLLKENRFYEERTFSPVALVKV

SEQ ID NO: 302336 - protein, 333 aa, unidentified
MMNMHSQGRVASEATRPNAGIDVSKEHLDVHLLELGMRVDNDASGWEPLIAKLKESDVDLVVVEASGGYERGLVTALHRARIDVARVNPRQAREFARSMGVLAKTDRVDARCLRDFADVLARHKDRHKYITVPADPERELLAALMTRRRQLVDMRVAEANRLEGATARTVRSIRSVIKTLDKQLHDIDGDIDQHLERHFKPQKELLDSVRGVGPVTILTLTSALPELGHLGRRQIAKLVGVAPLADDSGRRKGVRRTAGGRSEVRAVVYMATLTAIRHNPVIQAFYSRLVAAGKPKKVAIVACMRKLLTILNAIVRDQAPWRTDAGLTSSRST

SEQ ID NO: 302337 - protein, 386 aa, unidentified
MSQTTHQTSEPFYIGIDFHKHYSVFCVIDDRNTILERGRIDHKIPIGFELLIKRYPGCRVVFETTMNWHWLYEILEAHMDHKDIVLANAYKMRIIAEAQVKTDKVDAYMLAKFLKAELISTVHIPSKSTRQRKEVLRQRCFFVRQRTMLRNRIQRLLSAQHNLQLPQCSDLFGKKGISALGKLELPDPAGLLLRQQLEMLENLKTRIAEDEMALKKMLEVSPELEFVKSIPGMGPILAAVVVSEVDDISRFASAQRFCGYAGLCPTTYSSGGNTFNGRLMRACNKWLRWAFVEAAWVSVGCSPYFADYYKRKRALGKKANTAIIATARLMARICWQLLTEKRAYASFPPAQKLQGRPEGKPQASSGWVKERKDFAMPKETFPSRSE

SEQ ID NO: 302338 - protein, 438 aa, unidentified
MSNKVIFNLDELFISVGIDVGADFSWMSIALPNQQFVGKPYKILHNSIDSLTTAVSKIKEAEELYSLESRIFLESTGIYHYPLFCYLRDKGFNCSVINPIITKNSTNINIRKVHNDRFDSKKAALVGLKPDLKVSLMPSDLALNCRNLCREYYDLMDNRSAYVNKLQGELRMAFPQYLGIFSKVTINTSLTLLETYTSPSAFLKADKQEIIDIIKSTARFGLTYAQNKYNAIIQAATDANQFGYIIDSNIKRIRLYISFIRKYDEEINNILESLHELVDANEDTDFVKQIHLIKTFKGAGFLSAVSIMGEIGDFSAFSKPKQLFAYFGLDPAVKQSGKFEGTKVQMSKRGSAIARRVIHTLTLQSISISRNGEAKNPVLREYYLKKCDSKPKLVAMGAVSHKVCNMIFAILRDNKPFKIIAPQEHIKQYNAAKCDMTA

SEQ ID NO: 302339 - protein, 361 aa, unidentified
MNKKMYYIGMDIHKKNVNYCVKILDGTIVRQGSIRRTRAELTAFASRIRRPWKGVLEATLFTGFVYDILKPYAKEMIVGNPLQIKAIAYAKKKNDNIDAETLADLLRINLVPESYMPSTEMRNLRRCLRYRNYLVRQATRFKNKTAGVLMECGAEYNKEKLHRKGYFYNFMRRLSDVPDSVKEMLSFNRSLIETFEKNQNRLIQALKKNPKLQKRVELLQTIPGVGDIVSLTWALEIADPHRFSSIRKAVSYCGLCSAQRSSAGKEKRGPISKQRNSHLQWILIEAANMGPNRDAHLAKLRKKELKKGNENRATLNLARKIVAYLMAVDKSGKAFQYPEKKGRKKSPKTILKKKSTQCKTI

SEQ ID NO: 302340 - protein, 369 aa, unidentified
MKQRNKTKKGMPMKTKVKISYVGKKVFIGIDVHRLSYAVTAVCEQVVVLKCSVPGEPHKMVQFIANKFPGAEVSSAYEAGFSGLVLHRALTAAGVSNLVVNAASIEMRVNDKVKTDKRDSLKIAIHLSQGRLEGIRIVSEEEELTRLIARTRDQLVKSRGMLMNSVRMKLLQFGKLPIEYRKVLHLKSVEAWIAEKDFPGLLKIAIRYLVECWKSINIQLKAIKQELRLQAKSDPREAIYRSVPGIGPISARVLSNELGDMKQFRNERRLFSFSGMTPSEHSTGEPKNQRRGHITHQGSARIRKILTEAAWVAIKRDPALRAVHQRISVKSGAKKAIVAVARKLLGRIRSLFMKGEFYVNGKGLPPSAA

SEQ ID NO: 302341 - protein, 340 aa, unidentified
MIVVTKFFIGIDVSKPHFDVALMAVVNHVKQEMETARFDNTASGITLFEKWLKSHRLTFNEDCLVVMENTGIYHRLLWTFCSSRNLPIHIGNAAHIKWSFGIARGKNDKIDSIRLCNYAFKEADELRATAALDPELILLKDLISARTKLLKQKSGISISVKELGNVNGKEHQRLIEKALKNAIDGIVKSIKNLEDQIKKIINGNQYFKQNYKLLISIPGIGHVTAVYLIGCTGNFVGQPSGKELACYAGVAPFEQTSGISIKGRPRVHRMANKELKRLLHMCALSLIQHNQEFRAYYDRKKAEGKHSMSIINAIRNKIALRIAAVIKNQESYKNNYNIAA

SEQ ID NO: 302342 - protein, 421 aa, unidentified
MSENQRVVGFDCGEDEHSAVLLDAAGEFEERFSVANERGKIQELLAELLLAVRPGERLVVVVESKRSHGRVVSDVAVELGCDLRQVNTVALNHFRDLEGQPRKNDEWDAYLAARMVFLRMGGCRKATEVTEEERALSRLTRTHRRLVDERRKHLARLRAVLLELAPEMLHSSWEGPQPGRKAMLYLLERWPGFEGLERAQLRSIEKILLRCRYGSRATRVAKLIREMARGISIADEERQAFTLELDLLVRQIRFCNESIAQMYAQITQRVERHPIGKKLLEMDGNGPVITAVLISELLPVTRTSTEAKSATYAGVTPLARKSGKSLDNDRLTQGVNKRVLHALYTSSVVAIKHNAVDRAYYNKKLRDYAGHPKPHVAAFIALSRQRHKLIHKLMTTDARYDKEILISTHLARLERNQTVAA

SEQ ID NO: 302343 - protein, 451 aa, unidentified
MLGLGMQHIHCPNKRRTLTMKFNQSNKQNQRISRISETTLVIGTDIAKHNHVARAFNYRGIEFGKRCLFQNDENGLLNLLAWAESIQQEHGLTDVLLGVEPTGHYWFPLFHFLKQRGVEVVLVNPHHVRKSKELDDNSPTKNDIKDAKVVAKLVIDGRYTQPQLPEGVYADLRVLMNQRDRLCGDLNRVKGRIHNWLDHFFPEYRQVFKDWEGKASLITLQHFPLPQDVVGAGETTVMATWKKNGVQRAVGPKRAGLLYRKAQKSIGLTEGATAAKHELAMYLEQYAMLCRQIEQLMEHVAALVEQIPGASHMMSIPCIGLVTVAGFLAEVGDLSGYDHSQQIVRHAGLSLRENSSGLHKGETTISKRGRCRLRALLYRAALTMVAKNPEFRALHLYFTTRRDNPLKKKQSMIALCIKLIRVLFELGRKQKNYDSSKVLGPHREAQLQAAA

SEQ ID NO: 302344 - protein, 355 aa, unidentified
MNQDKYIGMDVHQATISVAVMDSSGKLIMECILETKAATILEFIDGLRGTLSVTFEEGTSAAWLHDLLKPHVSHLVVCDPRRNALLKDGSKSDRIDARKLAELLHSNKLHAVYHGEHGLRTLKELGRSYLTITKDLTRVMSRIKALYRSWAIPCNGATVYAPRHRAEWLAKIPEPGVRLRAERLYQQLDLLQPVRQEARRDLLVESHQHHAVKLLRQIPSIGPIRAALLVALLQTPHRFRTKRQLWTYSGFAVETHDSGEYRFVRGKLVRNRERITVRGLNHNHNHDLKNLFKGAAISASTRPGPLCDFYVALVEKGMRPTMARLTLARKMAAITLTIWKKGVEFDAKPLNRQAA

SEQ ID NO: 302345 - protein, 430 aa, unidentified
MTSMTSPTAPVTVIGGVDTHGQTHHAAVIDQVGRQLGDREFPTTPAGYRALLTWLRGHGQLERVGVEGTGSYGGALARHLRRMGAGVVEVDRPDRKARRAKGKSDPLDAYAAARAALSGTATGTPKTRDGRVEAIRVLRVARSGAVKARTQGANQLKALLLTAPAELREQLRHLSTTTLIATCARLRPSSELTDPEQATKTALRRLARRHQHLSEEIAEADTELRTLVTAAAPRLLVLPSVGIEVAGQLLTSAGDNPDRLHSEAAFAHLCGVAPVPASSGRTHRHRLNRGGDRAANNALYIVVLGRLRYDSRTRVYADRRTKEGLSKPEIIRCLKRHSRGSGGNHNDHVNGGLTCPGRPAACTPTEPSSDRPANSTRPWLTAPQACARPVMSNAARSAKVRPAGSSPRSISSPSTYWSMPTPSSRRPPNN

SEQ ID NO: 302346 - protein, 316 aa, unidentified
MSVETWFVGIDVAKDRLDVALHPTDERWTGSNDPAGIEALSEQLVRLAPQLVVLEATGGFEVPLVGALGARGLPVVVVNPRHVRDFAKALGRLAKTDRIDATVLAECAARVRPVVRPLPDEEARELHAWLARRRQWVEMMTADENRRQQAAAPIRRPIEGHLRWRRCQLAALERELTTRVRRSPVWRESETLRRSTPAVGPVLARTLLADVPDLGRLTGQQIAALVGVAPFNRDSGPRQGHRSLWGGRAPVRGVLDLAALVATQHNPVIRAFSQRRVAAGKPWKVVLTACMRKLLTILNARMKHRTAWKPVPALGA

SEQ ID NO: 302347 - protein, 350 aa, unidentified
MQENERNMQDVMKFTLWFGLDVSKDSFTAAGRSILRDQSTLFPPQEKFALSPEGVQAFLKWAGTQAGCFGYGVAMETTGVYSRRLAGLLRAASPALHVAVCNATSVSLYARSFTEEKSDKADAALIARYACDRNPREPREVAPDEMRLREIVRARNGMEDQLLEARNRLAGIEDAAVRRIQEGIVQSFEKAIAGLERELEAAVKASPRIREEVELMRTAPGVGLLSAACIFAELGSLRQYSRKQVSALSGVCPVNRLSGTSVRRHTMSHHGSRLLRRILFLDTHMAVRKMPALGRFRDRLLARPESSKMTAKCACMRKLLLILHAMVVTGTPFDPDYKSEKKIKKESCPT

SEQ ID NO: 302348 - protein, 292 aa, unidentified
MTCAGIDVAKGHLDLAIRFGSGEVETQRFDNNSDGIDQIKELLCEADPDRIVLEATGGYERPVSAVLAAVGLPVAVVNPRQTRDFARATGRLAKTDEIDARVLALFGERIQPEIRPVPSEDQELFSALVARRRQRQKIKTAEENRLGTAPSEAVRSDIEEHLSFLEERLAETECQIEEAVENSPLWREEEELLCSIAGVAEATAHVLMAELPELGEANRQEIAKLVGVAPLNCDSGQRRGQRTTWGGRASVRQALYMATLSATRHNERIQSFYDRLIERGKAKGARPRRRRW

SEQ ID NO: 302349 - protein, 386 aa, unidentified
MQASTVGTPTASRYGTIFITIELSQKSWLVTLHSPDQDKLSRHQLAGGDHAGLLALIDRIRDRAARALGGVPAVASCYEAGYDGFWLHRLLLAAGITNYVFDPASIAVDQRARRVKTDRIDGETMLRTLMAFLRGEPRVVRIVRVPSAEQEDARRASRERDRLVKEQTAHTNRIKALLRLLGMAIGNPRRRDWLSWLATQRDWQGQAVPPQMLGEIRHEHARLMLVRERLDALAKTPAQADPTPAAAQMIERSELLLRLKCLGPAFATTLTNEVFYKDFRNRREVASYFGLTPSPWRSGGIDRDQGISKAGNPRARCAAIELAWLWLRHQPDSKLTQEYRRRTLDAGKRIKRVAIVALARKLVVALWRYLTTGLVPEGAVLKAVKM

SEQ ID NO: 302350 - protein, 290 aa, unidentified
MAKVRSWAGLDVHANKVLVCVVDGDSGEMTIHRLPGDTAKVAGFCGGLPGPTRVAYEAGPTGFGLARALAAAGVGCVVAAPGKIERPAQDRVKTDARDAQRLVRLLMIDGLHAVRVPTGAEEALRDLVRAREDVRGDLMRARHRMSKLLLRHDVRYDGTARNWTASHRQWLSALRLGEHGAQATLLDYLGAIDALVIRRDQLEVTIAELIPSSPWAGDIARLRCLRGIDTLSAVGLCAEISDFARFEHPKQLMSYVGLVPSEHSSGDRRRQGQITRSGSRHARQLLVEAA

SEQ ID NO: 302351 - protein, 356 aa, unidentified
MAVYVGIDIHKKYCQAALMDESGRIQRELRFDNTKDGASGLVNLARSIDPQVKAVVEPSANYWIKIYDRLEDEGVEVKLSNPSRTKAIAEARAKTDKLDAKTLAYLLRGELVAESYVPSKKNRERRSLIRHRASLMRMRTEIKNRIHALLDKYDLTYEYTDLFGKEGLEWLHNLTLPPTDKQILQSNLQILEALTAEIQNADIQIAKDAVNEEQAKLLMTMPGVDYYAAMILLSEIGDVKRFASPEKLASWVGLAPQVHQSGETQWTGHITKKGSRRARWILGQCAQSARQHDPKMRAFYMRIEQKHGSSKAVVAVARKMLSIMHVMLTRNEPYHGENRQLTEQKHKRLDRIANMA

SEQ ID NO: 302352 - protein, 424 aa, unidentified
MRKSQYRSVSVKKVDVQRAILSPGGPLVLGIDVAKESFFASVMGQNQKVLVTVRWKHPVEHREFIQFVSRLREISPVEAVMEPSGVYGDAVRYALLQSGVSVFRVNPKQSHDAAEVYDGVPSLHDAKSAAIVAKLHLDGRSEPWPFRDELEQGLAAVVRQLEVFEKQFRQNRNRLEGLLARHWPELSRTLGLESVTLLELLIKFGCPEKVAHVPKEAQEFMQSVGGPFLSKEKILAVTKGAKKTVGVPTVSEERELIMLVASEARRSQKIVTTIRRKIELLVGEHESSARLQAVIGKTTSAVIVAAVGDPQKYTSSRAYEKALGLNVREKSSGKKKGGLHITKRGPGVSRLYLYLAALRLIQRDPVVRAWYAKKVGRQGGIMKSKAVVAVMRKLSRALWYVARGAPFDSSLLFDTTRLSLSEAL

SEQ ID NO: 302353 - protein, 392 aa, unidentified
MPELFVGIDVAKDTSSAQGIDRNGKGQFSLTFTMDSEGFTQLWEAITAHSKDLSEVIAAVESTACYHINLYSFLTAKGVATVVINPLLISNFTKLSLRKTKTDKKDAMSIAQFLLVHRETISQMSLSQELQDFRDIARERESVGNLLTAHRVEIKRLLQSTFPELERIGNLATKVMQDFIMAYPSARLVKMAKPKAIQKALQRKGVEDRLTYTAEDLIRAAKQSVATISPAKELILQGKIRTLQHLQERHEGLTKILTEYCKAAMLEDFEIVTSIDGISKGTATTFLAEIGCIGNYATYKKLIAFAGIDPTVYQSGKFEGKSRISKRGNRHLRRVIWLMTVNVIQHNGTFRAYFTKKKSEGQPSKKAIFATAHKLLRMIFAMLSQRTMYREA

SEQ ID NO: 302354 - protein, 355 aa, unidentified
MHTQIFKKLQELQLKADNGHIITIKGIGIDVAKAKLDITVIYSVADSNGADGSSNRDSLHTVISNNKESINHFQNELDQFLVPGSRNSFQIVFEPTSYYHKLLQQLLVSRGHNGVLCDTYKFKQYSRFLFGRNKNDRQDSHVLARLAMSGELGSGLGSELSRSKGLESQAKKLQLQTLKARIDHLKAVQITEICDIKYLQDSLESMQRQISAMQEVIEKYSIQIHSEEIMNLATTVPGISPKIASLLLSIMNPALTIKQWLAYLGLDPLNQQSRTRSTSPGLSGKGNRYLKSLIYYAGFGASVGKNKLFRPLYDKLKSRGRHHTEALLIIGKKILTIFRAVIRSGKPFDPAKLAI

SEQ ID NO: 302355 - protein, 463 aa, unidentified
MRIIGIDLAVKAEHRAVVVDERGRFVTPVLKVTTRAETLEQLLVRARDGTPRCKLCAVMEPTGMAWFPIAVYLIRHGVTAYLVNSQTVIDLRRVYHRHAKSDRIDTRVLAQLPLHNPENLHQLKLGGAVALACQRGCAQLDRWARQIAASKNRLKASLRFAWPGIETVFADLYALEARWFAEHWLDPQAVLRAGVSRLQQAWHERGLKPGDSGAWVPALVALAEDVLALYGPEPRYLDFELLQAEVQRDLALLAYLETQAEALRLKTVRPLYRQLQPDRLLETIPGVGQDGAAVYASFVGCIDRFDSARLFRGWSGMVPQSKESAEVESKGLPINHAGPRLIKKYAFLDAEVARQWDPQMAAIYYDQMVTKGKHHNQAICACATHLLDRVYVVLRDHKPYEVRDVDGQPVTVEEARTIIAEKYKVPEEVRRRTTKRYRQARRDQRAEKKQKREEARTGVRSKP

SEQ ID NO: 302356 - protein, 419 aa, unidentified
MKPQASKAFAAFIGLDWADAKHDVCLQAAGTEQREFRSLEHSPEEINAWVQTLRTRFNGQPVAVCLELTKGPIVSALRHYDFLVLFPVNPLTVAKYREAFTPSRAKDDPTDAELQVEILLKHRDRLMPLSPQSPTMRALVQLVEHRRRLVGDKVRLTNRLTSALKNYFPHVLRWFQDKDTAIFCDFLSRWPTLKAAQLARRTTLESFFRAHHVHSADVITTRIEAIKSAVALTTDEGVITPNALLVQALVAQLRVTLQVIADFDNAIAQRAQEHPDFSLFDALPGAGAVFAPRLLAAFGEQRERYASAEERQKYAGIAPVTERSGKKTWVHWRLQCPKFLRQTFVEWAAESTRHSFWAQVYYQQQRAKGKAHQAAVRALAFKWIRILYRCWQDRTPYDESVYLQALNRRSAPLLHNLAH

SEQ ID NO: 302357 - protein, 418 aa, unidentified
MYYVGIDIAKQFHIACVLDESNKLLVKNLRIESEISDFSLLNSELINITSDKSKFLIGMEATGLLFENLYIFLQGIGYNVVLLNPYQTTRFREMQTMKYVKNDNIDSQMIAALLKSAQYSKGYVSEDIYQAIKSLYRHKATLMQEMKSAKRQVSTTLAVVFPEFEQIIKDPFSVSGMALLNKYPTAKHYKGASGERILKLFRNIKGNNFNLQKANDLLDLAKLTIYQGNASDERAYVIHSNLRRISFLKEEIEACESQMFTLLNDVNKTIETSQENEVYISDLVDNLRSIDGVADKTIFAILSECGDISRFHSGQAFIGFLGLYPTLYQSGNSTKYGKLAKRGAKLAKLALYQASIACIRHNDELKKIYLDKKSGGRAPKECIIIVARKLAMIVYSIYKNNTPYNPARVFSTNASLSH

SEQ ID NO: 302358 - protein, 340 aa, unidentified
MNATTYGLDIAKTVFQLYWVDAETGEIYNRRFGRDQLIRFLAKRSPGRVALEACSGAHWWARRIASLGHRAMLIHAKYVRPFVQTNKTDAADAQAIWTAAQQPTMRSVAVKSEDQQAILSLHRIRSGLVATRTRQANQIRSLLGEYGLQFKFGRKALMNELKARLPEIEQSVPALVWRAFERQLTWLRQLDEDILVVERENLGWVKDHPDAQTLQDIDGVGPLTASATVAVMGSPSTFRSGRAFAASLGLVPKQAGTGGKVRLGGISKRGDPYLRKLLIHGARIVVTRSKHRPQWIEELLKRRPVNVAVVALANKMARTAWALLAHGQKYERYHVSVRAV

SEQ ID NO: 302359 - protein, 343 aa, unidentified
MRKYAALDVSMEQTAICVVDESGKKIIEGKVQTDPDTVTTWLAEKAGSLEKVGMETGPLAVWLWNELRARGLSIVCLDARHASAALAMMPNKTDRHDAAGLAQIVRTGWYKEVRIKSHAAYVVRALLSARDALVGIRGKIENEIRGLLKTFGVMFGRKVGGFTRRAEEIVAGELAASPEIKRIIEALLEARRAILDRIKLLDSRVRSVAKANATARLFMTAPGVGAVTALSVASAYDDPARFSRSSSAGAYLGLTPRRYESGEISRNGHISKRGSKLTRKHLFEAANALLTRDGKFSSLKAWGLRLAKIAGFKKAKVAVARKLAVILHAMWKARTPFRWSAAV

SEQ ID NO: 302360 - protein, 339 aa, unidentified
MQVTTVGLDLAKTIFHVHGVTEGGEVAFNRPLRRTQVLAFFERLSPCLIGIEACASSHHWARELSKLGHTVRLMPPMYVKPYVKRGKSDAVDAEAICEAVTRPTMRFVEIKSEDQQALLSLHRARDFVVRQRTQLINMVRSLAAEFGIAIARGVARAIDFAKGLIEGKQSGLPELAQDVLRVLSRQLVDLHNRLGWYEITMRIQARLSLQAQLLQTIPGVGPVTASAVAATIGSGHQFKSGREFAAWLGLTPRNHSSGGKERLGKITKMGDRYLRQLIVVGMTSRVRQVANHPERADPWLTKLLQRKPARVATVAMANKTARIMWAVLTRNEPYKPHAA

SEQ ID NO: 302361 - protein, 311 aa, unidentified
MNSEAYVGVDVSKVSLDVKVLPTNETLQISNDNGGINELIKRLTQIDPTLIVFESTGGLEMLAVSNLIENQLPVVVINPRQVRDFAKATGRLAKTDAIDADTIARFARDIRPEVRPIKDEHTQLLSALNARRRQIVDMLVAEKNRLSRAPKPNRKSIQKHIQWLERSLTDINKDIDKTIKKSPIWRENDRILQSFKGVGPVVSATLLGDLPELGALNRKKIANLVGVAPLNCDSGQFRGRRRIKGGRANVRRKLYMAAVASLRHNPLMKDFYDRLIEAGKPPKVALTACMRKILTILNAMMKDRTYWNAIW

SEQ ID NO: 302362 - protein, 404 aa, unidentified
MKGPIVSIDVSKGKSDYQAFKEMNVKYTGSRSIKHTKEGFDEIVSLVREMEKKLKTEVCVVYEATGVYHRVLKKVLEDNNIKQFIINPLLSAKTRKNDSLRSPKTDKLDPKSIAKTYYSHSLHNSHKPETIYHELRELSRYYEDILVHLRKDKVAFRAQLDVVFPGYDTLYDDLYGPVALAVIEKYPHPEMLQKKKINTVSKVIQSKTCHRQAMSDTMADKAIEYSKTIYSGCDKDDIEVLILQRFIKKLKEDMAEAERTIGEMIKLAQELPDFSIIKSIPGIGDNLAARIIAEPGDMTRFKKKNELVAFAGLDPRISESGQNDGDHMHITKKGNKRLRCLLYLAVTCSIRLKRDDNSIKDFYIKKKQQSNPMCSKAAKTACASKLVRIIYSMCKTGELYQYNK

SEQ ID NO: 302363 - protein, 349 aa, unidentified
MVTIGVDLHKRTHTLVVVEPTGRQLATRTVRATVAGHVEALRWAQGWAERAWALEDCRHLSRRFEADLLRAGEAVVRVAPKLMAGVRRTARTPGKSDPIDALAVARAALREPDLPVAQLDGVAREIQLLLDHRDDLVVERTRIQNRLRWHLHELDPGNEPAPRSLNRVRVLRALEDRLATAPGVVARLARDLVVRCGELTGKINELEHEIAVRVWELAPSLLALQGCGALTAAKLIGEVANIARFRSRAAFAMYNGTAPIPAWSGNSDHHRLNRGGNRQVNAALHRIAITQMQRPGRGRDYFEHRLAEHDTKREAMRALRRRISDEVYRRLCSDQLHAGSTTSGLETAA

SEQ ID NO: 302364 - protein, 428 aa, unidentified
MNDNDINRVERFRQFKNEIRGSDRFLIVGLDIGKSTHHAFLGTATGKTVKRGVRVENSARGFEHLLSMVQFYLDRDGFKDLVFGLEPTGVYHKPLAEFLIAHENLVVYVTNEAIKKNRALLDGRWDKNDTKDSANAADLVAQGKCQFYDLPNMQLRDLRALLALRQRLKKQLHSCRVRIRNNLVAQYFPELDNCWNQVQEENLAIVRWCLSPHKISQLSFEDFYQMVTTRNKGLRQSKRLSQIWEIAPYSIGCQAGIAMELEAQILVENIKIIQAQIASVEETMEDICLSFEEYQYLLSIPGFGPYVSAVVLAAIGTAQRFENTHQVLKFAGLDLSAQRSGKKSHSAVPVISKKGKATLRYALYQAALIASSLNAQFRAYFHQQLQGREREKGIRTKMRVKLAAKLLVIAWTLMKKKQAFDPSYMKAA

SEQ ID NO: 302365 - protein, 337 aa, unidentified
MSMYAGIDLHSTNSVVAVIDQSGKRLHRRRYPNDLPGILKSLDPYKGELDCVVVESTYNWYWLVDGLQDAGHRVRLAHPPGIAQYSGLKHGDDDSDAMHLAELARLGLVHEGLILAREERALRDLLRQRLRFVQQSVTLLHSIQSLCCRVTGKTLSANAFRALKMPEIERMFHDPIVRIGALARIRAWQSLQDEVDIVTRAVLKHQTDRPGLILLKSAPGIGRILGLTVLLETGPISRFASVGDYASYCRMVDSVRLSNGKKKGQGNRKCGNRYLCWAYIEAAHYALRHEPVRRWYQRKLAKSNLVKARKAVAHKIARGCYHVLHERAPFDMQRAFA

SEQ ID NO: 302366 - protein, 370 aa, unidentified
MSVRRILAKTINTDLEYEAIGIDLAKNCVSAALLTTDGEVVCIDRLDYSELEKSAQALSSTTFAMEPCTEMNYLVQKLEAWGHRCLVIGGKNVQNYVENHYSGQKTDLNDAQALAFLAQDTQLRTIKAKDVEQQKYASLTTLREQYIKQYRQTIVSLKGICQAWGLNISKGISGKARLKDLIENHAAFPEELKESLVDMVTHAQTAQKALNKITKTLELLAKNDKVCQLIQTIPGLGSICSCRLRATIGDIRRFKNPKDFPAYYGLVPRSIATGHNERKGKITHRGDRTMRSLMVQAAGSLVNMATKGKLKSKQLTKWILKKQKEKMPWGKLVCAVAAKLLRIVRAVLISNKPYNSKIAGVAKCSLPKGS

SEQ ID NO: 302367 - protein, 412 aa, unidentified
MEVLHDCGCGLDVHAKTVEACLITKGRKELRTFSTMTDELLRLADGLTSAGCTDVAMESTGVYWKPIFNVLEGLLRVILVNARHIKAVPGRKTDVRDCEWLADLVRHGWVKASFIPPLEIRELRELTRYRQTLVTEHTAVANRIQKLIESANIKLGQVASDVLGLSGRLMLRALAEGETDAGKLAELAQGKLRSKQAELRRALEGRLTQAQRWVLAEFLAWLEELEAALTRVETRIGEAVAACPDPFVQEAVELLDTIPGVGERTAQTIVAEIGVDMGRFPSAKHLASWAGVCPGNHESAGKRKSGQPTKGNKSLRTVLVEAAWAATHAKGTFLQAKYQRLVKRMPKQKALGAVAHRLLVISYHLLSRRVPYAELGSDYVDRQHLERQRQRLVERLEGLGVTVTIEKVVEAA

SEQ ID NO: 302368 - protein, 327 aa, unidentified
MEQIKRVGVDTSKHIFTVHGVDEKDRPVLRRNLRRSAFLEFFAKLAPTKIAMEACAASHHWGRELQALGHQVVLIPPQYVKPFVKRGKNDRNDAEAISEAAARPGMANVAVKSAEQQANAMLLSVRELLSRQRTQLVNALRGHAAEFGLVAAKGDKGVTELLAAAQASLPTPAVEALTLLGRQIEHVEAELAQADLKLQAQHRALPASRLLETIPGVGWMTALTLTLRIDASQFESGRHLAAWLGLVPKENSTGGKHRLGAISRAGDERLRSLLVLGATAVIRHAKPGKTSPWLLSLLARKPRKLAAVALANKLARVVWASDQGARA

SEQ ID NO: 302369 - protein, 343 aa, unidentified
MKLSRVGVDLAKNVYQLHGVDRFGKTMLKRRLKRHQWMKVLLDKAEPGCEIGMEACAGAHHWGRELQSRGYTVKLIPPQFVKPYVKSNKSDAKDAEAICEAMSRPNMRFVTVKRVEQQDIQATHRVRAELITHRTAKANQIRGLVAEYGLVAPKYLSSLRTAIPCWLEDAENGLTGNFRALLQGVWTDLLLLDDRVGEMDKLIKRLAENNEDCVRLQQLRGIGPMIATALVAAVGDARQYRKGRQMAAAIGITPKQHSSGDRERLLGISKRGDVYLRTLMIHGARAVVARAKYKDDRLSRWVTNIANKKHPNVAAVALANKTARMAWAMLRHETDYDPDFAIS

SEQ ID NO: 302370 - protein, 348 aa, unidentified
MKFYSKQHQYYCGIDLHARKMYVCVINSKGEVKVHKNIKTDPDELLSLITTFLDDIIIGVECVFCWYWLADFCAQHNIPFTLGHALYMKAIHGSKTKNDKIDSYKIALLLKGGNFPTAYPYPQEWRSTRDLLRRRMYISRRCGELVAHIQNTNTQYNLPQMKKKLTRKFNHDGVAERFDDPAVRKSVEVNLEMIQALNGVMRKLEWHLEKTARQHDYHSLYLLRSIPGVGQILALVILYEVHDIKRFPRVQDFSSYARLIRPTKVSDGKWAGNSNKKIGNHHLKWAIKEAAILMLRDSQQAKYYVSKLTRKYNKGKALGIYTHKLGRAIYYLLKNKEAFDIDKFFAVA

SEQ ID NO: 302371 - protein, 402 aa, unidentified
MLLVGIDWAERHHDVCVMAADGSVLARERITDGVAGVARLHELIASWAEEPAEVVIGIETDRGLLVGALVAAGYQVVAVNPLAASRYRERHTISRAKSDRGDARMLADLVRTDRHHHRPAKGDSGLAEAVKVLARGHQQLVWARQRQANLVRSALRAFYPAAVAAFGGDPGGRDAVAVLGLAPTPELGRRLSHGELVAALRGAGRRRQVEARAAAIQAALASQQLEAPPVVAAAYGQVVAAAVAVIASLSEQLARLEDALTSAFGAHRDAGIVHSQPGLGMVLAARVLAEFGDDPDRYVSAKARKAYAGTAPITRASGLRQVVLARAVGNRRLSTACHLWAFAALTGSPGARRYYDAHRARGATHRQALRALANRLVGILHGCLRHRQLYDEQLAWPTAAAA

SEQ ID NO: 302372 - protein, 383 aa, unidentified
MPRPMKELAEVEHRVATLYASLELSQSAWLVTSLSPGSVTMSKHLIPAGDGPGLLSLLARLRTKAEQVAGAPVGIVVIQEAGLDGFWVHRLLEANRIESHVVDAASIAVPRRRRRAKTDAIDGETLLRTLRAWKRGEPRVCAIVAPPSPEQEDQRRISRERAILLRERVRHVNRIKGLLASQGITDFEPLHKDRRIRLDALRTGDGRPLPPRPKAELLREIDLIELLLRQITEVETERDSAAEFDTAQKSPIALLARLRGIGSQIASVLYFEGLYRHFGNRREVAAYAGLAPTPWRSGTIDREQGISKAGNPRLRHIMVELAWLWVRHQPDSALTRRFRERVGAETGRVRRIAIVALARKLLIALWRYVNLGEVPEGAVLKPV

SEQ ID NO: 302373 - protein, 324 aa, unidentified
MFFLGIDVSKAKLDCALLGSDANKRKTKVVPNSIAGVQTLLQWCAKQGAEPAQLHAVLEPTGQYHEQAATALHDASVSVSLVNPAQVRDFAGALAVRSKTDGIDSYVLARYGQALKPGLWRPAPLHVRQLRALLARRDALAKDLQRELNRQEKTQFSDPPVLVEGSIAKTIAFLREEIKRLDHAINDHIDRHPDLKEDRELLTSIPGIGDRAGNSILSIMHNRHIESAEGLASYLGVVPVQRQSGTSLNSRPRLSKTGPSTVRATLYMAAIVSKRFNPHVGALYARLLAARKSKMAALGAAMRKLVHLCFGVLKTRTPYRPDYA

SEQ ID NO: 302374 - protein, 353 aa, unidentified
MKTYYVGMDVHRASIMIVVLNGAGKVVMQSVIETGAERVRGYLKQLRGKVYVTFEEGTQANWLHDIVRPLVTEVLVCDPRHNKLLQSGNKSDRVDAHKLAELLRNGALKAVYHGDHGMRTLKELVRSYDCLVSDTTRVMNRLKAIYRGRAIGCAGHEIYRQDRREQWLEKLTERGAKQRASFLYQQLAALRPLRHEAKRMMVQEARRQTAYRWLMSVPQFGSVSVAQLLAIVSTPHRFRSKRQFWTYVGLAVVTRTTADHEVVNGVLRRSKRPLSTRGLNRNHNHLLKRVFKNAATGACHSGPFKPAYDLRLAQGMVPSLARLTVARQLAATTLAVWKRGEQFNPARMKQQAV

SEQ ID NO: 302375 - protein, 336 aa, unidentified
MEYVGIDLHKKGFTACVMDQAGLVSQTEGYKNNSGDLESLLLGLRKPSFVIEATQNWMWMVRILQDKSLPVTLAHPLRTKAIASARIKTDELDAKTLAHLLRADLVPMAYIPTIKEQESRDIARARCQFVKQQTWIKNQIHSLLTKENLIPEASDLFGKKGKVWLNSQNLTDNNKVILKEFLALLKDVKKRISNLDTSIEKLAKENPRVEILKSIPGFGTTTAFVLAAEVGNPERFPSGKKMAAYLGLVPSLYQSGNTKRLGSITKLGSPYARWVLVQAAHRLVRADVNTKLFYQTLSVRRGKKKAIVAVARKLAELSWRLLVDNRLYEVRMPIRD

SEQ ID NO: 302376 - protein, 341 aa, unidentified
MTQVSTIGLDLAKNTFQAHGADAAGNAVFRKKLRRDQVLAFFAAHEPCVVAMEACPGAHHWGREIGNLGHTVKMIAPAYVKPFVKRQKNDAADAEAICEAAQRPTMRFVAVKSEAKQASAAIFRSRDVLVGQRTQLINAIRGHLSEYGLIAPQGPSHVERLIAAIEDPASAVPKAVRACLAVLVSALRHLRKQIEVLDAEISARAKTDETARRLMSVPGIGPLIATALEALAPPADTFNSGRDFAAWVGLTPVQRSTGGKERLGRTSRMGERTLRRLLIIGASGVVRWAKRKGIAADTWLGRMLARKPPMLVIVALANKTARVAWALLTKGGIYRAPAVSV

SEQ ID NO: 302377 - protein, 418 aa, unidentified
MDKELIARLSRRYLALDIHKHYSIVAGVNFEGEVVLEPVRVEHADLESWLKKHIQPSDYVVIESTTNAWFVYDLLEPLAEKVLVANPIKMKQIAQARVKTDIRDTLILARMLAANMIPAIWVPPVHVRNLRYLLSQRRQLIGMHTQTVNRMHSVAHRHHLSHPKGKRFNEKNTTWQQADELSDSEKFQLELDMSTKQHLDEQAGKITKKLARMSHEQPWAESMLYLMQLPGFGVITGMTILGAIGEITRFEGFKKLSSYSGLIPGLEQSGTKNKGKSITKEGRKDLRWAMVEVAQRAVKSDPLWGRRFQELCRRMHRNQAIVVIAHRLLELVWFVLTRKQSYRHFSDERIAYKYLTWAWQVNETDRDGLTRQQFARYYLMRLGIGRGLEKVALDPKHPRRLASEAELLALRPELIQIE

SEQ ID NO: 302378 - protein, 413 aa, unidentified
MEVIHVRCAGMDVSKKDAKVCVRHAGVGRRKTVETVTTWSSMTGQILALREHLIAEKVTCVVMEATGDYWKPFYYLLQDMPGVDEVMLVNARHVKTLPGRKSDVADATWLAQLGAHGLVRGSFVPPEPIRQLRDLTRARTAITRERGREVQRLEKLLEDAGIKLSAVASDIMGVSGRAMLEALIAGERDPAGLADRAKRRLRSKIPELTEALAGRFGEHHAFLARMHLDLIDQHTVAINALTRRIEVMIEPFQGFHDLICTIPGISTITADIIVAETGADMSRFPTAKHLASWAGTTPGNNESAGKVKSSRTRPGNPYLQGALGVAAMACSQNRQTYLGARYRRIASRRGPMKANVAIQHSMLIAIWHMGTTGTVYEDPGAEFFARLHPDRTKKRAIHQLESMGYRVTLDHAS

SEQ ID NO: 302379 - protein, 427 aa, unidentified
MTGVETGGQEPQFAAFVGIDWADQKHVWCLQAGDSAKRESGELEHTPEAVEAWVGQLCQRFGNRPIAVALEQSRGALVFMLAKYEPLHLFPVPSTTSASMRKALYPSGSKDDPRDADVLLDLLLQHRDKLRRLSPDTEATRRVQNLVEERRKLVDEKTEQTNRLTSHLKIYFPQILGWFEHLDTELVCALLERWPTLEELQKVPPAKLRTFFGKHHCRDQELIERRILAIRQSIPAIRDRAVIEAKSTVVKVIVQLIRTLLEGIADLDERIEEVAAAHPDFFIFESLPGAGAVLAPRLLAAFGSQRDRYASADEVQKYSGIAPVMEKSGKKQWIHFRWACPKFLRQSFHEWAGHSIAYSVWARSYYQRQRNKGQDHHAAVRALAFKWIRVVFRCWKDRVVYDESKYLAALARRGSPLAAGAAIAKTV

SEQ ID NO: 302380 - protein, 418 aa, unidentified
MNSDPESIPIQRFIAIDIHKHYVLLGGMNHHKEWVLRTRKVRMSRFPEWAQKNLTLSDAVVIESTSNAWEIYDLIAPLVSKALVANPLKVGEIAGAKVKTDKLDVERLLTLLIADIVPEVWVPPHHVRDLRSLISHRWRIHKQIAMTKNRLHSFIHRFNLIPPEGPLFSDTNRSWWLEQNFSPIVRLQIQQDLATLSHLSDLKEAVHQELTRLSNSHPWASDMVFLMQIPGLGVVLSMTVLSAIGDISRFAHAKNLVGYAGLGAGVHDSGKKHQGKGITKRGRKELRWAMVEVAWGAVRSDPHWKSQYENLKLRGKHANEAIVAIARKLLVSIWHVLTKREPHRYSSEEDLAYKMLIWSQRMDEDALRGMTRQQFAKYGLLRLGAGHDLTRIFRNGKPRRIAPADEVIALLPQLILLE

SEQ ID NO: 302381 - protein, 315 aa, unidentified
MSDTVAVFVGIDVAKDHLDVHAVPTDATFRVAHDAAGLATLCERLVAWAPTLIVLEATGGHEVPVVAALASAGLPVVIVNPRQVRDYARATGQLAKTDALDARILAKFAAAIRPEVRPLPDTQTRALDEAVTRRRQLVEMLGAEENRRRLVRDRRVQGQIEAHITWLKRAIKELDRELQATIRASPLWRDAEAVLRSTPGVGPVMTTTLLAELPELGRLSRHKIATLVGVAPLNRDSGQFRGRRMISGGRASVRRVLYMATLSAIRRNPVIKTFYDRLCANGHPKKVACIAAMRKLLTILNAMLRDGRRWHAQIA

SEQ ID NO: 302382 - protein, 347 aa, unidentified
MKILALDLGKYKTVACDYERETGKHRFKTSFTTAAALEQLVKAVKPDRVVIEVCNIAGWVCDRLRAMGIEVQVANTNDDAWRWRKVKKKNDRRDALKAAQLSAVNQIKEVYIPRIEVRQWRALIAFRQQLVRRRGRMKNHIRDLLVSEGQLLPRGNRCWTRLGVAHLEALAQPLGELSLGELWRGQLAIELRQLKEVQQEITAVEEKLDVIATADPRIQLLRTIPGVGPRLAEAIVALIDEPARFQHAREVSAYIGMVPKELDSGETVRRGPITKHGSRLVRSLLVEVAWSGLRYNQWVRETYQRISGGKKSRKKIAIVAVGRRLLVRCWAMLRDGTSWRMPLSAAA

SEQ ID NO: 302383 - protein, 419 aa, unidentified
MSFKIFKFNCCGLDVHKTWIYACIGITDSNNRTEYKQARFSSFSKGLHQLCVWLAKYNCNDVCMESTGKYWIPVFNILEQHKIRVTLSHPKYTKPMKGNKTDRKDAKWICDLYMCGMVKPSFIPPADIRELRDLVRYRFKLTCMITGEKNRAQNCLTVSNLKLDDVFSDVFGKSSRSITEQILQHPGEKFDVSPFVDSRCKTPIEEIQAAVDGNISKEQDVKLRQCLDHIDELQKHISEVEQEILRLSDKYEAALNLIRTVPGFDKNPMTAIQVLSEIGGDMPVFLTEKHLVSWAGCCPRNDKSDRKIKSTRISCTGSYFKPVLVQIANALIKSKKHFEFTTRYKRIKTRRGHKKAIIARCRMILTAIWHILTDLKPYTSDGFLESRPVKKEKVLTTSQALNLLRQRGYLIKDEPSPVS

SEQ ID NO: 302384 - protein, 461 aa, unidentified
MTRYGRKKKGVPQKGGSFPIINNNAAGIDIGSEEHWVAVPEDRDENPVRPFGCFTADLHAMARWLKKCGVTTVAMESTGVYWIPPFQILEEYGFEVKLVNARHVKNVPGRKSDISDCQWLQRLHTYGLLSGSFRPDDQICVLRSYWRHRANLVRYAADHIQHMQKALTQMNLHLHKVLVSVTGVTGMNIIRAIIAVERDPRRLALMREPGVKNTSEVIAKALEGDYRQEHLFALKQAVELYDFYHRQIEACDSEMERYLHTIEAKIDPVQNPLPKQKKRGKKPIGNQSFIDLRTELYRISGVDFTQIPGLDALTVQTILSEIGLDPAKFPTEKRFVSWLGLCPNNRITGGEVKSTKTRKTVNRAANAFRMGAQTLANSNVALGGFYRRIRSRLGSPKAITATAHKLARIFYRMWTTGQSYIDLGKDYYENRYRERVLRNITKRAKELGYDAVLQPIGQGVV

SEQ ID NO: 302385 - protein, 353 aa, unidentified
MTSLTDLREVVDVVIGVDTHVHTHSAAVIDSATGGVLGEITVPATAAGYAELVEFAGEYPTLRAWAIEGTGGHGAGLTRHLLESSELVVELDRPKRSARRNGAKSDPLDAIRAAREAMARPRLGTPRSGGERQALSVLLTARRSAINASTEAQLQVFSLVVAAPEPIRVRFRGQKLAAMLNTAATLRVQSAWDVETTSTVVALRTLARRAHAMLKEARELQKAIFAIIRGWRPDLLEEFGVGPIVAATVLCAWSHPGRVHSEAAFAMLAGVAPIPANSGQITTRYRLNRYGDRHLNAALHTVVQSRIQYQPATRDYVARRTAEGKTSREIKRCLARYVARDLYRLLETGAAAA

SEQ ID NO: 302386 - protein, 422 aa, unidentified
MVMEEITEEPGALIERAAALDIGKATLTACIRVPHEDKPGARRQEVRTYATLTPSLLELRDWLVCQGVTLVVMEATSAYWKPPFYLLEDDIECWVVNARDVKNVPGRPKTDKLDSVWLCKLAERGMLRASFIPSRPQRQLRDLTRYRRTLTHERTREKQRAEKLLEDAQIKLSSVISDIFGKSGRAMLDALIAGQRNPRALAALACKNMRAKTSVLQEALTGHFTDHHAFMLGMMLARIDALTTQIDTLTARIGQAIAPFAAQVAQLDEIPGIGITAAQDLLAEIGTDMSRFPDAGHLVSWAKFAPRARQSAGRSKAASTGKGNPWLGGTLGEAAASAARTKTFLASRYRRLARRRGKQRALVGIGNSILTIIWHLLCDPAAHFTDLGPDWHDRLTPLRRKRQLITELERLSGKKVTLHDAA

SEQ ID NO: 302387 - protein, 414 aa, unidentified
MSFIGLDVHKKFINGAVIDAPSDYAKRTFTIPTDKESITRFASSLSPTDSLALESTTHAFPIANLLRNNGNGASVVVSNPMKTKVINESKNKSDSVDALALANLLASGYLPVIWEPDSETESLRRITSYAQAVGRDKTAVKNRIHSILHRNLIVYSQFSDLFGKKGLGFLASLPLPENERIQLDEELDHLDYLDNKFLNIKKRMAKVSVVDARIRRLMTIPGVDYFIAFSLKAAIGNDISRFCSPKKLVGYFGLCSSVYQSAGKCYTGRITKRGRSHARWVLVQAAQSVVKQPSPLRAFFLRLKQKKGRNKAIVAVASKLTRIIWHMLAHGEDYHYSPPLRTKEKLAKLRIIATGEKVKSGPKPGAVSAGGRPAYLKARKNDKISGKAAEAGYVEFIKERYFSKKSSSRSKLLS

SEQ ID NO: 302388 - protein, 326 aa, unidentified
MENSNQNQNHLWIIGIDVSKESLDVWLISNTDGQLYNGKFNNNLSGFRNFKAWCKIHACDCDYQSLCCLEHTGLYTRQLVHYLLSRQVSVWLESSLHTKRSMGLVRGKSDSIDAQRIARFAHAHHTEAKPLNLSALTLDKLKDLNANRNRLMKSIQSLRVSTNELKLVDPESGKTIERVNREAIRGLEKSLHAVEEKIAEFIQADENLNKQFELVTTVKGVGKVMAVLLLIYTQGFTKIVDGRKLACYSGVAPFEYRSGTNITGRTGVSKFANSELKRVLHMAAISSVQHNPELKLYYKRKVAEGKSKMAVINAVRKNCFTELRLL

SEQ ID NO: 302389 - protein, 457 aa, unidentified
MSKRSKKAKSRSFKASSLPKHLQHINLNAAGIDIGSERHMVAVPEGRDTVSVREFGTFTADLEALAAWLKQCGVTTVAMESTGVYWIPLFELLERRGFEVKLVDARHVKNVSGRKSDVLDCQWLQQLHTYGLLAGAFRPPDEVCVLRSYLRQREMLIQASSMHIQHMQKALQQMNLLLHNVVSDITGVTGMKIIKAILAGERDPRVLARNRDERCKNTTTTIAKSLVGNYREEHLFALRQAVDLYEIYQTKIADCNQTIIKQVEKQPDISDDDPPTPEHQVPARDRIRDGVDVRDLLFKKSGVDLFAIPGLAADTLLTLASEVGFDMTPWKTEKHFASWLGLCPGTKISGGKVLAKKTKRNPNRATQAFRMAAASLYRSQTALGAFYRRIKSRAGGKQAVTATAHKIARIYYAMLTQGATYVELGQQAYEQRYKERRIDHLKVQAKSLGFQLVPCAT

SEQ ID NO: 302390 - protein, 338 aa, unidentified
MKVYVGMDLHATNTYVGMVDEENEVLHKQRFRNELPLILAGLDPFRKDIQGVVVESTFNWYWLVDGLMAEGYRVHLANVSAIKQYEGLKQIDDKRSAFWLANLLRLGILPTGYIYPKEERPTRDLLRKRLHLVRHRTSHILSVKNILARNLGLRMRSEDVKKLEDPEVKRFFPDKEMQTAVLASVGLIRHLEVEISGIERMITKKLKIRKEFAKLMTVPGIGKILTFTIMLEVGNIRRFPTVGDYSSYCRCVKSTRTSAGKIIGYGNRKNGNKYLSWAYIEAAQAARRFHETVRSYYEKKMAKTNRIVAIKALSHKLTRASYYVMRDQVDYDPGRLFR

SEQ ID NO: 302391 - protein, 388 aa, unidentified
MNITTDQPEAPTAIRTELGAIFVSLELSRSSWLVTSLSPSGGEKMSKHAVRGGDVSRLLERFLQLREKARARTGKVFPLIVIQEAGIDGFWIDRVLQNEGIESHVVDPASIATSRRRRRAKTDKIDGETLVRSLLAYKRGEPRVCSMVKAPTPEEEDQRRLCRERKVLTAERVLHVNRIKGLLFCQGICGYEPLRRDRRDRLEELQTGDGRPLPPHLKAQVERELDRLELLLKQIKTVEGERDALLAAAITSMPAPAAMLLDIKGIGPEFAAVLWSEGLFRHFDNRRQVAAYAGLAPTPWQSGAIDREQGVSKAGNPRLRTTLIQLAWLWLRNQPQSALTIWFHERVLRNGGRLRKTTIVALARKLLVALWKYVTTGVVIEGATMKAP

SEQ ID NO: 302392 - protein, 369 aa, unidentified
MSDVITYVGIDAHKKDLFIAMLIGPQAKPVAWTVANEPNAVRRLAKKLEREAPGPVQAFYEAGRCGYALQRQLTTPRVQCDVVAPGLIPQKPGERVKTNRRDARKLVELGRAGLLTTVRPPTPEEEAVRDLCRARDDAREDLQRCRHRLGKLLLRRGLHYLVGRNWTKAHRRWVDSLKWPHEAERVVVDDYLLAIDQTEARVKELDQQLTAVAATEPYRERVAWLRCFRGIDTLSAMLILAELHDFRRFASPRALMAYVGLVPGEHSSGEKHRRGRITRTGNALVRRLLVEAGWHYQHRPGVGVALARRRQGQPARIIAIADKAQQRLCRRFQYLVVLNKPRPTIVVAIARELVGFLWAALQPALVVAN

SEQ ID NO: 302393 - protein, 405 aa, unidentified
MNAVGIDVSKGKSMVTILRPFGEIVSRPHEIQHTTDQVDELVQTIRSLEGETRVVMEYTGRYYEPMARWLCDAGLFVSVVNPKLIKDFDNDSLRKVKTDKADSEKIARYTLDKWTKLRKYGHTDGLRSQLKTMNRQFVCYMKTRTAMKNNLISLLDQTFPGANTFFDTPARSDGSQKWVDFVYTYWHVDRIRKMSLSAFADHYKNWCKRHDYMYQPDKPTKIYKSIKSIIPVLPQDDVTKYIIRQAVEQVNSASAAVETLRTRMQEVASQLPEYAAVIEMAGVGPTLGPQLIAEIGDVTRFSHKGALTAFAGLDPGRNDSGAYSQKSVPTSKRGSSSLRRTLYLIMTVLIAKRLQGDPVYDFLDKKRAQGKPYFVYMTAGANKFLRVYYGRVKEYLGSISNIETE

SEQ ID NO: 302394 - protein, 346 aa, unidentified
MKILALDLGKYKTVGCAYESESGAHEFQRTFTTPAALKRLVQDVKPDRVVIEVCSIAGWVCDLMGQLGMAVQVANTSDDAWRWRKVKQKDDRRDALKAARLSAVNQLREVYIPPSAVRQWRALISYRQHLVGRRTKIKNHIRDLLVREGQLLPRGSRCWTKLGQEQLNRMARPLAEVEAAELWRGELWEELQQLQMIQERVASVEEKLNAIGGADKRVQLLRTIPGVGPRLSEAIVALLDQPQRFRKASQISGYIGMVPKAFDSGESERRGRITRQGNRLVRSLLIEVAWVGLRHNGWLRQTYQRLCAGKKARKKIAIVAVGRKLLVRCWAMLRDNCPWSWQPQIT

SEQ ID NO: 302395 - protein, 380 aa, unidentified
MATTRTVLQRKLTAEPGDLYMSFELGDKHWQISIGNDRHGLSRYTVGAGHTDEVADCIVKAAARFRIGGNARVHSCYEAGRDGWWLHRWLTTLGVDNIVVDPASIEVNRRARRAKTDRLDADKLLAMLIRHHAGERLWSVLREPSPEEEDARRTHRELQRLAHERIAHTNRITSLLVLHNVRTRVTIGGRDWPAWWQQHRELVPPALRAELEREAVRLQLVKEQVRSIEAARTKQLVEGKQPLVVQLTRLRAIGAKGAWVLVKEVFGWRHFANRRELASSLGLVPTPYASGDCDIEQGISKAGNRRARTLLVELAWGWLRLQPGSALTRWFNRRFAGAGKRMRRVGIVALARRLAIALWRYLQDGEIPAGARLKPASPRA

SEQ ID NO: 302396 - protein, 316 aa, unidentified
MKPQVFIGLDVSKQHLDVAVRPQGRHFVTPNDDRGIKQLVKRLAALKPQLIVLEASGGYEFLVTAALAEVQLPVALVNPQAVRKFAGATGKLAKTDKIDAQVLAHFAEALRPEPRPLPDQAQQMLKAALQRRLQVVKMIGQEKNRLEKTFMPAVRQDIQAHLAWLQKRLKELDRDLNDQIRQSPLWRDRDRLLRTIPGIGPIVSRAVIAQLPEAGALPGKKAVALVGVAPYNRDSGRFRGKRMIRGGRSYLRRMLYMAAVVASRWNPVIRAFYQRLLAAGKPKKLALTACMRKLVLILNAMVKNNQPWNQFITQVP

SEQ ID NO: 302397 - protein, 344 aa, unidentified
MDHFAGMDVSVKETSVCILDDAGKIVKEVKVASEPPALLMVLGNPAYRFKRIGLEAGPLSQWLFSALAEAELPVICVETRHMQAVLKAQINKTDRNDARGIAQMMRAGLYRPVHVKTLRSQKLRMLLTHRKLLQSKAIAIENDLRGTLRNFGLKVGMVGKVRFEARIQELVKNQPDLAVLVEPLLIVRRALREQIVILHRRLLAIVRDDEVCRRLMTTPGVGPVVALTYRATVDVPARFRKSKSVGAVFGLTSSRYQSGEIDWNGKISRCGDEMMRVMLYEAAQSMLRSKKWSWLKAWAMQIARRRGMKKAIVALARRLAVIMHRIWVDGTEFRWTREQATTAA

SEQ ID NO: 302398 - protein, 347 aa, unidentified
MDYYAGIDVSLEASSVCVVDASGKIIREAKVLSEPENLIGWFRDLGLEMTRIGLEAGPLSQWLYAAMKEEGLAVELLETRHVHDAFKAMPVKSDRNDARGIAQLMRLGWFRPVHCKSMPAQEVRALLTARKLVQSKLFDIEMSLRGILRGFGLKIGRTTPNRFGLRVEELVAGHPTLEIIGKALLAAHEVLLREFNGFEKRVRQQARQDKRVRLVMSAPGVGPIVGLTYVAAVDDPARFKSSKQVGPHFGLTPKRYQSGETDYSGRVSKVGDASVRTALYEAANAILTRPLKGATALKSWGMKLAKRAGMAKAKVALARKLGVIMHRMWVDGTKFADKGISPKAETA

SEQ ID NO: 302399 - protein, 352 aa, unidentified
MTKLLPLRQCLGIDVSKDHLHVSFSNQESDQRIRVIASSKFKNNSPGLNQLIVWIKKHRHGEADLVLVMEATGVYHEQAAYFLHEKGFKVSVLLPNKAKAFARSLNAKSKTDDIDAKILAQMGLERKLEQWKPASENMLKIKRLCRERVALQQHKTAAMNQSHACKSAHLPEKSSQTRWKQLIRFLNKQIKEVEQNIKQIVLKDPVLKGKVEKICVVKGLGLISVISIIAETDGFALFRNKAQLISFSGYDVVQRESGTSVKGVTRISKKGNSHIRRALHFPALVVVKHEKQFQAFFQRTLEKSFIKMKAYVAVQRKILVLIYTLYKNNSDYDPQYLFLQQPQKNRQEPCPA

SEQ ID NO: 302400 - protein, 421 aa, unidentified
MLESTQDNDQVVERIAALDIGKEEVVACVRVPDPQNPGRRLQEVTTHSTMTRSLLALCERLIQLGVTRVVMEATSDYWKSPFYLLEAAGLQPWLVNARDVKHLPGRPKTDKIDSVWLCKVAERGMLRPSFVPPAPIRMLRDLTRYRIDLVGVQTAEKQRVEKLLEDAGIKLSVVASDIFGVSGRDMMAALIAGERDPAVLAQLARARMRVKIGDLQESFHGWFSDHHAFLLAKMLARIDAIDADITDVETRIEAQIAPFAEAADRLDAVPGVGPAIAQVIIAEIGVDMTRFPTAAHLASWAKFSPIISESAGKKKGKNATGHGNRYLARALGQAAVTAGKTDTFLGERYRRIARRRGKKRAIVAVGRSILTITWHLLADPGTTFIDLGAQHYDTRGGTQRAIRNHVRHLEALGYTVTLHAA

SEQ ID NO: 302401 - protein, 322 aa, unidentified
MQGKVPPERSATRVYVGIDVCKARLDVYIHPVGQRLTFSNESDGIKKLKRSLKAHEGALVVMEATGKLHRAAHRSLHAGGFAVAVVNPLRSRLFAQALGALAKTDAVDARMLAILGESLAPAPTEPASDRVETLQELVAGRDAAVAARTALRNQLGASRSRVMAQEIQRQLHAVATAIANLDVEIGRLIADDPVLARRLAVLSSIPGVGAVTASALIAGLAEIGSLSAKQAAMIVGLAPIACDTGEHVGARHIRGGRGHVRRALYMAAVSAARCNPALKIFYDRLIAAGKKAKVALTAVMRKLVVLANTLVSENRQWSPNHT

SEQ ID NO: 302402 - protein, 352 aa, unidentified
MKRYKEALPKCKQIFVGIDLHRIQWHVTIRTEDVELSSSSIPGNWEALEKVLNRYRGSTLQIVYEAGYFGFWLHDHVVEYGAECIVTPPSLVPQEYGNHVKTDRRDSRKLAHLLAKGLLKRVWVPSAEERCQRQVIRRRRQLIGDRVRTQNRIKAELRFFGIEIAEPRGAWTKAYVENLHRLRFGNRWMQESFQRLLEEFQFLNQQIKRQTDLLRELAKTPEYLERVQILQSVPGIGLIAAMELLLELQDVERFRRADQLAAYVGLTPSQYSSANKIRMGRITCIGKNSLRATMVEVAWRLIAKDPAMREKYEQIKARAGGKRAIIAIARMTLLRTRRMLLDRRPYVIGLAA

SEQ ID NO: 302403 - protein, 324 aa, unidentified
MRQTLGIDVAKAKLDVALLLPTGKFRSKIVQNSTEGLSTLLKWLEKYDASPELHVCMEATGIYWEVAAEYLSEAGYLVSVVNPAQIKAYGTARLVRTKTDKVDARLIAEFCSTHHPEPWQEPSPAIKELRALVARREALIKMRTQECNRLAVSRTTVQADIEAHLDYLEQAITEIDAKIRKRIDDDPELKNQGSLLASIPGLGDKTIPILLAYYGGPLRFTKAKQAAAFAGLDPRQHESGSSVRGKPRLSKVGHTFLRKALYMPAMVATTRTAWGRAFKERLDAAGKPPMLILGAMMRKLIHVAYGVLKSGRAFDPGLHSTCNR

SEQ ID NO: 302404 - protein, 339 aa, unidentified
MKLYAGIDLHSSNNYVGIIDGKDNRLYQKRLPNRLENILPALEPFKDNLEGIVVESTYNWYWLVDGLQEQGYKVHLANPSAIKQYEGLKHTDDKWDAFWLAHMERLGILPEGYIYPKGERHVRDALRRRLLFVRHRTSHILSLQSAITRNLGIKMPVKEIKKLNEADADQLFDNSFLVLTARNQISAIGFLSDRIKEIEKEVKSHVKIKPEFESLLTMPGIGDILGLTIMLEVGDIGRFPKVGNYSSYCRAVKSEKLSNNKKKGEGNRKNGNKYLAWAYVEAANFAVRSYPECKSFYQRKKAKRNGVVAIKALSNKLARASYYVMRDRVPYDANYLFRS

SEQ ID NO: 302405 - protein, 348 aa, unidentified
MRFYTHTHRFYCGIDLHTRTLSLCVLDGSGAIVCQRTMPPEPDQLLSALAPFRDGLVVGCECLFAWYWLADLCAREAIPFVLGHALYLKAIHGGKTKTDTIDAEKLARLLKGGTFAQAYVYPKAMRATRDLLRRRSYLVHQRAELLAHLQMTFLQYNLAPPAQKLCYARNRAALDLDVFADPSTRSMLAADLVITTALDGQIKRLEAELVRTAKVHDPQTFHLLRTVPGIGPVLALILLYEVHDIARFEDEGRFLSYARLVGGVRESAGKKKPTAHRKIGNAHLKWAFGEAVCLMIRELPKAKAWLAKKERRHGKKRALGALACRLARTVFHLWRKQQAFDVKRFLAS

SEQ ID NO: 302406 - protein, 337 aa, unidentified
MGLYCGIDLHSNNHVLTVIDEADRRVYERRLPNDLAITKAALEPYRAELVAVAVESTFNWYWLVDGLMDAGYEVRLVHTGAVVQYDGLKHTDDEHDAFWLAHLMRLGILPTGYIYPRSERGLRDLARQRMRLVQHRASHITSVQSQVWRSTAVRLSSHTIKGEGKQPWPELRDADLALSIETGRAAIDALTVQIERLEEVLLKRVGLSPPFQVLKTVTGIGPILALTIALEVGDIKRFPGVGEFASYCRCVDSQRLSNAKKKGEANRKNGNPYLAWAFMEAAHFAIRYLPAARRFYERKCRQRNALLAVKALAHKLARACFYILRDQVPFAPERLFV

SEQ ID NO: 302407 - protein, 362 aa, unidentified
MQKHIFVGIDLGDKNSVARIAVDREKSERFGFVNTRAGRARLIAEVKRRGEQAGGAVIVMAYEASSCGFVLRDEAEAAGIECKVLAPTKMEKSVEQKKNKNDDRDADDVLGKLRGHVMAGNRLPTVWVPDLETRDDREVLRTRLALSERQTQVKAQIQMLLKRHGLEKPSDLGSARSKEYRRWLEQLSEYESVGWGTRQSLASLLRQLKGIEGEMENLEKLVKCLGAQQRHKPIVEALMKETGVGLLTALVYRTEIGHASRFRRGRHVGKYVGLTPTSHESGQQNDRKGHISRQGPPRLRKVLCQASWVHVQHDPHAREVYKTLVAKNPKKKKIALVAVMRRLAVRLWHRMREAELQQQTQS

SEQ ID NO: 302408 - protein, 385 aa, unidentified
MQKHHDDSKACLTAFVQDNTVIAVIEMSLANWLVAGMIPGVKREPLKRITPDPEVLLRLLYRWRDEAIKAGREITRIAVAYETGRDGFWLARWLRDRGINAYVMHATSVAISREHRRAKTDRIDTAMLRRGFLGWLRGERGHCSMALIPTIAEEDAKRPHRERESLIKQRTRAINQMKAILTQFGVRNFKPVLRKAAEKIGDVRTPEGGPLPANAAAALRRHIEHFRLINEQIKAIEKTRLQRLRQHPTDKFNTMVFLLVRIIGLGVETAEQLVHEILFRKLRDRKAVARYSGLTGAPDESGARRREKGLSRSGNGRVRKILIQLSWRMLRFQPNSGLVRWFKDRTANSRRSRKPMIVALARKLIIALWRYVNTGVVPEGFQLAK

SEQ ID NO: 302409 - protein, 457 aa, unidentified
MREKSKRTKGIEEAHPFSGMSRIHPHAAGVDIGAIEIVACVAGDENTQIVKAFGNYTVDLQALAQWLKSYDIKTVAMESTGVYWIALFEELERQGFECLLISSRSLRRVAGKKSDISDAQWIQTLHTYGLLEGSFRPQGDLVALRTLLRHRSQLVEHRSPHIQHMQKALLQMNVQLSQAVTDVTGMTGLKIIRAILVGEREPQALAALREPGCKKSAEEIGKALTGTWREEHLFILKQSVLLYDFYTEQIQDCDLETERLYSLTRPDWEAGEVQPLTKRKKNSHSKNLPHNAEEVRKHLKRISGVDLSLVDGFGVSLAQTVIMEVGTDMSKFPDEKHFCSWLGLAPKHEISGGKVLKKNTLKTKNRAGQAFRLAANSVKQAECMFGVFYRRLRARLGPAQATVATAHALARVVYRMLKYKVEYEPLSLNEYQKHYEEQQIKYMRKKAAKFGFQLVPT

SEQ ID NO: 302410 - protein, 341 aa, unidentified
MQITTIGLDIAKNVFQVHGIDADEKVVVRKQLRRGQVMRFFEELSPCLVGLEACATAHYWARELTKLGHQVRLMPAKDVKAYVKRNKNDAADAEAICEAVRRPTMRFVQVKSAEQQAQLMQHRARDLLMRQRTQLINAMRSHLAELGITAPQGREGIKDLLAIISNDDKTRFPVDARASLIVLAAQLQALQTMIGSLEKRLMAQHRANKESRRLQTIPGIGLIGATAIAATMPNPMVFRSGRDFAAWVGLVPRQTSTGGKPKLGPISKQGDRYLRRILVVGAVSVLRRAKQNPEKYPWATRLLARRPFKVVAVALANKMARIAWALLAKGGRYRAPRLAAA

SEQ ID NO: 302411 - protein, 458 aa, unidentified
MEEPQEVPADEEHERVWERVAAVDIAKASGVVCTRVPDEDRPGRRKTHVWTVQATSKAVIELGDYLRARQIQVVTLESTSDYWRIWFVVLEAAGLKVQLVNARAVKNAPGRAKTDKKDAVWLAKLTEKGLLQPSFIPPYEIRRLRELTRLRTSLVHDKSRYWARLEKLLERAHIKISAVLSTLDTDTARAMIEALIAGQRNPRVLADLAIGKARAKRAELTLALEGRWEDHHSIQARILLDNIDALNRQIEQLTTQISELISQIPAAWGIDADGTTGPHAGTSTDSPVLPAVAQLDAITGCGIISAQAVIAEIGLDMAVFGTPGRLVSWAKRCPQTRQSGKKTSGGKAGKGNPWLNGILGEIAASAARTDTFLGERYRRIARRRGKRKAIVAISRSILVIIFHLLSDRSARFCDLGPDFYDTQINRDRKIRNHIRQLQALGVDPDDLAALLTKNPPAA

SEQ ID NO: 302412 - protein, 359 aa, unidentified
MQRNKISFKGQRIFVGIDVHKRKWSVATITESGLQRVHVQNASAQELIDFLHRHYPDGEYHAVYEAGFSGFSTYYSLAEAGIDCMVIHAADVPTTQYESVMKTDKIDCLKLAKSLRAGLLKGIYIRPKDSIDDRGVIRMRRMIIKDLSRYKIRVKHLLMSNGVEIPEQFDKRKGNNWSGAFIQWLKGEVTLLSETRRSLDLLVGQVERMRQAQLEATRELRKLSQTERYRANYDLLCSIPGIGGLVAMTLLTEIYDITRFLNERQFASFLGLIPTSHSSGDKTIHGEMTFRGNKELGPMMIEASWTAIRNDVGLAASFSNYCRKMVPQQAIVRIARKLANIIIAVLKTKKKYVPYSSKG

SEQ ID NO: 302413 - protein, 391 aa, unidentified
MVCVGIDVAKDKHDCCILDSDGTIRADCITIPNNMDGFKQLLQTIRDCTKKSDKIKVGLEATGHYSYNILGFLLDNDLAVYVMNPLHTNLYRKSLSLRKTKTDRVDARTIATMLLSDVDLKSYTDIAYHNEELKSLTRYRFDKVQECAKLKQSVSRLATILFPELEGLVSSIHGTSIYALLSEYPGAKQISEVHLTKLTNLLTTASKGRYRKEKAIQIREAARASIGSVMPAKSLELKHTIKLIQELASEIDEIEDSIQKIIDELNPPILSIPGMGVNSAAVILAEIGDFSNFSSPDKILAYAGCSPSTYQSGKLTNCYAHMEKRGSRYLRHALYNATKYVCYWNPVFAEYLAKKRAEGKHYNVALSHAMKKLVRLIYALQKSGKTYLTAA

SEQ ID NO: 302414 - protein, 389 aa, unidentified
MVIIPQFNRTVKLFYGGFFMEFIGIDLHTNKFTCSWRDEHSPPEAKKGKRTETFDLTAKGLAAFYRTLTPDTYVLVEATITTFSFVRLIEPLVKEVIIANTYELKQISLARVNTDKIDANILSRILKMQVLGREYAVSPVVVPPVAIQELRGFFTTYRLYRKQTTQIKNRIHSLLKEKLYGFTQEEIFGKKDREKIRKLENRTAMSLQINQLLNNLEYLEEQVDELEDMIKAHAEPYMREIEILTSMKGIGVFTAIAVIADIIQVNRFRNSKAFTSYLRSAPKVSNSNTSKPELGINKKGRKLSATLITQSLNHVLSASPKLNRWYQELTQYKKRGLVRTGLRRRVLAEMFQMLKKGEYHYGRDKRIHEAKMFQFKRFLEKTKNLLKTA

SEQ ID NO: 302415 - protein, 315 aa, unidentified
MDVLLKNCAGLDVHQKEIVACVIREELDGSSIIETRSFPTMTKDLYELLKWLEQCNVTHVALESTGIYWKPIFNVIEDYFDITLANAKRIKNVPGRKTDVADAEWIAKLLQHGLIEKSFVPPTDIRELRDLTRLRKKWIGNITAEKNRIQKTLECSNVKLGSVISDVFGVSGRKLLSKLVEQGYVDPKDVQETIHFKMMPKAQQISDSLFGTLNTHQIFLIRQSWNHIIFLEEQLEQLEKQIQDLLIPYKEQVELLLTIPGVKENSVASIIAEIGIEMSQFPSAQHLASWAGLAPGNHESAGKKKVPEQRKGIHT

SEQ ID NO: 302416 - protein, 330 aa, unidentified
MRFAQLQEKAQARTGQVPPIIAIHEAGLDGFWIHRVLLSEGIESYVVDPASIATSRRRRRAKTDKIDGEALVRTLLAYKRGEPRVCAMVKAPTPEEEDQRRVSRERQTLTVERVQHVNRIKGLLFAQGIRDYEPLRRDRRQRLDALTTGDGRPLPRHLKTQIRRELDRLELLLEQIRTVEAERDALLERARAAETAPAPALLLGLKGIGADIAGILWAEGLFRPFSNRRQVAAYAGLAPTPWKSGSIDREQGVSKAGNPRLRTIMIQLAWLWLRHQPHSALSQWFKGRVSASGSRQRKTSIVALARKLLVALWKYVASGVVIEGAVMKAT

SEQ ID NO: 302417 - protein, 338 aa, unidentified
MKVKTLGIDIAKNKMQLHGVDSNGKIVLRKTLNRSQLAEFVATLPSCLIGMEACGGSNYWARCFETFGHTVKLMSPQFVKPYVKSNKNDRNDAEAICEAVTRPNMRFVPIKNIEQQDMQSLHRVRSLQLKLRAALVNQIRGLLAEYGIVLPQQIQNVRAYLARHLDDENELTVIARQLFTDLYEDLCSLDKRIKACDNQLKSIYEANEVCQRIGEVEGIGVVSATIMVSILSTQANEFKNGREFSAWLGLVPRQCSSGGKQVLLGISKRGDRYVRSLLIHGARSVVSRASQKKDARSRWVTELRERRGFNKAIVALANKNARVVWSLIKNNQAYQKAA

SEQ ID NO: 302418 - protein, 385 aa, unidentified
MPTATTRSSDFVPTLHLALDLGNTTWKLAFATGHAHAPRLRTLAARDLAQLEREIAGAKARFGLPADAPVVSCYEAGRDGFWVHRALLAFGVTSLVVDSASIQQNQNRRKRRPKSDRLDAAALLALLLRHLAGERRVWSVVHVPSVEEEDRRHLHRELFALTRQRTRQVNRIKGLLALHGVALPRLRGLPATPPALRDWAGAPLPPSLTDRLAREWARLRTTQRELRALRAERRRALATADATTDPTLGMVARLLALKGVGEVSAWLYTTEFFGWRAFRNRRQVAGAAGLTPTTRGSGDAERELGISKAGSAIMRALAVELAWSWVRRQPASALSRWYRARFAAGGPRQRRIGIVAVARRLLIALWRYLETGRVPEGAVLKPLKA

SEQ ID NO: 302419 - protein, 413 aa, unidentified
MVLGIDVGSETHYARAFDYRGIEYSKKPFKFSNTEAEFVTFKEWILDLQERHEKDKVVPGMEPTGHYWFNLGKFLQDNEMKPVLVNPHHVKKSKELDDNNPTKNDRKDPKVIAGLVKEGRYMIPYLPEGVYADLRTASNMRFQIQSELTRIQNRISRWVNIYFPEYKTVYGKPDAVSGMMILKQAPLPEDILTLGVEGVNQIWRDAKMRAVGKARAKTLIEAARHSVGAKEGTMAARMEIRMLLEDYESRNNHLQEVMTLIEELVKQIPMAEKLMDIKGVGIKTVSGFLAEVGDVSRFSNPKELQKLAGLALVENSSGKHKGQTTISRRGRKRLRYLLFEVAMSLVAKNPEFRELHNYYTTRRLNPLKKMQSLMAIAAKLIRVFYAMLTKGVDYDPKKMVSDIKRPAAYLQAA

SEQ ID NO: 302420 - protein, 369 aa, unidentified
MGEYSGAFVAFDVAKMKHAVAVAEAGRAGEVRFLGEVENTPARIERMIKKLAGRYGRLQVCFEAGPTGYGLYRQIAELGHDCLVVAPTLIPKRPGERVKTNRRDAVTLARLHRAGELTGVWVPDPVHEAIRDLVRAREAAMDDLRRKRQQLLSFLLRHGRIYVGGGHWTAAHRRWLGRQGFGHPAQQIVFQEGVDAIDDAAQRRRRLEEQLAAIVPSWSLAPAVQAYQAMRGASFLVAVTFAAEIGDVRRFETPRQLMSFLGLVPGERSTGDTVWRKGLTLAGNRRARRALIEAAWTYRYPARVSETLRARLEGLPKTVRDIAWKGQVRLCARYRRLSTTGKKLPVVVAAIAREMAAFLWAIGREVAPV

SEQ ID NO: 302421 - protein, 359 aa, unidentified
MDVHKNSISVAVADGGLRGESRFVGTIANTPAAFGKLASQLSRPGVRLRFCYQAGPFGYGLWRQLTGLGHDCVVVAPSLIPRKPGARVKTDRRDALALAALDRMGALTAVWMPDADHEAMRDLVRARAAAVRALRRSRQQLSGFLLRHGVVRPGKNWTMAHRRWLSTIRFDHPTSQIVLQDYIHAVEDAGARRDRLTGQIEELLDDWSMAPVVKALQAMRGIALIVAVTLVAELGDLTRFDNPRRLMAYLGLVSSEHSSGESVRRGGITRAGNGEARRVEAAWTYRLPARISAVRLKRLQGLPKAVRDIAWKAEVRLCARHRRLRAAGKPANLVNAAIAREMLGFAWAIAQHVKPRPAG

SEQ ID NO: 302422 - protein, 347 aa, unidentified
MPKLPSDLSSVTVVGLDLAKHVFQVHCVDTEERIVVARSLRRSQLLPFFASLPPCRVGLEACGSAHHWGRALMALGHDVKMMPPAYVKPYVKRQKNDAADAAAICEAVTRPSMRFVAVRSIENQAALMVHKVREMLVSQRTQLLNILRGHLAEAGVIAAQGACHGRALAALIEADHEDVPASVAEALMPVVEQLHHLDAAIAASDREIAAAAKACPQARLLMSIPGIGPLSASALVATIAEGGIDQFSGPREFAAFLGLVPRQHSSGGKERLGRITKMGNGYIRKLLVVGAHAVLHHAARHSDPLRKWAKALLASKPFKLVAVALANKLARIAYAILASQKPYTAAA

SEQ ID NO: 302423 - protein, 347 aa, unidentified
MKILALDLGKFKSVACVYETTSARHRFERTTTTAKALHDLLVEHEPERVVIEICSIAGWVSDLVRMLGIELQVTSTMHEAWRWRQVKRKNDRADALKLAQLSALNQLRLVHVPERETRQWRALINYRHRLIRQRTSSKNHIRDVLNREGLWLARGSAAWSSKGLEQLLELARPLAEVGVGELWRGELAVELLNLQTLEQQLRQVETKLDELGGAAAGVRLLQTIPGVGPRLAEALVALIDKPQRFQRAKEVGAYLGLTPKQIQSGESNRLGRITHAGSRVVRALLVEVSWVGLRYNSWMRGVYERTRRNSKTRKKIAIVAVARRLLIRCWAMLRDGTAWQPEYRAIR

SEQ ID NO: 302424 - protein, 420 aa, unidentified
MNDSIAGIDVHKRMLMVVVGTVGGAVADDGGEPREPIRFVQRRFGTTTSELLHLLAWLQQHGVQEVVMESTAQYWKPVWLALERHFRLRLAQAWSNRAPRGKKADFKDAKRLVRRHAAGELTLSFVPDAEQRQMRTVTRRRTQLTRQRVRIQNQLESLLEETRIKLSSVVTDLLGTSGLRILTALGQGETDPAKLAAMGDARLQCGSAELADALTGSVSEIHRRLLQQHLAQLALIDTQMEELSLLAADAMRQHSDAVIRLVKIPGIRVLAAQQIVAEAGPQASAFASAAQFSSWIGVCPGREESAGENHSSHCAKGNTYMRRVLCQAAQAAVRTKNSYFQQKFQRLMPRLGYAKAIWAMARHISVVIWKILHDGAQYKERGLPTTPQAAKRRVQRLTKQLRALGYSIEIKPLSPEAVLV

SEQ ID NO: 302425 - protein, 339 aa, unidentified
MELKRISIDTSKHIFTIHGVDPQEHPVLRREIRRTQLESFFVKLEPTEVALEACAGSHHWGRLLSRMGHRVKLIPPQYVKPFVKRSKNDRNDAEAIGEAASRPAMRTVPLKTTEEQAATIIVKHREMLVAQRTQAINALRGHAAEFGIIAAKGCPNITALLSVLAADEAIPVSARAMFGEMGQHVADLDVKIEELDRRLLDQHKANPVSRLLAAIPGVGPITAITMALTVDPGNFESGRHLAAWLGLTPREHSTAGKHRPGKISKAGNERLRQLLVVGAMSVIRVAKPGRQSTSGWLLQLLERKPRKLAAVALANKMARIIWAMMARGEAYRHQPLTTA

SEQ ID NO: 302426 - protein, 418 aa, unidentified
MEPNRFRHYIGIDWATEAHRICLLDHNGQLCAKVSIPHSGAGLDQLLEWLASHGVEPAFAAVAIETPRGALVETLVERHYAVFAINPKQLAHFRDRYTSAGAKDDDRDAWVGASALRTDEKAFQRVTIDAPELIQLRELYRTADELREEIQRLTSRLREQLNRYYPQLLALYSAADQPVLWDLLELTPLPATAHQLTLPQVEAVLRKRRIRRFTAGQVLEQLRATPLTLANGAAAAASEHALVLVAQLRVIYDLRQKTLKRLAGVVKKMRQTPTGSGAPSDAAIIASLPGAGVLTTAALLSESSRAVAERDAPALRAYAGVAPVTQQSGKTLKVSMRYACNNRLRNALYHFAMGSLRDPVARRHYDRLRAEGHSHARALRGVADRWVTVLMAMLRSGTRYDATRRKAWQAADAAGVTA

SEQ ID NO: 302427 - protein, 359 aa, unidentified
MTQPVSQPAPVVGGFDTHKDLHVAAVVDHQDRVLGTQSFPTTRQGYRLMLTWMRSFGALQRIGIESTGIYGAGLLRYIQAADVVVLEVTAPDKHDRRRRGKNDDFDAESAAHAAFTEQRKVTPRSRDGMVESLRVLKVCRKTAVQARRIALQMIQNTIVCAPDRLRDPLRNMTRMQLIRTLAAWRPDLTAYRDIEEAYRIALKSLARRYLELHDEIADLDAMIAAIVKELAPELIARPSIGLASAAQLLLTAGDNPERLKSEASFAALCGVSPVPASSGKTVRHRLNRGGDRAANSALHIIAIGRLRLDPRTQDYVARRTAAGHSRLEAIRCLKRYIAREVFNIIVRRQKEINQSRIAA

SEQ ID NO: 302428 - protein, 394 aa, unidentified
MYIVGIDIAKHTHWASVLNEKGKLVGKSFRISNTQEGFEQCVARLKEINLDLTQFEFGMEATGHYWLNLYTHLTDLGCTVHVINPVQSDALRGLYIRQTKNDIRDSVIIADVIRIGRYSETTLENPDLLALRDLTRQRFYLVDMISDLKRKVLTLLDRVFPEYPTLFSDTFGKTSLELLSTYTTPEDILAVDTDKLCEVLVTASRGRFDRQKAERVKSIAANSFGALLCADSTAFMLRQFVEQIKFLESQLSDLECMISERLACFDTQITSITGIGDVLGASILSEIGDINRFESPEKLAAFAGIDPSVKQSGTFTGNHNHMSKRGSPYLRRAVWLAACAAILHDPAIKAFYDKKKSQGKHHYAVVGYICHKMINIIFAILKTNQPYHPVFPQF

SEQ ID NO: 302429 - protein, 339 aa, unidentified
MQLYAAIDLHSNNCVPAVMDEQGKVVFTKRIPNRPASAIVEALLPFRDDLLAVAVESTPNWYWLERELRQANFKVELVNTAAIEQYGGLKYGDDFSDAAHLADLMRMNRLPTAWICPEGDRALRDLARKRAQLVRQRTLQLLSAHNLVARDLGDHLTGNSLKRLTAWDVNAMPLLPEQKTALKATLAVARCLESHVERLERDILAQMRERDVFKWLKTISGIGDVLGLTVALETGDITRFASAGHYVSYARLVDSKRVSNGKKKGEGNVKCGNRYLAWAFMEAAHFAVRYDPVIKSWYQRKAAKAKAVVAIKAVAHKLARAAFHVMKNGTEFDARRAFS

SEQ ID NO: 302430 - protein, 437 aa, unidentified
MEKREELLKFEELKASLRRGDPRILVGIDIAKDTHVARMEHSDGRVLVEKMGIENTREGFEAFRLRIEDLRGRLGLEVVLAFEPSGGYQKLLGEFLIQSGYTVVQVSGLVAHRNRQTLGDSWLKTDPQDARNLVDLLRQGKILRYATGAGFMEEAKRLVQCDRMLMYESNRLKVRIRNRLLPVAFPELEDFFVEVMHPDLLAILRHCPSAREIAAHSEEEFVRLVSKGGRLGTRKERFRRIYQKAKESIGVEVQDGFRWEAKWIADRLQAVVQDRKELQAEIARILSPYIGYRLVQTIPGVGKLLGAIFVVEIGDPWGYRHWRQVMKLSGLNLAVVQSGKFSGTPRISRQGKGLLRWAAYQAAVVATTKDPLFHQIYQKALENRATQKGAKKRALVKVAAKILKIVFAVLRDQIKFAPELVTPGQALLKTAREVRSI

SEQ ID NO: 302431 - protein, 410 aa, unidentified
MKDTLFIGIDVCSQSNTVHVMDSAGDKLWQHTFKNSQDGCLDLVRQLLETQSKHGAGFLSFGLEATGCYGSLLAMYLRETDSIPRSDKVVRVLNPRQVSRFKQSYSELPKTDAVDAFVIADSLRFGRIGLRGTVVEDKYLSLQKFTRARFQVAKDLSREKNRYLQTLFLKFSSMTQSPLFSDNFGTTAMDLVTEFESVDQIAYTPLPELADFLNSRGKGHFVDPETLAREIQKAARSSYRLPKAIQDSVNQVLAMQAQTIRFQEHQLKEYDKLIADQMTGIPSTLTSIKGIGPVYAAGILAEIGDVSRFKDQAALANYAGLSWSRHQSGKFEAEQTHLVHSGNRFLRYYLIEATDHVRKHDPELKRFYARKYEETPKTKAKRALVLTARKFVRVVYALLRDNRIYISRED

SEQ ID NO: 302432 - protein, 380 aa, unidentified
MKRTQAAQTKTTLSEGILYMAMELSASRWVLGFGNEVRDRLVSVAAWDTAAFLREVSLAKAKLGLPAKAPVLSVQEAGRDGFSVHRFVESEGIESLVVDSSSIEVPRRARRAKTDRADAHALLRMLRRYAGGERKVWRVVRVPSEARETERRLGRERERLTKERTSMTNRIRSILATQGIRYTSVIGSDFAERLQGFRRFDGTAMPTEVIEELLRAWERVSLIDSQRDALEARRRDRIRKDSDASAMMARRLTWLKGIGETTGWTLAQEFFWRDFRNRREVGSAAGLVPNPYQSGLMDRSSGINKAGSRRIRCLMVELAWRWLRWQPDSALSRWFAERFGSAGGRMRRVGIVALARKLLVELWRYLHFGTIPEGALIRSA

SEQ ID NO: 302433 - protein, 428 aa, unidentified
MDELDRNRLEQFRQLKQEIRKSEEYLIVGIDVAKDRHHAFFGTATGETLLRRLVFSNDYEGFRKLLEQAEALEVRHGLKKVVYGMEPTANYHKPLGEYLIHLGRAVVLVSGVTVKRNRESLDGRWDKHDVKDAANVADLISQGKCLYYDYPRAALRGLRGLLSLKRRLKKQEHGYRVRIRNHLIAQYYPEMDRDYDRLGAEGLSIVRWCFPPSEMTVLEVGEFVQRVTSRGVRMEKRQRLEGIWEKAGETIGCDGVPGVEHEARMMVEGLKQIREMIKETEGKIQELCKEFPEYEYLLTIPGFGPDVSAKVLGAIGDPDRFQNGKQVLKLAGLDLSADRSGKDSDKAIPEISKRGKADLRYALYQAALIASTRNHDFTVYYTRKLRGREREKGIKTKMWVKLSAKMLLIAWTLMKKKEAFDPAYLNAE

SEQ ID NO: 302434 - protein, 362 aa, unidentified
MTQYRSFVGLDVHARTIVGSALDVDTGEVTRHRFGYDLAEVVVWTRLLPGPQIATYEAGPTGFGLYRLLLAAGTECVVAAPSKLQRPSGDRVKTDARDAFHLMRLIHLDEITAVKVPSVEEETARDLVRSREDTRQDLMSARHRLSKLLLRHGFVYDDGAAWTQKHDLWLSSHRTGDLAFTTAFDANYEAVIQTLDRRDRLGEAITAMAADSPFTPMVNRLGCLRGISALTGFALAVEITDWQRFTGNTIGAFLGLVPSEYSSGQSRQLGGITKTGNSHARRLLVEAAWQHRRDYLPSARSVLQAWWEEAPAPARLRGQAGNERLHHQWVSFTARTKWPAIANVGVARELAGWCWSLAVMDG

SEQ ID NO: 302435 - protein, 345 aa, unidentified
MKTTTVGLDLAKNVFQVHTIDEAGAVIVRKALRRRQMMPFFEGLEPCLIGMEACGTSHYWARELSGLGHRVRLMPPAYVKPYVKRGKTDAGDAAAICEAVTRPTMRFVAIKSPEQQSLLALHRARDLLIRQRTQLVNLIRGQLAEFGIVLAKGIQHVLRLVARLVDGETLDIPEQASKVVIILAEQLRDLQVRIGGLEKDLKNWCRGNQAVKRLKTIPGIGTITASALVASVTDPHQFTSGRQFAAWLGLTPRANSSGGKARSGRISKMGDQYLRRLLVSGMTSQLRSVRRHPDRHPWTTSLLHKKPAKLVAVAMANKTARIAWVVMTREETYRAPQPLNQEAAE

SEQ ID NO: 302436 - protein, 388 aa, unidentified
MSKPFDLSKSLTALDQDSTLIVVIEMSQSSWLVAARAPGLARDPLKKLPPDPEQLFKLIDRWREESRRAGRVVRRVCVAFEAGRDGFWLARLLRQHDIEAYVIHPTSIPVKRDHRRAKTDRLDTELLMRAFLGWLRGEADHCSMAAIPTLAEEDAKRPTRERESRVNARSRLVNRMKGALARLGIRGFNPKLRKAAEKLEELRTGAGEPLPPNTLAELRRDMAQLRFVADQIKQIEKAREARLEKAPREGAHPMVLMLASIKGVGLETAEMLVAEVLSRKLRDRRAVARYGGLTGSPDESGSRSREKGLARSGNARVRRGMIQLAWRFLMFQKESALAKWFEARTANGPRGVRKTMIVALARKLLIDLWRFVEDGIVPAGVELFDSRA

SEQ ID NO: 302437 - protein, 355 aa, unidentified
MKYYTSTTQFNCGIDLHARQMYVCVMDRDGKKLVHTNVRNNDFEFFLKLVAPYRHDLTVCAECMFGWYWLADACQAAGIHFVLAHALYVKAIHGGKNKNDRIDSEKLTHLLRTNLIPPAYVYPAEKRPLRALLRQRILYVWNRSELLSRIQSHQLAHNRPTLRQTPYNREPWAEQLLAQEDHPARQLALQNDLALIGHYDAQLATLEKDLLKLTKQTSSRDFTLLQTTPGIGDYLGLTILHEIGDIARFPTVKDFLSYCRLVKGTVASGGKIKGLRGAKLGNPYLRWAFGEAAVIAKRDPAVIGPLAQRLEAKMGGNKFKANTVLAIKLARAVYFMLKSHTVFDPQRLVAALSRN

SEQ ID NO: 302438 - protein, 342 aa, unidentified
MQITTIGLDIAKNVFQVHGIDAAEKVVVRKQLRRSQVLVFFKALAPCLVGMEACATSHYWARELTKLGHEVRLMPAKDVKAYVKRNKNDAADAEAICEAVRRPTMRFVQVKSTEQQGRLMLHRTRDLLMRQRTQLINAMRAHMAELGIVAAQGREGIKALLRIIASERDARLPVDAHASLVVLAAGLQAVQTMIASIERRIIIQHRSDEASKRLKTIPGIGIVGATAIAATIPDPKVFRSGRDFAAWIGLVPRQDSTGGKQKLGPISKQGDQYLRRILVVGAHAVLKLARQQPEKYPWLTRLLARKPFRVVAVALANRMARIAWALLAKGGTYRVPVLAAAA

SEQ ID NO: 302439 - protein, 415 aa, unidentified
MNSFCGIDWAEGHHDIAIVDGEGKLVAKKRISDDSAGFTALTEMLAAAGDSFDDAIPIAIETPRGLLVAALRATGRPVFAINPLAVARYRERHSVAGAKSDHADAMTLANILRVDSHLHRRMPADSELAQAIAVLARAQQDAVWRRSKASNELRSMLREYYPAFLDTFAGKSATNLAKPEARAVLAIAPTPAHAAKLIKTRVAAALRRAGRKRGIDGLAVNILEHLQAPQLRQPELVEKAMGRQALALLAMLDAACTGADELAQTAAEEFRKHPDYAEITSFPGLADLTGARVLAEIGDDRDRFADDRALKAYAGSAPITRASGKVTSITHRRIKNDRLAAVGWVWATYAYINPGPAQDHYRRRRGHGDRHAAALRHLFNKMLGQLHHCLQTRQTFDPIKAFGQPRTAPREPAAA

SEQ ID NO: 302440 - protein, 381 aa, unidentified
MKTPNVCTPTTGNTGTIFVALELSRRTWLVTIHSPDRDRISHYKVDGGDHVGLLKLIARVRARSAKKLGYEPAVVSCYEAGYDGFWLHRLLTAAGIKNHVFDAASIMVEQRARRAKTDRIDGDKLERTLRQYCGGDRHAVRIVRVPSPEQEDLRRDTREEERLKEEQTSHSNRIKGLLRLHGMPVGDPRRSDYLDWLGKQRDWAGKPVPPRLLAEITREHARLRVVVEQLAAMEEQPSPARLNPAAAEMGRRRDLLFRLKSLGPAFSSRLVNEAFYKDFRNRREVGAYFGLDGSPWRSGDTNREQGISKAGRARHAAIELAWLWLQHQPESALSKWFRQRAANASKRIRRITIVALARKLMVALWRFLTTGLVPEGAVFKA

SEQ ID NO: 302441 - protein, 267 aa, unidentified
MNKDVFYVGIDVGCQELWLSIEGFKPKMFKHSKDGIRALHNWSQKRSNHKQIHFCMEATGVYSISVASLLAKKRQTVVSIVNPAQIAAYARAQMRRSKTDQIDAEVIRNYAETQSPPIWTPLSQTLRQLTALVTQADAIKECLQQWSNRCHAQGFVPDLPKEITQSQRALERSLKRELKKIETAINNLCAQESTLAQQLALLSTIPGVANQTAVKLLAYGQNWLTERSPKALTAYAGLAPHHHQSGSSVRAKSRTDKRGNPKLRKTL

SEQ ID NO: 302442 - protein, 403 aa, unidentified
MNNVAGIDVSKGKSMVSVLRPFGEVVAKPFSVGHTGSELKELADYLKSLDGETRVVMEHTGRYYEPVARFLHEEGVFVSAVNPKLIKDYGNNTLRKVKTDKADARKIARYGLDNWAELRQHTPMDTIRMQLKTLNRQQSLYAKTKTMMKNNLIALLDQTYPGVNALFDSPVREDGSQKWVDFATAFWHVDCVRNMSLAAFAERYRKWCKRHGYNFSQSKAVEVHTGAQDLIAMLPKDALTKTMVRQAIDALNAVSASLERLKAEMRTLAAQLPEYPVVMAMHGVGDSLGPQLMAELGDVTRFTHRNAITAFAGVDPGADQSGTHEAKSTRVSKSGPPELRRALFLVMDCLLKTQPQDDPVYRFMDKKRAEGKPYLVYMTAGANKFLRIYYGRVKEYLASLEGN

SEQ ID NO: 302443 - protein, 365 aa, unidentified
MFYLGIDQHKRQLTVNSRGEDGTVLLQRQVSTEWEKVRTFFADYAERAKADGGFMAIVEVCGMNPWLLDLLKEYGCREIVVIQPAERSKQKTDRRDAGKLGYLLWVHRQQFLEGKHPIGLRRVEPPTPQQADDRQLTALRARLTKKRTAVLNGIHKILAKHNLEQARPTKLFQTQKVRRWLAEMELPAVDRLEMNLLLPQWALLDEQLETTEGKIAERAADDEQVKLLESVPGFGHYSAVAISSRIGNIDRFRRPDSLANFFGLTPGSRNSGEAKQRLGSITKQGSRMVRHLLNQAVVKVVRFDGQMRTWYKRIRKERGSKIARVAVMRRLATILWHMLKKKEKYRYDSPIQKHKEFEAFDGRAA

SEQ ID NO: 302444 - protein, 324 aa, unidentified
MKDIVLGIDISKKTFDVTLVTPDKTWSKVFDNNEQGFESLSVWLKKHNTGSLDACLEATGTYGEALAEYLHGQGHQVYMVNPTRIHSYAKSKQLRAKNDKLDAKIIAEYCRVHDDLRPFTPTPAELKHLQGLDRRIADLKDTLVREKNRLKSANHPEKVRSSIQRTIAFVEAEIAALETDIDDTIRKNPELSKNKELIESPKGLGPVTSRIFIIDFNSFKTFESARAAAAFAGITPFVRKSGSSLNSAGSISRMGNSRIRQVLYMAARAAARHNPIFRAQYNKLRAAGKAYKVALCAIARRIIHVAYGMIKYQRPFDETLFCVD

SEQ ID NO: 302445 - protein, 386 aa, unidentified
MQASTVATPTAGHIGTIFVAIELSQRSWRVALHSPDKDKISHHKLEGGDHAELLALVGRVRERAARALGGVPAVASCYEAGHDGFWLHRLLLAAGITNYVFDPASIAVDQRARRVKTDRIDGERMLRTLMAYLRGEPRVVRIVRVPAAEQEDARRGSRERDRLIKEQTAHTNRIKALLRLRGMAVGNPRRRDWLSWLATQRDWQGQAVPPRMLSEIRHEHARLMLVRDRLDALAQEAAAAEPMPAEAEMTRRSELLRRLKCLGPAFATTLTSEVFYKDFRNRREVGSYFGLTPSPWRSGGIDRDQGISKAGNPRARCAAIELAWLWLRHQPDSKLTLEYRKRTLDAGKRIKRVAIVALARKLMVALWRYLTTGLVPEGAVLKAVKI

SEQ ID NO: 302446 - protein, 340 aa, unidentified
MDSTMKTKYYIGLDVHKETTTYAVRDRLGNVVAEGETATIYEELYPKLKPYLSSSQIGLESTSYYYCLYQRFLKNGYPVKVANTVQMRGLINKNDKLDSRHLAELLRLGNYPTAYVPDEMIQKLRNLVHMRHNLMEEKTRCNVRIQMLLDRNGVAMPPYKAFCKKWKSSLNTYLGSGNVSPDFRYAYDHYMFLDWKEKQLEQEIMGYVKTNWSKEYELLQTIDGFGPILSCYLISEICPIARFMSKRKLRRYAGVVPVFHESAGKTGRGYLPKSSSRGLLRWALIQAANAVSRTESRLGDYYRKKHKQKKSTNIAKVAVASSLCDIIYEVLTTSKPYITN

SEQ ID NO: 302447 - protein, 316 aa, unidentified
MRQDGSLVDELRLSHGTERAELEEFAREYAGSAVAIEATGHYRPIYETLDEHMDVTLVNPSKTRVIADAKVKTDRVDAKMLAHLLRANLVAESYVPPKDVRERRDLVRARKALVEDRTREKNRVRAVLKRTGNQYSRELFGPTGREFLAELTLSEVDRAVLEAHLAVIDTLNEQITKLDKRIEDTAAARHDAQLLMTIPGVSYFTSLLITSELGEIDRFSSAKKVISYAGLDPSIRQSGDKEVRGGISKEGSAPLRWALVQCANVAVRFDDYLGQFYNRLKQRKNHNIAIVATARKMLVAMFHMLRREEIYDPPTA

SEQ ID NO: 302448 - protein, 339 aa, unidentified
MTILFLGIDLAKNVFALHGVDERGKPALVRPAVRRDQLLEAVAKLPPCTIGMEACSGAHHWARRFQDFGHTVRLMAPKFVVPYRMSGRRGKNDAADAAAICEALQQRPAMRFVPVESTQAQSRLAVHTARQGWVSARTAVINRLRGVLSEFGIVLPLKAATVRSRAGEQIDTVPGWVQTVCRDLLAELQRLDERVAAYDEHIRLMAQADDRARALMAMPGIGPTTASALLASIGYGHDFANGRQLAAWMGLAPGQYSSGGKNRLGRITKAGDAYLRTLFIMGARAVLAAAANKHDRLSRWATALAERRGYWKAVVAIAAKNVRMAWAMLAKGEEFKPMA

SEQ ID NO: 302449 - protein, 387 aa, unidentified
MPQPNDLSRSLVALDQDSTLVAVIEMGQASWLVPGIVPGVNRHPLKKITTDQEQLLQVLRRWENEAVTAGRMVKRIAVAYEAGRDGFWLARWLRARRIEAYVIHPSSVPVSREHRRAKTDRLDTELLKRAFLGWLRGEPDHCSMAAIPTLTEEDAKRPGRERESLVGERTRITNRIKGALARLGIGNFKPMLRNAPQLLETLRTPEGAALPPNTLAELRRDMARLSFVKQQIKEIERDRIERLQQAPGEPGNAMVRLLTRVVGVGVETADMLVHEVFSRNLRDRRAVARYAGLTGAPDESGKKRRERGLAKSGNARVRRGMLQLAWGFLVHQPDSVLAKWYRARTADARGATRKTMIVALARKLLIALWRLATTGEVPEGLGLRAAA

SEQ ID NO: 302450 - protein, 366 aa, unidentified
MDTIYIGVDFHARQQTVCYLKTETGELVTCELKHQDKQVVQAFYAQFRGQVIVGLEASGYSPWFERMLEALGCEVWLGHATEIRRRARWRQKNDRRDAELILDLMLHDEFPRLHRGAVQSREVLRMLRYRQKLIKIRTMSKNSLQAIALQAGLAKGSRLFTKAGQQELGTAEMTPVMQWQREHWLQLMAPLNQQLLETMVWFKAQSKDDVCITRLRTHPGIGLLTSLCIVHTLQPVSRFRNTRKVAAYAGFDPVERSSAERKCFLGISKAGSRLLRYLLVEAAQTAVRKDEDLKRFYKRLAERRGRPKAKVAAARKLLIRAYIMLRDEIDYAEFRHRAVAARLARRGQGPSNVPEVLIGQPASPEH

SEQ ID NO: 302451 - protein, 385 aa, unidentified
MDQTSSSSISTNTLHCALELSRNSWLLAIQFPDREQPSLYPIEGGNTEKLMAKLTAARDCWAKVSGSPPAITLCYEVGYDAFWLARFLMGRGIECLVIDPGSLQVNRRGRRVKTDRVDVKMLLRTLIAWCRGERHVWSLVRIPSIDEEDLRRSHRERGRLVRERTAHINRIKGLLFGQGIRGINVKSQYKTLAVDNLVTGDGHRLPPRLACEIAREIQRLAMVQEQIAKIERERDTAPTPCEATERKRHLLLQLKSIGPAISALLSREVYYRQFANRRQVGSFLGITPSPYNSGAEERCQGISRAGSGHVRAIMIETAWLWIRHQPKSALTRWFVERTAGQSTRVRKIMIVAVARKLAIALWRYVEHGMVPQGAILNPPTTGNAR

SEQ ID NO: 302452 - protein, 368 aa, unidentified
MKEQTSAATETLNKGKTMIDFSGKTIYVGIDVHKKDWQVGQFHAGLVLGNHCISGNSSELINFLKTRYKGATLKCVYESCAWGFNLQRQLTAAGIECIVAHAGDIPGSDKEKKNKTDKVDAIRLARHHAAGLLKGIYVPDEELQKERNLMRFRKKLVGDLTRSKNRLKSLLKFQGIDIPENMDNSHWSKNFIRWIEEQAAKDRLLQDTLELMLEEVKLQRQLLLKTERKVRALMNSEKYAAKAKLLRSVVGIGPKVSTLFLLEVGDVRRFKGFDPLNNLIGFYPGSNSTGEKDIDTGISKRKHKELRTMLVEAAWQAVRQDPAMLDAYEQLTKKMKGNEAIIRIARKLLRRMRAVLISGVEYQKGLVK

SEQ ID NO: 302453 - protein, 535 aa, unidentified
MGRSQKGASLFPKPAGLPVSRRRAFDGGCNAAAEGGAKGVFAEGFLGNARRNGEAQREEARRNELRSKIAKQERSIPVRSFSGDLIKKSPLGMMQGCQPHHSPYQGGLQMNCTQNYKIDQVTEQTLVVGIDIAKRTHYACFVDDRGRVLRKSFPIFQSKEGFQQLYKAIQGAMQAFGKSEVIVAVEPTGHYWLNLAYFLEEHGIPLVMVNPAHVCRSKELDDNLPTKHDAKDALVIARLAKDGRFLVPRLLHEIEADLRVGSTLKEKLRKEQTAVKNAIVRWTDRYFPEFWTVFRDLGKTALSVLEWTPLPADMAGRTVEELLEVYRQSEGMKCPQKAKIQALINTAKDSIGVTEGTAMARFEIAALVRRYRQLEAEIAALDAELKALVQTTMEYQWLKTVDGLGDATIIDLLAEIGSFAHYRDPRQLVKLAGLTLKENSSGQRKGQKHISKRGRKRLRSVLFRAMIPLIRHNEAFRELHEYYTTRSVNPLTGKQSIVALCRKLLNVLFAICTKKQAFDAERMKQDVLSQVQRAA

SEQ ID NO: 302454 - protein, 365 aa, unidentified
MTSMTTTTPDVTGGVDTHGQTHHAGVLDPLGRQLGDREFPTTPAGYRALLGWLRSHGELQRVGVEGTGTYGAALARHLRLAGVPVVEVDRPDRKARRAKGKSDPLDAYSAARAALAGTASGVPKSRDGRVEAIRALRVARSSAVKARSQTTNQLKSLLISAPADLREQLRTLTTTALIATCARLRPNGDVADPEHATKTALRRLGRRYQYLSEEISEADTELRTLVTAAAPRLIALPAVGPEVAGQLLTTIGDNSDRLRSEAAFAHLCGVAPIPASSGRTRRHRLNRGGDRAANNALYIVVLGRLRHDPRTRAYAARRTTEGLSKPEIIRCLKRYVAREIFTALTSHATDHRHSSTPPPTTSTTA

SEQ ID NO: 302455 - protein, 329 aa, unidentified
MMVTKMTDATLGIDVSKETLDANCARGQRKQSRSFTNSPDGWKMMLSWLKAMGCKQAHVCMEATGRHSLGPALALHDAGNIVSVVNPAQIRDFGRTKLGRNKTDQVDAALIREYAELFKPGPWTPPSPAMRQLSELQTVRAGIVGSRTEWRNRISSGLGDSTATKLAGATIDHFTIQLEAIDKAISETIDGDAELRGRRDLLLSVVGVGETLAASLLAEMPEPGVLRRSGELVAYAGLNPSHHRSGTSIDRPTRISKIGNATLRSSLYMPALSAMRYNPAIAALVARLKSAGRLKPKQIVVAAMRKLLVICFGVLKTGKRFDPAMAMPA

SEQ ID NO: 302456 - protein, 393 aa, unidentified
MYFLGVDIAKHNHVAALIDSNGEVVIKTIKFTNDSVGYSKLISTVFSAIPDADSSNIVVAMEATGHYWLSLFSALTDDGFAVSVYNPFQIKSFRGAFTIRKQKTDTIDAVIIAHYIRTFGANITNVPDEALLSLKQLTRYRSDLVKNTSAAKNQIIAILDKVFPELASLMSNVFGETGKAILQIAPTPEKVLALDSKKLLEIVTKASKGRFKQDFVDRLTLAARNSFGIKFTTKACAFELSQLINTIIFLEEQIADLDYEIKTIYSELDEFLTTIPGVGEVLAPIILAEIGDVNRFSDPAKLVAFTGVDPSTNQSGQKVSGDEKISKRGSPYLRYAIHTAAFVAISNDEHLREFYDRKKAEGKHHYVALAGVQRKLLQIIWAVLKEQRPYRPY

SEQ ID NO: 302457 - protein, 423 aa, unidentified
MTKRFSTPTGVVLVAIDMSKLRQEVLIERPEGGRRRRMTVMATKPDYDRLAADLAAIGRPILVGFEATGNYHRTLAYRLLTAGFELRLISSVALARTREALHNGWDKNDPKDAQVILHMLRIGATQVYVDPLAAGINDLQELSKTPETISKAKTQTWHRILTHYLPLYFPEIGRFAGNSRSDWFLALIERFPTPGSILALEREAFVTEAWPLVGRKVSKARLINDIYETACSSIALPVPEESTAITMFRMIIAQARGLIRERNRIEEIAQVTLADHHDYQLLRRIPGIGPINALTILAEAGDLRRFGHHRQFLKFCGLDLATCQSGTFRGRTKLSKYGNARLRRTFWMAAQVAARQCDNSFRDKLGRYVAGHADDADRRRKAMTALTAKMARVAHAVVKTGTEYRPFLERPGARWKDPSLQGP

SEQ ID NO: 302458 - protein, 341 aa, unidentified
MYFTGCDAHKRSCTFQHIDDDGALGLTMKTTCSASGLERYLDKLDAPTVVTFEASRSYWWLYQYFSKHPKVSEVVVIDPYRSRKIAEELSVQKGYGRAKNDRIDSEMMAEETRLGLAPAIVVPTPEQLEKRTVCRHRLEVRHKRTRTANLAHATLAMHGQQTAIKELIGNLESRNKLYEQLPEYIQLIINDCIAQIALFENQIAECDRMLEKLIPQSGPQMKLLMTAPGFGPVCSRIVLTEIFDIANFKAPKSLVNYSGLAPVEQDSDGKKGVIKLNRHCNYYLKYAFMTAAHAARTHPRYKRIYEQDVKKHSKIQAKINLARRLAKAIYWMLNRQEPFKF

SEQ ID NO: 302459 - protein, 408 aa, unidentified
MQVLYTRCAGLDVHKDTIVACVRCVSPPMHQEVRSFGTTTAELLKLADWLAEHSCTHVAMEATGVYWKPVWHVLEDEFELVLANAAHIRNVPGRKTDVNDAMWIADLLAHGLIRSSFVPPQAIQQLRDLTRTRKQLVREVSQHSLRIQKVLEDANLKLGSVLSDVLGKSGRAMLEAIVAGETDPARLAALAQGTARNKAAELREALRGRITEHHRTMLRLHLQVVDALQRTLAELDAAVGKALAPIRERTRLLTTMPGVSDLTASVVVAEIGVDMSRFPTAGHLISWAGLCPRSDESAGKRRSTRVRKSGTWIKTTLVTAAWAAVRVKTSYLRAQFLRIKARRGAKKAILAVAASMLTAAFHMLRDGTEYNDLGTQHFDRQDRSKTIRRLLKRLEDLGCDVPVGAHVA

SEQ ID NO: 302460 - protein, 352 aa, unidentified
MTLVGCDLHSRKQQVAVLVTDTGEVLEQELLHEGDAVERFYRALPRPVTVGIEATGYTLWFHAVMQKLGHTLLVGEAAKIRAMVVRKTKTDRRDAQHLLDLLKHERFPTVWMPDPTTRDLRALIAHRVRLVRMRTMVKNGLHAIALNQRVALGPSLWTKRGLAQLRALSLPPHTANRRADSLELLTWLTTHIDQLDAQIAEAAAADARAQRLLTHPGVGPLTALITVLVLGPAARFPTSKHVVSYVGLAPAIHSSADKYHLGKITKQGNALLRWILGQAAPLAARADGELRRAYFAVLHRRGRPKAKVALARKLLVRLYIMLRDQIDYEEFRRRGRVRRPRIAVNPVSATTM

SEQ ID NO: 302461 - protein, 349 aa, unidentified
MIVIGVDTHKRSHTLVAVDAATGGVLGERTVSASDDGALSALRSIVRLGDERVWAIEDCRHVSGRFERSLVAAGERVIRIPPALTANARRSARERGKSDRIDALAVAHTALRDGVERFPAAFLDEQAMEIRLLSDYRDQLVVERTRTTNTLRWHLLAVDPELEASLRPSGLQGPRIRAKVARRLARLGDGAQVRIAKGLLRRINEITRQELALRSELDTLVAAHSPQLLSEPGCGTITAAILIGHTAGAERFPTDASFARHTGTAPIPASSGNTIRHRLHRGGDRQLNRALHTIALSRARTDPLTRAYLDRRAAEGKTKLEALRCLKRHLARHFWKLLYKPGNSEPGLT

SEQ ID NO: 302462 - protein, 344 aa, unidentified
MATYYIGADVHSNNTELAIEQRGQIVARYSVPTSIPAISAVLGSLQGKKILAMEEGPMAGWLYRNLHAKVDQLVVSEPRRNKLISSEGDRDDKIDSSKLAVLLRGNFLKAVHHTCDSHRAHLKHWINLYHDRVRDAVRDINKIRACCRMHGVRIPRKVVRNQVRRHAWLSELDNPVLKVQLHMLWIGYDATKAQVEIAKKQFSAYARKYPIIASWCKLPGVGLIRATTIFAYLDTPWRFKNRAKLHRYCGVGLVRMTSGKDKKGRPKPTRLKLPWAVNRRIKNAVMGAAITAIERGDNAFKDYYERMRSHGITPVNARHSVARKLVSTMSAMWKTGSEYDETLV

SEQ ID NO: 302463 - protein, 449 aa, unidentified
MGKVKPQVIEDDEHQGVFERVAAIDVAKATGMVCVRLPRRDGARYSKVREVTATMGAVTDLGRQLMKDEIEMVTLEATSDYWRIFCYVLEMCGLAVQLVSPSRARNLKGRPETGKLDSMWLARLTEWGMPRPCFVPPAPIRALRDYTRARTGLVRERTRCWQRLEKLLEGALFKLSSVASKLTTQSAQDMITAMIAGERDPRVLANMAQTRMRARHDALVEALTGMLDSRHGELAEMELDQIAFLNERIGKLGASIGDALAAIPAARGVNADGTTGPDAGRGPDAAVLPAAMRLAEIPGISVTMAMAIIAETGLDMTRFPAAAHLVSRAGLCRVASQSGPRSRGGRKGHGNACLRSSPGQAATGASRTSAFLGERYGRIARRRGKAKARVAVARSILVITWHLLSDPAARYAGLGPDYVARRTDRDKKIRNHVRGLRSMGLEVTLTPAA

SEQ ID NO: 302464 - protein, 372 aa, unidentified
MQSTTKFIGLDVSKEKNSVAIADEGQAKPRYYGSITHSPAALRKLIKELGPANTLSFCYEAGPTGYETHRWLESMGAHCIVIAPSLIPKRAGDRVKTDRRDAEQLARLFRAGELTPIYVPAPEDEALRELVRARETAKEDAHRARQRVLKFLLRHQIHSPEHIKRAWTKKYRMWLGTVTFPQVSMQTAFTEYLHTLHEVEQRIGRLEKSLIEEAATHPKAEMIRILQALRGIGFLTAVTLVSEIGSFARFSSPAKLMAYLGLVPREHSSGASTKRGSITKTGNGRLRRTLIESAWSYRHRPAVKGDLAIRLEGLSADVGQISWKAQNRLHAKYRRLIFVKHKHPNVAIAAVARELMGFIWAVARTIEQPNAQ

SEQ ID NO: 302465 - protein, 342 aa, unidentified
MQLGSGEVFKAQLSGSPADALQWFATLPGPVRAVYEAGPTGFGLARAARAAGVEVMVCAPGAIPRQPGDRIKTDTRDALKLARLLAAGQLRPVVVPAPELEALRDLVRAREDLRGDLMGARHRVGKLLLRRGLTWDGPGATWSQRHLRWLSTIRFDDELVEVVFGEYLAHHEVLLARRDRLDKLVLEQSTQGSWAPMVARLRCLRGVDTLTAVGLVAEIGDITAFKHPKQLSSYLGLVPSEHSSGTKRRQGAITKAGSAHARRLLVEAAWQYRRPARVSEPLRRRQAGQPPAAVDAAWRAQLRLHRRWAHLDTARAKKRTTVVVAVARELACFVWEIAQQPD

SEQ ID NO: 302466 - protein, 453 aa, unidentified
MSKTIPSNTQNLRRMNPRAAAIDIGATMHMAAVNPDADDMPIRAFGTFTHDLNNLAHWFKSCGVTSVAMESTGVYWIPAYEILEQHGFEVILVNARYAKNVPGRKTDVSDAAWLRQLHSYGLLRGSFRPNAQIATLRAYLRQRERLVEYAAAHTQHMQKALMEMNLQLHHVVSDITGVTGMRIIRAIVAGERDPDVLASLRDIRCHSSVETIRASLVGNDRDEHIFALSQSLDLYDFYQQKMLECDHKLEQVIATMTHNVEKPQSPLPKIRIRTKQPNTPSFDVRAALYGLVGTDLTQIHGFGASLALKLIGECGTDLRAWPTAKHFTSWLCLAPGNKISGGRLLSSRTRRSSSRAAALLRLAATTIGRSDTVLGAFYRRLAGRIGKQKAVTATARKIAVLFFNALRFGMAYRDPSAEAYDERHRGRVLASLQRRARALGYQLDPIPDAESVS

SEQ ID NO: 302467 - protein, 454 aa, unidentified
MRKPQVIPDEDHEVIYERVAAVDVAKASGVVCMRTPDPARPGRFVNRIWDNVPATRARIAELGQELLRCQVQMVTLESTSDYWRIWYYVLESTGLAVHLVSASQARNLKGRPKTDKLDAMWLARLTQLGLLRPSFVPPAAIRAVRDFTRARTDLVRERTRCLQRLEKLLEDAMVKITSVASDGMKAQSSVAMVAALIAGERDPRKLADLARGRLRAKRDALAEALDGMFDSHHGVIAQALLDQVAFLDQRIAQMEAGAIAALAQVPESWGVDATGDTGPHTGTSPDSPVLAAAYRLAEIPGISVWLAIVIIAEIGLNMTLFPTPAHLVSWTGLCRSAAQSGTRHGHGKQKKGNSYARAAAGQAAIGAAGTATFLGERHARIARRRGGAIAQVAVARSIMIIVWHLLSDPAARYRDLGPDWHATHVNRDKKIRSHIRGLQALGLTITITADEQAA

SEQ ID NO: 302468 - protein, 409 aa, unidentified
MDVLHAHCCGIDVHAKFVVACCRQIGSTGSVTKTSRTFGTMTADLQALAAWLTSEAVTHVAIESTGVLWQPVWNILEPHVTIVLVNPRDVRQVPGRKTDVTDAEWLAQLLQYGLLRSSFVPPVAIRALRDLTRGRAKLVDQTTAVTNRIHAVLHDANIKLGSVATDILGVSGRAMLQAIVDGETDPSRLADLARHRLRSKLPALRRALEGRVTDHHRFLLRRLLGQLAFLEAEIAIYDARIAEASAPFVAILARLDTIPGVDRRTAENLFAELGAEMSVFPTAAHLASWAAICPGNHETGGKPLKGTTRHGNRWARRALTEAAWGAKHTRGTYAAAQFRRLAARRGAKRAIVAVAHSLLVAAYYIIRDEVVYTDLGVAHFDRLAPTQLTRYFVKRLEGLGHKVTLETAA

SEQ ID NO: 302469 - protein, 323 aa, unidentified
MSKIIGIDISKQTFDVSYLEKDKWIHKIFKNQNTGFEQFIKLISASDWIVMEASGPYYVQLATFLHASSFNVCVLNPLIIRRYSQTRLYRAKTDKKDAKTIAEYGAQYELKRWCPESKPSIEIKQLYTALELLKKQKHQTKRQLESFEATGLLSSDLRKELKQVLILLIRRIDKFEKKIEQIGRLAYKDTVERIKTIPGIGLKTAIMMSVITDNFTKFDNYKQLTAFVGFSPRLYQSGTSVKGKGHICKMGKPQIRKLLYLCSWSAKRVNKNCIEMYERLKEKGKPERVIKIAIANKLIKQIFSIATNKQIYNENHQNLYFLK

SEQ ID NO: 302470 - protein, 354 aa, unidentified
MSGTYYVGIDVHKKTLVIAVIGAQGEMVSEETIDADHDALLLWLKRNRRRGALRVALEASGSSPWVTYLLIDEGIDVTPAHPNHIRAIAETKRKCDRLDARKLAELLRLGVLRSVHIPKPEDRATRALLRQMRRLVETRTSAKNTITSLLAEIGKRSPWTDVFGKRGRQWLAGLDLDPEYLVIVDQELAQIDLVTQQLKDLDKALENALKDSPLHTLVRTIPGVGPRLGAAIALEFGDVRRFATAKAAACYTGLIPSTYQSGEKRRGGKITKEGNAILRWALVQAVLQQVRVDEGAKKRYVRLRNRIKRPKARIAMARRLAVAIWHMAKTGEAYRQEPTPEPVKRGRKRGAATA

SEQ ID NO: 302471 - protein, 391 aa, unidentified
MFLLGIDIAKLNHVASCIDSSTNEVVFSNFKFKNDFKGFSALLNKIKSFDAKNLIIGLESTSHYGENLINFLFIHNFKVALINPLQTSHLRKANIRDAKNDNIDSLNIAKSLIFTNLNFVSKKNIECFSLKKLTRFRSNLIKQRSKAKIQLTSLLDLLFPELQYLFKSKIHSKAIYSLLKKYPSAEEIAALKDDEISNLLYASSKGHFKKEKSIELKSLAKTTVGIKDTSISLHLIQLIELIELYTKQIKDIEIKITDIVNNLDTTLLSVPGISVIACAIILGETNNFENFSSSKKLLAFAGLDPKIRQSGNFNASSCRMSKKGSPYLRYALIFTAWNIVRHSEKFNKYYSLKRSQGKSHYNALGHVAHKVVRILFTLIKKNISYQEEKLE

SEQ ID NO: 302472 - protein, 341 aa, unidentified
MQITTIGLDIAKNVFQIHGIDATEKVVVRKQLRRGQVIAFFEALAPCLIGMEGCATAHHWARELTKLGHEVRLMPAKDVKAYVKRNKNDAADAEAICEAVRRPTMRFVAVKSAEQQGRLMQHRVRDLLMRQRTQLINALRAHLAELGIAAAQGREGIKELLAIVASDGGSRLPVDAYASLIVLAAQLQAVQTMIGSIEKRIVSQHRSNEASKRLETIPGIGVIGATTIAAVVPDPKAFRSGRDFAAWIGLVPRQDSTGGKQKLGPISKQGDRYLRRILVVGAHSVLRRARQQPEKYPWLAQLLARRPFKVVAVALANKMARIAWALLAKGGTYRAPQLTTA

SEQ ID NO: 302473 - protein, 396 aa, unidentified
MESLIVGVDVSKESFSAAGLDGKGTRCFTEDCAMDSDGFSKFLKTIMAQQPDISTVIVGMESTGCYHINLFSFLTSQGIRAVVINPLLIANFAKLSLRKTKTDKKDALTIAQFLLAHTDKISQMSVSQDMQDMRDLARERESLSHFISATKTEIKRVLQTTFPELERLCSVYSGIMLEFLKEFPSARLIKLAKPQAIARAMEPRGSGNRISTFTAADVIKLAKNSVGTVSPAKETILRGKISTLLHLKDRRDELTAMLTDYCNSLMVEDLEIVISVEGISNGTGTTFLAELGRIENFETHRHLIAYAGIDPTVYQSGKYEGKSRISKRGNKHLRRVLWLMTVSVILHNENFRAYYQKKKQAGLTYKKAVMATMHKLIRMLFAMLSHRQRCLTTLPN

SEQ ID NO: 302474 - protein, 335 aa, unidentified
MTIFAGLDVHKKYFHATALGESGDVLVQENFPNDSGGYDSLLDVTGEDVKVALEATYAWEYVFEELEDRVEEIKLAHPKRVEAITKERIKTDVRASEALAKLLRLGWLPEAWAPPKETRKVREKIRRRAYLVWKRTGFKNKIKADLAKQGIRKKVSYDGEGMEWLRSLETDSINDYLDMIEALNDPIERITGEVRREAKATEEAKLLMTIPGIGFVWSLTLTTELGDVERFFGPNEVAAHAGIVPSTEQSGSKEVHGSITKEGNKYLRWAAVECAYLHDRYADDTYLTRFFHKLAAKKNDQTAAVATGRKLLITIYWMLKRGEKFGTICIEVCWS

SEQ ID NO: 302475 - protein, 436 aa, unidentified
MKNPLHLPIINPHAAGIDVGSEKFFVSVGGKEPKVFLTVTGQMKELCEYLKAEGVRTVAMEATGVYWINLYGALEEAGFEVVVVNGAHCRNFPGRKTDMKDCQWLAVLHAHGLLTSGFVPPADIRRLRDYLRLRADLVSMAAQHVQHMQKAMDRLNVKIHVVISDITGWSGLRIIKAILAGERDAEKLVELCDKQILKTKRTPMLEALRGLWRKEHLFALELAVDSYESYQKQIARCDGLIAEVVKEISAGKPTPDLGKPKELRHNAIILADLQKQMAQIFGKDLTKLPCLNESTAALLLAEIGQDMSRWKDWRHFGSWMALAPSYAQSGRRRRREKRYLTRAGQILCRAVQCMAVGKHTWLASFYRRIRAKRGAKVAIKATAYKVAKLIYLVLTKGWEYVEEGIAKYEQRVRQMQLSVLKKLARTLKYDLIPKAA

SEQ ID NO: 302476 - protein, 363 aa, unidentified
MNNDGSKPREVFGGVDTHSNTHHAAVVDPLGRELADREFPATPSGYEALRTWLVGYGQLVMVGVEGTGSYGAGLMRVLAGTGITVVEVDRPDRSARRADGKSDPLDAYAAARAAASGRAAGTPKSRDGIVESIRCLRLVQRSAIKARTQCINQIRALLVNGPTDLRELMRPLTTARMIRTLANLRPGTDLADPGVACRRALRSLARRHGDLDREVKELHRGLTDLTRQAAPELLERPGVGVQVAAQLLITAGDNPNRLVSEAAFAHLAGVAPVPASSGKRQHRHRLNRGGDRAANNALYTVALVRMRFHQPTRAYVARRTAEGLSKKDIIRCLKRAVAREMFHLLTKPAALSVHAHKPLSSAA

SEQ ID NO: 302477 - protein, 348 aa, unidentified
MSQILSTVTVIGIDIGKNSFHVVGLDGDGSLVLRQKWSRGQVEARLANMLPCLIGMEACVGAHHLSRKLKALGHDARLMPAKYARPYSKGQKNDFRDAEAIAEAVQRPTMKFVATKTTDQLDLQALHRVRERLVSQRTGIINQIRAFLLERGVAVRQGLRFLRAELPRILAALPEALSSRMVHLIEGLAEDWRRLDERIDCLSGEITALARQDAGCERLVSVPGIGPIISSAMVAAIGTGDAFSKGRDFAAWLGLVPKQISTGDRTILGTISKRGNRYLRVLFVQAAWVVLIKPQSWERHGLKRWIEAAKKRLHRNVLAIALANKLARIAWSVLARGRAFETSKLAAA

SEQ ID NO: 302478 - protein, 358 aa, unidentified
MYKFMKKFFIGVDVSKDTVDVSFFDDDRMKSPEYLAQYSNSPKGFREMVKDLRMCCHGVSSGQWLFCCETTGRYDHPLCHWLVDHGMVVWRESALQIKWSSGIQRGKNDRVDSLRIAEYAWRHQDKMQKFVKPSESLSNLKAAFTHRRRLVEKRTATRCQLKSMSSEKGLSASVARMIVRDLSREIERLSASIATMDESIQEIIRSDSELDRNYRHIISVKGVGPITAVALIVCSGNFKAITSAKKMACYCGVASFRSQSGTSVNRKASVSNLSNRQIKSLLSMAARSASRSNPVFAEYFNRTLSRGKPVALVYNNLRNKLITVVYKLIERDCDFDVDYMRMHSTGQRANEPAIREAV

SEQ ID NO: 302479 - protein, 423 aa, unidentified
MRGFGLDVHRDFCEVAIAEGSEVRSAGKVPTRVPALELFAESLVASDVVALEATSGAEKVTSVLQARGIRVIVANTRRLRSISQAKAKTDKLDAQTLARLLMSGLLDEVWTPDERTRTLRRLTNRRERIVRARSRAKNEAHGVLARNLCERPPVTDAFGKAGRRWFATLELPVDERLTLDGCLRQVDFLEAEVEALEREIARHALAWPEILRLMSVPGVNVNTAATFLASVGDIRRFSSPRKLVSYLGLDPRVHQSGGTPARHGRISKEGPSEARHMLGEVAWKVTLTAGPLRAFFERIRARRGSQVAATATARKLVVLFWHMLTSEEDYAFARPAMTRNKVRQLELTAGAPSQKGRKGIAGRKSKRLFEAERELSRQAEVAYRRFISDWTASGPSKGGAGATPGRASQKPLKGKAARQATSP

SEQ ID NO: 302480 - protein, 373 aa, unidentified
MFHFTTLFIGMDVHKESFSLCYYDMMTNQFKHSTKVGPNVSYIVNYVNELRRLYGQDTEVLCGYEAGCLGFTLYHQLQAHGIPCIVMAPTTVMKEGSKRVKTDKKDAAQLAKALAFRSYRPVHIPTAEDEQVKEYIRMRTDHKVALKKIKQQILAFCLRHDFRYTEGSNHWTQKHVRWLRSLNPEGLYAEILTEYLLTYEKLVDQIERYDARIEQLGQSDSYQEKVSRLSCFIGIKTLTALSIVTEIGDFNRFATAQQFASYLGLTPSENSSGDKERRGAITKAGNSHVRRLLIEAAQSLTKGTIGYKSKELKRRQSGNRVEVIAYADKANERLRRRYRTLVLGKNKKQNVAKTAIARELSGFIWGMMTERIA

SEQ ID NO: 302481 - protein, 378 aa, unidentified
MDRATNSTAPADRLFCAVELSKNSWLLGIQFPDRQKASVYPLKGGDSEGLMAKLVAACDRWTKVSGKKPSIILCYEAGYDAFWLARFLQARGIECLVVDSASMQVNRRSRRAKTDRIDLAKLLRALIAWCGGERHVWSVVRIPSVDEEDLRRSHRERSRLITERTAHINRIKGLLFAQGIRGINVKACYKTLQIDKLVTGEGRPLPPRLAREIKREIDRLALVQQQIAAIEEERDESPTTCKETEKKRAQLLLLKGIGPTGSAVMAREVYYRQFSNRRQIAGFLGLATSPYDSGQMERSQGISRAGSGPVRATMIQIAWLWIKHQPKSAIAQWFVQRTEGQSGRIKRIMIVAVARKLTIALWRYLEQGLVPQGATLTR

SEQ ID NO: 302482 - protein, 407 aa, unidentified
MDVIIERACGMDVHKDNITACIITPEGKEIETFSTKTLFLIQLVDWVKKHRCTHVAMESTSVYWKPIVNLLEAEDVEFLVVNAQHIKSVPGRKTDVKDAEWIAKLLRHGLLRASFIPDRNQRELRELVRYRRSIIEERARQHNRIQKVLEGANIKLGSVVSDIMGVSARDMLHAIADGENDPEKLANFARRTMRMKKDELKLALQGYISDHQRLMIKTILTHIDFLTEQIDMLDQEVANRVSIYQEDVECLDSIPGIATRMAEQMLAELGTDIKNQFPSASQMCSWAGLVPGNNESAGKRKSSKTKNGNKYLKSALIEAAHSVRGSKNYLGALYRRTAARKGKKRAGIVVAHAILRISYYLLTRKEMYVDLGEDYFDKQKQQSIVRHSLRRLESLGYTVSIVEPEAS

SEQ ID NO: 302483 - protein, 452 aa, unidentified
MAQGNLNLTPKPGKGRGAITITHPNAAGIDIGSASHFVAVPPDRDDEPVQEFASFTGDLQRLADWLQACGVDTVAMESTGVYWIPLFELLDARGFTVLLVNARHVKNVSGRKSDVLDCQWLQQLMSYGLLRGAFRPDDGVCVLRALTRQRHTLLRTQARSVQHMQKALVQMNIQLANVIADVAGASGQAILRAIVAGERNPYALAALRNARVHASEEDIARSLRGNWRTEHLFALRQALEAFDFCGQQLAQCDTEIDAQLQRLHISDTEPAKGKKRGKARNAPKFDLRTRLFQMCGVDLTRIDGIDVTTALAVLSETGTDMRKFASDKHFASWLGLCPGTKITGGKVMSGKTKRCANRAAQALRLAAAALRSSQSALGAYFRRLCSRMDKPKAVTAAAHKLARLIYAMLTKGEEYTDQGQDYYEERYRQRVLHNLSQRASKLGMKLVAAEPV

SEQ ID NO: 302484 - protein, 399 aa, unidentified
MQRTVPLCYPRSAARRHNTSLFVALEFSKSIWLLAVSAPGRDKISKYRVPSGDIAALLGLLTRLRTEAERRCSEVVKIISIYEAGLDGFWPHRALEAADVESHVVDAASIAVNRRSRRAKTDRIDVETLLRTLMGWARGELRIRSMVRPPSPEEEDARRLTREREALVTERVRHVNRIKGLLSTQGVVGFEPIRKDRRKRLEELCRWDGQPLPARLKKELLRELDRLELVMSQLAALETERDRILQASQTACQVVTQRPTAQPASTVAGTHLLRLRGIGPEIASVLSLEAFYRSFANRREVAAYSGLAPSPWKSGGIDIEQGISKAGNARLRRTTIQLAWLWLRHQPGSSLSRWFHQRVGDQRGKIRRIAIVAVARKLLVALWHYVTQGLVPAGAELKA

SEQ ID NO: 302485 - protein, 507 aa, unidentified
MAVRSKHVTTGADGTDAATVAEHGGDGAEVAEERVQVVERAAAIDVAKGSGMVCTRVPGSRPDRRRQKVWQVTATYGAVTALMDQLRCEGIQRLVLESTSDYWRIWYYLAEAAGLEVWLVNARDVKHLPGRGKSDRLDCVWHCKLNERGMLRRSFVPPQAVRDLRALTRTRARLAQDQARHQSRVEKILEDALLKISVVISDLFGASGRRFLDALVAGERSPKALAALGDTRLKASRKELEDALTGRFRDIHAFEITTHLRLIDAINDEIARLDEAIGQQLAKVPGTAPACTACGLAGGGHAPGCGARGTVLLPLAQRLDEITGVGERNAAVIIAELGTDPSIFPTPGHAAAWARLTPRTMQSGDTTRPGRTGKGNRYIRGGLGQAAMATARTDTRLGALYRRIARKRGKQKAIVAVSRVICEIAWILICDPAARFEELGPDYYSPRSPARRTRDKIREIERLNPGATTPSPATSRGVTPPAVTLPGHAHPSQPDCPGQLAAALHRG

SEQ ID NO: 302486 - protein, 342 aa, unidentified
MTVIGIDAHKRSHTCVAVNDAGAKVAEKTVASTSAGHAQALRWALTRFGTDLSWGVEDLRSMTGLLERELLAAGQKVVRVPPHVMARNRGSARAWGKSDSVDALAVARAVLREPNLAVAFHDPISWELRLLVDRREDLVEQRVAVTNRLIGRLHQLSPDRPTPAHLERTTSQLALSEYLREQHGLLAELARHELADIGHFSRGISTLTEDIVGRVRELDSTLLQLQGCAELTAAKLISETANMDRFRNEAAFARYVGVAPVPQSSGTAVGRVRASRSGNRQCNTAIHRIAIVQLRLKGPGREYYSRRRNEGDTAHTAIRCLKRRLCRIVYNRLRADYQHRNL

SEQ ID NO: 302487 - protein, 384 aa, unidentified
MSVYVGIDVHRNRSQVAVVTDDGQVQVNRNVPNGVEPILKLIGDLPTGTPVAFEAAYGWGWLVELLEDYGFDPHLVHPLRCKAIASARLKNDKVDAAILAQLLRADLLPEAWIAPAEVRQLRALLRHRVALVRLGTRLRNRIHAVVADHGYDRPGACWTGSYWTGPGRQWLAELPLPDVSRLIVADSLAFVDALAPTIDRLGHEIHARAKQDPRVKVLTALPGVGEFTAMVLLAEIGDISRFRNARALASWAGLTPTVRGSDLTVRHGHISKQGSPYVRWVLGQAAHVAKRHPEFAASYHGIANRRGSKIATVAVARKLLTRAYHLLANTDANNQHAATDTADNSTCVARGPRARSQTGRVTKPRVRSLQRHEPAASGHARAFD

SEQ ID NO: 302488 - protein, 559 aa, unidentified
MTVVGLDVHKRVVEAVVLRAEDGRILHRERFACTREELVRFATKRLGPKARVALEATTNTWSIVELLRPYTGELVVSNPMRTRAIAEAKVKTDKVDALVLAQLLRADFLPRVWQPDGMTQARRRLTARRASLVSDRTRVKNRIHAVLHQRLMEPPVSDLFGTKGMRWLQTLELDAAGRLAIDSELRLLRQIEIEMKAVDEALAVDGYDDPRVRLLMTLPGVDVAVAQTLLATLGDIQRFKDPDAAASYMGLVPSTRQSAEHCYHGPITKQGKGQARWMLVQAAQHLSAHPGPLGVFFRRLAKKKNRNVAVVATARKLVTIAWHMLKNNEPYRYAIPRSTETKLSRMRVKATGERRRTGPPTGQPRPTAYGSGVRTRTVPALDTIYEREGLPPIAPLSDGELRMLRQQKVLKHVAQTSRPQRLPRRAAAAEPPEAAGAAASSQRSVQPASASSSGSAAVAMADTSVSPASTDQSASACTSLRSRREADSTLPLKSYAWLVTTPAPSYTWYGRPRGFCDVMTGPVPAENDALARFGLERPDQVLVLQPHLDRGQLGPRIRP

SEQ ID NO: 302489 - protein, 340 aa, unidentified
MNYVGVDLHKKVITACVMDANRKILDERKLYPNEPHRIVEFFEGLGEYRVVLEATSSYSWFVELLEPTAEEVVLANPAKMRVIAESTRKTDKLDARVLAEFLARDMIPRAYMPTPRQRRHRALVRHRKYLRERATAVKCKIRHVLADYNADRRDLFSAGGGEAYLRALKLNEVDRFRLADLWNEWESIEKRLARTAAKIKAFAKEAPRAEAEARALLKTAPGVGVVTAEVVLCELGDARRFKDAKAVCSYAGLVPIVRQTGGKKSKDGRITKQGPGLLRWALVEAAWRLVASSPRWSGTYQRIKKRNGAKRAIVAVARKLLCVLYAMLRDSKPYRPLPAA

SEQ ID NO: 302490 - protein, 369 aa, unidentified
MQENTNVATLAGLRKQNIVGRMTIGIDLGDRKSHFCVLNDQAQVIARGFLPTTITAFRREFEGLPPSLVAIEAGAHSLWANQVIKVCGHDVLVGNPRKIRLITESDRKSDRVDAESLARLARADRLLLAPIQHRTQEKQVQLSVIRARHALVRSRTSLINCARGLVKPMGLRLPACSAEAFAKRTDSTSLPEILRVALAPLLKQIETVNEAIRDYDRQIEQIAATQYPETCLLKQIKGVGTLISLTYVLTLEDPHRFARGRDVGAFLGFLPRQKQSGERAPRLGISRAGNEYLRTLLIQGAHYILGPLGPDTDLRRWGLKLAARGGGGAKKRAVTAVARKLSVLLHHFWKTGEVYEPLRKTQMAEIPAA

SEQ ID NO: 302491 - protein, 326 aa, unidentified
MTVICEGLIVKRDTIAASPAGLVAYLQRCFSGARIRSAYEAGFSGFVLHRILVQSGVENIVVNAASIETAANDKVKTDLRDSRKLAEQLHAGRLRAIYVPEPQQEFRRQLTRTREQIVRQRTRLANQIKSKLHYFGLIGEVVPDQAITDRSLKQLEGLNLSEELAYALSLLIAQWRLLTLQLAELRQKFRGQARSDTALERVYRSAPGIGAVGARVLANEIGNPAQRFHNERALFKFTGLTPAEHTSGENVRRGHISRQGSARLRHQLVEAAWRAVAVDPALGIAFGRLAARCGKKRAIVAIARKLIGRLRACFSAGVLYEYGVCV

SEQ ID NO: 302492 - protein, 329 aa, unidentified
MNYKWFVGIDISKKTLDLVLYKKELQKKSPHCKIHNNQSGFKAITKWLKEQNAKLQDTLFCMEHTGIYGLEIANFLSKNGNYCIESSLHIKRSLGLIRGKNDKIDAFQIARFCYLHREELTPGKLPTKSMLLLKSLINERERLVKVRAIDKTIIKELNYKENIDCITRAEDRIIILTKHIHQIEKEIEAVVMGDQKIEQSYKLAKSVTGIGLVNAIMFILFTNNFTSITDARKYACYSGIAPFEHTSGSSIRGKTRISHLANKRIKVNLTNGARSAIINDPELRLYYERKKGEGKEHGTIMNAVKFKLITRVFATVKRGTPYVRLRQAG

SEQ ID NO: 302493 - protein, 353 aa, unidentified
MRYIGIDLHKTNFVVCFLNEDDSYRVETFPLSKSGINRFLLEVEKTDQAAVEVTQNIYYFYDQIKENVSRVVLVDTYRFSVIAKSKQKTDKADALALARFLKLDYLPEVPVPSERIRQLRELLRARETLVSVRTKLKNMAHAALTRNGIKVARSAFATEIARERLLNRDDLARIDSIILHTAIRQINELDREINQLESEIIKRGKTLKGLKRLLQLHGMNLLSAISLLAEIGDIELFDSSKQLTSYAGLVTSTRQSNETTRYGKITKQGRKRLRTAAIRAVLSMVNRTSTPLMDFYQRKKQEKGSGKAICATARKFLTIVFVMLKKDLDYWYLEDRLYNQKLRQLNRALAAAA

SEQ ID NO: 302494 - protein, 429 aa, unidentified
MDTVNTDKDHTQNQYAAFIAIDWADQKHAFSLQVDGQAKKETGILEQKPEIIGPWVAKLRERFGGRPVAVAVEQSRGALIHALLNYDFLVLYPLHPTTVAKFREAFKSSGAKSDPLDTDQILQILTKHAELLTPLHPDTEPTRLLGRLVEDRRKTVDYRTGHIQALGASLKEYFPQALELLNENLTSRLAGDFLKKWPSLEAFQQAKPSTIKRFYYGHNIRSPKVIAQVLQLAASAQPLTTDPAIVESGSRLSQMHAQLIQSLNPVIADYDQRIQQVFNHHPEAKLFSHLPGAGAVMAPRLTAFFGTDRSRYQAAVNVQSFTGIAPVTKSSGKTRVVFLRRACPKFARQTFHEFARLSIPACQWARNYLDYYTAKGKKYHTIIRALAFKWIRILFRCWQERRPYDDTQYMQGLKQRGSIFATLHLQKKV

SEQ ID NO: 302495 - protein, 315 aa, unidentified
MEAMIERCAGLDVHQETVVACVLFGPLDKKPKTSIETFSTTTTGLLALSDWLATLQVSDVVMESTGVYWKPIWNILEGSFHLVLANARHVKNVPGRKTDVKDAEWLAKLLRCGLIESNFVPPEDIRDLRDLTRYRKKLIHHRTSEQNRIHKILQDANIKLTSVLSDIFGVSGRRILEAILNGEKIETDGLRKMVDWRTKASITDIASAINGRIRRHHRDMLRYHWEHMGYLEKAIEELEKQIDQLLSPYRKEVELLDGIPGVNKAAAATFIAEMGVNMSVFKSAKHLASWAGVSPGNYESAGKKKQVKPHKETKH

SEQ ID NO: 302496 - protein, 359 aa, unidentified
MLVERTSVGLDVHARSVAAAAIDGVTGELKRARLTPSHDHIRSWLGELAGPVAVAYEAGPTGFGLYRSLTALGIRCVVAAPSKLQRPSGDRVKTDARDAVHLARLLRLGELTAVCVPSVDQEAARDLVRAREDCRGDLMRARHRLSKLLLRQGIVYCGGNAWTDAHDRWLRRQRFDSPATTTAFESDYDTILTVAARRDRLDNTIAELAADSEFTPVVRRLACLRGISTLTAFALAVEIGDWHRFTGNTIGSFIGLVPSEHSSGASRVHGSITKTGNTHARRLLVEAAWHHRASYRPGKTMHQRWELAPAAARARGDAGNRRLHARWITFNLRRKRPVIANVAIARELAGWCRSLAVMD

SEQ ID NO: 302497 - protein, 1154 aa, unidentified
MAIYHFSAKVISRSSGSSAVASAAYRSAQRLHDDRLDRSHDFTNKAGVVHSEVMLPDAAPERLGDRSALWNEVEKTELRKDAQLSREIEFAIPRELSQQQGIELARDFVRSEFVERGMIADLNVHWDIGADGLAKPHAHVMLSMREVGEDGFGKKVRDWNRTELISAWRERWADHVNERLASLDIDARIDHRSLEAQGIELEPQTKIGAPSLRMGPEADRLIEHHAIARENGERIIANPDIALNAITKSQATFTRRDIAMFVHRHSDGKEQFDRALSAVQSSPDLVALGKDGRGNERFTSRDMIEAEARIERASALIARREQFRLRGQAREHALATAEAQGLVLSGEQRAAFDHVTAGRDLGIVVGYAGTGKSAMLGVAREAWVHAGLSVRGAALSGISAENLEGGSGIASRTIASLEYQWAQGRDLLTASDVLVIDEAGMIGSRQMERVLSAANEAGAKVVLVGDPQQLQAIEAGAAFRSIAERHGHVEITEIRRQQSDWQRDATRHLATGRTAEALDAYYEHNMVHTAETRDAAREELIEGWNRERVADPEHSRIILTHTNDEVRALNVLARGKLREDSALGADVSIAAERGTRDFATGDRLMFLRNDRELGVKNGSLGTVQSVSAQRMAVLLDDGRNVAFDTKDYAHIDHGYAATIHKSQGVTVDCAHVLATPGLDQHSSYVALSRHRESVSLHYGKDDFADAEKLVRALSRGRTKDMASDYGQSEGMERRFAERRGISFRERIAAVFGEDLAARTKGAPPSFAGDLACTSPALGASSAPVQRKRRSRMMEYFAGLDVSIEETAICVVGDDGKVVLETEVPTEPQLIADALERFAGRLRRVGHEAGSISPWLHAGLIELGLPAVCLEPRHVRAALSAQRNKTDAADALGIAHIMRTGWFREAHIKTEDCYRIRLLLVQRRNLKRKFLDIENAIRHSLKVFGIRLGKVGRGSMEKAVRKAVADDAMTAGLMECMLRARAALWAEYLILHKLVTQLAMRDELCRRFMAIPGVGPVTSLSFKSAIDDPARFRRSRNVAAYFGLTSRRWQSGSSIDVKGRISKAGDPDVRRALYEAASAMLTRFKGRDTIKTWGLKLAKTKCHAKARVAVARKLAIVMHAMWRDDTFYVGDPDAEAHETDSAYAAKMQRLSLARS

SEQ ID NO: 302498 - protein, 351 aa, unidentified
MFIIGVDYHPSFQQIAFLNQETGEFGEQRLDHSDGEVEKFYRGLQSQGVHARVGIEATGYARWFERLLAELGIELWIGDAAEIRTLRVRKRKTDREDAKLLLKLLVEDRFPRVWIPNPENRDLRQLLWHRHRLVQMRTRILNQLQAVAMNEGKRWKKRLWNKQGRAQLAQLPLAPWASRRRQDLSELLDRFNPVIVELTTAVEREANKRPEAVRLMTHPGVGPLTALAFVLIIGDPFRFARGKQIGSYVGLVPCENSSAGRQRLGHISKQGNRLLRFLLVEAAQVAVRFDPDWRRRYLHLAMRRDRRIAKVAMGRKLAVRLFWMWRKGWDYSQLVEFGSHAGPLEETPGVQ

SEQ ID NO: 302499 - protein, 329 aa, unidentified
MKVQQIIGADLSKKTIDLVSHLHNNHLQIENCLFGFKQMLRWLVQQKIDLCETMIVMEHTGLYSFCFEDFLHQHHIVFTKVNALAIKRSMGLVRGKNDKTDAARIAAYGYEKKDNLKADEPVNQEMKRLQMLHSTRERLVKQRSGLICALKEYKYIGIPEKDIILKSQLQMIKAFGKQIYKLEAEIKTVIEKQPSLNQNFYLLQSIKGVGEVLSMATIIKTNNFTRFADVRKFACFCGTAPFEHSSGSSIKSKTRVSHLADKQMKTLLDLSAKTAIQYDKELRDFYIRRLEMGKSKMSTINIVRNKILYRMFAVVKRQTPFIENYLQAA

SEQ ID NO: 302500 - protein, 305 aa, unidentified
MQTITTIGLDIAKSVFQVHGVDAGGQVIIRRQLKRRQVVAFFQKLPPCLIGIEACASSHHWSRELQALGHTVRLMPPAYVKPYVKRQKNDMADAEAICEAVTRANMRFVPTKTPEQQSGLMLHRTRHMFIRQQTAVINSIRAHLAEFGIVAPVGRKGVTELLRIVADPNDKRMPEVARACLAALGTQLLALKEQILEFDRMILAWHRSNQTSKRLHYIPGVGPMLATALVASVADPRTFRSGRNFSAWIGLVPKQHSSGGKERLGGISKQGDRYLRSLFVAGALAVIRYAKIHGTGHRPWLTAFY

SEQ ID NO: 302501 - protein, 311 aa, unidentified
MTSAGIFVGIDVAKAQLDIAIRPSGEYFTAPHDDPGVSGVVQRLGALQPTLVVLEATGGFELDVASALGAAGVPTAVVNPRQVRDFARSTGLLAKTDRLDAQVLAHFGEVLRPAARSLPDAQAQELSAVLLRRRQLVEMLVAEKNRLPMATRRIRPQLQRHIEWLQQQVADLDRDLGALIRSSPLWRAKDDLLRSVPGVGPVLATTLLASLPELGTLNRQQIAALVGVAPLNRDSGTWRGRRTVWGGRAHVRAVLYMSTLVAVRHNPRLRSFYVRLRDAGKVPKVALIACMRKLLTILNAILKHQTPWALP

SEQ ID NO: 302502 - protein, 418 aa, unidentified
MKKVYRRCCGIDVHKDSVEVCVLPAVGESGPAKRKRFGTFRAELIQMRKWLKLLQVTDIAMESTGVYWRPLWNVLQDQGFERLLLANPMQVKALHGRKSDRRDAQRIAEFLQDERLDGSFVPTAEMQKLRMLLRDRVALVEQRNEVHNHIRDLFETAGVKLSSVLSDLMGVTGRGIIEALIAGETSADKLSWKVRGSLRKKEKQVKESLAGCFDDFHRDVLKRFYRQYTFLSEEIAEFEKLIEERMAPHAEMVARLDGIPGVDRLVAWHLIAELGIDMAVFLNADHCASWAGLVPGENESAGHSKNNRCRKGNRVLRRVLTQAAWAASRCKKGYLRAFFYRCKGRGSWAKAIVATAHKILTIAFCMLRDGTPYRELGDDYFDKLNPARTAKRLIARLEALGVKIQATMPPAVPSELRH

SEQ ID NO: 302503 - protein, 353 aa, unidentified
MKTYYVGMDVHKATIVIAVLDANGKVVSQTIIETSTQTVRNFFQSLRGEIHITFEEGNHAAWLYDVVKPLVKRVVVCNPKHNHLLKQGSKSDRIDARKLAELLRLKALKPVYHGEHGTRTLKELVRCYECLVKDLSRVQNRLKALYNSQAIRNRGRELYHLSKRESWIQKQENAGRRMRAELFFRQMDELKALKRAARRAMITESRRHEAQSILSQVPELGLVRVAQIIATVDSPFRFRTKRPFWAYLGLAVETRSSADHELTNGRVSRRKVKIETRGLNEDYNRRLKSVFKSAATHACSCGVYKEYFEKLVAGGMRPEMARLSVARKLAAAVLAVWKKGQSFDEGMIMSRAA

SEQ ID NO: 302504 - protein, 351 aa, unidentified
MQYYVGVDNHKKFSYLSVMDEKGVVVKEGRVVNTKEAVNRFLGKEYTKGTSAVLEAGRNWTVMYDWLEEELDEVKLAHPLKVKAIAEAKIKTDKIDAKTLAHLLRCDLVPEAYVCDKDTRVVKNILRQRMFLVKLATMVKNRIHLIIDRHPEVKNQIDLSDLFGKQGMEWLTVVVLPKDDRRILDEELDLLKYLNEKIDSSNHWITNLGKDDPNVKLLMTIPGIGKFFALLIATEIDEITRFRNKNKLASYAGLIPSVHASADKIFHGRIVKHGNKYLRWALIEAVWPAIRKDLSLREYYESLKARKGANQAKVAVARRISIIVYRVLSQKRNYILNYSGCPHLSLAEAAR

SEQ ID NO: 302505 - protein, 444 aa, unidentified
MHPLNDAAETQPYAACIGLDWADQKHFWSMRTADGKLTHGQLDNTPEAIEIWAAELAQQFGGRPVAVALEQARGAVIGMLSKYAHLVLFPVHPTTLANYRKAFSPSGAKSDPTDGDLILDLLVKHPERLRRLQPDTVETRSLQFLTEERRKLVDQQTSETQRLINWLKQVFPQILRWFDDPAAPLVGELLLRWPTLQHLQKASSKTLLKFFQEHNCRSEERIKQRLDQIGKAVPAITDPALLKTGTLCIHNSVGILKHMRSGIAAFDRQIAEIYRAHPDRAIVESFPGAGPALEPRLIAAVGSRRDRFDSASSLACFTGIAPVKQSSGGACWIHWRRACPKFIRQTFHEWAACSIRYCDWARVYYEQQRAKGKGHHAAVRALAYKWTRIFFRCWRDRVPYSEERYLKNLRPAQASAGQSASQLKFEWKPCAGFSKLVEVLEVSS

SEQ ID NO: 302506 - protein, 348 aa, unidentified
MNQFIGLDGHKNSCTFVVINEKGKVKQKAVLPTDEKALLEFVKSIPGRRHLCIEEGTQSQWFYEIFSDHVHDLAIVQGRKSPGNKDDERDARNLAERFRTRDLGHRVQKVPDSLATLKDLVRSYEMLNTDLVRVKNRIKHLYRSRGIAYSKTGCPFCTGRGGCQKPGFHQRLQLLRTQQESLKPLKAEAQKAMVTEANRHPMTRILQTAPGFGPVRTAELLSIVIDPYRFRTSRQFWCYCGLAIVGRSSANWVQKPNGELSRVKINHTRGLNQNFNHMAKAIFKGAAVTVLTSMPTEPLRADYDRLLANGTKPNLARLTLARKIAALVLAMWKNKEAYDPGKYRVTSI

SEQ ID NO: 302507 - protein, 345 aa, unidentified
MEFFAGIDLGKRRSQIKVLNQDRKVVEELKIDNDPKEFFRIFKKYKGKIDVACEASSNAFWIWDTLSPIVRRFSIGHTSKIRWIAEARIKTDKIDAGILAELLRADLFPAIAVPPKRIRELRELIRGVIRLRRQGLRYRNQVHGLLGRHGIPYKRSEVQDTKLGELVRRVELPRPARLAADALLRLEAATREEIRQLQIELQKELKGEEEINRQISLLESIPGVGFFSAALLVLELWDVTRFSDAKHLASYIGFVPGTHQTGETLWHGSMTRQGNVLVRWILVQDTWVAIHNHWFFGRMYDRYKKRKGNTRAVVPVARALLKTIHRVWTEQKSYEELYKEKTLVG

SEQ ID NO: 302508 - protein, 377 aa, unidentified
MSKLRFVGLDVHAETIVVAVAETAGEVRSLGGIPNRLESIRKLVHKLGPVQHLRACYEAGPTGYALYWQLTQLGVECAVIAPSLVPTKASDRVKTDRRDAEKLARCHRAGELTAVWVPDAAHEALRDLVRAREAAKKDQLRARHRLGKFLLRHGQQRPEGVKVWTKKHREWIKSHVRFEQPALEATLADYLEEVDHVGNRITKLETAIDEAIQQAPPAIKVVVEALQALRGVAQTVTVSIVAEVGSLSRFPNPRALMGYSGLVPSEHSSGNRVQRGGVTKTGNGHLRRVIGEAAWAYQHRPNVIGFLAQRQKRLAIGEESKKIAWKAQQRLHKRYKALSARGKNKNQIITAVGRELLGFIWAIGVSVEKQHPVTTAA

SEQ ID NO: 302509 - protein, 409 aa, unidentified
MDQLIERCCGLDVHRDTVAACVRVPGPNGKQRHEVRTFGTTAVELLALRDWLEAHGVTHVAMESTGVYWKPVFYVLEEAFTCLLVNAAHIKQVPGRKTDVKDCMWIAQCLEHGLLRGSFVPPAAIREIRDLTRHRKVLIQERTRAANRVHKLLEDAGIKLASVATNILGVSGRAMLEALVHGTTDAEVLADLARGKLRKKLPALRQALAGRFRPHHAFLVSQLLAHVDYLDEAIATVSEEVEGRLAPFAAQLTQLDTIPGINKRTAEVIIAELGVDMSCFPSDRHLASWAGICPGNNESAGKHKSGKTRKGNRWLRMTLIEAAAAATRTKDSALQARYRRVMRHRGHKKAVVAVAHAMLRAVYHLLAEGTTYREPGADYYDRRHTHRVTRRAIQLLERQGYRVVLEPAA

SEQ ID NO: 302510 - protein, 389 aa, unidentified
MLLEHPSDGLTAIRTHIAAIFVSLELSRSTWLVTCLSPGKGERMSKHSLTAGGVAGLLALFAGLKRKAEVRTGQSYPIITIQEAGLDGFWLHRVLQQEGIESHVVDPASIATPRRRRRAKTDRLDGEALLRALLAYKRGEPRVCAMVVVPSPEEEDRRRLCRERRTLIEERVTHVNRIKGLLFAQGISDYAPIRRDRRTRIEALRTGDGRELPSHLKAQIGRELDRLELLLGQIKAVEAAQDALLAAAKKPASQQAAPDPVTMLLALKGLGANFAAVLWSEAFYRQFANRRKIAAYGGLAATPWQSGGIRHEQGVSKAGNPRLRTTMIQIAWLWIRHQPQSALTRWFKERSQQGRKRAIVALARKLLVALWKYVTQGVEIEGAVMKPAA

SEQ ID NO: 302511 - protein, 311 aa, unidentified
MASFLGIDVSSLSLDALVRPQGIKISVRNDPAGFEELVKSLRGLSIKRVLLEATGGYERDVMRFLQDANYKVIRVNPKRARWFADSLGIKAKTDAIDAAVLAHFAEVIPDKPTLKTSPERALLRELLQQRDRLVQQRDDDRRRLKQAQSAMVAIFLKTNLQHFASQIKLVEQAIKRQATVLNDERIAKLDEVKGIGIVTATKLVALLPELGHVESREIASLVGVAPFNHDSGKSVGKRFISGGRFEVRRALYMACLVAVKHNPTLKARYEALRGRGKLAKVALVACMRIFIVRLNAMLRSGTPWRDDLPQP

SEQ ID NO: 302512 - protein, 409 aa, unidentified
MPERKVYGMIDKETPVLAFDVSKGSSHCQAFYSFGKPSGRPIKVAHTKSGMAAAEGISEALERETGRKPKVVMESTGVYSRPVIRWAELNGLEVYLISLLESAKVRKSRVRPTKTDALDCGVIAEVAYTRGVRKLAAASSLYSQLYSLSRRRSAVINRLTASKNQYRKSLDAVWPLLDEACDPFSGYAMWAVGRYRHPERLAKAKGESVMKALVQAEIRIGRVSKQAVASKLIAYAKDALSGCSPNDGEVDALMSAMSDVKRDMEALGEATEKLIALAKELPHFALIASIDGTGDALAALLCAEIGDPSRFACRNGLVAYAGLDPTILQSGRNDGLHYSITRKGNAFLRKYLYLAVENMVMHKADNAITRFYSKKKSSGLCHKAAATAACRKLLVSIWGMLRSGSCFER

SEQ ID NO: 302513 - protein, 330 aa, unidentified
MKQYHHVFGVDVSKKTVDITHVINQEFTHRKFSNDEFGMKELIVWLKELHLDFDTTLFCMEATGLYCFTLTNFLASHSIDTWIEHAAQIKKATALARGKNDKVDSQRIAVYATKNLDRLRLWKPVDATLDKIRHLASLRERLVETRKRLATPIKEFEDVGNLVMAKLLTKTIKSSLTAIDKDLKNIEIKIIDVINEDDNLKLLYKLITSVVGIGFVTAINLIVHTNGFTMLKDTRKLACYCGVAPFEYSSGSSIRGRTKVHYMANKKLKCNLHMASLTAVKLDADLKAYYERKVEEGKNKMSVLNAVKNKLLARVVAVVNKQQEYVKKSA

SEQ ID NO: 302514 - protein, 410 aa, unidentified
MAPLSNQQFKAFVGIDWADTKHDICLQQAGDDRREFDCIPHQVTRIDEWAKALHQRFGGPIAIALELARGPIVSVLQRHAFFTLFPINPAMLAKYREAFKPSRAKDDPTDAELALDLLLRHPERFSPLRPQSAGMRSLLSLIEQRRELVGDKTRFTNRLTNALKQYYPQTLEWFEDIDTVLFCDFLTRWPTLPAVRRVSRKTLETFFHAHNCRRAQLIEGRLESIRCVVSLTDDPGIVAPHRLLALMLVAQLRTALAAIDVFDKEIATVARTLPDFDLFDSLPGAGPHLTPRLLAAFGEQRDRFKGADELQKYSGIAPVTERSGKKCWVHWRWQCPTFLRQTFVEWAGQTINKSFWAGAYYRQQRAKGSSYQAAVRALAFKWIRILYRCLQTGTRFKGWVNIRCKSWVSI

SEQ ID NO: 302515 - protein, 342 aa, unidentified
MLEIAIVGLDLAKNVFQVHGADTEGAPVLRKKLRRTEVLPFFAKLPPCLVGMEACGGAHHWAREVAALGHQVRLIPPAYVKPFVKRGKTDAADAEAICEAVSRKTMRFVPVKSAEQQADAMVLKARELLVRQQTQAINALRAHLHELGIIAGAGVAKVSQLIDIARDPDDPRIPATARVALAAIVGQIDALGQELRRLERTIVAMGKRDPDTQRLTTIPGVGAITAASIKALVPDIGGFRSARHFAAWLGLTPKPHSSGGKERLGHISKMGNPTLRKLLVLGALAVLRRAKNAEPGLEWVARLLARRPGKVVAVALANKTARIVFALLSKGEVYRKPALATA

SEQ ID NO: 302516 - protein, 337 aa, unidentified
MEYFAGLDVSMAETHVCVMNRDGAVVYEVKVPSTPADIAAGLAKAPACGRIVFETGRMAPMLYHGLRQLGLPIFCIESRQAHQALKSLATHKTDRNDARGLAHLARTGFFKPVYVKSLPAHAVRALIIARKKLVGQRVTLENQIRGLAVVFGVRLPRALRPAFVRQALQASEGIPGLSAAMRGLVTARAAVLAAVSAIDADIRQLVRASAACRRLMTIPGVGQLTALAFTAAIDDPSRFRRSRDIGAYLGLVPRRYQSGEVDYTGSISKCGDRRVRTLLYEAANVMLTRYKSALKLKDWALAIAKRSTMRKARIALARRLAIIMHAMLRDGTEFNPA

SEQ ID NO: 302517 - protein, 373 aa, unidentified
MNTSITYVGMDTHKKEHTVAVHYPGQEEVVTLTVRNTAGEIGKLVKRVRKESLGEVRFCYEAGVCGFVLKRRIEDLGCWCSVIAPSLTPKKPGERVKTDRRDAMKLLLLFKAGLLTEVHAPNRDQEAARELTRCRETARVNLKRIQHQVVKFLTRHGYIFTDGNHWTHKHFRWMRGLEFDRPHLREVFDNYFTELQHGMQRLASLDKAVEALAQEAPYRDVVGLLRCFHGIDTLTAVTYVTELFEFGRFASPRELMSYLGLTCSEHSSGGTERKGRITKAGNNIVRRLMVETSWHYRHPCKVGPTLQRRRAGQPQWAIDIADRAGQRLRKRYWYLVNRGKMSCKATVAVARELVGFIWAVFREYEVRSRRVTV

SEQ ID NO: 302518 - protein, 388 aa, unidentified
MQTVADRSEAPNAIRTDLGAIFVSLELSRSRWLITSLSPDGGEKMSKHAVRGGDVAGLLERFAQLRKKALARTGKVFPFVVIQEAGLDGFWIDRVLRKEGIESHVVDPASITTSRRRRRAKTDGIDGEALVRALLAHKRGEPRVCAMVKAPTPEEEDRRRLCRERKVLIGERVRHVNRVKGLLFSQGISGYQPLRHDRRERLDTLQTGDGRLLPDHLKAQVRRELDRLELLLEQIKAVEAERDVLLAVQQGAAPAPAAMLLNIKGIGPEFAAILWSEGLFRHFDNRRQVASYAGLAPTPWQSGSVDREQGVSKAGNPRLRTTLIQLAWLWLRNQPQSALALWFKERVNRNGGRLKKTTIVALARKLLVALWKYVTAGVVIEGAIVKSA

SEQ ID NO: 302519 - protein, 411 aa, unidentified
MRLFVGDDWAEDHHDVEVMDEAGRVLAKRRLPEGVAGIAQLHELVGRYLPEYAEDAEVAVGIETDRGPWVAALIAAGYTVYPVNPLQASRYRDRHGVSGAKSDGGDSHMLADMVRTDSHQLRPAAGDSPEAAAVKVVARTHKTLIWERTRAVQRLRHQLREYFPAALEAFEDLDAPGTLELLGKTPDPARAAKLTRAQIAAALKRARRRGIAEKTDAILAALRGEHLGLPAPLTAAYAATARSLIAVITTLNEQVKILEEQVREHFGRHPDAEIYQSQPGLAAILGARVLGEFGDDPGRYADAKSRKNYGGTSPITRASGKKKVVIARFIHNDRLIDALMAWAFSALNASPGARAYYDQLRTKGIEHNDALRRVANRLVGILHGCLKTRTLYDEATAWGHRENLGQSRVAA

SEQ ID NO: 302520 - protein, 408 aa, unidentified
MGRAAEVVAPSSSIRTDGGCPVVQINDLSRSLAAFDPISTLVVVVEMSKASWLVSGVVPGVERQPLKKLEPDATALLQLIERWRNEAVRAGRPIRRIALAYEAGRDGFWLARWLIARGIEAHVIHSASVAVSRERKRAKTDRLDAAMLMRVFLGWLRGERGHCGMVAIPTMEEEDARRPNRERESLVNERSRIVNRMKSALARLGIRGFKPHLRKAPERLAGLRTAEGTGLPANIIEEFRRDMARLALVREQISSIEKTRAERLERAPDTGPHAMVRLLARVIGIGIETADMLVREILSRNLRDRRALARYAGLTGSPDESGLKSREKGLAKAGNARVRRGLIQLAWRFLMFQKDSALARWYRTRTEGPSGARKTTMIVALARKLLIALWRLVTTGEVPDGVELRPAA

SEQ ID NO: 302521 - protein, 372 aa, unidentified
MDKDSELFVGLDTSKLKISVAVADGERNGEVRFFGDISAEPASVASMVAKLAQRGAKLHFCYEAGPTGYELYRQIIGLGHCCAVVAPSLIPRRPGDRVKTNRRDAVSLARLHRAGELTPVWVPDETHEAVRDLVRAREVANDGLRKARQHLQSFLLRHGRIYAGRAPWTRVHSPWLAIQSFEHPAQNIVLAEYIQAIEDAAVRLDRLTKQVAEAMASWSMGPVVEAYQAMRGVALITAVTFGVEIGDVRRFDSAPQLMAYLGLVPSESSTGDRVRRGGITKAGNVRARRVLIEGAWTYRFPARVSREIEARLDRLPRSVREIAWKAQIRLCARYRKLVMAGKTKTVAVTAIAREMAAFLWAIGQEVAPAKTA

SEQ ID NO: 302522 - protein, 365 aa, unidentified
MSTITIGVDLAKSLFSVCEMDAVGHVLGRRDLGREAFALWLAQRPTGTVVAMEACSGAHHWARRCLEYGLQPRLMAAQFVTPFRKSRASKNDRNDAEAIATAARQGNMRFVPTKSLDQQARLAWHRVREGYKAESLAIGNRLRGLLAEFGIVVAKSDAALCRTLADLDQQTTLPSELKELIRDLDAHWTLVRMAIDACDARVAAHARQDARCVHLRAIIGIGPITADAVIATLGSAKDFRNGRQLAAWLGVVPTQHSSGGHTRLGAISCRGDAYLRTLLIQGARSSLQRAKSVSVEKSTPEQIWIRQLACRLPFGKVLVAIANKHARQLWAMLAHDLDYDPHACEKHPTAQRPAGKHAITVAAMV

SEQ ID NO: 302523 - protein, 416 aa, unidentified
MKVVYQTCCGIDVHKSFLVATIIKTTSGVDPSYQKKRFSTFNNSILQLKNWLIENQCRDVCMESTGKYWGPVFNLLEDEMNVTIANPKWVKAVKGNKDDTKDSKWIGDLFRLGLVQGSYIPCKPIRILREFTRYRYKLTSCRTSEKNRYQNALTVCNVALDSVVSDIFGKSATSVIDYLIEQSGNSINHEEIASRLLRSLKKKSDSVIESIEGYQMTAPQKYRMRLVRAHLDYITSTINDIDTMLDSLIAPYENAVQLLCAIPGVDRNSAITVISEIGTDMTPFSNSKRLCCWAGLTPGSNESAGKKKSVRITRVGVYLKPALVQVAHAAVKSDKSPYYKQKYERIMKRRGKKRAIIAIDRMILTAIYQMLSTGEAWNPTDLYKTDMPEPLKEKQKEKAIKQAKKLLIREGILSES

SEQ ID NO: 302524 - protein, 351 aa, unidentified
MWIIGVDYHPSVQQIAWVDTETGEIEEQRLKHSGGEAERFYRDLKEKGFSVRVGMEATGHARWFERLLRELGFELWVGDAARIRAKQVKKQKNDRQDAQHLLKLLLKDDFPRIWVPTPENRDRRQLLLHRHRLVQMRTRVMNQLQAVAMNEGIRRKRGLWTRQGRAELEALSLPTWTSRRRQELLELVDQLDPSIDQLSQAIEQEAEQQPEVQRLMTHPGVGPITALAFVLVLGTPQRFSCGKQVASYLGLVPSEDSSGNRRRLGHITKQGNTLLRHLLGQAAQSVANSDEEWRRQYAQLAMRRNRSIAKVAMARKLAVRLYWMWRQGYDYQQWASSVRTWGKLEIAHGVK

SEQ ID NO: 302525 - protein, 339 aa, unidentified
MQLYTGIDLHSNNSYLAIIDDTGKRIFHQKLFNDPVAINQALAPYEGTMAGIVVESTYNWYWLVDALMTAGYHVHLANPSAIQKYSGLKHADDKHDAFWLAELLRLNILPEGYIYPKEERPLRDLLRKRGHLVNLRTSLLISLKSIISRNCGQTLKANDVKKIREDLVAPLLAGNEDLALAGQVSKEAIDFLTKKIRKIETFIETKVKLQEPYEYLLGLPGVGKILALTIKLESGPIARFPQVGNYASYCRKVCAKWSSNGKAKSGGNKKNGNKYLAWAFSEAAELARRFDPQSRAYYNRKLQKTNFMVAHGALSHKLARAAYHIMRDNVPFMPEKLFG

SEQ ID NO: 302526 - protein, 372 aa, unidentified
MNKIVKYVGLDVHKDSITIAIADEGRDGNVRLYGKISNDLGQIDNVMRKLISQNAELHCVYEAGPCGYPIYRHLTSKGIDCVVVAPALIPKKTGDRVKNDRRDATHLATLHRSGELTPVYVPDQADEALRDLVRARKDIQISLRKVKQQINAFLLRQGISYPGKSKWGKAHLNWLAELKMQHPAQHIALTEYLDAMEDHEARVKRIEKAIEQCCQTSRLLPVIEALQALRGISLLSAVTVVAELGDLSRFDTPAQLMAYLGLIPSEHSSGGTIKKGPITKTGNTHARRTLIESAQAYRMPARKSKAIRKRQEGLPDDVLDIAWNAQLRLCHRYRRLIAKGKNHNVVITAIARELAGFIWAIARAVPIVAAER

SEQ ID NO: 302527 - protein, 346 aa, unidentified
MKILALDLGKYKTVGCVYDSESGAYEFKRGFTTPAGLARMVQEVKPERVVIEICSIAGWVCDLLWALGVEVQVANTSDDAWRWRKVKQKDDRRDALKAARLSAVNQLREVYIPRIEVRQWRALITYRQQLVRRRTKIKNHIRDLLLREGQLLGRGSSAWSEVGLKQLAAQARAFSECGPAELWRGELQLELEQLRELQRQLATVTAQLDKLGAGEARVQLLRTVPGVGPRLAEAIVALLDQPQRFRKASQVSGYIGMVPKALDSGETERRGRITRQGSRLVRSLLVEVAWAGLRHNAWVRQTYQRLSGGKKARKKIAIVAVGRKLLVKCWAMLRDNQAWDWQPQVT

SEQ ID NO: 302528 - protein, 341 aa, unidentified
MEYCGIDLHAEYSQICILDEQGEVMESSRIRTSLKVLERFFKRDPMRVVMEAGESSPWVSRLLDSLGHEVVVCSPRRVRLIAESKLKNDRVDAEVLARLVRLDPEFLKPIQHRSEEAQLLRANLKVRSAMVEARTKWINTVRGLLRSFGYKVCGKAPHTFAERVDQMELPGELRTVIEPLLEQLDLLSGEITRRNEHLEEMVKELPEVDHLREIPGIGPVVATYFVLTIDDPHRFRHSRDVASFFGLRPSMRESASVTHFGRITKEGDPEMRRLLVQAAHACLHTKADSELKSWALALAQRKGKGKAAVALARKLAVLMHHLWVTGEVYQAFPNKEATQAA

SEQ ID NO: 302529 - protein, 407 aa, unidentified
MNAVGIDVSKGKSMVAALRPMGEVALLPKEYSHSDVGLEQMACAIIALGEDTRVVMEATGRYHEPVAAALHEYGIYVTVLNPLFIQRSGGGSIRKVKTDKADAMKIAKYGLDNWVDLREYTPMEAVRQQLKLCSRQYNLYMKTIVALQNNLISLTDKTFPGVNELFSSPERADGHQKWVDFVLSFWHCECVCQISEKAFTERYRKWCKRKNYNFSEEKSLDLYADSCGHITTLPKNDNTKLLITTAAQQLLAAKTTLVAMRAEMLRLAKLLPEYEAVLAMYGVGEITAAQLMAEIGDVRRYPRRSSLVAFAGVDPAVNQSGKHEAQSNPTTKRGSPHLRKTLYQIVCTHLKKSPADEPVYQFIDKKRSEGKPYFVYMTAGANKFLRIYYARVKECLAALDGVDTIKN

SEQ ID NO: 302530 - protein, 345 aa, unidentified
MFTEFVALDAHKRYSLLERENIIDKTRWQVRIEHEKGSIAAGLQGVSTGTPVALEAVGNWYWIVDEIERVGLTPRLVHPRKAKLMMGMINKTDKLDVHGLNLLQRNGTLPTVWIAPGSLRDVRELTRCRMVLVAQRTRLKNRVLATFAKYAISLDEWSDAFGVAAQVAMQQLIVSLPEHTAFVTQTMLSNIAVLNDEIEQLEQRLHAVLVETPEMRLLQTLPAFGKILSAVVMLEIGDISRFPSAPHLASYSGTTPTVKSSGGKTRFGSLRQDVNRYLKWAFMEAGNLVCLQRRHFPSRHVTLLYQRIRARKGHPKAVGAVARHLAEATFYVLSKQQPYQDPVLR

SEQ ID NO: 302531 - protein, 401 aa, unidentified
MRYCLAFDIAKGKSVFVLAGEDGTILSGPSEVLHDCAGMARVEEEADALCGSKPPVIMEATSVYHLPPKAFFEARGHEVIVTNPLLTSMRKHTLRKTKTDAEDAARLAQAYFAGDFSEQREARFDLGGLRSQSRYLEFAVSQASESKAKLRELAAVCFPPLERIFPGDALFDPGTLAFVARYPHPSLLGRRPAATAARSFCPGRPKDAFRYGKRAASVLSMAKSGAPAVGPGDPAVATLSSAARRLAFMGRGNAAEREKLVAMARKRPEFAVYSSFPGIGEALAATLTAELGDLSRLATVKKAIAATGLDPTIVQSGKSIDYHGPISKRGDKYARVALFRRVIMILRYDGMKGVESDMTAYYKKKRSEGKHHYAAVTACCTKLLRKMYCRCKDQFKPASAD

SEQ ID NO: 302532 - protein, 422 aa, unidentified
MSYCPVAGIDVSKRFSDMCILSPDNKIFAQEKIYHDETSINRANALLQKAERLFFSKPVIVMESTSHYHLILFQFFSEHGYDVIVVNPLQSNSMKDFSIRKRKTDRVDAFKLAMMYRTKTLRPSQIPQTATRALRQLCRHRAELLNDVSSYKNRLTALLDQTFPGYDKVFSDVGGVTSCAVLVRFPTPTILLVEEESELVEVIAAASKSGYSFAKKKAGLLISAAQKAQTLGIHSCADETLIVCTIQMLRTLSESVLQIETAIDNLLAQIKEMRNNVSLLQSIPGIGSHSAALLLGEIGDISLFKKPKQLAAYFGLDPTERQSGSFRGTRNKLSKRGSSYARAALHMGIVNSICKRGKDSAANPVLLSYYEKKCKNKPAKVAQAASMHKLVFIIFAVLPDQKPFELKTPEQHAVEQGFVKAA

SEQ ID NO: 302533 - protein, 344 aa, unidentified
MSEAFIIGLDIAKYVFHAHGVDERGRAIFSKRISRKKLLDFFAAQPSCTVALEACGGAHHWARQLSQLGHEVRLIPPAYVKPFVKRQKNDAIDAEAICEAAQRPNMRFVAVKSEQQQAAGLVFRTRDLLVRQRTQLINAIRGHLTEFGWIAPKGPSHVAMLAGLIEEEEMASSLPEAARAMLRLMLDLLADLDGKIADLDKEIARRAREDEVSRRLMTVPGIGPISATAIAALAPPAETFAKGRDFAAWLGLTPLQRSTGGKHKLGSTSKMGERTLRRLLIIGSSAVALQASKRGAPKGSWLEQMLARKPRMLVTVALANKTARIIWALLVKKENYRAPVAAKA

SEQ ID NO: 302534 - protein, 438 aa, unidentified
MSNKVIFNLDDLFISVGIDVGADFSWMSIALPNQQFVGKPYKILHNSIDSLTTAVSKIKEAEELYSLESRIFLESTGIYHYPLFCYLRDKGFNCSVINPIITKNSTNINIRKVHNDRFDSKKAALVGLKPDLKVSLIPSDLALNCRNLCREYYDLMDNRSAYVNKLQGELRMAFPQYLGIFSKVTINTSLTLLETYASPSAFLEADKQEIIDIIRSTARFGLTYAQNKYNAIIQAATDANQFGYIINSNIKRIRLYISFIRKYDEEINSILESLHELVDANEDADFVKQIHLIETIKGAGFLSAVSIMGEIGDFSAFSKPKQLFAYFGLDPAVKQSGKFEGTKVQMSKRGSAIARRVIHTLTLQSISISRNGEAKNPVLREYYLKKCDSKPKLVAMGAVSHKVCNMIFAILRDNKPFEIITPQEHIKQYNASKCDMAA

SEQ ID NO: 302535 - protein, 358 aa, unidentified
MQTQFKELDFTGQNIYTGIDVHKKSWQVSVFSEALFHKTFNQPPKPEVLHGYLTKHFPKGTYYSVYEAGFCGFWIHDKLQSLGINNIVVNPADVPTTDKEKKRKTDKVDSNKLAKHLRNGDLEPIYTHKRVVLENRNLLRMRRTLIKDLTRNKNRVKSDLYFFGIEIPEQFTKNPSYWSKRFISWLEELKFQQWTGTASFRILMDQVKSLRAQLLEVNKKVRALSQEDYYKKRVELLGSIFGVGLITSMTILTEIDDIHRFANLEKLRSYVGLTPTSHASGDKDLHGEMIHRGNKFLKSAIFESAWIAARLDPVLHMDYINFCKRMKPNKAIVRIACKLLDRVHYVLKNEVPYKSGIP

SEQ ID NO: 302536 - protein, 339 aa, unidentified
MELYAAIDLHSNNSVLVVLDEKDGVVLQKRLPNDLQQICQALAPYGERLNGVAVESTYNWYWLVDGLMAQGHRVHLVNTAAVKQYEGLKYAGDVHDARWLAHLLRLGILPEGHIYPPAERGVRDLLRKRSQLVRQRSAQILSIENLLARDWGGRASANEIKAWSEADIDDLALSPESRLAVKSNLAVMHCLDEQIKRLERTILPEVKPREDYQALLTVSGIGKVLALTIALETGDIGRFAGVGNYASYCRCVDTKRISNGKSKGSGNAKCGNRYLAWAFVEAANFAIRYDAAVKRYYQRKCAKTKPVVAIKAVAHKLARACYHVMRDRQAFDVARAFGG

SEQ ID NO: 302537 - protein, 345 aa, unidentified
MPSIVGGFDIHRKQITFDYLDTVTGEVSRGQITPADRAQLRAWLAGRFEHPDDVAFAVEACTGWRYVTEELQAAGIEAHLAETADTATLRGRKKRAKTDRADARLQRDLLAQGRLPECWIPPAHVLECRALLECYYDLRCEHTAWIQRVHAVLFHQGAPVFHDLSRADAPAELAALAAGHLSHAGQAQAATCLRMLAVLEAELDAARRRLLAAARQLRGAKVLAGSLYGVGPVTALALTCWLGGAGRFSSARKAVRFAGLDITVWSSDGKGPPGRLSRQGPPVLRWALYEAGKTHARPAAPDHPYYAQVKDRKDGKRAALSEARKIVRQACHILAELGDDALAVV

SEQ ID NO: 302538 - protein, 340 aa, unidentified
MTITTIGLDLAKSVFQVHGVDESGATILVKRLHRKQMLPFFSKLSPCLVGVEACGTAHYWARTLAAMGHEVRLIPPSYVKAYVKRGKSDALDAEAICEAVQRPTMRFVPVKTVEQQSILMTHRARSLLVRQRTMTANALRAHLAELGLVANPGIANLAKLAEQALSDDDALPAYARTSLMILVRQIIALNNEVAALDRQLIAWHTESEASRRLAGIPGIGVITATALAATVTDPDQFRSGRQFAAWLGLTPQQHSTGGKTRLGGISKQGDRYLRRLLVVGATAVMRHTKDKPTPIANWIRKLMEKKPFRLVSVALANKLARIAWVVLTRQEAYRPYELTA

SEQ ID NO: 302539 - protein, 343 aa, unidentified
MQVVRIGLDLAKYVFEVHGVDQRGKVVLCKTLRRGSVSTFFADLPPCLIGMEASNGAHYWARVLTDLGHKVRLISPQFVAPYVKSNKNDRNDAEAICEAVGRPTMRFVPPKSPEQLAIQALHRIRQRLVRSRTRLVNQIRGILSEHGIVIARDIWRLRRALAEITGNATDDLNMLVRLLIGETQAELIELDRRIASCDRRIRELYRTNKLCQKLGEIEGVGPVTATALVAAVGDRSCFKNGRQFAAWLGLVPKQRSSGGRHQLLGISKRGDRYLRTLMIHGARAALGKAGGKQDPRSRWLVNLRQRRHPNVAAVALANKNARIAWAMLSGNLCYEPARSVQSA

SEQ ID NO: 302540 - protein, 352 aa, unidentified
MNQITTVGVDLAKDLIVACAGDVAGRTQFYKRFGFHGFAAWAANLPPCTIAMEACSSAHHWARTLSALGHNVKLLAPDLVKPFRKSQAAKNDRNDAQAILITALQPDMRFVSVKSVEQQSILAVHRMREGWKSERTALINRVRGLLAEFGIWLGRSPQTLTRRLPQLMQEEQLPARVRALLAQAHGQLLQLQALMQQCELDIQAHARHSEAAQRLSAVNGIGPITASAIVATVGNAADFRNGRKMAAWNGLVPKQSSSGGKERLGKITKRGDTYLRGLLTQGARSTLNAALARPPDKRSHLEHWIVALRHRVGYHKSLVAIANKHIRICWALLARGERYDPHAASRYPRAAA

SEQ ID NO: 302541 - protein, 346 aa, unidentified
MITIGIDPHKDTHTAAAVEDATGQLLGELTVSGTEEGHRRLLGWAHELAGEDGELRFALEDCRHVNGRLERFLLGAEELVLRVGTRLTARERNTARTYGKSDSIDALAVARAALREPGLPQATDDPQLRELKLLVDHREDLVGERTAHSMRLRWLLHDLDAGLEPVAHTLGEEKVRRGLSQRLGRYGEGVQVRICRELLVRIGELTRSIDALRKEIAALVRPMAPALLAISGVGELVAARILVEAGGPGRFTSDAALARHAGCAPIEVSSGRTRRHRLSRLGNRKLNATLHVVVLTQARVHPPARAYLAKKRAEGKSNKEAFRCLKRHLVRVVFRALQEQPSPAVG

SEQ ID NO: 302542 - protein, 345 aa, unidentified
MKYYFIGIDVSKEKLDATLIHYESESDSEQQLAYTTVENNPKGFRSLVSWSKKNAGRGVKTDTMLFCCETTGGYDRALCDWLYGNGLNIWRESALQIKRSMGLRKGKDDKADSEMIAYYALRFRSKATLYKPLDGNMRSLRDLFLYRQSLVAERRAKMVSAKEKQYISSKSKSDNFIYRDAQKAIDLLTKSIQECERRMLEIIKEDEEMYRNYLHLISCKGVGLVTSVMLIVYTDNFKGWSAKKMASYCGIAPFYESSGSSVFHKANTSGYSNRRLKGILTQAARSAITHNPTLRQYYLRMKAQGKPYGVILNNVNNKLVHILFSLVLHDCDFELDHEAKRALRA

SEQ ID NO: 302543 - protein, 367 aa, unidentified
MKKVSIAATKQSRNISQQKLTIGLDLGDRNSWYCVVDEAGQIRLEQRVRTNAKALREVFDAMPRSRIALETGTHSPWISRLLSELGHEVIVAHARKVRLIGESRKKDDRLDAQTLARLARIDPQLLSPVQHRSAKAQADLTLIRARAGLVRARTALVNTARGLAKSYGERLRGCNVRNMNPEKAEGLSPELQSALEPLLACIESVSEQIREYNERIEKLAQESYPQTALLKQVKGVGTLIALTYMLTLEDPHRFRKSRDVGCYLGLQPGRRNSGKSEPQMHISKEGDPYLRTLLVQGAQHILGPFGIDCDLRRWGLKLAERGGKSGKKRAIVATARKLAVLLHHLWVSGEVYQPLRNSNRTTVAAAA

SEQ ID NO: 302544 - protein, 344 aa, unidentified
MQLYTYYIGVDISNTDFCGSIYQTPDIPVKTLTDIENKLSGFNKFEQWLTNQQITPNNCVICLEATGVYAEQLCYYFTAKGYPVALEPPLKVKRSFPDKRHKTDKVDSREIAEYAYRFSDELRIWQPKNEIIEQIQVLLMAREQLVVHKTALLNTRQALTKKVIQTPLANKIYDQNIARLKKQIKDIENELNKLIDKHPDFRNAVQKLKSIPGVAMLMACNFLTVTNGFENEMATNYRKAAAFISICPYEHQSGTSIYKKPRSVKYGPARLRKLLHLAARSAITHNANFRKYYELKKAQGKSRRLILNNVANKILKIMCAIIQSQRTYVDNYVSIHPNLLSMNT

SEQ ID NO: 302545 - protein, 366 aa, unidentified
MKKISTVATNRNEIFKEHKLTIGLDLGDRSSHYCILDEAGEVILEHSLPTTPKGIHQVFNGIPRSRIALETGTHSPWVSRQLTQMSHEVIVAHARNVRLIGESSRKDDQLDARTLARLARIDPSLLGPVQHRSAKAQIHLTVIRARAGLVSARTALVNAARGLTKSYGERLRKCGTQQMNREMAKGLSTELREALEPLFGEIESLNERIAEYDRRIEQIAKEVYPQVALLKQVKGVGTLIALTFVLTVDDPHRFQRSRDVGCFLGLRPGRRNSGMNQPQLHISKEGDRYLRTMMVQGAHYILGPFGQDSDLRRWGLRLAERGGKNAKKRAIVAVARKLAVLLHKLWVSGEVYEPLRNNPKVVGQVA

SEQ ID NO: 302546 - protein, 388 aa, unidentified
MSCTSAPSLAAETSPARTATTLYVSLELSPSKWLVTSLISGSDRMSKHLIPGGDCGLLLQLLAGLKAKAEKQTGVVVTVAAIQEAGLDGFSLHRVLEANGVESWIVDPASVAVPRRLRRAKSDVIDGETLLRTLFAFRRGEPRVCSMVRPTNPDDEDRRRLTRERRTLIRERIEHTNRIKGLLMSQGISGYDPLRKDRWCRLEALETRDGNRLPPRMRAAIGREIERLELLAQQLKQVEAERDALVSAAPGRADNPATLLMKLKGIGAETATLLWLEGLFRNFANRRQLAAYAGLAPTPWLSGRIQREQGISKSGNPRLRTAMVELAWLWLRNQPGSALSRWFTNRVREEGGRKRRVTIVALARKLLVALWKYVSQGEVPDGATLKPA

SEQ ID NO: 302547 - protein, 416 aa, unidentified
MKLFVGIDVSSEKLDVCFLTDDDQLSTLSEISVSNDIEGASLTREMILEFNENYLFDQIIIGMESTSMYSFHPSMFFHEDEELKKLNTLVTIENPFRIKQFRRMFDEDKTDRNDALRIADFLRIQRFTTSPIKEEKYMALQRLTRTRYQLIKQLTRTKQHFLENLTYKCNTLVREMKDESTSLFSATVISLMTEDLTLDELAELPLEAFSDLIQEKGRGRFKQPEKIAKAIQRAIRSSYRLGTVAQESIDIVLGVLVCEMRALEKNIKELDKAIEQLVIVIPEYQCLTSIPGIGKVYAAGLIAEIGQIERFEDQTKLAKYAGLSWKVKQSGNYQSQNTPLTKQGNRYFRYYLVEAANSVKNYLPEYKAFYQSKYKEVPKHQHKRALVLTARKFTRLVDTLLRNHQLYTPPRSVIDK

SEQ ID NO: 302548 - protein, 409 aa, unidentified
MRYYIGVDWADAEHAVWGVDEGGQKVTARVVSHTAAGLSEWGRELHEWRAQGIEVWAAIERPEGRVVDFLLDHGVVVYPINPKALDRARDRFRQSGAKSDPFDARVAAEFLRTDHAHLTALHPSSAAAQELKYLTEDCQRLIRQQTRLVNQLTATLKAYYPRALEVAELTTVLARAFLQAFPTPEAVAGLTARQWQRWARAQHLSEARTAELWAGLQQPQLPVPAHVVRVKARLMRAQVAALTPVVEAVAAYRQGVEDFFASMPAAAWARTLPGGNGGITIATLWARLGDAPERWTSFQHLQAQAGTVPVTKRSGKLQVVTFRFACDKQLRYVVDQVAFLSLQRSAWARAYYDQQRARGHRHRHALRALGAKWLKIIFVMWQRQVAYDESHHLATMARQALRHPEKKIA

SEQ ID NO: 302549 - protein, 402 aa, unidentified
MISVGVDVSKGKSTVCILKPYGEIVCSPFEVKHVEKELEDLAGLLNKLDGEIRVVMEATGVYHLPILTFLQEKGYFVSVINPYSMKKYAKDNSLRRAKTDRLDSIMIANYGIDRWFKLQKYEGDENTYAELKLLGRRYRYYMELHVKSLQELTHILDYVMPGIKAMFNSWDEASNKDKLSDFVERYWHYALITSMSREEFTEDYLAWAKEKKYHQSNAKAEAVYEMASDGIPTLSSDTPSTKMLVQEAIAVLRAVDSSLFRIISRMQELAKTLPEYSTVRSMGGVGDVLAPKLIAEIGDVRRLHNAKALIAWAGIDPPPYESGQFVGSQRRITKRGSSTLRKVGYEVMRVLKSHREPEDNVVYNYILKKEAEGKSKKAAKIAGLNKFLRIYYARVMAVYQQQ

SEQ ID NO: 302550 - protein, 343 aa, unidentified
MTRKDRVFVGLDVHKKSYHAAVRVNGVEVQTTVLAPKAAAVLAFLEPYRSARLHVVYEAGPTGFGLVRALRAAQIPAEVIAPSKTPQTPGRENKTDRLDCRQLALYHEKGMLRRVAVPTPQEEADRQVIRLRDQVVKARRCVKQQIKSFLLQHGLAEPPGLKNWSKASVRALETMPLVPALRFCLDVMLAELAHRNESLQQVNRAVENLGQEPQHARAVAPLCEHSGVGVITAMQFRTELFRPERFANARQVAAYVGLAPRVSQSGGRCRTGPLLKAGRGRLRALLVEAAWVWIREDPEAAAVYRRLLRNTGQPNKAITGMARRLAIRLWRLLVPPEARGQAA

SEQ ID NO: 302551 - protein, 389 aa, unidentified
MKIYVGIDIAKLNHFAAAISSDGEIILEPFKFTNDADGFQLLVSKLESFDKNSIIIGLESTAHYGDNLVRYLVAEFYQVCVLNPIKTCQMRKNNIRKTKTDKVDTFVIAKTLMMQDNLRFVSFYDLDMMDLKALGRFRQKTIKQRTRLKIQLTTYVDQVFPEIQYFFKSGLHQHAVYALLKEAPSPKEIASMHMTHLANLLKVNSHGHFTKELAKELRVLAQKSVGANDSAISIQITQTIQQIELLDSQLEKIEAEMTDIMKFNDSVIMTIPGIGYINGGMILGEIGDIHRFSNPNKLLAFAGLDPSVYQSGNFQAKTTRMSKRGSRVLRYALVNAAWNVVRNNATFKAYYDAKRAEGRSHYNALGHCAGKLVRVIWKMLTDEVEFNLE

SEQ ID NO: 302552 - protein, 345 aa, unidentified
MEITTMGLDLAKNVYQVHAINGVGAVVVRKTLRRVQVLRFFERLDPCLVGIEACGTSHYWAREIGKLGHEVRLMPPAYVKPYVKRGKTDASDAEAICEAVSRPTMRHVAIKSCEQQAALTVHRTRDLFVKQRTQLVNMIRGLLAEFGIEIRRGITHALSLAERIAAGEMPDIPTLAAKMIASLARQVLDLQTRLRQIERELLAWHRSNDIARRLATIPGVGTVCATAFAASVTDPHQFRSGRQFAAWLGLTPLQHSSGGKERLGRISKMGDKYLRRLLVVGMTSLVRRAKYKPDAVDRWLAALLTRKPARVVTVALANKAARVIWSIMARGGIYRAPQPATAMVS

SEQ ID NO: 302553 - protein, 349 aa, unidentified
MSQTAQTAVAVIGIDIGKNSFHIVGHDERGAIVLRQKWSRGQVEARFANLPPCLIGMEACVGAHHLSRKLNGLGHDARLMPAKYVRPYSKGQKNDFRDAEAIAEAVQRPTMKFVATKTADQLDLQALHRVRERLVSQRTGIINQIRAFLLERGIAVRQGQRFLRAELPRILATPPDVLSPRMARVIEDLAGDWRRLDERIESLSSEIEAVARQDAGCERLMSVPGIGPIISSAMVAAIGAGDAFTKGRDFAAWLGLVPRQMSTGDRTILGKISKRGNRYLRVLFVQAAWAVLIKPKSWERHGLKPWIEAAKKRLHHNVLAIALANTLARIAWSVLAHGRNFEVSKIQTA

SEQ ID NO: 302554 - protein, 302 aa, unidentified
MKKTSTVQALRSENFKEQKLTIGLDLGDCWSFYCVLDEAGQIIVEQKLPTTPEAMKQTFGKIPRSLIALETGTHSPWISRLLSELGHKVIVAHAQKVQLITKSNRKDDRHDARTLARLARIDPELLGPVRHRSAKAQLHLTVIRARAELVSARTALVNAARGLVKSYGERLPKCGTYQVSEKLAEALSAELREVLLPLFKEIESLNERVKEYDERMEKIAKEVYPEVSLLKQVKGVGTQIALTYVLTIEDPYRFPKSREVGCFLGLRPGRRNSGESEPQKGISKEGDRYLRTMMVQGAHYIL

SEQ ID NO: 302555 - protein, 421 aa, unidentified
MTPPNEVVWAGIDTHTDTHTIALLDERGRPLGAETFTADPDGYDRLIGMLPGPGRVAAVGVEGTNSFGAALARRLTAAGYEVREVPRPRRSVRRRDGKSDPLDAVAAARSVMAGDGTSLPKSSDGWVEALRHLNARRSQLVSAMTAIPDSTNGLLAAAPEPIRERYRGLRSETRMNRLAECRPAGGLVERSVLAALKSAAKAWKALKRQAGLLEERMRLILEEHARPLLDMYCAGAVIAATLAIVAGDNPERIRSEAAFAKLRGVCPIPASSGRTNRHRLNKGGNRQGNMALHRIAIVRLRYHKPTRDYMAKKTREGKGKLEIIRCVKRFIAREAYRALISIRNGEVGRGTPAERGAKLRELRVSRNITQQQIGEALCVPSSRISEIERGARDLPELEQRAIQWIHSTTNPKQHTQTLDNV

SEQ ID NO: 302556 - protein, 450 aa, unidentified
MQEATQHDAVDVFVGVGVDVDVDVDVGKGRHHAVALDRNGKRLYNKALPNDEVKLRALIAELKTHRRLLFVVDQPSTIGALPVAVARAEGVLVAYLPGLAMRRIADLHAGEAKTDARDAAIIAEAARSMPHTLRSLRLADEQLAELTMLRGFDDDLAAQVTQTSNRIRGLLTQIHPALERVLGPRLDHPAVLDLLERYPSPSALAAANEKTLANRLTKLAPRLGKNWAAEIVQVLNEQAVIVPGTQAAAIVMPRLAQQLAALRKQRDEIAAEVERLVLAHPLWPVLTSMPGVGVRTAARRLTEAAPKAFATAAHLAAYVGLAPVTRRSGSSIRGEHPSRRGNKVLNAPCSSPPSLPYETQSHGPITRARSSKASATTKHSSRSHGDAATSCLPCCATAPFTHPSQPLTLDERRRGTRACCAATSPRGAAPLRRMRSRPDVARARPRRYMP

SEQ ID NO: 302557 - protein, 316 aa, unidentified
MASKSASRVNVGIDVGKTRLDVSVYERAVDFSAVNDAAGIRQLVGRLLRYRIERIVVEATGRLEQALVEALMARQLPVVIVNPIQVRRYAGAIGQLAKTDTLDARLISEYAAIVQPDVRPPVSKSVRRIKDLIARRRQLMDMIVQEKNRLQIMPKTLRADIKRHLTHLKRQVEKLDRLLDDAVDAEAAWAAKRTLVMSAPGVGPVVANTLLADLPELGTLGPRQIAALTGVAPYNRESGSMRGRRRIRGGRASVRTALYLGVMSAIRHNPLLRGFYLRLVATGKHKKVALTACIRKLVTILNAMVRDGTMWNEKYA

SEQ ID NO: 302558 - protein, 334 aa, unidentified
MWHVGIDLHRETVVIAAVNDAGEVIKPVTVRCEDAAAIVEVVRALEPFRAVVEASGTYRWLYDLLRPYGSILLAHPFRLRAMVQRRAKTDKLDAQLLANLLRIDQIPLAYVPPEPYHQLRELTRRRARLGRELAEAKIQLRALLARQNRQAPFRVPFGVRGLAWFHAQDFGWIENLCRDELLARLTHFGQQATILDKHIERLAAAFPQAEALTDIHGIALYSALLIVAEIGEPERFRTAKQVGAYAGLTPRVHQSGGHCYRGSISRQGSSWLRWILVEAAIKAVRGDVPLKNFYTRVRKRSSAKIARVAVARKLAEICWKRLRRWQQEHAKAAA

SEQ ID NO: 302559 - protein, 406 aa, unidentified
MELIALFKRVIGLDVHQAQITACALIEEADGTIRIEQKQFGAFKRDRRALAEWACALQPDQVVMESTGIYWKSPYAALEAAGIRALVVNARHVKNVPGRKTDVGDAHWLATLARAGLLRGSFIPPAMMRELRLIARQRQKLVGLLSSEKNRLHKVLTDGGIRLGVVVSDLHGQSARAMVKAIIAGKPPQEILELASKRLKASREELFDALQGELTASHCFVLDELMRHIEEIEARIARFDARLLEGLASQRNALALLQTLPGVDLIGAAMLLVEIGGDMDAFGSADRLASWVGICPGNNESAGKRKSGRVRKGNLYVRRLLCEFAHAASRTTSVFKSKFQALIVRRGHKRSIVALAHKILRTIFFMLKRREHYRDSATDYEALSVQRNAPRWIKALTKFGFIPNIV

SEQ ID NO: 302560 - protein, 366 aa, unidentified
MKKISTVRVNGNMIFKGHKLTIGVDLGDRWSCYCVLDEAGEILLEQKVATTPEAMKQIFEKIPRGLIAMETGTHSPWVSRLLKELGHAVLVAHAQKVQLITKSNRKDDRHDARTLARLARIDPQLLGPVRHRSAKAQIHLTVIRARAELVSARTGLANAARGLAKSYGERLRKCGTQQVSRELAAELSVELREVLEPLLKEIESLNERIKEYDVRMEQIARESYPQVELLKQVKGVGTQIALTYVLTLDDPQRFPKSREVGCFLGLRPGRRDSGESHPQMHISKEGDPYLRTMLVQGAHYILGPFGEDSDLRRWGLKLAARGGKSAKKRAVVAVARKLAVLLHRLWVSGEVYEPLRNSQKAMRAAA

SEQ ID NO: 302561 - protein, 368 aa, unidentified
MNENITVVGLDVHKETVVAAILPSTTARPTETVTIQNCPKAIERLVRRVTAVGRVVFVYEAGPCGYQVQRQITAMGKKCAVIAPALTPVRPGDRVKTDRRDAEKLARLYRAGELTEIYVPTCAEEAARDIVRAREDALEDRLRARHRLSKFLLRQGRVYRETKAWGVAHRAWLRSQRFEWPALQQTFEGNLRAVEEAEARLESLEQQVLDLAQCGPYRTAVGYLRSLKGLDTLGALTLAVETLDFRRFGRAPAYMSLTGLISSERSSGPKERRGGITKAGNAHLRRILVEAAWSYRLKNTVGPQLAARRRGCPPEVVQIARKAQDRLHRKFWRLVSRGKPSQVAAVAVARELAGFVWAIALRVPAVAS

SEQ ID NO: 302562 - protein, 423 aa, unidentified
MEVMHQWVAGLDVHKETVVSCVRLMTGRKPARECRTFATTTEGLLALLAWLTASRVTHVAMEATGVYWTPVWKILSAGDFTLIVANAAHIKQVPGRKTDINDAMWIADLLARGLIKASFVPEEEIQELRSLMRTRKQLVREQTRHVQRLEKTLEEANIKLGTVISDLMGASGRRMIEAMIAGERDPHRLAGLAERTIKASPKALYDALHGRLREQHRFLLQLHLQQWDAIDVAIRQIDQRVAEQIKRMNAEAADRQPPFRELIPGLCAIPGVSFLSATAILAEIGRDMSRFPTAGHLISWAGLCPGQNQSAGKRKSSRLRRGAPWLKTMLVQCAWAAKRAKNSYYSAQFHRLRSRRGPQKAICAVAASILTAIYHMLKSGLPYRDLGVDYFDRRSPEAKAKRLVTQLAKLGFAAQLQPLAEAA

SEQ ID NO: 302563 - protein, 410 aa, unidentified
MQVVYARCCGLDVHKRTVVACVLLSQADGTVQREVRTFGTMTAELLALADWLTALEVQHVALESTGVFWRPVFTLLEEGRTIVLVNPQHLKRVPGHKTDVKDAEWLADLLRHGLLRASFIPPQPVRDVRELTRYRKTLVHERAQEVLRVQKVLESANLKLASVATDVLGKSGRAMLEALVGGEQDPEALADLARGRLRAKLPELRQALEGRVRPVHLVQLRLLLEHIAFLEGALSELQQEIEAQLAPFAEAVTLAQTIPGVAQTAAIALVAEIGTDMSRFPSAKHLASWAGVCPGNKQSGGKRLSGHTTPGNGWLRAVLGEVAWAISHTSGNYLSAQFHRLARRRGKQKAVLAVAHSVLVILYHVLRDHHPYSDLGADYFDQLDRARLERRYVHQLERLGYAVTLTPSAA

SEQ ID NO: 302564 - protein, 506 aa, unidentified
MQKDLHNKQPRLSELIRNPDSVIEDFDTIPDDDIEYVKEYGIGIDCHSRFIEVCVRYRNGKLINKAQGRFSTDWTSLVAAREWCINILSTKTDPVPDLSEPLHYLVESTASYHMPVCMAFSGNPTIINPTIAGATKRKTDVLDSRLLALHDQINIWSECYMPSEDVKTLRILIDQRERFIHDANAAGNRINNIITRFGFTVGRSGSVVKDPMIRAIVEDQISDGPSSIEGLCPIPIPLEVRMVLRNEYEKYDYFTARANECKSRIFQKARSMEWETDTTTIPGDEMIRILATAPQIGELTAVLWLARVITPRRFRNAKALSAYCGLDPSLKISAGKVTSTVKRGGNKPLHKALNMCAHRLIHRHNEMFGIWGYNLQQQTGKKKKAANAVARKLSVAMYYMMKTGSEFTYDNYHSIRNIDVFDIPVEDLVLINGDFKRYIRILKENDIYTTTDLATAYISCSLGSCPGLGKKFFGLLKDFLDHHVTYKEMYDDIKSKLNHKEETVYE

SEQ ID NO: 302565 - protein, 467 aa, unidentified
MSPSILYRAVPVKTATLHFLKYVARRSTVHIGIDIGKNKLYVVIRWTAPRSKHAAYEQPWFVKNPDEISELIKKLLKIAKQNPVIIGIESTGTYGDPLRQALADAGLSVYQVRTKSTHDYAEVFDGVPSQHDGKDASVIAELLAQGKAKEWNFREPTEAENEMKYIVTKLRDSHKELSRLRGKLEGLLARHWPEITKILSLKSLTLLKLLKQYGGPQKIRTDREAVAAIRRFSFGRIDAEQADRIIDCVKSTNGVRQMTWDCRYVMDVATRMLDIYKETKRCKKRLAELIGMSCVELQRMSKLLGVATASVVWCNIGAPYFYHCADAWLKAMGLNLTERSSGEYQSSVHISKRGNSETRRWLYMSALRWVRQPPVKQWYLRKKEQTGIKIRGQENKRTGGKAVVAVMRKIMKGIWHALVHYHAFETVKLFCEGSSKKKDAKPGSKCFRKRNKNRKPYDSSASKMRQR

SEQ ID NO: 302566 - protein, 364 aa, unidentified
MQQLTHIGLDVHKDTIAVAVLRPDTVSFDERVIPNTPEALRRLLKRYPDPSLLTTCYEAGPTGYDTHRFITSLGIDCDVIAPSLIPKRSGVRVKTDRVDARNLARLHRAGELTPVRVPTPAEEAVRDLVRAREEIKADRRIARQRIRSFLLRYGKRYPAPSARWSFRFEVWMRALRFDEPMSQAAFEHLLGAYFVRDSQLCAVDRQIEELALLEPLATDVARLRAFRGIDTLTAVTILTETCDFLRFGSAGAYMAFTGLVPSEHSSGASRHQGSITKTGNVHIRRVLVEAAWAYRYAPAVRRKLKCRQEGQPPEVVAYSWAAQCRLHATYRKLATRKGANKAVVAVARELSGFVWGAMTGNMGA

SEQ ID NO: 302567 - protein, 375 aa, unidentified
MTVTRTLSGSVSEPTLYVAFELGKKEWKVAMTSGFGVPPWLRTVASRDWRGVARVIAEGRARFGLSPVAPVVSCYEAGRDGFWIHRALVEQGIQNRVVDSASIEVNRRARRAKTDRLDALKLATMLVRVCYGERRVWSEVRVPTVRDEAARQVSRERTALTQDQTRLVNQMRGWLATWGATLPSRRRGAWWTRVRDWAGAVLPAEVQARLARADVRLETVEAQIAALDAQQGTAVRTAAPSSALRQLVQLKGVATTSASVLLDEGLVWRAFRNRRQIGGLLGFAPTPYDSGESVRELGISRAGNARLQSISIQLAWNWVRWQPHSALSQWYRGNFGQGKRGRRIGIVAVARKLVIALWRYVTSGVVPEGAILKVA

SEQ ID NO: 302568 - protein, 364 aa, unidentified
MKIVGCDLHAGQQSIAMMDSETGELTEKVLKHDGNAVREFYGSLEGPVVVGIEATGAMQWFLELLEELGIECRVGHPAKIRAAETRQQKHDRRDAEVILELLLMKDRFPDIWMPSSEQRDLRSLLRDRHQWVKMRARLQHTLQAIALNHALRKGKALWTATGRQALQDLALPDYTAQRRDELLRLYTQLEQRIQQLDKQVEKEARGRPQAHRLLTHPGVGPVTALATEVFLGDPHRFDTANQVASYIGMIPCEHSSGKRRRLGKLTKEGNSLLRYLWTEATLHAAVKDPELKRFYRRKLVQKGMGKARVATARKLGIRLWIMLRDEIDYEEFCRRGKLPQKGKTHAGMPDFNSGPARAVTGSTE

SEQ ID NO: 302569 - protein, 347 aa, unidentified
MNKNWFIGIDVSKKTLDASIFVADVVINKFPHTQVRNDKEGFKELLRWLKEQGVRPQDALIGLEFTGYYSDALEQFLTSKKLCYAMLPTTVVKHYQRGARDKNDKIDSAKIADYLFRFHDTECIKLRVLPSKAMQDLKALKSERKFYVRHRTDCENRQKVAKSRDEQKNLQKIIDLYDKEIERIDQKMADVVTSDEEIHLTYMRLMSIPGIGSVNAINTIANTQNFTAFETARQYAKYVGVAPSEHSSGTSVRWRGRPSPHADLQAKADLSMAAMRAVEFSFEMNVYYERKLGNRPDDKDVKRKALNAVKFKLIRQMFSVAKQHRSFKPLEQTQAQAEIHNTDKRVN

SEQ ID NO: 302570 - protein, 389 aa, unidentified
MIYVGIDVAKDKHDCCILGPEAEMLFPVFTIQNNRDGFNELFIKMYEVAEDASEIKVGLEATGHYSYNLLGSLIDEGLTTYVINPLHTNLFRKGQSLRKTKTDKVDARTIAMMMFSDRTLKPYSDISYHNEELKSLTRYRFDMVQKRAKLKSSVSRLVNILFPELEKLVPTLHMASVYALLSELPGASYIAECHMTHLKSLLYKASKGRYGDDMAETIRETARSSIGSIMPAKSLELQHTIRQIQAISVDIDEIENSIDVIMDSLASPITTIPGIANRMGAMIIAEIGDFTRFDNADRVLAYAGISPTTYQSGQLNSSYAHMEKRGSRYLRYALINAAKYVSQWDPRFAAYLAKKRAEGKHYNVAITHVAKKLVRTIYRMELTGEVYRG

SEQ ID NO: 302571 - protein, 467 aa, unidentified
MTPPKDFCLDPGPPAPTPTCPPSPVLSDALQICHPHAAGIDIGEAEHWVAVPPGCDPQPVRRFGTFTVDLDALADWLIDCGVTTVAMESTGVYWIPLFELLEARGVQVLLIDPRQAKRAPGRPKTDRLDCKWLQRLHAYGLLAGAFRPEDQVCVLRSYLRHRQMLLTSAAHHIQHMHKALQQMNLKLTQVVSDITGVTGMAILKAILAGERDPVILAKLRNPHCQHSEDEIAKALQGTWRTEHLFALQQAVALYDFYHQQLALCDRQIKAHLETFADKSAGQPLPPKARRHKKTNEPRFDARTPLYRLAGVDLTTIEGIEENTALIILSEIGTDMHRWPSVKHFCSWLGLCPQHQISGGKVLSRRVRPGAHRVTVALRLAARTLHHSQSALGAFFRRMKARLGTPKAITATAHKLARLVYSLLQHGSAYVQQGLDAYEAQYRERKVTTMAKQAKALGYTLVPLAAQG

SEQ ID NO: 302572 - protein, 336 aa, unidentified
MSTICGVGIDVSARELTVSVAGKTTQSFENNAKGHRAISRLVRDCAKDEIQVCVEATGSYSLDLCFHLQGCGFRVMVANPRAVANFAKAMMSRSKTDPMDAEVLREFAERMPFVEWLPPSQGALELRAASRRLDSLSNMLTREKNRLHAARATKTTISIVCDDLKSSIKHFEGRIERLIKKIEAFIETQPSLHAHYRRLQTVRGIAARSAIRLLGELATMPADMSPRQCVAHAGLDPRQHQSGSSIDRPARISKRGNRYLRCALYMPAVVASQHDPVIKAFYERLLEKGKTPSARWWPLCVSYFTASSECSKPGLTLTPKNLGARRGLDVAQDALC

SEQ ID NO: 302573 - protein, 319 aa, unidentified
MLVGIDVAKAELVVAVRPSGERWSVANDERGVGTLVERLRALTPELIVLEATGGYELLAVAALAAAALPVVVVNPRQVRDFARATGQLAKTDRIDADLLALFADRVRPAVRPIADAEAQELDALLTRRRQLLEMLGAERNRLGQVFGKGKRPVRKSLKAHITYLEREVHLADTDLGEMVRQSPAWRERDDLLQSVPSVGPVLSRTLLADLPELGRLSRREIAKLVGVAPLSRDSGTLRGRRFVQGGRASVRAVLYMAALVATRRNVVIQAFYQRLVAAGKPKKVALVACMRKLLTILNTMVRTGTRWSADYAVPRLTTA

SEQ ID NO: 302574 - protein, 408 aa, unidentified
MGRAAEVVAPSSSIRTDGGCPVVQVNDLSRSLAAFDPISTLVVVVEMSKASWLVSSVVPGVERQPLKKLEPDATAVLRLIERWRNEAVRVGRPISRIALAYEAGRDGFWLARWLIARGIEAHVIHSASVAVSRERKRAKTDRLDAAMLMRVFLGWLRGERGHCGMVAIPTMEEEDARRPNRERESLVNERSRIINRMKSALARLGIRGFKPHLRKAPERLAGLRTAEGTGLPANIIEEFRRDMARLALVREQISSIEKTRAERLERAPDTGPHAMVRLLARVIGIGIETADMLVREILSRKLRDRRALARYAGLTGSPDESGLKSREKGLAKAGNARVRRGLIQLAWRFLMFQKDSALARWYRTRTEGPSGARKTTMIVALARKLLIALWRLVTTGEVPDGVELRTAA

SEQ ID NO: 302575 - protein, 381 aa, unidentified
MHRSYDYFVGLDVSQRTTSVCIIDADGKKFCEGKCNSRPEDIRGWLVNRVAEDKTLKIGLEAGNMSSWLYSGLVKFGFDVVCMETFQAHRFLATYRNKTDKNDARGLAQLVRMGGEDFLRVVSIRSQASQETRVLLAMRDHLVSQKVGLENHIAGVLKPFGVIVERGNVTAETFYKRTLEGLAEAERNGVHVRPYVLPSLNLYMEAVEKIAPLTEKIHAIANSIEMVRRFMDIPGIGPITALSFYAAVDNPQRFQKSSDVAAYFGLTPRQFQSGETNFMGGISRRGDPATRRVLVIAATVLLSGTQQWNSLKAWGVRLAKRIGFSKARIAVARKLAMIMHKMWLNNDRFRPKNLSPQERIKLKQELIVVASKSGRVATAAV

SEQ ID NO: 302576 - protein, 392 aa, unidentified
MVVSVGIDVAKDKHDCFIQNSEGEVLADVFTISNNMDGFHTLLEKIQACIAPQDKIRVGLEATGHYSYNLLGFLLDNGLATYVLNPLRTNLYRKSLSLRKTKTDRVDARTIAAMLLSDAGLKPYTNTAYHNEELKSLTRYRFDKVKERAKLKSSVSRLVCILFPELEKLVPTLHMASVYALLEEFPGAKQVARAHLTSLKSLLEKASKGRYKRDMALSIRDAARMSIGSRMPAKSLELQHTIRLIRELDAEIHEIEAEIETMMDEIRSPIMTIPGIGYRMGAMILAEAGDLSRFDSPDKLLAYAGMSPSTYQSGQLNNCYPHMEKRGSRYLRYALFNATKYVCLWDPTFSAYLAKKRAEGKHYNVAISHAAKKLVRLIFAMEKSRQPYRSAA

SEQ ID NO: 302577 - protein, 384 aa, unidentified
MQKSSTLYVGLDVHKESIDIAVADTPREAEVRHVGAVAGGVEAVTKALRKWVSRGYRLHIVYEAGPCGFVLQRHFSALGWHCDVVAPSSIPRPSGERVKTDRRDAIKLARLARSNDLAVVRVPGPADEAVRDLVRAREDAVRECRNARHRLKALLLRNGIAYAGKTAWTAAHLRWLATLKMEHSAQQIGFQEYLHAITESTQRIARLEQALRDALPEWSLKSLVQALQTMRGVQLIAAMTLVAELQDFLRFENPRKLMAYVGLVPGEHSSGPKRRQGSITKAGNSAARRMLVEIAWHYQHSARLSPIIATRQDQCPKAVTDIAWAAQLRLHAKFKRLLARRVLKNKAVVAVARELAGFVWAIGCEVQTSGWQGIKDESSVSQTH

SEQ ID NO: 302578 - protein, 320 aa, unidentified
MKKHATSMRVFVGVDVSKDSLDVYRPDTAELIKIDNSEAAVADLCQQLQKKKRHLIVVMEATGGYERLLVNQLALHDLKAAVINPRRVRDFAKGVGMDAKTDPIDAKILSRYGEVVSPKPMAVKSEHEQKHAAFVARRNQLLELISQENNRLQQTWDDDVKQSIRDVLEMLKKQLKSIDSQLAKMLKADAKNQRTIEILQSAKGVGPVMISTLIAELPELGRLNRAEIAKLVGVAPINRDSGKKSGKRFIGGGRGQVRRVLYMATIVAIRHNEKIKTFYQHLKSKGKVSKVAIVACMRKFITILNLLVKKDQLWQTKTSV

SEQ ID NO: 302579 - protein, 401 aa, unidentified
MISVGVDVSKGKSTICILKPYGEIVCSPFEVQHEEGAMEAFVDLLAKLDGEIRVVMEATGIYHLPILTFLHDKGYFVSVINPFAMKKYAKNNSIRGAKTDKLDSMMIANYGIEKWYKLQKYEGDEETYAELKLLGRRYRYYMELHVKALQELTHILDYVMPGIKKMFNSWNEANGKDKLSDFVEKFWHFDLITSKNLEEFTEEYLVWAKEKKYHCSKSKAEAVYELACNGIPTLSSDTPSTKMLVQEAVSVLRAIDSSLTLILARMQSLAKSIPEYSTVREMGGVGDVLAPKLIAEIGDVRRLHSAKALIAWAGIDPPPYESGQFIGSKRRITKRGSSTLRKVGYEVMRVLKSHPAPKDDAVYNYILKKEAEGKSKKHAKIAGLNKFLRIYYSRVMEVYQK

SEQ ID NO: 302580 - protein, 268 aa, unidentified
MRIIGCDLHARQQTLAMLESTTGEVVKATLKHEGNMVREFYDQLPRPVRVGIEATGSMHWFVNLMEELGIECLVGHPAEIRAAEARKQKHDRRDANLLQSLLVEERFPAIWLPTKEQLDLRALLRHRHQWVGLRVKIQNALQAIALANGLRRGSSLWTRAGQQAIASLPLSPHAAYRRSELQAMYVQFEREIEKLNQRVEQQAGERFGARLLMTHPGVGPITALATEVFLGDPARFAGSKELASYVGMIPGEYSSGKRQRLGGLTRGS

SEQ ID NO: 302581 - protein, 457 aa, unidentified
MPQPKRSRSRTGLSAVHPAAAAIDIGATMHVAAVGPDRDTEPVRTFQTFTDDLHRLADWFARCGVKTVAMESTGVYWIPVFEILEQRGFEVTVVNARDAKHVPGRKTDVSDAEWLQRLHEYGLLRPSFRPQAEIAGLRAYLRQRERLLDYAAAHIQHMQKALMQMNLQLHHVVSDITGVTGMNIIRAIVAGERDPNVLASHRERGCHASVETICQALVGNYREEHVFALSQAIELYDVYQTKVAACDRQIEVILKRLKKSATPPASKLLPPKHRSRQPNAPSFDARAALHAILGVDLTQIHGLGPYLALKLVGECGINLTAWPTAKHFTSWLGLAPHNKISGGKVLSSKTRRTSNRAASLLRLAAVSVGRTDTALGAFYRRLAARAGKAKAITATARKIAVLFYNTLRHGMSYADPGATYYEERYRQRVLGNLQRRAKSLGYVLHQAERDPVQMVVS

SEQ ID NO: 302582 - protein, 430 aa, unidentified
METLNRFIAGIDVHKKMLAVVVRREQDGQTQYEKHRFGTTRSEIVSLMAWLQHQQVNEVVMESTAQYWRPVWYGLEGHFKLHLTHPLKTRAPRGRKRDFRDAQRLADRWRSGDLEESFIPNAEQRSWRWLTRTRVQLKRKVGVIRCHVEGLLEQGGIKLTSVASDLFGVSGWAMLEQIAKGEADVEVMVKEARGALRKKEPQLREALAGQLEPVYRLLLKQHMDQVRLLWRQIEELNLALAGAMKEHLPALHRLSKIPGVDLYAAQELLSEIGPGATAFASAEQFVSWVGVCPGSQESAGVCYSRRSAKGNRYLRRLLCQVAWAAIHTKETFFSGLFARLKPRVEGKGAAWAVAHRIAKIIWLVLHQQVEYQEKGPVPPNERTLVRKFNRLLRDFGRLGLDVRAVLDKQLLVPATPAASAAPSIPSAPPA

SEQ ID NO: 302583 - protein, 320 aa, unidentified
MAQQGRIVGIDVAKLKADACIRSLQLRLSQPSTAQGQQDMIAWLRRHEVGLAVMEASGGYERVWAEALRAAAIAVRIVDPKRVRYFAKSAGRLAKNDPIDAEMIAWFAETFAVAAEPAHDADRDALNRLVTARRLLVRLATPIRQLGEHGQPRVVENAQRAILKTIKAQLAKLEAAIEAKIAANAQFVARRAIIASVPGFGDHFVAGALAWLPELGRISNKAAAGLVGVAPYDDDSGQHRGERHIRGGRRDIRTLLYMAALGAATRHNPVVMAYYKRLRAQGKKTKVALVACMRKLVVILNTMLARGEMWNPPPRTTAVA

SEQ ID NO: 302584 - protein, 341 aa, unidentified
MSDYSYFCGIDLAKNHFSLHAVDQNGKVILHKSVTRSKLLTTIANMPLMRIGVEACGGAHYWARTLNKLGHDTRIMAVKYVIPYRTKGKNDLNDAVAICEAVQRPSTRFVPAKSPEQQAILSVHRMREHWVRERTALMNRMRALLSEFGLIIPVGRSSLMKLVPLMLEDAENELPHLARTVIADAYHHLGELNQRIADTEQVFDSFAKVSANVQRVMRVRGIGPQTATAILASIGNGSQFDKSRDFSAWLGLVPKQYSTGGKPRLGRITKHGDKYLRTLLVHGARTVIANLGDKQDKLSQWCRGVLERRGMNRAIVALAAKNARIIWSLLHNQTEYENYAA

SEQ ID NO: 302585 - protein, 377 aa, unidentified
MDSSSPYPTGVDAPEWEVLANHSEDEEKPDMKITRAGVDIAKSIFHVYAVDRHDQPQWQGKLKRAQWLDALCQRLAPGAEVGIEACASAHHWGRELQKRGFVVRLIAAQFVKPYVKSNKNDRADAEAICEAMGRPGMRFVAVKSVSQQDTQAAHRIREELVGQRTAKANQIRGLVGEYGLVAPVGIEQLRCAIPEWLEDAENGLTIAFRTLLADLADDLCHLDERIGQLDAHIAKQVKDDPVMNRLMELRGVGPLTASALAGALGDGKAFSKGRDFAASLGLTPRQHSTGGKERLLGISKRGDSYVRKLLVHGARAVLRHAKHRDDALSQWLNAMAARKHANVVIVALANKMARIAWAVVHNDTSYEPSLAAGDQRG

SEQ ID NO: 302586 - protein, 403 aa, unidentified
MNSVGIDISKGRSTIAVMRPFGEVVISPFEVRHTGSELSELARQLKSLDGETRVVMEATGNYHASVAKLLHDAGLYVSVVNAKLVHDYGNNELRRVKTDRKDAVKLADYGLDRWLTLPRYIPEEDTRLLLKNCYRQYRQYSKVQTVLKNNLISLLDTVFPNANRLFSSPIRGDGSEKWVDFVAEFWHCRCVSEKSERAFTSKYLRWCRKHGYNFREAKAHTIYAKASGHIGVMPKSETTKLLVEQAVSQLRATSTALAALKHEMQSLASQLPEYPVVMDLFGVGPTLGPQLIAEIGDVRRFYSKKALVAYAGLDAPPNDSGDVTGRHKSMSKIGASSLRRTLFLVMSVYLQTAPLDEPVCPFMDRKRAEGKPYRVYMMASANKFLRIYYATVKAYLESLEHTA

SEQ ID NO: 302587 - protein, 365 aa, unidentified
MIVIGTDTHKKTHTCAAVDALTAAARGELTAPARGGSFGRVLVWARALDCERVWAIEDCRHVSGAFERFLVSRGERVVRVAPKHMAGARRSARERGKSDSIDALSVARAALKEGIENLPGAHLDGVALDIRLLVDHREDLVVARTQEQQRLRWHLHDLWPEFEIPTGALDTGKWLGKASRRLARAEQSVRVRVARELVRQIAARTTRIRELEAELARLVGSYAPQLLAERGCGPLTAAKLIGEIAGAERFATDAKLARTSGSAPIPASSGNTSRHRLDRGGNRQLNCALHRLAINKAHWDPETAAYLERRQAEGKSRKEAIRCLKRHLARRIWKLLQSPGPRPSAYPQKPISIYCNLPNSGFALT

SEQ ID NO: 302588 - protein, 343 aa, unidentified
MKLKTITIDLAKNVFQVCGVNEHIKPQFNKKLKRAELLDFMRQQPPTLVVMEACYSSHYWGREIAKLGHDTKLIPAQHVTPFVRGNKNDHNDAFAIAEASQRSHIRFVPVKSEQQQEINCLHRIRDHLIKNKTAQSNQIRGLLSEFGVIFPCGHVALCAGLAQIIDSEQRSTQLKTMMGELKVEYEDTRTRIKVIEQQLHHFVDNSESGKILLSIPGIGFINASAFLAAIDKGQAFNSPKEFAVWLGLTPKQHASGNVSKMGGITKRGDRYLRKQLIHGARSVVSRAAQRTDPLSLWATKLRVTKPFNKVAVAVAHRLARLIWILLTRQERYCATPAALEASA

SEQ ID NO: 302589 - protein, 358 aa, unidentified
MKQYSTIIGMDLGDKTSHYAVMTRKETEVQHTGTVRTTEEALRRLFGNMEPSCVAIEAGTHSPWVSRLLQQCGHEVVVANPRRTRAIYDNPTKNDRVDAEMLARLLRSDPNLLSPIQHQPEHEQAHLAIVKARDALVRVRTVLINTVRGLVKSMGQRLPRLNADVFHKVAADSIPASLNGAAQPLLKQIGALTHQIRRYDKVLDALRRKYYPECELMQSVPGVGPLTAITFRLVIGDPSRFSSSRDVGPYFGLTRKQDQSGGHDPELAITKAGNTMMRRLLVSGAQYILGPLNKKDSELRQWGLKMAGPLRSDGKMDRKAKKRAVVAVARKLAVLLHVLWVTGSLYEPFFQQKSMGAQ

SEQ ID NO: 302590 - protein, 344 aa, unidentified
MIIVGCDFHPSWQQVAIFDFSTGEMVERKLVNGNGEAERFYRSLPVPSLIGLESCGNSQWFVELVEQLGHQVWIGDAAQIRASYVRRQKTDKRDAAHILKLLREGRFPRLWTPSAEQRDLRQLLIHRHKLVEIRARVKNGLQHLAMNRGMQKKSRLWSEAGQKAFGKLRIEGWAACRREDLQRLRAVLDVQIGKLDAAAQRAAEDDEQARLLMTHPGVGPITSLAFVLTLGDVARFKRGKQVASYLGLIPREHSSGGKQRLGAISKQGNGFARMLLVEAAQTVNRLDEGFRKQYQHRCHTKPKGVAKVAAARRLAVRLYWMLRTRTSYPEIVRIESSPRVPLVD

SEQ ID NO: 302591 - protein, 457 aa, unidentified
MQTFYLGIDVSKGYADFIILNSQKKIVVENFQLDDTFEGHCLLFELLSRFFRDHPESIIYAAVESTGGYENNWYNALLAFQGSLNLQTARLNPLGVYHDSKAEMKRNVTDKISAKSVAEYMIGHPEKVSYQQQDHLASLRKQWGFVKMLTKQSTQLLNQLEALLYSANPEILVYCKEGVPAWVFKLLVKYPTASNLAKAKVTSIARIPYVSSAKAQAIALNAKRSVASATDKITQQLVVATVKQIMHLKKNIKTQTEIMAKECSVPEVELLKTFIGISDFSAIGLILNIQSVKQFKTAKKLASFFGLHPKLKISGDGVVVVRMSKTGRTEPRQILFMVAMTAITKNPLISGIYQEHVRKGMEKMAAIGLCMHKILRIIYGMLKHNSAFDPEIDLRNRQKSVQRRKLSRKDNKIRRYQDYDPKAPISSRHKTKRMEQRQSQSDNGAEYGILAPVPFPT

SEQ ID NO: 302592 - protein, 347 aa, unidentified
MDYVGIDLHKKESQICILSEGGQLSECRIRTEPQRFAEVLGARPRARILLEASTESEWVARCLEGLGHEVVVADPNFAPMYATRTRKVKTDRRDARALAEAGLLGAYRPAHRLSDAQRHVRGRLAVRDALVRTRTGYISLIRALLRRHGWRVPTGSADTFIRRVVALPLPGRLLSEVAPLLAVMRPVNQQLAYSDEVIEHVTRPDVRVQRLRTVPSVGPVTAAAFVATIDDAQRFRRAHEVEAYLGLVPRELSSGESQRRGRITKAGNTRMRWLLVQAAVSILRLRDPRTVALRRWAMGIATRRGKKIAVVALARRLAGLLYAMLRDGTTYEPRAVPRRATAAAVPV

SEQ ID NO: 302593 - protein, 399 aa, unidentified
MFYCGIDIAKYKHEASVIDMSGKALSNSITFANDRQGCEKVLAIFEKSEITPDNIVIGMEATGHYWLSVYTFFLELGYTVKVINPIQSEAFRKMYIRQTKNDSKDSYIIAQIMRFGEYSATSLSEENIIALRQLSRYRLALVDTCGDCKRRVIALLDQVFPEYDKLFSDTFGKTSSELLLNCPTPEDMLAVSTRKLTNILNKASRGRFGKEKAEELKDAAKNTFGIAFAKDAFSFQIKQLIQQIIFTEKQLSELEEQIANLLHETNQYITTITGIGDVLGAIIVSEIGDINRFERPNQLVAFAGLDVTVKQSGEFSGTKNKISKRGSPYLRRAIWLAAQRAAFCDPVLSDYYQSLKARGKHHLTAVGAVARKLCNIIFVILKENRPYFPTPPKKSQNLS

SEQ ID NO: 302594 - protein, 347 aa, unidentified
MRFYNNKHNYYCGIDLHARLLYVCILDSLGNKVLHKKIDADPDALLELITPYQDNILIGVECMHCWYWVSDLCLDYAFDFVLGHALYMKAIHGGKTKNDRIDSYKIASLLRGGNFPIAYVYPKAMRATRDLLRRRTKIMRHGADLKAHVANTFSQYNQQSHNVQLRYPCAREQVRNQFDEPSINRSIDMDLNVIAFYTKELASVEHFIEKTAKQHSAQDYYLIQTVPGIGRILALTILYEIGNIERFPSVQNFASYSRLVKCKAESAGKQKGTNGNKIGNAYLKWAFSEAAVLYLCGNEPAKKYIQRLQKRMSKAKALSALAHKLGRCVYFMLRDKTVFDEKRFLPQ

SEQ ID NO: 302595 - protein, 328 aa, unidentified
MQSGVPTKVLMLGDNLMTDKLIVGVDVSKAWLDIAVADKGMVERIDNTEKAIEQWLARVRPGLVAFEPTGGYERVLQRCVRGRGILFVRVHPNEIIAYRKSRGIKAKTDAIDARLIAAFADEVLSRRGLKPNIAGDETLRELAARRRQMLQTIGAETCRLAIADTKAVRKSLKVVIASLSRSLKAIEAEIRLHLKADENASELSDLLQTVTGIGPVVAMTFLADLPELGHLSGKQIAALIGLAPLTRRSGTSVTRDHTGHGRPAVRSVLFNAARAAIRHPSPFKAFYERLTIENQKPGKIALVAVMRKILVTANAIARDRQPWHFANT

SEQ ID NO: 302596 - protein, 316 aa, unidentified
MQTFLNIGVDVAKDAVVVACAAQSFPVNSITNQRAPLLVWLKSLPAGSRIGLESTGGYHELLADLAYAQGHTVFLLNPLDTKHYARAMGNRAKTDRVDAELIARLVAQEHSRLRPYTPPTANQRRLDRLIRRRAKIVRIKSMLKMTMCNLSGFTTELKAALLKLDALIAKIDSAMSAIAACSPQHVDAQQHLQTIVGVGPVVGMALTNTLERVPFRNADAFVAFIGYDPKANDSGHKVGRRRLSKRGPAELRRLLFNAAMAAIKSKVWKPIYEHYRALGWSTTATLVIIARKIARTAWSIHHYHSTFDPERITKNA

SEQ ID NO: 302597 - protein, 397 aa, unidentified
MGNRSAELHTTKEPVVSKRIRYMGLDVHAETIAVAVAEPGRRGEVRSLGTIPNRPGSLRKLVSKLGGPKGLRFCYEAGPTGYAVYWQLTGLGASCEVVAPTLVPKKPGERVKTDRLDAEKLARCYRAGDLTPVWVPDAAHEALRDLVRAREAAKKDQTRARHRLSKLLLRRGVRAPAGVRAWTLKYKAWLKTVVFDEAADNATLLDYRTEVEHQGERIKRLEQAIDDAVEAVPEEMRAVIDALQALRGVAKLSAATIVAETGPLSRFERPAKLMSYTGIVSSEHSSGASKRQGSITKAGNSHLRRIVVEAAWSCRYKPAIAGRLRQRQQGLSEEVKEVAWKAQHRLHRRYFRLVSRGKSPQVAVTAVGRELLGFIWAIGVQVEQELAEQRKATRKAA

SEQ ID NO: 302598 - protein, 401 aa, unidentified
MEIVYPRSCGVDVHKSFIVAVICISESVKPKYIKKRFSTFNNQLIQFRDWLIENNCQNVCMESTGKYYIPVYNVLESHISNIFVANPKWVRAVKGEKDDDKDAKWIADLFKFGIVRSSFIPQKDFRILRELTRYKYKLVNIRSSEKNRFQNALTSGNCKLDMVFTDVFGKSASNIIDLILSDNTYTDEDILSKVHKKCKASPDMDLDSINGTDLTPVQKSRIELVNDHIKQLSSNIQRLDKLIDLMIEPYEDYISFLCQIPGVSINSAITILSEIGVDMNQFTSTRRLTSWAGLTPSSNQSTGKKKSVRISRAGVYLKPCLVEIAHAAVKDKNHPYYANKFNKISKRRGKKCAFIAIARKILVGAYYMLLTGEIWNPADLAEVETPVEQRIKYVNQILNNY

SEQ ID NO: 302599 - protein, 309 aa, unidentified
MDVFVGIDVSKDRLDVHVRPGGEAFAVARDGKGLEELVGRLVELAPQLVALEATGGFETIAAAALAGAGLPLVVINPAQVRHFAQAVGKRAKTDPIDAAVIAHFAETVKPEPRPVPDEEARLLAELVARRRQIIEMLVAERQRERRAHSPRVRKSLLRHIKALEKELSEVDTDIDMLVRGSPAWREKEDLLASVPGIGKTLARTLLAELPELGQMDRRRIASLAGLAPFTRQSGRWKGQSMIAGGRPAVRSALFMGALVASRCNPVLKAFHQRLLAAGKPKMRALIAVARKLLTILNAIIRDQRAWQNA

SEQ ID NO: 302600 - protein, 361 aa, unidentified
MQSTTIIAFDQHAATTMAAVLLPGQRTPALHPLTSDSATILRFVDRLRRQGAVACCYEAGPCGFELQRALTGHDIPCDVIAPALIPRRPGDRIKTDRRDAGQLAVLYRAEALTAIHVPTEHEEAARDLLRCREDIRADLLRARHRLSKFLLRHGRRFTGTKKAWTKRHDDWLRTQTWPIAALDQTHRAYLRAVDEAVARLRAVEGDLRDLLTLDPLRERVARLRCFRGINDLTALTIAAELGDPRRFATAPRTMAFVGLVPSEHSSGTKQARGRITKTGNAHLRRVLVEAAWHYRHRPFVGATLRARQRGAPATVIARAWTAQHRLHRRYHRLAARGKPNQHVITAVARELTGFVWAALTQ

SEQ ID NO: 302601 - protein, 429 aa, unidentified
MKSNTQNAKIASITEKTLIIGIDVGSETHYARAFSWRNYEYSKKPFAFSNDEAGFAAFKEWMDDIAEKHGMEVIIPGMEPTGHYWLNLGAYLQEQGMKPVHVNPHHVKKSKELDDNNPSKNDRKDPKTIAGLVNEGRFSYPYIPTGIYAEIRNLSNLRIQTQEEITRIKNRMARWFSIYFPEIKDVYRNPDAVSGLMVIKQAPMPCDIRELGVEGVNKIWRDARLKGAGIKRATTLVTAAEHSIGNTEAPRSARKEIRNLLEDYEGYKKRMDELMEEIEKTLSEIPYIDKLMKINGIRIKTVSCFIAEVGDIGRFDNPKQVQKLAGYAIVADSSGKHNGESRISHRGRKRLRYALYESAISVIGKNKEFKEIHSYYRTREKNPLKKMQSVIAVACKLIRIFYTILTKGVDYDGQKMLNDIVRPEIQPAA

SEQ ID NO: 302602 - protein, 346 aa, unidentified
MNQIIRIGMDTSKHIFVLHGVDASEQPVLRKKLSRKLVLEFFAKLPPTVIGMEACGASQYWARELSRLGHEVKLMAPQLVKPYVMRNKNDGRDAEGLCEAMSRPSMRFVPVKSAEQQAALMLTGIRDGLIARRTQLTNTIRGHAAEYGLIAPKGLDAIEPLLARIAQDETLPALARELFVVLGRECVRLEGELEAVEARLMAWHRGDATGRRLAQIPSVGPIIATMLVMKTPDPGAFHSGRHFAAWLGLTPKDHSTAGKTRLGKITRAGDEDLRRLLVVGATAVIQQAKRGRGHHSRWLLALIKRKPPKLAAVALANKVARIVWKLMVTGESYDAARLNAATTGTA

SEQ ID NO: 302603 - protein, 357 aa, unidentified
MKRQKQYILRNEEVFVGLEDSKKTWKLCVRSGGVIVHEASMPAQYEVLRNYFHNKFPGCQIKVIYEAGFRGFELHDRLIADGWGCVVTPPHTVMEEKCQRKKNDRTDCRRLAKNLENGDYHICFVPDRELREDRQISRTYGQVEEDIRRTCNRIRRMLEFHGLDEGFPPGRWTQAMYDLARQKLGRLDMSESLRFSFEVLFRELEYLRGLRRELLRQLRRLARSDGYREDVELLKSAPGIGALTAIRLVLEWGDVRRFARKGDFASFLGLVPSDYSSGEKERRGHITKQGNPRLRTWLVECSWVAIRADPVLLEKFRRVVRACGSKKKAIVAVARKLALRLRRVLISREPYVIGVLE

SEQ ID NO: 302604 - protein, 418 aa, unidentified
MIGVGIVNHPKMKYTYVGVDSHKDTHTAVLLDCFFDKVGEIVFENLPSKFEAFLSEADALKVEGTTLLFGLEDISAYGRTLTIFLKNNDQEVKHVNSLLVAKERKAQTVTQKNDAIDATCAARVLLSKLSEMPDAEPEDNYWILRTLVMRRDFVVRNNVSLKNHLHSLLMQHYPNYRDFFQNIDGKASLAFFMRYPSPSTLGGTAVEELAEFLHKPSYGHFGIDKAKEILDSLEDTTIPFQDLRDEAVRSTIRQIQFNMQEIDGLESTMADVLSWFETTLTSMNCMDIVSSAQMLSCIGDIKRFPTPAKLARYAGIAPVEYSSGKKDLNFVNKRGNRELNCHFYLLAVRLIATSNTTNRARNLFFWQYYHRKISEGKTKTQALKCVQRRLVNIIWNMLTHGEEYINPPMLEVTKKAND

SEQ ID NO: 302605 - protein, 310 aa, unidentified
MDALYVGIDVSKDRLDVHAHPSGQAFAVARNGEGLAELIERLRAFAPALIAIEATGGFETVVAAGLAGAGLPVVVVNPAQVRHYAQALGRRAKTDPIDALVIARFAEATKPAARALPDETTRLLAELVARRRQIVEMMAAEGQRERRALDKRLKKSIARLRKALEKELAELDAEIDDSIHGSPVWAEKEDLLASVPGVGPVVARTLIAELPELGTLDRRQIAALAGLAPWTRQSGQWKGKSFIGGGRKSVRSALFIAAMVAARHNPVLKAFRDKLVAAGKPKLVALVATARKLLTILNAILRNKTPWQIA

SEQ ID NO: 302606 - protein, 342 aa, unidentified
MDHFAGLDVSVKETCICIVDDTGRIVWEGKVRSEPEALLKVLGNSAYHFKRIGLEAGPLSQWLFSSLAEAELPVVCVETRHMQAVLKAQINKTDRNDARGIAQMIRAGLYRPVHVKTLRSQKLRMLLTHRKLLQSKAIAIENDLRGTLRNFGLKVGMVGKVRFEARVQELVENFSDLAALVEPLLIVRRALREQIVILHRRLLAIVRDDEVCRRLMTTPGVGPVVALTYRATVDVPARFRKSKAVGAVFGLTCSKYQSGEIDWSGRISRCGDEMMRVMLYEAAQSMLRSKKWSWLKAWAIQIARRRGMKKAIVALARRLAVIMHRIWVDGTEFRWTRETAAA

SEQ ID NO: 302607 - protein, 431 aa, unidentified
MNPFSVSPPANVAAWVGLDWADQQHLVCLYDVGTGQTELSTLEQKPEALQSWLGQLRQRFGGRPVAVVLEQARGAVIYALLSVDFLVLYPVNPQSLASYRKVYATSGAKSDQADAVLLMEMVRNSPQRFRPWKPDDADTRSLQLLTENRRQLVNQRTAFTNQLTGLLKSYYPQALELAGELDSLQACDFLEKWPTLEALQQARPAQIRKLYLDYGKPRPESLEKRLEQIRRARPLTTDPAAVLSGTMMVRALIELIRPLLATLERFDQQIAALFRKHPDRLLFESFPGAGAVLAPRLVAAFGTDRDRFQSAQEMQQLSGIAPVTEQSGKQRWVHWRWACSKFLRQSFHEFADHSRKWCGWAKALYQRLRRSGKGHHAAVRVLAFKWIRILFHCWKTRTCYDEQVYLKSLEKRNPTLWAETQALPPRKPRAA

SEQ ID NO: 302608 - protein, 355 aa, unidentified
MTSTKYIGMDVHTESISMAVRNSVGKVVMESVIETKASMILQFIEGLRGDLHVTFEEGTAAAWLYDLLKPHVARLVVCNPRRNALLKVGNKSDRIDARKLSELLRGNQLHPVYHGEHGLRALKELVRSYLTISKDLARVMTRVKALYRSWGIPCSGTQIYSQLHRVTWLSKISEPGVRLRAAFYFQQLDALRTLRQEVRQELLAESHKHSAWKRLCGIPSIGPIRAAVALGVLQTPHRFRTKRQLWSISGFAIETRSSADHRHVNGHLQKVKKRVSIRGLNQNHNHDLKNLFKGAAVIASTKPGPFQEFYTALLAKGIRPEMARLTLARKIATIVWIVWKRGVSFDAQYLKPQTV

SEQ ID NO: 302609 - protein, 370 aa, unidentified
MKKNSTRPQSPKRAAARSKGPITIGLDLGDKSSRYCVVGDNGEQMSEGSVATTRKAMAQKFSGMGRCRIAMEVGTHSPWLSRLLSKLGFEVIVANARQVQLISASSRKNDRMDAHMLARLARVDPELLRPIRHRSEQAQADLMTIRVRAALVEARTSLVNAARGFTKAMGERLPACDTDSLGVEKLEALPAALQARLQPLLEQIEALTAQIKKLEGKLEQIARIEYPETQLLTQVHGVGTLIALTFVLTLEDRERFQKSRDVGCYVGLRPKQSESGQSQPQLRITKEGDRYLRTLLVQGAHLILNRRGPDTDLKRWGLKLAGRGGKNAKKRAIVAVARKLAVLLHRLWVCGEVYEPLRNSRPAATSNKAA

SEQ ID NO: 302610 - protein, 342 aa, unidentified
MQITTIGLDIAKNVFQVHGIDATEKVVVRKQLRRGQVMKFFAALPPCLVGMEACATAHYWARELTKLGHEVRLMPAKDVKAYVKRNKNDAADAEAICEAVRRPTMRFVRAKSAEQQGRLMQHRTRDLLLRQQTQVINALRAHLAELGIVAAQGREGLKQLLAIIADQADARLPLDARACLIVLAAQLQALHTLIKSIEKRLLVQHRANEASKRLESIPGIGIIGASAIAATVTDPKAFQSGRDFAAWIGLVPRQDSTGGKQKLGPISKQGDRYLRRILVVGAHAVLRWAKQNPGKYPWLTQLLARRPFKVVAIALANKMARVAWALLASGAKYRAPRLAAAA

SEQ ID NO: 302611 - protein, 353 aa, unidentified
MKPRMESNTASPTVIGIDIGKEVFHLVGFGADGKIAFRRRIRRLALRDVFEKLPPCIVAMEACLSAHFVSRTLRALGYEPRIIPAIYVKPFVKGQKNDYNDAEAIAEAALRPNLRFVQEKSQNQLDLQACHRVRSRLVSRRTATINQIRAFLIEQGIAVRTGPRALRKSLFAILENRKEEISPRTARLIRGLYEDWCGLDVRIETVTSEIEALSRTEAKCRQLMSVPGVGPLISTAIVAAIGSGEAFERGRDFAAWLGLVPRQYSTGGRSILGRISKRGSKYLRTLLIQASKVLLMRPHNWARYSFGPWLNSASERLHRNKLAVALANKLARIAWSVLRDDRAFDTHLEVAGI

SEQ ID NO: 302612 - protein, 410 aa, unidentified
MDILYLRCAGLDIHRDTIVACVRLAEAGGVVRLVETFATTTAELERLSEWLAGHGVTAVAMEATGVYWKPVWAVLAGDFELVLANAHHVKAVPGRKTDVNDATWLADLLAYGLIRPSFVPSLSEQALRDLTRARKQLTREKASHVQRIDKTLQAANIKLGSVFSNIMGQSGRALLEALAAGESNPEQLAGLVRTKIRASHAQVVEAVRGRLAAHQRLLLRLYLTQVDALDAAIAAIDHELGERLKPVQETVRRLTTMPGLSPLSAAVVISEIGLDMSRFPSAAHLISWAGLCPKNDESAGKRRSTRLRPGAPWLKAVLVQSAWCAVRVKASYLHALFQRLKARRGPRKAIVAVAAAMLTAIYHMLKRGAAYHDLGPDHFQRTERSRLAARLARKLGELGFDVTLTQRAAA

SEQ ID NO: 302613 - protein, 465 aa, unidentified
MTPHKDFFLHPRPPAPTLPQSPVLSDALQVCHPHAAGIDIGEAEHWVAVPPGRDPQPVRRFGTFTADLDALADWLIDCGVITVAMESTGVYWIPLFELLEARGVQVVLIDPRQAKRAPGRPKTDRLDCQWLQRLHAYGLLAGAFRPDDQVCVLRGYLRHRQMLLTYAAHHIQHMQKALQQMHLKLTQVVSDITGVTGMAILKALVAGERDPQHLAQLRNPHCHHDADDIAKALQGTWRAEHLFALQQAIALYEFSHQQLALCDQQITVHLATFADKSAGQPLPPKARRHKKTNEPRFDARTPLYRMAGVDLTTIEGIEEGTALVILSEIGMDMHRWPSVKHFCSWLGLCPQHKISGGKVLSRRVRPGAHRVTVALRLAARSLHHSQSAFGAFFRRMKARLGTPKAITATAHKLARLVYSLLKHGSAYVQQGVDAYEAQYHERKVKTMAKQAKALGYTLVPLAAQG

SEQ ID NO: 302614 - protein, 367 aa, unidentified
MGWMAPLRHLGAKMPVGQKPPANREPSMNEITTVGLDLAKNVFQVHGVDAEGTTVLRKQLRRAQVLAFFSRLPRCLVGMEACATAHYWARELRTLGHEVRLMPAQYVKAYVKRNKNDAADAEAICEAVARPTMRFVPAKTAEQQAAVLLHRGRERLVRQRTMLVNALRGHLAEFGVIAPQGLRNVGRLIAIIRDEEDARLPGLARQVLQVLAVQIEQLEAAIAALEKQLMGWHKSNPVSQRLATIPGIGPIIATAIAAMVAEPSGFRSGREFAAWLGLVPRQNSTGGKNRLGGISKRGNQYLRRLLINGASANLLRSKATNADPWVIGLRRRRPSLVVAVALANKTARIAWAVMHRQENYQRMATAA

SEQ ID NO: 302615 - protein, 422 aa, unidentified
MSQEKRYAAWIGVDWADEKHAVCEYAVATASRRGYTIEQRSEALGDWIAQLRSRYGSQPVAVVMEQARGGLIYALMGSDFITIYPVNPQSLAKFRKALYPSGAKSDPPDAELLEEMVRQNPDRFRAWDPGDEQTRSLQLLTEARRKFVDDMTALTNQITSALKTYYPQALDWAGELSSPQACAFLRKWPTLDALQKTRAFRIREFYEKYGRPQRELLNERIRVIEKAIPLTQDSAVVIAGAMAIQTLVGQIESLRVAIANYDAEIARIFQQHPDRAVFESFPGAGKVLAPRLAAAFGADRDRFQAALEIQELSGIAPVTERSGKTIWIHHRWACPKFLLQTFHEFADQARRLCAWSKLYYQQLRRRGKDHHAAVRALAYKWIRIMFRCWKDRKPYDDAVYMNSLHRRGSGLALDCGKPLSSM

SEQ ID NO: 302616 - protein, 314 aa, unidentified
MAGVMIGIDPHKGSHTAYALNEREQRLGQVRVRASSRQVEVLLGWAAGWPERAWAVEGARGLGQLLAQRLIAAGERVLDVPPKLAARVRLLDTGQINKNDPNDARSVAVAALRAHDLPQLTVEGYTTVMRVWARRYHDLGRLRTQLLCRLHAVLCELVPGGFRKELTAGQAIDVLDGIVAESPVTQAKLELARELVADLQRIDAQRREARRRTARAVAASGTSITDIYGVGPIIAGAVLGYVRDIHRFASRDHFASYNGTAPIEVSSGDRKIYRLSPGAGAGSSTTPSSWLRSPRSATAAPRAAPTTRRRSAKG

SEQ ID NO: 302617 - protein, 430 aa, unidentified
MEIVYPRSCGVDVHKSFIVAVICISESVKPKYIKKRFSTFNNQLIQFRDWLIENNCQNVCMESTGKYYIPVYNALEGHISNVVVANPKWVKAIKGEKDDNKDAKWIADLFKFGIVRSSYIPEKDIRILREFTRYQYKLVNMRSSEKNRFQNALTTGNCKLDIVFSDIFGKSASAIVDTILSNNPYTSEDILSKVHAGCKASHEDILSAVEGIQLNQFQKARIRIVQKHMEYLDSLLDEIQHHIDLMVANYEEYIQLLCTIPGINRKSVITIISEIGTDMSQWSSHRKLAAWAGLAPGCNESAGKKKSVKISKAGVYLKPCLVQVAHAAVKDKNCDYYADKFNKISKRRGKKRAIIAIARKILIAVYHLLKTGEVFNPTDMADVETTKKQRIEYVKNNLRNAFNQLSRTGLSEAEILQLIRKESTNSPQIE

SEQ ID NO: 302618 - protein, 490 aa, unidentified
MARLLEHSPRPESTYRPTWAVVFGKAEKMQDSDQRKDNADSSKQIAGLPVVRHKVAGIDLGSERHWVCAATVEGSGREVADFGATTCELIRMAKWLNARKVESVAMESTGVYWIAPHEVLEAEGLEVMLVDTRQLARVPGRDKKSDPFDCEWIQRLHSCGLLMGSFRPKEAVCMLRTLVRDKGNLVAEAGDWLRRIQKSLDQMNVRVHRAVSDIDGVTGMAILRAIVDGERDARQLAKLRNPRCHKSEEEIAEQLSGHWREDHLFSLRQGLKMYDAIQERITDYEKEILQKLAKMEREECRGQEVPKSKKPQKGRAIQSRGAEPMRQALYRMSGVDLTGIDAIGVETVQVVLSEYGPDLSRFPTEKQFVSHVTLAPHKPTSAGKPVKKKKRNSASTRVAAALRMAASSLRHSETALGAYYRHIARRIGGDVAVFATARKLATIIYRLLRWGQPYVDEGAQTYEQRYRENRIKSLTARAKELGYQLTPTTA

SEQ ID NO: 302619 - protein, 385 aa, unidentified
MKKNNTAKKSPKPKALSNFKKNQIREVAAKQRLTIGLDLGDRTSRYCILGEAGEVVSESQLPTTKAGLSSLFEKMPSSRIALEVGTHSPWVSRQLAGMGHEVIVANAHKVKLITQSVHKNDRIDAEQLARLARVDPKLLSPIRHRGPEAQADLAVIRARAELMEARTRLINCARGLVKPMGERLKKCDADQVKETLGEGLSEAAQRVIGPLLKSVEAISKQIAEYDQRIEEIAKRYPEQKLLTQVYGVGTLIALAYILTLEDAERFAHSRDVGPFLGLKPKERDSGDSHPQLGITKTGDGLLRSLLVQGAHCMLRKGAPDSDLGAWGLAKMKSGGKNAKKRAIVAVARKLAVLLHALWSTGEVYDPLFNRKVSQVAAKRKAPKAA

SEQ ID NO: 302620 - protein, 311 aa, unidentified
MTLPQTYIGVDVAKDWIDVCDPASSRQERIPTDRRSLRSFAATVGSSIVVLEASGGYERPVMSALFEAGRLATCVNPRQAREFARATGRLAKSDRVDALVLVEMGRALQLAPASPRSAERQRLSELTAHRAGITTMIVAEKNRLRTAQDPWIRRNISQHIKTLQASLAKAEAEMEAVIQGQGDLREQAARLRQVKGIGPVVSATLIAQLPELGQLDRRRIAALAGLAPHANDSGHRRGKRSIWGGRGTIRRTLYLAALTASRFDPRFRAFKERLLAAGKAKKPVIVACARKLLTVLNAMIKTGTAYRDAIV

SEQ ID NO: 302621 - protein, 370 aa, unidentified
MLDTTTFIGLDVHARSIKAVSLDVMTGEVRAATFGYDAGAVAEWVRSVDPRARCVYESGVTGFDLQKRLSGLGVDCVVGAVSKMIKPSADRRRKNDRNDAEFLARMLSVGNVVEAWVPDDECEAARDLTRALEDARDDLSRSKQRLSKFLLRHGLVFDERTPTGRRKGNWTRAHWSWIESIRFAERADNDVLAYYVDAVRRAAEEKARLEGLVEAEVRKPRWRKRVDSLRCLKGVDTASAADLVFEAGEFSRFRNARSFAAWVGLTPSEHSSGESDRRGAITKAGNKHLRKTLVEAAWHYLTCSGRPKGLAKGQAPDRGARRHAAKGVRRLVERREALLARGVHGNKANVATARELACWVWAVGLMAEEA

SEQ ID NO: 302622 - protein, 312 aa, unidentified
MAKDTIGIDVSKDRLDAFWHSRSEARCLPNSEDGFRNLCAWLEGQEGVLIVFEATGAYHRGLERYLGLAGRPFIKVNPKQARRFAQAIGRLAKTDSVDARMLARMGVVLELTPQPVEGEDVHDLRELLTARRALVKDQVTAKTRLATAQNPLVQEQLCRRIEDIGADIKALDEAIAQIAKQRGTLEERIHRLMTIPGIGRLTATSMLIDMPELGHLDSKKITALAGLAPMTQQSGKWQGKERIAGGRASIRRAIYMPALVAIRFNRELHEQYQRLLKAGKAKKVAITAVMRRIVVLANTLLREDRDWLPERP

SEQ ID NO: 302623 - protein, 352 aa, unidentified
MTERSKEQTVKFVGIDLAKRSFHVHAADARGERVLSKKLTRARLPGFIAQLPACTIAMEACGSAHHWARTFRGYGHEVRLIAPQFVKPFVKSNKNDAADAEAICEAVQRPNMRFVAIKSVEQQDIQSIHRMRSLVLGQRTALINQTRGLLLEYGIEVAQGRAALQRRLPEILEDADNGLSGRFRAELQGLYEELQHLNARVAHYDAQIDQIAKDNAQAQTLMQLPGIGAKGATALLAAVGEDPSLFKNGRGMAAWLGLVPRQHSTGGKERLLGISKRGDVYLRQLLIHGARSVLRVAEHKDDPLCRWATALKTRRHPNVAAVALANKLARIAYAILTTGQAYDPNSTRSIAA

SEQ ID NO: 302624 - protein, 482 aa, unidentified
MKPKQQEKTKEATCHPTQGHWHQMNRKQRREMTRKIQSEDIRLEVIHPDAAGIDIGNESHYVAVPPTRDSQPVRHFGCTTAELKEMAKWLKQCGMRTVAMQSTGVYWIAVYDILEQAGLEVYLVNARDTKNLPGRKSDVQESQCLMKLHTYGLLRNSFRPSQEIRTMRTYWRQRNDLVQSAGRHIQRIQKTMTQMNIQLANVLSDVSGVTGQAIIKAILAGERNPHVLAVFRDCRVKATEGEIARSLEGNWQEDLLFVLQQEQDGYEFCQKQMAECDQRLEQYLQQREDRSAGAPLPEEKRKERRKKKNGNKPRFDMRTGLFRMSCTDLTRIDGVDVMTAMTILSEVGWDMSKWETEDHFVSWLRLCPDNRISGDKIIGKGRLPTNNRASIALKMAASSLRTSKTYLGAQFRRLKSRLDTPVAIKAMAAKLARLVYRMLRYGMKYVDRGAAFYEAQHRQLQIKHLKSKAAKLGFQIIQVPAA

SEQ ID NO: 302625 - protein, 337 aa, unidentified
MQKSYLGIDVSKLTFDVALMVVTKGQKQPLVTSKFSNDAPGLKSFKLWLDERQVSFDAYSLLVIENTGIYHRLIWNFCTTYLLPVFIGNAANLKWSFGIARGKNDKVDSMRLCDYAYKNHEDIKPTTGLNKVLITLKDLLSNRSKLLRLKNAIKQTLNELKTSNDKATQGLMEKLNKSALDGLKESIKQMDAELIKIVKQDPSILTNYNLMLSVPGIGKVTATFIICCTNNFAIKVSGKQLANYAGVVPFENTSGTSVKGRSRVHFMANKELKSLLTMGALSAIQAYPEFTDYYERKMKEGKKHLQVINAIKNKMLLRVASVVNQQKDYVNNYKKAC

SEQ ID NO: 302626 - protein, 364 aa, unidentified
MKRKVYVGMDVHKETIRIANLTNNTKEIVKEQQIKHNEVQIKKFVNKLKSEWNEIHSCYEAGVTGYPLYRYLKSLGVNCILVAPGKIPRQSSDKIKTDKRDAIKLAKLLRSGELESIHVPSEEDEAVRDYLRSRDSLRLDLGRNRQRLMKFLLRKGITYSATKYWTVSHNKWLNNLQFNNEILQETFNDYYSRVRVQEENLKAMDKRIQEIAESEPYREKVGILRCFRGVDYLTAMFLLCEVCDFKRFKTAGSFMSFLGLVPGEYSSGSKRKQTGITKTGSPRLRRILTEAAWQHRFPGTGSKIVTARRSGQPALVVALAEKASLRLHKKFRNLQQRGKTPQVIITAVSRELSGFLWAAMNLVA

SEQ ID NO: 302627 - protein, 388 aa, unidentified
MQNIIHRPEGRAAIRTDLGAIFVSLELSRATWLITSLSPGAGEKMSKHVVQGGDIVSLLRRLAHLQEKVRGRRRKEFPLVVIQEAGLDGFWIHRVLEHEGIESHIVDSASIMTSRRRRRPKTDRIDGEALVRALLAYHRGEPRVCAMVRVPTPEAEDRRRVSRELKTLTAERVGHVNRIKGLLFAQGVSGYAPLRRDRRTRLEELRTGDGRLLPYHLKRQIGRELDRLELLLEQMNAVAAERDALLVPAEEQAVPTPAKMLLGLRGIGPDFASVLWQEGLFRHFDNRRQVAAYAGLAPTPWQSGAVDHEQGVSKSGNPRLRTTMLQLAWLWLRHQPSSALSQWFHQRVGDNGRIRKVMITALARKLLVALWKYVTAGVVIEGATMKTA

SEQ ID NO: 302628 - protein, 385 aa, unidentified
MAKQIFKYSVGCDISKDTFNVCILEVDQEMESKVKASHKFNNETKGFKEFESWVKKHKKHDVQTGFYMEATGVYYENLAWYLFEQEYNVYVLLPYKTKHYLKSIGIKSKNDKIDAQGLARMGAQQKHNPWRPHSKSIYTLRSLTRQHENVTKLKTGLENQLHAIEYSAVRNAIVKKQLKATIRLLEKQLDELADEISNLIDTDEKLNQKYSHIDPLRGISKLSWATIIAETSGFETFENQRQLVSYAGYDVVENQSGKHVGKTKISKKGNSRIRRILYMPSLVSVRLKEPVLYNLYQRVYNRTGIKMKGYVAVQKKLLVLIYHIWKNDKAFQSDYSKTFGEEESKLLFPFGFGETIKESSPDKRATQDEHSYELSSKVLFPLAQI

SEQ ID NO: 302629 - protein, 437 aa, unidentified
MRRKKNHARKNVNLQVLPVVHPNAAGIDVGAKEHLVAVPCDRDPQPVRTFQAFTPDLHQLAAWLKRCGIETVALESTGVYWISLYEVLEQYGFEIRVVNARHVKHVPGRTKTDVLDCQWIQKLHSFGLLNGSFRPDHQIRKLRTYMRLRDNLVVASTQAVHHMQKALFEMNVQLSNVISDIVGETGLTILEAIIAGQRDPKQLATLCSSRIKASRETVAKSLHGNWDEALLFALKVALETYRFTQTKIQDCDCCVQHHLAQFQSRAEVINSRQNLKTQLHRVCGVDLTKIPGIKEQSAQIIISEVGLEMTKWNTEKQFCSFLGLCPNNSISGGKVLHRATRKVYNRAADTLRLCAQSLTYSKSALGAKYRRLKARLGAPKAIVAMAHHLARLAYRMLRYGQNYVEHGIHQYELKFQLQRIKWLKKEAKSLNLQLVPA

SEQ ID NO: 302630 - protein, 350 aa, unidentified
MIIIGVDFHPEFQQIALLNTTTGEVEEKRLAHPDEAEKFYRAHASAGETVRLGMEASGHARWFERLIAELQFELWIGDAAEIRAKRGRKQKTDRQDAQHILKLMLKDDFPKIWVPSWENRDLRQLLWHRHRMVQARTRVMNQLQAVALNEGLHCRKKLWRERGRQQLESFALAPWASRRRRDLLELLDRLNPSIADLTQAIEREVENYPAAQRLKTHPGVGVLTALAFVLILGDAERFRCGKQVASYLGLVPLEESSGNRRRLGHITKQGSSIVRFLLVEAAQVTVRSLPEWRSKYFHLALRRGRKIAKVAMARRLAVQLFWMMRKQWDYEQLKTFGSHAGQPGHRDGVQ

SEQ ID NO: 302631 - protein, 346 aa, unidentified
MEIIGLDLHKRESQLCRRQPDGRIAQDRILTSRASFSATLGGIAPARILLEASTESEWVAAHLEQLGHVVTVADPNFAPMYATLSRRIKTDKRDARALMDACAVGAYRPAHRLSAPRRHLRAELATRAALVDTRTRWIALCRTRVRAVGLRVPSGASHTFPSRVATLDLTTHAPMLGAELSPLLTLMPAVSAAVAAAEARLAALAAADPVIRRLATAPSVGLITAAGVVAALDDVTRFPSAHAVEAYLGLVPREDSSAERRHRGGVTKAGNSRARWLLVEAGWRLLRSTAAEAAPLRAWGRQVAQRRSRRVAAVALARRLAGVLYAMWRDGTDYDAARLRGPRRRT

SEQ ID NO: 302632 - protein, 396 aa, unidentified
MLTSVMINNSLIGKAGASEASEASQAGTSRRREFGRVRVFKAVTEQEPRRHRGTSPNSRLNRRRPTRTASSYLQVREKTMSETVYVGIDVAKETFHVATCPNILKTQLPNTRKGHRQLSQSLKNHTIALIVLEATGGYERPLTAELLSDSLPVVVVNPRQVRDFAKGMGQWAKTDPIDAQVLARFAQIVKPAPKTHSTPQTAELSELVRRRRQLNGLRTQESNRLLMIHHPKVKKSIQKMIKTLNFQIDEIDRLIREYIDADDNFKNKDRILRSTPGVGPQTSAMLIANLPELGSLNRQEIAALAGLAPWDRSSGKSDGKAHIWGGRKDVRSVLYMAAFTACRFNPVIRALAERLKQKGKAYKVVITACMRKLLIILNTMVRNQTLWTPQKSVKNT

SEQ ID NO: 302633 - protein, 347 aa, unidentified
MKRIAVDLAKSVYQVAESIHVGRVDRRRRLDPEAFRRYLQEQPEPVEWVMEACGTAHYWGRVAQAQGHRVVLLHPRYVRPYRRRNKTDRNDCDAILEASRCADMHPVPVKSHEQQQVQQLHNLREAWKKTRVQHINLLRGILRELGVAAPSGTQAFLRQACELIERAEVCALRGALQMVLAEISLCEQAMRDSEEQLARWHADDDIVHKLDEVSGIGLLTASALKTAVGKPERFASGRHLSAWLGMTPNEYSSGERRRLGCISCKGNTYVRTLLIHGARAALLAAKRCQTRTPERLTQLQRWALQTAERIGHNKAAVALANKLVRICWAVWCHERRFSGDWQSARPA

SEQ ID NO: 302634 - protein, 368 aa, unidentified
MKMNAIKAAPAASAIAIKNEKSAKAKRILIGTDVHLRGYQAARKVDNGVIGVVENFRSEEALLLHVEKQCERAEQVVVVYEAGPLGYTLYRKLTARGVLCYVCAPDSSEQKRKRRKNNKIDARNLTSKLFNYLNGDEGALQLARVPTEAQEQLRLASREHDQMVEERKRLGAKGNALLLSQGFGSWSNWWRPKAWAQLSSLVPEWLLERLKIWVDVLKMLDEKICLAKVALARACSGPRPKGVGALSQIQLQSEVLDWSLYTNRRKIACLAGMVPSEWSTGDTERRGSITKVGVPAIRRIIVEMVWRIVLFQPQYKPVQKWQKVLQGTNPALKKKAVVAIGRQLIVDLWRLQTGRVSAQELNLVMVGA

SEQ ID NO: 302635 - protein, 343 aa, unidentified
MRYIGVDLHTTQLTVCYRDATGGTQIEMFPIDLVDKFIVSLNTYDQVAFEATGNSLFLYKKLLPVIGDANITVVNTCKFKLISKSVKKTDKNDCKLLAEYLAKDMLPRARIKDEFHLRVYALIETRDNLVGNTTRFKNQIHNIFVQHGIKLKAKQVANEKNLTKLIESCEFDETTIFHLNLAKRAIVQSKALSDEIEDKLFELKDNMEQIDNLTSICGIGVKSAMGIKATIGDVNDFENEDKLVAYSGLCPRVQNSNETVSHGRITKMGNKLMRKLLVQCAWVSIRYNPIMKEQYAKLRKRKPAGVAIIAIARKLLVQIYYTLKYNWYFNDTENTQREIKVFA

SEQ ID NO: 302636 - protein, 365 aa, unidentified
MRQASTVIAGGAHGVSSGLTVGLDLGDRRSHFAVVDAQGAVVERGVVATTREALLARFTELPASRVVLEVSTHSRWVSALCAQQGHTVVVANARELKAISGNPRKSDRIDAELLARLGRVDPELLRPLVHRGEEAQRDLTVLRARDALVRARTKLINAARGLVKATGERLPTCSAASFHERAWQAMPRALRAALHPVLESIAELTRQIREYDRQVAAMVERYPAARLLLQVSGVGPITTLAFMLTIDDPGRFTRSRMVPAYVGLVPKRRQSGERDPELHITKTGDALVRRLLVQCAHRILGPFGQDSELRRWGLRLAGVPSAGASRTQQSSIRKRRAVVALARKLAVVLHHLWVSGEVYAPLRAA

SEQ ID NO: 302637 - protein, 395 aa, unidentified
MTACIASGPLDRAKEKLIVKEFSTMTYGLRELSSWLKEHNVKTVAMESTGVFWKPIFNILEDDFEVLLANAARIKNVPGLKTDKKDARWIARLLRYGLVPASFIPPRNIRNLRDLTRTRKKLTEERTRHKNRIHKILQDANIKLSSVATDVFGVSGKAMIMALLEEDEPSPDEIKSMTKGKLRNKIGLLVKAMDGRVTDHHRFLLKMHFEHLESNSSQINELDEEIYRKLEPFEKEFRLIRTHPVISEVTGASVIAEIGVDMTQFPDARHLSSWAAISPGNNESAGKRKSGRTRRGNNYLKTTLVEAAWVASRTKDTFLSARYYNIARRRGSKRAAVAIGHQILKDIYYILSTGEPYKELGAEAARNRKSDARKCSMIQELEGMGYSVQKVEASA

SEQ ID NO: 302638 - protein, 392 aa, unidentified
MYIVGIDIGKNHHEASIVSPEGKQIGRSLRFATTHKGADSLMSFIFKNIGNSPCVFGMEATGHYWYPIYSFLKAKGYTICVINPIQSDSLRKMYIRQTKNDSIDSFLIAEVIRFGQFGTTSMADENILAMRQLCRYRDSVISSRTEIKLRIGTIMEQIFPEYEKQFSSLWVSTSMGILEKYLTPENIENAPIDELFEIIKDKSHNRLTKAKAISIKEAAADTFGIKIAQDAFSFQLKQLIDRMNFLDKQIEALDCQILEYYEKFDCYLHTIPGIGIIGAATILAEIGDISRFKNSSALVAFAGIDPTVRQSGEFNSTHNHMSKRGSPYLRHAIFLVATTCSFHNSPLNAYYKKKRDQGKHHLTATGAVARKLTTVIYAVLRDSKPYEPKKFC

SEQ ID NO: 302639 - protein, 344 aa, unidentified
MSEYAGQQFVGIDLHRRRSVIVRTTESGEVLESVRILNDVESLNRVIERAGEDPEVVLEATYGWYWAVDALQEAGARVHLAHPLGVKAFEYRRVKNDFRDAADLADLLRMGRLPEAWIAPPATREVRELVRHRAKLVALRSHCKAEIHAVLAKCGIQVSMSDLFGVAGTALLDRLQLAAPYAARIASLRRLIDDLDFEIEVFTNAVQGRLHADPGYVAVQQIPGIGPILGAVFVAEVGDVTRFSSAPQLACWAGLTPKHHESDTHVRRGPITKQGSRLVRWAAVESVKRVGPDTRVGAVRDRVAERRGGNIGAVAAARQQIEYVFYALRDGHVRALAHPARASA

SEQ ID NO: 302640 - protein, 375 aa, unidentified
MREKLRFLGLDVHAETIAVAVAEPDGEVRSLGTIANREDSIRKFIKKLGATEQLRACYEAGPTGFVLYWQLTQLGVECTVVAPTLVPKKSGDRVKTDRRDALKLARSHRSDDLTAVWVPDEGSEALRDLVRAREAAKQDQLRARHRLSKFLLRSGQRPAPGVKAWTQIYMAWIRQIRFAQMAQESTRLDYLHEVEHMGERVVRLEQAIAEAANLASPEVQEVINGLQALRGIAHISAVTIAAELGQISRFKSPRQLMGYSGAVPSEDSSGERTQRGSITRTGNAHLRRIAVEAAWSYRLPPGVGPALRKRQEGVPDEIKEIAWKAQHRLHRRYCRLAATRKDQRKIITALGRERLGFIWAIGIKAETAARQRIAA

SEQ ID NO: 302641 - protein, 323 aa, unidentified
MEQAILGIDISKDSFDTALLINGAYKFNTFTNEPDGFHRMTKWLNKLKCGHLHCCMEATGRYADHVAEYLYVSGHSVSVVNPARIKFYANSKLKRNKTDKADAQLIAEYCLREKPSLWSPPPANFKNLQALIRHLDGLMKSRQQERNRLNSGVSTPGVITSLQDCISFYDQQINNIQSQIQNLINNDPELLRRQTLLISIPGIGKLTAAKLLGEVRDISAFQSARQLAAYAGLTPKNMLSGSSVHKKTVISKTGNAHLRKLLFMPGITARNWNPIISPFCDRLSQNGLSPMEVICASMRKLLHLVYGILKSGKPFDPNYLENA

SEQ ID NO: 302642 - protein, 315 aa, unidentified
MTNINITTAGIDTSKAKLDVAVHNRIERWQVANTLPGWRVLAANFAKTGVTRVGIEATGGYERGVVEHLRAAGLTVLVLQPMQVKAFGQVHLRRAKNDALDAARIAACAATLEQPRIAPDPRLSELAGYLTFLEQIEEDIARFKTRLEHIDEPRLRRIVISDIKRLKARKAAHTRLIAKHLRAYDDLAKRFDLVLSIPGIGERTALALIIRMPELGQISREEAAALAGLAPFDDDSGKYKGQRHIAGGRGRLRRSLVAASLPAAFRWNKALIDLYGRLTAKGKAHIAALVACARKLLIYANTVVQRGTPWVEKVA

SEQ ID NO: 302643 - protein, 372 aa, unidentified
MGHHTEVFVGIDTSKSRNAIAIADGGRGGEVRYLGEFPATEAAIRKLVAKLAAKCCHLTFCYEAGPTGYGLYRLLKSLGHDCLVVAPSLVPKKAGDRVKTNRRDAVSLAKLLRAGELTAVWVPDERHEAMRDLSRARQAVKKDLQGKRQQISSLMLRLGRIYPGKTTWGPAHMRWLMSQKLEHREQRIAFEELLEGVRQESERMERLEDAIREVVPEWSLAEVVAALQAMRGIDLIAAVGVLAEIGDLSRFQNPRELMGYLGLVPSEDSTGDRVKRGGITKAGNGRARRILVEAAWSYRYPPRVSRDKQPKVEAAPRRAREIAWKAQTRLCGRFRSLERKGKRRTVIVTAIARELSAFIWAINRELMAPRQA

SEQ ID NO: 302644 - protein, 387 aa, unidentified
MFYVGIDIAKQTHYAAVMNSDGVVLCEPFAFNNDHQGFDALLKIINSYPKDKTFIGMESTAHYSENLINFLYTRGFQICVINPIQTSVLRKSNIRKTKTDSVDTFLIIKALTLNHYRLFSKRDYDSLQLKNLCRFRQKLMKARTKVKIQLVSYVDLVFPELQYFFKSGIHTKACYSLLKNVQSADGIASMHLTRLTNLLHKSSKGHFKQSEAVHLKELASQSVGINDYTIGLQILQSINQIELFTQQLAEIEATIKDIMESMDSVIKTIPGIGFLNGAMIIGEIGDISRFEKPCQLLAYAGLDPSVYQSGNFKAAKTRMSKRGSKLLRYALINAAWQTTLVNQTFKDYYELKVSQGRRHYNALGHVAHKLVRVIHKMMTDNVVFNLT

SEQ ID NO: 302645 - protein, 359 aa, unidentified
MSTITIGVDLAKSVFSECEMDGAGHVLKRQDLRREPFALWLTQLPAGTIVAMEACSGAHHWARRCLAYGLQPRIMAAQFVKPFRKSVRSKNDRNDAEAVATAARQGNMRFVPVKSMDQQARLSWHRVREGYKVESLAIGNRLRGLLAEFGVIVAPSDLALRRLLADLDAQLGLPAELKELLRDVADHWTSLRLRLDTCDARIEAHARADERCVRLRAIIGIGPITADAAVATVGNTREFKHGREMAAWLGLVPTQYSSGGHVRLGEVSCRGDAYLRTLLIQGARSSLQRAKAVVTEKATPEQLWIRTLDGRMPFGKVLVAIANKHARQIWAMLAHDVDYDPHACLKHPLHRHIDTMRTA

SEQ ID NO: 302646 - protein, 348 aa, unidentified
MSNPHRKQAPVQQAISGHDEASLFVGIDVSAATLAVALQQEGIAQRSFANSAVGHKALIQWLLQHEGKLRVSLEATGIYSLEVALALDREERIEVAVLNPKTVHRFAETMRRSKTDKADAIALAEYSRRMPFVAWRRPTTSALELRSLARHISTLIQEQTRLKNRMHAAGGSATTSRCVLQDLRRSMKSLTLRIARLRKQAVALVEQNAELKPKFQQLIGIPGIAETSAVQLLAELAGLAPEMTVRQWVAHSGLDPAHRESGSSVHLPSRISRHGNRFLRRALYMPALVAVRFDPHLKAFYQALQTRHKSKLQALMAVARKLLHAIFGIFKTNTPYNGEKLFPNLALA

SEQ ID NO: 302647 - protein, 423 aa, unidentified
MRFIGLDVHRDFCEVAIAEAGAVRPAGRVETEPAALLLFAQSLGGDDEVALEATGNALEIARIIEPHVGRVVLANPKAVKGITRTGAKTDRIDARTLAQLLAGGFLPAVWLPDEQTRILRRRISARAQLVRQRTRAKNQVHATLIRNPKGKPPVSDLFGARGRRWLDAQELPADEQETIAACLRQIDFLDGEIALIERALAEQVLASAEMRRLLTLPGVNFVTAAALLAAIGDIGRFPTARQPAGYLGLDPRVHQSGSEPARHGRISKQGPGETRHVLVEAAWHASRTPGPLRAFHERIAARRGSNIATVAVARKLAVIAWHMLTRGEDYAFARPSLTREKLRRLELITGAERHKGKRIGVWVTKEQHRLDKDLAAQAELAYRRLVQDWQPAIKGAGAAPGRASRGPSSGQAARQETAPPPAL

SEQ ID NO: 302648 - protein, 375 aa, unidentified
MIATTCLPMSVSEPTLYVAFELGKKEWKLAMTSGFGVAGWVRSVASADWRAVERAIAQGRARFGVPAEAPVVSCYEAGRDGFWIHRALVQRGIRNRVVDSASIEVNRRARRAKTDRIDALKLVQMLVRACYGERKVWSEVRVPTVADEAARQVSRERTALTQEQTRLINQMRGWLATWGVALPRQRPRGWWTTVRDWAGEGLPATLQARLARADGRLALVNAQIAELDGQQYAAVLRAEPGSAVQRLVQLKGVATTSASVLLDEGLVWRGFRNRRQIGGLLGFAPTPYDSGESERDQGISRAGNNRLQVISIQLAWSWVHWQPHSALTRWYRERFGTGKRARRIGIVAVARKLLIALWRYATTGVVPSGAVLKVA

SEQ ID NO: 302649 - protein, 348 aa, unidentified
MTEAYAGQQQFVGVDLARRRSVITRMDAAGTVLECVQIDNSPAALVAEVGKAGPAAPVAVEATYGWYWAVEALQGAGFEVHLAHPKGNASMHNRRVKTDARDATELARLLRMGDLAESWIAPPVVRGRRELVRHRHKLVRTRASLKASVHAVLGKCGVLLPWNDLFGPVGLAALAAVELPQPYASRIASQCRLITAISTEIDLVETAIAAEFTDDPGYRNLLTINGIGPVFASVFVAEIGDITRFPTPQALASWAGLTPRHYASDDKTRRGHITKQGSRLLRWAATEASQRIREPYLADKRRLITDRRGRTAANISKVAAGRRLLHVVYYTLRDGHARCLDQPARQPA

SEQ ID NO: 302650 - protein, 345 aa, unidentified
MKKRIEGVTVYGIDIGKNTFHVVGLDSSGKPLSHSKFRRDRLLVHFANTPASLIGMESCAGSQWLARKLQASGHTVKIIPAQFVKPYVKSNKNDMVDAAAIAEAVTRPTMRFAQIRQPEQSARQALHRVRDRYMSQRTGLINQMRGFLLEFGIAIRQGAGVFRLDVPRVLGDEENELPPSMRTLLGDLWNDFKLLEVRIEELSKQIQRSVQYSDTTRRLMTVPGIGPLAASALEASAGNGQQFRNGRFFAAWLGLTPREYSTGGKTTLLGISKRGNTYLRRILIHGARSCVQTCDRQRHPLGAWITKLEQRMHRNKVIVALANKIARVAWKILTKPDEIYRWADA

SEQ ID NO: 302651 - protein, 354 aa, unidentified
MSRGMFIIGCDFHSRFQQIAMLDPTTGEVIERRLEHENGEAKTFYSTLPSPARVGMEATCDAPWFERVLQEHHHELWIGDAAAIRAAMVRKQKTDSRDALHILDLLLTNRFPRIWVPSPAERDLRQMLRHRHKLIRFRTSVMNQLHALAMGQGLCLRKKLWAKVGRMELGGLVLDPWTSLRRQELLQLLDQLDPWIDKLDKAVNQAAESRPLAVCLMQQAGVGPVTALAFVLIMGPVTRFANSKKVVSYLGLNPSEDSSAGRQRLGAISKQGNPMMRYLLVEAAQTAARLDPELRRDYQRLKFRRGSGVAKVAIARKLAVRLYWKLREAAQPVPSARMQGSPASPVVGESLSAN

SEQ ID NO: 302652 - protein, 314 aa, unidentified
MTIQTPIVGIDVAKESLSLYRLDTQQASTLANARSTILAWLKTLPADCALAIEATSTYHVLLADLAYQRGHRIYVIDGYRLSNYRKGIGGRVKNDQSDARLLARYLAHEQRQLRPWKPTCKAYRRLQVLLRRRATLIRSTTALRLSFAQDRQMARELKPVLERMKRLEVRLNEELNKALQEAGLAEQAKRCQAIEGIGPLTAAALNLAFLRGSFRSSDAFIAFLGLDVRVKESGRYNGRRKLSKQGDSETRRLLYNAAMAASRTKAWQSRYQQYLQRGLKRTEALIILARKLARIAFALMKTQQPYRPTVDTVG

SEQ ID NO: 302653 - protein, 406 aa, unidentified
MFIGWDWATETHDVTVMDHLGARVDRWELAHTEEGITKTLARLARYGAPADLPVAIETTRGLVVDRLLTAGHPVVPVHPNAFHAMRPRWGAAKAKTDAGDSMKLADYLRTDGHFLPRLEPTDQATLDLQALTRQRADHIEAKVAAVNQLTASLDAHWPGGKAVFYELDSDIALAFLARYPTPAAASKLTAGRLQAWCKRHGYSGNKPGSFLIERLRSAPSAASRLSPAAVEQLIRIQVQLVQGTRATLRALDKAITEAVKAHPYAPLFATMPRIGKTNLAQITGELGPILERSQTCEQFIAEAGVVPVTKASGKSRTVAFRYATNRRARLAVTTFADNSRHGSDWAAKIYTDARTRKKRHPHAIRILARAWLRVIWACWRDGACYDPATHQANGKINTSADTPVAA

SEQ ID NO: 302654 - protein, 422 aa, unidentified
MDVLHARCAGLDVHKDTVVASIRIADGGPAKTEVRTFDTTTPGLLALSAWLAQAGCTHVAMEATGIYWRPVWHVLSDGEVTLILANAAHVKNVPGRKTDVADAVWLADLLAHGLIRPSFVPEAATQGWRPKAVNRALLRTRKQLVREQASHVQRLQKTLEDANIKLSSVLTNIMGKSGRTIIEALVEKQTDPEGLLALVQKGVKAPAERIKAALTGRVTDRHRFLLRLHLRQIDALDAALAEIDAEVDRGLDPFRQAVELLRSIPGVSDLTAQVIVSEIGTDMSRFPTAGHLVSWAGLCPRNDESAGKRRSNRLRHGAPWLKTTLVQCAWAATRKKASYLQAQFQRLRHRRGPKKAVCAVAASILTAAYHMLRDGTFYQDLGPDHFRRASPETHAKRLAQQITKLGFTCTLAPATPAEEVSI

SEQ ID NO: 302655 - protein, 335 aa, unidentified
MKCYKRVIGIDISAERLDIADSQLGIDREVEYSVEAIQSKITKKIKEPEETLVVCEATGGLEYVLVDALHDAKIDVVVANPARVRDFAKGHGYFEKSDKIDARMLQLYGQQVKVSLAKPRTAQERHFIALSRRRTQLLQLVSQESNRLRQCLDAQTKSFVEEMLKLLKSQLKAVDSAIEKVLEEQAKTNPTIDIVRSVPGVGMVMTSTLVAELPELGSLSRAKIAKLVGVAPMIKQSGKSDGKRRARGGRGNVRRVLYMAALVATQKNPVIKKFYIRLLASGKPKKLALVACMRKLLTMLNDMVRQQTKWDETKKSVAGSIVSKRPAPAHVLDKR

SEQ ID NO: 302656 - protein, 366 aa, unidentified
MKKISTVAIEGMQIFKGNQLTIGLDLGDHTSHYCILNEAGEVIWEQELPTTAKGIEQVFSKIPRSRIALETGTHSPWISRQLSQFGHEVIVAHARNVRLISESSRKDDRLDARTLARLARIDPALLGPVRHRSAKAQIHLTVIRARAALVSARTALVNAARGLTKSYGARLPKCGTEQINREITKELQPELREALNPLLAEIESLNARIAEYDTRIEQMAKEIYPEVSRLKQVKGVGPLIALTYVLTLDNPYRFRRSRDVGCFVGLRPGRRNSGMSEPQLHISKEGDRYLRTLLVQGAHYILGPFGQDSDLRRWGLKLSERGGRNAKKRAVVAVARKLAVLLHKLWVSKEVYEPLRNNRKQMAQVA

SEQ ID NO: 302657 - protein, 394 aa, unidentified
MGKMYVGIDIAKDRSSACGIEEGGRSLFELTFTMDGAGFAELLKTIEANGGTPGNVVAAMESTACYHINLYSFLSAKGIEAVIINPLLIANYAKLSLRRTKTDKKDAKTIAQFILVHKDSVTQLAISQDTQDMRDMARERESLCHQISAAKVEIQRVLQTTFPELAAMTNPLTKVMLHFIQLFPSARLVSIAKPSAIEKTLKEKPCSCRLRFTPKDLIEAARTSIATVSPAKELILSGKIETLVHLQKRRDELTKALTKYCESTIGEDLRIVTSISGINNTMATALLAEIGQIGNYLSHKHLIAFAGIDPTVYQSGKYEGASRISKRGNRHLRRVIWLMTISVIHHNSVFKNYFLKRRNEGQPFKKAVFATAHKLMRVIFAMLSKKTSFVAECV

SEQ ID NO: 302658 - protein, 338 aa, unidentified
MSLYAAIDLHSTNSVLAVINQAGEPVFQRRYRNELAALLAALAPYHAELSGVVVESTYNWYWLVDGLMDHDYSVHLANTAAIPQYAGLKHGDDVTDALHLAELLRLGLLPEGFIFPRALRAVRDLMRRRMLLVHQAVQLMLSIQSTYSRVTGQCWSADAVRHLQAESLTQAFPEPYTRYAVLLQYKHWCALQEDIQHLEHEAQQALIDPALRQRLCSVPGIGPILSLTIQLETGPIERFASVGDYASYCRMVESTRISNGKRKGQGNRKCGNRYLCWAYMEAANHAKRHCEPIRRWHQRKHARKHPVVAIKAVAHKLSRACYHIMREGTTFDAQRAFH

SEQ ID NO: 302659 - protein, 349 aa, unidentified
MKIIGCDFHPGYQQIAMLEDETGEFTVMKLSHAGDQDQVRKFYTGLAGPVRVGIEASGHSQWFERLLAELGHELWIGDAGKVRRSTDRAQKTDRRDAELLLQLLLENRFPRIWVPTPAERDARQLLLHRSKLVRVRTQVKNQLQALALNQGVQRRGKLWTVTGRQVLESLPLLPWASRRRAELLKLLDELDGSITSLDGAVSQEALARPAVRRLMTHPGVGPVTALAFALTLGPAERFSRGKKVASYFGLIPKEHSSGGKQRLGHISKQGSSFVRGLLVEAAQSAVRHEPQMRREYQRLSQRRCRALAKVAIARKLAVRLYWMLRGGMDYAQLLQGSCAGQPGSSRGRS

SEQ ID NO: 302660 - protein, 415 aa, unidentified
MEVIYKRCCGLDVHKKMVVACLIIRDGEEVKKEIRTFGTMTSDLLLLHDWLLANRVTHVAMESTGIYWKPIYNLLEGNFEVLLVNAAHLKAVPGKKTDVKDCEWIADLLAHGLLKGSFIPPEPIRDLRDLTRYRKSLTDERNREVNRLQKLLESANLKLSSVATDVMGVSGRAMLEAILSGSTDPEVLAELARGKLRKKLSLLREALRGRFRPHHRFMLEQILSHLDFLDETIERVSKEVENRIVPFQKEIELLKTIPGVDQKTAEVIISEIGVDMSRFPSHRHLASWAGLCPGNNESAGKRKSGKVRKGSQWLKRGLMESSWAASRTKETYLNALFHRMVRRKGKKKANVAVAHAILIIVYHILKKRIPYYELGADHFDRLNLKYITNHLVNRLNVLGYKVTLEPLSLAACMET

SEQ ID NO: 302661 - protein, 366 aa, unidentified
MDEITYVGLDAHAETTAVAVAEPRSPAPRFIGTVGAKFPELKKALSRLGTASSLRIVYEAGPGGFAMVRQLREAGYACEVVAPSKMPRRPGDRVKTDRRDALALAGLARATQLTFVTVPDERDEAMRDLSRARVDAVRARLKARQQLKALLLRHDRRYTGKSSWTAAHERYLSGISFTHPAQEIAFVEYRRAIGEAQARVELLTQALSQQLEHWRMRPLVQALMTLRGVDEVSAISLVAELGEMRRFAHPRQLMAYLGLVPSEYSSGQKRALGAITKTGNTHARRLLIEAAWNYRFPARISLRLQRRQEGQPAGVRDIAWRAQVRLTHRYRRLTARGLQQNKVCVATARELVGFIWSISQQITISN

SEQ ID NO: 302662 - protein, 308 aa, unidentified
MTTIYTGLDIAKLNLQLHLAGRIHDLPNTVAGHRRLLKLVATLPSAHVVCEATGGYERDVVAALHEAKVPVSVLNPARVRHFARATGQRAKTDDIDAAVLTAYGQALQPKPTAPRTAQEQQLAELIRRRVQVVEVLVAQRQQAERLTVSALRRQAQSLVRRLERDLKQIEVQLKELRTQATTLAVRVQKLEAITGVGAITALGVLAELPELGTLNRRQAAALAGLAPHPRESGQWHGRRSIGGGRAPVRRALYMAALVAARSNHQLKEFYQRLRAAGKPAKVALTAVMRKLIVLMNHILKNPTFALQN

SEQ ID NO: 302663 - protein, 414 aa, unidentified
MGDVRWFVGIDWASTQHRICLLDADGRHVAERDVTHDGTGLAELCAWLVERSKAEPAEIAVAIETPHGPVVEVLLERSFQVFATNPKQLDRFRDRFSVAGAKDDSRDARVLADSLRTDGRAFRQLTLDDPLVIELREWSRMHEELRQEQNRLTNRVRDQLWRYYPQALELGGRDLAANWFLELWKLLPTPAKAARATEKSIARILKAHRIRRLQAADVLRILCQPPLSVAPGTTEAASAHIGSLVERIRLVNQQIKEAERRQDELCAAIEETTPGQICGQRDVEILRSMPGLGRIIIAALLAEACEPLRLRDYHALRVLSGQAPVTRRSGKTCIVLRRHACNNRLRNVLYQWARVAMQHDPISKRRYAELRARGHSHGRTLRSLGDRLLYLLCTLLERQTPFDPNYQNPQRAVA

SEQ ID NO: 302664 - protein, 386 aa, unidentified
MRIALGLDLADKKCAAYAVPVGKAKKAQREFLDGFNKDFRRVPTTKEDLQRMVDVLKDESDGIHVLIENSTITHKVYWLLVGMGCEVLVAQSADLFRITESVTKNDDNDAMELAAYMRRRLNGEDEFRTVVMTPPEIMAKKMFIRAIYVDKTYLSECKKRLRFRLKVMGADLRREYKDISCERSLTQLRETGDPYLCYEVAVIRATKSRIQDGERYISTLFKDDPYFDLLMTIPGFGLEIFAYISTIIIDIDRFDDKKQLEAYSGLVPRQRSSADSDPNCRTTHHGDEWAREFLGYAVKAHVMWAKDSVVTIMYNRLRARGMPYKKVITACSRKMVDVVWSVLKNGRSFTSDQNVLRQARGAAAEIERMDSELSEQELDAKYAEAA

SEQ ID NO: 302665 - protein, 418 aa, unidentified
MKKHSNSREKSEATTKRAKSRGPVQRDTKEVLAELVGKLKEKLDPKKAAAASVGDRHPRGELRLNLDRLTVGVDLGDQWSHYCILGLEGETLAEGQLRTTQEDFATFFQGLNAARVVVEVGTHSAWVQEVISGCGHEVLVANPRFMEGSRRRKRKNDRIDANKLARLGRVDPESLHPIQHRSREVRQDLVMLRARDALVAARTEIINTTRGLVKSMGTRLPKCSSRSFAHKGEEAVPVEMREALLPLVRLAAALSADIKEYDKKIETLGREKYGHTTLLRQVKGVGPITALAYVLTLENPKRFAKSRDVGPYLGLVPKQEDSGEIQPQLGISKAGDTMLRKLLVGSAQYILGPFGPDTDLRRYGLRLCERGGKNAKKRAAVAVARKLAVLLHRLWVSGEVYEPLRAGMSATMTPAAAA

SEQ ID NO: 302666 - protein, 333 aa, unidentified
MPNYNQPHQFYAGVDLHARSMFVHVLNAKGKTVFERDLPAEPDAFLGAIKPFRKNLVVGCECMFAWYWLADLCEDKRIPFVLGHALAMKHIHGGKAKSDKIDAGKLAAMLRGGMFPLAYVYPRAKRQTRDLLRRRSFFVRQRAQLITHIMNTNSQFNLPPFAKKLSYAANRSGEIAERFTDPSTRLMIDADLHLIDAYDAQLATVERHLLQSAKVDDPVTFGFLRTIPGIGPILGLILLYEIDRIERFPEAGNFLSYSRLVRCAHESAGKVKGFGGKKIGNAHLKWAFSEAACLMLRTCLPVKSWLQRQEKKRGKRKALSVLEAKIGRTSYHL

SEQ ID NO: 302667 - protein, 336 aa, unidentified
MSQKEYVGIDLHRRRSVIVRVNEQGQKLSALRLDNDPELVEAAVAQAGEHPEAVLEATYGWYWLADLLKDLGATVHLAHPSGLNWDNRRVKNDERDALDLVKLLRLGELPEAWIAPPAVREIRELVRYRAKLVHLRSGMKSQVHAVMAKHGILPTRVDMFGPGGQAQLDALKLPQAYTTRIESLRELISLFDREVSLIEREIHKMLKDDPGYRAVQAVPGIGRVFAAIFVAEIGDVSRFSSPDKLCSWAGLTPKHRQSDVKVVRGRITKMGSKLVRWAAIEATAKNRGTKKIQADFRRIAERRGTQKAHVAAARKILTLVYYGLRDGEIRSLVKAA

SEQ ID NO: 302668 - protein, 403 aa, unidentified
MEVTKEHLDIHQFLIVGIDVHKDNHALVAANGFNQIFFEKEISNQYSDFQQIVDQIQLIARKENLRPLIALEDSYGYGQTLARFFFSKGLEVKTVNPVLTRRERGYMTHPEKSDISDAKGVVKATILEGIGRLPTFKITSESEFSKDLRILVYDRDFLIKEQTRLKNQLHRLLHQSYSGYYDKIFKDPFSKKALKLWQEFPSLLELKRTKRRITKPDWLKKINTLTLLSISNLQENQIKRKVRRLLQIREELKEMDQDLEQLLSNSNQYLETLPGCARILVAGTLAEVKDVSRFNSKDAFAKYAGLSPRPWESGKKKRNKKSLSGNRRLNRIIHQIALSQIGNRGYQPAKDYFQKKIAEGKSKKQALRCLKRQISDVIYPVRSLLNSSLKLKLFSNFYNFWSF

SEQ ID NO: 302669 - protein, 357 aa, unidentified
MKIVGCDLHARQQTIAMVDTETGEFTAKTLSHEGNAVRAFYAALEGPVVVGIEATGSMQWFLELLEELGIECRVGHPAKIRAKETRKQKHDRRDAGLIGELLMEDRFPEIWMPSTEQRDLRTLLRDRHQWVKMRARLQHTLQAIALNHALRQGRALWSAAGQSALQALPLPPYTDQRRTALLRLYVQLQKRIQELDQEVEAQAGQRPQARRLLTHPGVGPVTALATEVFLGDPSRFATGNQVASYIGMIPCEHSSGKRQRLGKLTKQGNSLLRYLWTEATLHAVQKDPELKRFYRRKLIQKGMGKARIAAARKLGIRLWIMMRDQIDYEEFCRRGKLRQSGEAQAGMPDFNSGPAQQ

SEQ ID NO: 302670 - protein, 355 aa, unidentified
MTSAKYIGLDVHKESISICVRNSVGKVVMESVIETKASTILQFIDGLRGDLRVTFEEGTWAAWLYDLLKPRVSGVEVCNPRKNALLKDGSKSDRIDANKLSEQLYMNNIKSVYHGEHGLRTLKELARSYLTINKDLTRVMNRVKAVYRSWAIPCAGKEVYAPRYRAEWLGKISESGVRRRAEFYYQQLDVLRLLRQEVRRDLLLEVKKHKAWKLLRQIPGIGPIRAAVLMAVMQTPHRFRTKRQLWNYCGLGLETHDSGEYRAVKGQLQRAKKQATVRGLNEDHNHDLKDIFKGAAMRASTAAGPLHDFYENLLAKGRKPTMARLTLARKIAAITLIVWRKEVRFDANYLKQQAG

SEQ ID NO: 302671 - protein, 415 aa, unidentified
MTETMPRVGLDVHADQTHLFSLDLASGEFVRKRVDGPPTEVLPHLEAIGPDLVAVHEAGPTGFGLARAGARPGLDIRIAAPGLIPRAPADRVKTDRRDAERLARLLAAGELRFVRVPGVEEERFRDLVRCREDLRGDLMRARHRLAKSLRRHELRFPGPGGNWTGRHHDWLARLRFDDPAARATFIDYLGAIQALEQRRGVLDKAIAEPAKEGAHAETIARLRCFRGIDTLSAAGLCAEIGDFRRFGRPTQLAGYLGITPSERTSGEGRRRGAITKAGSRHARRLPVEAAHHYARNPVVGTTLRRRQEGQDPRVCQIAWRAQRRIHLRWSHLRTRRGKPTGKTAVACARELACFAREAAVLDRDASLHNPPRRCRGSTGNRGPDSSHRGSATSPWATATAVAPASGQPACDEQGA

SEQ ID NO: 302672 - protein, 346 aa, unidentified
MTILDGTRPVTGGVDTHLDLNVAAALDPIGGLLGVAEFRTTRIGHSLLVDWLGGFGPVARVGVEGTGSYGAGLARFLRGAGIEVVEVDRPNRQARRRTGKSDPADAVEAARAALSGRAQGAGKTRDGNVEAIRALVVAKRSARSSKIKALNQIRHLGFTASDELRERFSGISRQHLGAAAARLRPRAGSDAITFATKTALSILGRRVLALDEEKERLNVLLAELVAKTAPSLLELHGVGVDTAATLLVAAGDNPGRLRCEAAWAHLCGVAPIQASSGKVTRYRLNRGGDRQANSALWRIVITRLGSDPRTQIYMERRLKEGRSKPEIIRVLKRYVAREVYPHLPRG

SEQ ID NO: 302673 - protein, 340 aa, unidentified
MQVNTIGLDIAKNVFQVHGIDGEGRPVLCRKVRRDRLVKLFESIEPCLIGMEACATAHHWARQLTALGHQVKLMPPAYVKAYVKRNKNDAADAEAICEAVRRPTMRFVPVKSADAQSALMLHRARHLLVRQRTAQVSAMRAHLAEYGVIAPKGIAHVRDLLTVLESGASMLPDLARQTLIMIAQMIDALSRQIRKIEVELLAWHRASAVSQRLESIPGIGFITASALAATVGDARAFRSGRQFAAWLGLVPRQNSSGGKDRMGGISKMGDRYLRHLLVVGATAIVRYTRRKATAVSVWANRLLERKPARLVTVAVANKMARIAWAVMARQEAYRVAPIAA

SEQ ID NO: 302674 - protein, 343 aa, unidentified
MRVVRVGVDLAKNIFQVHGVDRDDKTVWCRKLNRDEWINVLIAKTDTHCEIGMEACGGTHHWARLLQAKGYTVKLIAPQFVKPYVKSNKNDANDAEAICEAMSRPHMRFVSVKSVEQQDIQATHRVRSGLMDQRKAKANQIRGLVSEYGLVAPKELIHLRSAIPEWLEDAENGLSSRFRQLLHGLWNDLIALDQRVNALDQEIITLATSDPVAKRLQQLRGVGPMIATALLANVGDASQFSNGRQMAASLGLTPKQNSSGGKDRLLGISKRGDAYVRCLLVHGARSMIRMAKDKDDHLSQWVMRIANNRHPNIAAVALANKTVRIAWAMIVRGTDYQPDLVAA

SEQ ID NO: 302675 - protein, 370 aa, unidentified
MQPTRFIGLDVHKERISVSVAESGRQGAVEYLGEIDNDAALIAQLCRRLARPGTALSFCYEAGPCGYGLYRQLIGLGHRCEVVAPSLIPRKPGERVKTDRRDASMLARLHRAGELTAVWVPDAGHEAMRDLVRLRGVVRHVVTRARQHLQGFLLRHGRRHGRGTAWKMAYRRWLSTLAFEHPAQQIAFQDYVDAVTDAERRLQRVEEQIDALLPEWSLRPVVDALQAMRGVSIINAVVLVAEIGDFTRFSNPRQLMAYLGLVPGEHSSGEKVRRGAITKTGNHYARRALIEGAWAYRMKPRIGRHKVDRIEALPKAVRDIGWKAQVRLCARYRRLSLLGKNANMVIVAIAREMVGFIWSIACLIQTPKAA

SEQ ID NO: 302676 - protein, 386 aa, unidentified
MRNDHSPEQGAIRTDLGAIFVSLELSRSTWLITSLSPGVGEKLSKHSIPAGDAGALLARLTLLRQKATARTGREFPIIVIQEAGLDGFWVHRVLESEHVESHVVDAASILTSRRRRQAKTDRIDGETLVRTLLAYKRGEPRVCSMVRVPTPNQEDRRRICRERKALLTERIGHTNRIKGLLCTQGVFNYNPLLRDRRARLEVLQTGDGRPLPERMKAQISRELDRIELIVAQLKAVEAERDLLLEQEEAIPTAPAVMLGQLKGVGAQIATLLWSEALYRHFDNRRQVAAYAGLAPTPWKSGSIDHEQGVSKAGNPRLRTTMIQVAWLWTRHQPDSALTLWFKDRVERNGGRMRKTAIVALARKLLVAFWKYVTSGVVIEGAVMQAA

SEQ ID NO: 302677 - protein, 347 aa, unidentified
MLADEVDAVIGGDTHRDSHALEMAAPNGGTIGTLAIGNDETGYADAIAWITQNSPGPRVVVGLEGTRSYGVGLTRALQAAGFLVLEVEQPRRADRRRGKSDPIDAHLAALQVLRMPADRKALPRSDGDREALRILLIARREMTTVKTQQINRLRALLLTGDDADRELCRGPMSDAHLQLIARRRGRPDDTKEQQIRRGEARRLALAIRQATSELAANKKQLAELVASFAAGLLDKFGVGPVSAAQAIVSFSHPGRCRNEAAFAALAGVSPLQASSGRTVRHRLNRGGDRQLNRALHDIVKTRWRDCPRTHAYIAARRAEGKSDPEIRRCLKRYVARELFRALTAARG

SEQ ID NO: 302678 - protein, 343 aa, unidentified
MQAITTIGLDIAKSVFQVHGVDAEGQVVIRRQVKRRYVLAFFERLPPCLVGIEACASSHHWSRELQALGHSVKLMPPSYVKPYVKRHKNDAIDAEAICEAVSRPNMRFVATKTPEQQSCLILHRTRHLLIRQQTSVINAIRAHLAEFGIVAPVGRNGVEQLLGVVADASDKRLPEVARACVAALGVQLRVLKAQILEFDRMISAWHRSNETSRRLDEAPGIGPVLATALVATVADPKTFRSGRNFSAWIGLVPKQHSSGGKDRLGHISKQGDRYLRNLFVAGALAVIRYAKIHGTQHRPWLAALLARRPTKVAAIALANKIARMAWAMMVKGEHYKEPVALAR

SEQ ID NO: 302679 - protein, 408 aa, unidentified
MPNRIAGIDVHKRVLMVVVLDPEQAVIVGKRRFGATTAELTHLKAWLQEQTADEVVMESTAQYWKPVWLTLEGHFRLRLAQAWSNRAPRGKKTDFKDAERLARRHQAGELTLSFVPEAAQRQMRDLTRRRTQLTRDRVRIQNQVESLLEETRIKISSVLADLFGSSGLRILTALAGGENDPATLAALADARVQKSPQELTDALTGTVNLVQRKLLAQHLEHLRLIDRQMEELSGLTAEALHDEQDAITRLTQIPGIRVQSAQQIVAEAGSKAESFHSAGQFSSWVGVCPGKQESAEKNQSSRSTKGNSYLRRVLCQAAQAAVRTNNSFFQQKFRRLLPRLGYVKAIWAIARHLSVVIWKILHDGATYKEFGGPPTPQAAKRRLQRLKKELRAMGYSDELQPMPSAHPA

SEQ ID NO: 302680 - protein, 404 aa, unidentified
MDVSKRDAKVCVRVAGAGRRKTVETVTTWGATTNRILALREHLVAEQVSLVVMEATGAYWKPFYFLLEGVGFEVLLVNARQVKNLPGRKSDVSDAAWLAQLGAHGLVRGSFVPPAPIRELRDLTRARTTMTRERGREIQRLEKLLEDSGIKLSSVASDITGVSGRLMLQALIEGQHDPVVLADMAKRRLRHKMPELVEALTGRFSDHHAFLARMYLEAIDQRSQAIAELTDRIEVVMEPFRTFADLIGTIPGIGVRTAEVIVAETGADMSVFPTAGHFASWAGTCPGSHESAGRVRSTKTRPGNPYLKAALGTAALSIANSHGTYLSAKYRRIAARRGPMKAIVAVEHAILIAIWNMANTGAEYDDPGPDYFTRRDPERARRNATNQLERLGYHVTLDPIAASA

SEQ ID NO: 302681 - protein, 309 aa, unidentified
MGTYIGIDVSKDRLDVHVLPQDEAFSVERNGKGLGELVERLKSFAPNLVAVEATGGFETTTAAAVAGAGLPLAVINPAQIRHYAQALGKRAKTDAIDAKVIARFAADVKPDVRPLADETARFLADLITRRRQIVEMLQAERQREKRVTVRRLRKSIERLIKALEKELAELDGDIDDTLHASPVWREKEDLLASVPGVGPQTARTLIADLPELGTLDRKKIASLAGLAPYTRQSGRWKGKSMIGGGRKAVRCALFMAAMVAARHNPVLKLFRDRLIAAGKPKMVAIIAVARKLLTILNAIIRDNKPWQIA

SEQ ID NO: 302682 - protein, 358 aa, unidentified
MAGKVTETAVVGGVDTHKDLHVAAVVDQNNKVLGTQFFSTIRQGYRQMLAWMTSFGALKRIGVECTGTYGSGLLRYLQNAGLDVLEVTAPDRMERRKRGKSDTIDAECAAHAAFSGIRTVTPKTRNGMIESLRVLKTCRKTAISARRVALQIIHSNIISAPDELREQLRNMTRMQLIRTLGSWRPDASEYRNVTNVYRISLKSLARRYLELHDEIADLDVMIAAIVDELAPELIKRNAIGYESASQLLITAGDNPQRLRSESGFAALCGVSPVPVSSGKTNRYRLNRGGDRAANSALHIIAIGRLRTDDKTKEYVARRVAEGHTKMEAIRCLKRYISREVYTLLRNQNRQINSIPITA

SEQ ID NO: 302683 - protein, 287 aa, unidentified
MTEITIGVDVSKDFLDAHRHPDGDGRRFANTAAGHKALIGWIGKTAERIVFEPTGPYHGALERALAKAGLPLAKVNPRQARRFAEATGKLAKTDQLDAALLARMGALLQLEVRPLHSETIAELKQLHIAREALVKDRTAAKNRGKAINLAILKRQNAERLKHIERQVTAIEAEIDRRIQADAELARRLEILISIPGIARLTAFVLLIEMPELGHMESGQAASLSGLAPIARQSGRWIGKAFIRGGRANVRQALYMPAKVAITAIMRKLVVLANALLKAGRPWIPKTA

SEQ ID NO: 302684 - protein, 343 aa, unidentified
MTFKEWILDLKERHEKDKVVSGMESTGHYWFNLGKFLQDNEMKPVLVNPHHVKKSKELDDNNPTKNDRKDPKVIAGLVREGRYMIPYLPDGVYADLRTASNIRFQLQAELTRIQNRISRWFNIYFPEYKTVYGKPDAKSGILILKAAPLPEDILTLGIDGVNQIWRDAKLRAVGKARAKTLIEAAEHSVGSKEGAVSARMEIRMLLEDYESRNTRLQEVMVLIEELVRKIPMAEKLLEIKGVGIRTVSGFLAEVGDISRFNNPKELQKLAGLALVENSSGKHKGETTISRRGRKRLRYLLFEVAMSLVAKNPEFRELHNYYTTRRQNPLKKMQSLMAIAAKLI

SEQ ID NO: 302685 - protein, 409 aa, unidentified
MRVFCGIDWAEDHHDIALVDMEGKLVAKRRISDDAAGFAELVQLLAEASDDVDDPIPVAIETSRGLLVACLRATGRRVFAINPMAVSRYRDRHTVARKKSDAGDALVLANILRTDLAAHRPLPADSELVRAIGVLARAQQDAVWDRTLAHNRLRSLLREFYPAILAAMAGKRGGLLRPEARAILATAPTPSAAARLSLAQLRSLLTHTGRRRGIDAEARRLRGVLRATYLHQPPLVEEAMGRQALALLRQLDAACTSAEELAAATIAQFATHPDAELITSHPGLGPLTGARVLGELGDDRSRFADARAVKAYAGAAPVTRASGKSHQVMHRRVKNQRLAAAGYVWAFSALTASPGARAHYDRHRAAGDGHIAAQRNLFNRLLGCLHHCLQTRTPYNEQAAFPTQTATAA

SEQ ID NO: 302686 - protein, 400 aa, unidentified
MSKKNTRNALDTSLSYAVIGLDLAKADCAVAAVPCSDDDLGLIDRMDYESLFEQAEKLKPTLFAMEPCCGYSQISLRLQNMGHEVKVISGHAVKNWIATHKSNQKTDLNDATALAKLALYDHDLQPIRVKNVEECRIASVQAIRIQLRTQATKSLVCFKSLCQCWGIVIRRGSLNTKKMAEAVAAVEKLLGAEVASSLMILRDAYKFTKQINALDKLLDALVEANEQARTMKTVLGIGTQTAARLAVTTGDIKRFPMPRSYVAYFGLAPRNIITGHSGTPSPSKRGALKPVSSRGQGKVSRRGDRVARSFIIQGAATIYMLYCKDMLPECQLRRWLHEQIKRGKPYGKIIVSLAAKLLRIVWALLTYGEKFDSHKAGVPRSVLAAMEKPLKHDAAAESAA

SEQ ID NO: 302687 - protein, 310 aa, unidentified
MESITVGIDVSKNRLDVAVRPSGEVFAVERNAAGLEQLTIRLRELAPQVVALEATGGFETIAAAALASARLPVVVVNPAQIRAFAKAIGQRAKTDPIDAATIAHFAEATKPEPRPLPDEATRLLGDLVARRRQIVEMIGAERQREQRVTVPRLRRSITRLIKALEKELASLNTDIGDAVRGSPAWREKENLLSSVPGVGPVISSTLIAELPELGQLGRREIAALAGLAPFTRQSGKWRGKSFIGGGRTVVRTALFMGASVAARHNPVLKAFYKRLVASGKPKMVALIAVARKLLTILNAIIRDNRPWQTA

SEQ ID NO: 302688 - protein, 411 aa, unidentified
MQVVYTRCAGLDVHKKTVVACVITPKESGEWHKQIRTFSTMTKDLLNLSDWLTSHDCTHVAMESTGEYWRPVFNILEGNFEVMLVNARHMKAVSGRKTDIKDSQWIAELLQHGLLRPSFIPPVEQRDLRDLTRHRSNFIRERVNLVNRVQKVLEAANIKLASVASDVMGVSGRAMLAAIVEGNSSPEVMADLAKGTMTRKHDLLVQALEGRVRPHQKFILAQLLAQIDSINSSIELFDQQIEEYCHPFDQAVELVDTIPGIARRTAEMIVAEIGIDMNRFPSAEHLAAWAGLAPGNYESGGKKLGESTRKGNRVLRSILVQAAHALARTKTYLAAQFRRIAARRGKKRAAVAVAHSILVIVYHLISRQEHYKDLGADYFDKQRPESVKKRLIKRLEKLGYQVTVEPTPVAL

SEQ ID NO: 302689 - protein, 370 aa, unidentified
MSVRRILAKTIDTDLEYEAIGIDLAKNCVSAALLTTDGEVVCIDRLDYSELEKSAQALSPTTFAMEPCTEMNYLVQKLEAWGHRCLVIGGKNVQNYVENHYSGQKTDLNDAQALAFLAQDTQLRTIKAKDMEQRKYASLTTLREQYIKQYRQTIVSLKGICQAWGLNISKGISGKARLKDLIENHAAFPEELKESLVDMVTHAQTAQKALNKITKTLEELAKNDKLCQLIRTIPGLGLICSCRLRATIGDIKRFKNPKDFPAYYGLVPRSIATGHNEKKGRITHRGDKTMRSLMVQGAGSVINMATRGKLKSKQLTKWILKKQKEKMPWGKLVCAVAAKLLRIVRAVLISSKPYNPQIAGVAKCSLPKGT

SEQ ID NO: 302690 - protein, 415 aa, unidentified
MALKIVYKICCGIDVHKTFVVACIASTNDKGVTSYESHRFSTYTSGLKTLLQWLLDRNCKDVCMESTGKYWIPVYNILESDCSIILAHPKYVKAIRGKKTDKKDAKWIADLFKHDLVAGSFMPPADIRQLRDLMRYRFKLTCFKSSEKNRLQNCLTVSNIQLGNVVSDTFGKSAQAILDKILENPADTSFDLEPLVFKSLKKKLPELRDAIDGYITTEQAGKLKVIKAHYENLESRKAELEELILALAAPYQQELTILQTAPGISSPFTAIGIISEIGTNMEAFPSAKHLCSWAGLTPTNNESAGKKKSVRVSKAGCYIKPLLVQCANAVVKSTKHPEMRNRYLRLKKRRGHKKAIIAIARMLLTALYHMLKNEENYNAELYRKSDLLPVDREITVEQALMIARNQGYKIKSATA

SEQ ID NO: 302691 - protein, 391 aa, unidentified
MRSIGLDIHRDFCEVAIAEAGEIRSPGRIEMTPAALELFAQSLGADDRVALEVSGNAWEVARIIRPHVGRVVVVSPADTGIRSARAKTDRLDARALARLLAAGSLDAVWVPDEGTQAMRRRLSRRSQLVRVKTKAKNEIHAALMRRLIAKPPVSDLFGAKGRRWLEQVELPACERETVDGCLRQLDFCEGEIAQIERLIAAEALGSAEIRRLMTVPGVNVITAATFIAAIGDIRRFPDRKKLVGYLGLDPKVRQSGASAASRARISKQGSASARHALVEASWSAVRAPGPIHAFYERIRARRGHQAAIVAAARKLTCLFWCLLTREQDYAYAQPSLTRKKLRRLELAAGAPKGKVKPGIWAANKAMREAERELARQGEVAYRRTVADWQAQ

SEQ ID NO: 302692 - protein, 418 aa, unidentified
MLTTRVSRATLIVGVDVGKAFNAVGFMNKDGNVLGSCAKLYNSREGFEQFVKMIEGLKARHRLRDVLIGMEPTGHYWRKLAYFAKEHGYEVRFVRTTALKHHRELDESSSAKSDKRDALTIANITREGKYIDTVIEDGVLRQLRTLSKARDRLLRYSVSAKNSLHAALDDYFPELHEIFWSMGSRSLWVILEKFPFPEDVVLMKTSILQELIARSSRKKAGSARKAKALNEAAQKSIGVKQIGSADRYRLRVCLEEVKRTVLTLKDMDRQLKCMVKDIPSATYLMSIPGIGYLSAAVFLGELGDPAHFHNARQIVKYAGYDPQENDSGSWIGRKFISKKGRWLLRKYLFFMSMRVVVLSKYFQEYYHRKLETKNRVGQQPRRKEILCAVAIKLIKVIFALLRDKRSFEDTASAAVVIA

SEQ ID NO: 302693 - protein, 383 aa, unidentified
MSGAYEGRQIVGMDLHRRRSVLVRMTDTGEQLETVRISNDPEYLRQVMARAGEAPEVVLEAAYGWYWAADTLAELGAQVHLAHPLGVKMFSYRRVKNDQRDAADLADLLRMGRLPEAWIAPPPTRELRGWVRHRAKLVGLRSSLKCQVHGVLANAGVWVPMTDLFGVAGQQLLADLSGGERLSVESRSRLDSTLRVIAALEFEIELFAKLVNGRLRTDPGYRTIQQIPGIGPVLAGVFVAEIGDITRFTRPQQLASWAGLTPKHHESDTTVHRGRITKQGSRLVRWAAVEAVQRVGGHTRLGQHRDRVAARPRPQHRRRGRRPRTAHPGVLRATRPPHPRPHHPGRHVDTGTSVGGVRPRYTRWWARVVQVMTPDCRRRGRPL

SEQ ID NO: 302694 - protein, 426 aa, unidentified
MQPHYQVVCGVDVHKEFLQVCILRRGEDPEVFRVFNNFSGVQNLKQRVEEEGCECIACESTGVYWYRLYLAFEEQTRVIVGNAYQIKSIPGRKTDVRDAQWIAELAMNGLINPSRVFPKKDRELRELTRTRESMVNSRTQMKNRIHHTLDSAGIALGKGVNDIFGKSGIHLIWGLLNRERSEDIISNIPSARVKKKVNSLREILSGSLSDLQIMLIKNNLDMMAHINEHIRALDEQIIARMGEQERIRDVDIACSIPGVSVTTAVTALAEIGDYHDFETPEKLASWAGLVPSVYQSAGKNWSGKITKHGSAHLRWILVQAAKSAGRTVNTTFRKFFNRIMYRKGANTATVALARKILCILWHLLMKKELYIDPIKNAKVTKLPLVQKFSKNSPADIQKAIDFILDSGFKVIYPDATLDQNLRGVSR

SEQ ID NO: 302695 - protein, 364 aa, unidentified
MRIIGCDFHPSFQQIAMVDTETGEMVERRLFHADGEARRFYESLSRPVLVGIESSGSMLWFERLLTGLGHSYRIGDATAIRSSAPRKQKNDKRDAQHLLTLLLEDRFPAIWVPSMAERDLRQLLKHRHTLVQMRTRAKNQLQHIVLNQGLQRKKKLWTQAGLEELKQLELEPWTKRRRDDLLKILAEMDTHIAELSTAVEVEAERWPEAKLLMSHPGVGPILALATVVTLGQVERFRDGKHVASYLGLIPREDSSGERRRLGAISKQGNSFMRFLLVQAGLSAARGDAGLGRMYKRLVQKKHHGVAKVAIARKLVVRLYWMLRTQKQYPEVVRMQGSPSRAVAVEVAVDRLSGHPASRKRAGKK

SEQ ID NO: 302696 - protein, 320 aa, unidentified
METIVANLGIDVAKKKFQVALLKNDKYKSKSFDNTMPGFIALLAWLKQREPGEIHVCLESTGIYGDSLAKFLFENGYTVSVINPSRIKAFGEAELLRNKNDEIDAKLIARFCEKMKPVAWQPDPPEVEHLRMLGRRRDVLISMRTQELNRLGNPDRSVNESIEKVIAFLDQEIEAITQAIQNHIDGNDGLKKKRDLLKTIKGVGDVAIEAILSETNGFARFERIEQVVAFTGLSPKQKDSGTSVKGRPRLCKIGSARLRRALYMPALSAIRCNSFVRALYERLRAKSKHGMVVACACMKKLVHIMFGVLKTGKPFDPLYS

SEQ ID NO: 302697 - protein, 402 aa, unidentified
MRFFVGIDWASRAHAVCIIDQTGRIRWQGSIPHTAEGLTELVGRLRRFRGPGRLRVALERPSGLLVDTLVDAGLEVVPIHPNALKATRPRYSAAGGKSDPGDAFILADLLRTDGHRFPALRPPSDETRALRALVRARDDLVTQRIALANQLRALLERFWPGAAAIFVDVDSAIALAFLARYPTPQSAARLGEKRLAQFLAQHAYSGRRPVVELLARLRTAPASQVGEAEAEASGDLVRALVAVLTPLVGQLQQLSAAIEAALAQHPDGRLVQSLPRSGAVNAAQILAELGDDRARFPSDEQFAAEGGLAPVTHASGQHKAVVFRWACNKRLRRALTTFADNSRHASRWAALVYQRARARGCRHQHAVRILARAWARILWRCWQDRAPYDVSRHRAAQALAAA

SEQ ID NO: 302698 - protein, 342 aa, unidentified
MSVYVGIDVHRKRSQVAMVDESGEVLANRNVPNGVEPILKVIGGLPPGTPAAFEAAYGTSWLVQLLEDYGFAPHLVHPSRCKAIASARLKNDKVDAAILAQLLRADLLPEAWIAPPPVRQLRALLRHRVALVRLRTRLRNRIHAIVADYGHDRPGGGYWTGPGRAWLAALELPAVSRELVEDNLGLIDALQQRIDRLDWEIRQRARSDPRVKALTQLPGVGPFTALVILAEVGHISRFGSARRLASWAGLTPTVRGSDRVAHYGHISKEGSVWLRWAMCEAAQTAKRSPQFTDTFQRIAKRRGKKIATTAVARKLLTRAWHLLADAEHAAAPQLTAPQTMAR

SEQ ID NO: 302699 - protein, 443 aa, unidentified
MNAAGIDVGAKSYMVAIDQEKLNVREFGVYTRDHERLIHHLKCHGINTVAMESTGSYWQTLFASLQAAGLDVLLVNGSQTKNVKGRKTDVIDCMWIQKLHALGLLSGSFLLSNVLQELRTYYFHRQHLIEQTVMYANKMEKSLRLMNIRLDIVLRDVTGKSGLNIIEAILSGDRDPKKLASLADVRVKKSQEEIANALQGSWRQELLFELQASLQFYKLYEVALIECDNLIEMKLTEYVPKENVFTGNDIQGKVNYKKTRKHSPAFNVSKISYDYFGTDLFSIPGVSHTTVLCLLTNIGNDIHKFPTGKSFASWLRLIPNNKISGGRIISSRSPSGKNYLAIALRQAANSIGNQKEHPLTPFFKRIAFRKGRISAITATARKLAVIIWNMLTKIQPYNKENKQTNNERHKHVQLRNIERRIGSLQLNQDELKKLFTRTSLLVT

SEQ ID NO: 302700 - protein, 427 aa, unidentified
MAYRIAGIDVHKKVLAVVVADVEGEGEYEFERRRFGSNPEHLQLLAEWLLEQEVEEVVMESTAQYWQPVWGALERYWRPTCQKREGAGTMSGKLHLAQAQSNRGRRGRKKDFPDAERLVKRLVAQELVLSFVPDPEQRLWRTVTRRKHQMTRLHVRMQNQLESLLEEAHIKLSGFVTDLLGVSARRMLQALADGETDPAALAALADKRLRATPAQLCDALGVCTELNPVYRRLIKMALHELQFLEQQMGQLDQEIANLLRPHEDAVKRLAEVPGLGVDSAQQIIAEVGPTVATFPSDKQLCSWVGVCPGDNESAGVNHSHRSPKGNRHMRRILNQTANAAARTKGSIFEIVYRRHVPRRGHNQAIGVIAHRLCQLIWILLHRKVRYEERGPAVTERSKRKRTARMVRELRFLGYHVDPPNLQHGNSA

SEQ ID NO: 302701 - protein, 345 aa, unidentified
MNIASVGIDLGKTTFHLVALGERNKVLIRKKFSRAQLLAHTANLPASLIGLEACAGAHFLGAALQGQGHQVRLIPAQFVKPYRKSNKNDFIDAEAIAEAVTKQNMRFVKIKTQEQLDWQAMHRVRDRLVQRRTALINEIRGFLLERGITFAAQPIHLRKNLPVVIEDAEQNLSPRLRWLLDRLWQEWKQTEIDIKAMTQEIERISNEDARCRRLRQIPGFGPLVSTATVAAIGNGAAFRRGRDFAAWVGVVPRQYSTGGKQKLYGISKRGNIYLRRMLIHGARSVLFRVKYDTGGFGQWVHRLAQRAPRNKVVVAIANKLARIAWAVLSSGQDYCHQPLLQPAAA

SEQ ID NO: 302702 - protein, 386 aa, unidentified
MPKPNDLSRSLTAFEQDSTLLVVIEMSHTSWLVAGIVPGVDREPLKKLEPDGDALLRLLQRWRDEATRAGRTLKRVVVAYEAGRDGFWLARWLRARGVEAYVIHPTRVAVSREHRRAKTDRLDTALLKRVFLGWLRGEPKHCSMVAIPTLTEEDAKRPNREHESLVGERTRLVNRIKSGLVRLGIRTFKPMLRRAPEHLDALRTPEGAPLPVNTLAELRRDLARLHLIRAQIKAIEAARLEQLQQAPDQGPHAMVRLLARVIGIGVETADMLVQEVLSRNLRDRRAVARYAGLTGAPDESGARRREKGLARAGNGRVRRGMIQLAWRFLMFQGESALAQWFRSRTAQAPKMRKTMIVALARKLLIALWRLVRTGAVPEGLALRPAV

SEQ ID NO: 302703 - protein, 408 aa, unidentified
MGRTAEVVAPSSSIRTDGDYPVAQVNDLSRSLTRFDPIATLVAVVEMSKAKWLVSGAVPGVERQPLKKLEPDATALLQLIERWRNEAVRAGRPISRIALAYEAGRDGFWLARWLLARGIEAHVIHSASVAVSRERKRAKTDRLDAAMLMRVFLGWLRGERGHCGMVAIPTMEEEDARRPSRERECLVNERSRITNRMKSALARLGVRGFKPHLRKAPERLADLRTAEGTGLPANIIEELRRDMARLALLRAQINSIEKTRAARLERAPDTGPHAMVRLLARVIGIGIETADMLVREILSRKLRDRRAVARYAGLTGSPDESGLKRREKGLAKAGNARVRRGLIQLAWRFLVFQKDSALARWYRTRTEGPSGARKTTMIVALARKLLIALWRLVTTGEVPDGVALRPAP

SEQ ID NO: 302704 - protein, 349 aa, unidentified
MTIIAEDFEFVVGVDTHARTHTFTTIHCATGALIDTAAFPTTDAGMNRALAWIRRRTGGEPVFAAVEGTSSYGARLTQMLQTEGIDVGEVRPPSRSSRALTGKSDPIDAEAAARSVLGRQRDHVITPRAAGTRSALRILLAARSLLDQQRTANRNALTALLRSTDLGVDVRASLRETQITAIAAWRTTQAVDTLVRIARLEAKRMAMAIKNLTEQLTKNHKALAQLAEELAPGLQTIPGVGPVTAAIIICAYSHHGRIRSEAAFAALGGVAPRPASSGNTTRHRLNRSGDRQLNRAFDVIVRTRMSFDTATKDYVARSRAAGKSNREIRRNLKRYVCRSIFRQLQTITA

SEQ ID NO: 302705 - protein, 582 aa, unidentified
MKYQCRDSRFLKIRFGLIDRVRAAEYFSVSQSSVPCGGVASPRAGVKLDRVCWHYTAHPAGHHAKNWVVRKSGVISPPVCHVPAEHTTAHEKALCWPGVAPASEVGLTPALRARHQFDLGTLRHHRLLLLATSLGSTQGSNSLRAPALADPASNSVWVCRTGTEVCGVRRDVMDVLHPCCCGLDVHKRTVVACLISTPPTGPAEKMIRTFGTMTPDLLALADWLTSAGCTHVAMESTGVFWKPIYNILEGLFELLLVNAQHLKAVPGRKTDVRDAEWIADLLRHGLLQPSFVPPSPQRDLRDLTRTRTTLVEERARIVNRIQKVLEGANLKLAAVATDITGLSARAMLEALLAGQTNPQALASLARGKLRVKHDQLAQALTGHLRPHHAFLLSEHLAHLDFLDEAIVHFSQEIADRMRIETEAIVLLDTIPGVSQRTAEILLAEIGSDMSRFPSAHHLASWAGICPGNNESAGKRRSGRTRKGSRWLRQVLIEAAHSAARTKDTYLSAQYHRLAARRGTKKALVALGHTILVIVYHVLTRREPYHELGGNYFDERQRQAVEHRLIRRLELLGYSVTLQPTVA

SEQ ID NO: 302706 - protein, 422 aa, unidentified
MKNVTDSGQKVKGQKLLMALERASWILGIDVGKEKLCCALLLKDETFRCRFDVEASLNGFQMMLERVKTETRGDGAVMFALEPTGHYWMVLGQFFEDHNQSYVLIHPLVVARSREVKQLNRGKTDAFDARLIAELACRGSVTRTQIPEDDWATIRFYAREYMDREKEIAREKNRMMSYLETTLPGFLEIFPRPLGMNSRACLRVLANFREVLQGDIVQFESQARKHITGKRLMTSRVKRLFDMLQRGDALGLRAGRKTLFWRIINSLDRLELYEKQQDMASKALISLYEQCEFKPYMDSVWGTSPLTNSLVLGFMGNPTSYDTPASLIKMAGCDPVPNESGKFKGKASISHRGRNLLRKAGDRISFLLEKRNTVFRNFMHHLTARPKNKLTKRQARIACINKYFRIIWVLCNHRVLFNPALA

SEQ ID NO: 302707 - protein, 466 aa, unidentified
MKHNRRRYPGKPRVSPSVLERINPNVAGIDCGSAEHFVAVPPDRDPMPVRSFPTFTSDLHRLADWLIACRVTSVAMEATGVYWIPIYEILEARGVEVHLVNARHVKNVPGRKSDVSDCEWLRELHSVGLLRGSFRPTDAIVALRALLRHRQTLIETAAAHIQRMQKALVQMNVQLPLVVSDITGVTGLRILRDIVAGRRDPAQLAEHRDHRCRASKTEIIAALTGNYRPEHTFVLQQNLELFDACQTQLAACDTTIEAHLHTVTAPLAAPTTPLPTARVTKKPRDNEPRFEIRTPLHQLTGGVDLTQIDGLTSYTALKLLSEIGTDMSRWPSEKHFTSWLTLAPNNKISGGRLLSSRTQPSANRAAAILRMTVMSLGRTQTALGAFYRRVAARIGKPQAITATARKLAILIYRALKGELVYRDPGADAYDAQQRTRVLRRLRQRAATLGFELVNRETGELLERVVS

SEQ ID NO: 302708 - protein, 334 aa, unidentified
MKKRYFMGIDIAKATFDFCLLSRDGALLWRGRFSNDSSGIKQFLAQLGAGRWKPSLIHFALESSGVYGKALIAALHQVSLAVSVLNPAQVKYFAFSVLRRTKNDRVDAEIIARFCLERKPIANRPLRPVEEQLKLLVHERDSRVGEQNRERSRAKNDPFQIELPSLISRQRQHRLKQLEKEITQLDAALNELIASDEYLNTQSQLLCSIPGIAQTTAAKLLSELAGKEFQSARQLAAYAGLTPSEFRSGVSSYGKTHLSKVGNAFLRKALYLPAAVARRWCKPLRPWITLLEQRRLSNLAIRGAIMRKLLHIAFGVLRHQKPFDPSCVFMPKTA

SEQ ID NO: 302709 - protein, 410 aa, unidentified
MGLFCGIDWASDHHDIAVVNDEGQVLARGRVGNNAAGFAQALTLLADAGDTANDPIPVGIETDRGLWVAALRETGRVIYPINPLAASRYRARYAVSGAKSDATDAVLLANIVRTDPEAHRPLPADTELAQAIRVLARAQQDAVWARQQIGNQIRDLLKDFYPAAIIAFAGLPSGGLARSDARTILAAAPTPGQAAKLTPARLRRLLIKAGRRRDLDRDVERLRAVFTDTYLHQPPVVENAMGIQLSALLHQFEAASAAADELAEAAIAHFEQHPDAPIITSFPGLGKLTGARVLAEIGDDRTRFADARGLKAFAGSAPITRASGKKTMVTHRHIKNRRLATVGSIWALASLRSSPGARRHYDARRAAGDWNRQAQRHLFNKFLGQLHHCLQTGQTYNEHRAFPPPLPLAA

SEQ ID NO: 302710 - protein, 340 aa, unidentified
MEEVSIIGIDLAKRSFQVHGAGADGSVAFRRKLSRGKLLGFLASQPECTVAMEACASAHYWGREIAALGHEVRLVPPIYVKPFVKRHKNDVPDAEAISEAAQRPTMHFVAVKTEAQKTQGMLFRTRDLLVRQRMQTINALRGHLAEYGVVAPQGRARIRQLVGVLEDGDSGLPEAVVELGGLLLGRIDELDEKIYGLDHEIRASAREDEDTARLMTIPGIGPVTAMAIQSFAPPMESFRRGRDFSAWLGLVPRQHTTGGKPRLGKISKMGQRDLRRLLVTGATAVVQHASRRGAITDPWLAGMLARKPKKLVAVALANKTARTVWALATKKEVYRVRAAA

SEQ ID NO: 302711 - protein, 380 aa, unidentified
MEKDIRYVGLDVDSERVAVAVADSAVTEVRSLGMIPNAAESVRRLVKKLGPVHRLRFCYEAGPHGYGLYWQLTRLGAHCDVVAPTLIPVKSGDRVKTNRRDAEKLARLYRSGELTAVWVPDAAHEALRDLVRAREAAKKDQLRAKHRLGKFLLRRGLKAAVGVKSWTLKHLAWIKTLHFEHPAQEATFLDYLHEVEHASARIARLEGALDQAIETAPSTMRALIDGLQALRGVSSLSAATIVAEVGPLSRFARPKQLMGYSGMVSSENSTGNSVRRGAITKTGNAHLRRVIGEAAWAYQRRPSMYRALEKRQEGLSEEVKEIAWKAQHRLYSRYRRLVAKGKLHQKAVTAVGRELLGFVWAIGMQVEKEQRAQAARGRAA

SEQ ID NO: 302712 - protein, 409 aa, unidentified
MRPILRSCCGIDVHKSMIKACVAKGPLNKPPKIEIRTYSTMTSDLLKLSEWLKENKVQEVAMESTGVYWKPIFNILEADFPVSIANPKYLKKVPGKKTDVSDSEWIATLLRCGLIPKSFIPPMAIRQLRDLNRTRRKMVEHMASEKNRLQKVLEDANIKLTSVVSKVDGVSSMNMIQALLNQDEISREDIAAMVHGKLKTKIDQLVQALHGRLTDHHRYLLRLHLKQIAFLADQIKELDDVIQKKMKAFKKESDLIKTVPGIGDTTSSAIIAEIGTDMSQFPDEAHLSSWAGICPGNNESAGVKKSGKIRKGDKFLKATLCEAAWSASKKKGSAYSAYYNNIAKRRGKKRALVALAHRMLMDVYRTLKTGEPYVDEGAEAVFERNSSGRQKSAIRFLEKAGYAVTKASA

SEQ ID NO: 302713 - protein, 412 aa, unidentified
MADIAAYIGLDWGDERHSVHLQMADGTLEHVELEQKPDVLHAWVTQLKERFAGGQVAIAIEQRKGAVVNALMLYDFLVLYPINPKALARYREAFRTSRAKDDPADSQLLLDLVVRHRDHLRAWIPDTTEARKLQLLCEQRRKLVNHRVALTNRLTSLLKQYFPQALEWVGDLASLQGCDFLAQWPNLDAVQSARPSAVRKFYQAHNCRMASVIDARLAAIKIAQPLTIDPAIVEPLSLSVQTYATQVHGLIRAIQAFDVRIAHVFADHADHDVFASFPGAGDVCAPRLAAAFGTDRSRWDSAAELQSYSGIGPVTERSGKTLWVHHRLACPKFVKQTFHEFADQSIRFSRWARAYYDQQRRRGNDHHAALRALAYKWIRILFRCWKDRTPYNEGRYIDALCRRGSPLVKNFA

SEQ ID NO: 302714 - protein, 435 aa, unidentified
MDLPIINPHAAGVDVGSEKFFASVGGKEPKVFLTVTEQMRDLCRHFQAEGVRTVAMEATGVYWINLYGALEEAGMEVVVVNGAHCRNFPGRKTDMKDCQWLAVLHAHGLLTGGFVPPSDIRRLRDYLRLREDLVSLAAQHVQHMQKALDRLNVKLHVVISDITGKSGMKILKAILAGEREPEQLLLLCDEQILKTKRAAVLESLRGLWRKEHLFALELALDSYESYQKQIARCDEQIAQVIEQMRGGKPTPELGPKKELRHNAMVIDDLQRSMAQIYGKDLTKLPCLNQSTVTMLLAEIGSDMSRWKDWRHFGSWMAVAPSSAQSGKRRRRQKRYLNHAGRILCRAVQCMAVGKHTWLASFYRRIRAKRGAKVAIKAAAYKLAKLIYLVLTQGWEYVEQGIAKYQDRIRQQQLKALQKMAKALDYVVLPKAMAIN

SEQ ID NO: 302715 - protein, 355 aa, unidentified
MTGETAMTLYIGVDFHPHQQTVAWCDTQTGETKTLDLVNEVGSVRSFYSSLPESAIVGIEASARAAWFEELLFETGHKLFVGNPVLIRKRATSRHKNDRRDAELILELLLRKEFPAIWRRPPESTRIIDVVGLRHNLVRHRTQVYNRLQAIGHSIGLPKGKMKSVAFQALVKAAETDEATVIRRDHLFLLLAQLDVQIDELSKWLEKKAEVDKTVQLLMTQKGVGYLTALVTVHTLGDVSRFRRLSKQAASFAGLDPVECSSAGRIRFGSISKAGSSLLRYQLGHAGGIASRYDSRLKSFCKRLAKKKHRAVVRTAAARKLLIKLSIMLRDEITADEFDRRGRTVGNARLASGLK

SEQ ID NO: 302716 - protein, 345 aa, unidentified
MPNLNQFHDFTYIAGIDIAKSVFQVHSCNTQTGEISNVQIKRAKLLEHFANRGKCLIGMEACGSSQYWAREFQKLGHTVRLMDPKRVKPFVRHNKSDRADAEGIYWALSNGVQAVAVRDNIERDLHTLLTIRTRLTTLQTGNINHVRGQLLEYGQPIPKSPVKFLEHVNDCINNLEGNVDQTVIDMFRFLVTQIKAGEEQLRELNRKIEKLSKQTKHAEHFLTVPGVGPVITANLCVLLADPSAFVSGRQFAAFLGLVPMHTGSGGKTINTSIPNRCDKRLRALFVEGAQAVARSKHPSDWVKNILARKPKKVALIAIANRMARQCWAVAHYGQPWRDTSIATAA

SEQ ID NO: 302717 - protein, 340 aa, unidentified
MAIVGGLDVHRRQITFDYLDTETGQVRRGRIAPADRQLLRRWLMSVTSRPAAFAVEACTGWRFVVEELCRAGIQAHLAEPAETAAARGPKRRAKTDRADARQLRELLAAGRLPESWIAPEQVLEIRGLLQLFKDLRDEHTGWVQRIHAVLFHHGVAAAVGDLLGGDSRQRLQAGTGLSPAGHQAVLAALRVVDMLEAELGPLRKQIATFARRQPACKALQAQYGVGPVTAAVIWAELGDCRRFSASRKAVRHTGLDVTVYSSDDKRAPGRLSRQGSPLLRWALYEAAKCAARSSSPDYAYYSRIKERIGGNRAALSVARKIVRRSHHILRSLGDQALTAV

SEQ ID NO: 302718 - protein, 379 aa, unidentified
MASVHDSARSKTVYAAIELSKKSWVVAIAHPDRDRPSIHRIAGGNLADLIGRLRKAAGEKQRIVVCYEAGYDGFWLARSLAKIGIDCRVLDPASIQVNRRARRVKTDRIDSLALLRALIAIDRGERHVCAVVRVPTVEEEDARRSHRERQRLVRERTGHINRIKGLLFAQGIRGIEPKRRRTRIDFGKLATAEGMPLAERLRRELEREYQRLELIETQIRIVEKERDTADAQDPAVEQKRELLCALQGVGGASAAILAREVFARQFASRRQLGSYLGLTPSAYDSGSTTRCQGISKAGNSWARRVLIEVAWLWRKYQPSSPLSHWYSRKTADQSPRIRRIMLIALARKLAISLWRYVETGLVPDGVVMAKTTPHMAAAA

SEQ ID NO: 302719 - protein, 351 aa, unidentified
MNEITTVGVDLAKEVIAVGAADRSGKTVFTRVFRRAAFAAWAVQLPPCVFGLEACGAAHHWARWLTSHGHTPRLMAAKNDRNDAEAVLTAVRQPNMRFVAGKSVEQQACLSWHRLRQGWSEERTALLNRLRGLLGEFGVWRGRSAEVLTRALPVLEQDEALPLMVRRLLTEARPHLARLDAAIARCEVEIKSHVKGNAVAQRLTAITGVGALTAAAVLATVSDARDFKNGRQFAAWQGLVPRQDSSGGHTRLGHITKRGDTYLRGLLTQGARSALQAALTKEPLRRTRLQAWIVQLHARVGYHKTLVAIANKHARMIWAILAKGEAYDPDAWRRWTRTAPSTPPAMCGVTA

SEQ ID NO: 302720 - protein, 320 aa, unidentified
MSTPSPVFVGIDVSKARLDIHVLPSQEAFSFANDADGCARLVERLTPIGVSLVVVEATGRYQRRVAADLLSAQIPVAVVNPRQSRDFARSLGKLAKTDAIDAEVLARFASVGHLRVCEKQPENAAILDDRITRRRQVIGMLNAEGNRLAGMIDPVSIKMIKKVIRLLEQQREELDRQIAEMIESDDDWRGKRDLLQSVPGVGQITAANLVAEMPELGKLSREQIAALAGLAPMNHDSGTMRGKRAIRGGRASVRSTLYMAAFNAMRYNPVIAVFTQRLSDSGKPFKVVVTAAMRKLLVILNTIVKTKTPWRNPLCVAQNG

SEQ ID NO: 302721 - protein, 406 aa, unidentified
MEELLIGIDWSQAHYDVAILAINGAILTEFRINNTAPDLKQLKEKIAKFAVPPECCLVGIETHHNILFDFLLSCQYQVYVIAPNVVNSSRGRFSASGAHTDRTDARLIADLLRTDRQRFAPWRLDSPLLNQIKLRLNHIDNLTKTTIQHANRLEAILLRVYPQPLQTFSKLAIPIAMHFLLAYPTAAALKELSKDEFRKFCRDHHCHPAAWIRNWYAALQQPTPEADPLLAEAYSGEIAFLAGLLLSLIEEKKRAADEAHALFLQHPDQAIFASLPGAGLLLRPKLLALFGEDRQRFPSPQAVRQLAGTCPVTKQSGKKKQILFRKACNRDYRDTMQQFAMVSVQQADWAAAYYKAAKARGHYKNSAFRCLANRWVGVIWKMWQTNQPYNEAYHMQQIRKHRPSTD

SEQ ID NO: 302722 - protein, 456 aa, unidentified
MSQPKRPGSRTGLSAVHPAAAAIDIGATMHVAAVGPDRDTEPVRTFQTFTDDLHRLADWFARCGIKTVAMESTGVYWIPVFEILEQRGFEVMVVNARDAKHVPGRKTDVSDAEWLQRLHEYGLLRPSFRPQAEIAGLRAYLRQRERLLDYAAVHIQHMQKALMQMNLQLHHVVSDITGVTGMTIIRAIVAGERDPNVLASHRERGCQASVETICQALAGNYREEHVFALSQAIELYDVYQTKVAACDKQIEVILQRLKQSATPPASKLLPPKHRSRPPNAPSFDARAALHAILGVDLTQIHGLGPYLALKLVGECGINLSAWPTAKHFTSWLGLAPHNKISGGKVLSSKTRRTSNRAASLLRLAAVSVGRTDTALGAFYRRLAARAGKAKAVTATARKIAVLFYNTLRHGMSYADPGATYYEERHRRRVLANLQRRAKSLGYVLHQADRDPIQAVS

SEQ ID NO: 302723 - protein, 370 aa, unidentified
MGNRSMFVGLDVHKETIDVSIAEGQREGEVRHYGVIATDLEPLDKVVRALRAPDRRLHFVYEAGPCGFGIYRHLTKRGEDCVVVSPSMIPKRSGDRVKTDRRDSQMLARLHRAGELRAIYVPDDTDEAMRDLVRAREDAVGVGTQAKYRLKAFLLRQGRRYPGREGWTLPYRRWLTDLSFPSAAQHIALQEYRDTIAETEQRIDRLTEQLRQLAPTWRWAPVVAALQALRGVSFVTAVALVAELGDLRRFQHPRELMAYLGLVPSEYSSGPSVRRGAITKAGNPHVRRLLAEAAWAYQGIPRIGRQHAYRQEALPKVVCDIAWKAQLRLTTRFRRLVARGKAKPKVATAIARELAGFIWAIAREVAPAPQ

SEQ ID NO: 302724 - protein, 387 aa, unidentified
MQAETPATVVATTTPSDVDTLFASLELSKSKWLLTVNSPGGEKFSKHQLGGGDSGSLLGLLARLRTKAEQRCGRPVRVMAIQEAGLDGFWLHRLLVDNGVESTVVDPASIAVDRRHRRVKTDSVDGETLLRTSMAFARGERRVCSMVRAPSPEEEDRRRLTRERGTLLKERIQHTNRIKGLLNGQGVRDYDPLARDRIARLDAVRTGDGRALPQMLKAEIRRELERIEMATAQLAIVERARDAQLRTQAEGGENPAAMLLEIKGIGAEFASLLWLEALFRNFANRRQVAAYAGLAPSPWQSGAIDRDQGISKAGDRRLRRTMIELAWFWLRHQPSSALSRWFQERVGAGRGRIRRIAIVALARKLLVALWRYVAQGIVPKGAVLKAA

SEQ ID NO: 302725 - protein, 410 aa, unidentified
MERVIERCCGLDVHKKTVVACVRVPGRTSAREQQVRTFGTTTAELLALRDWLAGYGVTHVAMESTGVYWKPIFYVLEDAFTCVLANAAQIAQVPGRKTDVKDCAWIAQLLEHGLVRGSFVPPAPIRELRDLTRYRAALIGEHTRETNRLQKVLEDAGIKLASVASDVLGVSGRAMLDALTQGTHDPDVLAELARGALRRKLPALRQALTGRFRPHHAFLVSQVLAHLDYLDEVIEALSTHLDEVMAPFAEEVSRLDTIPGVNKRTAEVLIAEIGVDMGVFPTAGHLASWAGLCPGNNESAGKHRSGKIRKGNRWLRGALIQAALAGGTRATKGAFAARYRRVMRHRGHKKAVVAVAHAMLVAAYHLLARHTTYQEPGADYYERRHAERVRQRAVQLLERQGYRVTLEPAA

SEQ ID NO: 302726 - protein, 337 aa, unidentified
MNNNYYLGIDVSKGYADFTILNSNKKVIEENFQLDDTFSGHNQLFKILTDFFAGKPQAHLYAAVESTGGYENNWFNCLCKYKAQFNLSVARLNPFGVNYNSKASLERIVTDKQSAKNIACYLISHPEKVNYQKEDYFAAQRRQWTFIKLLTKQKVQLLNQLESFLYIANTEILPFCKDGVRLWTLKLLKEYPTSGHLAKARALTVNKIPYISKVRAEELVENAKHSVASASDEVTAEVIRSLATQIISLRKLIDLQTKQLEKSCDLPEIKLLKTFTGIGTYSAVGLMIEIVSASRFSSVKKLASFFGIHPVFKKSGDSTSAYRMSKKGTKATQTDII

SEQ ID NO: 302727 - protein, 344 aa, unidentified
MDHFAGLDVSVKETSICIVDETGKIVREVKVASEPEALLSVLANPAYHFKRIGLEAGPLSQWLFSALAEAGLPVVCVETRHMQAVLKAQINKTDRNDARGIAQMMRVGLYRPVHVKTLRSQKLRMLLTHRKLLQSKAIAIENDLRGTLRNFGLKVGIVGKVKFEARIKELVENLPDLAALVEPLLIVRRVLREQIIILHRRLLAIVRDDEVCRRLMTTPGVGPVVALTYRATVDVPARFRRSKAVGAVFGLTCSKYQSGEIDRNGRISRCGDEMMRVMLYEAAQSMLRSKKWSWLKAWAMQIARRRGMKKAIVALARRLAVIMHRMWVDGTEFRWTREQAAAAA

SEQ ID NO: 302728 - protein, 392 aa, unidentified
MRAAADRADAPTAIQTDLRAIFVSLELSRSTWLITSLSPGGGEKMSKHSVQAGDIAGLLRRFAQLKEKARARTGRDFPIVVIQETGLDGFWIHRMLQSEGIESHVVDAASILTSRRGRRAKTDRIDGETLVRTLMAFKRGEPRVCSMARAPTPQEEDRRRVCRERRTLVGERVTHVNRIKGLLFAQGVFGYQPLRKGRREQLEELRTGDGRPLPVHLMAQIVRELDRLEVVLEQLKTVEAERNALLKPATGAAASPPAMLLELKGIGPETAAVLWSEGLFRQFDNRRQVAAYAGLAPTPWQSGSIDHEQGVSKAGNPRLRTTMVELAWLWLQNQPASALSLWFHERVRRLGGRMRKTTVVALARKLLIALWRYTTAGVVIEGAVMKAAPATI

SEQ ID NO: 302729 - protein, 427 aa, unidentified
MNNTQNDKIAQVTNETMVIGIDIGSEKHWARAFDNRGMELSKKAFGFRNTAEGFASFEVWYENQRRAAGMKRIMVGLEPTGHYWFNLNQFLTENGVRVVLVAPQHVKHSKELDDNTQRKDDLKDPRVIAKLVTEGRYFLPYRPSGVYADLRDGFNRRCGIVESMTRAKNRLHRWFSINFPEYLHAYGSVTAKTGLMVLKKAPLPKDIVELGVEGIDKIWRDAKVRGAGKKRAMTLVALAEQSIGEKTANEAARLELWQLLEDYDHFAHQFEVIEEMLKRKIHEVPHADNLLAIPGIGYFTVMGFFAEVGSIDRFDDPKQIQKLAGLAVVENSSGKRKGLPGISKRGRDRLRWVLFQAAMSAVKNNKEFREIHLYFTTRKDNPLKKIQSLMAVAGKIIRVFYGMVRTGGAYDPERLLRDIRRPEKDAA

SEQ ID NO: 302730 - protein, 401 aa, unidentified
MQDTQQRDAVDVFVGVDVGKGQHHAVALDRNGKRLYNKALPNDEAKLRALIAELKTHGRLLFVVDQPSTIGALPVAVARAEGVLVAYLPGLAMRRIADLHAGEAKTDARDAAIIAEAARSMPHTLRSLRLADEQLAELTMLCGFDDDLAAQVTQTSNRIRGLLTQIHPALERVLGPRLDHPAVLDLLERYPSPAALAATSEKTLANRLTKLAPRMGKNLAAEIVQALSEQAVIVPGTQAATIVMPRLAQQLAALRKQRDEIAAEVERLVHAHPLWPVLTSMPGVGVRTAARLLTEVAHKAFASAAHIAAYAGLAPVTRRSGSSIRGEHPSRRGNKVLKRALFLSAFAALRDPVSRAYYSRKVQQGKRHNQALIALARRRCDVLFAMLRDGTIYQLKSALNA

SEQ ID NO: 302731 - protein, 398 aa, unidentified
MLGFVGLDIAKDTFTVCFLLVENGGQVNSQTTQTFTADQPGWQAFLSVWQQMPAETWHIGLESSGPYTRLFLHHLQTLPYSVYLLSPLQVQHFRRSRSLRKAKTDRIDAESIAVWLHSMWQENNLPRVARPRSALRDLAYLYNQLTQELTRVQNRFRQVLHVLFPELERTQTRFPKTLRHLLSAYPSAQRIAQAPLDALDALLSHGRGQRLALSAQTLQALAATSWGLEDAVAVAHLQHLLALWDDLETRREAVFHSLRQAVQQQFPQAWQLLRAIPGLGERLVALFLALVDNPQRFSSAKSLVAFAGLDPSVYQSGNFQGHGRLSKRGLPLLRHVLFLMAQALVRYTNRFRQAFQHYREQGRSYREAMVIVARKALHVLYSLLLRQVPFQDLPASST

SEQ ID NO: 302732 - protein, 355 aa, unidentified
MTVTIVEEARPVTCRAAVTGGVDTHADTHVAAALDPVGGLLGVAEFPATTAGYARLLGWLGGFGTVCLVGIEGTGSYGAGLARYVTATGIRVVEVDRSDRQDRRRQGKSDPLDAVSAARAAQSGRASGAPKGRDGAVEAIRALMVARRSAAGERTRTVNQARALVLTGPDDLRARFAKHKPAALITGLAALRPRPGDVAGHATRIALRELGRRARFLDGQLVRLDELIVPLVTARAPGLLAVYGAGPRTAALLLIAAGDHPERLRSEAAWAHLCGVAPIPASSGKVTRHRLNPGGDRQANHALWRIVFTRLGSDAATRAYAERRTAEGKSKAEIIRCLKRYVAREVYRQLRPAVG

SEQ ID NO: 302733 - protein, 342 aa, unidentified
MSVFAGFDVHRRQITFDALDTETGEVMRGRIDASPAAVRLWTERLGKREVHVAVEACTGWLFVCDALVAAGAVAHLAEPVETRALRGRNRRAKTDREDARWLRELLAEGRLPESWIPPEHVRQWRSRARMRHTLIDERTQWLQRIQATLFHHGVDGTPERLRTAEGRAFLERLPVPADARERIEIALAMIDAIEAQLGPLERELRQLARRQTGCRALMGLYGMGELTSLVTLCELGDVQRLSASRKAVRMAGIDIGVHRSDRRARAGKLTRQGSPQLRWALYEAALSACRPSSPDHADYQALKARGLSHTRASLTIARKLARRSYHVLHQLGPAALEPVTTD

SEQ ID NO: 302734 - protein, 482 aa, unidentified
MKPKPEEKNKRTTNHPPQHHGHQMNRKQRREMMRKIQSEDLSLEVIHPDAAGIDIGNESHYVAVPPSRDSQPVRRFGCTTAQLKAMAAWLQQCGIRTVAMQSTGVYWIAVYDILEQAGLDVYLVNARDRKNLPGRKTDVQESQWLMKLHTYGLLRNSFRPSQQIRTMRTYWRQRNDLVQSAGRHIQRMQKALTQMNIQLANVLSDVSGMTGQAIIKAILRGERDPYKLAAFRDCRVQASEEEIARSLEGNWQDDLLFVLKQEQDGYEFCQQQMAECDRQLAQYLRQREDRSQGASLPEETRKGRRKKKRANKPQFDLREALFHMTGTDLTRIDSIDVMTATTIISEAGWDMSKWKTEDHFVSWLRLCPDNRISGNKVIGKGRLPTNNPISIALKMAASTLRLSKTYLGAQFRRFRTRLGAPINIKAMAAKLARLVYRMLRYGMKYADQGAAFYEAPHRQLQIKQLKWKAAKLGYQVTPVPAV

SEQ ID NO: 302735 - protein, 340 aa, unidentified
MLTIFGLDIAKRVFQLHSLDPDTGEIQRLKLRRAEMVPFFANRAPCVVAMEACGSSHHWGRQLRSLGHDVRLIATKFVRPFVKNNKTDAADAQAIWEAAQRPDMRFVPVKTEQQQAILVLHAMRDGLVKGRTAQLHQIRAAFYELGIELPEGRHWCVKNLPSAFERLEGKIPAMVIEALRGQLELILNLTARIDELERKLDAYRRMDERCERLLQVPGIGLLTSTAIVASVGDAKEFRSGREFAAWLGLVPRQSGTGGKVRLLGISKRGSSYLRALVIHCARAVVARQKQHTAWLERLLRERPWNVAVVAQANKIARTIWALLAHERAYEADHRAVAVGG

SEQ ID NO: 302736 - protein, 347 aa, unidentified
MGTPSYEGKQVYMGLDVHREFFVASCICDGVVVKRCRMPGTAEAVISLVSKEFGGASVRAAYEAGYSGFWLYRKLVAAGIDCIVVHPASIEVSSRDTVKTDKRDSLKIAQQLSAGRLRGVRVPTEEEEQRRLLTRTRDQLMNKKRRVMVQIRMRLHYFGLFPESIQGRIKLQDVEDILTGLEGELQRTIGMLRDEWIELAKRIKEIDRLLVEPAKEDPLDAVYRSVPGVGPLISRILSAELGDMSQFRNERALFSFTGLTPSEYSSGGHICRGHISRQGNTRLRHMLVEAAWKAVRKDPVIKEYYIKLSERIGKRKAIVAVARKLAGRIRAALRKHEHYTLDYRAAA

SEQ ID NO: 302737 - protein, 349 aa, unidentified
MEVLIGVDPHKATNVVAAIDEQGELVGQETFPATRKGLRALERWAKRFPERRWAVEGAGGIGRPLAQKLLAAGERVVDVPPKLSSRVRVLSTGNARKNDRLDATFIALAALRNDRLTSVQTEDGPEGHVEILRLLTERREDLVSERTRALNRLHVLLRDLLSDPVRKQLSTDAAAKLLRRARPKHPAGRVRRQLASELVRDVRTLDRRIAGLDERIAGEVKASGTMLTEIFGVGPILAAKILGIVGDVSRFPSKAHFASYAGVAPIEASSGEVVRHKLSLAGNRRLNQVMHMIAVCQARSDPRGGAYHRKKLAEGKSRREAMRCLKRRISDAVFRVLVTDSQLASPTVS

SEQ ID NO: 302738 - protein, 282 aa, unidentified
MKKIHVGIDISKEKCNLCYRSGLEIVREEECPNDVKALKKAFKAALKVLGASFEDVLVCAEYTGRYIYPLTVACQELDIFLWMDDPTRIKNSMGLTRGKNDAIDAARIAEYAFRYSDKAVRYAIPDAALVSMKSLLADREFLLIDRKRYQSQLTDQKKYMAPGDFKHKNNRWKKVIKSIDEQIAAIDAEIESLIAADPVLARQKELLVSIDGIGEHIAINMIAIIGGFTRFQNARQFCSFAGLSPYKCSVKGQNIQTGKSNHEGFTTHERSERGNAHESRGI

SEQ ID NO: 302739 - protein, 313 aa, unidentified
MNETPCFVGIDVSKASLEVALRPFGRQQSFSNDDEGVARLVQWLRVEAPSLIVLEATGKFEQRVARALAVEGMLFNIINPRQARAFAKAIGILAKTDRIDASVLARFAEVLQPEARPLKTEETEALSDLVTRRRQVVEMITAEKNRQGTASKRIHRDIQTHIRWLEKRLEDLNDDIDELIRKSPLWREKEKLLQSVSGVGPVLVSTLLGALPELGTLNRKQIAALVGVAPFNRESGRYRGKRTILGGRGPVRSVLYMGTLAAIRYNPVIQVFYQRLFEAGKPRKVAITACMRKLLVILNTMIKNGTSWQHQPA

SEQ ID NO: 302740 - protein, 347 aa, unidentified
MEAIVRIGLDTSKSVFQLHGVDGMEQPVLRRKLRRGQVLAFFGRLPPTLIAMEACGASHYWARELQSLGHEVAMIPPQYVKPYVQRGKSDAADAEAICEAASRPKLRKNLVPIKSPEQQGAQMLTRVRNQFIGRRTQLANSIRGYAAEFGFTAPKGLSRLPQLLIDIRADATVPDLAMELIEALAAELARVDDQIVTLDKKLMQLHRSNEMSRRLATIPGIGPIGATLLSIKVVDARGFKSARNFAAWLGLTPKNHSTAGKNRLGVITRAGDGMLRTVLVAGATAVIADMRRRGSRPWSWLKDMIAHKPPKLVAIALANKLARIAWKLMVSGERYRPASAVPMPTPT

SEQ ID NO: 302741 - protein, 334 aa, unidentified
MKQVNDVGVDVDSKELVCALHCSGQGAALTVFANTAAGHKKFVRWATKGGRSARVCLEATGIYSLQFALALHAAKRVELMVVNPRAIKDFARACMQRGKTDALDAAVIRDFLQRMPFTPWQPPAPEILELQAINRRIDQLHTELTREKNRRHAADFAGAIAKTIAQDIEVNIRHLEGRLERMHQSALRLVRGVPALAAKLAHLVSTKGIGETSAMRLLAELLVLPHDLTAPQWVAHAGLDPRPYESGTSIQRPRRISKVGNRHLRAALYMPALVAIRHQPNVRAFYSKLVAAGKRPMQAVVAVMRKLLHAIWGMLKHDQNFDGNKFFKLAEHTS

SEQ ID NO: 302742 - protein, 421 aa, unidentified
MALCPHHWKIGETICNDPQVCRIVDLPVYYELKTNNGNRDYRIQIGGHYMNYNTVYVGMDVHKESFTLCSCKYEDEKASHYQRTPASYKNVLRYLAFLRTIYGEDTRFVCGYEAGCLGYSLYHQLENFNVECVILAPTTMLEQRSKRRIKTDKRDAEIIARSLAQHNYSPVHIPTETDNQTKEFIRMRDDHKAELKKIKQQILSFCLRQGYQYDGSGNWTAKHVKWLRSLKPAGLYKEILDEYLLTYTILTDKLNRLDQRIEELASKEEYTESVSKLTCFLGIKTHTALSVIVEVGDFQRFVSARKFAGYLGLVPGQHSSGDDRNGLGITKAGNTHVRRLLVESAQSYTRGKIGYKSRVLRSRQAGNSPQVINYADRANERLRRRYYKMVLKDGKKYNIAKTAIARELACFIWGMMTDNIY

SEQ ID NO: 302743 - protein, 402 aa, unidentified
MNAVGIDVSKGKSMVAIMRPFGEIVSAPFEIKHTASDIHSLVELINSVEGESRIVMEHTGRYYEVLAHQLSETNLFVSAINPKLIKDFDNDSLRKVKSDKADAVKIARYALDKWQNLKQYSVMDELRNQLKTMNRQFGFYMKHKTAMKNNLIGILDQTYPGVNTYFDSPARSDGSQKWVDFASTYWHVDCVRKMSLNAFIDHYQNWCKRKKYNFSQSKAEEIYGKAKELVPVLPKDAITKLIIKQAVDQLNSASTTVESLRTLMNETASKLPEYPVVMAMKGVGTSLGPQLMAEIGNVSRFTHKSAITAFAGVDPGVNESGTYEQKSVPTSKRGSADLRKTLFQVMDVLIKTHPQDDPVYQFLDKKRAQGKPYYVYMTAGANKFLRIYYGRVKEYLASLPES

SEQ ID NO: 302744 - protein, 373 aa, unidentified
MSQDTTSPIWVGMDVHQNSITVAILEQGVQEPEVLRLPGEVVAVRRLFRRLSQRGAVRSCYEASGAGFVLQRALDQSGYICDVIAPSLIPRRPGDRRKNDRLDAIWLANHYRAGTLTKVAVPDQDTEAVRRLVRSRLATQQEITRLKHRVIRVLQVHGHRFVGTKSLWTIKHRVWLRDLQRQLIGPLQAVLTFELEHLEYLEAQRNNLDAMIAQIAQQEPWRAGVQGLCCFRGVKILTAMTLLTEIGDVKRFRSPRGLMAYTGLVPGERASGEKHHRGPITKSGNPHLRRVLGEAAWHNRHKVGADQKLQNRRHGQDPRVVAIAIKAQHRLYKRFWRLHERKGTYKAVIAVARELTGFLWAAMWAIADQEVAH

SEQ ID NO: 302745 - protein, 318 aa, unidentified
MSESVFVGIDVSKAQLQVASLPSTALQAIPAARQGTFANDGVGVRKLVTSLQTLQPALVVLEPTGGLEMPAAVALGAAGVPVAVINPRRIRDFARAEGRLAKTDALDAQVLARFAQAMRPEPRPLPEAGVRDLGGLVARRRQVVEMIVAESNRRPSAPPEVRAHINTHLAHLREERDWLDEQLAEAIRAHPVWRERARLLDSVKGVGPVLIATLIARLPELGALSRREIAALVGVAPFNCDSGKHQGKRKCWGGRADVRRVLYLATLSATRFNPVIRTFYQRLLAAGKPKKLALTACMRKLLAILTAMLRDGRCWQPA

SEQ ID NO: 302746 - protein, 427 aa, unidentified
MTTRNGDKQEPQFAAFLAIDWADQKHVWSLQSADSELREQGEVEQTPEAIAAWVAQMRQRFGHRPIAVAVEQTRGALVFLLSKYEQLHIFPVPPAMTANLRKAFYSSGAKDDPKDSDLLLDIVFLHREKLRRLSPDTEATRLIQNLVEERRKLVDEKTAQSNRLMAHLKIYFPQIPRLFEDVGSPLVCALLERWPSLEQLQKVRPAVLRNFFRQHRCRQELIESRLKAIGSALPALGDQAVVKAKMQVVKVTLQLIQILHQGIKALDRQIQEAAEAHPDFFIFDSLPGAGAVMAPRLLAAFGSQRERYESAEEMQTWSGIAPVLASSGKQQWVHFRYACPKFLRQTFHEWADYSIAQSEWARAYYELQCRRGKKHHAAVRALAFKWIRILYRCWKDRVAYDENIYLAALMKRKSPLAPAAMAAPVGL

SEQ ID NO: 302747 - protein, 377 aa, unidentified
MKAPSTRPAAVLGLDVGKSSHWACLIDSNGEVLASAPVRNREAELDALFASAPAGTLVVVDQFRNIGSLAVRRARAAGLGVAYLPGLAASRAAGLFAGEAKTDERDAAVIARTALGVPDSLSGVPGRGEALAAARALSSQRAPVVPCATRDQTRLRAVLLESCPALEAAVDLSDRRWLELLAGFGGAWGIARSGAGGPRAEAAGEAAAASTAPPPALVEAENRQVRFLAARISEALDEAGALEAETAALLEGDETYACLLTVPGIGPRTAAQLAVSVDIGRFPDHDHLASYCGIAPRVRSSGTSVRSVRASRRGDARLKSLLIFSCNSLVRSSGRYGEYYRACRARGMGHGRALKAVARKRLRAIYAVMRDRVPYRE

SEQ ID NO: 302748 - protein, 341 aa, unidentified
MAPQMSVLGIAIAKLVCHVVGMDDTGAVVLRKRIARSEWLAFIANVPPLRIGMEACGSAHYWARCVREHGHDVRLIAPQCIKAYVKSPKHDARDAEAICEAVTRPTRRFVPIKRVEQQDLQALHRVRERLIKARTALVNEIRGLLSEYGIILPSITKFRALIVDQLHKEQAKLTTLSAEVFWQLYDAFRALEKRLEYYDEKLAAIGQAHPACQRLQTIPGIGPVTATALIAAIGNVTQFKNGRQLAAWLGLVPREHSTGGQPRLLGISIRGDRYLRKLLVHGARATLRWVDTKGDDRSQWLRALIARRGKNRAAVALANKNARIVWALLAHNQEYRVRTVI

SEQ ID NO: 302749 - protein, 351 aa, unidentified
MPRMSTVHAGTTIGIDMGKNTLHMVGLDSRGAIVLREKVSRGRIALRLANLPACLIGIEAGLATHYVARELAALGHDVKQVPPTYAKPFRQGHKNDFRDAQAVAEAVQRPTTRFVPAKTDEQLDLQALHRVRSRLVSERTAVTNQIRGFLLERGIIVRQGLRFLRQALPDILAKRTDVLSPRMVRIVVDLASDWRQLDERIEAVTDEIETLAKSDDGCRRVMTVPGIGPIISSAMVAAIGNGAAFAKGRDFSAWIGLVPKQMSTGDRTILGRITKRGNGYLRTLFVQAARVILLRPASWPKHGFGVWLARAAQRLHRNVLAAALANKLARIAWTVLAQERSYEARVAVAPS

SEQ ID NO: 302750 - protein, 342 aa, unidentified
MYYVGMDCHITTLDFAVVNESGQLIKTKSVATGVNSFLEFVKTLPQPRTIYMEEGTLAGWALETCIRYKEKLVITDPMKNRWIGSSGQKSDPLDALKLAQLARGGYIKEIHHSVGQRQRFRELMEAYYDTVKDTVRIKNRIKAKFRQNGIRCTGATVYSKAYREEWKERLPQETTLRLIVDGLWRQLDQFERTAKEILVAARAQSKQYHEIKYFKAIPGIGFINAATISAILETPHRFATKRKVWMYAGLGLTKKSSGGKVYSEKLTRNYNHLLKYTTKQAAEVAIRATDNPFRQKFLNMTLIHGIAPHRAKLTIARDILATMWAMWRKGEKYNPQIRKAAM

SEQ ID NO: 302751 - protein, 348 aa, unidentified
MLADQLDYVVGVDPHRDSHALAVVHVVSGVVVFEATVIASSDGYAHALKLVDQHATGRRAFAVEGTGSFGAGLTRFLTVRGEQVLEVGRLRRERGSGGKTDALDAVRAARSVLTSERPATPRAGGERQALQALVAAREGAVNAKRAGLCQLRDLLITTPEPLRSELRPLTRARLLQRLAATRPGGGRDPELRGSMLALRSIARRVLQLTAEERELAREIEALTRRLAPQLLDQPGVGPHAAAQLVLSWLHRGRIGSEAAFARLAGAAPIPASSGQTVRYRLDRSGDRKLNRALHMILVTRKRTHPATIAYIERRLQEGKTRREANRSLKRYLARSFYRLLERGAPLAT

SEQ ID NO: 302752 - protein, 391 aa, unidentified
MLWANGQGRKRKEKRVFGTVTRELLALTDWLRACGVTHVAMESTGVYWKPVWNLLEGQFEVLLVNAQHIKAVPGRKTDQKDSEWIADLLQHGLRRGSFVPPRATRELRDLTRYRVSLAQECNRIANRIQKVLEDANIKLASVATDALGASGRAMLEVLIAGQQDSGQLAEMSKGLLRNKIPELRQALEGRVTERHRFLLRQLLDHLKFTEGKRGEIEAEIDRRLRPFEEKVARWCTIPGVERVTAWGLLAEIGFKMEQFPTSAHLASWAGLCPGSFQSAGKRLSGRTRKGSAALRRCLCQAGWAVSTKRDNYLSALYRRWAARRGGKRAVIAVAHAILVMAFHLLKRKQDYREAGADYFDRLHADGLRRSLLRRLERLGHKVTLEPLAQPA

SEQ ID NO: 302753 - protein, 328 aa, unidentified
MSKHSIACAGIDTGKHKLDVALPKRVKEVQVDNTPDGHVALSTWLRQQGVDRVGIEASGGYEQEIVAHLRRDGFVVIVLQPTQVRAYAKFLLQRAKNDKIDAGLIAACTAATEKIHVPPDPRLAPFAEHLTLIEQITQDIACCKTRRETCRAPRIRQFWKEEIARSTRLLNSELKTLATAIRQHRDLAERLDLIVSVDGVGLRTAVAILVRMPEIGRVTREHAASLAGLAPFDDDSADRIGARHIRDGRTRLRASLYAAALPAAFRWNTHLMALYRRLTAAGKPHKVALIACARKLLIFANTVVERGTPWVAEQPIPSNLACTPRHAT

SEQ ID NO: 302754 - protein, 430 aa, unidentified
MPYRISGIDVHKKMLAVVVSDVEVDGEYRFERRMFGSNPEQLRSLAAWLLEQEVEEVVMESTAQYWKPVWGALERYWKPIRQKREGAARRSGTLHLAQAQSNRGRRGRKRDFPDAERLVKRLVARELILSFVPDAEQRLWRTVTHKKYQLRCSRVRLQNQLESLLEEAHIKLSSLVSDLLGLSAQRMLKALADGETNPAALAALADERLRATPEQLCDALGACTELNVVYRRLLKMALQELRLIDEQIGELDKEMAGLLSEHQDAVERLAEVPGLGVDSAQQIIAEVGSTAATFPSKKCLSSWVGACPGDDESAGVNYSHRSPKGNCHMRRLLNQAANAAARTKGSIFEIVYRRSVPRLGHNQAIGAIAHRQCRLIWLILHQGVRYEERGPAVTKRSKQLRTWKMLRQLRRLGYRIEAPNPQQLSQAQAR

SEQ ID NO: 302755 - protein, 369 aa, unidentified
MKQLITYIGLDVHKETIAVALAEAGKRSEVREYGKIANTPAAVKALVAKLARNGHELRFCYEAGPCGYGIQRQLTASQHDCIVVAPSLIPRRPGERIKTDRRDAINLAKLHRAGELTPVWVPDAAHEAIRDLVRARLAAVRTLRQARQQLSGFLLRHGHHYNRPAWTLMHRRWLAGLRFEHAAHHIVLEDCIAAIEAATARRDRLEAHIAAALPDWSLAMVVRALQALRGMALVAAATLVAELGDITRFANPRQLMAYLGLVPSEHSSGGTRRQGGITKAGNGAARRMLIEAAWSYRFPARISREQLLRQEGLAKPIRDTAWKAQERLCRRYRKLARAGKPPTVVVAAIARELAGFVWAIARQARPTGA

SEQ ID NO: 302756 - protein, 416 aa, unidentified
MSQTTSGSSQEDAPIRYICGIDVGSQSCSGCVCRPDKSVVVKPVTFANAKDGWEVLFEKLTRLDAVPKQILIGMEATSLYGENLYQEAQARGYQLCLLHPGQTHQFHRQQGLRAKTDRLDAMTIAKVLLSGEARAGYVPSEQITTYRELVRLHTRLSDEAASYQNEIQILVVVLFPEFTQVFADPCLPSALAVLKAYPSAHDVAAAGVEPITHLLRTQTSGHFGRPTARKLVELAHSSVSSNRALSGRSTSLRILCDQLEHTQANLARLQTELEQLMAHDPGVKSLEQIPEFGPKTVAVLRAELGDVNRFSRTDQVIAYGGMDIEIKESGQWKGKAKLSKRGSGLVRRVLYLAAIRSIHLEGSAFGAYYRRLVQRGLRKGSALMAVMRKMLAVAAHLLKHEEESYDPSKVYAGDAA

SEQ ID NO: 302757 - protein, 387 aa, unidentified
MIAVGIDIAKRTHEACVMGQDGRQIGKGRRFHNTRRGVQALLDDLQQLREPATIGLEATGHYWLALHEQLVQAGHAVQVLNPLQTHAYRKTTIRKVKNDRKDAWLIADVVRIGRGRAAYVPDETILQLRELTRFRWGLVDQVGDAKRRALTILDRVFPEYERLFSDVFIKSSRALLLRATTAAEFADADLDELTSVLKQTSRNRFGREKAEAVQAAARDSLGLAKLGGVASFELRALLEQIAFLEQQVAAVEQQVERLLATLEQHVTEIKGIGPVLAASLIAEIGDVHRFRRFESLVAYSGIDPTVFASGEFTATETHMSKRGSPHLRRALWLAAVSASTCNPDLAAYLQRRLEQGKPWGTAMGAVARKLLSRIYVILKDNRPYEVR

SEQ ID NO: 302758 - protein, 355 aa, unidentified
MNKRTPVEAAELAIDLAKNVFDVVAADGRGQELWHRCLHSRRAFEMFLNGLKAPLWVGMEAGPGAQAWGRLLQARGIRVKILPARAVKAHAHRMKNDLNDARAILRAMHDEDIHPVPVKTREQLALQMHHRVRAGWVRRRTAACNQLRALLLEQGLAAGRGWKALKAMVDRVLGGEWPMPEGVVALVEACVSEWRGLTERIDAATARLTRLARCDETAQRLCTIPGVGPLTATAVVGKGLDPAQFKNSRRCGAYLGLVPEQYGTGGRVVLGKMSRRGDAYLRSLFVEGAQSVVKQARRHPEATDVLTCRIRRWIERHGGKGAAVRLANHNVRVVWALLERGGTYQLSASKAPVMA

SEQ ID NO: 302759 - protein, 414 aa, unidentified
MKLFVGIDVSSEELEACFMDHEGDTLETLKVDNNLHGASYLRDRIVTVADKLAVSEIHIGLEATSVYSWHPAMYLHEDAALQERKTKVFTINPKLINKFREAYADLDKTDRIDAWIIADRLRFGRLTTTIVMQEQYIALQRLTRMRFHMVHNLTREKQYFLQNLFYKCNAFRSEVDSSVFGHAIMEMLSESYSLDEIANMEVADLADYLKDKGRNRFPDPENVARCIQKAARASYRLSKVVEDSIDLVLGTSIQAIRSITNQLKELDKAIERILAGIPGAQCLRSIPGIDRVYAAGMLAEIGDIERFKDQAALAKYAGLTWRKHQSGPFEAEDTKRIRSGNRFFRYYLVEAANSVKNHDQEFGNYYRKKHKEVPKHQHKRALVLTARKLVRVVDVLLRNGQLYTPGRKVNTANH

SEQ ID NO: 302760 - protein, 362 aa, unidentified
MAIVNSIVKNYTKIIAIDTAKNSFQVCVGRTDGEGKVKQYKFSRSKFHDGIVKLGVDGSAIVMEACATSHNWGRLFQKDGFTVLLVAPQHAKKYLKNTRMKNDANDAEAIYVCSLQHNTRFIKVKTLEDSAIASLHTNRHACVKNMVEAGNRMRGCAAEFGIVVAKGHSHIKDLLAIIDSPEKMATLNIPDIAQWNLTKLAETYRHAQKMLDEVTEMIVGYGETSALIQCAMSCPGIGPITASALVAKISDGSAFDNGRQLAAFLGLVPSQNSTGGKSTLGKISKTGDRYLRALLCQCAHSIIRFSEHRTKECKNTQLDRFVMRLKANHKAGCNIAIALANKMARIVWALLKRGVKFETKVA

SEQ ID NO: 302761 - protein, 418 aa, unidentified
MGKRKNRVCGADVHKDIIVATILNSDDTEFQEKFGTTTVELGRFRDWLIAHNCEQVAFEATGVYWFPVYDALSPTIDTIVANPWMIKGIPRNKSDTLDSKWIAGNCLDGKIKRSRVLPKDCRDLRTLTRARSAYIKTRTQLRNRIHKYLALCGITLSSYISDIFGKSGRHILDGLIESKDIDTILDSIPSGKVKKKRELINASLGKGLDGVSRMLVKDTLELLDHLEEKVNDTSLEILGRLQERAKDLAIVMSVPGIGFVSASIILAEIGDYHDFQTSEQLVKWCGLAPGLNESAGKKSPCGITKQGSKSLRTILVEIAQVVAKMSKNKLSRFFHRLRTRKNYNVAITALARKLISIIFHLLVNQELYQENNYTQAKTKPIKKDLLCLSKEEQLKDGVAAIVDAFYHLKKKSSLEGGG

SEQ ID NO: 302762 - protein, 402 aa, unidentified
MTYDYVIGMDACKYFHHACVLDIDGTQVLSKRINQNEQSLRALFSAFSAYDHKVLVVVDQPNNIGRLTVAVAQDIGIDVRYLPGLAMRQLSRIHAGNAKTDIRDAYIIAHAAKNLPESPRSVDRVEEAFLQLKVLNDIDEDLARSYTRLINQIRSALVGCYPQFEQALRGQIIHRKWVLHLLARYGGPTKIKRLGKAKAAAFARRYKARNPEPVLDAIFAAISEQTVTIAGAHYAEMGVAMSAKDALLKLEHRQQIEKEVIELINDIPHTQFLLSMPGIGPKTAAQILMTAGDMSDFPSAGHLASYAGLSPRTNQSGTSIMSNSLNRAGNKKLKNALWQSSFASIRFHERSRQFYERKRREGKRHNAAVVALARRRLNVLYAMMRNHEHYHDPAPSQEDLAA

SEQ ID NO: 302763 - protein, 373 aa, unidentified
MSNVQRDFAKGKPIYVGIDVHKRDWVVTVLCQGEEIYHATVVPDPAALVRLLKRFEASEVHTVYEAGPTGYWLHDALVEAGFDSTVTPPSLVPRIGGRVKTDRRDSKKLASMLAGGFLRRIHVLTGEERAHRQFLRTRNQIERHRRQTQNQIKSLLLFHGKRAPATQRERWSEAHVRWIETLSWDHQALKTSIDAMLTMYRNLTEQYKQLTHEIEAFALTEKYRERAHLLTQIPGIGIFTAMAILIELQNIERFRRADQLASFLGLTPSQHSSGERIRMGHITRCGNYQVRTRLVESSWTLIRYDTGARATYERIKHQTGSGRKAITAIARRLALRIRRVLLDKAPYRLSDGGHLATGRDKRGEAKRFILRRV

SEQ ID NO: 302764 - protein, 401 aa, unidentified
MPFHAGLDWGGASHSVCIIDGSGQLVAREEVRRDATGLAALLARLRAIAAPAELPIAIERPTGLLVDTLVEAGHKVIPIHPNVVKACRPRYRAASGKSDPGDAYMLADILRTDGHRFRPLTPASDDIRALRALVRGRDDLVAQRLALANQLRSLLDSFWPGAGAIFAAIDSPIAIAFVRRYPTPDSAARLGEKRLAGFLAQHSYCGRRSSAELLARLRAAPNGLAQEAEADAKGELVRALAASLDVLVGEIARLSARIEHAVAQLSDGRIVMSFPRAGRICAAQILAELGDVRERFLTEDQLAAEAGVAPVTHASGKSRGVTFRWACNHRLRQAVVCFADNSRHASPWAADIYARAKARGCRHQHATRILARAWIRVLWRAWRNHTPYDADLHVGATKIAA

SEQ ID NO: 302765 - protein, 394 aa, unidentified
MFFLGIDIGKRSHVASVMNEEGKVVIKGFSFPNSSEGGEKLLQKVTSISTVDQFKVGMEATGHYWLSLFSFLDEFNFNTHVINPIQTDGWRKGTEIRKRKNDIIDSVLIADLIRYGTFVETSLSDENIFSLKQLSRYRTYLVGTASDFKRKIIAVLDQVFPEYDTLFSKVGIFGKASKEVLLELSSPDAINHISAGTLADLLGEASRNRLGMKKAEELKTAASHSFGIKFAQEAFTFQLRSMIEQLKFLEKQITDTEKEIKKIMDDIDSVIETIPGIGPINGATILGEIGDINKFSSPAKLVAYAGIDASVRQSGEFEGTHNVMSKRGSPYLRKALFSAALVASRYDPVLKAFYDKKRSEGKHHLTALGAVSRKLCYIIYAILKKNEPYEVRLQ

SEQ ID NO: 302766 - protein, 432 aa, unidentified
MSRTCGATLAALHPTVESVGLVERVCAIDIGKAGLVACVRVSHDTTPGRRVQEVREYSTTTPALLGLADWLRCQQVELVAMEATSDYWKPVFYLLEAEGFACWLLNARHVKNVPGRPKTDKLDAVWLAKVVEAGMCRPSLVHPKPIRQLRDLTRYRRSLIRDQSREKQRLEKTLEDAQIKLDTVIANLHGVSGRQMLGALIAGERDPKTLAQLAHEVMRRKIPQLQQALSGRFEDHHAFLAAAMLRRIDGLAADIAELDTRIEQLITPFAAVVDQLDEIVGVGVRSAQEIIAETGVNMTAFPTAGHLVSWAKFAPIDNQSAGRKKTATTGKGNPWLAATLGESVAALARTNTFLGDRYRRLARRRGKKRAIVAVGNSLLTIIWHLLSDPDARYHDLGPDYHQSKINKQRRERDLIRQLEHLTGHTVTLTAVA

SEQ ID NO: 302767 - protein, 343 aa, unidentified
MQTITTVGLDIAKSVFQVHCVDADGKVALRRQLKRRYVVAFFQKLPPCLVGIEACASSHHWSRELQALGHTVRLMPPAYVKPYVKRQKNDAADAEAICEAVTRPNMRFVPTKTPEQQSCLTLHRTRHLFIRQQTAIINSIRAYLAEFGIVAPVGRNGVERLLEVVADAKDTRLPDIARACVAALGTQLLALKAQILAFDRRIMAWHRSNETSKRLDAIPGVGPALATALVASIADPKAFRSGRDFSAWIGLVPKQNSSGGKDKLGSISKQGDRYLRSLFTTGALAVIRYAKIHGTKRRPWLTALLARRPTKVAAIALANKIARMVWAMMTRGERYKEPVALAA

SEQ ID NO: 302768 - protein, 385 aa, unidentified
MPKLKDLSRSLITLEQDATLIAVIEMGQSSWLVAGIVPGIERQPLKKLGVDESALLKLLHRWREEAEKAGHRIKRIAVAFEAGRDGFWLARWLNAHDIKTHVIHASSVAVSREHRRAKTDRLDTELLKRSFLGWLRGERDHCKMVAIPTIKDEDAKRPNREHESLVGEQSRIINRMKATMARVGIRGFNPKLKKAAERLDGLRTPEGEPIPANTLAELRRDMVRRRLISDQIKQIEDARLGRLTQAPSDGPHAMVRLLARVIGVGVETADMLVHEILSRSMRDRRAVARYAGLTGSPDESGKKRRQKGLARSGNARVRRGMIQLAWRFLIFQKDSALAQWFRARTENARGARKTMIVALARKLLIALWRFVREGVVPDGVVLRPA

SEQ ID NO: 302769 - protein, 387 aa, unidentified
MHKAFDHPATPAAIRVDLGAIFVSLELGKSSWLITSLSPGSEKMSRHTVQGGDVAGLFACFTALRERARAREGRLFPLVVIQEAGLDGFWIDRVVNKEDWIESHVVDAASIAVSRKHRRAKTDRIDGEMLVRTLLAFKRGEARVCSMVRPPSREEEDRRRLGRERKVLVGERTRHINRVKGLLFGQGIRGYQPLRRDRRACLDELRTGDGYPLPKHLKSQIGRELDRIELLMEQIKAVEGERDELAQMSVNEHSPVAQLQGLKGIGAEFAAVLTQEGLFRHFNNRRQVAAYAGLAPSPWKSGSIDREQGVSKSGNPRLRTTMIQLAWLWLRYQPDTALAQWFHEHIGARSNRSRKTAIVALARKLLVALWKYVTSGVVIDGAVLAQR

SEQ ID NO: 302770 - protein, 340 aa, unidentified
MTITTVGIDLAKNVFAVHGVDQNGKTVLVKSRVTRAALPGLIAGLPPCVIGMEACSGAHYWARLFRQYGHEPRLMAAKFVSPYRMTGKSGKNDAADAQAICEAVRRPHMRFVPVKDESQQAMQCLHRTRQGFIEEKTATYNRLRGLISEFGVIAPQSTDALRRMVSVQKSSLPLQVQQCVDDLLEHVDRIEANIAEYDRILSRMAKTDHRSQRLMELKGVGPTTACALVACIGNAHDFKNGRQLAAWLGLTPSQYSSGGKSKLGRITKAGDSYLRTLLVQGARSILIGAEKRTDSFSRWVCSLVERRGYWRAVVAIAAKNARLCWASLHYGDDFRLYSAS

SEQ ID NO: 302771 - protein, 418 aa, unidentified
MQVETDEPEIIERVAALDIGKAEVVCCARVPGPGGRRMQEVRTVSTMTAALLALGDWLAGLGVTRVVMEATSDYWRAPFYLLEDRFETWLVNAKDVKHLPGRPKTDRLDAVWLCKVAERQMLRPSFVPPPAIRALRDLTRYRVDLLAERTAEKQRVEKLLEDALIKLSVVVSDPFGVSGRAIMAALIAGERDPAVLADLARGTLRSKTARLTEALTGRFTDHHAFLLAQMLRRVDAITADVATVQARIDAQLGELAPAVARLDAIPGVGPVAAQLILAEIGVDMTRFPTPAHLASWARFAPGVSESAGRKKGNAGTGHGNRYLARVLGEAAIGAARTDTFLGERYRRIARRRGKNRAIVAIGRSILVIVWVLLSDEQAQFVDLGADYYASRTNAERKVRQHVRELQELGYAVTLNPAA

SEQ ID NO: 302772 - protein, 314 aa, unidentified
MYENYLGVDLHLKRTYLVLMDAQGTMKERRALPTDSLGDYAAGLPDSTIAVLEATRNWQYAYDLLAEHVDQVELVHPKKVKAIASAKIKTDKIDAATLAHLARADLLPTAYAPPQHIRQGRALVRHRAKMVRDRARAKNRVHGLLAQKGIRSPVSDLFGKQGRAFLDEVASQLDSVSQAILADHLAIIDALSQRIEVSEEQITPFIEAHPELKANVALLSTIPGVATYSALLILTEVGDIHRFPDPKHLCSYAGLVPSTYQSGEVARHGRITKEGSPWLRWIMVEAAIHAGRCVLGSAATTRASKGVMVRRQLG

SEQ ID NO: 302773 - protein, 386 aa, unidentified
MRDVEHTEAAWTGAAVFVAMELSRSTWVLATQASPSGKTSSHRLAGGDTDGLLALLRRLAAREQGAAGEEVQVVLGYEAGYDGFWLHRRLTAEGISCWVMDPGSLQVNRRARRAKTDRLDAAMLLRALMAWHRGDRTACHMVQVPSVEREDARRTHRERQRLIAERVQHVNRIKGLLATQGLYEFLPLRRDRRERLDELRTGDGRALPPRLRQEIEREFRRLELVLEQIGAVEAERDAAVAAPAVDDADAAKVAMLARLGGIGTELATVLVREALYRPFANRKEVAAYAGLTPSPFASGDRHRDQGISKAGNPLLRKSTVELAWLWLRYQPDSALARWFTERVGDVRGRIRKITVVALARKLLVALWRHVTTGLLPEGARLKPAAT

SEQ ID NO: 302774 - protein, 319 aa, unidentified
MTQTNNNITTAGIDTSKLKLDVAVHGRTECWRVANALSGWRALVANLAKAGVTRVGIEATGGYERGVVEHLRAADFTVLVLQPIQVKAFGRVHLRRAKNDALDAELIAACTAAIDQPRIAPDPRLAELAGYLTFLEQLEEDIARFKTRLEHIDEPGLRRIVNSDIARLKARKAAQIRDIAKRLRAYSDLAKRLDLVLSIPGIGERTALALLIRMPELGRVSREEAAALAGLAPFDDDSGQHRGQRHIAGGRGRLRRSLFAAALPAAFRWNKALIVLYARLIAKGKAHNAVLIACARKLLIYANTVVQRGSPWTEKPISV

SEQ ID NO: 302775 - protein, 345 aa, unidentified
MSYYAGIDVSLEQSSVCVLDGEGKIIREAKVASEPEALIAWFGSLGLAMTRIGLEAGPLSQWLFAAMKQAGLPVELLETRHVRNAFKTMPVKTDRKDARGIAELMRMGWFRPVHCKSISAQETRAILTTRTLIEAKLRDVEMSLRGVLRGFGLKVGKTTPTNFAERIKQLVSEHSNLQVIADALLAVREVLLREFRSFEKRVRTMARHDERARLLMTTTGVGAVISLTYAAAIDDPARFKNSKQVGAHYGITPKRYQSGEIDYSGRISKIGDKSVRTALYQAAHIILTRPVKASALKSWAMQLAKRIGMAKAKVALARKLAVILHRMLVEGKPFDHKLPNQVAAA

SEQ ID NO: 302776 - protein, 389 aa, unidentified
MTKRKIETVNDLSRCLVALDMDATLIAVIEMSQSSWLVAGIVPGVERQPLKKLAIDEGALLNLLRRWRAEAEKEGHRITRIAVAFEADGFWLARWLAAQGVETHVIHASSVAVTREHRRAKTDRLDTELLKRGFLGWLRGERGHCKMVTVPTLADEDAKRPSRERETLVGEASRIITRVKAAFVRLGIRGFNPKLKTAAARLETLRTPAGEPIPPNTLAALKRDLERHRIVKQQIHEIEQTRLELLEQAPAEGRHAMVLLLARVIGIGVETADMLVQEVLSRNMRDRRAVARYAGLTGSPDESGAKRREKGLARSGNARVRRGMIQLAWRFLMFQKDSALAEWYRQRTANAPSARKTLVVALARKLLIALWRLARDGVVPEGVRLRPAA

SEQ ID NO: 302777 - protein, 267 aa, unidentified
MTHPVAASKAELPPASITIGIDVSKDHLDAARHPGGDTVRVANTRKGQTALLRWIGDIKAVARVVFEPTGPYHRTLEERLAAVGIPQVKVNPRQARRFAEATGKLAKTDRVDALMLARYGALLDPVARPVRTDLQNRLAELMAARRSLMRDRTATLNRLRTLTIGLLQRHARHRLRQIEAQVTSLDAATDALEAEDAHLSRRRDVLASIPGLGRVTAHALLADMPELGMMEEGQAAALAGLAPITRQSGTWRGRSFIVTGRLRPPYD

SEQ ID NO: 302778 - protein, 343 aa, unidentified
MQTITTIGLDIAKSVFQVHGVDAGGQVIVRRQLKRRYVLAFFQKLSPCLVGIEACASSHHWSRELQALGHTVRLIPPAYVKPYVKRQKNDAADAEAICEAVTRANMRFVPTKTPEQQSGLVLHRARHLFIRQQTAVINAIRAHLAEFGIVAPVGRHGVEELLNVVADPGDRRVPEIARACLLAFGAQLRRIKEQILEFDRLIRAWHRSNEMSMRLDEAPGVGPVLATALVAAVADPKSFRSGRNFSAWIGLVPKQHSSGGKNRLGNISKQGDRYLRGLFVAGALAVIRYAKIHGTKHRPWLTALLARRPTKVAAIALANKIARMVWAMMARGERYKEPVALAR

SEQ ID NO: 302779 - protein, 377 aa, unidentified
MTKKLDTTFIQVVHPVCCGLDVHKKKISACLITLDEHGQEQYDIEEFGTFTNDLLNMKEWLTNNGCPIIAMESTGVYWRPIHNVLEGFMEVILVNARHIKNVPGRKTDISDSKWLAGLLRHGLLRGSFIPPKEVRQWRELTRLRRTYTESLADYKRRIHKLFETANIKIDSVVSDLFGVTGRNLISLLCNESELSLENIRENAKGGLKSKFKELHSSIQGFFEDHHRFQLIGMMEVIAGFEKKIAETSERLDNLTAGHQDLLDRLDEIPGIDKKSAQSILSEIGVTLDEFICMGALASWAGLCPGNNESAGKRKSGRTSVRNHPFKTILIEVAWAAVKKKGSYYRAKYFKLKARRGPKKAIVAIARAATQNTPPVAT

SEQ ID NO: 302780 - protein, 370 aa, unidentified
MLDTTTFVGLDVHARSIKAVSLDVMTGEARCATFGYDAGAVAGWVRSVDPRARCVYESGVTGFDLQKRLSGLGVDCVVGAVSKMIKPSADRRRKNDRNDAEFLARMLSVGNVVEVWVPDDECEAARDLTRALEDARDDLSRAKQRLSKFLLRHGLAFDERTPTGRRKGNWTRAHWSWIESIRFAEGADNDVLAYYVDAVRRAAEEKARLEGLVEAEARKPRWRRRVDSLRCLKGVDTATAADLVFEAGEFSRFRNARSFAAWVGLTPSEHSSGESDRRGAITKAGNKHLRKALVEAAWHYLTCSGRPKGLAKGQAPDRVARRHAAKGVRRLAERREALLARGVHNNKANVATARELACWVWAVGLMAEEA

SEQ ID NO: 302781 - protein, 382 aa, unidentified
MQASTVVTPTVGHCGTIFVAIELSQKTWLVTLHSPDRDRISRHKLEGGDHAGLLALIERVQARAADKLGATPKVVSCYEAGYDGFWLHRLLTAAGIANFVFDPASIAVEQRSRRTKTDRIDGELLLRTLMAYLRGEPRVVRIVRVPSMAQEDARRASRERDRLVKEQTAHTNRIKALLRLQGMAVGYPRRRNWLHWLAQQRDWQGQPLSPHLLAEVTREQARLMLVREQLATLEQACATAAAAVPAPMAERQELLQRLKALGPAFATTLTNEVFYKDFRNRRQVGAYCGLTSSPWRSGGIDREQGISKAGNPRARLKAIELAWLWLRHQPESELSRWFRTRTANAGKRARRIAIVALARKLMVALWRYLTTGLVPAGATMKA

SEQ ID NO: 302782 - protein, 415 aa, unidentified
MQTLVERGCGLDVHQATVVACLLIGLTSGKVQKQMRTFGTTTRELLALRAWLLSQGCTHVAMESTGVYWKPVYAVLEAEGALEIVVANAQHVKKVPGRKTDVKDAEWIADLLCHGLLRSSFVPPKSIRELRDLTRYRRKLVESQAAERNRLLKLLETANIKLASVATDVFGVSGRLMLRALIEGRATTQEMAELAKGLLRKKIPQLETALEGKLEAHHRFLLKLQLERLEAAEKDLAVLQQRIQEKLQPYAAQLALLQEIPGVDWTLAAVIIAELGVDMKVFGNVTQLASWAGICPGSNESAGKRKSSRIPKGNVYLKTALVEAANAAARAKGTYLRDKFFRLKARRGYKRAAVAVAHKILVAIYHMFSHHVCYNELGDLYLDNLNKHHLTRNLVHRLERLGYTVTLEPKAAAAA

SEQ ID NO: 302783 - protein, 379 aa, unidentified
MAMACPDGMGASLPLRLALRPAKCQIADPVVNIEMETIMERTIIAVDIAKKVFQLHWVEMDTGCIERLQLKRAKMLEWFANRTAALVVMEACGGAHDWGRALMKLGHEVRLISPRKVRPFVQRNKTNAADAQAIWTACQQPGMRFVPVKSEAQQIVLSLHRLRAQLMKTRIMQTNALRGLLYEFGIVLPEGHAALLKALPEAMCDAKARLPAMLMDSLDEQLRRVQQLQADIGLIERRLSQQMREMPACKAVAEIPGVGLLTATAVVASMGAPTAFKDAREFAAWVGLVPRQTGTGGRIRQLGISKRGDAYLRTLLMHGARAVVIRSKDGPTWPWLTALLQRRPYSVAVAAVANKLARTIWAVLAHGQAWRPEAWQVMH

SEQ ID NO: 302784 - protein, 347 aa, unidentified
MRFYNQQHDYYCGIDLHARILYVCIVDSAGNTVLHKKIDANPDALLDVLAPFQDQIVVGVECMHCWYWVSDLCLDYAFDFVLGHALYMKAIHGGKTKNDRIDSYKIASLLRGGNFPLAYVYPKAMRATRDLLRRRTKIMRHGADLKAHVSNTFSQYNHPSPNLQLRYPYAREEVRNRFDKPAINRNIDLDLNVIAFYTKELASVEHFIEQNAKQHNPQDYQLLQTVPGIGRILALTILYEIGNIQRFPTVQQFASYSRLIKCKAESAGKQYGTCGNKIGNAHLKWAFSEAAVLYLRGNKKAKKYLNRLQKRMSKAKALSALAHKLGRCVYFMLRNKTVFDEQKFLPE

SEQ ID NO: 302785 - protein, 408 aa, unidentified
MSKTCGIDWSERHHDVAIVDDQARVVGRARVSDDAAGFTRLLELLAEHRDGEDGPIEIAIETDKGLFVAGLFAAGFTVFAINPRAVARYRERYGQAGGKSDPGDAGVLANILRTDRHVHRPLPADSELVRAVKTCARQHQEAIWARQQAMNRLRSLLHDYYPQALQAFPNLAHRAAASVLRAVPTPQTAQRLTLNRVVALLKKAGRRNDPGLAETIRTTLRAPALRQPAPIEHALGVAAVGLIDVITAMSDAITALEAELATVFDEHGQAAIITSQPGLGPVLGARVLGELGDDPHRFTDTAGLRSFAGTAPITRASGRSRVVTSRRICNRRLGDACHWWAFAAITKSPGARAHYDHRRAAGDTHNAALRNLANKLLAKLWHCLQTGTLYNEATAWPAPTDTTEQAAA

SEQ ID NO: 302786 - protein, 277 aa, unidentified
MSATLTGGVSFWGRPSCKTLRVLVSVLGKHSFHIHCQDKSGKALLRKKVARTKLIEFLAGCTSATVVMEASAGAHFMARRLADLVHEAKLISPQFVRPFVKSNRNDFVDAKAICEAEPRPSMRFVQPRTEAWQVMRALHRARESLLRDKVKTTNKMHAFLLEFGSSMPIGAAVIKQLSTVLAENELPHYLAQLLMRLHAHYLYLVEQITGPETALEQELNCDETGQRLQAISGVVPVTASVLPSQPGDGKQHACSRDFAASVGLVPRQYSTAEKIRF

SEQ ID NO: 302787 - protein, 343 aa, unidentified
MQTVTTIGLDIAKSVFQVHGVDAAGQVLIRRQLKRRYVLAFFQKLPACLVGIEACASSHYWSRELQALGHSVRLMPPAYVKPYVKRQKNDMADAEAICEAVTRANMRFVPTKTPEQQSGLMLHRTRHLLIRQQTSVINAIRAHLAEFGITAPVGRTGIEELLRVVADPSDKRVPELVRTCLAALGSQLLALKKQILQFDRMILAWHRSNQTSKRLNCIPGVGPLLATALTASVADAKSFRSGRNFSAWIGLVPKQHSSGGRERLGSISKQGDRYLRRLFVAGALAVIRYAKLHGTNHRPWLTALLARRPTKVAAIALANKLARMAWALMARGGRYNYPIALRP

SEQ ID NO: 302788 - protein, 388 aa, unidentified
MIYVGIDIAKLNHFASAISSDGEELIKPFKFTNDNDGFHLLISKLDLLDKDSLIIGLESTAHYSDNLVRYLVAKNYKVCVLNPIKTSTMRKNNIRKTKTDKVDTYIICKTLMMQESLRFVTFYDLDLMDLKALGRFRQKTIKQRTRLKIQLTSYVDEIFPELQYFFKSGLHQKSVYALLKEAPTPEAIASMHMTHLAHLLKVNSHGRFNKEMAQQLRVLAQKSVGASDSSLSIQVTHTIQQIELLDSQLERVEAEMTEIMKFNDSVIMTIPGIGYINGGMILGEIGDIHRFASPNKLLAYVGLDPSVYQSGSFQAKKTRMSKRGSKVLRYALVNAAHNVVKNNATFKAYYDAKMAEGRTHYNALGHCAGKLVRIIWKMMTDNLEFNLN

SEQ ID NO: 302789 - protein, 300 aa, unidentified
MNDMMIGVDLAKNVFQIHGALRTGEVQFRKKLTRQQFTAFMARQAPCLIIFEACGGAHYWAREMEAPGHEVKLIAPQYVRPFVKRQKNDAADAEAIVIAARQAEMRFVGPKTVEQQSRAAVFRGRERLVHQRTADVNALRALLYEHGYVFPVGMRYLDRMTALVDDDTSDLPALIREECQDLLAQIAEKTAHITERTAKLKALASQSDRARRLQTMPGVGPLTAIAVQAFGPDMAHFKTGRNFAAWLGLVPRQHSSGGKERLGRMTKAGQADIRRLLIIGAMSRLGWLGRRTIAQGNCPA

SEQ ID NO: 302790 - protein, 433 aa, unidentified
MPTTHPYDLVIGLDRSDRKADLHLIDTRTGNAQKHSLPTAPEELHDWLAGLRRDHPQERVAICLEQPAANRIFFLESYSWITLYPINPISLQKFREAFLTSRAKDDGKDAQYLAQLLLNHHDKLKPGQPDDAQTRQLQQLVSHRRAVVDERTGLTNRLKALLKQYFPQALDLCGEDLWRPLATAFLLKWPALQSLQKARKESLKQFYYLHGSRSQKLIEQRLERIDKAVPLTDEIALLQSYTLRVLLICRELQLLHKTIDQFDEQIATVFQQHADRPIFQALPGAGPVLAPRLLASMGSERERFARPQNLQSFSGVAPVTKQSGGKGHVHRRYSCPKFLKQSFHEYAKESIRHSRWAAAYYGQQRNRGASHHTAVRALAYKWQRIIWKCWQTQSIYKEQIYEAALKKNHSPLFDLLDQIELGKSPVKTDANKS

SEQ ID NO: 302791 - protein, 482 aa, unidentified
MKKRNIYSNRSQELLGLFEQAGNNSKVMCVPIDYAKKDHVVMFCNGYGDILRKPFAVKNSAVGMTYLLEQVNRSCHHRGIKNEHVFFGGEDVNSYAENFVNALRSKGWLVANVNAHDAKKQRENLQASTDRLDLMGIATMLLNRRANCMPAQSGVYRNLRTLVRHRKKLVKMKTEVRNRTHTIVDRLFPGFLNEKKSGINPFSKSSLSLMQDRFSAPQIQRRKRSTLVAQLKRLSTPNAEQIAAKLQTYAAQVLTPPDEHTATLQVSLSSHAKHYHCLLDSAEQLQREMALLLCQTQGAYLTSIKGIGIVLAAGVTAEIGNPYEQKPLNNLVSYAGIVPRVKQSGGPEGQPHAGRVSKRNNHILKDYVVQSAFHIGRYGPADLLADYKRREANGQHADFGIARRFLRMAVCLMRTSQIYLPPRLRNVKTKPQERAGYYLAVWPYLKDKWNKLGALKAAFAKDRPLGKWRYIIQELYDIKLSL

SEQ ID NO: 302792 - protein, 350 aa, unidentified
MRFYHVQPEQHYFCGIDLHTKAMYLCVLDQHGAIVLHKNIRTRPQAFLKAIAPYRDGLVVASECIFCWYCLADLCQSQGIDFVLGHALYMRAIHGGKTKNDKLDAEKIALLLRGGMLPQAYVYPQEKRATRDLLRRRSYLVRMRADLLGHVQLTRHQYNLSAFNKRITHKANREGIAERFNDEVVQHNVALDLELIDYLHEQIRPLELYLVRQAKVHDQQAFYLLRSVPGIGKVLALTILYEVDDIRRFKRVQQFCSYARLVKGQKVSAGKHLRTMGSKMGNRHLKWAFSEATVLFLRESERAKAYLARLESKHGKGKALSILSAKLGRAVYFMLLRKEPFDQQRFFAQA

SEQ ID NO: 302793 - protein, 373 aa, unidentified
MAIKVKPEEVIRHEEVYSVGLDVSQRSTSICVLDPNGRLVMEGQAKTNPFEIARYLQKRMEGPLKLGMETGSLAAWLYHGLRKMGLDITVMDAVHAHRALSLKRHKTDRNDARGLAEMVRLGSEWMKAVHIKEQASQELRVQLAARARLVKQKIDLENELCGLLKPFGFIVARGNVSADTFRDRVVDALCEAQDNGFHLRPLLMPLLDVHRLIAQHIAEADARLEVVAKAEPICRRLMTVPGVGPVTALAFRATIDDPTRFRSASDVAVYLGLTPRRYQSGEQDYHGRISKRGHSPTRLHLVQAATVLLVSVKRWSALKAWGVRLVNRIGFNKAKVAVARKLATVMYRIWRDQSEFRWGKAAMEPAASAAATS

SEQ ID NO: 302794 - protein, 373 aa, unidentified
MKSNLTHVAMDAHKKQHHVALADPRTGELRTFTVTNTARDVAKMVKRIKKEASGEVQFCYEAGVCGFVLKRRIEALGCPCSVIAPSLVLTRPGDRIKTDRRDAKKLLGQFMAGQLTEIYPPNEQQEAARDLTRCRESALENLQRIRHQLTKFLVRHGYIYRDGTPWTDRHIRWLRSLEFDLPDLRTVFEEYYTELQHCMQRLDSLNKQVHQLAERPEYHEMVGLLRCFRGIDTLAAITVLTEIFEFGRFSSPRGLMSYLGLVPSEFSSADKRRPGRITKTGNRRVRRLLTESAWHYRHLPTVSKTLQQRRHGQPQWAINMADQAMLRLSRRYRRLLARGKASSKVVIAVARELAGFLWAMLREFAIRREPQVT

SEQ ID NO: 302795 - protein, 392 aa, unidentified
MIYVGIDVAKDKHDCFAMNSDGEILIEKLTVQNNFDGFNSLFNSLSQFNESLENIKVGLEATGHYSNNILNFLTSKGFNVYVINPLQTNLYRKGQSLRKTKTDKLDARFIATMLITDNLKPYSNLSYHISELKSLVRHRFRLIQERSKFKTSLSRLVTLVFPELEKIVWSISQTSVLYLLNELPSAKDISECNLKHLTSLLEKYSKGKYSRAKAIEIRELARISIGTNSRSLSFELRQVIQTILFLQTQIDDIDKELKTIVDELDSPIMSIPGISYVSAAFILAEIGDINNFDSPAKLQAFAGLDPSTYQSGKYTATHSVMVKRGSKYLRWALLNATRLVCMRDKTFNDYKNSKLAEGKHYFVALSHTSKKLIRVIYYLLKTNKSYQLPKVA

SEQ ID NO: 302796 - protein, 441 aa, unidentified
MAMRKREEDEVFPNAAGIDVGGSSHWVAVPRQADDEPVREFGAMTDDLNAMADWLLACGVDTVALESTGVYWIPVYEVLERRGLVVWLVDARQMKYVPGRKSDVQDCQWLQKLMSLGLLRAAWRPGDEVCVVRAVVRQREVLLAEQASWVTRMQKALVQMNLQLTEVLTDVMGMTGQAIVRAIVAGERDPKVLARHRNGHVKASAADIERALTGNWREEHLFVLGQALAMVDSLAQRVLECDAKTEALLAPLGRHEVELGGPGKRRGKNSPGFDARTALARWAGVDLTRINGLAVTTVMTILSEIGPDLSRFANVKHFCSWLGLCPGTKVSGGKVLSARTRRSTNRVRQALKLAAMSLSRNDSALGAFYRRLCSRMDKPRANTAVAHKLARMVYFMLTRGEAFVDQGQQHYEEQQRQRSIDALMRRATALGFQITPAVQLA

SEQ ID NO: 302797 - protein, 377 aa, unidentified
MATTRTVLRDQLTAKPGDLYMSLELGDKHWHISIGGERRSVSHYIVEAGHTEEVADCIAKAAARLHTARVHSCYEAGRDGWWLHRWLTELGVDNIVVDPASIEVNRRARRAKTDRLDADKLLAMLVRHHRGERVWSVLREPSPSDEDARRAHRELQRLTHERIAHTNRISSLLVLHNLRPRIVIGGRDWPAWWNEHREQVPPTLRAELEREAVRLKVVKEQVRAIEAARARELAEGKQPLVAQLVRLRAIGAKGAWVLVKEVFGWRHFANRRELAGSLGLVPTPYASGDSEIEQGISKAGNRRVRALLVELAWSWSRLQPGSALTQWFNRRFAGAGKRMRRVGIVALARRLAIALWRYLQTGEIPIGARLKPAGSGI

SEQ ID NO: 302798 - protein, 346 aa, unidentified
MLYVGLDVHQKRSSICILDDNGKTVKQDLVKGPWPAVIDRLRKIDQPFGLCYEASCGYGYLHDRISSLPMASHVAVAHPGQLRLIFKSKKKHDRVDAAKIGKLLYLDEVPRVHVPGVDIRSWRKLIEFRQKLLAKRVAAKNQVRAVLRGNAIAASRGLWTKKSLAWLMTLDLPAGEKLAMEMAIEEVKELSEKIKRVEKELAKIASNHLGVTLLRTIPGIGIRTAEAFCAYVDDIKRFARSRQVGCYFGLVPCMDSSAGKHRFGHITKDGPSTVRKLLCEAAWVAVKKSAAIKERFERIVHGDPDRRKIAIVAIAHHLCRVMAAMLRSGEVWREEVAAGKKTLARQ

SEQ ID NO: 302799 - protein, 375 aa, unidentified
METIYIGVDFHARQQTICYLTTETGEFVTHELKHQYKDEVRTFYAQFVGRVIVGLEASGYSPWFEQLLEDLGHEVWLGDATEIRRRARWRQKNDRRDAELILDLLIHDEFPRLHRPSLASREILRMLRYRHKLVKMRTIIKNSLQALALQSGLSRRTKLFTKAGRQELRAAPMSPVMKQQQEQWLELLVVLNQRIVETMLWLKQQSLNDARIRLLRTHPGIGLLTSLGLVHTLAPVSRFRNQRKVTAYAGLEPMERSSAERKRFLGISKAGSRLLRFLVIEAAHTAVKKDDDLKRFYRRLQERRGRPKAKVAVARKLLVRSFIMLRDQIDYAEFQRRAVAARLARQSSRPSVPDRLIGQPASSESQECVRSESKK

SEQ ID NO: 302800 - protein, 349 aa, unidentified
MVVIGVDAHKRSHTAVAVDGTGRKLAERTVEVSRAGHLELVRWSRRWRDRTWALEDCRHLTRRLETDLLGLGERVVRVPPKLMAGARRSAREPGKSDPLDALSVARAALREPDLPAARLDGIERELRLLVDHREDLVVDRTQHQERLRWFLVELGIDEPPARSLNRTVVLDRLAAELASRSEPVVRFARDLVERIRDLTRAIDALEREIHVLAERVAPTLLALTGCGHLTAAKLVGQTGGIGRFRSRAAFARHNGTAPVPVWSGNVVRHRLNRGGDRQLNVALHRIAITQLQRPGPGAEHLAKRIAAGDTKTETIRALRRRLSDEVFRRLTLDESQRRQPETALTAAAA

SEQ ID NO: 302801 - protein, 343 aa, unidentified
MQAVTTIGLDIAKSVFQIHGVDAAGNVIVRRQLKRRYVLLFFQKLPPCLVGIEACASSHHWSRELQALGHTVRLMPPAYVKPYVKRQKNDAADAEAICEAVTRANMRFVATKTPEQQSCLMLHRTRHLFIRQQTSVINAIRAHLAEFGIVAPVGRNGVEQLLDVAADASDTRLPEAARACLLALGAQLRTLKAQILNFDRQIMAWHRSSEASKRLDDIPGVGPALATALVASVADPKAFRSGRDFSAWIGLVPKQHSSGGKDKLGSISKQGDRYLRSLFTAGALAVIRYAKIHGTKHRPWLTALLARRPTKVVAIALANKIARMAWAMMARGDRYKEPVALAA

SEQ ID NO: 302802 - protein, 317 aa, unidentified
MTNVTFPQLIQRGCGIDVHLKVVVATIDGVGIQKETRSFNTFTSCLTEMKEWLLANGITHVAMESTGVYWKPVMRVLEEGIPNVWIVNARHIKNVPGHKTDKMDSEWICKLLLAGLLKPSYIPPKEQRQLRDLTRYRNKLIQTIAAEKNRMMRVLEDCNIKLSSVVANTSGVTATALIDMLCDGRKLTMADIESVYHKKLSASPQELLEACTGFVEEHHVYMLQMIRKSIAQTQGLVDELSKRIKDILIKYDNVLEALKEIPGFNTKVVEDLISEIGLDMSAFPSEKHLASWAGICPGNNESAGKKKAEESLMVINK

SEQ ID NO: 302803 - protein, 408 aa, unidentified
MELTPMHKRVIALDVHQAKITACAVVEHDDGRVEVTKRDFGAFRRDRRALATWALEVRPEVVVMESTGVYWKSPFAALEAAGIVAWVVNARHVKAVPGRKTDMADAQWLATLARAGLLRASFIPPRDLRELRLVARQRQKLVGMCSAEKNRLHKVLVDAGIRINVLVTDIHGASARAMIKALLQDKPLHEVLDLKGRLRASREDLFEALSTEQLSTVHRFVAGEILQHIEDIEQRIARLDRYLLDALVPWQPQLQLLQTLPGIDLQGAAMLLVEIGADMSVFGSAERLASWVGICPGNNESAGKRKSGRIRKGNAWVRRLLCEFAQAAARTRCAFKDKFQALAIRKGHKKSVVALAHKMLRTVYAMLNSGTFYQDRVVDYEALNVARNAPRWLKMLQKHGFIAAPTTA

SEQ ID NO: 302804 - protein, 380 aa, unidentified
MRAVCGLDVHKDSVFLCILCETGEIFEKVYGVLTHELQSMCLEMKSRGVTEVSMESTSVYWIPIWRVLEPHFRLKLVNPYFIRQLPGRKSDVKDAQWIAECTLKELIRGSFVPPELIQQLRQYDRRIFDLDAEIVRKLSKLDAVMQRCNIRLSNYVSNTDTKSYKEVVRKLCEGVTAPEELIKVIFGRIINRHGRETILAALTGVVSDAEKDAMRQLRDELDLAEKHKQECQDRMLHICKTYYPNELKRLMTIPGIKERAATSLIAEIGVDMTKFQTAAHLASWSGLKPRNDESNKKIKSRRITHGNVFLRKTIIECAWGASRTRDCFFSRFSFHQTQVRKKNKMKVLVAVARKLLIAVWQCSGNSGLLSGNSQSGRHDL

SEQ ID NO: 302805 - protein, 464 aa, unidentified
MKSPSPCVGRAADRLLVGDDVSSVRNDVRFLSATGDVLLGHQPFANDVPGYHALRECVLELLEQQGSAGVDFAGEATGWYWFHTFYALAHDPELAHVDVRLNLYNPRLTHAFKKALGSLEHSDPLDAHVIAERLRFARTQHAPVLDDVWLGRRLLTRHYFHLSHALAAEKTYFSAFLFLKASAYRQLKPFSEVFGTTSTAILTQYSTIQELAALPILELEARLRDLSNNHLPDVEKNATRLQAVATHSFPVPPGMVAPLNLLLSSTLDHIRFLEAQLDTLQTAIAEAFQGVPELDWLMSIPGIGLIIAACLLAEISPWERFLEGDLIDRRTGRRRPKNARDAEAALAKWVGLWWPRNQSGAFTGEITRLRNEGNRYARYALTQAANCLKEHSAEYAAFYARKFAESTTHAHKRALVLTARKAIGLFVALLHTGQSYRVPEPYRNVLSPHQARQLADDPTSPDDT

SEQ ID NO: 302806 - protein, 349 aa, unidentified
MLADELDYVVGVDTHRDEHVLAVLAAPVGAVIARYAIGANPRGYGEALRFVEQYTGGTRAWAVEGAGHYGAGLTRFLVGHGETVLEISRPPRAERRLRGKDDSLDAVSTARAALASETLALPRAGQRREALRLLLIARRSAVDVRREALVQLRSVIVTAPDRLREELRGLPAGRLLERCRRLRRTRTMSADELATRLVLRSLARRVLAATAEADELEAEILADVRALAPQLLDEPGVGPIVAAQLIVAWSHRGRLRSEAAFARLAGVAPLPASSGQTTRHRLSRGGDRQLNRALHTIVLHRRQHDPATKDYIARRIAEGKTRRDATRLLKRYLARHLYRVLDGQELQMT

SEQ ID NO: 302807 - protein, 400 aa, unidentified
MNAVGIDVSKGKSTVAVLRPFGEVAASPFDVIHNDSDLKQLAELIKALPGESKVVMEYTGTYFEPIAQFLHNNGIFVSVVNALLVHDYGGNSLRKVKTDKKDALKLASYALDRWTELDEYIPADEQRKTLKLLNRQYNQSIKIQTMMKNNLISLTDSVFPSINKLFTSPERQSDCREKWVDFLKAFPHRDCVAKLYLSVFKTKYKSWCSRNKYKYSEAKAEEIHAYAKSVIAVLPLNDNVKLLVTQAVSQLNTILETLSSIRDEMNRIASSLPEYDTVMSMFGVGKVYGPQLIAEIGDTRRFRNRRAVTAFAGLDAPPYQSGQLDVSSRHISKRGSAALRKVLFQITEVYILNKPEDEPVYQFIDKKRSEGKHYYSYRIAAANKFLRIYYAKVNQVLNEQ

SEQ ID NO: 302808 - protein, 369 aa, unidentified
MIIIGADYHPGFQQIAFVDTETGDCGEQRLQHREETEKFYRDLAAQGMKVRVGMDASGHARWFERLLAELNIELWIGDAAEIRTKRVRKRKTDREDARLLLRLVQEDRFPQIWVASWENRDLRQLLWHRHRMVQARTRLMNQLQAVALNEGLRCKKKLWREHGREQLESFRLARSFRLAPWASRRREDLLKLLDQLNPTIAELTQAIEQEAENCPEARRLMTHPGVGALTALAFVLIIGRAERFQCGKQIASYLGLVPMEDSSGERRRLGHITKQGNALLRFLLVEAAQVTVRTIPQWRSKYFHLAMRRGRKIAKVAMARKLAVRLFWMMRQEWNYEQVQKFGSHVGQPENRHGVQENTELLTGASRSS

SEQ ID NO: 302809 - protein, 357 aa, unidentified
MPRTSAKQVTAVTVVGIDIGKNVFHLIGLDKHGRIALRAKLTRGQLDAQFANMPPCLVGMEACNGAHHLSRKLNRLGHDARIMPAQYVKAFLKGNKNDFRDAEAIAEAVQRPTMKFVTTKTEDQLDLQALHRVRARLVRERTAVINEIRAFLLERGIAVAQGYQRLRKALPDILATREDVLSLRMRHTIEELAEDWRYLDTRIERVSIAIQALAEDGGPCERLMTMPGVAHIISTATVAAIGDGRTFERGRDFAAWLGLVPRQISTGDRTILGKISKRGNPYLRTLYCQAARVVLVKSQLWERYGLKAWIESKRKRLHHNKLAIALANKLARIAWALLTKGRDYEVTRYDPTSPQPA

SEQ ID NO: 302810 - protein, 371 aa, unidentified
MNFIGIDLHTNRFTCCYRDEQPSVENSKKEQVTRTYALNESDLALFYQTLTKDTYVLVEATITTFSFVRLFKDKVKKVIIANTYELKQISLARCKTDKIDADKLCRILKAQIMSGELLVSPVDLPPKRIQDLRSLFSTYRLYKKQNVQLKNRIHSLLKEQLLGFTQEEIFGKKSREKIRTILPRTPMNFQVNQLLNRLERDEADVDELEKQVLIYAEPFMKQIEILTSMKGVSVFIAIAIITDITDVSRFKNSKAFTSYLRSAPRVSSSNTSVSIRGINKKGRKLAATLLTQSLNHVLNSSSKLQRWYERLCEYKKPGLVRTGLRRRVLAEIYQMLKKGEYHYGRDEKNHDNKMSQYRNFLNKRKFLLEIA

SEQ ID NO: 302811 - protein, 409 aa, unidentified
MRLFVGLDVSSFDMKVYFLNGEGEKLDSFSVSNDLPGAQVLKERLLQCTTNQEVETLKIGLESTSVYSFHPSMFLHHDEDLKRFGTKVFLLNPKQVANFKKSYSDMNKTDEIDAFVIADYLRFGRNQMSIVKESQYVALQQLTRARYQLVRMLTKEKQHFLQHLSYKCNTFSQEVDSSIFGNAMMELFLEKFSLEELADMPLEELAEFLQEKSKNRFGDPKCVASTIQKAVRTSYRLDKVVEDSIDILLGTSIEIIRTYQRQIKELEKSIKRIMAGLTQTLESIPGIGPIYAAGIIAEIGQIERFDDETKIAKYAGLYWRTYQSGRFTAENTSLSRNGNHYLRYYLVEAANSVRKHVLEYQEYYAKKYNEVPKHQHKRALVLTARKFVRLVDALLRNHQLFTPERCVKV

SEQ ID NO: 302812 - protein, 348 aa, unidentified
MFAIINLKDKFMKTSGKEFNFFVGIDVSKLTLDVTILKPQSGKLHHKVIDNDARGYLRLRNWLVSEHGVEFNRALICMEHTGLYTRSLEQFLHANNVYVWKESSLHIKKSLGLTRGKSDKIDSMRIAEYAYRFFDKADINGYCPTSVQALRDLLTTRERLNKALKSIRVSINELKKVAIKEAVDLETYQLSAIRGLKESIREVEEAMFETVERDSQLSKQCEMAISIPGVGKILAIKLMVYTQVFTRFESVRQLACYCGVAPFEHRSGTSINGKTGVSKFANMDLKSTLHLASLSAIQHNSDLKAYYHRKVSEGKSKMCVINAVRNKLLSRIIAVVNRQTPYVVLAQA

SEQ ID NO: 302813 - protein, 427 aa, unidentified
MPYRIAGIDVHKAMLAVVVADVEVDGDWQFARRQFGATPSQLHLLTEWLVEHEVEEVVMESTAQYWRPVWDALERDWQPTQRCRVDAGPTTGALHLAQAQSNHGRPGRKRDFPDAERLVKRLVAHELTLSFVPDVTQRLWRTVTRRKYQLTRNRVQLQNRLESLLEEAHIKVSTLVSDLLGASARRMLRAVAMGETHPAAVAALGSPRLRATPEQLCDALGAAADVPPLYRRLLAMTLAELDLLESHRQQLDEELAALLRVHQAAVQRLAAVPGFGVDSAQQIIAEVGPTATTFPTAKHLASWVGACPGHDESAGVNRSHRVPSGNRQMRRLLNQAAHAAVKTKGSIFELLYRRFVGRLGHAQAIGAIAHRLCRLVWKILHDGVTYEERGPVVSQARAHRRAAKMLRELRSLGYRVELIPAPSGNAL

SEQ ID NO: 302814 - protein, 364 aa, unidentified
MPEAICFVGLDVHARRTAGAAVQLGSGEVFKAQIPGAPVEAIDWLQTLPTPVRAVYEAGPTGFGLARAARAAGIEMMVCAPGAIPRQPGDRVKTDTRDALKLARLHAAGQLRPVVVPEPELEALRDLVRCREDLRGDLMACRHRITKLLLRRGLTYPGPGASWTRRHASWLGSLTFREPLLQLTFAEHLSCHEVLLARRDRLDRLIADQAASGPWAPLIARLRCLRGVDTLTAIGLLTEVGDFAAFPHPRQLASFIGLVPSEDSSGDRRRQGSITKCGSSHARRLLIEAAWHYRRHPALSVDLRRRQARQPPAAIDAAWRAQLRLHRRWAHLDHARGKKRTTVAVAVARELACFVWEIANQPDI

SEQ ID NO: 302815 - protein, 340 aa, unidentified
MNFSVFGVDVAKRVFQVHSVDPETGEISSKQIKRNGFLEHFANCAPCLIGMEACGGAQHWARRLIEMGHQVKLMPGKAVKAFVNGNKNDVADARAIWIAAQQAGIKSVAVKSEEQQAVLALHRMRQQLVKFRRMQSNGLRGLLTEYGEVMAVGRAALDRAMSDALARLSDRLPAVLIDTLREQWNMLAKLDGQIAQIKRRLSAWMKQDKACKTIAEIPGVGLLTATAAVATMGDAKAFKSGREFAAWLGLVPGQTGTGGKVRLLGISKRGDTYLRTLLIHGARAVLTHAKEPGKWVQEISKRRPRNVVTVALANKMARTIWALLAHDRQYERSYVSVKPA

SEQ ID NO: 302816 - protein, 331 aa, unidentified
MQITTIGLDLAKHWFQIHGVDAKGDVIVRRRLWRSGVIAYFRSLEPCLVGMEACATAHYWARELTALGHTVKLMPPAYVKAYVKRNKNDAADAAAICEAVTRPSMRFVPVKNAEQQSVLMLHRARSLLVRQRTMLVNALRAHMAEFGIVAPQGFRHVGILTKTIARQQEGLPELARSILQTIIDQLNGTMARIREIEGRLAIWHRQSRVSRLLATVPGIGIMGASAIAATVADPSLFRSGREFAAWLGMTPRQNSSGGKERLGRTSKRGDKYIRSLLTAGAVAVLRHARNRPTRDGEWVRALLARKPTKLAAVALANKTARIVWVMMRGEA

SEQ ID NO: 302817 - protein, 322 aa, unidentified
MAKHTTTCAGIDTGKRKLDVAIEGRREQLQVENTPEGHKALLAWLRQHRVKRIGIEASGGYEQPVVAELRRKRFVVVVFQPAQVRAYAKFHLQRAKNDKIDATLIASCTAAVRKIHPAPDPRLQPFAEQLTMIDQIGEDIARLKNRIESCRNAGINKLWQEDIARLEQREKAALKALVASIRKHPDLAERLTLINSVDGIGLPTAIAILVRLPEIGRITREQAVALAGLAPYDDDSGDQVGVRHIEGGRKRLRRALYTASLAASFRWNLQLIKLYQRLIAAGKEHKRALVACARKMLIFANTVVARGTPWCSEPPVRALSVS

SEQ ID NO: 302818 - protein, 351 aa, unidentified
MLIIGCDFHARYQQMAMLDDATGEVVERRLDHLNGEAEVFYRGLPRPVRVGIEATGPIRWFQQLLTELGHQLWVGHAAEIRARAVRQQKTDTRDARHLLELLVSGRFPRIWVPSPQERDVRQLLRHRFQLVGFRTSVKNQLHALAMGQGVCRRKKLWSAQGRQELEQLALDPWAHRRRQELLEIHDRLQATIQELDLAVKQEAQNRAAALRLMQQPGVGPVTALAFVLTIGPVERFRKSKQVVSYLGLNPSEHSSGGHQRLGSISKQGNSMMRWLLNEAAQTAARYDEDLRRDYQRLKFRRGAAVAKIAIARKLAVRLYWKLREAAQPVPPARMQGRPTCPLMDAGGPSRR

SEQ ID NO: 302819 - protein, 368 aa, unidentified
MPSMPHPSLHSQDDNATGEVVLGVDTHKDLHVAAVITALGVLVGSKAFPATSTGYRQLLAWARTFGTLRRAGVECTGSYGAALARHLAAEGMQVIEVNQPDKATRRRRGKTDIIDAETAARAVLSGRATGSMKTGDGPVEMLRMFKLAKASAIKARTQTINQLKAVLVAADPVLREALSGLSNPTLFRRCVELPPTTPSDVTSAAVYTLRLLACRIRELTVEIRDLEHRITDAVTRHTPALLERPGIGPDSAAALLVTAGDNPHRLHSEASFSALCGASPIEASSGKTQRRRLNRGGDRQANAALYRIALSRLRWDQRTQNYLARRAAEGKTRRETIRCLKRYIAREIYYLITSPTPTPSAQSQPSAA

SEQ ID NO: 302820 - protein, 376 aa, unidentified
MEHDSTLYVGCDVHKDSITVAYALGSGEVQLLGKTGTTQADIDRLCKRLQSKAPRIRFVYEAGPCGYGLYRQLVNKGFDCMVCAPSLIPRKPGERVKTDRRDAVKLVRSLRAGDLSAVYVPGVDDEAFRDLARTWVSAKDDLKRARQRLKAFLLSHGVRYTGRADWGPAHQRWLGAHAFDSAWQQLAFEEHRRAIEDRLAQCARLEAALREAVPNWRFYPAVLGLRTMRGVQFTTAVGMLAELGELSRFAHPRQLMAWLGVTPSEHSSGEKRRQGSITKNGNSYARKLLVEAAWSYRHTARVSPDIQRRHEGIPKPIVDRAWDAQVRLCRRYRKLIARGKQKNIAVVAVARELAGFIWDVSRLAMSLAVPQEVSLA

SEQ ID NO: 302821 - protein, 357 aa, unidentified
MQTQVTKRLNFSGKKIKIGLDVHKKSWSVTILVDGIEHRTFNQPPEPQRLIDYLHRMFPNGEYQSAYEAGFCGYSIHRDLMKSGIDNRVINPSDIPRNQKEMLGKTDYIDSRRIARSLDHDLVRGIHVFEPHLEELRTLNRTRINLMKDFRRSKNRIKSLLFYFGITLPNHLDNNHWSLKFEKWIEQLSFNDQAGKEALCQLMATYRYFKQQMLDINRQLRKFIKAYDRQLYELLMTIPGIGPLMAILIITELGDINRFHHLNHLCSYVGLIPRINLSVENQRVGDLTFRCNHYLRTMLVEAAWQAIRMDPVLLQYYQQKLPNSKAQKVIVKVARKLLNRIRYVMKYRKPYVLGIIE

SEQ ID NO: 302822 - protein, 382 aa, unidentified
MQASRKSTPTAGHCGTIFVAIELSQKTWLITVHSPDRDQFSRHRLEGGDHAGLLALIEKVRARATQQLGSTPRVVSCYEAGYDGFWLHRLLEAAGISSLVFDAASIAVEQRSRRAKTDRIDGELLLRTLMAHLRGEPRVVRIVRVPSVEEEDARRASRERDRLITEQTAHSNRIKSLLRLLGMAVGNPRRRDWLAWLKRQRDWQGRPLPPHLLAEAQREHARLMLVREQLAALEQVQAAQASAVPAPMAERRDLLQRLKALGPAFTATLVNELFYKDFRNRREVASYCGLAPSPWQSGGIDREQGISKAGNRRARHKAIELAWLWLRHQPNSALSHWFRTRTANAGRRAKRIAIVALARKLIVALWRYLTAGLVPEGATMKA

SEQ ID NO: 302823 - protein, 419 aa, unidentified
MFEEGKQTHQSREVSFSHRKNRAFGQVDVRGHRDFDRRALQGLNEHLRRRYVLHIINLKSSDDIVASIPKVSREWPMQDVATVGLDIAKQVFQAHGADASGETLFNTQIKRENVLEFFSKLKPCLIGMESCATSYYWARQLLEFGHDVRLIHTSYVKPFVKRGKTDANDAEAINVALTQKTMRFVPVKTLNQQAAITIFRTRSLFVSQRTQLVNALRGHLAEAGLVAAKGIQNYSKLVKLMESAADTVLPTVLKQALTDICDQIHRLNDLVTKLDKEIDRRVTHDENACRLLTIPGVGPKTAMCVIATIPDIHRFPSGRHFSSWLGLTPRTHSSGGRSVLRRITKMGNSKLRAMLYLGGTVIMMRDSKTPIGRWAARLRARRPYKVAVIAVANRIARIIWALLTNGGVYDPTHGREASA

SEQ ID NO: 302824 - protein, 347 aa, unidentified
MSVSMIGLDTAKSVFQIHGVNEAGKVELKRKLRRSELIPFFEKQETCTVVMEACGAAHHWARILAGLGHTVKLVAAETVRPFVKKGKKNDAADAAAICEAASRPDVKFVATKSVEQQGILALHAARSLLVKQQTMLANAMRGLATEFGLTVPKGIRKLPELMELVDADEAIAKQARQAITGLHDRCQELAEGIETFEAEIVAHARRDETARRLATIPGIGPITASLIAATVGDISLFKTARQFAAWLGLVPGQNSTGGKTRLGRITKTGNREIRRLLVLGATSMVQRADGWNSAVGTWLRNILERRPVRLVTVALANKMARIAWAVMTRKEVYRPKGGVTVVAQAAA

SEQ ID NO: 302825 - protein, 375 aa, unidentified
MSHYREAFVAFDTSKLRNAVAIADGGRAGEVRFLGEIDSTEAATAKLVRKLAGKYERLTFCYEAGPTGYGLHRQIKSLGFECVVVAPSLTPKRPEDHVKTNRRDALSLAKLLRADELAPVWVPDRGHEAMRDLTRARETAMTDLRSKRQQISAFLLRQGRHYPENKKTWSKTHMDWLASQKFEYAEQRLVFEEMVLAMRQARERLERLEQAIRIAVPDWSLADVVEALMAMRGLDLISAASFLAEIGDLSRFRMPTELMAYLGLVPSEDSTGDSIKRGPITKAGNRRARRMLVECAWAYQHPPRVGRDKQPKVDAAPRAVREIAWKAQCRLHRRYRALIRRGKLKTVAITAVARELAGFLWAVSREIATAPTALK

SEQ ID NO: 302826 - protein, 414 aa, unidentified
MGLKIVYKICCGIDVHNSFVVACIASTNSVGVTTYKSHRFSTYTKGLKELLQWLLDNNCKDVCMESTGKYWIPVYNVLENDCSIVLVHPKYVKAIRGKKTDKKDAKWIADLFKHDLVNGSFMPPADIRQLRDLMRYRYKLTCFMSSEKNRLQNCLTVSNIQLSNVVSDTFGKSSQRILDKILENPLDTSFDILPLIHGSMIKKIPDLELAIDGYITPQQAGKLKIIKKHCEDLKTRKSELEELILALAMPYQQELDIILTAPSFKNVFSAITVISEIGVNMETFPSAKHLCSWAGLTPTNNESAGKKKSVRVSKAGCYIKPLLVQCANSVIKSEKHPEIRNRYLRLRKRRGHKKAIIAIARMLLTALYNMLKNNASYNAELYKNSDVLPFERVITVEQAILLAQFQGYKIKSAV

SEQ ID NO: 302827 - protein, 345 aa, unidentified
MDVAYDGRQVVGMDLHRRRSVLVRMTMDGRRLETARIENSPAALRGVLARCGQRPLVVLEATYGWYWAADVLEQAGAEVHLAHPLGVKAFSYRRVKNDERDAADLADLLRMGRLPEAWIAPPEARAVREVVRYRHKLVGQRTSCKDQVHAVLAKCGIPVTHSDVFGTGGGLWLDQLVLPAPYAAKVASLRALIAVLDGQIAGLGAEAAVMLAGQPGYAALRELPGIGPVLAAVIISEIGDITRFRKPAQLCSWAGLTPRHYESDLKVIRGHVSKQGSRLLRWALTEAIQHQPAGTRPRAAREAIIARRGPQARNIAKTASARVLLTQVFYALRDGHVRRASDPAA

SEQ ID NO: 302828 - protein, 346 aa, unidentified
MSYSTTVGVDPAKNVIQISVVSSRGKELSNRSLTRKKFAEFLGKQKRSLVAFESCASAHYWARAAQRHGHEARIIPAKAVAPFRQGHKTDSNDALAVAEAARRPNIKEAPMKTVEQQGLQAIHRSRELLIQECTALSNHLRGLLMEFGIVIPKGFASLLKAVPEILEDGDNELPDLYRPTLHRMYSRLLELREDIEAMTKEVDRLAKAHPICSKLMALEGIGPIGALLLYATMGSGAAFSGSREFAAYLGLAPKQYSSGGKTNIVGLSKKIGNSRLRSVLILGARAYTYRLKEPKSSKDKWLKANIERNGECRAAIALANKNVRTAWAMVTQGTEYQRRAQLEMAA

SEQ ID NO: 302829 - protein, 342 aa, unidentified
MQRVTTIGLDIAKSVFQVHGVDAIGDVVIRRQLKRRYVVAFFQKLAPCVVGIEACATSHHWSRALKALGHTVRLMPPAYVKPYVKRQKNDAADAEAICEAVTRANMRFVETKTPEQQSCLVLHRTRHLLIRQQTAVINAIRAHLAEFGVVAPVGRRGVAELLDVVAASSEEPVPEVARGCVAALGVQLRMLKAQILEFDRQIMAWHRSNETSKRLDEIPGVGPALATALVASVADPKAFRSGRNFSAWIGLVPKQHSSGGKDRLGSISKQGDRYLRSLLTAGALAVIRYAKIHGSKRPWLTALLARRPTKVAAIALANKIARMAWAMMVKGERYKEPAALAA

SEQ ID NO: 302830 - protein, 409 aa, unidentified
MQPLLEYCAGLDVHRDTVVATVRTPDGAGGRCTVTETFAVTTPTLLALRDWLQAQRVTHVALESTGVYWKPIYYVLEDAFTLILVNMQHLRHVPGRKSDVRDSEWLAQLLECGLLRGSFIPPLPIRDLRDLTRYRRAQLEDRTREVNRLHKLLIDAGLKLSSVLTDIMGMSGRAIIRALVEGTTDPEVLSDLARGKLRAKLPALRTALQGRFRTHHAFLAAQILNKIAIIEETIGECTREIDRLLLPYAEVLERLATIPGIQRRTAEIIVAETGADMTAFQTAAQLCSWAGICPGQDESAGKRRTGKTRRGNRYLRAALVEAGLAATRAKHTAVQARYYRLKAKHGHKKAVVATAHHLLKIAFHLMRDETVYREDGPDYFERRSKDRVVRRHLRQLEQLGYRVTLDPAA

SEQ ID NO: 302831 - protein, 475 aa, unidentified
MNVKGTKKKNQVVTANIFEQQELLKKAEAIKESLTASTWRELETNGKFDKNEKLSFISDDMLILGCDVGSETHYMRAIDTRGRELSKSVYSFNNDSEGFQSAKEWAVQIAAEHNKSQIVLGLEPTGHYWFCLAAWMISNGISVVQVNPYAVKQTKEVEDNSQMKDDRKDPKLIANLVKDGNFGMPYLPEKLYAELRRLSMFRDQLNEDRIRTINRMHREMKIYFPEYKDALGKVDGAFSLELLRQDPFPDDLISLGEDGIRKIWHDARLRGRGYSRAGEILQYAKVSVGIKDGAIAGKAAVKWFVQKILELDAELAVIENQINQKCQEIPHAGNILEISGIGENILSGILAEMGDISRFDDVKEIQKLSGLGLVACSSGKHKGETRISHRGRKRLRYWLFQAAKSAVAHAEEFKELHIYYTTRADNPLKKMQSLIVIACKLLRIIYTILKKGIVYDPKKMLMDIRRVEKKEAIVA

SEQ ID NO: 302832 - protein, 339 aa, unidentified
MKLYGGMDLHSNNSYMVLIDESGAVVQRRRVGNEMGRVLQTLEAYREQIDSLVVESTYNWYWLVDGLKAAGYQVRLAHPSALQPYEGLKYSDDRSDAHWLAEMLRLGIVPSGYIYPEAQRPLRDLLRQRSFLVRQCTSQLLHMGNILSRNRGRKTSRQQLRQMTVAEVRELFPDRERTLAVESSLRVIEVLEQQIRAIEKQVLERIKPEAGFRNLQTVYGVGPILAMTIWLETGEIGRFKQVGDYASYCRCVTSTRISNAKKKGQNNRHNGNAYLAWAYVEAATYAARFYGQAARFVERKTAQVNRTLAIKALAHKLARACYYVLRDQVRFEPARLFGG

SEQ ID NO: 302833 - protein, 316 aa, unidentified
MSEKQMESFVGIDVSKTTLDLRLEPAGESLHVMYDNAGIAEICRRLSSMPPTLIVMEATGGLETRLATELAACGLPIAVINPRQARDFAKATGQLAKTDRVDAAILAAFARAIRPAVRPLKDEDTRALDDLVTRRRQLIAMRVQETLRLGTAGSKALQKSLKTHIAWLDKRISDIDVDLTQRLRSSDIWKAKDDLLRSIPGVGAVTSLTLLAKCPELGQLNRREIAKLTGVAPLANDSGTHRGKRFIWGGRADVRAVLYMAAVSAIRCNPAISAFATRLKQAGKPAKVVIVACMRKLLSIMNSMLKNQTPWQPATT

SEQ ID NO: 302834 - protein, 321 aa, unidentified
MIIIGCDYHPGFQQIAFVDSETGEVNERRLEHREEAEKFYRDLGGQRAVVRVGMEASGHARWFERLLGELQFELWIGDAAEIRTKRVRKQKTDRQDAQLLLRLLLEDRFPRIWVPSWENRDLRQLLWHRHRLVQMRTRIMNQLHVVALNEGVRRKKALWRPAGRAELESLVLARWASQRRQDLLELLDQLTPKIQELTRALEQEVQKRPVTQQLMKHPGVGPLTAMAFELVIGTPERFDCGKQIASYVGLVPSEESSGDRRRLGHISKQGNSLLRFLLVEAAQVTVRSDPEWRSRFFHLAMRLRFARSECASRRRIARMRS

SEQ ID NO: 302835 - protein, 373 aa, unidentified
MRDNSEAFVGLDTSKLRHSVAIADSGRTGEVRFYGEIENTPAATAKLVRKLAAKYERLTFCYEAGPTGYGLHRQIKSLGHESVVVAPSLVPKRPGDKVKTNRRDAVTLARLLRANELTAVWVPDERHEAMRDLTRARETAMLDLRSKRQQVSALLLRQGRSYPESRNTWTKAHIIWLASQKFDYPEQRLVFEEMMLAVRQALERLERMEQAIRAAVPDWSLAEVVTGLMAMRGLDLISAATLLAEIGDLSRFRTPQQLMAYLGLVPSEESTGNTIKRGPITKAGNRRARRMLVECSWSYQHPPRVGSVKQHKVDAAPPAVREIAWKAQCRLYRRYRALIRRGKLKTVAITAIARELAGFIWAVSREIAPAATK

SEQ ID NO: 302836 - protein, 346 aa, unidentified
MYQDNLFCLDLAKKSVQGCLLDKAHEVRFNRTFSRKKLIEWLSRQQPMPVAMEACSTAHYWSRVIERLGHQPLLVPTRTANRYREGHKTNATDALAVGVAARQPTTRFVAPKTIEQQEMQSVERIREHISDGLTATSNMMRALLAEFGLDIPKGKAAFKRHVVELLEDAENDIPMVLRTELINEWERYGQLELRLKEAERARDLLCKQHESCQRLNQLGGVGPVNAIGLYLALGDRGSSFKNGREAATCIGTTPKQYSTGDEVIMLGISKKCANKRLRSNLIQGARSVIKALKQREPKNAQEAWLKSLIERRGEGRAAVAWASKTIRVAWAMLHHGDNFKLHLNLA

SEQ ID NO: 302837 - protein, 345 aa, unidentified
MQITTVGLDLAKRVFQVHAVDASGSVVVRKALRRSQVLPFFIKLPPCLIGMEACGTSHHWARELTELGHKVRLMPPAYVKPYVKRGKNDAVDAEAICEAVTRPTMRFVAMKSAEQQAALSIHRTRNLLVKQRTQLVNMIRGLLAEFGMDIPEGLERALALAREIAAKETTPDVPAVAMQILGLLCGQVLDTHVRLQAIDRSILALQKSDEVARRLSTIPGIGPVGATAFAASVADPRQFRSGREFAAWLGLTPSQNSSGGKDRLGRITKMGDRYLRKLLVVGATSLIRRARYKPETADPRLVALLGRKPVRVASVAMANKMARVVWAVMARGETYQPRHAPNLTA

SEQ ID NO: 302838 - protein, 345 aa, unidentified
MSKIRFLGLDVHADTIAVAVAESDGEVRRFGVIPNQWEAVRRMVKKLGPNSELRACYEAGPTGYVLFWQLTGLGVACQVVAPSLVPTKAGDRVKTDRRDAEKLARCCRAGDLTAVWVPDAAHEALRDLVRAREDAKHDQLRARHRLSKFLLRHGRRPSVKMKSWTQMYMAWVKRNVHFEEPALEATLLDYVQEVEHAAERIQRLEKAIAEAIEKSAPELRAVVAALQALRGIAMLTAVTIIAELGILSRFLSPRQLMGYSGLVPSEFSSGNRVQRGKITKTGNAHLRRVVVEAAWAYQHRPWVGGYLGKRQKGLDPEIIEMAWKAQHRLHGRYKKLQKERTRIRL

SEQ ID NO: 302839 - protein, 375 aa, unidentified
MKHYVGMDLHSNNTYIGAIDENDQRVFKGRFPNQLPVILEVLEAYHETITGIVVESTFNWYWLVDGLMDAGYKVHLAHPGAITQYNGLKKTDDKSDAFFLALLLKLGILPEGTIFAKEDRQIRDLMRKRLMLVRNKTQHLLIFKSIVSRNLGENMNAQLIKKLKPEDVESMFDNKHLVLSAQSNISAMIYLEEQIKILEKQILKDSENSSAYQNLITVPGIGKILGLTIALETGNINRFKDVGNYVSYCRCVRSERFSNQKKKGNNNRKNGNKFLSWAFIEVAHKTRRYLPQADAFYKKKSIKKNKIVAIKALSHKIARACFHMMKNEEPFNVERVFGKTTKVLNNGCDSKPSRGLVKEPLAPIGQTVATNSLNR

SEQ ID NO: 302840 - protein, 333 aa, unidentified
MHRIAGVDVSKLTFDEFAMGGGKGKHHQFSNNREGWARFWRTLEALGEGALHVCMEATGLYWEGLAEFLHQKGATVFVVNARRIKGFAMSEDKRTKTDKVDAGVIARFCQAHLHVLKPWTPPAPCVRQLQSLTRQLASLTDDRARQDVRLQSAVLCAEVHESIKQHIEFLDESIERMKRSIQTLISSNSELQKKEELARSIKGVGPVTASVVLAECRLFNELKDRRQVAAFAGLDVTEFSSGTSIRSKPRLSKRGNARLRQVLYMAAMAAKRSNPVFKRFYERLRANGKTKMQALGACMRKLLELIFTVVTSGNAFDPNYGAAPSEAIQAVAA

SEQ ID NO: 302841 - protein, 348 aa, unidentified
MQFYTNLHPFYCGIDLHARMLYVCILDARGEILVHKKIKDSPEQLLNLLAPYIGNIVVGAECMHCWYWLSDFCEHHNIDFILGHALYMKAIHGGKTKNDKIDAYKIAKLMRGGNFPLAYVYPKEKRAIRDLLRRRTNAMRHSAELKAFIKNALSQYNLPVPEKSDLSYTTGRDAMRGYFPNPQVQRSIDMNLRLIEVYDHEVSSIECYVEKLTKHDNGRDYYLLRSLPGVGRVLALTILYEIGTIKRFDSVQKFASYSRLVKCKAESAGKAYGTQGNKIGNAHLKWAFSEAAVLFLKGNPPAQAYLAKLQKRMSKAKALSALAHKLGRCMYFMLKNQTVFDSERFLAG

SEQ ID NO: 302842 - protein, 467 aa, unidentified
MAPRRRKAFRTSSAVEDLAVHHRNAAGIDVHAAVHFVAVAVEDVPAGFVNPEAKLPAGVRKFGANTGDLEALAAWLKDCHVTTVAMESTGVFWIPLFDLLASQGFEVILVDPRQTKHAPGRPKSDVLDCQWIRRLHSYGLLTASFRPCDEVVRWRGFQRQREMLIRYAAQHVQHMQKALEEMNVKLTEVVSDIVGQTGMKIIQDIVRGERDPHQLAKHRHDLCRATEAEIASALYGTWRVEHLFALRQALQLYEFYQKQLRECDTQIEACLRGMKDRSNGAALPPSLRKRRPEKNEVRFGARALLFKMAGVDLTVLEAINETTALVILSEIGTDLSPFPHEKNFVSWLGLCPQHRGSAGKIFKRRTRRGANRAARALRMAAQGCHNAKNALGAFYRRIQARSGGAKAVVATARKLAERVYRLLRYGQEYVRQSQEAYEAAYQLRLVRSLTKKAASLGYKLVPETMTA

SEQ ID NO: 302843 - protein, 391 aa, unidentified
MTILVGIDVAKDKHDCFFMNSEGEVLAKPFTIFNNKEGFDFLYEKIQSVSSSDNIKVGLEATGHYSYNIIGFLLNKGLATFILNPLHTNLYRKSLSLRKTKTDKIDSKTIAMMLLSDVSLKSYSDISYHNEDLKSLTRYRFSKVEERAKLKTSLSRLAQILFPELEKLVPTLHMTSIYQLLEEFPSASAIASVHLTRLTNLLSKASKGHYDRETAIKIRDAAKNSIGSNMPTKSLELKHTIKLIRALTIDIGEIEAEISKMMDMIASPITTIPGIGRNIGAMIISEIGDFSRFSSPDKILAYAGFSPSIYQSGKLDNCYAHMEKRGSRYLRYALFHAAKLVCHWDKTFADYLAKKRAEGKHYYVAISHAVKKLVRVIFHIEKTKQAFLKAS

SEQ ID NO: 302844 - protein, 481 aa, unidentified
MAENTTARTRQTERLTRKQRRELGRRIWSEHPGLEVVHRDAAGIDIGSEQHYVAVGPDRDAEPVRTFGCFTEDLHRLARWLKECGIRTVVMQSTGVYWIPVYDVLEQYGFDVWLVNAQDTRNLPGRKSDVQESQWLLKLHTYGLLRKSFRPEPNIRALRTCWRERAEYVQQAGTCIQRMQKALTEMNVQLSNVLSDLSGVTGMCILRAIVAGERDGRRLAEFRDARVKASRETIAKSLEGTWRPEQLAILQRQLTDWDHVRQQIAACDVDLEAMLKQLPDAEVDPQPPAANPPGKSKRRRQKKDRSSRNQPSFDLSGELKRVTGVDLTRIDGIKEMTIQTIIAEAGLDMSKWPTENHFVSWIGLAPRNDVSGGKVLKKKTRKVVSRLATGFRLAATTLRASDSYLGEQFRRLRTRLGAPKAITAMGAKLARLVYRMLKYGQEYVDKGSAQYQAKYHEQQIRQLKKKAAQHGFTLVSMPDPA

SEQ ID NO: 302845 - protein, 341 aa, unidentified
MSIITVGIDLAKNVFAVHGVDDNGKPALVKPKVSREHLLPLIAQLPPCLIGMEACSGAHHWARLFRQHGHTVKLMAPKFVTPYRMSGKRGKNDAADAAAICEAVRRPHMRFVPVKEEHQQIILALHRTRTGFVEERTATYNRLRGLISEVGIVCPQKIANLRRALIDHLEDLPGYMNRCVGDLLAHADSLDARIAEYDRIIREAAREDARSRRLMELPGIGPNTASALLASIGAGHDFQNGRQVAAWIGLTPGQYSSGGVARLGRITKAGDTYLRSLLVMGAKAILSGLGDKQDRFSRWARALVERRGYWKAVVAIAAKNARLAWAVLRYGEDFRLKAASA

SEQ ID NO: 302846 - protein, 344 aa, unidentified
MKITTIGIDLAKNVFQVHGVDERGMAVLKKQLKRDQMAVFFAKLPTCLIGMEACGSSHHWARKLQGFGHTVRLMAPQFIKPYVKTNKNDVADAEAICEAVARPNMRFVPVKSVEQQAVLSLHRVRQGFVKARTAQANQIRSLLGEFGLVMPKGITNVRKRVPEVLENACDELPAAFRHLVERLLDHLKELDRQVGQLEAQIKAWHRSSALSQKLEKIPGIGPLGASALVASIADARSFNNGRQVSAWMGLVPRQHSSGGKPTLLGISKRGDVYLRTLLIHGARSAIVAAQRRAAVNPWLAGLLHRRNPNVAAVALANKNARTVWALLAHDREFQPDYVPTLAAA

SEQ ID NO: 302847 - protein, 399 aa, unidentified
MTSSYGVFLGLDVGKGDHHAVALDPTGKRLHDGPLPNTEPKLRALFDKLAVHGPLLVVVDQPATIGALPVAVARACGHQVAYLPGLAMRRIADLYPGNAKTDARDAFIIADAARSLPHTLRPVDTGDEALAELEVLVGFDDDLAGEATRLGNRIRGLLTGIHPTLERVLGPRITHPAVLEILSRCGGPTGIRKAGRRKVTAIAATHAPRLGEKLVADIWTALGEQTVTVPGTAAADTVLPRLADSLKTVLQQRNQVATEVEDILDAHPLAGVLTSMPGIGVRTAARILLEVGDASAFKSSAHLAAYAGIAPVTRSSGTSIKGEHPTRNGNRKLKRAFFLAAFAALHDPTSRAYYQRKRDEGKKHNAALICLARRRCDVLYAMLRNGTHYRHPDPAPAAA

SEQ ID NO: 302848 - protein, 318 aa, unidentified
MNSPSMTVGIDVSKQRLDFARFPQGDTFSVAYTDTGLAKLLKRLRGWSPQIILLEASGGYEYGVVAALVAASLTPVLINPRQVRDFARALGILAKTDKIDAKVLAEFAFRVQPEPRPLPAAQQQELNHLLSRRRQLLEMIQMECNRREVSPFLRVRQSIDHNLASLRRQLTDLEREIDDFFNQSPLWVQQDALLRTVPGIGPQTVLSLQAWLQELGALNRHQIAALVGLAPFNRDSGVLRGRRMIRGGRHKVRQALYMATLSAVRYNPVIKALFERLAGQSGKPGKVALVACMRKLLIILNAMVKNQTTWRPMTPLTS

SEQ ID NO: 302849 - protein, 320 aa, unidentified
MNSTPSFVGIDVSKAELDVYIRPDGIHWTVPNDAEGHARLVSDLSPIAPTLIVLEATGGLERPATYTLTEATLPVVVVNPKRTRDFARSLGLLAKTDRLDAQALAHFADSVRPQLRDLPDQDAQDLSAQLARRRQLTDMLTAERNRLHTALSAIEDSIRAHITWLQDEIATLEAELDTLIQANAHWCAQVKQLAAVKGVGQITAYTLTADLPELGQLNHKQIAALVGVAPLNSDSGKRRGKRFVQAGRAAVRTALYMAALSASRFNPTIKAFYQRLTDAGKPKKVALIACMHKLLTILNAMVKNGTDWDPSYANRATNVA

SEQ ID NO: 302850 - protein, 385 aa, unidentified
MAPPRRPEIVIGLDVGKSSHWACVATRDGEVLASKPVANRENALDSLFAEFPGALVVVDQVRNIGALALSRARAAGMPSAYLPGLAAHEAARLFGGDAKTDERDAMVIAKTALGIPDALLPVPHPDPAIAAARALAAQRDFLTCESTRSKNRLRSILLESCPEFESLVDLSDLSELRLMAALGGPWSVADAGRRRAAALARGARRGKVDALVGSVGSSTRPDAAAIAAEDRAVRFLARRIAENAAELQAATAEISALLERDETYRCLLTIPGIGPKTASELAISVNIDDFPNHDRLASYCGLAPRNRQSGTSVSSVSASRQGNKRLKNLLIFSCNCLARTDGRWGEYYARCRDRGMPHGKALKAVARKRLKVIYAVMRDKVPYVA

SEQ ID NO: 302851 - protein, 350 aa, unidentified
MQPGNGMDKFKLFCGIDVSKADIDVVYGSASSNRHVKLSNDVKGIAQLLKLLLQLESERSAILVCCENTGSFMDKLAYILKGEDIFFWAVHPLLLSFYSIELNRFKTDKADAQKIFTYAMTNKATAISFHLPSQPARQLKELFTCRKNLIQTRSTYICRIKDQQQRAFYGELVMQVEKQLILILDGFIKAIEKAIQQVVTSDKKIKGMFKILTSIPCIGPITAWHILFITDCFEKFGSHKALAAYIGCAPYPKRSGTSIKHKDKTSKKAYKPLKVDLNQGIVSVCTRPGQPFYNYYQSMIKHNRHHLYILNSIKNVLLKLVFKLIHANTTFNQEIFMRNKISWQKHLQMS

SEQ ID NO: 302852 - protein, 315 aa, unidentified
MAMPVPVSKPIVGVDVAKNELVIYHANLDLLETISNTKAAIKKWLRALPGSVAIAIEATNIYHLEFADLAYEAGCVIYMVGGYELNHYRKSVKVRAKTDALDAQLLARYLRKEADELRPWTPPSPLYRQLLSLFRRRAALVQARVSLTQSWANEPLLKASFAEQMKSMQRLEGLIEKMISDRLKEAGLLGQLKRCMSVEGIGFLTGARLITSFQRGDFRNADAFIAFLGMDLRVSKSGQKDNRRSLSKRGDSEARRLLHNAAMAASRTAAWKEFYQTQRARGYSTTQVLVMLARKLARVVFALLKGQNEYQPKVG

SEQ ID NO: 302853 - protein, 411 aa, unidentified
MNDGTQQQTFGIYREMTLLAFDLLASVIPARIDRDPPCILPLPATKQSASLSVDGSPQAPRVSEPEKKQGAPSTGSIENPNSRLGRKPSPHSQGRVMERHPASPSFVGIDVSKDRLDVHVCPSGQVFAVARDGQALAQLVADLITLAPALIVLEATGGFEITVAAALASAGLPLAVVNPRQIRDFARATGRLAKTDALDAQIIALFAERIRPEPRPLADADSQSLAELIARRRQVVEMIGMETNRLHQARNSRVQRMLKATLKTLKAQLAELDHDIDDTIKQSPVWRVADDLLTSVPGVGDVTAHTLIADLPELGQLDRRRVAALVGVAPVNRDSGQMRGKRTIAGGRAEVRNALYMATLAAIRWNPVISRHYKSLVERGRPKKVALVACMRRLLGILNAIIRTNTPWQCA

SEQ ID NO: 302854 - protein, 332 aa, unidentified
MSVYVGIDVHRKRSQVAVIDQDGEVLANRNVPNGVKPILGVIGGLPAGTPAAFEAAFGWGWLVELLEDYGFSPHLVHPLQCKAIASARLKNDKVDAAILAQLLRADLLPEAWIAPPAVRQLRAMLRHRAQLVRLRTLLRNRIHAVLADHGYGRPEGCWSGPGREWLASLELPAVSREVIEDGLALIDALQEPIDRLDWEVHQRARSEPAVKVLTQLPGVGVFTALVLLAEIGDITRFGSARKLAAWAGLTPAVRGSDRTVRHGHISKQGSVWVRWVLCEAAQTAKRHPDFAASYQAIARRRGKKIATTAIARKLLTRAYHLLTDASSGGAPH

SEQ ID NO: 302855 - protein, 335 aa, unidentified
MQVYGIDLSMEKFDVSFIDAKGKEKNKQVKNRLASISKFLDIVPEDAVLCAEHTGSYGDLLVYLCNQFEIEIALVPGYTIKHSLGMVKGKSDPVDASRIREYGERFFDKLEFKEYDSEEIVELKSLYTLRSQLVKARKSLRTGAHGRSYLPIQSISVNKHVQKALYNLDVEITEVEDEIEAVIMANNELKDNYELAVSVKGIGPVIATDLLIKTGNFKNIDTARKAASYAGVCPFPNASGKMAGKAKTSPFADKKLKALLYMGAKSAVKHNKEYRLYYERKTMEGKPHFLIMNNISNKMLRTIFSVVKNKTPYCQDYICHDPREKNINSSTHKVA

SEQ ID NO: 302856 - protein, 399 aa, unidentified
MEQIRVGIDVGSREHCVGIASADGEILDEFRIAHTRAGFEEFFDRVGGWSSRLGCSVAVAMEGYNGHARPLDREILRRGWRLYNVNNLKLARYKEIFPGPAKTDRLDVVKILELFRLRETLPMAKDVLQEVLEVPCVNERLKRLTRRRRQLVEEKVRVVNRLHSDLQAVCPGLVGITGRVDNLWFLRFLVSRRDLRQLARMRRSSLLKIEGVGRRYAEAIVRWQAEAEFSGEVDYVGSMIISDARRVLGLLEEISGLEVQIVELSRESEIASLLRTIPGFGRITSAELAGEIGTVERFEREGSLALYLGMCPVSHESGCYRGSRSSRQVNWRAKLAMMTAVARHLEQVAESRAYYERKRSEGKRHNQAVRSLGRHLVRVIWAMLRDRRHYWLREEVCSS

SEQ ID NO: 302857 - protein, 259 aa, unidentified
MGAINAAIEVGKEKLDVALGSAGEQFTEANEPRAVARLCQRLAAAGCERVLIEGGSYQNLLVAALRAAELPVVIVNPRRVRQFARSIGQLAKTDALDARVLALYGERLQPPVRELPNEQTRALRDLWVRREQLIEMLVMEENRLEHARKALHRGLRAHIDYLRKQIRQADDDLDRTVRNSPLWDKYELLSGVPGVGPVLSVALLADLPELGRLNRREIAALAGVAPFNHDSGTLHGQRKIQGGRPRLRRVLYAATIASG

SEQ ID NO: 302858 - protein, 457 aa, unidentified
MESYYMGIDISKGYGDFVILDGKKNIVEPNFQLDDTFGSHCKLFDILKVFFEHHPESVLFAAVESTGGYENNWLHTLSGFQGVLNIKSARLNPLGVRANSRASLRRVITDKISSLDVAEYLISHPEKVSYQQDDSLAGLRRQWGFVRLLVKQKTQILNQFESLLYNANPELITYCKSGVPAWLLKLLKQYPTAAKLAKARVSSLDKIPYVTADRAKDLIEQAKKSVASATDEASGNLIAVMAEQITSMEETIRIQTQQMTRQCTIPEVALLKTIPGISDDSAIGLMLEIQSINRFSSAKKLASFFGLHPVFKTSGDGTSGIHMSKQGRKEPRKILFMVALVSLTANPHIQKIYEEHTAKGMKKMAAIGLCMHKILRIIYGMLKNNQAYDSQVDQKNRERIKARKAPRVAKNVNRRYEMFDQQAPVSRRQGNKRKEWKQSQSDNITMCGIGVSTPSIG

SEQ ID NO: 302859 - protein, 339 aa, unidentified
MGLYCGIDLHSNNGVYAVTDGEDRLLFRRRLPNDLAVVLRTLEPFREQLEAAAVESTYNWYWLVDGLQAHGYPMRLANPAKMEQYEGLKQTDDNTDASFLAHLLRLGILPQGYIYPAEDRPVRDLLRRRMLLVHQRTALILSLQGMFCREIGSTPSWRKIVQEDAEALCQRFGSQQELGFIATEQVEVIRFLARKIRLFEKRALEKATLRTSYEKLLTMPGVGKVLGLTIMFETGQISRFAKVGNYTSYCRGVSAKRLSNGKKKGENNRKSGNAYLAWAFVEAAHHAMRVCPQALKFYERKKAKTNGAVATKALASKWSKAAYYILRRQEAFDLKRVFG

SEQ ID NO: 302860 - protein, 425 aa, unidentified
MNYKQNEKINQVKESTLVVGIDIGSTTQYARAFDWRGIELGKVLPFSNSREGFESLKAWMQHLQDKYKKLDAIVGIEPTGHYWFDLGAYLEDEGILLVMVNPYAVKQTKELDDNSQSKNDRKDPKVIAKLVTEGRYSAPYTPDGVYADLRIMVANRKRLIREMTQIKNRFARWFAIYFPEYTDVFGDYEAQSSMLLLKKVCTPEAIVELGAEKINQIWRDAKLRAVGMKRATTLCETAKRSIGLKKGSSAARYEMKLLLEDYEYKKAQLDAVMEEIEKLCRKIPESEQMLAIKGIGVITVAGFLAEVGDVRRFESPRQIQKLAGLSLRENSSGKHKGQTTISKRGRSKLRAVLFNAAIPLIAKNPEFKSLHEYYTTRANNPLKKKQSVIAISCKLIRVFYAILANGVTYDAQKMLSDIHRQPQVA

SEQ ID NO: 302861 - protein, 281 aa, unidentified
MDEVKRFVGIDVAKTALDVFIGSAGAAFSVANDEVGIRELLRQLAPADFVILEATGGLEMPVASALAAAGIAVAIVNPRQVRDFARATGRLAKTDRLDAELLARFGDAVRPAARPLANEQAQALEALVTRRRQLVEMLTAEKNRRASAPKVSHRSIDEHIRWLEKRLSGFDGETRRVDSRYSPVAERDELLRSVPGVGKVLSSTLLAHLPELGALNRKQIAALAGLAPFNRDRGTLHGSRCIWERARPGPTRPVHGYGGRRSQQSGHQKFLYPAACAREIS

SEQ ID NO: 302862 - protein, 412 aa, unidentified
MQVIYERCAGLDVHKKSISACVLCWEVGARKVQEIRVFGTMTRDLLALADWLKAHEVTHVALEATGVYWRPVWSILEGQFSLLLANPQHIKAVPGRKTDTKDSEWIADLLQHGLLQGSFVPPTPIQDLRDLTRYRVELAQAQNRVANRIQKLLEQANIKLASVASNALGASGRQMLEALVRGEQDPERLAELAQRRLRSKIPELRLALEGKVRDHHRFLLREFLDEWEALGRRITRVEEEIERQLGPFEWAVTLCQTMPGVDWVTAANLVAEIGVNMEQFPSASHLASWAGLCPGNHESAGKRISGKTREGNRWLRRTLCQAAWAVTRKKDCYLSAQFRRLASRRGIKRAVMAVAHTMLTIVYHMLKTSRSYVDLGGTYLEQINKGQLQRYFVKRLQRLGLQVTVEPIIPPA

SEQ ID NO: 302863 - protein, 430 aa, unidentified
MKKNNSNSQTNSDRAGKPGKARGPVQRDAKEVVAELVARLSQKLEPRSAGARAGEARQQDLPGPNRDRLTVGVDLGDKWSNFCIVGLDGEKLTEGELRTTQEDFAEFFHSLAAARVVMEVGTHSAWARDVVAGCGHEALVANPRQMEGPKRRKRKNDRIDAHKLARIGRMDPQSLFPVEHRSVEVRQDLVAVRARDALVAARTQLINTTRGLVKSMGGRLPKCSSPSFPHKVEESLPAEVREVLLPLVRLVETLSDGIAAYDKKMEKLGSEKYPQTKLLRQVKGVGPITALAYILTLENPERFAQSRDVGPYLGLVPKQEDSGDSQPQLRITKMGDMMLRRLLVGSAHYILGPFGPDTDLRRYGIRLSERGGKNAKKRAVVAVARKLAVLLHSLWVSGEVYEPLRHALPKATEEEAVRHAPAEATEKEAA

SEQ ID NO: 302864 - protein, 378 aa, unidentified
MAKCIMVGCDLHGKSMLLRVAVDREEARTRRCGTTPAARQAVIAGLRRQAESIGARRVVLAYEACGFGFGWHDELTAAGLECYVLAPSKMARSAHQRKRKTDEKDAEAILGLVRSHELAGAALPKVWVPDLQTRDDRELVRRRLALAEQAAKVKVQIRWLLQRNGQEVSPAEAWSEPYYLWLKELAGGGLAKGAAATLSSMLGELAWFQEELVRLEGQIKELSQQPRYASPVAALRRHKGVGRLTALVFLTELGRLSRFKNRQQLGSYLGLTPSSFESGVADDRKGHITHQGPSRVRKVLCQAVWSRLRVVPEEKAAYERLVRRNPQHKKVAVVARMRTLGVVLWHEGLAAQAALASGLKRGGHCPLSPGVVGAVSAA

SEQ ID NO: 302865 - protein, 338 aa, unidentified
MSQLSKSAAGVIFCGIDVSAATLAVAVEQQDQPVAEREFPNNGSGHKALIAWLSQRGHARVSLEATGVYSLDLALALDAAEGVEVQVLNPKVAHRFGQTLSRSKTDPVDARTLAAYSRRMEFTGWRAPSRSQLQLRSLTRHIDNLTAELTRGKNRLHAAKVSDMTPACIVEDLHNALESLECRIHVLRREALALVRADAVLKENFELLISIPGIARVSALQILGELVVLSPELSVRQWVAHSGLDPAHHISGSSIHRPSRISRAGNRALRRVLYMPALVAIQHDPHIKAFYRALVHRHKAKMQALIAVARKLLHAIYGVLKSATPYDGQKLFPQIQAI

SEQ ID NO: 302866 - protein, 347 aa, unidentified
MRFYTKQHQFYCGIDLHARTMYVCILDQHGTILVHRNMKASPEMFLKAIAPYRADLVVCVECIFTWYWLADLCAQEGIPFVLGHALYMKAIHGGKAKNDKIDSQKIAALLRGGMLPEAYVYPAEMRATRDLLRRRTHLMRKRAELLAHVQNTNSQYNLPEIGKKITYKANRDGVAERFEDVAVQKTIEIDLALITYYDDLLKDLELYILKTAKQHDANTLYLLQTIPGIGKILSLVLLYEIHDIRRFPRVQDFASYARLVICSKESAGKRLGTSGKKIGNAHLKWAFSEAATLFLRQNPAGQKLLGRLEKKHDKGKALSILAHKLGRAVYHMLKRKVAFDMDLFLRP

SEQ ID NO: 302867 - protein, 400 aa, unidentified
MNPVIGLDVSKGESHAQAFADRGTPYGKIFRFKHDLEGLASFLRFAQDLESFTGKRATVVLEATGHYHSSVVQFLEEHQYLHIVINPLLSHQAKKSNLRKVKTDAADAYQLGEMYYKEELEPYKKRGQYLMNLRYLTRQHESLTDMYVQAKLQFQAVLDQVFPEYHGVFGDLYSKVSLRFLVLYPTSQTVLAMSEKDVMANIQRLAGHVNPSCWSLKSAQKLMAAAERNPFKETAFPSQLISLELLINLLLQYQEHLAKLDKSIEALAEELMEFDLIQSIPGIGTKIAATILAEIGEIDRFDHAKKLIAFAGIDPSVFSSGKFTASRNSITKRGSRRLRTALYQAVRCGLRSSRNKKLRAFYDKKRAEGKLFKVAVIACANKLIHWIYAILTKKEPFRLD

SEQ ID NO: 302868 - protein, 371 aa, unidentified
MKKDSTTKFIGLDVHSKTISVAIADEGRKGEVRHYGTIDNTFEAIDKVIKSFTATGTELKFIYEAGPCGFALYRYLSGNGFKCIITAPGLIPKRSGVRIKNDRRDALTLARLYRAGELIGIYVPEPEDEAIRDLARARDDARVAERKAKQRLNSFLLRNNLIYPGKTKWNRTYFDWLGLVGMKYPAQKIALQEYIEAVHECNGRVKRLSEQISLAVEEWRMAPMVKALQALRGVSLICATVTVAELGDLSRFNKPKELMAYLGLVPSEHSSGESIRRGHITKTGNKHARRVLVEGAWTYKHHARVTRPLIKRQRDLPKNICQISWKAQLRLCARYRRMMVRKKPMQVVVIAIARELAAFMWAIAQEVKAAA

SEQ ID NO: 302869 - protein, 343 aa, unidentified
MDHYAGIDVSLEQSSVCVVDAAGGIVREAKVASEPEALIGFLGGLPRPVARVGLEAGPLSQWLQAALVKAGYDAVLLETRHVKAALSAMIVKTDRKDARGIAQLLRMGWFRPVHGKSAPAQEVRALLVARKQLQAKMRDVELSLRGLLRGFGLKVGEISKGQFATRVRFLVAGHSMLERIAEAMLQAREALRTEFTKLHRAMPAIVREDAVCRRLITVPGVGALIAVTFTSGVDDPGRFTRSKGVGAHFGLTPRKYQSGETDVTGAVSRVGDAMVRTALYEGAHILLTRAVRFSALKRWALEVARRRGMKRAKVALARKLAVILHRMWVNGTTFRWGREAAAA

SEQ ID NO: 302870 - protein, 400 aa, unidentified
MISVGIDVSKGKSTVCLLKPYGEIICKPFEVQHTEKDLEELANLLQKLDGEIKMVMEATGIYHLPILTFLLEEGFFISVINPFMMKRFARDNSLRGAKNDRLDSVMIASYGIEKWHKLKKYEVNDGIYPELRFLGRQYHRFMQTHVKHVQELTHLLDHTAPGLKAMFNSWNEHSNRDKLSDFVERFWHFDLITSLSREEFVEQYLLWAKEKKYHQSRSKAEKIYDLASNGIPTLSSRTPSTQMIIQEAINVLRIVNNSLYRILSRMKELAKSLPEYATVRSMGGVGDALAPQLIAEIGDVRRLHNGHALVALAGIDPPPYESGQFVGTHRKISKRGSPILRKIGFEVMRMLKSHKEPEDNAVYNYILKKEAEGKNKKLAKIAGLNKFLRIYYARVMEVYR

SEQ ID NO: 302871 - protein, 423 aa, unidentified
MGKTIPICCGVDVHKKFLVATILTGDYLIPQCKQKHFGTSFRNLLAFKQWLLDNNCKNVCMESTGKYWVPVWNILEGVVNVVIANPKWVSAVKGNKDDKKDSKWIGSLFRMGLVPSSYIPGKDIRILREFTRYRSKLISMRSSERNRYQNAFTVCNLTLDAVVSDMFGKSAMAIENYLLDTDIVNPEFCATLLQKKLKKKSTEIIEAVEGFNMTQEQKERVRIIQGHFADIDKRISQIDEIIGRLTAEYEGTISLLCTIPGIDRRLAITIISEIGTDMSEFGSSRRLCSWAGLVPGNNQSAGKKKSVRITRAGVYLKPALVEAAHAAVKATEKNPYFRIKYEKIMKRRGKKRAIIAIARMILTSIYAMVSTGEVFNPSDLLKYDMPEELQKKRTLAEAKDAVKLLVSLGLVAEGSISLEALAS

SEQ ID NO: 302872 - protein, 408 aa, unidentified
MNAVGIDVSKGRSTVAILRPMGEVVQPPEDVMHDAISLERLAYKILALGEETKVLMEATGRYHEPVAAELHEHGIFVSVVNPLVIHNYSTENSVRKVKNDQKDSLKIAKYCLDRWEKLREYTPMDALRQQLKLISRQYDLYMKTRVTLENNLISLTDKVFPGVNEMFKSPERADGHQKWVDFITTFWHCECISRVSEEAFTERYKKWCKRKGYNFSATKAADIYIDSLGHIVTLPKNDNTKLLIQTAAKEFTSTSELMALVKAQMIALAKQLPEYDTVMAMYGVGDVTGPQLMAEIGDVRNYPRRSSIVAFAGIDPEVDKSGKNQSDGKPTTKRGSPHLRKTLFQIMSTYLKLSPQDEPVYQFIDKKRAEGKPYYVYMTAGANKFLRIYYARVKECMAAPEDEESSEG

SEQ ID NO: 302873 - protein, 411 aa, unidentified
MDVVHPYCCGLDIHKKLIVACSITPGTDGQPHKQLRSFGTMSDDLQQLATWLAEQGVSHVAMESTGSFWKPIFNMLEDHFELLLVNAQHLKAVPGRKTDVKDAEWIADLLRHGLLKPSFVPERAQRELRELVRYRTSVIQERATAANRLQKVLEGANIKLASVASDVLGRSSREMLEALLAGQTDTAAMAELARGQLRTKRALLERALAGNFAPHQRFLVAEILAHIDFLDQTLERLNDEVAARERPFEEQLAEVDSIPGVGRRTAEIVLAEVGPDVRRFVTAGHLASWAGVCPGQDESAGKHRSGKTRKGNRWLRAALVEAAHSAIRTKTYLGAQFRRLASRRGPKKAIVAVAHSILTIIYHLLLDGHAYDDLGDSYFDQRHQQHVTHRLTQRLERLGYHVTLEPITSAA

SEQ ID NO: 302874 - protein, 402 aa, unidentified
MMHRKPGEVVGGVDTHLDVHVAAVVDHVGQILETSSFPATPAGYRQLLAWLRRFGLVRAVGVEGTGAYGAGLARHLGRHGIDVIEVNRPDRQRRRRRGKSDTTDAEAAARAVLSGDATVTPKTGDGQVEGLRALRIARRSALKARTQTALQIRDLILTAPDALRAQLEPLDAAARAERCARFRCGDPTDPIQAIKRALRILGRRYQQLSDEIAELDDLIAGLCVQINPALMGARGVGPEVAATLLVIAGDNPERLRSDAALAALCGASPIEASSGRVVRHRLNRGGNREGNNALWRIVMVRMATCPRTRAYVNKRTAQGRTKKEIIRCLQRYVAREIHSLLVNDHTVITGTDLRRRRQHAQLTLTDAAEALNSWPIAISRLERGLTHDTDLATRYHAWLQPA

SEQ ID NO: 302875 - protein, 386 aa, unidentified
MPQLNDLSRSLVILEQDATLIAVIEMGQSSWLVAGIVPGVERSPLKKLAVDESALLKLLNRWREEAEKAGHRIERIAIAFEAGRDGFWLARWLRARDIEAHVIHASSVAVSREHRRAKTDRLDTELLKRAFLGWLRGERDHCKMVAIPTIGDEDAKRPNRERESLVGEQTRIVNRMKAALSRLGIRGFNPKLKKAAERLEDLRTPEEEPIPPNTLAELRRDMERRRLVRSQIRDIEDARLERIEQARGDGPHAMVRLLARVIGVGIETADMLVQEVLSRNLRDRRAVARYGGLTGSPDESGKKRREKGLARSGNARVRRGMIQLAWRFLMFQKDSALAHWFYARTKHAPQTRKTMIVALARKLLIALWRFVREGAIPEGIVLRPAL

SEQ ID NO: 302876 - protein, 377 aa, unidentified
MGDYSDAFIGIDTSKLRNSVAIADAGRGGEVRFLGEIENTAAATAKLVRKLAAKYERLTFCYEAGPTGYGLHRQIKGLGYECTVVAPSLIPKRRGDKVKTNRRDALSLAKLLRADELTAVWVPDGRHEAMRDLTRARETAMLDLRTKRQHVSAFLLRLGRPYPESKKTWTGAHMSWIASQKLDHPQQRLVLEEMMLAIRQVQDRLARLEQAIAAAVPEWSLALLVTALMAMRGIDLISATTLLAEIGDLSRFQTPTELMAYLGLVPSEASTGDTVKRGPITKAGNRRARRMLVECSWSYQHPPRVGQAKQPKVDAAPPAVREIAWKAQCRLYRRYRMLIRKGKLKTVAIVAIARELAGFIWAVARAASTTRIAAATN

SEQ ID NO: 302877 - protein, 343 aa, unidentified
MSIQVIGIDLGKSNFHLVAHDPKGQAILRKKLSRQQLVQFVQNTPASTIAFEACGGAHWLGRLCMTYGHTVKLLPPQYVKPYVKGNKNDFIDADAIAEAATRPSMRYVPVKSEEAQLLSAIHRIRQGYIKDRTACMSRIGALLLEFGVSLPQGHSVMKALPAWLAEHARHLPALIHNELCGLHQHYQVLMLKVAEQDNKLKRYLASNEDAQLLKSIPGIGDITASQCIAELGNGGQFTNGRNLAAWLGLVPHQHSTGGKARLLGISKRGNKHLRTLLIHGARAILSRPEKTGAVFGNWLTKLRASKPFNVVCVALANKLARMVWAVLKYRREFSAAKLQSGYA

SEQ ID NO: 302878 - protein, 369 aa, unidentified
MADVTLFVGLDVHKKTIAVALADGTAGADVRFYGTIANTPDAVRTLGKKLSKAGQQLHLCYEAGPCGYGVQRQLTRLGHRCDVVAPALIPRKAGDKVKTDRRDAMMLAQTLRAGQLTSVWIPDEAHEAMRDLVRLRAQAMRDLRKTRQQLLSFLLRHGLDSPYGHWTKMHRRWLGELVFAHPAQHLAHEEMLQRIERAEALCDRLKQAILESVPQWSLAPVVQAIQALRGVSLIVAAVIVAEVGCFGRFDSPRTLMAYLGLNPSEHSSGATIRRGSITKTGNALARTCLVEAAWTYRFPARVTQIIRDRLKALPEPIRNVAWKAQVRLSARYRKLIAAGKPAPKVVVAIARELVGFIWAIARMVEPKLA

SEQ ID NO: 302879 - protein, 272 aa, unidentified
MTVKTVGLDLAKDVFQVHGISENGRVVFNKAIKRAKLLSFFEALPPCRVGMEACGSSHHWGRQLRKLGHEVKLMPAGYVKPYVKRGKSDAVDAEAICEAVRRPTMRFVEIKTEDQQAILSIHRTRDLAVRQRTQLANMIRSLLREFGHVLPIGIEAVTAFAKRHHEGDHLDMPDIANGMLGIQCYQFIGMNERISGYSKMIEQHAMLNSDARRLMRMPGIGPVTASAIVATIGDAHQFRTGRDLAAWLGLTPLNKSSGGKERLAITDGGHDG

SEQ ID NO: 302880 - protein, 254 aa, unidentified
MYNYIGIDVSKQTLKVFDETKEYEVPNEKGLKTFKKLLKKDYGKEWIETKLIYEPTGPYSNYLREFASTNKLKVYEVNPKKSANFAKVLGNRSKTDAVDAKMLYRFHLLLKESELFIPEIDKITEQLGSFIHSYEIIQKTRTMLSNHLHSMEYKSGADTKIKESIKKEIKHLCEMEENLEKETEAFVENNQETREDLKNLLSIKGIGVISAINLLYLFRKYSDTNRNEITALAGLDPVQRQSGSSLNGGRKITC

SEQ ID NO: 302881 - protein, 375 aa, unidentified
MKQKLRFLGLDVHAETIAVAIAEPDGEVRSLGTIPNRLESVRKLIKKLGPAEKLRACYEAGPTGYVVYWQLAELGVKCDVVAPTLVPVKAGDRVKTDRRDAQKLARSHRSGDLTAVWVPDEGSEALRDLVRTREAAKQDQLRARHRLSKFLLRSGQRPPTGIRPWTRPYLIWVAQLRFTQMAQEATRLDYLHEVEHMRERVERLERAITEAVKLASPALQQVINDLQALRGIADISAVTIAAELGQVSRFDGARQLMGYCGAVPSEDSSGKRTRRGSITKTGNAHLRRIVVEAAWSYHRPPCIWYGLRKRQENISEEVKEIAWKAQHRLHKRYMRLAAAGKDKRKITTAVARELLGFIWAIGTRAETTVRQRIAA

SEQ ID NO: 302882 - protein, 367 aa, unidentified
MKKVSTVEARQTRNFREQKLTIGLDLGDRSSWYCVLDEAGEVLLEQKLGTTPKAMKEGFGGMPRSRIALETGTHSPWVSRVLSELGHEVIVAHARNVRLIGESRKKDDRFDARTLARLARIDPQLLAPVKHRSAQAQSHLMVIRARAGLVRARTSLINTARGLTKSYGERLRGCSPRNMNAEKARQLSPELQAALEPLLTAIESLSERIYEYSQKIEKIAKESYPQVARLKQVKGVGTLIALTYMLTLEDAQRFRKSRDVGCYVGLQPGRRNSGQSEPQLHISKEGDPYLRTLLVQGAHHILGPFGADSDLRRWGLKLAERGGKNGKKRAVIATARKLAVLLHRLWVSGEAYEPLRNSRREMLPAAA

SEQ ID NO: 302883 - protein, 412 aa, unidentified
MEMLYQRCCGLDVHKRTVVACLLTTASDGTVNKQVRTFGTMTADLLALAEWLDAAACTHIAMESTGVFWKPIYNLLEGLFELVVVNAQHMKAVPGRKTDVRDAEWIADLLRHGLLRPSFIPARPQRELRELTRYRMVLVRERAEEINRLQKVLEGANIKLAAVATDILGKSGREMLRALVGGATDAAALAELARGRMREKIPQLEQALSGHFAAHQQFLVAQQLAHIEGLEALIERVSQEITARLAAEEEAIQILQTIPGVGRRIAEILVAEVGTNLTRFKSAAHLASWAGVCPGNDESAGKRRSGKTRKGSPWLRTALVEAAQAAGRTKETYLAAQYRRLTARRGVKRAAVAVAHTILVIVYHLLTRHEAYRELGMTYFDERDRQRVERRLVHRLEALGYVVALHPAASGA

SEQ ID NO: 302884 - protein, 345 aa, unidentified
MPIVGGLDIHRKQITFDYLDTATGQVRRGQIAPADRVHLRAWLARFAGREDVAFALEGCAGWRYVAEELAAAGITAHLAEPADTAFARGRKRHAKTDKTDSRHLRQLLAEGRLPECWIPPARILECRALLELYNDLRRERTAWAQRIHAVLFHQGAPALGEGALRTEKGAAGLRAAAAAHLSPAGQLQVATALEVIDALEARLHVVRHQLLDAARHLAGAKALAARLYGVGPVTALAITCWLGGAGRFSSSRQAVRFAGLDITVSSSDRKGPPGKLSRQGPPVLRWAVYEAGKAHARTSAPDHRYYATVKDRKNSKRACLSEARKILRQAHHILAELGDDALAAA

SEQ ID NO: 302885 - protein, 359 aa, unidentified
MKGTKVLKQSLGIDVSKDSLSFCLGMLKSDLSKEFIQGNDVLNNKKGFKELTKWLNTYSSKKGLPVIVMEATGVYHEQIAQYLYNLNYDVCIMQSGRVKKYAQSLDQRSKTDALDSKMLSMLGCERNLTPWTPPSETLQDLKFLSRERSRLVKERSIEKNRFHAMNVASYAYKKAIKRYKKRIQLLNLQITEIEAEMQEIVNKERVLSDKINFLRSIPGLSFISVATVVAETSGFSLFTSGKQLVSYSGYDVVLRESGNYKGKTKISKKGNKHIRAILHMPSMTAIRLNPTLKPFYDRLKPRKAKPLIAVVAVQRKLLLLMYSLWKNNQYYDPKHEIKKAARKQVLAAQDRSKNEFATS

SEQ ID NO: 302886 - protein, 361 aa, unidentified
MLESIALVGLDVHLAQSVAAVLDPVSGELRVERLRGAPGDVVPVFLEALGRPVRAVYEAGPTGFALARAAAARGLDLRVVSPGSIPKAPGDRVKTDRRDAKRIVRLFAAGELSFSFVPSEEEEHFRDLVRCIDDARVDLMRSRHRLSKFLLRRGLRFPGRAWTQPHQRWLGKISFDDALSRAVLIDYCAAIDALAHRRRELIVVLEDAVATSGYAETVGRLRCFRGINTLTAAGLCAEVGNFERFAKPGLLSGFLGIVPSEYTSSEKRVQGHITKAGPTHARRLLVESAHHYRRRPRVGLELAARQAGQDPRVVAVAWRAQRRLYSRWAHLAGERGKPTGTVAVACARELAAFCWEAATLN

SEQ ID NO: 302887 - protein, 445 aa, unidentified
MAKKARARPAWTVAHPDAAAIDIGAYSHYVSVPEDRDERSVREFGCHTAQLDQMAEWLHECSIKTVALESTGVYWIPVYEVLQARGLDVWLVNPKHTRNVTGRKSDVLDCQWLQQLHTFGLLNRAFRPEANVCEVREIARLRETMIDERTRHVQRMQSALTQMNVQLSSVLSDIAGETGMAIMRAIVAGERDAAKLAQLRNYRVHASAEQLEAALRGTCKSEHLFKLSHELACYDFINTRLAVIDAELQRLLRAMAVQDSPIQVRGKTRAKNAPKFDVRQALLNWSGVDLTEVPGIEALTAMKVLAEIGPDLHRFKTSKRFCSWLGLCPGTQITGGKRLDGKTKRLPNRVSQALKEAASGLARSKCAMGAYYRRMALRMSTSKAITAVAHKLARIVYAMLTGQNQYQAQQLQMHDQRYQQRVVRGLRKRALEMGFDLIERTPAAV

SEQ ID NO: 302888 - protein, 410 aa, unidentified
MSPLYVGIDVSSKSNVAYLMKPDGSKHSNFSVPNSRDGSRQLVKRILSAITSESLTDVVIGLEATSVYGDNLVCFLREDGSLAPYNKKIHVLNPKQVNKFKLSYNDLPKNDYVDSFVIADCLRFGRINKEVYLGDYRYAALKNLTRARFFAVQNLTREKQRFMNQLFKKYSTMAQEKVFSDTFSTTALAVYESFESAETLANMDLHQLTEFIIEKGKNRFPDPDSVAKAIQKAARSSYRLPKTVNDSVNQVLSISISSMRAMESQIKAFDKAIAEQMALIPNTLTSVNGIGPVYSAGIIAEIGDINRFPTQASLAKYAGLVWSQHQSGDFEAQNTRLIHSGNRYLKYYLCEAALSLVRCDAEYRSFYHRKYKEVNKYQHKRALALTARKLVRLVFRLLKDNCLYRAPESK

SEQ ID NO: 302889 - protein, 438 aa, unidentified
MSNKVIFNPDDLFISVGIDVGADFSWMSIALPNQQFVGKPYKILHSDMNSLTTAVSKIKEAEELYSLESRIFLESTGIYHYPLFRYLCDKGFNCSVINPIITKNSTNMNIRKVHNDRFDSKKAALVGLKPDLKVSLMPSDLALNCRNLCREYYDLMDNRSAYVNKLQGELRMAFPQYLGIFSKVTINTSLTLLETYTSPNAFIEADKQEIIDTIKSTARFGLTYAEKKYNAIIQAAHDANEFGHIIDSNIKRIRLYISFIRKYNKEIASILDALHELVASNEDADFAKQIHLIETFKGAGFLSAVSLMGEIGDFSAFSKPKQLFAYFGLDPAVKQSGKFEGTKVQMSKRGSAIARRVIHVLTLQSISVSKNNEAKNPVLRDYYLKKCKSKPKLVAMGAVSHKVCNIIFAMLRDNKPFEIITPQEHIKQYNAAKCDVAA

SEQ ID NO: 302890 - protein, 342 aa, unidentified
MNIPVRIGMDTSKSVFQLHGVDENEVVVVRRQFRRAEMIRYFERLPPVLVAIESCGSSHHWGRLLQSFGHEVKLIPPQYVKAYVKRGKNDAADAEALCEAVTRPSMRFVPVKSKERQAACMLMTVRERLVSVKSQLSNAFRSYAAEFGIVGPAGRQNVAALIKRVLEDDSLPEMARDLFRLQADEYAAVQARLAKIEAKLMKWHREDDISRRIATIPGVGPIGSSMLSMKAPPPETFRSGRDFAAWLGLTPKDHSTGGRQRLGGIAKAGDSALRSTLIVGATALLRHVRKGRHKPTPWLASLLERKPPKLVAVALANKFARVAWRLMISGGVYNQPVAAMPT

SEQ ID NO: 302891 - protein, 404 aa, unidentified
MGIDLGGEHHQVHIINPAGESLAERLVPHTGAGISEFLDWLAQLTGPDPASVAVAVENPRGAVIEALLERGYAVYSINPKQLDRFRDRFSVAGAKDDSRDGCVLAHSLRTDLPCFRRPRVEHAKILLLRELSRTHDQIVEDLRRAANQLNDSIRRYFPGLLALCPGTDEPWLWHLLQLAPLPAPAARLSKQRLATLLKQHRIRRFSSDDLCAVLQARALPMAPGSAEAIAEQVILLLPRLTQLHQQRGQLEQRIEKLLEELASDESYSGHRDVTILRSMPGVGRGFTAAVLSEAPTALADRDYRALRSLAGSAPVTKQSGKSRSVIMRHACNGRLRTALHHSTGVHIQQDARARQQYADLRQHGHSHGRAIRGVGDRMLARLIAMLKQHTPYDPARRQALCQDQ

SEQ ID NO: 302892 - protein, 345 aa, unidentified
MTTMNYIGLDVHKKTISYCVKDVSGRIQQEGKIGSTRRELDCWMKTLPQPWTVAMEATIFSGWIYDHLLPHATQIKVAHPLMLRAIAAAKKKNDQIDASKLADCLRCDFLPECHMMPRAIRDRRRTLRYRHLLVRQMVQMKNRVSGLLMETGVEYNKQRLHKVSYFRELLSANEEVPPSIRPLLKLSRETIERCQKTEYALVSSLQRDPVLADRIKRLRTVPGVGPITALTWALEIGDVSRFGSIKQAISYCGLCGDERSSADKAMRMPLSKQRNKHIQRALVEAAKLAPRQSHELAVIYDQERQKGNSNRATLAVARKMVAYLLAVDRQQRDFVPAEERRTSAA

SEQ ID NO: 302893 - protein, 347 aa, unidentified
MTIIRIGLDTAKHVFQVHGVDDGEQPVVRRQLRRSEIETFFGKLPPTRIGLEACGASHHWARVLGGLGHDVVLLPPQYIKPYIKRGKNDAIDAWAFSPRACPVGAICEAMSRPGMRFVAIKSAEQQAGLMLLRVRDLLVKQRTMLINAIRGHAAEFGVTAAKGPVKVSELLQRARAEETGLPALARDMLGVLSGQLDGIGVRLKALESELMALHKHNQLSQCLATQPGIGPIGALNFALKVTDPQGFRSARHFSAWLGLTPKENASGGRRRPGRISRQGDEALRQLLVLGATARIRFAKPGRASAWLIDLLARRPKKLAAIALANKMARALWAMMVSGEVYRQPKAA

SEQ ID NO: 302894 - protein, 501 aa, unidentified
MRTPKVKHCEVVNNSAGDHNGVRRHLASARTRSSLPNVTNIGLRSPVVPSAPGQTYERTSSLEDPCIRFTHRRSDQAKRGINMNATEWNEQPYFAALDWARSHHDVVIIDRLGQIKETIRFDHTAEGWQSFQRLARQHPHLPVAVETSHGTVVEQLFAAGVSVYPINPKAAERYRERQAPSGVKDDQLDAWSMADALRLDGHMWRALAMKDPIVAELQLLCRDEIALIEQRTAFVNQLKQALHEYYPSALEAFDDWVSPSAWNFVLTFPTPHQLQHAGRRRWEKFLHVHKLWRAETVETRIAIFGRATALSGSAPAVAAKSLLAVTLARLLRQLEGQLDAYRERITAVFASHPDHDLFGSLPGAGPKLAPRLLSEIGDHRARFVDAEGLQCVAGTAPVTYQSGKRLRYQKMRHACDDTLRATVHLWANLSRPQCAWAEAYYQAHRKKGQSHACALRCLGQRWLKILWKMWQSRTPYDEALHTRNQTQHGSWVLALNSPQSS

SEQ ID NO: 302895 - protein, 338 aa, unidentified
MNCTTLGIDLAKQVFQLHGVDARGHVVVQKRVSRSKLRETVAQLPPCLIGMEACSSAQYWAREFEKLGHTVKLISPQFVKPYVKGNKNDSRDAEAICEAVARPHMRFVPLKTVESQDSQAIHRMRSRLIKERTALVNQIRGVLAERGIVIAQGLSRLRKQLPTIVEDLSNELTPLGREVRRELYDHLVALDERVSRAEGLVQRVFTQSVACQKLAQVEGIGPVVATAVVAAVGNAREFPNGRHLAAWLGLVPRQHSTGGKERLLGISKRGDRYLRTLLIHGARATVHRARRKTDARSRWIQNLEQRRGKNIATVAIANKNARIAWAPLTSDAEYRKAA

SEQ ID NO: 302896 - protein, 324 aa, unidentified
MYAALDLHKKYSEAVVMDEDGVVLRKGRMQNDPKMIERFSNSLDNATVVIESSSTWYWVYCILAKKHKVVLSNPVKTKAIASAKVKTDRIDALTLANLLRGGYIAECYIPPKHIMELRELVRYRANLVRLRSNLKNRVHAYLLMNNIRIEGTPFSKQFLEEVRKIDDRRVQGYLRIIDCINVEIHEASRVISDEAVNNEDAKLLMTMPGIGFYSALLIVSEIGDVNRFPDSHHLVGYAGLAPSTHSSGGRTYHGRIMKAGSPYLRWVLNQCVRANLRSEPDGALARFYARLARKKGDAKAVVATSAKMLRVIYWMLREKQPYHG

SEQ ID NO: 302897 - protein, 338 aa, unidentified
MYYTGIDLHKFTSYLTTVDSSGKIVKQENIKNVDHNFVQYFNSIHGEHKTTVESTMTWYWLNDLFTSLKIPLVLAHAKYVKAIAYAKVKTDKVDSHTLAQLLRMDYIPEAHKISGENRTLRDALRARLKIVQRHTSITNSMHLLLAKYNFDSPEQLSGIAKYQYEQLTEVEELLNNQILDLEKQLYPSLIPNEDIQRLLWIPGIGKMNAFNIVLEVDDINRFADVKNFFSYCRLVPSARNSAGKSKQRSSKDGNKYLKVVFSDAAVHAIHYYPVIRKYNNSLLRKKNKQVAKTIIAKEIAKIVYYVLKTKTNFNNKFKGKDLEHSKSLQWPRVINPYA

SEQ ID NO: 302898 - protein, 418 aa, unidentified
MQTELSQFTAIVGIDWADKKHDVCIQAASSGQRQFYQVPHKVDKLDEWARSLYRQYGGPIAIALELSKGPLVSALQKYDFFVIFPIDPTTLANHRKTFTLSGAKDDPTDAEYALDLLLKHTEHFKALNPQSVEMRTLMTLVEQRRRLMDDRVRITNRLRSALKQYYPQALEWFDRIDTQLFCDFIKRWPSLAQARRARKSTLEKFFHEHNMNRKTLLERRLTAIKSALPLTEDEAIITPYRLQTMTLVAQLEVALVSIRRYDDEIATLAPQHPDYGLFDCLPGAGPSLAPRLLVAFGEQRERYGKAAELQKYAGIAPVTERSGQSTWVHWRWQCPTFLRQTFVEWAAQTINKSYWAGLYYYQQKAKGCSHQAAVRALAFKWIRILYRCWITRTPYDEAKYLKTLQQRGSPLLKMAEAA

SEQ ID NO: 302899 - protein, 341 aa, unidentified
MSELYVGLDLHSGNTYMGLIEKGTMKRVFEKRVRNNLEEVVWTLAPYREEIRGIAVESTFNWYFMVDGLNDAGYDCVHLANPSAIQQYKGLKYADDRHDAFWLAQMLSLGILPEGYIYPREERPVRDLLRKRSFLVKQRTAHILALQSMIERNTGVHMSANALRKVKAEDIRRILKEDHLVLLGTTSLETIAFFGKNIRNIEKTVKREVKTREAFEKLHMVPGIGDILAMTIMLEVGDISRFARVGDFTSYCRCVPTGRLSNGKSKGKGNAKNGNRYLAWAFIEAAYLSMRQSPKIAGYYKRKASRTHKMVAAKTIASKLARACYYILRDGVEFKEEMLFC

SEQ ID NO: 302900 - protein, 397 aa, unidentified
MRNRYGSVAYGGMDVHRKFSSVTLRDAAGRVVVRERLDHEDRRKMREHLRRWPAGMPLVMEASFGWPWVSDEVEAAGHRPLLSNCYKVEQMRKARGQVKTNTKDADLISMLPAESTRWWEVWRAPPDVRDLREWMRHRADLVVLQTEVKNRVHALLARQGVFHPFSDLFGGQGRAFLHRLCEDGYHANGALPPGTLEAIRSDVRVLLALRAELATITWRLRGRLTQDPLVRRLKTIPGIGLILAHVVASEAGVIGRFRSHRNLASYACLAPRSDDTGEADPTRAPLGRHLGDRGNRTLKWAFIQAAHAAVRHGGRWRAMFDRHTDGGTKNRGRGYVKVARQLAKVVFVVWSREVDYTETPSPRPGSAPVRRRKKDSRPGTGQPLHPMAEVSGPQASS

SEQ ID NO: 302901 - protein, 331 aa, unidentified
MEEVKRFVGIDVAKVALDVFIGSAGGAFSVANDEVGIQELLRQMKPADFVIVEATGGLETPVAGALAAAGIPVAIVNPRQVRDFARATGKLAKTDRLDAEVLARFGEAVRPEARPLADAQAQALEALVTRRRQLIEMLTAEKNRRARAPKVLHRSIDEHIRWLEKRLSGLDAELAELIRETPLWRERDELLRSVPGVGKVLSSTLLAQLPELGMLNRKQIAALAGLAPFNRDSGNMRGSRCIWGGRAQVRRVLYMATVAGVRSNPTIRTFYLRLRTNGKHAKPALIACMRKFLVILNAMLHNKTHWQTPALISPTAPPFPLLGAVSEHGCC

SEQ ID NO: 302902 - protein, 345 aa, unidentified
MGEVITVGLDIAKSVFQVHGVDETGAVVIRKRISRAKMLAFFGSLRPCLIGIEACPAAHHWGRELQTFGHTVRLMPPSYVKAYVKRSKNDANDATAICEAVTRPSMRFVPIKTKDQQAALMLHRARQLLVRQRTMLSNAIRGHLAELGIVSAKGRQGTGTLLEIIADAGDGRVPPVARKVLDVLARQYHALGAELGSIDRSILAWHRSCDASRRLEEIPGIGPVVATALVAEIGDNWKMFGSGRSLAAWIGLVPRQQSTGGKERLGGITKQGNRYLRWLLVSGAMAVIRYAQKRGTLKRPWLGRLMGRRPTKVAAVALANKIARMAWAIMAHGERYKEPRPLLAA

SEQ ID NO: 302903 - protein, 377 aa, unidentified
MSSSIIWIGMDVHKDTVMVAVYSDDAREPEIVQQLPNDPRKLKRFFQRWGRRGEIRSCYEASGAGYVLQREITEWGHDCEIVAPSLIPIRPGERQKHDRKDATQLARLYRAGELVTIRIPSAAEERVRDLVRCRQCFQREILRSRHYVTKFLARRGLVYREGTNWTRRHRSWLQSLFQQGGLEPEDRSVFSEYLALLDYKVSRREDLDGQIEKLAFSPAYKPKIDRLRCFRGVDTLAAMTLVTEIGDWRRFERPGQLMAYLGLVPSEYSSGDREHRGPITKAGNSRCRHVLVQAAWKYKHRPTVSVDLKKRQSGQLPQAIAHAWKAQHHLHKLFHRIAARKSSRIAVVAVARELVGFLWAVMQELETEQAVTLSTAA

SEQ ID NO: 302904 - protein, 362 aa, unidentified
MATSQITGLPPKSPTLVAPPIAIKNCVGIDVSKDHLEVCFSQMDIQQTVQIKSTRKFANRLGGWKSVDAWVKRLSKTNIPLWLVMEATGVYYEGAAYYLTSQHYQVAVVLPNKSKSFIQSLNLKTKTDAMEARALAQMGLERKMKAWRGFSKTMLTLKRLCRERETIQEHLVAASNQLHAHKYEHNAEKKTLQRAQQHIKFLQKQIQDIDRQIEQTLVQGPDLKAKIDKVCTLKGVSTLTAVTIISETNGFELIENKAQLVSYAGYDVVERQSGSSIKGKTRISKKGNAHIRRALHYPALSAARYDPNLHALYQRVVERNPKAKMVALVAVQRKLLVLIYTLFKNNMEYDPNYAKNKTPIPN

SEQ ID NO: 302905 - protein, 360 aa, unidentified
MSEHQQGSSPHNIVVGVDTHRDFHVAAAIDSRGALLGSHTFPATQAGYTDLVAWARSFGDVDRVGVECTGSYGSAISRHFTENNIPVIEVNRTDRSTRRRRGKSDTIDAEAAARAVLGGYAHARAKSADGCVEILRILKLAKESAIKSRTQAINQLKAVLVTAEPGLRESLSGIGTIRLVQRCARLLPGTERNVLAVTKRTLRLLSRRIQYLTTEIEDLQAQIHDVVGDHRPELLDSYGLGPDTAATLLITVGDNPDRVQSEAAFASLCGVAPVEASSGNTTRRRLSRGGDRRANTALYLIALSRMRWDPRTKAYLQRRITEGKTRREALRCLKRYIARELYPLLLGQPKIQAAAMPDAA

SEQ ID NO: 302906 - protein, 349 aa, unidentified
MEKSAKAQAGQVFAGIDVSAHELSVGLRRGIEDRLTVTTFTNSAAGHKALLVFLLHGKARVRVCLEASGNYSLDLAFTLQAHRQVEISVVNPRRARRFAESLGERSKTDRVDARVLCEYAARMPWVPWQPPSPVALHLRALTRAIADLSCIHTQQNNRAHAAAASHALPGLVVKEMRRHQKYLEQRMTRLRREALRLVAGHFELDRRFRLMLTATGVAETSALQILGELAVLPDTLDARQWVAFSGLDPRLFKSGKSVEKRPRISRGGSRHLRRALYMPALVALRRDPYLRCFYQNLLARGQARLQAVVAVMRKLLHALFAMFRTNQPYDGSKLCRAVDITGNAIAACA

SEQ ID NO: 302907 - protein, 339 aa, unidentified
MKEVSTIGLDIAKQVFQVHAIDGRGAAVVRRALRRRQVLRWFAELPRCLVGLEACATAHYWARELAKLGHEVRLIPPAYAKAYVRRNKNDPADAAAICEAVGRPSMRFVAVKTEQQQAAVGLHRVRDLLMKQRTMLRNQLRSLMAEFGVVAPKGRRGLSELLSILADGEERRIPSPLRASLLLVADTLRGIERRLEVIDEQLVAAGRADPSYRHLITAPGYGPILSSAMSAIVTDPAAFRRASDFAASLGIVPRQEGTGGKVWLGPISKRGNGYLRRLLVNGATAVLNSKRAKDDPWLARLLATKPRKVVAVALANKMARIGWALMMRQEDYRTMPAAA

SEQ ID NO: 302908 - protein, 400 aa, unidentified
MLSIGIDVSKGKSTVCGMKPRGEIVYTPFEVQHTREGMSELVSLLRSSGEEVRAVLESTGSYHCPVVAALLENGIFVSVVNSLRMKRFCSQSIRKVKTDRIDAMQIALYGLAYWQELQPTRLPEDTYRELQLLARQYYQMTSLLIKAKVDFNAICDQVLPGMQELMSDHAGRHKLSDFVLRYHHTTHILEMGETRFRKDYCKWAEKKGYRNCERMAALIFATAQNGIPVLPNAPSTQIVITEAIRVLHTVEASRDAILTQMQALAKTLPEYSLVREMPCIGDTLAPRLIAEIGDVRRFHSKRALIAYAGIDAPPYQSGKFCANNRHISKRGNRYLRKTGYEVMQSYVMHKPANDPIFTFIEKKRGEGKSGKLAMVAGLNKFLRVYYGKVTELYRSLPAIE

SEQ ID NO: 302909 - protein, 413 aa, unidentified
MSVTDACEPARPTAGVDWASADHAVAIVDPDGEQTARFAVVHDAAGLRTLVGKLLAAGVDRVGIERPDGPVVDALRQAGLTVYVIPPGQLKNLRSRYGSAGNKDDRFDAYVLADVVRTDHRRLRPLLVDTEPTTALRQSVRARRDLVAHRVAVANQLRAHLQICLPGAVGLFADIDSTISLRFLERFPTQDRADWLSAKRWAAWLSATGYSGRATPETFHTRLSDAARGHSGPAADTAATVTGAFVAVLRTITTQIEALAARIAEQLDLHPDAPIFTSLPRSGTVRAARLLAEIGDARGRFPTADSLACLGGVAPSTRQSGKVCVVSFRWGADKQLRDALCDFAGDSRHANPWAADLYRRARARGHDHPHTVRILARAWVDIIWTCWTTNTPYDPDRHGALQRLLNEDQPAAA

SEQ ID NO: 302910 - protein, 409 aa, unidentified
MQVMYQRCAGIDVHQRFLVVCLITTEAGQRRKEIRTFRHETTNLLALRAWLLQEGCTHVGMESTGVYWMAVYRRLEGFFELIVGNAQHIKGVPGRKTDVQDAEWIANLLQHGLITPSFVPDLEQQDMRDLTRTRVSLVQERARLVNRVQKVLEEAGIKLSSVLSDVMGLSGRAILDALCAGESDPVRLAKLVHKSVHATQEQLSTALTAEVREHHRFLLRELLSLIDAQDRSIRHLEEEIERHLRPFEEQVERCEKITGVSRHVLHVLMAEVGTEMQRFPDGEHLSSWAGVCPGHKESAGKRLSGRSRQGNRYVRAALVQAAHGVRRSRSYLGERYRRLKKRRGSKRAALAVGHSILVIYYQMMKTGQEYQEKGEEFFQRKDRGKGERQLVHRLERMGYQVISPPLRTA

SEQ ID NO: 302911 - protein, 391 aa, unidentified
MYIVGIDIGKNHHEASIVSPEGKQIGRSLRFATTHKGADSLMRFIFKNIGNSPCVFGMEATGHYWYPIYSFLKAKGYTIYVINPIQSDSLKMYIRQTKNDSIDSFLIAEVIRFGQFGTTSMADENILAMRQLCRYRDSVISSRTEIKLRIGTIMEQIFPEYEKQFSSLWVSTSMGILEKYLTPENIENAPIDELFEIIKDKSHNRLTRAKAISIKEAAADTFGIKIAQDAFSFQLKQLIDRMNFLDKQIEALDCQILEYYEKFDCYLHTIPGIGIIGAATILAEIGDISRFKNSSSLIAFAGIDPTVRQSGEFNSTHNHMSKRGSPYLRHAIFLAATTCSFHNSPLNAYYKKKRDQGKHHLTATGAVARKLTTIIYAVLRDSKPYEPKKFC

SEQ ID NO: 302912 - protein, 416 aa, unidentified
MNAVGIDVSSRKSTVAVLRPLGEVVCLPFDVTHDIAGLASLAEKLKAIDGETRVVMEHTGRYYEAVAKALHEAGFFVCAVNPLLIKEYGANSLRRVKTDKADAVKIARYALDNWADLRDFTPMDAIRYDLKTLNRQFQLASKQRTASANNLIALLEQSFPGIRKCFDSPVRSDGTQKWVDFAHSFWHVDCVRKQPFPAFCERYRKWCKRHAYFFKLSNAEEVYALAKRAVVLTPKSKVVKVLVQEAANQLISISRSVEVYRAEMDRLAAMLPEYPVVMAMYGVGKSYGPQLMAEIGDVRRFERKQALVAFAGIDPMPNQSGDKNVRSNKSSKRGSPYLRKTLFNVIRTYLQCAPQDEPVFQFLNRKRAEGKPFYVYMLAAANKFLRRYYAKLRDFFASLDTLQPVAPIPTILKATL

SEQ ID NO: 302913 - protein, 450 aa, unidentified
MAKAQRKKPRKLERNLPVMRPNASGVDIGATEIFVAVPADRDAESVRSFPTFTADLHALADWLRQCRVDTVAMESTSVYWIPLFQILEARGIEVHLVNAQHVHNVPGRKSDVLDCQWLQYLHSVGLLKASFRPEQAVCEIRSLMRHRDNLVQLACVHVQHMQKSLDQMNLQIHHVISDITGVTGLAIVDAIVAGNTVPQELAKRRDYRIKASIETVTKSLVGDYRPEHIFTLKQSLTAYRHYQQLIADCDQEVQRRIETFQSKDAGPTAPADSASPATAPQTSFDLRTHLERIFGVDLTRIPGFDVLRVQTIFSELGADLSDFRTDHSFASWLNLCPKDGTSAGRRIRGPRVKTKNRVTQAFRMAAFSLHNNKSYLGDYYRSQRARHGAIKATKNAAHKLARIFYHLVTTRQPYDETVFAKLEASNQKRKLHKLQTLARHLGYSLVTLPA

SEQ ID NO: 302914 - protein, 415 aa, unidentified
MALKIVYKICCGIDVHKTFVVACIASTNDKGVTSYESHRFSTYTSGLKTLLQWLLDRDCKDVCMESTGKYWIPVYNILESDCSIVLAHPKYVKAIRGKKTDKKDAKWIADLFKHDLVAGSFMPPADIRQLRDLMRYRFKLTCFKSSEKNRLQNCLTVSNIQLGNVVSDTFGKSAQAILDKILENPADTSFDLEPLVFKSLKKKLPELRDAIDGYITPEQAGKLKVIKAHYENLESRKAELEELILALAAPYQQELAILQTAPGISSDFTAIGIISEIGTNMEAFPSAKHLCSWAGLTPTNNESAGKKKSVRVSKAGCYIKPLLVQCANAVVASKKHPEIRNRYLRLKKRRGHKKAIIAIARMLLTALYHMLKNGENYNAELYQKSDLLPVDREITVEQALMIARNQGYKIKSATA

SEQ ID NO: 302915 - protein, 352 aa, unidentified
MVVAVQYRSPSLNKNVMVQIYGIDLGMSSFDVSFLSESGSVRHLSGVKNTVHGISKFLLSLPSSAVLCAEHTGVYGDLLLRLCTLNRTCLCFVPGYQIKHSLGLQRGKSDPLDACRIREYAERFYDLLRPCFYPGEEMSELQELYRTRSLLVESRKRLDTLNIGDNCKSSVSLAADHARRAVLAELNTQISGLDHEIEALIQNSSEFSRNYQILTSIVGVGPVTSCELIIKTENFRKLDTAKKCAAYAGIAPYPKESGKMKCGHKISPMGDKQLKTLLFLCARSAKEHNKEIRLYFLKKHKVEKKHFFVAMNNIANKLLRLIYSLIHKQQTYDRDYIQRDPRCVVISDTNKC

SEQ ID NO: 302916 - protein, 436 aa, unidentified
MCAPDKDGANREVEQFGATTPELERLVLWLKERSVESVAMESTGVYWIPPHEVLERHGMEVVLVSTRELARVPGRKKTDRVDCKWIQRLHSCGLLAGSFRPNEQVCMLRTLVRDRGNLVAEAADWLRRMQKSLDQMNVRLHRAVSQIYGVTGLATMRAIGNGERDPRKLAQLRNRRCHKSEEEIAEQLSGHWREDHLFSLKQALKMYDAIQERIADYEKEILRKLTEMEKEERRGQQAPKLSNSQKSRTIKTRGQEPMRQALYRMSGVDLTTIDAVGVETVQAVLSEYGPDLSRFPTEKQFVQHATLAPHRPTSGGKPTKKKKRGSASTRVAGALRMAAVTLRHTETALGAYYRQIARRLGPDVAVFASARKLAILIYRLLRWGQPYIDEGAAAYEKRYQEARLRRLASAAKNLGFQLTPQPANIDSLQVSAQAQQ

SEQ ID NO: 302917 - protein, 306 aa, unidentified
MHLTANISVPQKNFIAIDLHSDNAVICVRRSALNKAGELVGKNIWCGRVSIRDGLDSFVKALLPYCQDFDHVAVVESTYNRYCLADVFEERGWLLRIADPSTVSQANLKSSDDRTDAQYLAERLRVGSLKHYLPLSYSSRALWDLCRYRMAMVQDCASLKIKLINLYRNQLSKNLLVADLLDRCRNHMQSNYRFDPDILEEFKDPNIRLRVAFEVSRIAMLEEMIEECNAEIQKQCKDQELVKLCKTIPDCGPVLSAVICTEIGTMQRFKSAGDFVTYCRLCSTSKLSNGKSKGLGNAKNGNAYLS

SEQ ID NO: 302918 - protein, 369 aa, unidentified
MDSIQIIALDLGKFKSVACVMDARTRRHGFVTVDTTPAALHDLLSAHAGPADASAEPSRVVVALEACDGAGWVYDLAAALGFDVRVANCCHESWRWRRVKRKTDKDDALKLAKMVLLDHLPTVHVPPPAMRQRRHLVLFRRSVVQRRTASKNAIRSIFSRQGLTELLPRGKKTWSKAGLAQLRTHAKPPADCTGIDELWRGRLHVELELLDAADAQAALVERKLDELGATDAKVQLLQTVPGVGPRPAEAVVVSLDDPHRFKSGSELGSYAGLVPKLIESGQMSRVGGITRRGPSILRGMLIEVAWVVWRHNDWAKSFVAKVSRGAKVSRGMKQRKKIAIVALARRLLAKLWAMLKTNTPWQDPASASA

SEQ ID NO: 302919 - protein, 421 aa, unidentified
MSKSQRVVGFDCGEDEHSAVLLDAAGEFEERFRVINERGQVQELLAELLLAVRAEEQLVVVVESRRSHGRIVSDVAVELGCDLRQVNTVALNHYRDLEGQPRKDDEWDAYLAARMVFLKMGGCREVVEATEEERTLSRLTRTHRRLVDERRKHLARLRAVLLELAPEMLHSSWEGPRPGRKAMLYLLERWPGFKGLERAQLQSIEKILRRCRYGSRATRVAKLIRQMARGISIAGEERHAFTLELDLLVRQIRFCDESRDRLRAEIVHRIERHPVGQKLLEMQGNGPVITGVLVSELLPIARTSTEPKCATYAGVTPLSRKSGKSLDNDKLAQGVNPRVLYALYTSSVVAIKHSAIDRAYYQKKLRGYAGHPKPHVAAFIALSRQRHKLVYKLMTTNARYDKEVLIAAHLSRLEQEQTAAA

SEQ ID NO: 302920 - protein, 437 aa, unidentified
MRFLQIRSACGWMFDCCCGHFGSQRGRETICNDPQVCRIVDLPVYYELETNNGNRDYRIQIGGHYMNYNTVYVGMDVHKESFTLCSCKYEDEKASHYQRTPASYKNVLRYLAFLRTIYGEDTRFVCGYEAGCLGYSLYHQLENFNVECVILAPTTMLEQRSKRRIKTDKRDAEIIARSLAQHNYSPVHIPTETDNQTKEFIRMRDDHKAELKKIKQQILSFCLRQGYQYDGSGNWTAKHVKWLRSLKPTGLYKEILDEYLLTYTILTDKLNRLDQRIEELASKEEYTESVSKLTCFLGIKTHTALSVIVEVGDFQRFVSARKFAGYLGLVPGQHSSGDDRNGLGITKAGNTHVRRLLVESAQSYTRGKIGYKSRVLRSRQAGNSPQVINYADRANERLRRRYYKMVLKDGKKYNIAKTAIARELACFIWGMMTDNIY

SEQ ID NO: 302921 - protein, 329 aa, unidentified
MKRNWFIGIDISKRTLDVAIYDPENKKAKTHFKVPNETKGFKKMLKLLKAEKVDFDSAFICLEYCGIYGLEIGLFLEKKIDFCFCSPLHIKRSLGLTRGKNDKLDAFKIARFSYLFRDDLSPSFMPTAPMLKLKNLMGERHRAVKAATIDKQVLKELSSQMDKKAKLRAQKRLKVLAIDISSIEKEIMSLITGSPELKKNYDLLITITGIAIVNATMMILCTNNFVGITNARSMACYCGVAPFEYTSGSSVRGRTKVSNLANKQMKANLTNAARSAIVHDPELRIYYKRKREEGKAYGTILNAIKFKLITRAYAVINRGTPFVKLRQAG

SEQ ID NO: 302922 - protein, 459 aa, unidentified
MGRKKSKASTWEGLKVIHPDAAGLDIGSEEIWAAVSPHRNPEPVCKFGTFTPDLYSLANWLKSCGTDTVAMESTGVFWIPVYEILEARGFKVYVVNPAHMKKVSGRKSDIQDCQWTQELHSVGLLRASFRPEGEIVALRAYLRHRAGLIEHRAAHIQHMQKALQQMNVQLTQVISDITGVTGLAIIRAIVAGVRDPQELATLRQPGCKKSEEDIAKALTGNYRREHVFALQQALALYDFYTEQITACDVEIERQFANLKPVDDELSPLPPSDKRESNSKNGPSYDARSYLYQLMGVDLVAIPGLNESTVQTIVSETGLDLSAFPTSKDFCSWIGLAPHNDTSAGKQLRSHTLQTNNRAGQAFRMAAQSVAKSPNSAFGAYYRRMRARSGPKQAIVATAHKIARTYYYMVKHRVPFHDLGGEEYERLAQERERKNLEKRAAKLGLTLVEASKTPALAGSF

SEQ ID NO: 302923 - protein, 399 aa, unidentified
MLSADLPITVTLEVIEMGAKRRGPGPSHVLIGPDRAGNVVGIDPHKQTLTATVVDPRGGILACEHFRVSGDGHRALEAWALQFGAVARWGVEGASSWGRHTAMFLCGRGYDVRDVCANRTARNDRARQRGKSDTLDSERIAREVLAHPLLPKAFKRAGEDQGPDEQLQLLAIWHNRRRSILTSRQHLLNEAEHLLCELPLELADQLPHSKAVRPRLAALAARNRRRRYDPPTTLRLRMLDEYRVQIAALDREEKHVIAELAELVRASGSTLGELCGLNTRSVAELLVEVGDPRRFTEGGFARFNATAPLPASTAEGPGEPVRHRYNPGGNRRVNAVLYRMAITQLRCEPRAQAIYNNARAKPHTKKEARRILKRHLSDVVYRRMIRDQASLPAQPLLAA

SEQ ID NO: 302924 - protein, 433 aa, unidentified
MEAMHERVAGLDAHKAMIVACVRRIVGGKVSRECRTFETTTAGLEALLGWLTEAGCTDVAMEATGVYWKPVWNILSDGAFELIVANAAHIKNVPGRKTDVNDAMWIADLVACGLIKASFVPEEEIQELRSLLRARKQLTREQTSHIQRIQKTLEEANIKLDSVISDILGISGRRMIEAMIAGVRNPLRLAELADRRIKASPKALYDALHGRLTDHHRFMLKLYLGQHDSLSEAIARIDRQVHGLIIRMDAEVKAGQATFRALIILLCSIPGISTLAATVILSEIGRDMSRFPTSGHLVAWAGMCPGQNESPTGQARGLKAHGKRKSSRLRKGAPWLKTMLVQCAWAASRKKDSYYKAQFNRLRGKRGPKKAICAVAASMLTAIYHMLKDGTFHQDLGADHFDRRSTEVKAKRLVAQLTKLGFQVQLQPLAEAA

SEQ ID NO: 302925 - protein, 466 aa, unidentified
MENNYILYVGMDVSKGKADAAILKVSDRRSVKPKFLRKKLSFKFVKSEVASFLETVRSYSDVNCTSICFALEVTGIYSTNVYDYIKANLYENESIKFLNTDFVNQWRIAHNIAKSDPLDAQTISTIIGTDLDVQYVNDNVFENKNGYQDLKALVHRHYQIKKIYSQEINRLIAQCDCLFPELQYVFEPKSAAFIAVLSSYPTTHDIINASRVEVFDVVYEATKHRCSMDKVDKLFELCQDTLVPDDISSYGKSIILDLVENIKNIKGQLKSIERYIKDIASLNPAYKLLLTITGCGPITAATVIAETGNIRRFKNADCFVSYSGTSPRNKRSGTSVETMGKISKKGSRYLRHAIYMIAEFARRHNPVLKHQFERIKNGNKKRHKLANIAIANKIARYIYSIMKNKSSFVILHDHIMRLPEETRDTFFNSISLDFPKNTRKQIYQYSDINGELHRFVSIKTDEMIPA

SEQ ID NO: 302926 - protein, 360 aa, unidentified
MLMQKQRKELNFKGENIYVGIDVHLKSWSITILTEHNHHKTFNQPPEPEKLSTYLQAHFPEAVYYSAYEAGFSGLWAHYELESSGIRNIVINPADVPATGKEKMHKTDSVDSRKTARSLRSNELRCIHIPSQSTLSDRSLIRMRVSVVKDLSRLKQRIRMMLHFYGVETPKTFANDTRISKGFQWLKEDAAGAKGINREAFLFLVNEFEAEKQSLLTITRMVTGLSKKVRYKKNMELIRSIPVIGLITGITFLVEIEDITRFQSNDKFAGFIGIIPCCHSSGEKDNKGAMTPRGQVNMKAALIEGSWIAARVDPVLTLSFNRHCRRMESNKAIIGIARKLSNRMYFVLTKQTKHVCGVVQ

SEQ ID NO: 302927 - protein, 410 aa, unidentified
MHKEIHTAVIMTYMEEHIGEIEISNNLKGFQRLVAYVEKCQAKKKLKHLTPLYGLEDVTHYGRNLAVYLLDREHPVKEVNSALSYMERMSYPSVKKNDMWDARCVCAVLMRRYELLPDADPKDYYWIMKQLVHRRNALVKAKSALLQQFHEQIQYDYPSYKKFFFEVECKTSIAFFEQYPSSQTLEGTSVEELAEFLRIPSHNACSTKRAEKILELVEGDAVKAHNYQFGRDFIIQSMMRNIRFILDELGRINKLQKKLVKEVNYHLETLPGVNTVTACALIAQIGDISRFKSADKLANYAGVAPLCFSSGGKGKNVQNKTQGNRELYSVLYLLAMQQIHVNTKGQARNPVLRTYFESKVSGGKTKIQALLCIMRRLVNIIYSMMKNQTAYRMPVLKEPEVTEEKEQKIS

SEQ ID NO: 302928 - protein, 341 aa, unidentified
METATIQKNFYCGGDLHAKTMFLSIMDAKGEILFHRNIPNNPPYFLSVIQPYRHSIAVGVESTFNWYWLADTCQKENIPFFLGHALYMKAIHGGKNKNDRIDATTIANLLRCNMFPPAYPYPKEMRGTRDLLRRRYRYVTLRAESYTHIQGTFNQQAIDGVSSSDVKRKSSRADLPNHFDHPDIAMSVNCDIELSYALDPIINKIEKQVYTRAKYHDHNALSILMTTPGIGKILAFTILYEIYTINRFPSVQNFSSYCRLVKCERTSNGKYTGDGNNKIGNPYLKWAFSEIIIHAQTHSPNIKKYYERLISKHGEGIAKSIMAHKFAVAVYFMLKKQGGIQ

SEQ ID NO: 302929 - protein, 347 aa, unidentified
MRFYNRQHRHYCGIDLHVKTMYICILDSAGQVLVHRNAKSTPEAFLEIVAPYREDLVVAAECMFTWYWLADLCAVEGIAFVLGHALAMKAIHGGKAKNDKIDSHKIAVLLRGGMLPQAYVYPAAMRSTRDLIRRRLHLVRKRGQLLAHIQNTRAQYNRPVFGRKLAYKANRGGVVEHFADPSVQKSIEIDLALIDHYDALVVDLELTIVREAKRHDAEAFHRLRSVPGIGKVLALTILYEIHDVTRFDRVQEFASYARLVKCVHQSGGKKLGTGGAKMGNVHLKWAFSEAAVLFLRHTKDGKKILAGIEKKHGRGKALSILAHKIGRAVFYMLSRGTVFSMEKFLAA

SEQ ID NO: 302930 - protein, 361 aa, unidentified
MKKPTQHLITEVPRRQAKVEMTIGIDLGDVWSHYCTLNQDGDVVDRGRFRTTAKAIEKWFAPVPHARVAMEAGVHSIWISEQLEQLGHEVIVANVRELRAISHSDRKSDDVDAEKLASYARLDPEILRPISRRTVEQQEALTLIRARELLVRLRTAAVNAVRGLTKACGHRMPASSTKCFAQRGQAAMPPGLKLALGPILAQIAEMTLKIKQYDRDIQRMTQSEYAETQPMMTIHGVGHITALTFVLTLGDKTRFGRSRDVGCYLGLRPKRSQSGERDPQLGITKAGNAYLRSLLIECANHILRPHGRDSALRQWGLHLTARGGKQAKNKSVVAVARKLAVLLHHLWTTQEPYIPFYQQAA

SEQ ID NO: 302931 - protein, 436 aa, unidentified
MTLINFVAANQKYYAFNLLSVFIMVFWSVQYLLQHLLVQTQVSHQLLQPLILILQLPQTPQFRHARPGKFFLPVNGMDYFLPLRLTVRNVLTRRITMNIVFLGIDLAKNVFQLCGLNQAGKLVYTKRTGRKELLQTLANIPACLIGIEASTGAFYWQREFEKLGHKVKVISPQYVRPFVRGQKNDGNDAQAIAVALMQPTMQFVPPKSPEQQDIQALHRARQRIVNHRTATVCQIRGLLLDRGIPIGSAVSRARRAIPLILEDAENGLSSRMRRTIAELYDLFNDLGRRIHFFDKEIETVFRQSEACPRIAKVKGIGPKTATAVVAAIGKGTEFKNGRHFAAWLGLVPRQHSSGDRQVLMNMTKKGDKHLRTLFIHGARAVVRVATNNNDGHMNQWVNQLKERRGFNKTTVAVANKNARIIWSMLRNDTGYQVVCN

SEQ ID NO: 302932 - protein, 460 aa, unidentified
MPPRAVGATATHIDALPCVHPNAAGLDVGADQIYACVPSDRDSRPVRAFATFTADLHALADWLEVCGIDTVAMESTGIYWLAIYEILEARGIRVFLVNARQIKIPPGRKSDWKDCQWIQRLHMLGLLQASFRPDAEMALLRAYLRHRAELIAHRAPHILHVQKALHQMNIQLDRVLADITGTTGMAILRAIVAGERDPLVLAQLRNPGCKSSEEKLAKAMQGNWQAPYLFVMRQALELYDFYTQQLAACDVELERYYGAMKPRFESDIDPTTLPAAKPGSKSKNKPNFNARAELARVVGVDLVAVTGLSAASVQTIISEIGTDMSKFPTVKHFGSWLGLAPHNDISGGKVLRSRTRKVVNRAAQAFRQAAQCVGRSETALGAYYRRMRARLGPQQATVATAYKIARIVYAMLKERKPFEAASAAAYDQQYREREIKYLERKAAKLGFELAPKALTEPVPS

SEQ ID NO: 302933 - protein, 449 aa, unidentified
MPKKRTKVVSLPMIEPKAAGIDVGATEIFVAVPADRDPEPVRCFPTFTVDLERLADWLQQCRIRTVAMESTGVYWIPLFQILEKRKIDVRLVNAHHVKNVPGRKTDVEDCQWIQHLHSVGLLRGSFRPDEEICAIRSLWRHRDNLIQLATLHLQHMQKALDQMNLQIHHVISDLAGTTGLAIVDAILAGERDPHKLAQLRNRHIRASTETIMKSLVGDYREEHLFTLRQSLKSYRHYQELIQEVDLQVKQMVQRLPSKIAAGEKPPKGDKIRRTPWRNEPPQLRNDLYRAFGVDLTEVPGINSLTAQMLLTEIGPNLSRFPTAAAFCSWLRLCPDPKISGGQVLSSRTRPTKNRAALALRMATQGLHRSNTFLGDYFRRMKARMGAPKAMTATAHKLARIVYHMVTTQQEYDTTVFQQQEQRRRLHKSARLHAQARELGFQLVPINVVP

SEQ ID NO: 302934 - protein, 421 aa, unidentified
MDAGTLMPQAGRDGSESGYKIVNEHETVDIYLGLDVGKGEHHATALTPAGKKTFDKPLPNTEPKLRELFAKLQAKHGTVLVVVDQPASMGALPLAVARDMNCQVAYLPGLTMRRIADLYPGEAKTDARDAYVIADAARAMPHTLRAVGPADETTAELQMVAGFDDDLAAENTRIKNRLRGLLTHIHPSLEQVLGPRLDHPAVLALLERFGSPAQIRKAGRRRLVSLLRPKAPRTAERLADDIFTALDEQTVVVPGTEAAALIILSLASSLSSVLGQRKALAARIEELLEDHPLSQVLTSMPGIGTRTAARILIDVGDGTAFPTAGHLAAYAGLAPVTRTSGSSIRGEHPARRGNRQLKRALYLAAFASLKQPESRAYYDKKRREGKHHVAAVIALARRRVDVLFAMLRDGTFYQAPAGTSA

SEQ ID NO: 302935 - protein, 439 aa, unidentified
MSRRAYRATGVNEVNWEQIAHGKEGLDVTLGVDVGKFDVLVVCRWADERFERPWRVKNPREIPTLVALAKRVQTDRKLVVAMESSGTYGDALRQALSDNGIEIQRVGGKAAHDYAEVFDGVPSQHDGKDAAVVAELAALGKGRPWPYEAPDSWEEELTYWVEEMVIQRQLVTFWQGRLEGLVARHWPEAFQVLKLSSGTLLRMLKRYGSPQALAADPQAPRQLARWGGALLSAKKIDQLLAGARSSVGVRLGPWQQRQIQECAEKALAARRQSNQAQRRLRQLAVGHQVLQAQGKVVGIPTACVLWVCTGDPRKFDSAAAYRKAMGLNLVERSSGTYQGQLRISKRGHARTRQWLYFAAMRLVQKRGVRPWYEAKKARDAGDARRLLVAVMRKLAVALYHVGVRNEEFQPRRLFGRIGKHRGRGAQRAIAVAEPSKIQG

SEQ ID NO: 302936 - protein, 348 aa, unidentified
MSITMIGLDTAKSVFQIHAVDAASKPQLKRKLRREEVIPFFEQQERCTVVLEACGAGHHWARILTELGHEAKLLAPEAARPFVKKGKKNDAADAAALCPAASRPEATFVPVKSPEQQGVLALHSVRTLLVKQQTMLANAMRGLATEFGLVVAKGIHKLDALEAQVQAEASMPATAKQAFAELHGQSQAAATRIAGLEVQIVAHARQDATARRLATIPGIGPITASLITATVGDSIGSFKSARHFAAWLGLVPRQHSTGGKTRLGRITKAGNSEIRRMLVLGATSMVHRAAQWNSAVGAWLRGVLERRPVRLATVALANKMARIAWAVMTRGETYQAKGRAPAAAAAVA

SEQ ID NO: 302937 - protein, 389 aa, unidentified
MEHPMSQLNDLSRSLTSLEQDSTIIAVIEMSQSSWLVAGIVPGIERHPLKKLEPSEEDLIRLLMRWRAEATEHGRTITRIAVAFEAGRDGFWLARWLRARDIETYVIHPTSVAVSREHRRAKTDRLDTGLLKRVFIGWLRGEPDHCHMAAIPTLAEEDAKRPNRERERLVRERTRIVNRMKSCLVRFGVRNFKPTLRKAPERLETLQTTEGVPLPPNTLLELRRDMARLRFVIDQIKQVEEARAQRLEQAPQEKSHAMVRLLARVIGVGIETADMLVHEVLARNLRDRRAVARYAGLTGAPDESGSKRREKGLAKAGNARVRRGMIQLAWRFLIFQKDSALAQWYRTRTESAGKKRKTMIVALARKLLIALWRLVTTGEVPAGVILRAA

SEQ ID NO: 302938 - protein, 349 aa, unidentified
MDATTVAVDLAKNVFELAVADADWRIVERHRLNRARFARFFVHRAPCQVVMEACGSAHHWARRILAEGHSVRLLPAHYVKPYVGRSKTDRADAAALIEAARSAQIREVPIKSLEQQQLQSLHRLRSQWLSTRQRYLATLRGILREFGIMIPLGAAVAKAQIGHALAQADSDIPEGLRPALAEMLREIAPLEEKILGVERQLAALTRTDPRAQQLREIPGVGLLSSTALLSTVGDIQRFPSGRHFACWLGLTPSERSSAERRRLGKISKQGDVYCRTLLVHGARSALLAAHRAQRAGKPLDRLQQWALNCERQCGHNKTAVALANRLARIVWATWKYERAFDGNWVNQPA

SEQ ID NO: 302939 - protein, 307 aa, unidentified
MFIGIDVSKNQLDVCTRPSGEAFVVARDDKGLADLVEQLRGARPELIVLEATGGFEQVVAGALAGAGLPVVVINPRQIRDFARALGRLAKTDRIDAEVIALFAERVRPELRPIPDEAARELDELVTRRRQVIEMIVAEGNRARRLDTRRIKKRIDRHLEVLQKELTEIERELDDTIRNSPIWRETEDLLKSVPGIGNATARTLLAELPEIGSLDRRQIAALAGLAPFNRDSGTFRGKRMIGGGRASVRAVLYMATLTASRWNPVIKTFYKHLLASGKAKKSALVACMRKLLTILNAIVRDRTPWQPA

SEQ ID NO: 302940 - protein, 422 aa, unidentified
MLQETQDREEIIERVAALDIGKAELVCCVRVPDEGRAGRRLQEVATYSTMTRSLLGLPGRLRCLGVTRVVMEATSDYWKPVFYVLEAAGLETWLASARDVKHLPGRPKTDKLDAVWLCKVAERQMIRPSFVPPPQIRRLRDVTRYRIDLVGVRTAEKQRAEKLLEDACIKLSVVASDIFGISGRAMMAALIAGERDPKVLAQLARTRMRGKISALEEAFTGHFTDHHAFLLGKMLARADALSADIAEPGAKIEEMIAPFAAAAQRLDELPGINSIAACAILAETGIDMDRFPTAGHLVSWAKFAPGVKESAGKKKGKNTTGHGNSYLARVLGNAAVSAGRTDTFLGERYRRIARRRGRKKAVVAIGRSMLVIIWHLLADPDARYTDLGSDFYETRINPERRRRNHIRQLEALGYKVILERAA

SEQ ID NO: 302941 - protein, 468 aa, unidentified
MEVILRCCAGLDVHKDGVEACVRRTSAGGKVEHEVRHWGTTTRELAEMSNWLSSLRVTHVAMESTGVYWKPIFNILEEHFEILLANAQHLKNVPGRKTDIRDCQWIAQLLQHGLLKGSFIPPRPQRELRDLTRQRTQLVDEASRISNRIQKVLEDANVKLGSVASNVVGASGRLMLEAIVAGQDDPSQLADLAKRRLRGKIPQLEQALDGKLTEHHRWMLGLLLDQWKSTQLFIARLDERIAERTRPQQAVLEKLDAIPGVDRRVAEVLLAEIGPDVTPFPTHAHLASWAGICPGNNESAGKKRSSKTTKGSRWLRQALVQAAWAASHKKDSYFQAHARNLMHRRGRKRGLVAVAHSLLTVIYHMLKEDTSYHDLGSQFLDRLRAKHLVRFHVRKTAEPRPTGHAHFRDSLIFRADPSTSHAFACFAQDDNVEGIASTLRVRTISSRPRLGRRRWSTQRSVARRGVPI

SEQ ID NO: 302942 - protein, 315 aa, unidentified
MTEKTERFVGIDVSKQTLQVCVLPDSVQRCFENSPSGHVELLQYLASVGPQLVVLEPTGGYEMEPLCALWQAEIPVAVVNPRQIRDFGRSLGKLAKTDMLDAELIARYAQTVRPPVRPIPDEESQQLQALVVRRRQLVETRATEQARKHLAKGRVRASIESLLAYLSAQIDELDDELQKLVESHPAWHKHDEILQSVEGVGDVTSATMIALLPELGTLNRKQISALVGVAPLNRDSGRKQGKRQVWGGRAAVRAGLYMATLAATRFNEQMSSYLQALRQRGKPFKVAMVACMRKLLCMLNAMLRDGRPYNPQLQT

SEQ ID NO: 302943 - protein, 387 aa, unidentified
MQKPHDNSKASLAAFMQDNTLIAVIELSLSSWLVAGLIPGASREPLKKLEPNPEDLLKLLHGWRDEAIKAGRLITRIAVAYETGRDSFWLARWLRERGIDAHVIHANSVTVSREHRRAKTDRLDTAMLKRGFLGWLRGERGHCTVAIVPTMEEEDAKRPHREREGLVHEQTRVVNRMKSALIQFGVRNFNPKLRKASVKLETVRTPEGKSLPPNTIAALRRDMERLKIIKEQIKAIEQARLQQFEQKPEALANRMIYLLVRIYGLGLETADLLVHELLSRTLRDRRAVARYAGLTGSPDESGSKRREKGLSRSGNARVRKIMIQLAWRMVKFQPDSALVQWFKQRTENAKRSRKPMIVALARKLIIALWRYANDGLIPAGFRLHSAA

SEQ ID NO: 302944 - protein, 347 aa, unidentified
MNITRIGLDLAKNVLQVHGVDERGKALLRKRLKRGEVVAFFARLSPCLIGMEACGSAHHWARELAALGHTVRLMAPQFVKPYVKANKSDARDAEAICEAVGRPSMRFVPVKTLEQQSVLSLHRARQGFVAARTAQANQIRGLLSEFGIVIAKGIRQIEGRVPEILEEAENGLCGMNRALFQRLFEHFRQLDRQVKQLEEQIHAWHREQVDSRRLAGIPGIGPLTASALTAAIGNAREFANARQLAAWLGLVPRQASSGGKDRLLGISKRGDVYLRTLLIHGARSVLRRTRACPDPAQGWLAQLVHRRNPNVAAVALANKNARIVWALLAHGREYQPGYVGARLPTAA

SEQ ID NO: 302945 - protein, 346 aa, unidentified
MGVDTHRDAHVASVLSLTGAVLATDEFPATAAGYRDLLKWARRSGAVRRAGVEGTGSYGASLTRYLLSQGVDVFDVNWMDRADRRRRGKSDPLDARNAARAVLSGRACARAKSGDGPVQIARMYKLTKASAVKARTQTINQLKAVLVTADPALREELAGLGNAELFRICARFADASSCEEAGEESVLQATRITLSWLAHRIGQLSEQIRDVETRLARLVKCHAPQLLDVVGIGPDTAVTLLITVGDNPERLDSEASFAALCGVSPVERSSGRRQVRRLNRGGDRQANAALHRIVFTRLRVDPRTQDYYERRIKEGKTRREIVRCLKRYAAREVFHLVKQLQRAPRS

SEQ ID NO: 302946 - protein, 340 aa, unidentified
MNIVFLGIDLAKNVFQLCGLNQAGKPVYTKRTGRKELLQTLANIPACLIGIEASTGAFYWQREFEKLGHKVKVISPQYVRPFVRGQKNDGNDAQAIAVALMQPTMQFVPPKSPEQQDIQALHRARQRIVNHRTATVCQIRGLLLDRGIPIGSAVSRARRAIPLILEDAENGLSSRMCRTIAELYDLFNDLGRRIHFFDKEIETVFRQSEACPRIAKVKGIGPETATAVVAAIGKGTEFKNGRHFAAWLGLVPRQHSSGDRQVLMNMTKKGDKHLRTLFIHGARAVVRVATNNNDGHMNQWVNQLKERRGFNKTTVAVANKNARIIWSMLRNDTGYQVVCN

SEQ ID NO: 302947 - protein, 412 aa, unidentified
MRLFAGDDWAEDHHDIEVMDQAGKVLAKKRLPEGAAGMAQLHALIGQFVPEDDMDSTEVVIGIETDRGPWVAALVAAGYTVFPVNPLQASRYRERHGVSGAKSDAGDAHMLADMVRTDSHQLRAAAGDSPEAAGIKVLARTHKTLIWERTRATQRLRHQLREYFPAALEAFEDLDAADTLELLGKAPEPARAAKLTRAQVSAALKRARRRNIPDKATAILAALRSEQLGQPEALTAAYAATVRSLLAVITVLNEQVKALQGQVGEHFGRHPDAEIYLSQPGMGKILGARVLGEFGDDPRRYRDGKARRNYAATSPLTRASGKKKVVSARFIHNDRLVDALNAQAFAALSASPGARTLYDELRTRGIEHNDALRRLANRLVGILHGCLKTRTLYDEATAWGHRQNLPQSSVAA

SEQ ID NO: 302948 - protein, 280 aa, unidentified
MDVAAIGTDLGKSTFHLVALDQAGQIVLRRKLTRRKLVDLTATLPSTLIGMEACGGSHFLARLLREQGHDARIIPAQFVKPFVKSQKNDFLDAEAIAEAVQRPTMRFVPVKTEEQLDMQTLHRVRDRLIGCRTALINQVRAVLLERGLTFARGRASMAHVVAELVAADTDEVTSATRELLALIWQEWQELQTRVDDLTARIEQAAAQDEVCRKLTAVPGIGPLTATALVSAVADGSMFRRARDLSAWLGLVPQQRSTGGRTKLLGISKRGNGYLLRPRVE

SEQ ID NO: 302949 - protein, 371 aa, unidentified
MESIVYVGIDVHKDTYSICCYKAREDRFYYEKKIKAESKPVIKYLESVKKEFGDETIFICGYEAGPTGFGLYRDLEKANYNCVIIAPTSLKHPTNHKIKNDKVDARFLARTLFTKDYSSVHVTTEHEEAIKEFCRMRQDVKLHLKKAKQVLLAFLLRQGIKFTDGEYWTVKHRTWLKTLTFKDGYLEEAFNEYMITVNSLEDRLKNIENRLKEIAEDETVKDKVDKLVCFCGIETLSALTIVSRIGDFSRFSKAYHFSNYIGLTCGEDSSGLKEKHLGITKNGDKEIRRILTESAKSLKLANPRGEKSKRLLERQKSKDPAVIAYADKCRYRLKSKIAHLEMKGKPANVAATAAARELACFIWGMMTNNIA

SEQ ID NO: 302950 - protein, 354 aa, unidentified
MPRQSKSASARLCVVGVDIGKEVFHIVGFDSAGKLAFRRKIKRLALVEVFETLPRCVVGLEACLSAHFVSRTLRGLGFEPRIIPAKYTKPFVKGQKNDYNDAEGIAEAALRPNLKLVGEKTQDQLDLQALHRVRSRLVSRRTATINQIRAFLIELGIAVRTGARALRNSLCAILDNRADELSPRMINIIVGLQDDWVSLDKRIESLTAEIEKISEVETNCARLKSVPGIGPMISTAMVAAIGAGEAFERGRDFGAWLGLVPRQYSTGGKPILGRISKQGSRYLRTLFVQAAHVILMRPHNWPKFNFGPWLEQASTRMHRNKLAAALANKLARIAWSVLRNGGTFGEHQVLPEAI

SEQ ID NO: 302951 - protein, 407 aa, unidentified
MIFVGDDWAEAHHDVHVMNEAGEKLVARRLPEGLEGIRRFHEIVAGFIADAGDVVVGIETDRGLWVHALAAADYQVYALNPMAVARYRDRHNVAGAKSDTGDAKVLADLVRTDRHNHQPIRGDSPHAEAIKVLARGHQNLIWARTRHTNQLRNALREYYPAALEAFDDLADRDAMAVLGRAPTPDAGARLSLGQLRTALKRGGRQRYVDQRASEIQAALGTAHLAAPATLAQAFAATTKAAVGIISELNRQIAELEAVLADRFEQHPDADIYLSLPGLGDVLGARVLGEFGDDPDRYADAKSRKNYAGTSPITVASGKKRAVLARHVRNRRLYDAIDQWAFCSLSASAGCRRFYDHRRTAGDLHHQALRALGNRLVGILHGCLRTHSTYDENTAWAQREEKTDDIAA

SEQ ID NO: 302952 - protein, 426 aa, unidentified
MLAFDLAADKQVCALCGQDSAVIARRTITAKAWQLSDAVAWGLPRAAAAGFASVVVACEPTGHRWRVLDQIAAQAGVRLVCVQPLLVGRAREAEDFTRNKNDDSDAVIIARLVTELRCYLPERAEPIWARLRHPGARRVGLVLAAGAAGAQIRDLLECAWPAVLGAAVEPLESASWRAAMTVVLDRVADSGDLSFIRRSGWPRFAAAVRRELPRHGTPRWHSPIVRAVFTAATDPAQAGLGVAEQRAGALERVRFALEDLAHARAELVVVEGRMVAVLDTLGLTELVTSIRGLSAVGAAAILAETGDLTRFTSARALVKHAGLCPRNNASGGYQGKAAISGRGRARLRMAAWRAIFPALHHNPVLAARYTHLTGRPDRQLTDAQARVAVAGSLLRQLHAVITTGTPWNPAIAAGTHHPEREAASAA

SEQ ID NO: 302953 - protein, 403 aa, unidentified
MNKLKRVCGLDVHKDIIFACVKKGKYQSEVKQFSTTTQGLAELSHWIQGEQVERVAMESTGIYWMPVWRALESDFKLLLVNPYFIKQMPGRKSDVQDAQWIATLLDKELLKGSVVPDKTIRVLRDYMRRYAQLQGQMTRCLQQIEKQLSRCNIKIASLSSTIGSKTVIDIVASICKGEYQPEQLLKLVHGRIRNKHGEKVKQALEGIIDEHDIFLLRQIYADYIHIYDQCEALVGQAQKVADEYYQQEIALLQTIPGIKKLSAIIIFAEIGGCINLFATAQNLTGWCGLRPKNDESAGKIKSRSITKGNKYLRRILVQTGWAASRTRNCYLKTKFEQLSIRKSSKKALIAIARKQLVIIWNVLSKNEPYAEPQIVLSPEQIERKQKYYQGKLEKLFKTIEKAG

SEQ ID NO: 302954 - protein, 428 aa, unidentified
MNCTQNEKLNQVTPHTLIVGVDIAKFKHVARAQDDRGKILGKALTFTNTKEGFEAFFAWLEEMQHKHEKSDVLVGMEPTGHYWLNLAYTLKERLVSFGVVNPLHVKRSKELDDNSPTKNDIKDARVIAQLIKDGRFSYPRLPMDQDAEVKAGITIRNQIVGDLQALQGRIHNWLDKYFPEFLTVFKDWSGKMALATLEHIPLPVQLNQTTPERVAEIWSTYGGVQRPSHKRIQRLQEAAGRSVGLTVGLQMAQREIATNIKRYKMLKEELHALEKQLEDLVLTLPGIAEMLTVPGVGMVTVIELYSELGDIKNFENPRQILKYAGLNLRESSSGKHKGQTRITKRGRAKLRALLFRTVMPLVRHNRAFKALHQYYTTRQENPLRKKQSLIVLCGKLVRVLHTVGRKQCPFDEERMIRDIPHLSLALGA

SEQ ID NO: 302955 - protein, 370 aa, unidentified
MKSIVYIGMDVHKNSYSLCAIYGKTGEVLGETKIGPDIKLIEKFINTVKNKINEDVDVMTGYEAGCLGYSLYWQLKAKGIDCEILAPTTMQRSAKNKVIKNDRRDAQMIATNLNNGTYKAVYVPNDHDVEIKEYIRMMDDFKDEAKKVKQHINAFVLRLGYRYEGKSRWTPAHIKWLRELELTSMYKEILNEYLSELELLTEKAERFQHKLEKLSQEDPYKEKIGELRCFKGIDTTAAMVLHAEVSDFNRFPNAKAFASFCGLTPGENSSGDKNKRLSITKQGNSHVRTILVECAQVLVRGAIGKKGKKVKSKQLGQDVKVIDYADKAVLRLQKKYHQMILRGVNKNIAITAIARELACFVWGVETGHIA

SEQ ID NO: 302956 - protein, 412 aa, unidentified
MKIAGIDVHKKVLMVVVVDASTPEEKPERRRFASMPSELHRLLLWLREQGVEEAVMESTAQYWRSVWLELEPHMRLHLAQAFSNRAPRGRKHDFKDAERLVRRLIANELILSFVPDGEQRIWRSMTRMKLQLTRDRVRLQNQMECLLEEMRIKLSIVVSNLLGASGLRILRALAQGETDPKQLAQLGDERLQCTEEQLVDALTGRVQPVHREMLALQLQRLQLIDQQIARLNRMIADAMKAHQDAVIRLAEVPGLGVDSAQQIIAEVGAHASTFLSAAELTSWVGTCPGKEESAEENHSSRSAKGNKYLRRVLNQAAHAAVTKKGSHFQGVFRRLLPRLGYQSAIWAVAHRLCRVVWKILHEGVRFIEQGREPDPQAKKKRAQMLARALRRLGYQVAITPINPLTTTNGIPM

SEQ ID NO: 302957 - protein, 455 aa, unidentified
MDGSYAGVDWASEKHDVLVADATGEKLLAASFAHDEKGLRSLCRQLVRLRVQLVAIERPDGLLVERLLDAGLRVLALHPNQVAAARDRFRVSGGKSDGFDAFVLCELARTDHHRFRVLEPDSDATKAIRALTRGREDLVGARTALVNQLRAELERFWPGPLGLFSDLHSQISLAFLERYPSPTEARGLGEARLAAFLARQRYPGRQKPAQLLAKLRAAPAGRVGERELATRRQLVGGLVAMIKTLNGQIAELERQIATAIREHPDGQIFTSLFKGAVITAAELLAEMGDCRGRYPTRDTLAGDAGQAAVAIESGKRKAACFRWGCNKRLRNAFHTLADSSRHHNPWAQDLYAQACDRGHDHPRALRTVGRAWSRIVWQCWQDGVPYHPARHRALQRHVTVTIPTSSGPVPDLAATQRMASAAVTQRAARRAEREALDGKPTSAKPIARPAKRRRA

SEQ ID NO: 302958 - protein, 343 aa, unidentified
MPRSPTYQLFVGIDIAATTCAVAWMRPNAQPTRAITIKQTPAGFGDLQRQLLAIEPDPHAVLIVMEATGTYWMRLASTLVSAGFAVSVINPAQAHDFAKALLKRSKTDAIDAQTLTELGARLQPERWTPPPQVHTELQQRLVQRDGLVAARTQFRNQLHALVQQPVVITSVQTRLETLIASLDEEIATLEQEIAAALQQDDAWAAAAARLATVTGLGTLTIAWILTTTMNFTLTVTPDAAANYAGLAPQLRQSGSSVRGRPRVGHGGNARLRRALYMASLSAVQHNPVIKAFYSRLCAAGKPRKVALCAAARKLLRIAWAVAHNDQDFDPAYAARKCVEQAAA

SEQ ID NO: 302959 - protein, 357 aa, unidentified
MKIVGCDLHARQQSIAMMDSETGEFVEKTLLHKGSAVRDFYAALEGPVVVGIEATGSMQWFLELLEELGIECRVGHPAKIRAAETRKQKHDRRDARLVLDLLLRDRFPEIWMPSTEQRDLRTLLRDRHQWVKMRSRLQHTLQAIALNHGLRQGSRLWSQAGQTALQALPLPAYSSQRRAELLSLYMQLQKRIQKLDQEVEAQVQQRAQARRLLTHPGVGPVTALASEVFLGDPTRFANGNKVGSYIGMIPCEHTSGKRQRLGKMTKQGNALLRYLWTEAAMHAVGKDPELKRFYRRKLIQKGMGKARIAAARKLGIRLWIMMRDQIDYQEFCRRGKLRQSGEAHAGMPDFNSGPALQ

SEQ ID NO: 302960 - protein, 377 aa, unidentified
MSRIRFLGLDVHADTIAVAVAEPDGEVRSLGPMPNRLESIRKLVTRLGPVNNLKACYEAGPTGYVLYWQLTALGVPCDVVAPTLVPVKAGDRVKTDRRDAEKLARCYRAGDLTPVWVPDAAHEALRDLVRAREDAKQDQLRARHRLSKFLLRHGQRPPETVKKGWTQKYMTWIKSAVHFDQPAQEATLLDYVHEVDHMAERIQRLEKTIEEAIQQAPPAMRAVIEALQALRGVAQVTAVTVVAELGTLSRFDSPRKLMGYSGLVSSEFSTGNRIQRGRITKTGNAHLRRVIIESAWAYQYRPWLGGYLLKRQQGLDQEVKAIAWKAQHRLHSRYKKLAASGKNKPQIVTAVGRELLGFIWAIAVQTEAKFKAERKAA

SEQ ID NO: 302961 - protein, 427 aa, unidentified
MPYNMAGIDVHKRMLHVVVSDVEVDGEYDFTRQVFGSSPEGLRSLAAWLMEHQVEEVVMESTAQYWKPVWGALERYWRPICQKREGALQTSGTLHLAHALSNRGRRGRKKDFRDAERLVKRLVANELILSFVPDAKQRLWRTVMRTKYQLTRNRVQLQNRLEALLEEAHIKLSSFVSDLLGVSARRMLKAIAEGETDPAALAALADGRLRAKPEQIRDALGVCAELHPVYRRLIQMALEESASIDKRMEQLEQQMADLLRPNEGQVQRLAEVPGLGLDSAQQILAEVGATAATFPSEKHLASWVGACPGNEESAEVNYSRRSPQGNHHMRRILNQAANAAVKLKGSIFEILYRRHAPRLGHKHTIGIIAHKLCRLVWKILHLGVRYEERGPAVSKISKQKRTQKMIRELRRLGYRIELSTSQLATSA

SEQ ID NO: 302962 - protein, 399 aa, unidentified
MDIDDVGVFLGLDVGKSAHHGHGLTPAGKKVFDKQLPNSEPKLRAVFDKLAAKFGTVLVIVDQPASIGALPLTVARDAGCKVAYLPGLSMRRIADLYPGEAKTDARDAAVIADAARTLPHTLRSLELTDEITAELTVLVGFDQDLAAEATRTSNRIRGLLTQFHPSLERVLGPRLDHPAVTWLLERYGSPTSLRKAGRRKLVEVIRPKAPRMAQRLIDEVFDALDEQTVVVPGTGTLDVVIPSLTRSLAAVHEQRRALEAQIGQLLEAHPLSAVLTSIPGVAVRTAATLLVTVGDGTSFPTAAHLASYAGLAPTTKSSGTSIHGEHAPRGGNRQLKRAMFLSAFAALHDPASRTYYDRCRARGKTHTQALLRLARQRINVLFAMLRDGTLYEPRTPRLA

SEQ ID NO: 302963 - protein, 340 aa, unidentified
MDILDLLGLDIGKSTFHLIGHDAKGKEVLRKKFNRNRLLEFAARLKPCTIAMESCGGSHWLARKLLSFGHQVKLIAPQHVKPYVTGNKNDYIDAEAICEAASRPKTRYVAIKTVEQQVLSTQHRLREALVGHRTQTINRIHGFLLEFGIELPATKAAMNQAHQILDDPAAELPQQLKSFIEHLLEEMKRLNDEIKAIDRSIKEQVDTDDAGTRLMSIPGIGPIIASALLADVGDASNFHSSRDFAASLGLVPRQHSTGDQTVLLNISKRGDKYLRKLMIQGSRAVLVHIDKRTDALGTWCRDLLIRKHPNKVACALANKLARIVWAVLARGVSYNAQSMA

SEQ ID NO: 302964 - protein, 367 aa, unidentified
MKKISTVAAKPSKKISRQKLTVGLDLGDRNSWYCVLDESGQIQLEQRVRTNAKALREVFSKMPRSRIALEIGTHSPWISRLLSELGHEVIVANARKVRLIGESRKKDDRLDAQTLARLARIDPELLYPVKHRSAQAQADLMTIRARAGLVRARTALVNTARGLAKSYGERLHGGNVRNMNPEKAEGLSPELQAALEPLLNAIESLSERIVAYNDRIENLAQQRYPQVALLKQIKGVGTLIALTYMLTLEDPHRFGKSRDVGCYLGLQPGRRNSGQSEPQLHISKEGDPYLRTLLVQGAQHILGPFGIDCDLRRWGLRLAERGGKSGKKRAIVATARKLAVLLHHLWVSGEAYAPLHNNNRMPLPMAA

SEQ ID NO: 302965 - protein, 395 aa, unidentified
MYRLFVGIDVSKDSFSVTGLNDKAKFLFSLAPLMNAQGFSDFLKVIKAHQKDLSSVIVALESTGPYHLNLFSFLVSKGITTIVINPLIIANFAKLSLRKTKTDKRDATTIARFLFLNRDSIGQLPSSQQTTDLRDLARERESILKMIASMKNDIRRILQTTFPELEHLVDVLGDTMLYFLKIFPSARLITQAAPEAVAQGFNQGDWRRRISVHYTKIIDLAKISIATSSPSKEMILPGKIETLLYLKKKVDEITKMLVRLCKSMKKEDLAILTSIRGVNVKTAAPFLAELGDYQNFTSYKKMLAFAGLDPTTHQSGKFEGMSMISRRGNRHLRKVIYNMTFCVVRYTGPLRDYFFRRKAEGLPFRKALLATSHKLVRTIFAMLNGRTLYKFAEVA

SEQ ID NO: 302966 - protein, 337 aa, unidentified
MGLYCGIDLHSNNHVVTVIDEEDRRLYERRLPNDLAITKAALEPFRTQLVAVAVESTFNWYWLVDGLMEAGYQVRLVHTGAVVQYDGLKHTDDEHDAFWLAHLMRLGILPTGYIYPKSGRGLRDLARQRMRLVQHRTSHITSVQSQVWRSTAVRLRSETIKGKGKQPWPELLDPDVALSVETGRAAIDALSAQIERLEELLLKRVGLLPQFQLLKTVTGIGPILALTIALEVGDIKRFPGVGEFASYCRCVDSRRLSNTKKKGEANRKNGNSYLAWAFMEAAHFAIRNLPAAKRFYERKRRQRNALLAVKALAHKLARACFYILRDQVPFAPDRLFA

SEQ ID NO: 302967 - protein, 419 aa, unidentified
MKPQASKAFAAFIGLDWADAKHEVCLQAAGTAQREFRSLEHSPEESNAWVQTLRTRFNGQPVAVCLELTKGPIVSALRHYDFLGLFPVNPLTVAKYREAFTPSRAKDDPTDAELQVEILLKHRDRLMPLSPQSPTMRALVQLVEHRRRLVGDKVRLTNRLTSALKNYFPHVLRWFQDKDTAIFCDFLSRWPTLKAAQLARRTTLESFFRAHHVHSADVITTRIEAIKSAVALTTDEGVITPNALLVQALVAQLRVTLQVIADFDNAIAQRAQEHPDFSLFDALPGAGAVFAPRLLAAFGEQRERYASAEELQKYAGIAPVTERSGKKTWVHWRLQCPKFLRQTFVEWAAESTRHSFWAQVYYQQQRAKGKAHQAAVRALAFKWIRILSRCWQDRTPYDDSVYLQALNRRSAPLLHNLAH

SEQ ID NO: 302968 - protein, 376 aa, unidentified
MEQHSEVFVGIDTSKLRNAVALAEGARGGEVRYLGEIDTTDTATRKLVAKLAAKYTQVTFCYEAGPTGYGLYRLIKSLGHDCIVVAPSLIPSKAGDRIKTNRRDAENLARQLRAGELTAVWVPDEHHEAIRDLSRAREAAVDDLKSKRQQVLSLLLRLGLYYPGKTTWGKAHRNWLAVQKIVHREQRFVFEELLGAERQAQDRADRIAAAIVVAVPEWSLAQAVTALQAMRGIDLVSAVTILAEIGDLSRFASPRELMGYLGLVPSERSTGDNVKRGPITKAGNRRARRILVETSWSYRHPPRVGREKQMKVEAASEPVRAIAWKAQTRLCGRFRALSKKGKRQTVVVTAIARELCGFIWAIHRAVTNPGTTTTSR

SEQ ID NO: 302969 - protein, 409 aa, unidentified
MEVIHKNCAGLDVHKKVVVAAILVEGRPKEIRSFGTMTADLLELSDWLVSCEVTHVAMESTGEYWKPIFNILENNFEVMLVNAQHISKVPGRKTDVSDAEWIADLLRHGLLTASFIPPVGQRELRELTRFRSTFVKERATLVNRVQKVLESANIKLASVASNVMGVSGRAILESIVDGTATPEQMAELSKGRLRNKREELSRALEGRVKPHHRFVLTELLSQIDGLEETIARFNQEIEEYCRPFEEVVVLLDTIPGVARETAENIVAEIGTDMSRFPTANHLASWAGVAPGNNESAGKKHSGKAKKGNKPLGVTLTQAAHAATHTKNTYLSAQYHRLAGRRGKKRALKAVAHSILVISYYMIQRHTPYFELGGDYFDKRRPETTAKRLISRLEHLGYQVSLQQMSIPVS

SEQ ID NO: 302970 - protein, 381 aa, unidentified
MPNARPQCWCQAPQPRSGAPKAQGLIAALRPQHNPPCHRSLRADVLTANNTSTGADRFVASQLQFRISTSLTDVTAGWSGFWLARWLGHRGVEAHVVQPSSIPVDRRARRAKSDGIDAELLLRTLLAWFRGEPRVCSMVPIPNEVDEDERRRTREREELMADRISLVNRIAAVLATLGVRDYNPLRRDRRARLGALRTALGDPLPPHASARILRILDRLDLVCAQITELERGRDAVLEKEAPDRAEKMIQQLVDLRGIGVQSATVLVREAFVREFTNGKRLGSYAGLTPTPFSSGAAKREQGIGKAGNRRLRTVMIELAWLWQRYQPGSALVGWFRERVSGTGRRMRKVMVVAMARRLLIALWQFATQGIVPEGAVMKPTY

SEQ ID NO: 302971 - protein, 412 aa, unidentified
MDVIHPRCAGLDISKKDAKVCVRINGAGRRKTSETVTTFGATTRQIMAMRDHLAAQQVTCVVMEATGDYWKPFYYLLEDLSGVEVMLVNARHVKNLPGRKTDVADATWLASLGAHGLVRGSFVPPEPIRQLRDLTRTRTAITRERTREIQRLEKLLEDAGIKLSSVAADLNGASSRAMLEALLAGETDPAAMADLAKKRLRMKIPQLTEALYGRFTSHHAFLTRMHLDLIDQHTAAIEQLTDRIEVVIEPFRRFRDLICTIPGIGGNTADVVVAETGADMARFPTAQHLASWAGTTPGNNESAGKVKSRRTRPGNPYLQGALGTAAMSISHTHDTYLAAKYRRIATRRGPLKANVAVQRALLVAIWNIATTNTTYHDPGGDYFTRLNPQKARNNAVRQLEAMGYHVTLDQAS

SEQ ID NO: 302972 - protein, 349 aa, unidentified
MEQHEVILGVDTHLDTHVGAVISETGKLLGTLSVPAETAGYLKLLTWANSLGHLRRAGIEGTGTYGAGLARVLRDHEIEVLEVNRPDRAARRSRGKSDPTDAENAARAVLAGKATAIPKEQSGAAEAMRAVSVARRSAVKAKTQAINQLRALLVSAPQDIRERLLKTKTAECVANCARLRSLGNTPMLQTLTTTLRLLAKRYLARAEELTTLDAMLEQLTLKHARRLRERFGVGPQTAAVLVAVAGDNPERLKSDAALAALCGTSPLQASSGKTVRHRLNRGGDRAANNALWTIAMVRMRSDPRTRAYVERRTKEGMSNKEIHRCLKRYIVRELYPLILADLADSARTT

SEQ ID NO: 302973 - protein, 397 aa, unidentified
MFFCGIDVAKRKHAVMILDERGQAQRPFFEIENNRAGMDFLLEQLSQLGGEVTIGLEATGHYWLALYDVLTQNGYQVIVINPLQIAAHRKKSIRKVKNDRRDAFCIADFLRVTVDLKAASPEMPVLLQLRELTRFRFWLSEQVGDCKRKLLTILDRVFPEYEKLFSNVFVESSKALLQQAVSAQEFAEFDLQELAEVLADKSRGRFGEEKAKQIQEKARQSIGVSFLVDAARIEMQCLLAQLELAEEQISRVDEAEKALMEQIPQHITSIPGVGAITGAAILAEIGDIHRFESEDKLVAYAGIDASVHDSGQFHGTQMHMSKRGSPYLRLALWQAASMCLQHNEELRAYYDKKRAEGKVHGVALGAVCRKLLIRIYIILKENRVYEAHAPQKLGVDS

SEQ ID NO: 302974 - protein, 342 aa, unidentified
MTYYAGIDVSLEYSSVCVVDGAGKIIREQRIASEPEALIAWFRGLGFGLERIGLEAGPMSQWLYAAMRAAGLAVELLETRHVRDAFKAMPVKSDRNDARGIAQLMRLGWFRPVHCKSMAAQEVRALLTARKLVQSKLLDVQMSLRGLLRGFGLKVGATTPSRFAGRIRDLVEGNATLEVIAAALLVVHETLRRELAGLEKRVRSIAGSDGRVRLLMSTPGVGAIVALTYVAAIDDPARFKSSKGVGAHFGLTPKKYQSGETDITGRISKIGDEGVRTALYEAGHIILTQPLKGCTALKSWAMRLAKRAGMKKAKVALARKLAVIMHRMLVDGTLFKSAAVAA

SEQ ID NO: 302975 - protein, 363 aa, unidentified
MFESTTVSVGLDVHARSVRLAALRADELLEEQTLPYDEEAVERVLRRWPGVRCCYEAGPTGFGLYRYLVERGIDCRVVAPGLVPQRPGDRVKTDSRDARKLARLLAGGLLEPIHVPSRELEAARDLVRAREDARVDRMRDRHRLSKFCLRHGRMLPTSSWTIVRRKWLGEQRFEFAAEQCTFDTYLHTVDLVDARIEQLERAIRDTAERGPWRELVGRLRCLRGVDTLTALALAAEIGDFNRFKSAEEFMAFVGLVPTERSSGEQRRQGSITKVGNSHVRRLLVESAWHARRHPKVGYDLARRQRGHDPAVIERSWRCQKRLYQRWQRMAGRGKPQQKIVVACARELAGFVWAIATDQPLRSL

SEQ ID NO: 302976 - protein, 386 aa, unidentified
MPQLNDLSRSLVILEQDATLIAVIEMGQSSWLVAGIVPGVERSPLKKLVVDESALLKLLNRWREEAEKAGHRVERIAIAFEAGRDGFWLARWLRARDIEAHVIHASSVAVSREHRRAKTDRLDTELLKRAFLGWLRGERDHCKMVAIPTLAQEDAKRPNRERESLVGEQSRIVNRMKAALARLGIRGFNPKLKKAVERLDGLRTPEGEPIPPNTLAELKHDMERRRLVRSQIRDIEGTRLERLVQGHGEGPHVMVRLLARVIGVGVETADMLVQEVLSRNLRDRRAVARYGGLTGSPDESGKKRREKGLARSGNARVRRGMIQLAWRFLMFQKDSALAHWFYARTKNAPQTRKTMIVALARKLLIALWRLVREGAIPEGIVLRPAL

SEQ ID NO: 302977 - protein, 483 aa, unidentified
MKPGPREKTKKATNHPTPRHWHEMNRKQRRETMRKIQSEEISLEVVHPDAAGIDIGNGSHYVAVPPSRDSQPVRRFGCTTAELKAMAAWLQQCGIRTVAMQSTGVYWIAVYDILEAAGFEVYLVNARETKNLPGRKTDVQESQWLMKLHTYGLLRNSFRPSQEIRTMRTYWRQRNDLVQAAGRHIQRMQKALTQMNIQLANMLSDVSGVTGQAIIKAILAGERDPHKLAALRDWRVKASAEQIAQSLEGNWQPDLLFVLKQEQDGYEFCQKQMAECDRQLNHYFQQQEDRSQGAPLPEEKRKERLRKKKKGNAPGFDLRLELFRMTGTDLTQIDSVDVMTATTILSEVGWDVTKWKSEDHFVSWLRLCPDNRISGDKIIGKGRLPTNNRATLALKMAASTLRLSNSYLGAQFRRLRTRLGAPIAIKAMAAKLARLVYRMLRYGMKYADRGAEFYEAQHRKLQIKYLKSKAAKLGFQIIEAPAA

SEQ ID NO: 302978 - protein, 475 aa, unidentified
MNHRRLVGIDLGIASAHTVRVLDAEGTTIAKRKAWPTLESLGEIEAAALDGCPPGTRLEVVMEPTGPAWMPIAVFFTTRGHVVHRVSSAKAHDLRRFLSRHTKTNGIDADTLARLPLFDPAGLQPLVLPTAERAALDRRVRVTDRLTEQGAVHKRRIKDLTRQLMPMTPLNGDLGVADLAVLERYADPNALVRAGEKRLTTLIAKASNGQQGIDRARQWIDAAGASIELYADHPAVAFADLAAEIATEVRLLRAVQTELTTHAAERESCYRWVDPTQLARSLPGVADVSGPALVAAMGDPARFTRGKQFRSFTGLVPKASETGDTDRKGQPMSKAGSSLLRTTLVRAADNARRTDPQLARIYYVQMVERGKDHLGAVCVVAASLAERFWAVMHRGMPYVICDTDGRPVDPDEAKAIIAEHWTVPADVRARRRSKKAGKAPQTVRAGQRLRGDLPQHESIDQQYARRQHQPQRRTA

SEQ ID NO: 302979 - protein, 343 aa, unidentified
MQVTTLGIDLAKNVFQVHGVDAQGRQVFSKALRRSQLRNFVAQLPACLIGMEACGSAHYWARELQALGHEVRLMAPQFVKPYVKTNKNDRADAEAICEAVTRPNMRFVPIKTPDQQAVLALHRVREGQIKARTAQANQVRGLLAEFGIVVPQGMTTLFRELPGILEDAENGLPDLFRTLLADRLDELRRLDQAVKEQERQIQAWHRSHAVSRRLAEIPGIGPISATALVAAIGHARHFKNGRQLAAWMGLVPKQHSSGGQSNLLGISKRGDRYLRMLLIHGARSALLADQRRGEGGDPWLEGLRQRRCPNVATVALANKNARTVWALMAHDRTFDPGLRGAAA

SEQ ID NO: 302980 - protein, 342 aa, unidentified
MSIVYVGLDLGSSNFQQVALNHDGVSRVNRDFSTSEANLIKAFSDLKGEIHVHLEAGELAPWAASVIAPLVTRVVCSHPQSNAWIAKDADKCDRLDAYKLAELLRLNRFKEVHYAPDQPRRNFKQLVQHYDELTAQQARLKTKLKARLRMQGVIVTGERLFSATGRKEVLAKVGSRDLRTAITQLYAVLDQSIAAQEQARLLMLRAGQAFPEIKLLRTAPGIGPIGACRFSAYIHTPSRFSSTRKLWKYCRLSISHRSSNGKPLRRPRLDRFGCGRLKDVSRKAFDAAVRSQKDNGFKRAYLRALETTHDKTHARLTVQRKIVSTLRAIWINQTPYGDELMR

SEQ ID NO: 302981 - protein, 322 aa, unidentified
MNPKNYGGIDVAKKNFVIGIYGQDKTKTEANTPKGHAKAVEYLQKHNVDLVVLESTGGLEVPLANALHAADIRVVIANPQRTHQYAASFSLGKTDHLDAKMLADYAQALDSRKMADDMCYAPPSEEALALEALVKRRSQLVEMRKMEKNRLEQTHTSQKASVVAMIKHLGELIAALDKEIDQSNRGGFNGKGEILSEIKGVGRITCATLLSMLPELGKVPHKRAALLVGVVPPPRQSGEKEKKSGCVGGRMEVRNVLYMAALTATRSEPKLKAFYEKLMSRGKAFKVALNACMHKLLRILNARMRDYLASLKETEESESQSA

SEQ ID NO: 302982 - protein, 425 aa, unidentified
MCKRFKVAFKILRRNCCGLDVHKTWIFACIGITDANGRTEYKQARFSSFSNGLRELAGWLTKHSCADVCMESTGKYWIPVFNILEKTCWVTLAHPKYTKPQKGNKTDRKDAKWICDLYMCDMVKPSFIPPADIRQLRDLMRYRTKLTNMLTSEKNRALNCLTVSNLKLDDVFSNVFGKSSRSIVQHILEHPGEQFDVAPFLDRRCKHSVEDVQAAVDGAISREQAAKRRECLLHIDQLNGHRETIETEILRLAQPYSHQLELLRTVPGFSAAPLTAVALISEIGVDMSVFPSAKHLASWAGCCPRNDQSNNKVKSTRISRAGCYLKPLLVQIANAVIKSDKYPECKERYRRIKARRGHKKAIIAICRMLLTAIWNVLSKLEPYSAKGYLEDKLTEHSVVISKSQGLELLRKRGYIFKDEVSADSG

SEQ ID NO: 302983 - protein, 420 aa, unidentified
MSSAINIVYPICCGMDVHKSFIVACIAVTDEHGQTAHHIRRFSTFTGDLRRLADWLASFNCRDVCMESSGKYWIPVFNTLEKTCNVCLTHPKYVKAIKGKKTDKKDAKRIAELFKCDLVRSSFIPPLDIRQLRDLCRYYVKLTYVNTGEKNRARNCLTMCNFKLDDVFSDVFGKSATRVLDALIEHNNSNFDVAPLLDRRCKAALEDVRAALDGELNPSQAEKLKLIRQHMDNLRNLQTALEEAIFRLAAKYQPQIDLLLTVPGISEPLTAIRILAEIGADMSVFETSKQLCSWAGLTPQNQESAGKKKTTRIGRAGAYLKPLLVQCALAAGSSDKHPELKSKYQALKKRRGGKKAVIAIARKLLTAAWHILSKNEPYNAELYRRADKPPISRELTPAQAFAFLRSKGFVILTEQEPIPA

SEQ ID NO: 302984 - protein, 370 aa, unidentified
MEKYKFVGLDVHKETIAVSVAEANGGEVRYVGEIANTPEAVVKLTRQLKKGDATPSFCYEAGPCGYEIYRQLQELGLACQVVAPSLIPKKPGDRVKTDRRDSLSLARLYRAGELTAVWVPDGAQEALRDLTRAREDMKHMQRQGKQRLQAFLLRHRKRYGGKSNWTQAHFRWLETVKFDQPVQQIVFQEYVDLVKAMTKRVDALDDQIESAAAASVFWPVIEGLMALRGINLLTATIIVAEIGDLRRFASAPQLMAYLGVVPSEYSSGGTKSRGGITKTGNGHVRRVLAEAAWTYRHPARKSAFLQRRAERTSETVQDIAWKAQKRLCGRYRLLEAKGKLKVQVCIAIARELAGFIWAIGQALPQPEARA

SEQ ID NO: 302985 - protein, 401 aa, unidentified
MVYLERGYNLKELPWSKTVSNSFLFKEACMILVGVDVAKDKHDCYIMTSEGEVLFKSFTIANNMEGFNQLYEKILSVIDNFDNVKIGLEATGHYSYNILGYLLDKGLTPYVINPLHSNLYRKSLSLRKTKTDKVNSRIIASMLMSDVSLKPYSNTLYHNEELKSLTRYRFTKVQERAKLKISISRLVTILFPELEKLVPTLQMNSIYALLYEFPSAHAISKAHLTRLTNLLNTTSKGHYTKDKAVLIREAVKNSIGSNMPAKSLELKHTIKLIKELTSEINEIEEEIKIIMNKINSPILTIPGIGLSTGAQILAEIGDFKNFSSPDKLLAFAGLSPSTYQSGNMYSSNAKMEKRGSKYLRFALFNAAIYVSYWEPTFSQYLKKKRVEGKHYYVAISHVVKN

SEQ ID NO: 302986 - protein, 412 aa, unidentified
MEQIHDRVAGLDVHRDEVAVCVRTPGPRGGVHTEKARFSTTTGGLAMLAGWLAERAVTLTAMEATGVYWKPVYYALEDRFELWLCNAHHVKNVPGRKTDMSDAQWLADVAAHGMVRPSFVPPPPVRELRELTRYRKTQVDARAAEIARVEKVLQDAGIKLTSVASKVLTQSGRAMIEALIAGERDPAALAGLAKGKLRPKIPQLTAALSGHFGAHHAVVAARILAHLDSLDDAIAVLDGQIAARIAGGYQSAARLLADVPGLERRSVEVIIAETGADMSRFPSPAHLASWAGLCPGNHESAGKRRKVATTPGNPWLRRTLIESARAAARTRDSYFGAQYRQIARRRGPNKAAVAVAHSLLDVIWHMLTTGEVFTDLGADYFTSRQDKEHQTQRLVRQLQKLGHTVQLTATTT

SEQ ID NO: 302987 - protein, 431 aa, unidentified
MNYNQNHKISQITSETLIVGVDIAKHNHVARAQDFRGLELGKTCFFENTKAGFHSFLDWITQLVKGCKLNQVIVGMEPTGHYWLNLAHLLKENNIKFVSVNPLHVKRSKELDDNSPTKNDVKDAKVIAQLVKDGRYAEPTIPRGIYAELRVAKKLRDLLNVDLQVVQGQVHNWLDRYFPEFLTVFKSWEGKAAIHFLKLEALPYELVKYTDEELLLSLRQVVKRSIGLKKIRALKEAANRSIGIRQGAAMAKLELRALLEKYDFIQMKFEELDYQLDQLLDHIPGVTQMLEVSGIGRDTVAGFFAEVGDLRDYQHPRQIVKLAGLSLKENTSGKHKGQTKITKRGRKKLRALLFRAAMILVAKNKAFKALHLYYTTRAQNPLKKMQSLIALCNKLIRILFSIGKKQFTFQEDKMLKDIPHMATFVAHETVA

SEQ ID NO: 302988 - protein, 337 aa, unidentified
MEYGAIDLHTRHSQIRVIDAEGRVVREQRIPTTRERLTEAFAGLGPVRVLLETGTESEWVAQTLEAAGHAVIVADPNYAPMYGEVRRRVKTDRRDVAALAEANRRGFYRLAYRRSAPQRAMQQILRTRRQLVAMRSGTISLLRSLLRQEGYRLPSGSSAQVPTRLATLDIPAALALTLAPLHQTLADLSQRILAIDARIRAAVQDDAIVTRLQSVPGVGPVVAVTFRATLDRLDRFREAGQVSALAGLVPREDSSGERQRRGHITKTGSRELRSLLIQAAWACWRSRGSGALRVWAEQLAARRGRRIAVVGLARRLSRLLFAIWRDGSTFVPALVAR

SEQ ID NO: 302989 - protein, 408 aa, unidentified
MQVLYPPCAGLDVHKDTIVACVRCVSPPMHQEVRSFGSTTTELLELADWLGEHDCSHVAMEATGVYWKPVWHVLEDEFELVLANAAHIRNVPGRKTDVNDAMWIADLLAHGLIRSSFVPPQAIQQLRDLTRTRKQLVREVSQHSLRIQKVLEDANLKLGSVLSDVLGKSGRAMLDAIVAGQTDPEQLAALAQGTARHKTAELREALRGRITEHHRTMLRLHLQVIDALQRTLAELDAAVGKALAPIRQRARLLTTMPGVSDLTASVLVAEIGVDMTRFPSAGHLVSWAGLCPRSDESAGKRRSTRVRKSGTWIKTTLVTAAWAAVRVKTSYLRAQFLRIKARRGAKKAILAVAASMLTAAFHMLRDGTEYNDLGSEHFDRQDRSKTIRRLLKRLQDLGCDVPELAHAM

SEQ ID NO: 302990 - protein, 346 aa, unidentified
MRGAVHMQVSTIGLDLAKRVFQVHGVDSAGRVIIRRQLRRGQVIDFFEKLPPCLVGIEACATAHHWARELMARGHEVRLMPPSYVKAYVKRSKNDAADAAAICEAVTRPSMRFVPVKGVEQQAALMLHRTRELLVRQRTQLINAMRAHLAELGIVAAQGRDGVKELIGMASSDQLPQAVRDSLRALIMQLEAAHQQIVGIERRLQAQHRTSESSRRLETIPGIGVIGATAIAATVTDPTVFKSGREFAAWIGLVPRQNSTGGKQRLGSISKQGDRYLRKLLIVGAMAVIRHARRQPEKHPWLIQLLARRPAKLAAVALANKTARIAWAMLVRGEDYQALRRLAAAA

SEQ ID NO: 302991 - protein, 325 aa, unidentified
MTDQILYCGIDISADSFDICMLQPEGNLVWDKLPNTTQGFKQLLKLCTGNYHFIMEATGAFHLPLCFFLHEKKAVYSVVNALQIKRYIQMNLERNKTDKKDAKHICMYGVERKPLPYQMPDHQYFECRTLNNGIEGITADIVSYTNKIYAAKKLKIDSAVTIKSYQQIVKMLKAELKKLKDELDVKLLLWHPDLVKQVSSVKGIGSRATATLIVYTQGFAHTETYQQLISYAGLSPKEYFSGKSIKGRVRISKIGGRQLRHILYMAALNAKKTNAACKALYDRMVEKGKNKKLAIIAVCNKLLKQVFGVVKSGILYQDDYYKNIA

SEQ ID NO: 302992 - protein, 351 aa, unidentified
MADSSCEVILGVDTHLDTHAAALVDQVGRLLATCTIPATAAGSRQLLGWASTHGQLTRAGVEGTGTYGAALTRHLVAAGVQVVEVNRPNRQHRRRHGKSDPADAEAAARAVLADQATATPKTRTGIVEAIRVLRVARSGAVKARTQAANQLRDLLVTAPDQLRAQLQPLPTGRRVAQLLTTPPGPSVDPASATRRALWHLARRHHELTAEIDALDAELDRLTRRAAPRLLARPGVGVETAGKLLVTAGDNPNRLHCQAALAALCGVSPVEASSGKTVRHRLNRGGDRQANNALWVIAFTRLRIDPATRAYAERRTKQGKTPKEIMRCLKRYLARELFPLLLADLAHANSSP

SEQ ID NO: 302993 - protein, 320 aa, unidentified
MLPILGIDVAKATIQVSLQGVTGKRRHKSFGNTTAGHGELVQWLKKHAGELVHACLEATGTYGEAVATALTDAGHRVSLVNPAAVKAFAQSQLRRSKTDRVDADVLVDFCRAHAPAPWTPWPAEVRVLQGLVRRRDAVQDMLIQERNREQAGELVAPVRASLTRHVAVLEAELAALDQQIRDHLDRHPTLRAQRDLLETIPGIGIATAARLLAECRDITAFDSARAYAAFAGLVPRECTSGTLRGRARLSKLGVARLRAALYFPALAAMRANPTLRAFSARLRAAGKHKMVVVAAVMRKLLHIVYGVLKHRRGFTPSVTA

SEQ ID NO: 302994 - protein, 405 aa, unidentified
MGDSDRPKKDDTLELRVSVDIGCRSHNVAIGLSSGEVLDEFSIAHESEGFRQFFCRIEKQERRFGCPVAVAMEGYNGYARPLDTLVRARDYRLFNINNLKLARFKEIFPGSAKTDAIDARKGLELFQLRDHLPVAKDVLQEVRTTPQENAILKRLSRRRRRLVDERVRVVNNLQSDLHAVCPGLLEITGGADNIWFLRFLTNTDDLRKLARMRETTIRKIPGIGKKYASVIVEWQKTAQFSHEVEWVGEMIQEDAIRVLDLHDKIQSLEAKLDSVAHGSGIAQTLATIPGFGSICTAELAGEIGTIERFGSEASLALYIGMANLDNSSGKQKGSKPPTQVNTRAKAAMMIAVDRHRKQVPQSQKYYEKKRVEGKKHNQAVRALGRHLCRVIFKMLKENRGYILQQ

SEQ ID NO: 302995 - protein, 420 aa, unidentified
MKVVYRTCCGVDVHKSFLVATIIKTTSGVEPSYQKKRFSTFNNSILHFKEWLVKNQCRDVCMESTGKYWVPVFNLLENEINVTIANPKWVKAVKGNKDDTKDSKWIGDLFRLGLVPGSYIPCKLIRILREFTRYRYKLTSCRTSEKNRYQNALTVCNVALDSVVSDIFGKSATSVIDYLIEQSDNSINHEEIASRLLRSLKKKSDSVIESIEGYQMTDSQKYRMRLVRAHMDYITSTINDIDTMLDSLIAPYENAVQLLCTIPGVDRNSAITVISEIGTDMAPFSNSKRLCCWAGLTPGNNESAGKKKSVRIARACVYLKPALVQVAHAAVKSDKSPYYKQKYERIMKRRGKKRAIIAIARMILTAIYQMLSTGETWNPTDLFKIDMPEPMKEKQKEKAIKQAMKLLIREGKISESQLAS

SEQ ID NO: 302996 - protein, 411 aa, unidentified
MPEAVIGLDVGKLSHWACVATRDGEILLSAPVANREGDLDSLFGRFPDALVVVDQSRNIGALALARAKAAGMSAAYLPGLAAHGAARLFAGDAKTDERDAMVIAKTALGIPDALLPVGDPGPTVAAARALAAQRNFLTCENTRSKNRLRSILLESCPAFEALVDLSDGPQLRLMASLGGAWSVADAGPRRAAALTRGAARGKIEALVRSTASSTRPDAAAIAAEDRAVRLLARRISENSAEIDVITAEISALLEGDDTYRCLLTVPGIGPKTASELAISIDIEDFPSHDRLASYCGLAPRNRQSGTSISSVTASRQGNKRLKNLLIFSCNCLTRTEGRWGDYYARCRERGMPHGKALKALARKRLKVIYAIMRDRVPYAAQSKRSEQIGAHRPKGLALACRDSISKTALPS

SEQ ID NO: 302997 - protein, 409 aa, unidentified
MDLVIARGAGMDVHQATIVVTVRVPDEPGGRRSITETFGTMTADLLAARAWLQAYGVTHVALESTGVYWKPVYYLLEDAFTLLLVNMHDLKRVPGRKTDVQDSEWLAQLLECGLLKASFVPPPPIRELRDLTRYRVQQVRDQARETNRLCKVLEDAGVKLTTVVSDVMGVSGRAMLAALIEGTTDPTVLADLARGRLRSKLPALRRALEGRFRPHHAFLLQQILAKIDFLEDTLAQLTQEIDARVAPFAPLLAALDTIPGVDRIGAISIVAETGGDMQRFPSAAHLCSWGAMCPGQNESAGKRRSGKTRKGNVYLRRTLIQAALAATRKRDCALQTRYYRVKRQRGHKKAVVAVGHQILEIAYYVMRDGVSYHELGADYFVKRDRERTVRRSIKQLEALGYRVTIEQAA

SEQ ID NO: 302998 - protein, 483 aa, unidentified
MDTIAHIVGVIRQMGVVMTFVNGELQARFMGRIRGLDPQRCLVVPVDVGKASAVALVADHYGEILVPPFEFALTETGFAVLVAAVGRARVERDPAILRIGVEAAGHYHRTLVARLQAAGLEVVELNPRAVKDARGQQLLRTLKNDARDCGAMAELLIRGSGRPPQCRDEALAAQAAWVAHRRRKVAAQVVLGNQIHGQLDLIFPGLTGCFAHGLDAKTLRVLIRDLPDPDRVRRLGVDGVLRFVRRRGVHMTRPKAQQIVQAAHVALRLFSTERRAPLAVLAADWALFEALDAQICEATAQLAALLPNTPAGVLLGIPGVGVVNASSYGAAIGDPNRYRDAAAAYRASGLVPISYESAGRARPRTGISREGSVELRRAIIDLGRGVGLHHPDFIAYRRELLARGKPPLVALIAVGHRAHRLAFAMLRSQRSFDADRWTRAVAGHRHPTDEQARHGDTPVVGGPPARRDLPAQHTLTHAEVSSN

SEQ ID NO: 302999 - protein, 364 aa, unidentified
MIVIGTDTHKQSHTAAALEEGTGRVIAEQTVRAKRRSFDDLLLWGRRLDSQRVWAIEDCRHVSGALERFLLARGEQVVRVAPKLTAGARNSARERGKSDAIDAVAIARAAIREGVHTLPAAQLAGPELDVRLLVDHRERLVAQRTRLSNDLRWNLHDLWPELEVPTRALGAVCWQERISGRLARAEQTTRVRIARDELRRIRELTRAIDELERELAVLVAEVAPQLLAERGCGVLIAAKLVGEIAGVQRFDSDAKLARIAGSAPVPASSGHSDRHRLDRGGNRQLNCALHRLAVTKGRLDPETAAYLTRRQAEGKSRREAVRCLKRHLARRVWHVLQPQADYARLASTPPAVAIHCNLPLNAFS

SEQ ID NO: 303000 - protein, 324 aa, unidentified
MTRGVFVGVDVAKDRLDVAFRPGGEKLSVPNDRRGITRLLRTISRLTPECVVLEASGGYERRLLERLAEEELPVALVNPRNIREFARASGRLAKTDAIDAAVLAHFAEVMKPELRRLPDPETRKLRALITRRNQLVRMMTAEQNRQLQALESVRAGLAAIVRCLKKQIAVLDKQLAALIRATPAFRQKAELLRSAPGVGPVVSAMLIAHLSELGTLNRKKIAALVGVAPFNRDSGRMKGKRAIWGGRGDVRAMLYMSTLAAVRLNPSLRAFHSRLRSAGKSPKMALTACMRKLVVMLNAMLKVGSRCSEERTRPVKLIAATAPT

SEQ ID NO: 303001 - protein, 422 aa, unidentified
MLQDTHDTEELIGRIAALDIGKAELTCCVRVPSSTGSGRRSQEVRTYKTMTRSLLMLADRLGELGVTRVVMEATSDYWKSPFYLLEAHGFETWLVNAKDVKHLPGRPKTDRLDAVWLCKVAERQMLRPSFVPPPEIRRLRDLTRYRSDLVAVRTAEKNRVEKLLEDAQIKLSVVASDIFGVSGRAMLAALVAGERDPKVLAQLARQRLRAKLGLLEEAFHGHFSDHHAFLLATMLERIDRTSADIAAVEAKIEAEIAPFQAAVDRLDEVTGVGRAAARIIIAEIGLDMGRFPTPGHLVSWARFAPGVKESAGKKKGTASTGRGNPYLARALGEAAVAAGKTSTFLGERYRRIARRRGAKRAVVAVGRSILIIIWHLLSDPTVRFHDLGPGFYDTRIDADRKRRNHVRQLEALGYKVTLEPAA

SEQ ID NO: 303002 - protein, 454 aa, unidentified
MARPVLAVGIDPAKRVHHAAAVLYPDRLILDTAFANDRHAIQDFDAKVAALAIQHEAELIYGIEDHRGYGRAVTQTLHQAGRQIRVVNPLWTHRQKDFYGQDKDDRIDARSVAAVVLRRADKLPDAGDVSALSAAIREAERTLEDLGRQRTRALNRLHRHLSDVYLASYETFFDRLKRPWPLRFFSRFPLPQDLHGQSTEDLARTLQELAGRHLGSARKSLGERAHHILAATAALQTQPRDRSLALKAELIRQLCEEILANLERTRRLERLLHDQLLPATGQKLESVPGIGTLTAATILGEIGDVQRFPNRHAFAKYNGTAPASKSTGGRQRHTARRGCNHRLKRALWLIALTAVRHDPLARAYYQRRAEGGLSKVDAIKRVARRMSDIVYAMLRTGAAYDRKRLEQAIANRQVAASKAGGTSSKDRQDGSAVGPALPAFDDASLPKSRHGTNR

SEQ ID NO: 303003 - protein, 330 aa, unidentified
MKRQAASEAARQQIVGIDVAKAKLDVALKMLAGKWRNKVVPNSPAGFAELRSWLAKHGVSCAHVCMEATGIYWEAVAADLADHGFAVSVLNPAQIKAFAGAMGVRTKTDSVDAKVIAEFCADRAPDMWQPPSKSVRRLRALVGRRDALVDLRTQESNRLEVAATEEVQRSIEQVIAHLDEQIKKIERQIAKDIDDDPTLKQQRELLDSIPGVGAKTIAMFLSHYGGDLRFDKTRQAVAFAGLDTRKHESGSSVQGKPRLSKMGNSQIRRGLYMPAVVAMTRTPWGKAFSSRLLAAGKPKMLILGALMRKIVAIAYGVLKSGKPFNPALHA

SEQ ID NO: 303004 - protein, 439 aa, unidentified
MILIREVADAPVIMGISKPAGLKSPCGEVKIMNPLFVGIDVSSRNNVAYLMKPDGSKHSSFSVQNNLGGAKILSERIVSALESVPLSDLVIGLEATSIYGDSLVYALREDGSLGRFQRKIHVLNPKQVRKFKEAYPDLPKNDWVDAFVIADHLRFGRIAKEVYMDDYRYQALRTLTRSRFDIIQNLTREKQRFANYLFLKCSGIAQAKDIQNTSATTIALMERFETVDDLANADLDELTAFIAETGRGRFADPDAAAKAVQAAARGSYRLPKTVNDTVNQAMAVSIASMRALKEQVKVLDKAIEQQFEIIPNTLTSIPGIGKVYSAGIIAEIGDIHRFDSQASVAKFAGLVWHRNQSGDFEAEHSQMIKSGNRYLRYYLLEAANSVRRCDSEFRRYYDLKFKEVNKYQHKRALALTARKLVRLVFRLLKDNRLYIPPED

SEQ ID NO: 303005 - protein, 349 aa, unidentified
MTDQRLSYCGRIVYVGIDVHKETYTVTCVCNKQIVKTATVQADPAALAASLPRWFPGATLYSVYEAGFSAFVLHRVLTKAGITNLIVNPASVAVAANDKVKTDRRDATKLAIDLADGRLRGIYVPTEAEELARLLPRTRAQIVKHRATIARQIKAKLHQFGLIAPSSRRLISRRYLREMAAWSLPPELSVRLTLLAEQWRFATRQLIEMRRLLRDQAQAQEAIEKVYRSVPGIGEVVARTLATELGDMTRFANERALFSSTGLTPSEYSSGASVRRGHMSRQGSSRVRHWLVETAWRALPRDGVLKEMFDRIAATRGKKRAIVAIARRLTGRIRACFRQGTTYAVGTYA

SEQ ID NO: 303006 - protein, 412 aa, unidentified
MDVIHPRCAGLDISKKDAKVCVRINGAGRRKTSETVTTFGATTRQIMALRDHLAAQQVTCVVMEATGDYWKPFYYLLEDLPGVEVMLVNARHVKNLPGRKTDVADATWLAQLGAHGLVRGSFVPPAPIRQLRDLTRTRTAVTRERTREIQRLEKLLEDAGIKLSSVAADLNGASSRAMLEALLAGETDPAAIADLAKKRMRVKIPQLTEALYGRFTSHHAFLTRMHLDLIDQHTAAIEQLTDRIEVVMEPFRSFRDLICTIPGIGGYTADVVVAETGADMTRFPTAQHLASWAGTTPGNNESAGKVKSRRTRPGNPYLQGALGTAAMSISHTRDTYLAAKYRRIATRRGPLRANVAVQRALLVAIWNIATTNTAYHDPGGDYFTRLNPQKARNNAVRQLEAMGYHVTLDQAS

SEQ ID NO: 303007 - protein, 384 aa, unidentified
MPTMTTRSPFVTAPVPTLYLAFDLGNLRWDLAFTTTAGEPPRRRVCPARDLATFDRELARAKEHFHLPPNAPVVACYEAGRDGFWLHRALTARGITTTIIDSASIEVDRRKRRAKSDRLDAAALLTLQLRAAAGDRRSWHPVHVPTDAMEDWRHLHRELQLLTRERTRSRSRLKGLLATQGLRLPTLRGFPAHLPHLRRWDGTPLPPRLRDRLQRDWDRLTLVLSQARGLVAERRTLLATSTDPAVHQVRQLLALRGIGEVSAWLYTLEFFAWRQFRNRRQVGALAGLTNTRQLSGRLTRDLGISKAGNVHVRSLAIELAWSWLRHQPDSALSRWYQDRFAAGGSRLRRIGIVALARKLLIALWRYLETGLVPTGARFKPGVLT

SEQ ID NO: 303008 - protein, 372 aa, unidentified
MNNTTVYVGMDVHKESFTLCAYTLEKEKGSYSRRTPADYKEVLKYLEFLRTVYGNDTIFVCGYEAGCLGYTLYHQLTDHHVDCVILAPTTMLEQRGKKRIKTDKRDAEIIGKCLAQHNYSPVHVPTASDEEVKEFLRMRDDHKLALKKVKQQILAFCLRHNYRYDGNSHWTATHINWLKSLTPEALYKEILDEYLLTYTTLSDKLERLDKRIEELAAKDEYKEAVRKLCCFIGVKTHTALSVIVEVGDFRRFASAEKFASYIGLVPGEESSGDGQTRLGITKAGNRHIRMLLTEASQCYSRGQIGYKSKALKARQDGNTPQVIAYADKANERLRRRYYKMVLSKCKKHNVAKTAIARELACFMWGMMTDNIA

SEQ ID NO: 303009 - protein, 469 aa, unidentified
MRIIGLDLAITSAHKAVVMDEHGTFVTPVFGVATWPDELAALLERAREGAAPDQPVVVVMEPTGLAWLPVAVYLIRHQVTVYLVNSQQVADLRRYYHKHAKSDRIDARVLAKLPLVSPEKLHALVLPPAALLKCQRACKQLDWVITQITALHNQLTGLDRTVWLGGWRDHVFADPFAPAARWCREHYYDPTAVLRAGSEAIGRAWRATGLDPADDGAWAEALVRLAGHVVAVYGTPSLYVDFAALQAEVRLIQKWLAQFEADRNQLRRTVVRPLYRRLHPSRHLETLKGIGQDSAAVFVSFIGAPTRFANGRAFRGWSGLVPRSSQSADSESKGLRISQAGPDLPKKFAFLDADVARRYDPQLAHIYYDQMVHKGQHHTQAVCAVATHLLDRILVVLQQDRPYQLRDVDGTPVSDKRARQIIAERYHVPEDVRQRNNRRARRARAERQAERQYARRQKVKGKSARSVRS

SEQ ID NO: 303010 - protein, 362 aa, unidentified
MKSTTVAVDLAKSVFQLAVADASWKVIESHRLTRSQFERWFHNRDVSLVVMEACGSAHHWARYLSGLGIGVKLLPAKYVRAYVKRNKTDAADAAALLEALRASDIEPVRIKSIEQQALQGLHRTRSLWMSTRTSRINALRGFCREFGLVIPQGARTGVEAIARLLADPGSAIPELIRGSMKLLAEEIRLLEQRVAQLEQQLAVLAKQSPACKELLTVPGIGLLTATAMVAATGGEVSHYRDARHFASWFGLTPKEHSSGSTRHLGRISKRGDRYLRMLLTHGARAVLRAASVARLASKQVDGLKDWALQVQGRTNHNKAACALANKLARICYAVLKHHEPYGSQTRREESKKINRTAYAVAV

SEQ ID NO: 303011 - protein, 422 aa, unidentified
MSYCPVAGIDVSKQFSDMCILSPDNKIFAQEKIYHDETSINRANALLQKAERLFFSKPVIVMESTSHYHLILFQFFSEHGYDVIVVNPLQSNSMKDFSIRKRKTDRVDAFKLAMMYRTKTLRPSQIPQTATRALRQLCRHRAELLNDVSSYKNRLTALLDQTFPGYDKVFSDVGGVTSCAVLVRFPTPTILLVEEESELVEVIAAACKSGYSFAKKKAGLLISAAQKAQTLGIHSCADETLIVCTIQMLRTLSESVLQIETAIDDLLAQIKEMQNNVSLLQSIPGIGSHSAALLLGEIGDISLFKKPKQLAAYFGLDPTERQSGSFRGTKNKLSKRGSPYARAALHMGVVNSICKRGKDSAANPVLLSYYEKKCKNKPAKVAQAASMHKLVFIVFAVLRDQKPFELKTPEQHAVEQGFVKAA

SEQ ID NO: 303012 - protein, 350 aa, unidentified
MIHIGLDLHHRNSYIRAVTDEETLLPGRRIYHSDMMELWQYLAPFGDQPKRVVFEATSNARWMMRFLQQDPTIEPVAVTPHKVRIIAETVAKTDKIDATVLAQLSRMNALPRAWLPEGRVEALRELIRHRSALVQRRTQAKNRVNGVLVRDGRVRPLANIFGPCGRRWLEEIGLPEVMRFQVEQWLENLDRYEAQLKQVEDRMAVLLKSYPDWRAQVELLRTMPGVGLLTALTILGELGDFRRFRSRSSVSAFAGLTPTSKRSDRSCRYGKISKRGSTELRRILVEVSLNAVRRVPRYAVLYERLKRAKSGNVGKVAVARQMLEDCWTMLMKNEPFRLVPVQAESLTRVG

SEQ ID NO: 303013 - protein, 356 aa, unidentified
MGNSNRLDFTGQPIYIGMDVHKKSWSVSIHSAVCEHKTFTQPPEVDILVNYLRRNFPGATYRSVYEAGYSGFWVHDQLVEKGVACTVANPADVPTKDKERRTKRDQIDCRKLARSLRAGEIEGIYVPCRKKLEDRSLVRTRQSMVRKQTRCKNQIKSILFFYGIAIPEEWAERRWSGPFVRWLESLPMERASGEVALRIHLEELRHLRQILARLDREIRVLAQTEEYQTQVRLLRTIPGISTLTAMILLTELQEISRFRSLDELASYVGLIPDTRSSGETEHTGDLTQRRHGQLRASLVEAAWVAVRKDPALLMAFQESCKRMRKTRAIVKIARKLLNRIRYVLKNQTPYRMGVVQ

SEQ ID NO: 303014 - protein, 421 aa, unidentified
MKNVTDLRQKVKGQKRMELERATWILGIDVGKESLSCALLLKDETFRCRFDVEASLSGFQMILEKVKTETKGDGAVVFALEPTGHYWMVLGQFFEDHNQSYVLVHPLVVARSREVKQLTRGKTDALDARLIAELACRGAVTRTQIPEDDWATIRFFAREYMDREKEIAREKNRMMSYLETALPGFLEVFPRPLGMNSRACLRVLANFREVLQGDIVQFESQVRKHITGKRLMTSRVRRLFDMLQRGDALGLRAGRKTLFWRIINGLDRLELYEKQQDMASNALISLYEQCEFKPYLDSVWGTSPLTNSLVLGFMGDPTSYDTPASLIKMAGCDPVPNESGKFKGKATISHRGRNLLRKAGDRISFLLEKRNTVFQNFIHHLTVRPKNKLTKRQARIACINKYFRIIWVLCNHRVLFNPALA

SEQ ID NO: 303015 - protein, 322 aa, unidentified
MAMLSFGGIDVSKNRLDVMVLPEEQCSSVPNDAAGWANLIEQLRGCSIAAVGIEASGGYERGVMRALLAAGIPARHVNPFKLRQFARASGVLAKNDPLDARMIASFVAIMPTRPAQLQAPAAERLAEMLAVRRQLSAEKVAAENASRLLEDAMLQRLSRRRIGRLAADIDVVDERMVEIVATDAALAHRYRLLTSMPGVGAVLACTLLALLPELGRMSRKQVAALVGVAPYAFESGTLKGRRCIWGGRAHVRHVLYMAAMSASNWNPVLKAFHDRLKAAGKLPKVTIVAVMRKMITTLNAMVRDDVVWADRYIGRHSVPTAR

SEQ ID NO: 303016 - protein, 431 aa, unidentified
MKVIYPIACGIDVHKSFIVAVICDSTTLKPTYTKKRFSTFHKDLIKFRDWLLEHGCDNVCLESTGKYWIPVFNILEGHISNVVLTNPKWVKAVKGKKDDNKDAKWICDLFKLGLVQGSFIPEKQIRILRELTRNLFKVTNMRSSEKNRFQNALTVGNCNIDQVFSDVFGKSASAIINLILADEPFTLQDISTSLHGHCKATAEEVSDAIIGFSLEHVQKQRITLIQAHMEYLNSMILNFQSLIDSIVSPYDPYVTLLSSIPGVKRQSAITIISEIGIDMSQFGSHHRLASWAGLAPGSNESAGKKKSVKISRAGVYLKPCLLQVAHAAIKDNKNPYYANKFNKIAKRRGKKRAYIAIARKILVAIYHMIDTGEFFNPRDLADTETTIKKRIQYTKNNLRNDINSLLNSGLSQEDLSILINSILPDNPQLST

SEQ ID NO: 303017 - protein, 321 aa, unidentified
MTHVVGIDVSKAKLDVALRRPDGKFRSKVVENSPSGFVALTAWLGTHGVTQVHACLEATGTYWEAVAEYLVDAGHTVSVVNPAQIKAFGGAGLVRTKTDRVDARLIAAFCVAQQPPPWQAPPPAVRALRALVARREALNAMRTQERNRLGVAADTVRPGIEAHLTYLEQALADIEAAIRRKIDDDPGLGNQRALLDSIPGLGDKTIPTLLAYYGGPLRFDTAKQAVAFAGLDPRQHQSGSSVRGKPRLSKVGHSRLRKALYMPAMVATTRTAWGRALKQRLAAAGKPPMLILGAMMRKLVHVAYGVLRSGRPFDPALHQTA

SEQ ID NO: 303018 - protein, 461 aa, unidentified
MTESPCRVHGLGGGVTGSGGTDRPLIRDMTTGFFAGREALRNVDVAIGAVGRPGGYDRRVHVIDTSEIGVFLGLDVGKGEHHATAVTPAGKKAFDKRLPNSEPKLREVFGKLKTKHNTVLVVVDQPASIGALPLAVARDTGCQVAYLPGLTMRRIADLYPGEAKTDARDAFVIADAARSMPHTLRSIELEDETIAELEMIVGFDDDLAGEATRISNRLRGLLTQIHPSLERVLGPRVQHPAVLKLLDQFGSPAQIRKAGRRQLINLMRPKAPRMAERLVEDIFTALDEQTVIVPGTDAAALIVPSLASSLTSVIDQRKLLAARIEELLEAHPLSQVLTSMPGIGVRTGARILIDVGDGSSFPSAAHLAAYAGLAPATRSSGSSIRGEQPSRRGHKQLKRAFFLSAFAALAEPASRTYYDKKIAQGKHHTQALLCLARRRADVLFAMLRDGTFYDPKPAPTG

SEQ ID NO: 303019 - protein, 455 aa, unidentified
MPKPKRIRNARTSPVPRILEPDAAGIDIAATEVYVAVPTDRDPEPIRCFSTFTDDLHRLADWLRACNVQSVAMESTGVFWIPLFQILEDRGFRVCLVNARHVKNVPGRKTDVSDCQWLQYLHSVGLLRASHRPAQTICAVRSIWRHRESLVQMAAAHIQNMQKALDQMNLQLHHVISDISGTTGLAIIDAILDGERNPETLAALRDPRIVASRKTIARALVGDYRTEHLFTLQQSLRAYRQYQQWIAACDVEIERQLRVLPNNLADDQKPLSKSKDHHKPRRNEPSFDLRSQLYRIFGVDLTEVPGVSSLTAHALLTEVGPDLRRFPNAAAFASWLGLCPDNRISGGRVLSVVTRKVKNRLTMALRMAAQSLHRSQSHLGQYFRRMRVRLGTPAAITAAAHKLARILYHLITTRQPYQESTFAAMEERSRHRQLLRLKKQAASFGFQLVPGSSVP

SEQ ID NO: 303020 - protein, 460 aa, unidentified
MKQCRRKSPPQRKSGSSSFSMINKDAAGIDIGSGEHWVAVPEDRDEEPVRCFGCFTADLQAMARWLKECGVTTVAMESTGVYWIPCYQILEEHGFEVKLVNARHVKNVPGRKSDVSDCQWLQRLHTYGLLSGSFRPDDQICVLRSYWRHRANLVRYASDHIQHMQKALTQMNLHLHKVLSNVTGVTGMNIIRAIISGERDPEKLALMRERGVKNTPEAIAKALEGDYRQEHLFALKQAVELYDFYHRQIEACDREIERYLHTFEAKVDPVQNPLPRQKRKKEMRYQSFVDLRTELYRVSGIDFTQIPGLDVVTVQTVLSEIGLDPGKFPTEKRFVSWLGLCPNNRITGGQVKSTKTRKTANRAANAFRMAAQSVANSNTGLGGFYRRIRARLGAPKAITATAHKLARIFYRMWTTGQSYTDLGSDYYENRYKERVLRNITRRARELGYDALLQPIEQRVA

SEQ ID NO: 303021 - protein, 403 aa, unidentified
MRVPAAADKAWAGIDVGKRHHWVCVVDRDGRQLLSARVANDEAGIAAVIGSVTGLAAEITWAVDIIGAPSALLLAVLSQSGQHVRYASGRLVAAMSGAYTGEGKTDPKDAFVIAETARIRRNLPVTGHKGELVCNLSLLTAHRADLIADRVRMINRLRDVLTSVFPALEREFDYSSCKGALVLLTGYACPARIRRIGQARLASWLRQRRVRGYASVAARAITAAQAQRITLPGQDIAADIIAELARNLLALDERVTELDTQIAALFAEHPQAEIIQSMPGFGPVLGATLLVTAGDLAAFPSPGHPAAAAGLVPVPNDSGRRSGNLHKPRRYSRPLRRGSSLSAQTSMMREGPSRDYYLKKRQHARPHNQAVIALARRRIDVLWALLRDNRTYAATPPAPAKAA

SEQ ID NO: 303022 - protein, 451 aa, unidentified
MPRSTKKKVQTQPLVLRPDSAGIDIGATELFVAVPPERSGQSIRSFGAFTEDLHALADWLKFCRIRHVAMESTGVYWIPVFQVLEARGFEVCLVNARHVKAVPGRKTDVADCQWLQYLHSVGLLHASFRPSDQVCVLRSYLRHRDMLVRTASRHIQHMQKALNQMNLHIHHVIGDLTGVTGLAIIDAVLAGERDPHKLAALRDRRIKSSAATIAKALVGDWRKEHLFALRQARELYQAYQNQIQACDKEIEAHLSGIESRTELPPPGPAARKPERNQPRFDVRGHLHRILGVDLTALPGMSSLTAHLFFSEVGPDLGRFKSSKHFCSWLGLCPDNRVSGGKQLESRTRQVSSRAAYALRMAAYAAGRSHTAIGDFFRRKRAQLGAPKAITATAHKLARVLYHMITTHTPYDETRFADQEQRSRDIKERNLHRLASALGFQLVPLPAKPAPL

SEQ ID NO: 303023 - protein, 374 aa, unidentified
MVEHSEHGVRELVCLLVDHRVQRVALERPDGLLVARLLDAGIEVLAIHPNQVKAARERFRPAGGKSDPFDAFVLCELARTDHHRLPRLAPSGDETVALRALSRSREDLVAMRVELANRLRAELDAFWPGARAIFADVDSKIALAFLERYPSPLEAKALGPKRLGGFLARNGYCGRRSAQELLERLRRAPVGCAGEAELEARRAIVLALVAALRPLVEQIGLLTSQIRGALAAHPDAAIFGALFCDPKSAVTAAGLVAEIGDNRARYPSADALAADAGMSPVAVESGKRRSAAFRRGCDHRLRSHFACLADSTRHWHPWAGEVYHRARARGCDHPHAIRVLGRSWARVLWRCWQDEAPYDPARHGNLRRLQTQGG

SEQ ID NO: 303024 - protein, 392 aa, unidentified
MVCVGIDVAKDKHDCFILNSEGVVLADVFTIANNREGFELLLQKIRSCTHPADNIKVGLEATGHYSYNLLGFLLDCGLPTYVINPLHTNLYRKSLSLRQTKTDRIDARTIASMLMSDVNLKSYTDIAYHNEELKSLTRYRFDKVQDRAKLRQSVSRLVNILFPELESLVPTLHMASVYALLSEFPGAKQIAASHLTHLKSILYEASKGHYDRDKALVIREAARQSIGCCMPAKSLELQHTIRLISELDKEIAEVERAIQSILDEMAPPILTIPGISYRMGAMILAEIGDFSRFDSPDKLLAYAGLSPSTYQSGKLNATGAYSHMEKRGSRYLRYALFNAAKYVCHWDPTFAAYLAKKRAEGKHYNVALSHAAKKLVRLIFALQTSGRSFQPA

SEQ ID NO: 303025 - protein, 278 aa, unidentified
MNKIVLGIDVSARTLDAALIFEGRIFSKQFKNSTDGFKLLAGWLESLHVTGVHACLEATGIYGEEIALFLHGRGYQVSVVNPLRIKGYAQSNMRRNKTDRLDARLIADFCLTQEPDKWEPPSKEVKHLQSLVRRVEVLAGMRQAEENRLSNASLEIKPSIERMLGLIKEEIKELEQQIKQHIDYNPNLKEQSALLQTIPGIGARTANLLLSEIEFERFTSARSLAAQAGVVPRQKQSGTSLKQTSLSKLGNVRIRRALYFPAITAKQHNQIVKSLLDV

SEQ ID NO: 303026 - protein, 417 aa, unidentified
MKTVAGIDIHKSMQAVVVRLVRNGQVVYEQRKFGGTVSEILMMRDWLQELGVEEVAMESTAQYWRPVWYWLEGKFGLHLCHPLQNRAKGGRKSDFRDARRLADRWSAGELDDSFVPGAEQREWRALTRARVQYKRAITIMRNHVECILERDSIKITSVVSDVFGASGWAVLEKLAAGERRLDELVKGLRGQLQKKEAMIREALAGKLTSSGLLLLRNCMQNVAQLRRQVESINEELGRQMKAYTKELVRLTKVPGIDLYAAQELLAEIGPKAAAFPSADQFASWVGLCPGSKQSAGVNYSSRSAKGNPYLRRLLCQVAWGAIHTKNSFFKGLFARLKPRIQGKGAAWAVAHRIGKVVWLLLHDEVEYIEKGTGVNPQNLARKFRRIVKELARNGMDPRELLAQAVTSKATLRASATA

SEQ ID NO: 303027 - protein, 325 aa, unidentified
MRLYTAFDVHSSSSVLAVVDEHGKRLFYKKVRNDPDEVVRILEPLHGEVVGVVVESTYNWYWIVDALMDAGYRVHLANPSQIKKYEGYKYTDDRHDAFWLAQLLQLEILPEGYIYPKEERPVRDLLRKRGHLVRLRTSLVLGLESIITRNYGIKPRAKDLQAVSEDRVSPLLDGNEDLLLAGQTSKEVIDFLTGKIKAIERVVKSRVRLRDEYKNLLTIMGVGEILALTIMLETGPMGRFARVGNYVSYCRKVPTKWTSNGKRKGKGNRKNGNKYLSWAWSEAGSAARRHYRCARRYFDRKAQMSNLMVAHNALEHKLARAGYYM

SEQ ID NO: 303028 - protein, 423 aa, unidentified
MDVLHERVAGLDVHQKTIVACVRRIDDGKVARECRTFETTTAGLLTLLAWLRECRCTHVGMEATGVYWKPVWNILSDGDFELIVANAAHIKNVPGRKTDLNDAMWIADLVACGLIRASFVPDEGLQELRSLMRTRKQFSREQTRHVQRIQKTLEEANIKLSAVISDIMGASGRRIVQAMIAGVRDPGQLVQLADRRLKASRTELYEALRGRLTEHHGFLLRVHLEQHDALAATIRQIDRQVEVALTRLDQERATGRITYRDLIALLCTIPGVSTLAAITILAEIGRDMSRFHTAGHLLAWAGLCPGQNESAGKRKATRLRKGAPWLKTMLVQCAWAAKRKKDSYYRAQFYQISARRGPQKAICAVAASLLTAIYHMLKDGTEHQDLGANRFDRRPVEAKVQSLVARLAKLGYQVQLQPLAEAA

SEQ ID NO: 303029 - protein, 371 aa, unidentified
MALQAAASQDDGVAGSERVGPKHQRETAVEHFIGIDVSLESSSLCVVDTTGRIVREAKVASEPEALAGFCRGLGLAITRIGFEAGPLSQWLHAGLAKAGFDVVLLETRQVKAALSAMTVKTDRKDARGIAQLLRMGWYRPVHCKAVPTQEIRALLTGRKLLQGKLLDVELGIRGLLRNFGLKVGTVSKGRFAARIRELIAGQPMLERVIEPMLRAREALNAEFHALHRAMLAIVREDVVCRRLMTVPGVGALVALTFTSAVDDPERFRRARAVGAYFGLTPKRYQSGETDIVGSITKIGDEMVRAALYEAANVMLTRASRFSSLKRWALDVAKRRGLRRAKVALARKLAVVLLRLWTTGGVFRFGKEAVAA

SEQ ID NO: 303030 - protein, 357 aa, unidentified
MKILALDLGKYKTVACDYELASGEHEFETTPTTPQSLHDLLVEREPDRVVIEICSIAGWVCDLTRALEIEIEVANTNDERWRWKRIKKKTDRTDALKLASLSALQQIEPVHVPAREVRQWRALINYRQFLLRRRNRMKNHIRDLLAREAILLPRGRSAWTQEAMIALEQLARPLAAVECHELWRGELSIELGELRRAEEPLKQVEKKLDELAKANQNVQLLQTIPGVGPRLAEALVALIDDPGRFAHGKEVGAYLGMVPKQLESGETLRLGHITHHGNRLVRALLVEVSWLGLRYNPWVREVYERTRAGKSARRKLAIVAVGRRLLIRSWAMLRDQQPWHGPAKQTAAQKTKLKRAA

SEQ ID NO: 303031 - protein, 311 aa, unidentified
MKIPPQFIGCDVSKHYLDIFDADGAVIRRIVNDPQGIAAWLDGLPDRTDRHVVFEATGRYDRHLSAALHARGLRCSRVNPARARDFARALGLMAKTDAIDARMLAAMGQCLAPAPTPEREASRDRLARLHKRRDQLVAMRQKEKLRQMEAVPEEHDSLARHITWLDAEIAAVEQDRDTLLREDAELARLNRLLRSIPGIGPVASATLLALMPELGSASPKAVAALAGLAPFNVDSGQFRGHRAIRGGRRRVRNALYMAAVTAARSYSRFAAFADGLKERGKPAKVAIVALARKILITANAILRDGVPFNAT

SEQ ID NO: 303032 - protein, 400 aa, unidentified
MIDISDIGAFLGLDVGKGEHHATALTPAGKKAFDKRLPNSEPKLREVFAKLIAKHGTVLVVVDQPASIGALPLAVARDAGCKVAYLPGLTMRRIADLYPGEAKTDARDAFIIADAARAMPHTLRSIGLTDETVAELEMIVGFDDDLAGEVTRVANRLRGLLTQIHPHLERVVGPRIQHPAILTLLERFGSPSQIRKAGRRRLVTLIRPKAPRMAERLVDEIFTALDEQTVVVPGTDAAALIVPSLAASLQAVLDQRKILATRIEELLANHPLSKVLTSMPGIGVRTGARILIDVGDGSSFPSAAHLASYAGLAPATRSSGSSIRGEQPSRRGNKQLKRAFFLLAVAALADPASRTYYDKKIKQGKHHTQAILCLARRRADVLFAMLRDGTFYQPQPAPSA

SEQ ID NO: 303033 - protein, 363 aa, unidentified
MKGMTVSSMTDTDTAVSIEVYLGVDTHRDTHHAALVDRLGRPIDDREFPTTADGYRRLLTWASAAGAIAGVGVEGTSSYGAALTGALREAGWAVVEVDHPDRSARRRRGKSDPVDAYAAAVAVASGRATTCPKSRDGDVESIRVLHNTRRAAVKARSDALTSLKSMLVTAPDEVRERLRGLTRARLIRMCASLEPGPVASGGAAAATEIALRSIAVRYQHLSGEIAALERDLQVLTRRAAPALLELPGVGFDTTAQLLITVGDNRERIVSEAALANLCGVAPIQASSGQRCRHRLNRGGDRQANRALHTVVLSRLKTDPLTQAYRERRLAEGKTKREIIRCLKRAVAREIFRVLNPKAEVDNS

SEQ ID NO: 303034 - protein, 504 aa, unidentified
MGYRDSQTLFEGGIEVSTTSRKLKFTPFPQRFFDPVVPLLKDYCFLLSTPENIYLGYYGSPIIHGDTIHHQAICSVEKQEELILQKEYRVFKESPKGDEGGSMFYLGIDVAKKSSRYLVLDSEGKRVVSFSLENLKERFQNLLSRLQEAKIATKDILAGLEATGWFWENLYQFLQEKGFKVVLLNPYYVNKFREALAKKAKTDDIDALVIANLLRTGEYMNSVVPEEKIQVLREYTNLRYEFLRTRKDYQRKVISLLGVVFPEYERTALKNPFGVAPLQILKEFPTAKDLALAKPRHIEKIVRSIQGNNFDLKEIQSLIDWAKNSIYSGRAREARGVSLKMLLGQVQALNSNIQEIDKSIEDILSPGTDDSFPGENLLSIPGVGKKTIAAVLSYLGVDGSSFCSAKKVTGYVGFFPRLYQSGETKRENRISHRGPKVLRWALYMSAVSCLIHNKEMRVIYQRKISQGKSAKQALIVVAKKLLEVMLAMLKSGKPYNPIQVYANT

SEQ ID NO: 303035 - protein, 323 aa, unidentified
MNTNTLQNINIGVDTGKSQLDIYIRPLDVFFTVPNNEKGIKQALATIKKHNPQRIVIEATGRLEMPFVLACTEAKLPIVRANPVHIKRFAGAIGRRAKNDRLDAQLIAHYGEAIKPDLTVIKAKNIRLMSDLVIRRNQLLAMQTMEKNRIQILPKHLHSTIIPILTAIKNQVSKIENKLVKLIEDCPEYQTKNTLLQSVPGIGNIAAASIISNVPELGYITNKQAASLIGVAPITRESGRYKGKRVIQGGRAQVRTVLYMAMMSAIQCNPVFKDTYARLLEAGKPKKVAIIACVRKMVVILNSMLRDGIMWDQNIAQNKGLTP

SEQ ID NO: 303036 - protein, 364 aa, unidentified
MSSVSHRSLTHLGMDVHKDSISVGILRPDDSMDVERIFHDEESVRRFIARMGEPRQLTACYEAGPTGYGLERLLRRLQVRCDVVAPSLIPKAPGDRVKTDRRDCRRLARLHRAGELTPIRVPTPEEEAVRDLCRARGDVVEDLDRARRRLGALLLRNGQVWRGGSNWTQRHEQWLLGLRFDDPALASTYNHYRSIVEERRLRLVALEADLLVYCDKEPYAEGIHRLCCYRGVNTIGALTLVSEVCDWRRFAKASSFMGFVGLVPSEYSSGERTQRGHITKAGNEHLRTQLVESAWAYQRGPYVGYRIRGALEQAPPATAERAWKAQVRLCGRFRRLAARKNVKSVVATAVARELAGFLWGEMTA

SEQ ID NO: 303037 - protein, 391 aa, unidentified
MESAQMVQPVLVPREFEVFAGLDVDKTRIAVPFTDHNRWLKSLPMPHSSQHLLNYTRKHFAGCRVAFVYEAGPTGFGLHDDLLAAGHRCLVVAPSMVPRAPGQRVKTNRIDSRKLSEGLRGGQLNSIHVPSLAYRHLRHLVQLRDSHVRQMMAAKYRIKALLLYEGIPFPEAPASNQWSARVLHKLGTLPCTAAVGFKLNSLVASLYFHQLEAAATQKQIRRFCQQDPELSRSIQYLTTIPGIGWIVASHLVARLGDWRQIRNVRQIASFLGLVSWEHSTGDQVQRGSITRTGDVRLRNKLVETAWTAVRKDPELEEFYRRIYQRHPRPIAARKAIVAVARKLTTRIYSVLKQQRPFRLKTGVAQAPLTPEETACPRGRLDQPQNEGTHGS

SEQ ID NO: 303038 - protein, 413 aa, unidentified
MNAVGIDVSKKKSTVTIRQAGDVVLLPPRDYRHTQSSINELIAIIKGLDGETKVCMEHTGRYYEPMASWLTNAGIFVSAVNPKLIRDFGDESLRAPKTDKADSKKIARFALDRWTKLRQYSPMDETRNQLKTMNRQFSFYTDQKTAMKNNLIALLDQTFPGANDFFDSPARSDGSQKWVDFVYTYWHVDCVRGKSLSAFTEHYRSWCKRKGYNFSAGKAEEIYRVAADLIAVFPKSENTKMLIRQAATLLNTTSQMVESLRIQMDQVASTLPEYSVVMAMNGVGPTLGPQLIAEIGDPTRFTHREALTAFAGVDPGADQSGDHNRKSNRTSKKGSPYLRRTLFLIMDGLIQRSPADSPVYAFMDKKRTQGKPYLVYMTAGANKFLRIYYGTVRDSLKQKGLWPDPESVEVNPV

SEQ ID NO: 303039 - protein, 412 aa, unidentified
MDEVVEFCAGLDVHRDTVVATVRFPQGRHRGSETKTFGTDTAELVALGDWLISHRVTRVGLESTGVYWKPVFYLLEDRIAQLWLLNAQHLKNVPGRKTDVVDSAWIAQLVEHGLVRPSFVPSPPIRELRDFTRHRRVLSEERTRMVQRLEKVLQDAGIKLTSVASTVLSKSARAMLEAMLAGESDPVVLAELAKGRMRSKIPALTDALRGSFRVCHHGVLVRQILAHVDFLDAQLAEIDEQITTRVATFEPIIERVQTIPGVARKCAIGMIAEIGVDMSVFATPAHLASWAGICPGNNASGGKARSGRTRHGPVALKTVLTEAAQAAARTKNTYLGARYHAIRGRRGTFKAVGAIRHDILIAYWHIVTADVGYQDLGVDWVARRRSREHQIARLAKQIEKLGAAVEITMPAA

SEQ ID NO: 303040 - protein, 351 aa, unidentified
MVTLVKQPTRLIVGVDSHKETHQAAVLDVNGVLLANERFAASSSGYQQLEAWLATWGEIDRVGMECAGSYAAGLARFFRERDVEVIEVNFPHRAVRARRGKDDAIDAEMAARKVLSGEAQAIVKDTTGAIECIRLLKVARESAIKARTNALLQIRDVLITAPSELREHVEAAGGSRRRVTRAASLRPDLACVNEPLQAAKLSLRTLARRVKMLDEEIAEVDVHLGALVASCAPTLLSLLGIGTQHAAQLLVTAGQNFDRLHSEAAFARLCGVAPIPVSSGKTNRMRLHRGGDRRANKTLHLIAVARLRLDPATKVYMERRRTEGLSKKDVVRCLKRYIAREAFGALRQDLL

SEQ ID NO: 303041 - protein, 419 aa, unidentified
MSFKILKNNCCGLDVHKTWIFACIGITDSNKRTVYKQARFSSFTKGLQELCHCLAKYDCTDVCMESTGKYWIPVFNILEKNNIWVTLSHPKYTKPQKGNKTDRKDAKWICDLYMCGMVKPSFIPPADIRELRDLVRYRFKLTCMITGEKNRAHNCLTVSNLKLDDVFSDIFGRSSRSITEQILQHPGETFDVAPFVHGRCKTPIEEIQAAVDGAVSKEQAVKLRQCLNHIDELEMHKSEIEREIFRLSDKYEDILTLIRTVPGFDKNPMTAIQVLSEIGGDMSVFPTAKNLVSWAGCCPHNDQSNHKIKSTRISRAGSYFKPVLVQVANALIKSKKHPEFSTRYRRIKARRGHKKAIIAICRMILTAIWHILTDLKPYTAKGFLEPRPVSKEKVLTASQALNLLKQRGYVIKDEPIFIS

SEQ ID NO: 303042 - protein, 317 aa, unidentified
MSFVGIDVSKLQLDIAVRPDNKKWSVINSEANIAKIVETFNELSPQVIVIEATGGMEMPLVAALSHARLPVVVVNPRQVRDFAKAIGRLAKTDRIDSEILAHFGEAVKPDVRLLKDEETQMLTALVTRRRQVIEMLTAEKNRLGISPKVVHKDIQKHIDWLQARLEDIDRHLDSAIRKSPVWREKDDVLRSVPGVGPVLSLSMITGLPELGTLSRRQIAALVGVAPLNRDSGLFRGKRIVWGGRANLRAVLYMAALSASRVNPAISTFYRRLIEAGKKPKVALTACMRKLLTILNAMMKNRILWQADYSTCTPQKNA

SEQ ID NO: 303043 - protein, 352 aa, unidentified
MEHERIVGLDLGDKFSYACVLDHKTGEVLQEKRIATRASCLETFFAGRPPLRIAIETGTHSPWVSRLLESFGHEVLVANARKVRLVYGGDRKSDKLDAQKLARLARFDPKLLAPIQHRSKDAQAHLALIRSRDALVSSRVGLVNHVRESVKAFGARLPVCSTRTFARKARAVIPEELLAALEPVLATIEKLSEQILVMEKRIKVLGREVYPETNVLRQVTGVGSITALTFVLTLEDPSRFKKSRDVGAFLGLTPGQKQSGDRDVKLRISKRGDESLRRLLVQSAHYLLGPFGSDCDLRRHGEKIEAGGGGYAKQRAIVAVARKLSVLLHRLWLTQEIYEPLRNSDKTLAKAA

SEQ ID NO: 303044 - protein, 352 aa, unidentified
MKSTQTTATPKLFIGMDVHKKSWTVHFKTDLFDNKTVTMPADPDELISYVRKHFQDHEVSCCYEAGCCGYWIARALLSHGWEVKVVNPADVPRNNKQDWQKTDRIDSRNLCKHLSDDNLKGIYIPGEEQEQLRSLFRRRIHLARNLRSIKNHIKSQLLYFGIKLPDQYDNPNWSREMKTWIGNLKWKFSSGGESIKSRLKQLEFMWYEELHISNELRAYCRKHYRKDYYLYKSIPGIGGITAAGILSELGDIRRFNRLDELAAIVGLVPGIYQSSDHTINLGLTKRSNHQLRSLLVEASWVAVRTDMALQQYYRRHAHKEPNKAIIKVAHKLLSRMRAVINSEVPYQLGVLK

SEQ ID NO: 303045 - protein, 348 aa, unidentified
MAYFVGLDVSVKETSVCVVDDSGKVISEQKVLTEPDNIITLLTSIGETYARIGIEAGPLSQWLVNALIAADLPVICVETRHMKALLTAQQINKTDRNDARGIAQMMRVGLFKPVHVKTLVAQEQRMLLTSRKLLQRKLLDVESDLRGTLRNFGLKVGAVSGSRYDARVRELVEGFPGLTAIVEPLLTVRRVMRQQFAVLHKMLLDTVRDDPVCRRLMTAPGVGAVVALTYRATIDQPQRFVHSRAVGAHVGLTPKRYQSGEIDYDGGVSKCGDALLRTMLYEAAQTMLTRAKKWSWLKAWGMRVAQRRGIRRAIVAVARRLAVVLHRMWVDGTEFRWSKDNATVLNAA

SEQ ID NO: 303046 - protein, 412 aa, unidentified
MGRNKSRNKDRGTISVVHPNAAAIDVGATMHTAAVNADRAPEPVRSFGTFTTDLHRLIDWFAECGVDTVVMESTSVYWIPIFELLDARGFAVFLVNARDAKHVPGRKTDVSDAQWLQRLHSFGLLRASFRPKGQIAELRAYLRQRERLLEYGASHIQHMQKALTEMNVQLHHVVTDITGVTGLRIIRAILAGERDPAVLAGMRDRRCHATVETIEKALAGNYRVEHLFALEQALALYDTYQQKAFACDARIEAVLKELIVRRGREEGQLPAARQNRSSQQNSLLFDVRAALFALLGKDLTQINGLGPYLALKLIAECGDDLSAWPSAKHFTSWLCLAPSNKISGGKVLSARTRRSGSRAAALLRLAARTVGRTDTALGAFYRRLAARIGKAKAVTATARKIAVLFYNACNTG

SEQ ID NO: 303047 - protein, 315 aa, unidentified
MEKTTPTTEVTYVGLDIAKDRLDYTVDGSRCDHVPNTPGGHEKLLRVFAKRRGVRVICEATGGYERAVVAALLQAKHEVCITNPGRVRAFAHAEGLLAKTDRLDAQLLRRFGEKVQPRLHAPMDQAAITLRELLDYRRQVSDQLVAVRNRLELAGPVLRARLDGQVTFLEKELTAADQLIQDHLDHDDTLRRKAARLRELKGAGPVLAATLLAYLPELGEIESPQLSALVGVAPFAHDSGRSHKARHVRGGRGLVRRVLYMAAVAATQHNHVLRAYYTRLVAAGKPKMVALVAVMRKMLHVLNRLLADPNFVLVR

SEQ ID NO: 303048 - protein, 362 aa, unidentified
MGKFIMVGCDLHDKSMLLKIAVDRGVPSMRTWGTDRGARQAMMADLRRRAAEVGATRMVFAYEACGFGFRLHDELTAAGIECYVLAPSKMERSVKHRKRKTDERDAQAILDHLRSFLLAGVELPSVWIPDVQTRDDREIVRQRLATAEDGSAIKTRVRWLLKRSGIESPSAEAWTCTYWCWLHDLAERGLPAGAAQALRSLLRHLDWLLAEMERLDAQVLSLSRTDRYRGPVAALMRHKGVGVLTAMVYLTEMGDLSRFRNRRQVASFLGLVPSSYETGQGDDHKGHITHQGPQRVRKVLCQAVWSRLRTVESERISYDRLVARNPKHKKVAVVARMRTLAVRLWHEGLAAQEATKAQVAVA

SEQ ID NO: 303049 - protein, 369 aa, unidentified
MDHHSVAYVGFDTSKTKHAVALAEGGREGEVRYLGEIEATPAAVERLLGKLERKYKTLHVCYEAGPTGYGLYRHIRALGYACDVIAPSLVPKRPGDHVKTNRRDAVTLARLLRAGELTAIWVPDEVHEAVRDLVRAREAAAQDLRHKRQQVLSFLLRHGRIFTGHRHWSRAHLRWLAGQAFTHPAQQIVFQDQVDAVADAQARLERLDHQLAELVPTWSMAPVVAACQAMRGVSFLVAVTFVAEIGDVRRFESPRQLMAFLGLVPCERSTGDTVRRGGLTLAGNRRVRRALVEGAWSYRHPARITETIRVRLENLPKAVRDIAWKAQVRLSARYRRLIAAGKKAPVAVAAIAREMAAFLWAIGRVVEPA

SEQ ID NO: 303050 - protein, 348 aa, unidentified
MKNKSFVGIDISKNVIDVSIFREDTNIKMFPHEVFNNTRKGFGDMCSWLKKSRVVLSQALFGMEFTGCYSLDLEKFLTSKNYSFCMLSTRIVKHHPMGTIDKRDKNDSAKIADFLYRYDGTECAKPYKLPSKAMQQLKQLVNERKFLVEQRTNFMNRMQMFETKEDSAMYESYIKKLNHDIEKIDQEECELMSKEEDVFDTFQNLLTIPGIGFVNATNIIAITRNFTAFDTARQYARYVGVAPCSHTSGTSVKWRARPSAHCNGQVKADLSMAALRAVEYDVEMQMFYNRKLGGGKDSDTKRKALNAVKFKLIRRMFAIGKQKRKWEVLNTSDDRKNLHIEKSKASEL

SEQ ID NO: 303051 - protein, 345 aa, unidentified
MNVTTVGIDLAKNVFSVHGVDSHGKVVLKKTVSRSKLLECFANLPPAIIGMEACSGAHHWARALRSLGHDARIIAPRFVIPYRKSGKNDGNDAEAICEAVSRPAMRFVPVKSVEQQAVLSLHRIRSAVVAERTAQINQIRGLMSEFGLIMPKGRYPAQHHIPDILEDADNGLPSLARRLLHDIYQRIQALNQQILAYDREIDSLARHSEPAQRLMTLPGVGAVTATALVASIADPAQFNNGRQLAAWLGLVPRQYSTGGKTRLGRITKQGDKYLRTLLIHGTRAVLAALRDKQDRTSCWLRELIARRGYKRAAVALAAKNARIVWAMLTRGENYRPQPANQAVAA

SEQ ID NO: 303052 - protein, 412 aa, unidentified
MDVVHTHCAGLDVHKKSVVATVIVPETQGGWCKETQTFGTMTADLLTLSDWLQSHAVTHVAMESTGEYWRPVFNILEGNFEVLLVNAQHMHQVPGRKTDVKDSEWLADLLRHGLVRGSFIPPEPQRNLRDLTRHRSNFVRERTNLINRLHKTLEGANIKLGAVASDVVGVSGRAILAALIEGEADAATMAELAKGRLRTKRTELTKALEGRVNAHHRFILTELLCQIDGVEETIEHFDEQIVEYCHPFEEVVAHLDTITGIGPDLAQALLAEIGTDMTRFGTAQRLSAWAGVAPGNHESGGKRRSTKTRQGNRRVKSLLVQAAWAASRTKDTYLSALYHRLAGRRGKKKAIVAVAHAILVIVFHLIIRNEPYRELGGDYFDKQDPETTVKRLAKRIEKLGYQVTLQPASVPA

SEQ ID NO: 303053 - protein, 392 aa, unidentified
MNPCALGWDNHRKFSKVSLMEQTPDGEIRAVERARLEHCDKQAMRAWLSHLDPEIPVALEATFGWPWVADLLEELGHPVHLAHPPVVRALAKHEAKTDRCDGDRLGKFQLRGILPESYLAPPEVRQRRERTRYRMALSALRTAVKNRAQAVLHRHGILHDFSDLFGKAGRRFLDDLALPEGSRQALQGCLQLLDKLTLLIHEVEQWMVANLEEDELVRLLMTIPGIGLILAHVIRAEIGELERFPTYRHLASYAGLAPMSDDTAGREGPRHCSSACNHVLRWAFIEAVHGVGRTKGPRGFRLRQLYARLRGSGRPKGRASSAVVAVAHELSKLVSVVWTKRMPYTDTPPPRPGSRAGRPEPQESPTAKTTLRSNQPRHPMVRCRATVGQTRM

SEQ ID NO: 303054 - protein, 387 aa, unidentified
MIAVGIDVGKRTHQACFLDGQGREVARSLRFANTAAGVQQFHDRLQLLPAPATIALEASGHSWLGVHRRLTAAGLTVQVVNPLQTDAFRQTGVRKTKTDRRDAFVLADLVRIGRARPNYVPDDTLLQLRELTRFRWHLADRIGDAKRRLLTVLDRIFPEFADQFTDPFGTSARVLLRQAASAAAFADLELDDLTARLHAASRGRFGRAKADALRRCAQDSLGVAALGTVGQLEVEALLDELAVLEQQLQRADAAIATLLAQIPQQLTSIPGIGPVLAASILAEIGDAHRFPRLAALVAYAGLDPSVFASGAFQGTRQHISKRGSPYLRRALFLAAHGARLHNPDLAAYLGRKLAEGKPYRAAVIALAHRLLARIYVVLTEERPYVVR

SEQ ID NO: 303055 - protein, 343 aa, unidentified
MGVYAALDVSQELTAICLIDDGGALLAEGKVATCPDAIATWLGRWTGALEKVGMETGPLAVWLWNTLTAKGLPVVCLDARHASAALKMMPNKTDRHDARGLAQIVRTGWFKTVRIKSHEAYVVRALLTARDALVAIRVRLENEVRGLLKTFGVLFGKRVGGFMRRAEEIIAGELAVAPELRPIFEALVAARCAILQRIRALDAQVRASARRSRTVQLFMSAPGVGPITALAVAAAFDDAGRFRSSASAGAYLGLTPRRYESGEVSRNGRISKRGDRMARTHLYEAANAIMTRKLGASRLRDWALAIAERTGPRKAKVALARKLAVILHAMWRADTPFRDAATA

SEQ ID NO: 303056 - protein, 348 aa, unidentified
MTTAYIGIDLHRTVIQICVLDARGERLAEERIRYESLEEGVEAVAFVRRFGPDCRVAVEAVGLNRWFVNACLQAGLDVLVCDPRKLDLKKLGKKTDRRDAREIARRLWLGDLDRIALTYYPSDAEYGRRKLLRVRHRLVQMRQQTINQLRGMLNAYQIPAPRGVLYTRPSRERLASVQLPVLELQQAFEALVAVLEGLQGQIDALNRRVRRLPSEEADVAVLAKEIPGIGAQSAATLLAELGDPKRFAGPRAVAAYAGLVPRVSQSADKAHHGRMTKQGNPELRWILSQWAVRLMKDDPFVRAWAQRLRRRVHKNKARMALARRLLVGLWVMLTRGEAFDLRRCLGQA

SEQ ID NO: 303057 - protein, 342 aa, unidentified
MDYYAGIDVSLELSSICVVDATGQIVLEAKVASEPEAFVGFLTRLGLPLTRIGLEAGPLSQWLYAGLAKVGQAVVLLETRHVKAALSAMIVKTDRRDARGIAQLLRMGWFRPVHCKSPPAQEVRALLVARKQLQAKMRDVEFSLRGLLRGFGLKVGEISKGQYAARVRMLVAGHTMLERIAEAMLRAREALQAEFGKLHRAMLTIVRSDEVCRRLMTVPGIGALIAVTFTSAVDQPGRFSRSRAVGAHFGLTPRKYQSGETDITGAVSRVGDPMVRTALYEGAHIMLTRAVRFSALKHWALQVAKRRGMRRAKVALARKLAVILHRIWVDGTTFRWGREVTA

SEQ ID NO: 303058 - protein, 368 aa, unidentified
MGKIRLVEGGGQSGLPAVRRPTPGSEVWIAIDISRSKLVYCVRWDGAEQYRQSTALGLEHVRALVQRYAGCRVHVAYEACGFGYEIAWWAQAQDAVTLTVIAPSRVERAPGARVKTDRVDAGQLARKLEKGDLKAIYVPSRTLHADRAVGRAYGQCVKERKRAQIRLRLLLQEHGQLGPLPGRGWTVYARWVSTLDLPTPVRACVEAHLQLRASAAVQARRLRAILGGVAASDTYHGLVGALCMQAGVGVYSAIRLVLELGDIDRFATTDSLPHYLGLTPSQYSSGETDHRGHILKSGPGALRALVVQCAWAAVRPGRDPDLRALFERLAPRIGRKRAIVAVARRLAITLRKRWMHHLHPPPATDVAA

SEQ ID NO: 303059 - protein, 356 aa, unidentified
MRNVLLRVAARSRTVGRRIVGHHSLWAEEKQDRGRPLHRTRIGCRNFWFAYKAGSTKVSKTNTKSLVCAGIDIGKAKLDCAIAERGAELCCDNSQDGRGQLIAFLKGHGVRRVGLEASGGYEIEVVDDLRAAGFEVIMFQPNQVRAYGQFKRKRAKNDRIDAILIAECTAAQDGVRAAPDPRLAAFAEHLTWIEQIEEDVARAKVRRERYRNPRLKAEIEGEIKRLGARKREEIRLLLKALRAHADLAHKIELLVSIEGIGERTALALVVRMPELGTLSREEAACLIGAAPFVHESGRYKGQRRTGGGRARARTSLFAAAQAAARQWNPALIAFYDRLVKAGKPHTVAIVASRIHW

SEQ ID NO: 303060 - protein, 440 aa, unidentified
MKLKIVNPNAAGIDIAYGEMQVCVPEDRDGDNNRCFGSFTCDYEEIASWLKACGITTVAMESTGSYWVGLYFFLEERGFDVLLANAKDVKNVSGKKTDEADAEWIMLMHSYGLLKQSFHPDAAARSIRELARHRDNMLRSAGKEVQHMQKSLVLMNIKVDTVISDILGKSGKAIIEAILDGNHDPKSLSQLADPRCKASKETIEKSLEGTWDTVHLFELKQSYDLFKYIHTQIADCEAEMDRLLDEYTNGCGTDMRGYTATNKRVAKKNAISFDAEKHAFSMWGVNAMEIPGMSLGALAVLMGELGSGFTEKFTSAKSFCKWCNLVPNNKISGGKLLSSKVPKQKSRVGQVFRLCANSVKSVKTGLGVYFRRQKSKGGHLQAIVATANKIARIFYTMVVNKNHYDESKVGLDEKELLQRKITLAQRTLDRLNLRLSVAQG

SEQ ID NO: 303061 - protein, 340 aa, unidentified
MQITTIGLDIAKNVFQVHGIGIGERVVVRKQLRRSQVITFFEALSPCLIGMEACASAHHWARALARLGHDVRLMPAKDVKAYVKRNKNDAADAEAICEAVRRPTMRFVRIKSAEQQGLLMQHRTRDLLLRQRTQTINALRAHLAELGITAAQGREGLKELLAIVADEEDERLPINARASLVVLAAQLQALQTIIGSIEKRIVAQDRANEASKRLRTIPGIGIIGATAITAVVTDPKAFRSGRDFAAWIGLVPREDSTGGKRKLGPISKQGDRYLRRILVVGAHSVLRRAKHSPERYPWLTRLLARRPFKVVAIALANKMARVAWALLAKGGSYRPRLAAA

SEQ ID NO: 303062 - protein, 420 aa, unidentified
MKVYNVDNFAVLIGIDWADKKHDICEHPTHSAKYNYSVIKHSPEALHEWAMDLKKSYPNQKIAVVCELQKGPLIYALAKYSHLTLFTVNPSTVAKYRKAFAPSGAKDDPADAFIQVEILTLHMNKLSVIEPESVSIRTLAQLVESRRGLVQNSVDLSNKMTATLKNYYPQVLEWFGEKDSMIFCDFIEKWPSLALVQKARKQTLLDFFNSHNSHYKAVNNTRIEKIKTAMPLTEDEGVIAPNQILIEVLIAQFRVLLKGITTLDKAIKSLYKSQRNKGIFDSLPGAGPQLAPRLLVAFGNNKDRYQSASELQKYAGIAPVIERSGKKMWTHWRYSCPTFLRQTFVEWAGFSIRYSFWAKAYYEQQKSKGKPHNSIIRSLAFKWIRIVFRCWKTNTPYDESKYLEALKRRGSPLLKFAINS

SEQ ID NO: 303063 - protein, 387 aa, unidentified
MSRNARVPIPVTTLDQDSTLVVVLELSARSWLVGARVPGIGRMSRYALAPSAEALAAWLGTAKARAGAAGRTVVRVVLAYEAGRDGFWLARYLEARGVEVYVIQPSSVLVDRRARRAKTDALDVEMLMRTLLAWLRGEPGVCSMVPIPDVAEEDGRRPVRERQGLIGERLALLNEIDGLLATFGITGYRPLRRDRRAQLAALRTPEGDPLATNAAARIGRILDRLELVMQQIAELEQARDAVLAKEAASGEAETMIRGLARLKGIGAELATVLVWEAYVRSFPNRKALGAYAGLTGTPFASGSTTREQGISKAGNRRLRSSLVELAWLWLRYQPDSKLAAWFRTRTGSVGSRMRKVMIVALARKLLVALWRFCRDGVLPEGAALKAT

SEQ ID NO: 303064 - protein, 343 aa, unidentified
MEKRYIGIDLHRNQFTCCVRLENGRNYLSEWKLESLPQFVKKLRPSDEVAVEVTGNTRLFYDAVAPHVARVVAVDPNQFRVISHSVKKTDPNDARNLALYLAKGLLPEVRMKEKTQAQIASLTQTRDTLVKLRTALKNKVNNILSAHGINLAKEALSSEKKLGEVLAMRFDPMVRTELRVIVEQIRSLNESIAELEKTITDQGQKLPGHKNLTSIKGIGPLSGSILLSVIGDIHDFPEEGKLAAYFGIVPRVSNSNETERSGRITKRGSKLGRTALVQCALIAQRYSPYLKRFYEKTKARRGTGKAIIALARKLLGIIYRTLKNNWVFEDFPNFVLAGVDKTS

SEQ ID NO: 303065 - protein, 428 aa, unidentified
MSRRVYSSRRLSAKDFGRFVSQAGSAPVTVGVDVSKHELVLMVRRGPEDFLGPLCAANPCQVREVAELVGLIAARGPVRVAMEPSGTYGDALRQALSDRGIALQKVGAKRSHDYAEVFDGVPSQHDGKDAAVIAELCAIGKSSPWAYEPPDEKQSRMRLLVEWIDGQDRIRRMWLGRLEAILARHWPEATGVMPLRSATLLRALEHYRGPADLAADARAVEKLLSWGGNLLKREKAAALVESARATLGVRQNQADRDRLGRVARQALAAWHELRRSRSELKQLAEGNRVIGSQAAAVGVATACVLWARLGDPNDYPAAPAYLKAMGLNLTERSSGQHKGPMHISKRGDPLVRRWLHMAALRMVNAHAPVRDYYRGKRARHGASHRYAITAVVRRLAVAVYKLAVHDRQFDPARLFAGPKAAQAASGGQ

SEQ ID NO: 303066 - protein, 385 aa, unidentified
MKTIKYNVTCGGMDVHYKFSNVTFRDEAGRVVSRERLKHPQRAQLLERLNRWPKGIPIVLEASFGWGWLSDLLINAGLEPHLSNCYKLEQMRKARGWVKTNKKDADMLSLLPFETTDWWEVWRAPCEVRNRREQMRFRGDLVALQTVVKNRIHAIFHRHGIFHEFSDLFAGKGRKFLAGLCLDNPMNLSSEALMALRGQVRLLDHLRRQLADVERVLRKQLVRTALILRLKTIDGIGLVLAHVLAAEIGRIERFRSQKALASYSLLAPRSHDTGQDDPSRSPLGRHLGMNGNRTLKWAFIEAAHGAVRSGGRWRAMFDRLTEGGKKDRNRGYIKVARELVKVVYVVWKKDVAYCDVPPQRPGARRKKTRSGTGQLCHPMVHAFTA

SEQ ID NO: 303067 - protein, 451 aa, unidentified
MDECRYRDDRSIAKLIKGERILDHQFRYFVGIDWATQTHRVALLDSEGRAVEQYNAAHSGEGLAALVEKLKQRTGCNPEEVAIAIEVAWGALVETLVENGFSVFSINPKQLDRFRDRFTVAGAKDDSRDALVLASSLRTDRKSYKRVEVESPDILRLRELSRFEEELKSELRRMTNRLWQQLHRYYPQMLSLSPAADDPFVWDLLRAAPTPKDGAKIRRVRVERILTDNRIRRLSADEVLLALKEAPLVLAAGAGEAACEHVLLLLPQVSLLDRQLRDVGLRVKQLLARLTEPGTEPGGLPCDAALMLSIPGIGPAIAAALLTEATRPIRERDYQALRCYAGTAPVTKQSGKRKTVNMRYACSPRLRKAVYYWASTSINCDKRSRQQYDALRASGHHHGRALRGLADRLLRILISMLTQGKTFCPLRRNGSLPQRSSPAAAVGALQLQPAV

SEQ ID NO: 303068 - protein, 330 aa, unidentified
MYLGIDIHKRYSQVAVVDSDGNLQQESRLPNDRLADLAEEYAGSEAAIEASGNYRPIYETLDEHCDVTLVDPSKNRIIAEATVKTDRVDAKRLALMLRADMLAESYVPSDEIRELRDLVRTRKALVEERTAEKNRVQAVLARTDNTYESELFGPNGREFLSELSLSKVNRKIVEAHLSVIDEYDAQIEIFDKEISKRVVESPAAQRLLTIPGVGETTAATVLAEVGEIERFDRDKELVSYAGLDPEVHQSGDTEIRGSISKEGSAPLRWTLVQSALVAVQYDDYLGNFYTRLKSRKNHQIAIVATARKLLVSMFHMLTRKEPYNPPEVNT

SEQ ID NO: 303069 - protein, 350 aa, unidentified
MRTKPIPETAAFGIDIGKKVFHVVALNAAGAVIQRAKFSRDTLMAFFEAAPKVLIGMEACPGSQWLARRLAAMGHDARIIPARFVKPYVKSNKTDTVDAAAIAEAVTRPTMRFVEVRTPEQVDLQALHRIRDRLVGQRTALMNQARAFCIEYGLAMRVGAGGFHADIRRHLANEENDLTLAMRVLLAELLDDLGYIEGRIKAVNGKVEAYARENDTVSRLVTIPGIGALSATALVAAAGDGRQFRKARDLAAWLGLVPAEHSTGGKQTLLGISKRGNRYVRRLIIHGARSCFLHLNRANHALGSWLSALEARTHRNKAVVALANKLTRIVWAVLTKPGSVYLQSKGAALS

SEQ ID NO: 303070 - protein, 420 aa, unidentified
MRNAGIHANSLLEVRRMYNAVGIDVSKGKSTVAVLQPGGTVIRKPFDVSHTSQNLNELADYLSSLDGTTKIVMECTGRYHEPMVKALSETGLFVSIVNPHLIKNFGNNSLRKVKSDPADARKIARYTLDNWTELRQYSGMDNTRTQLKTLNSQFSFFMKQKVATKANLIALLDNTYPGVNKLFDSPTREDGSEKWVDYAYSFWHADCVRKIGLKAFTERYKSFCKKHHYIFQQDKPEKLFNASKELVAVFPKEKTYKLLIQQSIQQLNLASEHVERLRREMNELASTLPEYSTVMGIYGVGKTYGPQLIAEIGDVSRFTHREALTAFAGVDPGVDESGQHKSKSNRASKVGSARLRKTLFQIMTTLLQNAPEADPVYRFLDKKRSQGKPYYVYMTAGANKFLRIYYGKVKECLRNLEQTE

SEQ ID NO: 303071 - protein, 334 aa, unidentified
MENIALIGIDLGKNSFHIHCQDRRGKAVYRKKFTRPKLIEFLATCPATTIAMEACGGSHFMARKLEEVGHSPKLISPQFVRPFVKSNKNDFVDAEAICEAASRPSMRFVQPRTESQQAMRALHRVRESLVQDKVKTTNQMHAFLLEFGISVPRGAAVISRLSTILEDNSLPLYLSQLLLKLQQHYHYLVEQIKDLESQLKRKLDEDEVGQRLLSIPCVGTLTASTISTEIGDGKQYASSRDFAAATGLVPRQYSTGGRTTLLGISKRGNKKIRTLLVQCARVFIQKLEHQSGKLADWVRDLLCRKSNFVVTCALANKLARIAWALTARQQTYVA

SEQ ID NO: 303072 - protein, 398 aa, unidentified
MTESSDYESVQVFIGVDVGKDTHHAVAINRSGRRLFDKALPNDENKLRSLISDLKQHGQILLVVDQPATIGALPVAVARSEGVLVGYLPGLAMRRIADLHAGEAKTDARDAAIIAEAARTLPHALRTLKLADEQIAELSMLCGFDDDLAAQTTQASNRIRGLLTQIHPALERVLGPRLDHPAVLDLLQRYPSPEKLASLGEKKLAAQLCKLAPRLGKRLAADIAQALAEQTVVVPGTNAAAVVLPRLALQLITLRKQRDEVALEVEQRVLAHPLYPVLTRMPGVGVRTAARLLTEVACRAFASAAHLAAYAGLAPVTRRSGSSIRGEHPSRRGNKALKRALFLSAFAALRDPLSRAYYTRKMSQGKRHNQALIALARRRCDVLFAMMRDGTFYTPQAS

SEQ ID NO: 303073 - protein, 334 aa, unidentified
MWHVGIDLHREFIVMAAVRDNGEIMEPVKIACQESETILETIRSLAPFRAVVEASGTYRWLYDLLCPHGTILLAHPLRLRAMIQRRSKTDKLDSQLLANLLRINQIPLAYVPPEPYQRLRDLTRCRAKLARDRAEAKIKLRDMLARRNLVSPYKTPFGLRGLAWFRSQDFGPVGNMIRDELLARLWHYDHQIAAFDKQLEQCRPDFPQTEALADIYGIGLYSALLIVAELGEVERFRTAKQVGAYAGLTSRVHQSGGHCYQGSITRQGSPWLRWILVEAAMKTVREDAALRNFYSRIRKRSSAKIARVAAARKLAEICWKRLRRWQREHAEKAA

SEQ ID NO: 303074 - protein, 343 aa, unidentified
MHQSNKWDDVVGIDVSKDKLDCYLVGQKTNRNHELLAENSYNGFEHLGQWLAEHNVDPARAVLVSEHTGRYGEHLLRWTTREGWDHAVVKTTALDKVTPEHHRKDDRYDARLLADYGVRFSDRLRLAKAPQPAVGQLKRLQAERRKMVDRRAALKSKLTEADTHDADMSELTTMWNEQIQLLSEHIDQLVKTMNELIRQNEHLKVRHQTMRSAPGIGPVLGRFWLSEFAGQQKLDARKISSRFGFAPHGSSLGSSVKSPDRSTGYGNSEMRKLMHQAARSVANHKPHYRNYYEDKLAEGKHELVAINNIINKLIRLYCAMWNNRAEYDPGYIQKNKQMWKKSA

SEQ ID NO: 303075 - protein, 308 aa, unidentified
MPSLNHERDGYGHRRRQTCHYWRRGHHADLHVAAALDPLGGLLGVQEFPATATGYAQLLDWLGGFGPVALVGVEGTGSYGAGLARHLAVAGIRVVEVDRADRQDRHRQGKSDPLDAVSAARAAQSGRASGAPKGRDGAVEAIRALMVAKRSARAERTQAINQARALIVTGPDELRARFAGHTPAQLVEAIAALRPRPGDVPGYATRVALRELGRRAQFLDAQLDRLDDLIGPLVTARAPGLLRLHGVGSDTAALLLIAAGDHPERLRSESSWAHLCGAAPIPASSGKVSRHRLNRGGDRRPTTRCGGS

SEQ ID NO: 303076 - protein, 429 aa, unidentified
MNYNTQNAKIASITEKTLIVGIDVGSETHYARAFSWRNYEYSKKPFAFSNDEDGFASFKAWMDEIAEKHEMEKVIPGMEPTGHYWLNLGAYLQGQGMRPVHVNPHHVKKSKELDDNNPNKNDRKDPKTIAGLVNEGRFSYPYIPTGIYAEIRNLSNLRIQTQEEITRIKNRIARWFSIYFPEIKDVYRNPDAVSGLMVIKQAPLPCDIKGLGVDGVNKIWRDARLKGAGIKRAKTLVTAAEHSIGNTEAPRSARKEIRNLLNDYEIYKSRMDELMEEIEELLSEIPYIDKLMGICGIGIKTVSCFIAEVGDIERFDNPKQVQKLAGYAIVADSSGKHNGESRISHRGRKRLRYALYEAAISVIGKNKEFKEIHHYYRTREKNPLKKMQSVIAVSCKLIRIFYTILTKGIDYDGQKMLRDIVRPGMQSAA

SEQ ID NO: 303077 - protein, 334 aa, unidentified
MQNVTLIGIDLGKHSFHVHCQDEKGNALLRKKFSRTQLINFLASCKAATVVMESCGGAHFMARRIADLGHEAKLISPQFVRPFVKSNKNDFVDAEAICEAASRPSMRFVTPRTEDQQAMSALHRVRDSLIRQRVKTTNQMHAFLLEFGVSLPRGIAVIRRLAAVLEENDFPPYLTRVLSRLHSHYVYLSGEIDEIDKELKTHLADDETAQRLLSIPGVGPVTASLLATRLGDGKNYVSSRDFAASTGLVPRQYSTGGKTTLMGISKRGDKNLRRLLVQCARVFMQRLEHNPGRLAEWVKKQLASHHSNVVACALANKLARIAWAVTAHQAAFSK

SEQ ID NO: 303078 - protein, 339 aa, unidentified
MSEFSTVGVDLAKNVIQIHGVDADGDVVVRRQLRRSQFLAFFEGRPGCLIGIEACSGAHHWGRQLQEMGHDVRLMPPSYVKPYVKRNKTDAADAEAICEAVTRPSMRFVPVKSEADSAALVLHRARDFLVGQVTQAGNAIRAHMAEFGIVTAKGSKRVASLAEELDIVPEAARLPLRALFDQLAETQARIDRLTAEIEEVHLQNDVSRRLASIPGVGVLTATAIAATTPDVSNFSSARDYAAWLGLTPKQHSTGGKPRSGGISKMGNRYIRRLLYLGAMAQIMVRRRSRHAGTDWLSRKLATKETRVVAIALANRMARTIYALLRDGTSYRLRVGAMPG

SEQ ID NO: 303079 - protein, 414 aa, unidentified
MDVLHERCVGVDISKKDAKVCVRTPSAKRRGSFTNQTTTWGSTTNAVLALRDHLLAAEVTLVVIEATSDYWKPFYYLLAEDLNVILVNARQVKNLPGRKTDVSDAAWLAQLGAHGLVRASFVPEQPVRELRDLTRTRTQMTRERGQIAQRLEKLLEDTGIKLAAVAADIMGVSGRAMLEALINGERDPQVLAELAKRRLRNKIPELTEALTGRFREHHAFLARLYLDQYDQLSGMIGQLDGRIEAAMAPFRPVLNLLDTIPGINQAVAEVIVAETGGDMSRFASAKHLASWAGVCPGHHESAGRSKNTRVRPGNPYLKGALGLAAFGAVRTKETYLQARYKRLTARRGPLRALVAVEHSIITAIWHMLTDGRPYHELGGAYFAQRDPERATRRAITQLNQLGYTVTLNPRETAA

SEQ ID NO: 303080 - protein, 333 aa, unidentified
MNKQVSVGVDVSQETLDVAVITEREEQRTGRFPNTSAGHRQLIKWLTKGGRCARVVLESTGVYSLDLALALHATRRIEVMVVNPRAARKFAEACLQRSSTDSTMAVALREYAVRMRFIPWMPPSAAVREVRAIARRIAALTVEKTRELNRQHAAGASAATPAVVCNDVAVNVRHLERRIAELERHAVVRINADVELQRVYRHLLSVCGIAETTAIQLLGELLVLPSDMSARQWVAHSGLDVRHVDSGTSVHKLPRISKQGNAHLRRVLYMPALVATQHEPHVRAFYEQLLAAGKKPLQALVAVMRKLLHAIWGMLKTDTDFDGSKFRKIPEAA

SEQ ID NO: 303081 - protein, 359 aa, unidentified
MNTTTVGVDLTKLAFSVCVVDEPGRVLHRHDFRRDGFAKWLGQLPAGTVVAMEACSGAHHWARRCLAYRLQPRIIAAQFVKPFRKSSRNKNDHNDAEAIATAARQGNMRFVPIKDVDQQVRLSWHRVREGYKVESLAIGNRIRGLLAEFGVIVAQSDVALRRLLADLEAQSGLPVEFKELLRDLADHWSQLRTHLEACDARIEAHAREDERCVRLRVIIGIGAITADAAVATVGNAREFKQGRQMSAWLGLVPTQHSSGGHARLGEISCRGDAYLRTLLIQGARSSLQRAKAVAIEKATPEQVWIRSLDGRMPFGKVIVAIANKHARQIGAMLAHDVDYDAHARLNHPMHRQIQAAQAA

SEQ ID NO: 303082 - protein, 406 aa, unidentified
MIQDSPDGGKRFWCGIDWGGRSHHLCVLDDDGQQLLSRKIAHTVDGLMALVEVIASLAGSVLIAIERAEGLLVEHLQQQCEAEIYCVSPKISARARERYRMAAAKSDEFDAYVLADTLRHQHAQWRPLATPSPVLAELTAISRDRQRILDMQVDTENRLRSILEAYHPAPLHLFSSLDRDITLAFIQTYPTPAQAGRITATRMGGFTGRHGYSGRQKPEALIERMQPHLLSASEGTVAGKALAAKAFTEQLALLNTHLRGHDKRLRELLDAHPDTHIFTSFPGIGPVTAAVLISEMGEERTRFPSPSSLLADTGLAPVTKASGRTRQVRFRYAANRRMRHAIDWWMFVATREDPWSAEIYQQARAAGHAHHRALRGLGARWVRILWRCWQDHTAYDPAVHHRPTAA

SEQ ID NO: 303083 - protein, 335 aa, unidentified
MLYVGLDVHWKTASIHILDENGKKVKAMTIRGGWDKMLAELKTLPQPWSVCYEASCGYGVLYDQLSHWASKVVVAHPGQTRLIFRTKRKNDRIDAQKLAKLLFLDEVPVVHVPSAQMRAWRELIEFRSRLVNRRVAVKNALRALLRSYGVTMPRSLWSVKGRAWLESVTLPNRSAQIRQELLLDDLRIADSKIARVTAELDAIADGSAAVTVLQTISGIGPRTAEAVAAYIDRPERFTKNHAIGAYFGLVPCQDASAGKNRLGHITREGPATVRKLVVEATWRVIALNPSVKAFFERIHHGKKDRRKIALVATAHWLLRCMLAMLKTGECWREAA

SEQ ID NO: 303084 - protein, 393 aa, unidentified
MTTIVGVDIGKDFHQATILNPAGETVGGTIKFDNTALGFTKFLSHLQRFISDKEDSLVSLEATGHYWLPLYLFLLDKGYQVQVFNPYQSDALRKVFLGRAKTDKLDAELVARLARVGTQKATPLPGEELLSLRNLSRFRSELVFQSSDTKRRLVFLLDLIFPEFEKLFSDAFGKTALAILQNHPTPEEILELDEEKLINLLKTSSKGRLGEKTAQLLKAKAALSVGISFGQKSLVFELKLLLEQLKFLKEQLKDLEKEITQILSKTDQRLTTIPGIGPMIASAILGEIGDIKRFPNVPSLVAYAGLDPTTFESGSSILKERKLSKKGSKYLRTALWQGAVYSLIHNPNLRAFYDKKLSEGKPKQVALGAVANKLTRIIYGILRSGTDYQPDFS

SEQ ID NO: 303085 - protein, 332 aa, unidentified
MSAVVCGLDVHKETTYATVLDPSGQVLVQRKMMNEDIPAFLEMTHPDKLAMEASTYIIPLYRKLTEQGYDVTVSHPRKTRLIAEARIKSDRVDSRALAELLRLDSLPTSYIPPRDIAAIREKVRRRAFLVRQVTKLKVKIRDVLAAEGVKPPTGHGLFTAKGVEWLQSLKLEPVDCYLRLIEPLKEEVKLVSGDLKRSAGKDDEVQLLMTIPGVGYYVALLVKSEIGDISRFSSGDHLASYAGLVPSTRSSGGVERHGGITREGSRWLRWAMVEAAMVHIRYDTPVTRFYHGVAERRGKRAALVAAARKLTEVCYSVLVHGRPYFNPLDAQA

SEQ ID NO: 303086 - protein, 372 aa, unidentified
MREYNELFIGLDTSKAKISVAVAEKERNGEVRFFGDISAEPTSVASMVAKLAKRGATLHFCYEAGPTGYDLYRQIMGLGHQCQVVAPSLIPKRPGDRVKTNRRDAVSLARLHRAGELTAVWVPDEAHEAVRDLVRARECAHDALKKARQQLQSFLLRHGRIYPGRSPWTRAHFRWLAAQSFTHPAHHIVLAEYIQAIEDAAIREDRLTKQVAEVVASWSMAPVVEAYQAMRGIAFIAAVTFVVEIGDVRRFETAPQLMAYLGLVPSESSTGERVKRGGITKAGNRRARRVLIEGAWTYRYPARVSQTIQARLDGLPRSVREIAWKAQIRLCARYRRLITTGKLKTVAVAAIAREMAAFLWAIGQEVSPTVRA

SEQ ID NO: 303087 - protein, 454 aa, unidentified
MSQRRQRSKTFKVGALPRELAQVNLNAAGIDVGAERHFVAVPEGRDEVSVREFGSFTADLEELADWLRKCGVTTVAMESTGVYWIALFELLERRGFEVKLVDARRVKNVPGRKSDVLDCQWLQQLHTYGLLAGAFRPSDEICVLRGYMRQREMLVQVAAMHIQHMQKALQQMNLLLHNVVTDITGVTGMKILKAIIAGERNAKVLASHRDRRCRNSATTIAKSLVGNYREEHLFALKQAVELYETYQGKIADCEAAIVGHLANQPTRTDDEPPPTIKTHKTRDCIRGAADVRSQLFKLTGVDLFAVSGFGADTLLTLASEVGFDMTAWKTEKHFSSWLSLSPGTCKSGGKVLQSKTKRSANRAAAAFRIAAATLARSKTALGAFYRRIRSRAGAPKAITATAHKLAVIYYSMLKHGTNYIEVGQAAYEHKYQQRRLKGMQKQALAMGYHLVPIV

SEQ ID NO: 303088 - protein, 447 aa, unidentified
MGRRRKPKTQAEMPVMRSDAAGIDVGATELYVAVPADRDAEPVRCFPTFTQDLYALADWLEQCQIKTVAMESTSVYWIPVFQILEARGIEVCLVNARHVKNVPGRKTDVSDCQWLQFLHSVGLLRASFRPEQAVCSVRSLLRHRESLVQMAGTHVHHMQKALDQMNLQLHHVISDITGVTGLAIVDAVLAGERDPEVLAKLRNHRIKASEETIAKSLVGDYRAEHLFTLRQSLAAYRSYQKLIADCDAEIQRSLVEIDSKKEVPPEGGGNALSEKARFLLSEELERILGVDLTKVPSLGPLNIQILLGEIGPDLTKFRNASAFASWLGLCPANDVSGGAILRTGTRKVNSRAAKTLRLAAQTLFRSKTPLGDFYRRMRAKLGGPKAVTATAHKLARIIYHLITTGQAYDETTFAQQQARYRKYQEAKLQGKARELGFQLVPLAVVAE

SEQ ID NO: 303089 - protein, 422 aa, unidentified
MDKNDDTRLKEFRQLKNEIRGSTQHLVVGIDIAKERHHAFFGTPSGKTLLRRLVFDNTKEGFEHLVFHADTLSTRHDLTKAVFGMEPTSDYHKPLGEYLITQGRMVVLVGGPAVKKNRELLDGRWDKNDTKDAANVADLITQGKCLFYDFPSLDLRELRSLLSLKRRLKKLEQGYKVRIRNHLIAQYFPEMDAYFDYSEGRAIVKCLDPVKLGNLPFEAFATMASRRNGGAPQRSRLGEIHAKAAVSIGCSVHPSVPFEAATLLEGMGQIHTMMHETDKRFTEVCKRFTEYSFLLSIPGFGPGVSAQVLGALGDPYRFENHRQVLKMAGLDLSANQSGKRTATTPVISKKGKADLRYGLYHAAVVASSRNPHFMRYFTDKLKGREKEKRITTKMRTKLAAKLLVIAWTLMKKKEVFDPDCIK

SEQ ID NO: 303090 - protein, 429 aa, unidentified
MNCTQNKKIEQVKETTMIVGIDVGSEKHYFRAFNWRGIELTRKPVAFSNSMEGFSSFYNTIVELMQKSELEEALVGIEPTGHYWFDLGQFMGEKDIKFVMVNPHHVHKTKELDDNSPSKNDRKDPRVIAGLVKNGRYFYSYMPTGVYAKLRNASNRRFVLVEEQTRAKNRLQKWIAVYFPEYKGIYTHIDAKGGMLVLKKAPTPEEIVRLGVEGIIKIWKDAKLRGNGHKKAMLILAAAMRSIGLKAGLTEARMEIQDLIEDYELQTKRLERVNDLIKGLCQQVRYADKLLEIKGIGITTVAGFIAEVGDITRFDSTKELQKLAGLELVADSSGKHNGKTKISKRGRKRLRYLLFEAAISVVGKNEEFKEIHRYYTSREKNPLKKMQSLIVVACKLIRVFHAILTKGIRYDASKMLKDIRHPGEQLKAA

SEQ ID NO: 303091 - protein, 342 aa, unidentified
MQVTTIGLDIAKNVFQVHGIDAAEKVVVRKQLRRSQVLEFFKALPPCLVGMEACATAHYWGRELTKLGHQVRLMPAKDVKAYVKRNKNDAADAEAICEAVRRPTMRFVQVKSAEQQSQLMLHRTRDLLMRQRTQVINALRAHMAELGMTAAQGNAGLRELLAIIAGAADERLPAEAHASLIVLTAELQAMRTLIASIEKRIIAQHRSDEASKRLRSIPGIGLVGATAIVATITDPKAFRSGRDMAAWIGLVPRQDSTGGKQKLGPISKQGDRYLRRILVVGAHAVLKLARQKPEKYPWLTQLLARKPFKVVAVALANKMARIAWALLVKGGPYRARALVAAA

SEQ ID NO: 303092 - protein, 337 aa, unidentified
MSLYIGVDGSRDTLAVALFRAGQDSSPQYLGSFPNRLEKFETLFRQVQQQSRGEEVIWVIEPCGGYERPLMYWLYEHRQCILYPNPRQVRQWQQGRGYRAKTDPLDSQMLALYGAEHRQDLHPWKPWPEPAGHLLRLAERWRELEVERQREQNRLEAYLSQGISPDAPEVRDLQEHIQFLEGLIRRTKKHIGRLYRDFPDLDGLRRRLLSVPGVGEKTVHVLVALLIRWAQLGRRDAKGLVAYLGLDPRIHQSGKRPPRGRISKQGDTRWRSLLVAAARGGLKGTSSPLARFYRRLRQRGKPHMVALVAAARKIVVWAWAVYCCGEPFDLRRHIARV

SEQ ID NO: 303093 - protein, 393 aa, unidentified
MEEKRILKYAVGMDVSHGDIKCNICSIDSTQRVKVVRSRKFANGLSGFRELEAWSSKYAIGSKIETVYLMEATGVYYEGAAHFLYEKGLRVSVIVPNRAKRFAQSLGLRSKTDAIDAYGLAQMAVQMTLEPWKPFSDQHNELIKLTRYHTSLQEAKTMVSNQLHAQNHSGRPSKFVASKLEVRVALLEKDLKACKAEIKKLISKDKELERKVKMISDSIHGVGFMTVITIVCETNGFLNFSNSRQLTSFSGYDVIENQSGKRNGKTRISKAGNKYIRRALYFPALNATKIDGPLKKFYDRIFHRHFIFKKANVAVQRKLLCLIYTLWTNDQPYDMEYHETQMPISQESSFQANEKLKVKKAAKSVKKSSPQGATLDESQLAEAPGILFSVPET

SEQ ID NO: 303094 - protein, 470 aa, unidentified
MKKHQERKTKSKGTKPIHDSQPDAAGIDIGANEIWVAVAADRTQEPVKRFGAFTQELKAIVQWLLDCRVRSVAMESTGVYWIPLYQLLEDAGLKVCLVNARHVKNVPGRKSDVRDCQWLQYLHSVGLLMGSFRPPQAICAARSIYRYRQNLLSMAAQHTQHMQAALDQMNIKLHHVIDDLSGVTGQAIIEAILAGQRDAHQLAKLRDKRIQASEATIVKALEGDWRSEHLFVLAAALENWKQVQQQIQKCDQQLLVYSRQFEACTTVAQPIKVMHLKPELEGTKWGESRAQKPRKKTSKNQPEGSWREELERFFGVDLTAIPGISVLSGLTLMTELGNDLSAFKTAHHFASWLCLCPDNETSASKVLRRRTRRSQNRVRQALRMAASTLHHNKSYLGDKYRRLRAKLGAPKAITAMAHQLARIIWTLITRRLPFDLSIFALEQRANEQRRLKSLSKTARQMGFQLIPIPA

SEQ ID NO: 303095 - protein, 412 aa, unidentified
MKVVHRICCGIDVHAKMLVACLILTNGQKEIRTFSTMTDDLLRLRDWLQAANCTHVAIESTGVYWKPVFNILEDALTVILINPEHARALRGRKTDVKDAEWLADLLRHGLLKPSFIPPPEIRELRELTRYRESLVRQQSAVANRIQKVIESGNIKLGQVASDALGVSGRAILWALAKGETDPVKLAALARGQLKEKELLLRRALHGRLTPNQRFVLREALQLWEQLEAADRRVTEEIDRYLQDRPKLARARDNLDSIPGLGPRAAEIIVAEIGVEMKANFESDAHLASWAGICPGNKRSGGKRLSGRTRKGNTYLRAALVQAAWGASMKKNCYLRSQFYRLVKRLGRKKALVAVGHSLLVIIYHVLERDQTYTELGGDYFDRQHVELQREYFIRRLQMLGLKVNVEELPKAA

SEQ ID NO: 303096 - protein, 451 aa, unidentified
MAKRKVEMDIINLHCAGIDVGSKSHFVAVGQSLEDVKEFGVYAEDLTSICLHLQEYGITSVAMESTGNYWQNLYVELVKYGFEVTLANGKFTKNIKGKKTDVKDARWIQKLHTIGLLTSSFLPDTTTETLRTFCRQRQNMIELSSEATHKMSKYLKLLNFRLDVVVKDICGLTGLSIISDICQGNLNPTTLAKHRHYNCKKSEAEICKALQGNNRADYLFGLKQELESYHFYQTKISECDHHIKTFLEDQINTDVGKSQLKTDVKKHKRINKNAIQGIDLNQAAYQYFGGVDLMKIEGLSHATIMSIMSEVGPDGFSKFETAKHFTSWLRLAPNNKISGGKILSSKTPKGSNRLKIALRNAANVIGNLKDTHLSDFFRRVAYRKGRTAAVSATARKLAVIIWNMVVKHVPYKPPTEYLFLDEKRKLGIVKRIKKQIAKFELTNTELGFTTT

SEQ ID NO: 303097 - protein, 317 aa, unidentified
MNSEKNQNEINIGVDTGKTQLDIYIRPLDIFFTVSNDESGIKKAVTEIKKYRPTRIVIEATGRLEHEFIMACSKSKLPFVIANPSHIKKFAGAIGRLAKTDKLDSQLIAHFGEAIKPALSRLKPENMQLMSDLLSRRRQLMTMQTMEKNRLQIMPKEITNSIKPMLTALKNQLEKIDNKLSKLIKECEDYKAKNDIIQSMPGVGNIVAFNLLSDMPELGYLTNKQASALIGVAPINRESGIYEGKRMIRGGRHKIRTVMYMAMMSAMQCNPVFKTTYQRLVAAGKPKKIAIIACVRKMIVILNSMVRDGVMWDPKMS

SEQ ID NO: 303098 - protein, 348 aa, unidentified
MQIATIGLDIAKNVFQVHGVDASERVVVRKQLRRGQVLGFFKALPPCLVGMEACATAHYWARELTELGHQVRLMPAKDVKAYVKRNKNDAADAEAICEAVRRPTMRFVSVKTAEQQSRLMLHRARDLLMRQRTQLINALRAHLAELGIVAAQGREGVRELLRIIASERDARLPIDAHASLVVLAAGVQAVQTMIGSIEKRIVAQHRSDEASKRLRSVPGIGIVGATAIAATIPDPKIFRSGRDFAAWIGLVPRQDSTGGKQKLGPISKQGDQYLRRILVVGAHAMLKRARHQPEKYPWITRLLGRKPFGVVAVALANKMARVAWALLARGGTYRAPALAVAAQGSSQN

SEQ ID NO: 303099 - protein, 478 aa, unidentified
MVTSRPSHLNRKQRRELARRLRVEDPGLTVMHPHAAGIDVGNSAHYVAVRPDRDPDSVRRFECFTADLHRLADWLVHCGVTTVAMQSTGVYWIPVYEILEARGLEVYLVNARHTKNLPGRKSDVQESQWLLKLHTYGLLRNSFHPTAEIRVVRTYWRQRGDHVRAVSTCIQRMQKVLTQMNIQLANVISDLSGWTGQRIVRAMLAGERDPEQLAALSHPGIHATRQTIARSLEGTWQPDLLFVLQQEVAMYDAYLQRIAECDQALEQHLKGVADKVADTLSDAEPQPPSRETRRAGPKRRRKAGSHAPQFDLGRELHRISGVDLTRIDGIDVGVAQTMISEVGLDMSRWEDEDHFASWLGLCPDNRITGGKVLRRGTRHVINRAATALRLAATTLLRSQSYLGAQYRRFRGKLGAPKAITAMAHKLAVLVYRMLRWGHAYVDKGLQYYEERHRQQQIHLLKKRAAKLGLQIVEPQLAH

SEQ ID NO: 303100 - protein, 363 aa, unidentified
MLFVGIDQHKRHLTVCIRDEQGNVSLRRQVSTKWENVDAFLASLRERATAHGGYVAVVEVCGFNGWLVKRLEACGCKRVYVISAPDRVRQKTDRRDAAKLSELLWINRDRIAAGQKLVHVSVVYQPTEEEQYDRQLTHLRLRLGQALTRVKNSIKGILRRHNLEQECPTKGGFTQAALRWLRIVQLPTMDRLELDMRLAQYRVYAMQLADVALMIEKRAEQNAEVPRVRTMPRVGAYTALALVAHIGSIERFSHARSLSNYFGIAPGCRNSGDTDRPGAITKAGHPFIRFLLAQTVLHALRGDPGLRRWYQRVKRRRGSKVARVAVMRRLCESLWHMLSKKENYRFVDGTHADDGKKTCRPAA

SEQ ID NO: 303101 - protein, 334 aa, unidentified
MEKVTTVGIDLAKNVFSLHGVDGAGRVVLKRTVRRDQLLEVVAGLSPCLIGMEACSGAHEWGRRFQEHGHTVRLMAPKFVTPYRKSGKNDGNDAEAICEAVTRPSMRFVPVKSAEQQALLALHRVRQGFVVERTATINRLRGLLSEFGVVLAQRSVTVRRQAAAAAEDLPELARRAIGDLLDELRVLDERISSYDREIEAQAKLCEPAQRLMKIRGIGATTALAIVATVGNAREFKNGRQFAAWIGLVPAQYSTGGKTRLGHISKRGDAYLRNLLVQGARSVLHTAAAHGDRLSRWALELQPRRGYYRTLVAIANKNARIAWALLAKNETLRPA

SEQ ID NO: 303102 - protein, 317 aa, unidentified
MQELQVFVGVDVAKAELVVARHGQTGSRTLPNQAQAISAWLRELPDGACLAMESTGRHHQMLASLAQAAGLQVFVLNARDVHFYAKALGARAKTDRLDAHVIARYAAEQHTRLHRWIAPCPALQQVRSLLGQRWAVVSKRTALRQSLQGCDGAITLEVQALEAGFAALLKAIDARIVALLGQDGGVRQRQRLLQSIVGVGPQSSALLASVLAQVQFASADALVAYSGLDPRACDSGSSRGRRRLSKRGQPALRHQMYMAAMSACHTSTFKSLYQALRARGLKTTEALVVLARKLLRIAFAVWRSGQPFDPTRFAAGA

SEQ ID NO: 303103 - protein, 373 aa, unidentified
MPINLRYVGLDVHAETIAVAVAEADGEVRSLGILPNRLEAVAKLIRKLGPREHLRVCYEAGPCGYVLYWQLTRLGVPCDVVAPPLVPMKPGDRVKTDRRDAEKLARCYRAGDLTAVWVPDAAHEALRDLVRAREAAKQDQLRARHRLGKFLLRQGRRPPEGVKPWTQRHRRWLDALHFELPAQQATLADYLYEVDHAAARVARLESALDEAVAAAPAPMRAVIAALQTLRGIRQVIAATIVSEVGSLARFTHPRELMGYSGTVPSEHSSGDRVHRGAITKTGNAHLQRVLVEAAWAYRFPPKCAKGLRQRQRGQPAAIIDIAWKAQQRLCHRYHRLLARGKPTPHVITAIARELVGFIWAIGIAVERGQAMAA

SEQ ID NO: 303104 - protein, 374 aa, unidentified
MNFIGIDLHTNRFTCCYRDEMSSVEDPSKGRIIKTFELKAQGIAAFFQTLTKDTYVLLEATTTTFCFVRLFKDMVKEVTIASTYELKQISLARCNTDKIDADKLCRILKAQVLSGELLVTPVTLPSVEIQDIRALFTTYRLLLKQNVQLKNRIHSVLKEQLYGFTQEEIFGKKDRQQIRKISPGTTLHFQVNLLLDMLEHGEAELEVLKDRILLQAAPFMKQIEILTSMKGASVFIAIAIIADIIDVSRFKNSKAFASYLRSAPRVANSNTSVSIRGTNKMGRKLSATLLTQSLNHVLDSSKKLSRWYDRLCEYKKPGLVRTGLRRRVLAEIFQMLKKGEYHYGRDVKNHESKMVQYRKFLEKQKNDAVLKKTA

SEQ ID NO: 303105 - protein, 357 aa, unidentified
MLAMGDSALRKGADAMTFVGCDLHTRMQQVAVLDTRTGEVSERQLGHDGSAIEEFYAALPQPVTIGIESTGYAVWFHTLMQRLGHTVLVGDAAKIRAMVVRKTKTDRRDALHILDLLHHDRFPTIWVPDPITRDLRALLTHRMRLVRIRTMVKNGLHAIALNYRLTRGAKLLRQAGLAQLHALALPPHTAQRRDQSLELLAGLTTQIRELDDAITTAALAHPDGPRLITHPGVGALTALATIVVLGPVARFHDSKHVVSYVGLAPALNASADKYHLGHITKQGSTLLRFALGQAASHAARMDADLKRTYGALVHRRGRPKAKVAVARKLLVRLFIMLRDQIDYDEFRRRGRTAPASA

SEQ ID NO: 303106 - protein, 339 aa, unidentified
MGIVGGLDLHRRQITFDWIDTTNGETKRGVIRPATRPSLREWLAGLAGTETAFALEATTGWRFVVEELRRAGIEAHVAEPADTRALRGKKRRAKTDRADARHLRDLLLAGSLPESWIPTEFIADLRTQVRLRKSLIDQRSGWIRRIRAQCFHHGLPDPPNVQTAAGLAWLARAELPATARHVVAVALTMIEGIDVHIDALDNELCAIARHQQGCLALQSQWGVGPLTAVALVAELGDVTRMSSSRKVVRYAGLDITVSESDIKRSRGYLSRQGPPVLRRALYEAATSAWRNASPDHEYYLAAKARLGTKRARLSVARRMLRRSYHLLANLGEAAIEPAR

SEQ ID NO: 303107 - protein, 441 aa, unidentified
MSTFPILSRKGGVHLKKADLLSTLFVGIDIGSRNHVVALMDFESQEPLHTFMATNNQPGAVELAQKLADYLLARKDLTRLLVALESTSFYGIHIANYLSSCEILAPFHTLVYCLNPKVIRNYKKSFVDLGKNDFIDAFVIADFARANRIKTSPWRGSQFLALQRLTRHRQHLAKSLTREKAYMLSNIFLKFSEFSLLDEDEQPFSNGFGATASSVLTDFLSTEEIIDMPMEDLISYICEKGRNRFPNPECTASLLKQAARNSYRLDKCLYEPLTVSIASSFTLISTYQQEIKSVNKAIEKTLKGLNPNAYQSLLSIPGIGPIMAGGIISEIGDIHAFKSQDSLAKYAGLVWRENQSSKFTGEDTPMSKAGNAYLRYYLIEAASHVRNHCREFSDYYQKKYAEVKTHQHKRALALTARKLVRLIFGLLANNQLYSSERVDQA

SEQ ID NO: 303108 - protein, 326 aa, unidentified
MQGKESSEQKTKVKSSAGVDVCKSWLDAHVLPEGCSLRVANDARGHRQLKKWLTEHDVSLVAIEATGKWHRQVHRMLHENGFRVAVVNPLRARLFAEAIGLLAKTDRLDARMLALLAVSLSPPARPPMAEAVEALQELIAGRAGAVAEQTALENQLAAANTAFLRRQLKGRIDRIAKDIASLQTEVERRIGCDEALARRYAILLSIPGVGPVTAATLIAGMTELGTCSAKQIAMLSGLAPVADQSGARDGQRAIRGGRAAVRRVLYLCALSAKRCNPAMSALYDRLITAGRPHKVALITVARKLIVLANTLIAQNRSWQSQPPIHA

SEQ ID NO: 303109 - protein, 468 aa, unidentified
MENKHPRRRGRRHQPRPVLERINPHAAGIDCGSAEHYVAVPADRDAQPVQRFKTFTADLHRLADWLTRCGITSVAMEATGVYWIPVFEILEARGFDVRLVNAHHVKNVPGRKSDVSDCEWLRDLLIVGLLRGSFRPSDAIVALRGYLRHRHTLVEQAGIHIQRMQKALVEMNVQLPLVVSDITGVTGLRILRDLVAGHRDPVRLAAHRDPRCRASEAEIIAALTGNYRPEHLFVLQQNLELFDMCQTQLTACDHAIQRHLQTLTATCAEPSAPLPAPRVVRTRHSRDNAPRVDLRADLYRLTGGIDLTQIDGITPYTALGLVAEIGADMSRWPTEKHFTSWLTLAPKNRISGGRLLSSRTAPSANRAAGILRLIVMSLSRTQTALGANYRRLAARLGKPQAITATARKLAILVYRTLKGELVYRDIGADGYNAQHRARLLTSLRRRAATFGFDLLNRQTGEVFPAAPA

SEQ ID NO: 303110 - protein, 365 aa, unidentified
MQEKAGIVGIDASKKHMEVVRLFKDEKSIERGNFSTDAAGKDRLKKWLKSKDTVMIEASSGIFLLVKEIIRDVGCEVLVLNPGDLAVIYKSLKKTDREDALKLARLGLWIPRDKLPVVPVPTDEEEDCRRLVSEHTFYTEERTRLINRLHSVYYQAGYTGLTKKDLKTKENREKPLLLLSERYSDEAKRLMKRIDDIENDLEALQKKTSEFLKSHLELVMIYMSMVGIGPVNSLALLGHLGYFDRFSKAKQVSNYVGLTPKIDQSGESSKKGRTTNRGCRQIRRVIVQGAWSLVKSEKGGLLKEKFERICARSGKHRAIVAVAREMLEILFYMVKRGEYYRGITQTDVDKKLYYYGLLNKSGQGA

SEQ ID NO: 303111 - protein, 399 aa, unidentified
MKQFNQKVIEIETVTALNTIQRALFEHPAYIGLDTHSKTIAVSVAKAGRDDPESRGEIANQPKAVAKLVERLSQEFGGEVLLFCYEAGPCGYSIYRQIIALGHDCQVIAPSLVPNRPGDRVKTDRRDAGKLARALRSGDLTAVWVPDEEQEAMRDLTRTRNDFKALERKTRQQLNAYVLRHGHAWPSNRTRWTQTHYHWLESLKFPHDWQQVVLQEYIDAVRETSQRVTDISAQMDRVLPQWSLAPVVDALIALRGIDKLAAMVLLAELGDISRFESPRQLMGFLGLVPSEHTSGSRRRQGAITKTGNSHARRMLVECAWSYRFPARQTMHLKRKAKNAPDEARAIAWKAQKRLCGRYQSLLLAGKNTKQTTVAIARELVGFIWDIACHEMPKLSAAAR

SEQ ID NO: 303112 - protein, 354 aa, unidentified
MIIVGCDYHPSFQQIAFVDTETGELKERGLTHREGAEEFYRALAATGQQVRVGMEASGHARWFERLLAELQFELWMGDASEIRRKRGRKQKTDRQDAQHILSLLLKDDFPPIWVPNWENRDLRQLLWHRHRMVQARTRIMNQLQAVALNEGLLCRKKLWRERGRRQLEAFPLAPWASRRRHDLLELLDRLNPTITELSQAIEREVEKCPAAQQLMTHPGVGPLTALAFVLIIGDATRFQCGKQVASYLGLVPLEDSSGNRRRLGHITKQGSSILRFLLVESAQVTVRSLPEWRRKYAHLMMRRGRKTAKVAMARRPAVRLYWMMRQGWNYQQWSKLGSHAGQPGNRDGVPSNIE

SEQ ID NO: 303113 - protein, 324 aa, unidentified
MIDGVLGIDVSKNTLDASMSSCNKVRARSFANSPDGWRHLLDWLITQRVRRVHACLESTGRYSLGIAGALNEAGHVVSIVNPAQIRDFARTKLGRNKTDGVDASHIREYCELFKPQPWAPPSEAHRRLGELQTIRAGIIAGLTEWKNRKNSCMIDAVAQSLADVTISHFTSQLSAVDEAITQTIDHDSVLRRKRDLLLSISGVGETLAGVVLAELPGPDVLHSSAEVVAYVGLNPRQHQSGTSIDRVTRISKIGNAVLRAALYMPAMSAMRYNPAIVALVARLKSRGRLKPKQIVVAAMRKLLVLCFGVLKTGKPFDPAIAMGR

SEQ ID NO: 303114 - protein, 330 aa, unidentified
MKNYKEAVGIDVSKKTLDAYCYQGEVHKAFVNDISGYKSLLKWVLKVTKASEVFYCFENTGYYSLKLALYLHSQGIIYVEESPLKIKRSSGIVKEKTDRLDACLIARYAWFYREELQPSTVKSTSHLELGRLLALRDQLVRNNAGLKGTLKEMQVLLSSPTTDAECIGLTRSIAYLQKQIKGIEVRIIDIIAADVSMSKNYQLLSSLKGVGLVVACQLIYHTGNFTRFNSWRAFSSYCGTAPFEHRSGTSIHRRKQCHYLGDRKMKSLLSMASVSAIQHDSELRLYYKRKLAEGKDKMIAINNVRNKLIARAFAVIKRGTPYVVLQQHAA

SEQ ID NO: 303115 - protein, 339 aa, unidentified
MSSIKILGIDLGKSCFHLIGRDSHDQIIFHKKLSRPKLLEHLAQLEPCIVAFEACGGAHWLGRICQSHGHDVRLIPPQYVKPFVKGNKNDFIDAQAIIEAALRPDMRTVPVKPVESQSQAVIHRLREGFVAERTACMSRIGAILLEFGLSLPKGHCTMKRLYSWLANQKVKLCPAIIEELQVIHDHYLYLNERVAKQDVKVTRHVNLDSRCQLLKTVPGIGVITASQTVIEMGNASQFKNGREASAWLGLVPRQFSTGGKSKLLGISKRGNKRLRCLFVHCARSVLSRLDKYQGKLYDWLRKLRLTKSFNTVCIALANKLVRIAYAVLSKHEPYLAQEV

SEQ ID NO: 303116 - protein, 350 aa, unidentified
MENIALIGIDLGKNSFHIHCQDHRGKAVYRKKFTRPKLIEFLATCPATTIAMEACGGSHFMARKLAELGHFPKLISPQFVRPFVKSNKNDFVDAEAICEAASRPSMRFVQPRTESQQAMRALHRVRESLVQDKVKTTNQMHAFLLEFGISVPRGAAVISRLSTLLEDSSLPLYLSQLLLKLQQHYHYLVEQIKDLESQLKRKLDEDEVGQRLLSIPCVGTLTASTISTEIGDGKQYASSRDFAAATGLVPRQYSTGGRTTLLGISKRGNKKIRTLLVQCAVFIQNWNTSLASWPTGSGVVVSEKQLCRHLCSGKQAGQNSLGTDGATANLRSIKAEIHQFKQSFIWFCEY

SEQ ID NO: 303117 - protein, 348 aa, unidentified
MRFYTQQHRYTCGIDLHARSLYVCILDNTGQVLVHKNIKASPEALLKLIADYRDDLIIGVECMFSWYWIADFCEDHGIEFVLGHALYMKAIHGGKAKNDRIDSEKIARLLKGGMFPYAYVYPRGLRSTRDLMRRRIKLARERGDLMAHIKNTLSQYNLPAHPENLRYEKQREPMRHAFPDPSVQRSIDLDLARIDFYDGQLAKLEWYLKRTAKSVDPKTVIRLQSVHGIGDILSLVILYEIHDIERFPRVQDFVSYCRLVKCQRESAGKKYGTGGARIGNPYLRWAFGEAAALFLRGNPKAQRWLEKKTRKHNKAKAMTILAHKLGRAVYYMLKRGTLFDQDRFLAQS

SEQ ID NO: 303118 - protein, 343 aa, unidentified
MDHFAGLDVSVKDTSVCIVDETGKILREVKVASEPAALLAVLQDPAYRFKRIGLEAGPLSQWLYSAFAEAGLPVICVETRHMRAVLKAQINKTDRNDARGMAQMMRVGLYRPVHVKTLRSQKLRMLLTHRKLLQSKAIAIDNDLRGTLRNFGLKVGIAGKVKFEARIKELVENFPDLAVLVEPLLVVRRVLREQLGILHRRLLAIVRDDEVCRRLMSVPGVGPVVALTYRATIDVPARFRKSKSVGAVFGLTCSKYQSGEIDRSGRISRCGDEMMRVMLYEAAQSMLFHSAKWSWLKAWAMRIARHRGMKKAIVALARRLAVIMHRIWVDGTEFRWTREAVTA

SEQ ID NO: 303119 - protein, 371 aa, unidentified
MKSILSVGMDVHKNSFSLCAYDGYTGEIVSESTFASDVKLVIKFIEALKSRYENDVEIKCGYEAGCLGYSLYKSLTARGVDCVILAPTTMQVSAKNKMVKNDRMDALNIAKNLASGSYKTVYIPDEEDVEIKEYIRMIHDFKKELKRVKQEICAFVLRHGYQYDGKSKWTIRYMNWIRELEMSEIQRETLNEYIAEMENLNDKIDRFMNRIDEMYQSDRYNEKVSKLRCFKGIDTFAAMTIQVETADFERFPSAKAYASYTGLTTGEHSSGDKNNRIGITKQGNTVIRKTLVECAQSLVKGNVYAKKSQGLKSRQKGMDVNIIEYADKATERLKKKYQKLIERNVPRNKAIVAVARELACFIWGMETGNIH

SEQ ID NO: 303120 - protein, 404 aa, unidentified
MLFVGIDWAEDHHDICILDESGDVLRRRRIEDGLSGLETLQALLAEFAADPTQVIVGIETDRGLLVRGLLASDYEVYAINPKAVSRYRDRHAVSGAKSDAGDAKVLADLVRTDRHNHRPIQGDSELTDAVKVLARAHRSLIWTRQRQANQLRHLLREFYPGAIAAFGSDLTSTDALALLMAAPTPIRGRTLSQAQIGSALRRAGRQRQIEARAAQIQAALRQPQLQAPARVADAYGATVAATVPILLELNAQIAHLEQELKKAFEEHPDAEIYQSLPGLGIVLGGRVLAEFGDDRTRFQHAKARKNYAGTAPITKASGKSRIVLARVARNRHLADACYLWAFSSITRSPGARRYYTALRQRGKTHPQALRSLANRLVGIVHGCLAHRQRFNEAVAWPSAATLAA

SEQ ID NO: 303121 - protein, 423 aa, unidentified
MAYRIAGIDVHKKMLAVVVSDVEVDGEYQFERVRYSSSPEHLRFLAEWLIAQQVEEVVMESTAQYWKPVWGALERYWKPICQEREGAGPKSGTLHLAQAQSNRGRRGRKKDFPDAERLVKRLVADELVLSFVPDTEQRLWRTVTRRKYQLTRNHVRLQNQLEALLEECHIKLSSLVSDLLGASARRMLKALAEGETNPATLAAMADKNLRATQAQLCDALGACTELKPIYRRLLKMFLEELQFIDQQISKLDQELASLLSQHHDAVVHLAEIPGLGVDSAQQIIAEVGAGAATFPSAKQLSSWVGACPGDEESAEVSKSHRSPKGNRHMRRILNQAANAAAKSKGTVFEIVYRRLISRLGHNQTIGAIAHRLCRLIWIILHRGVRYEERGPSVSAKSRRHRTNRMIRELRSLGYRIEPLVATA

SEQ ID NO: 303122 - protein, 345 aa, unidentified
MEIIRVGVDLSKQVFQVHGVDRHERVVWQRTLKRKNWIHEVCTHVRPGGEIGMEACAGAHHWAREFQSRGYEVKLIAPQFVKPYVKSNKTDRNDAEAICEAMSRPHMRFVAVKNTEQQDIQAVHRVRSELVRQRTSKANQIRGLVAEYGLVAPQRMTALRRAIPDWLEDPGNGLSGAFRRLLSGLWDDLRTLGRRVAELDDEIQAIAQAHPVAQRLQQLNGVGPVIATALLAALGDGSTYRKGRDFAVSVGLTPKQHSTGGKDRMLGISKRGDAYLRQLLVHGARAAVRTAARKDDALSRWIQSLLARKHTNVVVVALANKTARLAWAMVRQGTDYDPHRAAHSV

SEQ ID NO: 303123 - protein, 366 aa, unidentified
MDKDTTYVALDDSKRKLAVAILRPGQTELEQREMAKEPHLIQRVFRRLAREGAVAACYEAGVSGYDLYRQITACGVACHVIAPALTPRRPGQRIKTDRRDAAKLVRLFRAGELTAIHVPAEAEEAVRDLTRCREDVRRDVLRWRHRLLKFLDRHGRLYVTGKNWSQRHWAWIRQQRFDLPPLQRTFEATLFALEQACAHQAELDQEIAALAEQAPYREPVGWLRCFRGIDTLSAMILRAEIVDFQRFTHPRELMAYLGLVPSEYSSGDRERRGALTKAGNTHARRVLVEAAWHYRHRPTLGRALAARAQGQSPACRAQAWRAQQRLYRRYRHLVGHGKRPPVAVAAIARELVGFIWAVMTQRAPAA

SEQ ID NO: 303124 - protein, 399 aa, unidentified
MMYQQFCGIDISKDSFDITLLNSNGEIKLQDKLLMNRDGFNTLLKYLSSYSKENLLVAMEATGIYHLPLLSFLLENSFKSVVINPILIKSFIGSTTLRKTKNDKKDATSIALFSLKSYQSLHLATTDAIENIKPLIRERETLSKEIARLKTEIKAILTQLFPELSKNTNIFTRSILNLLLKAPSRKAIRNLKKQRIQKILDDTSGNKVRISADEILSLAKNSIAISDKYLEKVLTSKIRRLIYIQDELSFLDTELQNSLEDTDINNDIEILQSIPGIGSVTSKNFMIEVSSVEKFKSVKQLCAFIGIDPSVKQSGTSINYRGKISKRGNANLRRTIWQMAIGVIRSCDKFNTYFSKKREEGKKFKQAVIAVANKLLRTIFVLLKNKTKFDENLASGVSK

SEQ ID NO: 303125 - protein, 309 aa, unidentified
MEIVVGIDVSKERLDVAILPQEEVFAVGNDHAGIDELVERLKGIGVDAIALEATGGYETLAVAGLSSAGLTVLVVNPAQVRAYAHAIGRRAKTDPIDAAVIAAFVLATKPEIRPLRDAETQALSELVARRRQIVQMTVAEENRLRMALAKQAQKSIKRLLTALRRELESLDADLDSHIRKSPVWRVREALLTSVPGVGATTARTLLAELPELGSLDRRQIASLAGLAPWTRQSGKWKGKSFIGGGRGKVRAVLFMAALVASRYNPDLKAFRDRLVAAGKPKIVATVATMRKLLTILNAIIRDGRPWQNA

SEQ ID NO: 303126 - protein, 369 aa, unidentified
MSNDTTAFVGLDVHKDSITVACVASDSDAPVIDIGTIGTQQYAIDRLCKKLSGRGPLRFVYEAGPCGFGLQRLLASRGYDCQVAAPSLIPQKPGERIKTDRRNARKLALALRAATLSYVHIPTPEQEQFRDVVRAWQQAKRDVTGARQRLKSFLLRHDIRYTGRANWSTAHRRWLSEMVLPSPAQQIVFQELVDSISERERRRDRLERQLDHLAPDWSGYPLAQALQAFRGIQKTVAYTVVAEAGDLARFAHPKHFMAWLGLVQVEHSSGKTRRLGPITRCGNRWARTLLTEAAWSYRYSPKVSRIIEARAGTIDPAIRAIAWNAQIRLHHQYVKLTAKGKHKNVAVTAVARELAGFIWAAARQLEQPA

SEQ ID NO: 303127 - protein, 319 aa, unidentified
MAQNDLVVAGIDVAKDKVDVCIRSPSMRRTFAGTAEGRRQLVSWFRRQKVGRAVMEASGGYEREWAKALRKARIEVRIVDPKRVRSFARSAGRLAKNDAIDAEMIAWFAETFDEARGQVCDAAREELVQIVNARQALLEQQTQMQNRCEHAVPVPVRKTHERLLKAIAIEVAKLEAAIAALIKASPHFAETAEIIESVPGLGKITSAGLIAAMPELGQVSNEAISALLGVAPYDDYSGKRQGERQIGGGRRKVRNLFYMACLGAATRHNPVLKAFYRRLLARGKKAKVALVACMRKLIVILNIMIARREKWDASRYAVG

SEQ ID NO: 303128 - protein, 356 aa, unidentified
MKIVGCDLHARQQTIAMVDSETGEFTEKTLGHEGNAVRAFYASLEGPVLVGIEATGAMQWFLELLEEMGIECRVGHPAKIRAQETRKQKHDRRDARLLLKLLSEGRFPEIWMPSSEQRDLRTLLRDRDQWVRMRTRLQHTLQAIALNHAMRQGRALWSARGRCAWEALALPPYTSQRRSELLGLYAQLQKRIQELDQEVEAQTRQRPQARRLLTHPGVGPVTALATEVFLGDPSRFASANQVASYIGMIPCEHTSGKRQRLGKMTKQGNSLLRYLWTEATMHAVAKDPELKRFYRRQLIQKGMGKARIAAARKLGIRLWIMLRDQIDYEEFCRRGKRQGGEAHARMPDYNSGPALQ

SEQ ID NO: 303129 - protein, 337 aa, unidentified
MALYAGIDLHSTNSVLAVVDEDGKRLHRRRYGNDIEVILRALTPIKDDLVSVVVESTFNWYWLVDGLQDAGYHVQLAHPPGIEQYSGLKHGDDNSDAEHLANLARLGLVHEGFIFPRAERALRDLLRQRLRFVQQSVALLHSIQSLWCRTSGETLSANRFRMLTPADIESAFPDPLVRIGALARINAWKALQDEVETTERCVLENQRDRPGLVLLKSAPGIGRVLGLTALLETGPITRFASVGEYASYCRMVDSVRLSNGKKKGKGNRKSGNRFLCWAYIEAAHHALCYEPVRIWYQRKLAKSNLVKARKAVAHKIARGCYHVLHERTPFDIERAFG

SEQ ID NO: 303130 - protein, 366 aa, unidentified
MKQQHQDSEVTIGLDLGERWHRFCALDGRGEVVEEGSVLNDRASLARLTARYPRALAVMEAGTHSPWVSRYLEGLGWEVIVSNPRKVRAIYQHERKSDQRDALMLARIGRMDRALLYPVRHGSEQAQQDLLRIKLRDSLVRARVALINSVRFSLKSLGYAVSNPSSERFHKVAMEGLPERVQQMVAPSVQALAELSTRIAVLEREINVVARTKYPQTLLLQQVPGVGALTALYFVLKIEDPQRFENVRDVGAYAGLCPRRDQSGGSDPQLRISKRGDPYLRRLLVSAAQYILGPFGPKSALRAYGLMLAADGSARARKRAVVAVARKLAVLLLSLWKNRSHYEAFPHWQTIEDKRSGTIAMHRVEA

SEQ ID NO: 303131 - protein, 405 aa, unidentified
MGIYVGIDWAEAHHDICVLDEMGTVLAKRRIAEGLEGVGQLHAMLADHAQEPDQVVVGIETDRGLLVGALLAAGYLVYAINPLAASRYRERHVTSGAKSDPGDAKVLADLVRTDRHNHRLVAGDSELAASLQVLARAHQNLIWSRQRLVNQLRNNLREYYPAALAAFGTELAHPVALGVLDAAPTPARGRTLSQSKLAAILRRAGRERGVEEKAAALQGQLRAPQLAAPALIGEAYGKTVASTVRILREMNAELASLETELAPSFEKHPDAEIYRSLPGLGIVLGARVLSEFGDDRTRFAHPKARKNYAGSSPITKTSGRSRVVLARMARNRRLADACHQWAFCALTPSAGARDYYHRLRQRGKTHHQALRALANRLVGILHGCLDHRQTYREDIAWPTSLTVAA

SEQ ID NO: 303132 - protein, 388 aa, unidentified
MIYVGIDIAKLNHFASAISSDGEELIKPFKFTNDNDGFQLLISKLDPLDKDSLIIGLESTAHYGDNLVRYLVAKNYKVCVLNPIKTSTMRKNNIRKTKTDKVDTYIICKTLMVQESLRFVTFYDLDLMDLKALGRFRQKTIKQRTRLKIQLTSYVDEIFPELQYFFKSGLHQKSVYALLKEAPTPEAIASMHMTHLAHLLKVNSHGRFDKEMAQQLRVLAQKSVGASDSSLSIQVTHTIQQIELLDSQLERVEAEMTEIMKFNDSVIMTIPGIGYINGGMILGEIGDIHRFSSPNKLLAYAGLDPSVYQSRNFQAKKTRMSKRGSKVLRYALVNAAHNVVKNNTTFKAYYDAKMAEGRTHYNALWHCAGKLVRIIWKMMTDNLEFNLE

SEQ ID NO: 303133 - protein, 442 aa, unidentified
MPEDSTIRFVGLDVHKRQITACFVDAAGVKQHTRTFDLTRTQLAYFAELDLRPTDHVALEATTNCWAVARVLQEHVARVVVSNPLLTKAIAQAKVKTDKVDAYVLAQLLRCDFLPEVWHPDTTSQQMRELTGRRTALVQQRTALRNRIHSVLAVRLIDTPDNLFCTKGQDWLAKLLPTLDAQGQLLIQSDLRLLQALQQELETLGQVLAQRGWQDQRVRLLMTLPGVDVAVAEAVLAALGDIARFRTPEQAAAYVGLVPSTHQSADKCYHGPITKRGNNQARWMLIQAAQHMGQNPGPLGHFFRRLKQRKNHNVAVVATARKLVTIVWHMLRKNEPYRYAIPRSTETKLAALRIRATGEVRRGGIAKGAKQVAKLPGGSRTIKALDRVYEREGLPPRQPLTAGEQRAIAAAECATFVADLAHEHVVPRRKKMQRVEEPGSAE

SEQ ID NO: 303134 - protein, 404 aa, unidentified
MKVTYQTCCGVDVHKSFLVATIVKTTGGIEPSYQKKRFSTFNNSILEFKQWLLDNDCHDVCMESTGKYWVPVFNLLEDDINVVIANPKWVKAVKGNKDDTKDSKWIGDLFRLGLVKGSYIPCKKVRILREYTRYRYKLVSCRSSEKNRYQNALTVCNVALDSVVSDIFGKSSTSIIDYLLEQSGSSINHEEIASKLLRSLKSKEDAVIESVEGYQMTDAQKYRMRLVRAHMDYITAEINDVDKMIENMISSNTDFENAVQFLCTIPGVKRDSAITIISEIGTDMSQFSSSRRLCCWAGLTPGSNESAGKKKSVRITRAGVYLKPALVQCAHAAVKSDKSPYYKKKYESLVKRRGKKRAIIAIARMILTAIYQMLSTGEQWNPSDLYKIDMPVALVEKQKAKAIK

SEQ ID NO: 303135 - protein, 344 aa, unidentified
MYHYAGIDVSLECSSVCLVDGAGKILRETKLLSEPEALIAWFRSLGLTCERIGLEAGPLSQWLYAAMRDAGLAVELLETRHVRDAFKAMPVKTDRNDARGIAQLMRLGWFRPVHCKSIAAQETRAILTARKLLQSKLRDVENSLRGVLRGFGLKVGKTNERTFAGRIRELVAGHPGLEVVAQALLEADAVLRREFNSLDKQVARLARSHPQASLLMTTPSVGPIVALTYASAIDDPKRFRSSKATGAHFGLTPKKYQSGETDYTGRISKIGDASVREALYQAAHVMLTKPVRNCAALKGWAMRIARRAGMRKAKVALARKLAVILHRMLADTTPFNPMAKAMAS

SEQ ID NO: 303136 - protein, 481 aa, unidentified
MSNEARSHSKQRSPWRRRHQRKLSPPRAASQHFAVVHEHAAGIDIGGHSHWVAVPPERGGETVREFSAFTNGLHEMVEWLKSQGIRTVAMEATGVLWIPVFEVLETAGFDVCLVNAAHVKNVSGRKSDVLDCQWIQKLHACGLLQRSFRPEDKTVVLRSYVRQRGELVRSQSASTQRMQKALIQMNLQLHLVVGDITGLTGMSILKRLLAGERDPSVLASLRDARCRRSQQEIAQALCGTWRQEHLFALRQALATWEHLARQIGEVDKQIEQALVSMNDAPHLEAETPLASPSEKSRKAQKALGFDARTLLYQKAGADLTQVLGISLLTSLTVLSEIGTDMSRWPTVGHFTSWLGLAPNTRISGGKELSSRTRKNKNRAAGALRMAVSTLYRSDSPTAAFYRRKLHKGKPVAVTATAHRLARHIYAMLKNGTQYVEHGLADDQQRQRHRQLAALTRTAARLGLVVLPKDQMPSPIGAEAQS

SEQ ID NO: 303137 - protein, 362 aa, unidentified
MVYVGLDVSSKSFVVHVIDEKKRVVKRAEIPATRAGLRALCAELGSERKLVVVEAGNQMKWIADTLQRQSGVTLHVVHPNEVKWIAESGGKKTDKVDAKKLAELARGDLLPRKVHVVEGPTRAMRELVSARTRLMQRRVSLINTLRGYLLQEGVRLSEKFFAQGDWRTQLTRRKVSATSRAIIEAFRPGIEALQDGETALVTELRKLSDDRTRLLETIPSIGVLSARTVVSALDDAARFDNRKCVAKYGALTPTIYQSGDVVQHGRINRDGRQEIRRVLLQCAHGAVRMKSPASAPLRHFYRRLENARGKKKALVALARKLLVICYGVLKSGQPYDPTKLVGRSTRSAPPRTRRRYRLRPAA

SEQ ID NO: 303138 - protein, 329 aa, unidentified
MTETQSQSEATPDATPDAIPCFVGIDVAKAWLDVGVRPSGASWRVANAEVELPTLVARLRPLAPEVVVLEATGGYERAVAAALGAAGLPVVVLNPRQVRDFAKATGRLAKTDTLDAHVLAHFAEAVHPEPRPLSDEATRQLAALLERRAQVVGMLTAEKNRHHQAVGRVRTLIEAHITWLQAALDELNQDLDQALQSSPLWREREELLRSVPGVGPILSFTLLADLPELGRLTHKQLATLVGVAPLNRDSGTARGKRLIWGGRARVRSALYMSALSAVRYNPVLRAFWTRLREQGKPPKVALVACMHKLLTILNAMVKHQTPWRMVPTV

SEQ ID NO: 303139 - protein, 318 aa, unidentified
MAQITKIVGLDIAKDKVDACIRSASAERTFANTAEGHRELLRWLSEHAVGRAVMEATGGYEQSWAELLERAGVEVVIVDPRRVRHFAKSAGQWAKNDPIDARMIAWFGETFANLTGKPRDKERQVLEHLVKARQGLIGMKDRIVKQGVHKQPTEVRKAYRAATKALATQTAKLEAAIAGGIEHNTEFAKRADIIQSVPGLADVATSGLVALMPELGHVDNQAAAALLGVAPYDDDSGDRRGHRHIKGGRHRLRRLLYMPIVGAATQHNPVLKAYYERLLARGKPEKVALVACMRKLITILNTMLKRGEKWDPAKYARA

SEQ ID NO: 303140 - protein, 301 aa, unidentified
MDAVLGIDIAKAKFQVALLLADGKIRHKTFPNAASGFAQLAAWLQRHQLGGVHACLEATGAYGDALATWLHDAGHRVSVVNPTIIHAYARTQLARSKTDRLDAELIARFTATQQPPAWTPPALEIRQLQALVRRLDALHGMRTQEMNRLAAGVAVHAVQTSIEAMLATLDAQIAQVQQLIRDHLDRHPGLRAQRDLLTTIPGIGEATAAVLIAELFDKRYTSARQAAAFAGLVPRLVQSGTLRGRSRLSKIGPGRLRKALYFPAVAALRWNPTIRAVRLRLTAAGKPPMVIIGAAVSPLLL

SEQ ID NO: 303141 - protein, 410 aa, unidentified
MYHLGIDWSDKSHSFCILDDAGAKLDAFEISHGLAGFETAHKRISKLGAAPDDVRIAIETKNSLIVDFFLELGYSLHFLNPKQTDRFRDRHRMSSSKSDSFDAYVLADAVRTDPHLFNTLSALDEHSLALRMLTRTREGIVRRKVAISNELTAALKRYFPLAVDLFSALDKPEAIGFLLQYPTYAQARTVSQSRIRSILKKQGLSDKVGANHAKAIYNKLRQPQASPAASVARAYPIAVKSLLRQMLHTRRELDAIEQDIRDNYTNHPNKELLESLPGIASTLGPVLAAELGTDITRFVDVKMLKAFAGSSPVTQRSGKYSEIKYRRACNWRVRQALHLASQSALTCCPWAQELYYRLRSQGKSYGRALRAVANQLVEILYAVLTRRTPYSEEYHLKMKALHSKATPILT

SEQ ID NO: 303142 - protein, 346 aa, unidentified
MNQFVGLDVSQNITHVCVIDGDGKKSWQGKCESTPEAIADAIRAKAPGAARIGLESGPLSTWHWHALKAMGLPVICLDARHAKATMSGQVNKTDKNDAYGLAQIVKAGWYREVSVKSLDSHTVRSMLGARAQLVGMRVEVSNQIGGVLKTFGVVLKRRTGLPFEELVIDACGRGDCLAVHTVRSLLSVYSGLKEQIRALDRELFMYAKGSEVCRRLMTIPGIGALTAIAFVTAIDDPSKFGKSSSVGAYLGLTPRRYQSGEVDRNGGISKCGDALVRAYLYEAATTLLTRVEKWSALKAWGVRLAKRNGMKKATVAVARKLAVIMHRMWMDGEAFRWSAIEPADAA

SEQ ID NO: 303143 - protein, 418 aa, unidentified
MRVDTDEPEIIERIAALDVAKAEVVCCARVPGPGRQRMQEVRTVSTMTAALLELGDWLAELGVTRVVMEATSDYWRAPFSLLEDRFETWLANAHDVKHLPGRPKTDRLDAVWLCKVAERQMLRPSFVPPPHIRALRDLTRYRVDLLAVRTAEKQRVEKLLEDALIKLSVVASDPFGASGRAIMAALIAGERDPAVLANLARGSLRSKTARLTEALTGRFTDHHAFLLTQMLQRVDAATADIATVQARIDDEVGELAPAVARLDAIPGIGPVAAQMILAEIGTDMSRFPTPAHLASWARFAPGVNESAGRPTGKAASGKGNRYLARVLGEAAVSAARTDTFLGERYRRIARRRGKKRAIVAIGRSILVIIWALLSDTDAQFIDLGPDYYATRNNPERRARHHIRELQALGYSVTLNPAA

SEQ ID NO: 303144 - protein, 428 aa, unidentified
MPLAGNVPPGASEPASELLIQYLLQHLLVQTQISHQFLHQPLIFILQLPQTPQPGHAWTGKFFLPVNGMDYLLPLRLTVRNVLSRRITMNIVYLGIDLAKNVFQLCGLNQAGKPVYSKRTGRKGLLQTVANIPACLIGVEASTGAFYWQREFERLRHKVKVISPQYVKPFVRGQKNDGNDAQAIAVALMQPTMQFVPPKILEQQDIQALHRARQRIVNHRTATVCQIRGLLLDRGITIGAAVSRVRRAVPLILEDAENGLSARMRRTIAELYDLFNDPGRRINFFDKEIDAVFRQSEACQRIAKVKGIGPKTATAVVAAIGKGTEFKNDRHFAAWLGLVPRQHSSGDRQVLMNMTKKGDRHLRTLFIHGTRAVVRVATNNNDGCLHQWVNQLKERCGFNKTAVAVANKNARIIWSMLRNEIEYQSIGS

SEQ ID NO: 303145 - protein, 343 aa, unidentified
MKLFIGLDVSLAKTAVCVINEYGKIAKEAQVPSDPQAIVDFANTLEGAVAIIGLEAGPLSQWLHRGLADAGLDVVLMETRQVKGALKAMPIKTDRRDAEGIARLLHMGWFRPVHCKSVSAQEVRALLAARKAIQQGMIALELSLRGLLRNFGLKVGAISRGQFDARIKQLVEGNSMLQAASGPMLRARTSLRHELAGLERQVRLLAKDDAVCRLLMTMPGIGAVVALTFRSAVDDPARFSSSKKVGPWVGLTPSRNQSGERDVIGGITRAGDANLRRALCQAATVMIHRGRSTWLRSWAAQVAKRRGAKRAMVALARRIGTILHRMWTDGTEFSSDQLLAKSA

SEQ ID NO: 303146 - protein, 421 aa, unidentified
MVQQKISRKLAQVKKGTLHAGVDLGSENNVAVVINEYAERLDRFSFPNDRDGYEYFQRRIEKQKQQHKAPEVMVAMEPTNYLWMLLATVLEQKGITYRLVNAYTVKKHREGDQLDRSKDDPRDAFTIADLSRTGKCTETQLQHGAYAELRQSVSLYYRLKRQIRREKQHIWHAAGQLFPELPRVFKNITGETAKAMLITQAAAVEIQKMSEEEFITKVRIGFDGNRLLVSRLRAAYHLAMVSVGVKYGVQALQLALKLHIESLNQHLNQEKRLLSALELCFLSLPQANSLLSVNGINILTGATILAEIGDPKRYRHAGQLVKLAGIQPTPNRSGRKQRSATPMSHQGRPRLRSALYMTCLCLIRVDRRFSILYQRLQHREKNPLTKMQSLGVLMNKLLHILWALMKQQTQYKPLDAGLTET

SEQ ID NO: 303147 - protein, 421 aa, unidentified
MEVIIYMKNHESLFFGVDWGRSSHQVCVVDHEGSVVGEKSFKHSGGGLLEMAQWMREISDSEACDIAAAIEVNHGPVVESLVEQGFGVYSINPKQLDRFRDRFCVSGAKDDRRDALVLASALRTDRSHFRLVEPRDPDVIILREFNRTREELTAERTRCVNRLRGLLFRYYPQFCELLGKKVNTWHLELWELMPCPDSAKRKRVQTVDNLLKRNAVRRFNAKQVLEILRRKKIELNDATTGSCIEHIRMIIERMRVIDRQLKETKDSIKQVIETMNSKLKAEGERPTDIEILRSIPGVGPVVLATLIAEAWDLVRRRDLKALRCLGGTAPVTRQSGKSRQVVRRRAVCRSLANAFHTPGGIAVKHDPVSRVKYEALRAKGHGYCRSVRTVCDRLLLVACAILKKGELFDKEFKKPLEDIAA

SEQ ID NO: 303148 - protein, 525 aa, unidentified
MTDSKSGAFKARGQFWLKCKKPLKVQFQRPVDNYSGGPDYSGTPFIIILDSKIHFLRVILLIKQKIMARKKKIEMEIINHNAAGIDVGSKSHFVAVGQSLEDVKEFGVYAEDLVELCNWLLSYEITTVALESTGDYWQNLFVELQKHGLEVVLCNGKFTKHAKGKKTDVKDCRHIQKLHALGLLTSSFLPDETTEILRTYCRQRSNWVELAASASRKMQKYLKFLNFRLDVVVNDVCGLTGLKIIEDICNGNLDPYSLAEHRHYNCKKPKEEIAKALHGNNRKDFLFGLKQEFDSYNFFQRKIKACDKEIERLIKQEIRKSPEKQILKTTEKPYKRINKNAVSIKDFNQIAFQYFGGIDLMAIEGVSHSTVIAIMSEIGMDGFKKFKTAKDFCSWLRLAPNNKISGGKVLSNRIPKGSNRLKIALRHSANAIGNLKDTHLSNFFGRIAYRKGRQAAVSATARKLATIIWTMVTKKVPYTPPSEYLFLDQKRKMGLAKRIKKQMAKFDIKPEEIGISNSLTPNYNF

SEQ ID NO: 303149 - protein, 316 aa, unidentified
MLSLVPVAGIDVGKHFLDLGFHPAARPLRCDNTPAGIERLIDALRQRGVLRVALEAIGPYAHSVTTALAGAGFAVALVDPRRIRAFRTAEGQIAKTDRLDAALIARFAQRMPEHLHPAPEPDQVRLKALSTRRRQLTELIAMEKTRLKQALDPLVADSHRAVIETLEGACAAIEADLDQRIGADPALARKRAILTSIPGIGRRIATVLITDMPELGRLDRKAAASLAGMAPHPTQSGAHPGRHAIAGGRPCLRTAFYMAGMVAARTCPTFKLPYRAMRDAGKPAKVAIVATGRRLVVLANALVKDDKTFAESHLLA

SEQ ID NO: 303150 - protein, 326 aa, unidentified
MSKDKEYVGIDISKDYFDVCYADGKHNQFENNKEGFSKFKKTLAASSHCVMEQTGRYHWGIANYLYEKEIAVSVVNALVVKRFIQMKLRVTKTDKADAKMIQMYAEFDNPREWEPPQIYINQCRELRNLVTLLLKQNTALKNQLKSLELSDFPSKLASRIIKRQLKTIQKEVKALEDEMQRLLVENEGDLLSLLTTIPGMGRKTAMSLIVTTNGFKDFENSKQLSSFLGLSPTIRTSGTSVRGQSRISKMGNKDVRNLLFMCSFTAYKCNPSCAKLFERIVNKGKSKKLALLAVCNKLTRQALAISKSRIPYDENYRSINPVLLQN

SEQ ID NO: 303151 - protein, 427 aa, unidentified
MSEVQSGKQEPQFAAFVGIDWADQKHVWCLQAAGSEKRESGELVHTPEAVEAWVGQLCQRFANRPIAVAVEQTRGALVFMLSKYEPLHLFPVPSTMAASMRKALYPSGSKDDPRDADLLLDLLLQHRDKLRRLSPDTEATRRVQNLAEERRKLVDEKTAQTNRLTSHLKIYFPQILDWFERLDTELVCALLERWPTLEELQKVPPAKLRTFFRKHHCRDEALIERHILAIGQAIPAIRDRAVIEAKSTVVKVIVQVIRSLVEGIADLDDKIEEAAAAHPDFFIFDSLPGAGAVMAPRLLAAFGSQRERFANAAEVQSYSGIAPVTERSGKKKWIHFRWACPKFLRQSFHEWASHSMMYSAWARSYYQQQRSKGQDHQAAVRALAFKWIRIAFRCWKDKVAYDESKYLAALARRGSPLAALVATAKTL

SEQ ID NO: 303152 - protein, 340 aa, unidentified
MIVTTKFFIGIDVSKPHFDVALMAVVNHVKQEMETTRFDNTASGIKLFEKWLKSRKLTFNEDSLVVMENTGIYHRLLWTFCSNRNLPIHIGNAAHIKWSFGIARGKNDKIDSIRLCSYSFKEADELRATGSLDPELMLLKDLVSARTKLLKQKSGISVSVKELGNVNGKEHQKLIEKALKNAIDGIVKSIKNLEDQIKKIINGNQDFKRNYKLLISIPGIGHVTAVYLIGCTGNFVGQPSGKELACYAGVAPFEQTSGISIKGKPRVHRMANKELKRLLHMCALSLIQHNQEFKMYYNRKKAEGKHSMSIINAVRNKIALRIAAVIKKQESYKNNYNIAA

SEQ ID NO: 303153 - protein, 370 aa, unidentified
MGNRSMFVGLDVHKETIDVSIAEGARQGEVRHYGVIASDLEPLDKVVRALRAPNRTLHFVYEAGPCGFGIYRHLTGRGEDCVVVSPSMIPKRSGDRVKTDRRDSQMLARLHRAGELRAIYVPDDTDEAMRDLVRAREDAVVVATQAKYRLKAFLLRQGRRYPGREGWTLPYRRWLTDLSFPSAAQHTALQEYRDAIAETEQRIDRLTEQLRQLTPAWRWAPVVAALQALRGVSFVTAVALVAELGDLTRFGHPRELMAYLGLVPSEHSSGSSVRRGAITKAGNPHVRRLLAESAWAYQGIPRIGRKHAYRQEALPKVVCDIAWKAQLRLTGRFRRLVARGKAKPKVATAIARELSGFVWAIAREVSPAPR

SEQ ID NO: 303154 - protein, 370 aa, unidentified
MNNSIFVGLDVHKATVSIAAAEAGRGGEVRSIGTVASDTGQIAKLADQLSKGGRQLHFCYEAGPCGYGLYRQLTSLGHDCIVVAPSLIPMKAGDRVKTDRRDAVMLAKLHRAGELTAVWVPDDAHEAMRDLVRARMTSRQVLSKARQHLQGFLLRHGRVYSGTKGWTRMYRRWLATICFDHPAQQIVLQDYINAVSDAEERVERLTGQIEALVPQWSMAPVVQAFQAMRGVALINAVTLVAEVGDFSRFNNPRQLMAYLGLVPSEHSSGTKVRRGGITKAGSTLARRALVEGAWTYRLPARVSNTLKSRIEPLPKPVRDIAWKAQVRLCARYRRLSAAGKPKTVVTTAIAREMIGFLWAIAREVKVGVTQ

SEQ ID NO: 303155 - protein, 352 aa, unidentified
MAKNDFDELMSVGVDIGKDVFHLVGFNKEGQLVLRKKIKRMALITTFEELPHCIVGMEACLSAHFVSRTLRKMGFEPRIIPAIYVKPFNKGQKNDYNDAEAIAEAALRPNLKTVTEKTQEQLDLQALHRVRSRLVSRRTATMNQIRAFLIEQGITVRKSVAALRTSLQAILDNRSDEISLRMRKLILGLQQDWIWTDKRIEMTTSEIKAVSESEASCQRLMTIPGIGPIISTAVVAAVGTGEAYDRGRDFAAWLGLVPRQYSTGGRTILGRITKRGSRYLRMLFVQAAQVIMMRPKNWHKFSFGPWLEAAATRMQHNKLGVALANKLARIAWSVLNSGKDFDWKEKEFATAI

SEQ ID NO: 303156 - protein, 402 aa, unidentified
MAGITAGIDWASEAHEVCISKEGEVLERFSVAHDERGIAGLARRLTKLGVARAAIERPDGILVERLLATGLEVLAIHPNQVKAARARFAVAHGKSDRFDAYVLAELARTDAHRFRALVPDSEETKALKTLTRAREDLVGVRVELANQLRAQLQAFWPGALLFAVLDSPISLAFLKRYSSPAEARSLGQGRMAAFLAREGYSGRTDPDELVARMRSAPQGTAGPAEQEARRAVVLGLVSALEPIVSEIAALDAQIRERFVAHPDAAIFRPLFRDRRTTICPATLIAELGDCRGRYPTEAAMAADAGMSPVALESGKLRVATFRRACDKRLRLAVATLADSTRHWHPWAKEVYRRARARGQDHPHAVRTLGRAWIRVLWRCWQDRVPYDATLHGNSRRLQPAGG

SEQ ID NO: 303157 - protein, 400 aa, unidentified
MISVGIDVSKGKSTVCILKPYGEIVSKPFNITHTQKDLSELSSMLFRLNDEVKIVMEATGIYHLPVLTYLQEKGFFVSVINPYLMKSYRNESLRKAKTDKIDSRIIANYGIDHWFKMKEFQTSGEIYEELKLLGQQYRHYMKLHLLSLAKLTHLLDLTMPGIKNLLASWNETNRKDKRSDFVERFWHYDVITSMSEQEFTEEYILWAKEKKYVPSQEKAKVIYTLAQESIPTLPSETSSVKILVTEAVRVLKEVDATLGLILSRMQEIAKTLPEYSVVREMGGVGNTLAPKLIAEIGDVRRFRNGKALVAFAGIDPPPYESGQFVGCNRKISKRGSASLRKVGYETMRSLKMRSRPEDPVYRYVVKKESEGKSKKAAKIAGLNKFLRIYYARVTELYKNI

SEQ ID NO: 303158 - protein, 312 aa, unidentified
MTQIICGVDVSSKTLDARIGREGAVGRFACTAEGVAALAAFCKAHRVDLVAMEATGGYEKMPFALLWTHGVPAAIVNPRSVRRFAEGMGFFEKTDRIDAGVIAWYAEVKRIVAQEPSSEAHQRLEALVTRLRQLTELRTAQTNQRRLVKEAAVLSTFDELHALLKRQTRSLERQIAALVDSDPLWHKLDPAFRSIKGVADRTVARLMAEMPEIGTLSNKAISKLAGLAPFARDSGQFKGKRAVRGGRTHVRSILFVVAELVRRHNPDFAAFHKRLKDAGKPLKVIRIALAHKLLVRLNAKAREVREQIAYAA

SEQ ID NO: 303159 - protein, 420 aa, unidentified
MTPLSNQQFTAYVGIDWADTKHDICLQAAGDIRREFDCIPHQVARIDEWAKSLQRRFGGPIAVALELAKGPIVAALQKYDFFTLFPINPSTLAKYREAFKPSRAKDDPTDAELALDLLLRHPERFAPLRPQSAAMRSLVSLVERRRDLVGDQNRLTNRLCDTLKQYYPQALEWFEDRGTVLFCDFLTRWPTFLAARRARSTTLEVFFHAHNCRHANLIEARLESIRAATPLTEDPGIVAPCRLYVLALVEQLRTVLTAIDRFDREIATVAGTLPDYTLFQGLPGAGPQLAPRLLAAFGEQRDRFHGTDELQKYSGIAPVTERSGKKSWVHWRWQCPKFLRQTFVEWAAQTINKSFWAGAYYRQQRAKGSTHQAAVRALAFKWIRILYRCWQTSTPYDETTYLNALSKRGSPLIRNLGLAG

SEQ ID NO: 303160 - protein, 414 aa, unidentified
MDIVFHRCAGIDVHKKTVVVAIIATRDDGSVHQETRTFGTMTADLLDLSDWLTLHNITHVAMESTGDYWKPVFNILEGNFEVWLINAQHLSKVPGHKTDVGDAEWIADLLRHGLVRPSFIPPVAQRDLRELTRYRSTFVRERATLVNRVQKLLESANIKLSSVATDVLGVSGRAILEALIVGQATPEQMAELAKGRLRNKREQLTKALEGRMKPHHRFVLTELLCQIDALDETIDRFDEQVKAYCLPFEEAVALWDTIPGIARRAAEIIVSEIGTDMTRFASADHLSSWAGVAPGNNQSGGKRRRAKTPKGNQTLNEILTEVALAASHTKNTYLSALYHRVAARRGHKRAIRAVAHAILIIGYHLMLRKEPYRELGADYFDKRRPQATANRLVKRLQRLGYDVTIQKQPETLAA

SEQ ID NO: 303161 - protein, 348 aa, unidentified
MMIIGVDYHPSSQTIAFFVEETGECGEQELNHSDGQAEKFYRDLKQRGIRVRVGMEATGYSRWFERLLAELGFELWIGDPAQIKAKRVKKQKFDREDARLLLRLMREDNFPQIWVPSPENRDLRQLLWHRHRLVQMRTRIMNQLQALAMNEGYRWKKKLFSKQGRAQLEKLSLAPWASRRRQELLDRMNPTIEELTAAVEREARKRPEVLRLMTHPGVGPLTALAYVLIIGTWERFPCGKQIGNYVGMIPCEGSSAGKQRLGHISKQGSSLLRFLLVEAAQAAARINPEWRRRYMHLAMRRHRNIAMIAMRRRMAVRLYWMWRNGCEYSPSLEFGSYVGQLGTGHGVK

SEQ ID NO: 303162 - protein, 373 aa, unidentified
MTTVRFVGLDVHADTIAVAVAEPSGETRNLGIMPNRADAVRKLMKKLGPVERLRVCYEAGPTGYAIYWQLVGLGIACEVVAPSLVPTKPGDRVKTDRRDAVKLARAYRAGDLTPVWVPDAAHEALRDLVRAREAAKRDQLRARHRVVKFFLRHGHRAPLGCRAWSTRYWLWVETVRFPYPAQEATRLDYLQEIQHAAERVARLEQAIQEVVRTAPAPLRAVIDAVQALRGIAPLTAITLVTELGSMARFAKARQLMGYTGIVSSERTSGTRIRRGAITKTGNAHVRRVVVEAAWAYRHPPHLGPTLRKRQAIVEPAVREIAWKAQHRLYQRYRHLTRTGKPSQQVVTALARELLGFIWAIAVRVETAARTHAA

SEQ ID NO: 303163 - protein, 350 aa, unidentified
MSKINSHHSHANIIYMGIDVHEKTYNISLFYQGENILSRQCPADYDSIRKILKKYSSFSCRAVYEAGAFGYGLYDQLKTDGVNVIVTPPSKVLRSQDDKVKTDKRDAAKLAHHLSAGLLKSVCVPPLQVRYDRELLRTRDQLVDQRRRIYQQIQSKLRYHGLPLRSKGTITALNKAALLQMPLPAPIRIAFSELICLYDFYSQRLRFLRNELLKLAESKPYATAIRLLQSIPGVGLFASLAWVLELPAMKYFLTDDKLANFLGLTPSEVSSGSKRRLGSISKTGNPKIRWLLVQSSWILIKKDPVMQQAFARIKRRRGSQCAIIAVARKLSARIRAVLLHQTPYAIGTIA

SEQ ID NO: 303164 - protein, 321 aa, unidentified
MVYIGIDISKSSFFAAYPSTNGYRTQTFPNTTAGVRKFIGTLSVAEHHCVMEATGNYGFLLLYLLHQSGIAVSLVNPKQIKHFARMMMTVTKTDEKDACMIAMYGEKMNPPIYKMPSQTIILLKQKKTVIRQLRKQLVASKNLRESLVVLPYRDKACLRALDKTIDFLTRQIEQIEAELADIASSEFDKQLKALTSIKGIGITLATALILTTGGFTYFDNAKQLSRFIGICPTYRQSGTSLNIKGHINRNGDEHLRSLLYVASWSALRSNTACRECYLRLKANGKPSKVALIAVANKLVRQAFAIATTDSTYIDGFISTKE

SEQ ID NO: 303165 - protein, 449 aa, unidentified
MMEPQEIEDAEHEQILERVAAVDVGKAAGMVCTRVRHDARPGKRRTRVWEVSATTGAVLELADHLVAEGIERVSLESTSDYWRIWFYVFEAAGLNVQLVNAHDVKNAPGRPKTDKLDAVWLAKLTERGMLRPSFVPPAEIRQLRDYTRLRVDLTRERTRYYSRLEKLLEDALIKISAVASTIGTLSVRDMIEALIGGERDPKVLADLARGKMKAKRAALIEALTGRFDDHHAELARMLLDQAGALSAQIGKLTARIEELIAAIPAAQGVNADGTTGPQAGTGPAAPVLPAVNRLDEVTGIGRESAQALIAEIGLHMSVFPTAAHLVSWVKICPRTIQSGARSRAGRTGKGNPCIKGILGEAAAAAGKTDTFLGERYRRLARRRGKLKALVAIARSILVIIWHLLADPTARYHDLGASYYNQRISKDRTTRNHVRQLEALGYTVTLIAAA

SEQ ID NO: 303166 - protein, 399 aa, unidentified
MFYAGIDIAKRSHEASVIDVEGKPLFDSISITNTKEGCDKLSTLFEKFEIAKDDVVIGMEATGHYWLAIHECLTEQGYDVRVINPIQSEAFRKMYIRQTKNDSKDSFIIAQVMRFGQYSETSLSDENLVAMRQLSRFRFALVDNCGDCKRRIIALLDQVFPEYATLFSDTFGKTSKELLLQCPTPEDMLSVSTRKLTTLLSKTSRGRFGEEKAKEIRSAAADSFGVGFAKNAFAFQIRQLIEQLTFSENQIEELEEQISLLLHQTNDVITSIPGIGDTLGAVILSEIGDINRFDAPGKLVAFAGLDVKVTQSGEFTGTKNKISKRGSPYLRRAIWLAANRAAFCDPILSDYYQSLKARGKHHMTAIGGVARKLCNIIFTILRENRPYQAQPPKKQLKEG

SEQ ID NO: 303167 - protein, 403 aa, unidentified
MNSVGIDISKGRSTIAVMRPFGEVVISPFEVRHTGSELSKLARQLKSLDGETRVVMEATGNYHASVAKLLHDAGLYVSVVNAKLVHDYGNNELRRVKTDRKDAVKLANYGLDRWLTLPRYIPEEDTRLLLKNCYRQYRQYSKVQTVLKNNLISLLDTVFPNANRLFSSPIRGDGSEKWVDFVAEFWHCRCVSEKSEKAFANKYQRWCRKYGYNFNEAKAHTIHAEASGHIGVMPMSETTKLLVEQAVAQLRATSAALAALKHEMQSLASMLPEYPVVMDLFGVGPTLDPQLIAEIGDVRRFYSKKALVAYAGLDAPPNDSGDVTGRHKSMSKIGASSLRRTLFLVMSVYLQTAPLDEPVYQFMDRKRAEGKPYRVYMMASANKFLRIYYATVKAYLESLEHTV

SEQ ID NO: 303168 - protein, 371 aa, unidentified
MKQQTKSSNITVGLDLGDRRHRFCALDERGEVVEQDSICNDRVSLRKLAGRYHGALGVMEAGAHSPWISRFLEALGWRVVVSNPRKVRAIYQHERKSDQRDALMLARIGRMDLALLYPVRHGTAEAQQDLLRIKLRDSLVRARVAVINSVRFTLKSLGYTVRNPSSARFHKVVMEEVPESVREMITPSVQALAELTARIKMLELEINTLAQMKYPQSAQLQQIPGVGPITALYFVLKIEDPNRFAHVRDVGAYAGLCPRRDQSGESDPQLRISKRGDAYLRRLLVSAAHYILGPFGPQSALRAYGLMLAADRTARAKKRATVAVARKLAVLLLSLWKSQQPYQPFPGACLNGEQEDRRSGTIALHRMEATD

SEQ ID NO: 303169 - protein, 359 aa, unidentified
MIVERTSVGLDVHARSVVAAGLDAVTGEVFKQRLVPASEVVIEWLRSLPGPVAVTYEAGPTGFGLYRAITAAGFRCEVAAPSKLTRPAGDRVKTDAKDALLLAQLLQVGQIVPVRVPSITEEAARDLVRAREDVRGGLMRARHRVSKLLLRHGHVYYGGNAWTGKHTAWLNSIRFDQPGTRAAYDADREAVDFAVARRVRLDTAIAAMAADSEFTAVTRRLCCLRGISTLTGFALAVELGDWDRFTGASIGAYLGLVPSEHSSGDSRRQGAITKTGNTHARRLLVEAAWHHKAQYKVGAVLQARWEQATPAARARGHLGNQRLHHQWTKYAARRKKHTVANTAIARELAGWCWSLATLE

SEQ ID NO: 303170 - protein, 430 aa, unidentified
MKSNTQNAKIEAITEKTLVLGIDVGSETHYARAFDHRGIEYSKKPFKFSNTEAGFVIFKEWILDLKEKHEKDKVVPGMEPTGHYWFNLGKFLQDNEMKPVLVNPHHVKKSKELDDNNPTKNDRKDPKVIAGLVREGRYMIPYLPDGVYADLRTASNIRFQLQAELTRIQNRISRWFNIYFPEYKTVYGKPDAKSGMLILKQAPLPEDILTLGIDGVNQIWRDAKMRAVGKARAKTLIEAAEHSVGSKEGAISARMESRMLLEDYESRNIRLQEIMTLIEELVNQIPMAEKLLEIKGVGIKTVSGFLAEVGDISRFNNPKELQKLAGLALVENSSGKHKGRTTISRRGRKRLRYLLFEVAMSLVAKNPEFRELHTYYTTRRLNPLKKMQSLMAVAAKLIRVFYVMLTKGVDYDPKKMVGDIKRPAVYLQAA

SEQ ID NO: 303171 - protein, 414 aa, unidentified
MERVYERCCGLDVHKRQVTACVHVPDRQGERAELCAEFETMTADLLGLRDWLKGLGVTHVAMEATGVYWKPVYYLLEDDFELLLVNAQHVKNVPGRKTDVQDAQWLCQLLEHGLLKGSFVPPKPQRELRDLTRYRKSLVWERAREANRLQKVLEDANIKLASVASRPLGASGKAMLKELCEGNNDPAALADLAKGKLRAKLPLLRRALEGRFRGHHALLVSHLLAHIEYLDETINSLSEEIEERMRPLEGQRELLCTIPGVAERTAEVILAELGPDMSRFPTHRHAASWAAVCPGHNESAGKRRSGKTRKGDSWLRTALIEAAQSAAGRTTDTYLHSQYLRVKRRRGHRKAIVAVAHSILVASYYILSEEKPYEDLGGDYFIRREDPERVTQRLVRQLERLGQSVTLEPALEAR

SEQ ID NO: 303172 - protein, 450 aa, unidentified
MAKPKRRKHRKLDRSLPEMRPNAGGIDVGATEIFVAVPADRDKDSVRSFPTFTQDLHELTDWLKQCRVDTVAMESTGVYWIPLFQILEARGIEVHLVNAQHVHHVPGRKSDVLDCQWLQYLHSVGLLKASFRPEQAVCEIRSLMRHRENLVEMSCVHVQHMHKSLDQMNLQIHHVISDITGVTGLAIADAIVAGNTDPKELAKLRDHRIKASVETVTKSLVGDYRAEHIFTLKQSLTAYRHYQQLIADCDQEVQQRIQAFDSKNAGPSAPADASPSAAADPPRFDLHSHLARIFGVDLTLIPGFECLRIQTLLSELGADLSKFPTPDTFCSWLNLCSKDGSSAGRRIRAPKVKTKNRATQAFRFAAQSLHNNQSYLGDYYRSQRARHGAPKAIKNTAHKLARIFYHLVTTRQPYDETVFAKLEMRKQQQRFRKLQSLANRMGYSLVEVHA

SEQ ID NO: 303173 - protein, 314 aa, unidentified
MSGINVGIDVAKEELVVAVLPSGESFTEVNDERAVMRLVKRLSALRCERIVLEASGGYETLVVGALAAAGLPVAVVNPRQVRDFARAIGQLAKTDPLDARVIALYAERVQPPIRELPDEQTRALRELCVRRQELIEMLIAERNRLRLASPATRPEIAGHVDYLLKRIKQIDRDLDQAVRNSPLWRKKGELLTSVPGVGRVSRAVLLGLLPELGRLNRAEAAALLGVAPYNRDSGALRGRRMIRGGRPRVRRVLYVATVAAVRCNPVLRAYYLRLRAAGKPIKVALVATMRKLITILNAILKTNTPWRLPCVTPL

SEQ ID NO: 303174 - protein, 418 aa, unidentified
MATVDIVYPICCGMDVHKNFLVACIATTDQGSNTKHQIRRFSTFTGDLRKLADWLASNNCKDVCMESTGKYWIPVFNVLEKTCNVCLTHPKFVKAIKGKKTDKRDAKWISELFKCDLVRASFIPPADIRQLRDLCRYYVKLTYMNTSEKNRAQNCLTMCNLKLDAVFSDVFGASATRVREAFFEHNNTDFDIAPLLHKGCKASVEEVKAALEGELSSIQVEKLKFIQQHQECIRNLQDALESLILQLAAKYQPQIDLLLTVPGISSPLTAIRIMAEIGVDMSVFETAKKLCSWAGLTPQNNESAGKKKTTRIGRAGVYLKPLLVQIALAVGVSNKHLELRDKYQALKKRRGGKKAVIAISRKLLTAIWHILSKNEPYNAELYRKADAPPDNRVLNHEQAFALLRSRGYLICDAEGVVT

SEQ ID NO: 303175 - protein, 314 aa, unidentified
MSTAMYVGLDVAKAHIDGAVRPSGDVHRVPHDDAGLTTLVTEVRALAPTLVVLEATGGYETDVASVLALAGIPVAIVNPRQVRDFAKALGRLAKTDAIDARVLALFAERVRPAARPLPDAAQQALVAMVARRRQLIDMLTAERNRLPLAHGAVRRDLREHIHWLERRLRDSDRDLAAMMRDSPLWRAQDNLLRSVPGIGPVTAAVLIAELPALGRLSRREVAALVGVAPLNRDSGTRRGPRTTWGGRATVRAPLYMATLVATRCNPVLRAFYRRLRTAGKPPRVALVAAMRKLLTILNAIVKTQRPWQPVALDL

SEQ ID NO: 303176 - protein, 344 aa, unidentified
MNISMIGLDTAKSVFQVHAVDPSGKVAMKRKLQRGELIPFFEKHEACTVVLEACGVAHHWARVLTGLGHDVKLIAPEAVRPFVKKGRKNDAADAAAICEAASRPSVKFVSAKSLEQQSVLTLHSARCLLVKQQTMLANALRGLATEFGLTVPKGIGKLEELAALVNADEAFPETARHVLTGLFDHCRATAASIETVEAEIVVQARQDETARRLATIPGIGPITASLIAATVGDIGMFKSARHFAAWLGLVPRQYSTGGRNRLGRITKTGNREIRRLLVLGATSMVYRAPQWKSAAGLWTRAVLERRPVRLVTVALANKMARIAWALMTRKEVYHAKGRAAAAAA

SEQ ID NO: 303177 - protein, 327 aa, unidentified
MSLFVGLDLHKVYSEFAVMDIFGNVLRQGRVENTLDKMREFSESLPSSSSVVMESSSTWYWAHRLLSERHNVTLSNPVRNKAIASAKVKTDKIDSTTLANLLRGGWAAESYVPSKETMEFRELVRFRANLVRERTRMKNRIHAYLLMNNISIDAGPFTKGFVEKVRGIDDARVQSYLRLIDGLNREIREASMTIRRKAGSNEDASLLMTIPGISYYSALLIISEIAEIERFEDSASLVGYSGLAPSTHSSGGKTHHGPITKTGSSYLRWIMGQCTRAHMRVEPEGTVANFYARIARKKGDQKAIVAASAKLLKIVFWVLKEKRAYHS

SEQ ID NO: 303178 - protein, 344 aa, unidentified
MDYFAGLDVSVKETSVCIVDDTGKVVRELKVASEPEALLAVLTNPAYRFKRIGLEAGPLSQWLYSALAEADLPVVCVETRHMQAILKAQINKTDRNDARGIAQMMRVGVYRPVHVKTLRSQKLRMLLTHRKLLQSKAIAIENDLRGTLRNFGLKVGIVGTAKFEVRIKELVENLPDLAILVEPLLIVRRVLREQIVVLHRRLLTIVRDDGVCRRLMTTPGVGPVVALTYRATVDVPARFRKSKSVGAVFGLTCSKYQSGEIDRSGRISRCGDEMMRVMLYEAAQSMLRSKKWSWLKAWAMQIARRRGMKKAIVALARRLAVIMHRIWVDGTEFRWTQEQAAAAA

SEQ ID NO: 303179 - protein, 405 aa, unidentified
MFEIEDVGVFLGLDVGKSAHHGHGLTPGGKKVFDKPLPNSEPRLRAVFDKLTAKFGTVLVIVDQPASIGALPLTVARDAGCQVAYLPGLAMRRIADLYPGEAKTDAKDAAVIADAARTMPHTLRSLELTDDITAELTVLTGFDQDLAAEATRTSNRIRGLLTQFHPSLERVLGPRLDHQAVTWLLERYGSPAALRKAGRRRLLELIRPKAPRMATRLIDEVFDALDEQTVVVPGTGTLDIVIPSLAGQLAAVHTQRRAMEAQINSLLAAHPLSKVLTSMPGVGVRTAAVLLVTVGDGTSFPTAAHLASYAGLAPTTKQSGTSIHGEHAPRGGNRQLKRAMFLSAFACMNADPASRTYYDKQRARGKTHTQALLRLARQRISVLFAMLRDGTFYESRTPGNVELAA

SEQ ID NO: 303180 - protein, 368 aa, unidentified
MEQKERRFVGIDLGKTKYTVKVILSNGKVIGWEGKTTPAGRNDLYKQLLPTDRVGIEVCSLAMKMAREMSEKVGCDIALMDAHQLAVIYNSVKKNDKEDALKLARLVQKNSNEELPVVNLPSEQETKRRNLLTENKELKQSRTQEINRLHAIFLRCGHTEVVKKNLASKENREEISCLLKGFDLEQARRIMHRIDIIEEDINTVDSEINNEVKGDKRIELLESVPGVGMLTAMAFVAYIGDGSRFHSASQVSASIGLVPKIDMSGSINRYGGISKHGCGYLRSLLVMASWSLIRSKADSALKLKYNYMVKFQSKNKRKAIVAIARKLAELLYIILRTGSKFEVRPFRKPSTKELAECAINQKEESGAA

SEQ ID NO: 303181 - protein, 409 aa, unidentified
MGARRARSQPSHGPSARPDLSSLYLASMPLAGGERGERVGDEAVDGRGRVILGRQAVAQPGPPVRSAPPESAPLPEAETSHLQGGTRAGPHAEEAMMQATYLGIDVAKGFLDLSVRPTGQALRVANEPAALVAALGRVGAPAPTVLEASGGYERPAVRALQAAGLAVARVNPRQVRDFARATGQLAKTDRIDAALLARYAEAMRPAPTPPADPATERLAALVERRRQLVTMREAERNRRREAPAAVADDLAAHLAFLGARIAALDAQIRAAIAADAALGRRAALLRSAPGVGPVLAATLLADLPELGRASGKELAALVGVAPFARDSGRWRGRRQVWGGRAPVRAVLYMGALAAARHNPALRPFYGRLLAAGKPKKLALVACMRKLLVILGALVRHDTPFREDFHAHTP

SEQ ID NO: 303182 - protein, 401 aa, unidentified
MEIVVGWDWADGHHDVVVQDQPGHTLWAGQVAHTREALDLLEGRLLDWAHHVRTDVHVVIETSQGLVVDWLITTGFWVYPVNPKVSDARRKPSGAKTDRLDAAILARLGWTDRDQLRPLRPADEAWVELRQLTRIDEALTRQATRLTNQLLAALKSYYPQVLAAFADMSRPVALAFLANWPDPQDARRLTVNEVMSWLRQHRYPRAAQEAPRIWSALQQRAWEASPGKRRAQVWAVRALVAQLQAVQTEQRALREHLAELFLASPDADLWMSVPGVAVTLATRLQAGFGPDRDRFERAEAVQALAGTSPVLYQSGKFQRVHMRRACDKHFRAAVHQLAFTSLSRCTWAREYYDQYRARGHEHHAALRALANVWLRILFRMWKSRQRYDEARFLADRARHAA

SEQ ID NO: 303183 - protein, 358 aa, unidentified
MATMSWAGLDVHARSTEAAALDVASGELTRRRFGGGAEPVVAWLAELPQPVSACYEAGPTGYGLYRAAREAGIAMQVIAPSKTPRAAGARLKSDRKDAELLVRLLMAGALTQVTVPSPEAEAARDLAHARDQLRGDLMRARHRVSKLLLRHGRVYEGGAWTQAHGRWLAGQRFTHEATELAYLDGLAAVTGLVARREALDRQLGQLARGEAFWPTVARLCCFRGIDTLSAFALHLEVRDWERFAHAPQLAAWLGLTPSLCQSGESSSQGAITKTGSAYARRLLVEAAKHYVRPPRIGATLRARQQGQPDHVLQTAWRAQHRLFRVQTRLRGRGKPANVATVAAARELACFLWSAVNAG

SEQ ID NO: 303184 - protein, 363 aa, unidentified
MVRTTLTQPASSGVVVGVDTHKDTHVARAKDALGRRVGEQLVPTTPAGHRQLLAWARGLGEVEAFGVEGTGSYGVGLARYLRSEGEVVIEVIRPDRQARRRNGKSDPADADAAASAVLSGDAAGLPKGADGQVEMIRTLRVARSTAIKARTQAVNALKALVVTAPSDLREQLRASSTTRLVYACARLRPGELVDPTAATKVALRSLATRYEALEAELERLDGALARLIGEAAPELVARFGVGPDSAGALLVAVGDNPGRLRSEAAFAMLCGASPIEASSGKIARHRLNRGGDRQANAALYHVVMSRLRWHKPTQDYMARRTTEGRTKREVIRCLKRYVAREVYLALKGMASNRVTTTLAHAVA

SEQ ID NO: 303185 - protein, 341 aa, unidentified
MSTVTLIGIDLGKHSFHLHGQDSAGRMVFRKKCSRQQVFTLLGNSPCSTVVMEACAGAHWMARRIQALGHQPKLISPQFVRPFVQGNKNDFADAQAICEAASRPSMRFVCVRNEAQQTVSALHRVRESLVRERTGVINQVHAFLLEFGISLPRGQAILRRLPAVLAEHELPPRLAALLERLQAHFKYLDEQIGEIERDLCQQLREDERSQRLLEIPGIGPITASVLMTELGDAQQFGSARQFAASVGLVPRQYSTGGTPKLLGISKRGDKNLRRLLVQGARAIMQRVERRTDRLGVWVRELLARRHSNVVACALANKLARIAWAILANGTNYRSEQAVSAT

SEQ ID NO: 303186 - protein, 419 aa, unidentified
MNRIETKKLRIVNAKTLIVAIDISKTTDVGYCRCPSGKDIKPFEFRNNVDGFKTLWDRICWMKMSHHLEEVVVGFESTGAYGEPLVHYLRQKPVKLVQVNPMHTKRIKELQGNSPGKTDRKDPRVIADIIALGHALSVVVPEGAAAELRRLTLARERSLGRRTALYNQLQDLVSLLFPEFLQVIKDVKSKTAHYLLRHYPTPQDIMKCGVAPLSSILKRVSRGKLGSTQAQALYEAAAESVGLREGTQGIVLEIEEILSCLEACNRFIDKLEAEMLPHLEQIPYHDSLLSVKGIGVITVAGLVGEVGDFRHFRTLREVMKLAGLDLFEISSGNHTGNRHISKRGRPLLRKLLYFAAINTVRKGGVMHISYQRYLERGMPKMKALIAIARKLLRVLFALVRDHSQYVENYSKKEALKLAA

SEQ ID NO: 303187 - protein, 345 aa, unidentified
MFYVGVDLHKSFTQVYGFNDATGEVVERRVSNDKSSIREVMSQFGENAKVVLEATRNWYWFVDLLQEMGIDVVLSNPLQTKAIAYAKVKTDKVDARMLSHLLRADLIPFAWIPSMEERGIREMLRTRLTLVRIRARFKNLVRSILAKLNIVLSHGDIWRGKGRKELEQLNLPSPYTEILPHYLSIIDNLDKYIEEWNRKIERIAKETPEVFLLKSVPGIGTISALTILYETGPIDRFPSAKRYSSYAGLVPRVKGSGGKFKTGHLSRQANMYLKWIYVEIATGIVRIGKGYLYEYYKKQMYKKGKNVAKIALARKISRMVYHLLKQHITYDTFVERNVNKMRRTG

SEQ ID NO: 303188 - protein, 356 aa, unidentified
MGLYAGCDLHAKSNYWGVVDGEGKRVFKKKLRNDAGAILEMLRGMGGDLVGVVVESTFNWYWLVDVLMEGGYRVHLANPAKMQKYSGMKYVDDEDDAFWLAEMLRLGVLPEGYIYPKEERPIRDLLRKRGHLVRVRTSVLLSLKNIVSRNCGKGVKSYILKGGKGMGGLLEGNEDLALAGQVSKEVIDYLSGKIEGVEKAILGRAEIRESYGGLLTLPGVGKILGLTIRLETGPIGRFGDVRNYVSYCRKVPSRWLSDGKWKGQGNRKNGNRYLGWAFSEAAELARRFHAEPRAYYQRKMAQTNAAVAHSALAHKLARVAYYILRDGVRYEPEKLFGSNRAGAESLKGGLAKSHET

SEQ ID NO: 303189 - protein, 411 aa, unidentified
MRLFVGDDWAEDHHDVEVMDAAGKVLAKKRLPEGVAGMAGLHELVGRHLGEDADGAEVAVGIETDRGPWVAALVAAGYTVFGVNPLQASRYRERHGVSGAKSDSGDAHMLADMARTDSHQLRAVAGDSAQAEGIKVLARAHKTLIWERTRQVQRLRHQLLGYYPAALEAFDDLDAPDALELLGKAPDPARGAKLTRAQVSAALKRARRRGIPDKATAILAALRSRQLGQPAAVTAAYAATVRSLIAVITVLNEQVKALQGQVEENFGQHPDAEIYRSQPGMGAVLGARVLGEFGDDPHCYADGKARRNYAATSPITRASGKKKVVAARFIHNDRLVDALNAQAFASLNASPGARAFYDQQRAKGIEHNDALRRLANRLVGILHGCLKTRTLYNEATAWSHRQNLPQSSVAA

SEQ ID NO: 303190 - protein, 412 aa, unidentified
MQAIIERCCGLDVHQETVVACLLIGTAGAGARKEVRTFRTVMRELEALRDWLKAAGVTHVGMESTGIYWRPVYAVLEGHVELIVGNARHIRNVPGRKTDVKDAEWIADLVRHGLIAKSFVPPPPLRELRELLRYRRKLIEAQAAERNRLLRLLETANIKLASVMSDVFGVSGRAMLKALIAGSAAPEEMAALARGQLRRKRTALIEALTGGVEEHHRFLLALQLGRIEAIEADITALDARIGESLLPYGAEMALLMTIPGVNWLVAAVIIAEIGTDMSVFLSVHHLAAWAGVCPGSYESAGKQKSGRARKGNVHLRTILVGAAISAARTKGSYLRDKFHRLKARRGALRAALAIAHKIVVAAYHMLAGGVAYRDLGDAYLDQISERRTVANLKRRLERLGYHVVLEPRAEAA

SEQ ID NO: 303191 - protein, 403 aa, unidentified
MAKEPLSVFGGVDTHKDVHVAAVVDERGKILDTASFGAHAKGYAALNVWLEGFGTLVRVGVEGTGSYGSGLTRHLQANDVDVVEVNRPNRQMRHHRGKSDPVDAEAAARSALNGEATAVPKDHDDIVESIRVLRVAFCSARDTRTRLALQIRDLIVTAPCALRESMPAKTADRVAHCAKFRPTDVRDPHEATRMALKTLSRRYENLSNEMAELTKLLDELTKEANPALRAAKGVGVDVASILLIAAGSNCQRLRSESAFASMCGVSPIQASSGQTNRHRLNRSGNRQANNALWRIAVVRMTTDEETKAYLSRRTAEGKTKRDVTRCLKRHIAREAFWLLQHPAYAEVGPRLRTMRTSAHISLQTVSDDLGVWPTKISRIERGLEHNEEFVTIYQAWLNQHRAA

SEQ ID NO: 303192 - protein, 421 aa, unidentified
MKKIKPKTTKAVNQKVLITTVDGGKDKHYGYYRCPDGTECKAFDFWNNGRGFQEFWERISSAARTHGLEEIIVGFESTGPYMEPLVQFLRNKRGVQLVQVNPMHTKRLKELTGNSPLKTDRKDPKVIADIIELGHALTVVIPEGPAADLRRLTQGRERTIESRTRLLNQLQSLLVISFPEFLQVMTDVKTASAQHLLRHYPTAEEIVALGEAALVTLLRKVSRGKLREDRARALFEAASESVGVREGRSSMLLEIRLLLETIASYDRFIDGLEAEMVRHLEQIPYSRVILSLKGIGSVTAAGLIGEVGDFTKFNTISEVMKLAGLDLYEVSSGKHRGKLRISKRGRPLIRKLLYFAALSAVRKGGTMHEWYQRALGRGMIKTKALVAVSRKLLGIIFALVRDHSIYAENYTKQKLILQEAA

SEQ ID NO: 303193 - protein, 475 aa, unidentified
MEKTSKNKLEDVTRLLALQKIRDVKDLESYKLSVCHPHSAGIDLGSREIYVAIDPRIAAEMGIPIVHVFNTFTSGLQDCRKLLMNCGIQTVAMESTSIYWTTIYSILVSAGFEVCLVNPKKFRMVPGRKTDVLDCQWLQTLHLYGLLRGSFHPEEKIACLRSYMRERNLIIKDRSRHVNRMQKAMTKMNLLLTNSLSDITNKTGISIIKAIIAGERDPEKLASLRSVRCKFTQEEIAESLNGYYKEDQLFLLKTNYEAFCFFDSQLYEIDKKITDLLETFPLKKGKDEISPPSQKSKYQRKNKNDIRTDKNLKDMLYRILGTDVTSVTGLQSNTILQIISEVGIDMSKFPTCNHFASYLGFVPHNKITGGEIKSSKTDRIKSTAAQAFRKVVPAISRTDSALAGFYKRIVPRIGTGKAVVAVCRKLAIIFYNTLVYGNEYVEYGLEKYKEQIKERERKLVMKLARKNNWDISCSL

SEQ ID NO: 303194 - protein, 373 aa, unidentified
MPKYSTAFGMDVHLRSTTVCALDADTGEAVTRRFPGNPWGEIAGWMDGFPGPSLAAYESGYLGFAPQRELAGLGVECVVAAVSKIPRSAADSASKNDRNDAARMAKAILAHDISPAWVPSPEVEGIRDLAGAYDGATARLATAKQRLLAFLAKRGFVYGGTTPAGNPRKYWTYDFLRWLDKVRPEDDGGVRALAALRNEVEAAAEARADLLSEYRAAVDASPIAAEVAALQSIKGCAFALAAAFSAEVGDFTRFRSGRQVTAYFGLAPSQRSSGDSVRLGGISGAGNALVRKLAVEGSWCYAAARHQPKLMPRDTGVPLEIRMHGRKGSERLLRRREEMLERGMPQAKANAATAAELVRWLWALGTMCREAGE

SEQ ID NO: 303195 - protein, 460 aa, unidentified
MQNAPADKRTPIPLLFVGLDVHKDTISEAVAEDGRDGEVRSPGTFSHDLGVLEKRMRQHQRQGYELRVCYEAGPCGFGIARRLRQLGIDCQVIAPSLIPKKSGDRQKNDKRDAVKLARCHRAGELTPVQVPEPTDEALRDLCRARTDAVNDLRRTRQQLKALLLRLGYRYHGNTSWNDAHERYLRELVLPHAAHKQVLEEYIQAVATTGERVARITAQIAEIATQWRLWPAVQAIMCLRGFQVLSATLFLSELGDLTRFAHPGKLMAYLGLLPSEHSSGETISKGAITKCGNAHVRWILTEAAQHYFLPPKISQELSRRQQAHPRRIKEISWQAQNRLSRRGRALLARGKSKQKAVTAVARELAGFLWAVYHEWKTPGSTQARTLQPASAAKAAPLNQAAAPGRQPEGKSSHSKCPHWDATPRHSPPAPQTALGSLKKRAPLPRATSKESVGSGGTKTRR

SEQ ID NO: 303196 - protein, 431 aa, unidentified
MDDIARFKMFCQLRSQIRGSGDHLIVGIDIAKDKHHAFFGTATGQALWRRLIFTNDQTGFNRLIEQIDTLKAQHDLDKVVFGMEPTGNYHKPLIHWLTEKGYLVVFVAGKAVKDNRELLDGRWDKNDTKDSANVADLISQGKCLFYENPEADILALRNLLSVRRHLKKEIHRLRMRIRNGLLAKYFPEMDRHWGSCVAENLAIVRWYLDPRKIAATDFDIFVRHVTTTDRGVRQLHRLRKIHNAAACSIGVPTDVAAVHEAGILVERFKTVEAELAEVMEQIDAICRGLPSYRLLLTIPGFGPYIAPLVLSALANPMRFKSRKQVIRLAGLDLNASRSGRKSQQQVPVISKKGDAELRYGLYQAALIASYRNDAFRRLYNRMLEGRQKERGIKTKARVKIAAKILVIAWTMLKKGEPFNPNYLLAEPVHPR

SEQ ID NO: 303197 - protein, 345 aa, unidentified
MEHYAGIDVSMESASPCVVDATGQIVREAKVASEPDVLIGWFGGLEFAVTRIGLEAGPLSQWLYAGMRAAGLPVELLETRHVRDAFKAMPVKADRKDARGIAQLMRLGWFRSVHCKSLPAQEIRALLTARKLLQTKNHDVEMSLRGVLRGFGLKVGPTTPRTFVGRIRELAAGHGTLSTVAEALLAARSMPFEQCQKLEKHLRSLAREDGRVRLLMTGPGVGAIVALTYASAIDDPGRFRSSKAVGAHFRLTPKKYQSGETDVTGCISKIGDAGVRSALYEAANVILTRPVKGSTLKSWGMRLAARSGMRKAKGALARKLAVVLHRMLADGTEFLADKAAAAVAR

SEQ ID NO: 303198 - protein, 342 aa, unidentified
MTVIGIDAHKRSHTCVAVNDAGAKVAEKTVASTSAGHAQALRWALTRFGADLSWGVEDLRSMTGLLERELLAAGQKVVRVPPHVMARHRGSARAWGKSDSLDALAVARAVLREPNLAAAFHDPISWELRLLVDRREDLVEQRVAVTNRLIGRLHQLSPDRPKPAHLERTKSQLALAEYLREQHGLLAELARQELADIGHFGRGISALTEDIAGRVRELDSTLLQLQGCAELTAAKLISETANMDRFRNEAAFARYVGVAPVPQSSGTEVGRVRASRSGNRQCNTAIHRIAIVQLRLKGPGREYYLRRRNEGDTAYTAIRCLKRRLCRIVYNRLRADYQHRNL

SEQ ID NO: 303199 - protein, 337 aa, unidentified
MGKEILVIGIDISKDDFSVCVKEKSADGKVQIKGSRKFQNDYYGFTELKSWMSKREKECKLVRYIMEATGSYYEDLAYHLHEDGNKVFVVLPNKIKHFAKSLNLKTKTDKVDASLIAEIGIERELSEWLPMAPEYKLLRDLCREMLSLKKEKSKAMCQLHAMNHSHGKTESVIEIKKSQIDFYESSIQQIESEIKKTVGANEWLKQKVEKIEKIKGLRMITIVTILCETNGFQMFSNMRQVVSYAGLDVVMKESGQYKGKTRISKKGNNRIRQCLYMPALTATQYNENIKDLYQRVNERNPGIKRKGIVAGMRKLLILIFVLWKKDEEYNPDYLWQS

SEQ ID NO: 303200 - protein, 346 aa, unidentified
MLYAGLDLSRQRLDVHVLDEEGRTVEVLAVHPDADALRTLANRILRHGEEVSAVIESMTGSRFVHDTLERFGWDVMIADAVKAKGVAPLAAKTDKIDAHVLAELARRDLVPEIWLPDPTVRAERERARFRLHLVHHRSALKCRIHATLMTFGHSVPVADLFGTSGRALLAGFELPEPWATTMATSLAMVDELDERIDECGRELARLGANHPYIPLLLSVPGVGPLLAYTIASEIGDIARFASPKKLTGYTGLCPIVRQSGNRDFRGPLAKNGPKYLRWALVEAATHAARDVRYRDRYERNKKRLGRQRGAKVARIDIARQLAEAIWHVLTKNEPFAPVGPAILLVA

SEQ ID NO: 303201 - protein, 321 aa, unidentified
MVAQAPLVVGIDVSKRKLDWCIRGQERGCAANTPPACTALAETLRQRGVCMAVVEASGGYEATVVSAFRAAGVVAWVVDPKRVRDFAKSAGRRAKNDAIDADVIAWFAETFGKGQSAPTPDVPREELAALVAERQGFVALSIQLKNRDEHPGSAAVARERRAIVKQIARAVARLEAAITRKIAHTPHLAEAARVLTSVPGIGDLTAAALIAWLPELGRIDRRKLSALVGVAPYDNDSGNQKGARHIAGGRFNLRTALYMPTVGAATQHNPVLRDYYAHLLATGKVEKVALVACMRKLLGILNTMMARHETWSPRQSAPAVA

SEQ ID NO: 303202 - protein, 339 aa, unidentified
MRTYYIGADVHSNSTELAIEHNGNIVCRRSVSTTIPAIKEVFASVGGKIHLTFEEGPMAGWLYRNLKDTVDRIVICDPRRNKLICSDGDADDKIDAAKLASLLRGGYLRAVYHSDDQRRAELKQWVSLYRDRVRDAVRMINKIRARCRMYGIAIPRNVIRDKSQRPQWLSGIKNQSLAKQLEMLWIGYDATAVQVRRTKRQLCTLSRNYPIIKIWSDLPGIGIIRAVTAFAFLDTPWRFAHKNKLWKYCGVGLQRTASGADRKGIPKPAGLQLAWAVNRLLKNIILGAVHTAISQGENVFRRDYERMIHEGIIPSNARHAVARKMLTVMGHVENKQSVQ

SEQ ID NO: 303203 - protein, 402 aa, unidentified
MSCQRRIHAMRWTSLSYAVIGLDLAKADCAVAAVPCADDELGLIDRMDYESLFEQAEKLGPTLFAMEPCCGYSQISLRLQNMGHEVKVISGHAVKNWIATHKSNQKTDLNDATALAKLALYDHDLQPIRVKNVEECRIASVQAIRIQLRTQATKSLVCFKSLCQCWGIVIRRGSLNTKKMAEAVAAVEKLLGVEVASSLMILRDAYKFTMKQINALDKLLDALVEANEQARTMKTVLGIGTQTAARLAVTTGDIKRFPMPRSYVAYFGLAPRNIITGHSGTPSPSKRGALKPVSSRGQGKVSRRGDRVARSFIIQGAATIYMLYCKDMLPECQLRRWLHEQIKRGKPYGKIIVSLAAKLLRIVWALLTYGEKFDSHKAGVPRSVLAAMEKPLKHDAAAESAA

SEQ ID NO: 303204 - protein, 410 aa, unidentified
MIYVGIDWADDHHDVAITDDSAQTLSTFQISHDSSGFALLQAKLASFHQPPDQILVALETNRGLLIHELLRSGYSVYAINPKAVNRYKDRYVLSQAKSDSLDALALAHLLRTDRQRFKVLKPFPEDYRLLDRLCQDLRKLVDEKSRISNQITSVLKEFYPQALEVFSVDSNIGIAFLRAFPDPQALSTCKKKSFEAFSKKHHYSRPQKVEELWKLVQSPALQSDPVVLKAGRFRLLALLDQLGPLREHLIRYEKEVKAILDKLPEAKSVSSLPGVGDRLAPELTAALGPKASDSKTRFQSAEEIMRLSGCVPVTRQSGKWKAVSLRYACVKSLRRTFRDWAFASLSQSIWARAYYDFYKAMNMPHSTILRNLGKKWARILFAVWVKGIPYDEALYIQSLKNHNVRWALAL

SEQ ID NO: 303205 - protein, 466 aa, unidentified
METAYRRCCGIDVHKKSVMVHVLPPQGRSDSKPLEREFRTFSRDLRSLRGWLKNCRATEVVMESTGQYWRAVWNILEEPAGPRLMLVNPAHIKALAGRKTDRIDARRLAHYLANEELDGSFVPPRDIRELRDLMRWRVHLLEEVNRVKNRIGQMCEAGNIKVSSVASDLFGLSGRRMLKAIVEGKRDAGWMADYACGSLRTKRRELEQALDGTFTQHQRWMLDQELHHLANLEAQIAAATQEIAEHMVAYTDMIRRLTTIPGVERRVAWTMVAELGPDMTVFPDADHAAGWSGLCPGNKITGGKRLSGRTRKANPYLRRALTEAAWAASHAKNCYLAALYRRLRGRLGHNKAIFAVAHQILLVAYTMLRKGEDYRELGGDYYDRLNKPRTVRRLLDRLARLGYEAELTPTPEQPTTATADPVTLSGSPPAEAFKPRRGRPCKCKERGIPCHHGSPPATELAENTTG

SEQ ID NO: 303206 - protein, 338 aa, unidentified
MYYSGIDQHKQFSYFTTVNDEGIIIKQAELKNNEFDILNYFYTLGKNHIATVETTGGWYWMNDLLSNHGINLKLAHAKYVKAIAYAKVKTDKVDSHILAQLLRLNFIPEAYKISDNLRPLRDTLRARLRLSQKRTSCLNFMNRMLEKFNINSPSQLTEFYKLQYQQFDNQEQLLKQQMLTLEKSLYPSLIPNEDIQRLLWIPGIGKLNAFSILLEVGDINRFQSEKNFFSYCRLVPSARNSAGKSKQRSSKDGNKYLKLVFSDAAVHSLQYYPTIKKYHDSKLRKKKKQVAHAIIAKEIARIVYYVLKNKSAFNNHFKGIELEHKKSVQWPRTSSPDV

SEQ ID NO: 303207 - protein, 337 aa, unidentified
MTLYCAIDLHSTNNVPVVIDENDKILFQKRLPNDLATVHAALAPYQSELHGVAVESTFNWYWLVDGLIDHGYKPVLVNTSAVKQYEGIKHTNDHSDAFHLAHLMRLNILPTGYIYPKEERAVRDLMRKRLQLVRHRVTHMLSAQNQLWRSTGVNTTTKLIKQADFSLLNLVEDRHLKMAIHSNLVMIQALSQQIDLLEKTVKRQAGLKTEFQSLLTMDGVGDILGLTIALEIGDIRRFPRVGNFSSYCRCVDSSRLSNGKKKGDNNRKNGNKYLSWAFIEAAHSIIRHNKTAHRFYQRKRAQKNGALATKALAHKLARAAYYMIRDREPFKLDLLFR

SEQ ID NO: 303208 - protein, 369 aa, unidentified
MKSNIGTPVSVGIDVAKATLSVSICDHDGHEQALAIRNTDTDITTKVLPYLRHYSGKVVMESTGHYHWTPALVLREAGIDIRIVNPLLAKQYTSGTIRKVKTDPADARGLARMAMVCDNLPETFTVSRARLIIRKKLATISTMSRHLQALKANITSLREGQALLNEPDTTVVMELAESIKQLGLSIKHLENECVRLTTSDTNSRETMERLETIPGVSEFCAALATNWFDINTATSAKSFIGYAGLDVSSRESGTWRGHCRLTKRGNPFLRKRLYSAGWGAAMNYPEYRLYYDQLKASGRGHREAVVIIARKLVRTMYCLLRDGVSYDSVKVSFPKPDNLTIFFNGYCERLAKQSLILLQLIIFVHKHLI

SEQ ID NO: 303209 - protein, 432 aa, unidentified
MMNDELCVVHPRAAGLDVHKGHITATVRLADPTADEPRFETRMFNALASGLAALVAWLTGHRVAAAALEATGVYWHTPWQALTDAGIEAQLLHAQHVKQLRGRKTDVEDSRWLARVCQFGLGRPSFVPSQQFRDLRSLSRHRRKLVARRSQVRNQAQKVIDRGGVRVGAVLSDIFGTNGRRVLDGLVNRLDPNDILASLSWHVRRKLDRLGDALSLTLRETERRLLADLLTEHDSLSQRIGDFDRHIDEALAPYAEQRRLLETLPGVDRTAACAILSEIGADPHKVFGNPHRLAAWAGLCPGNNESAGKRRNGRARRGNQTLRAVLIESAHAAARTNHCQFQAFHQALTRRRGYKRAIVATAHKLLRCVFAVLRDRTPYRDPATDYEALLVQRNAPRWLRKLHQFDILVRNQDGTFAVHWPAGPNRSTAPTP

SEQ ID NO: 303210 - protein, 318 aa, unidentified
MSSAAPAFVGIDVAKAELVITIHPSGEHWTIANDVTGIHTLVQRVRGHAPTLIVLEATGGYERAAVAALAAAQLPVVVANPRQVRDFARATGQLAKTDRIDADILALFAERVRPAPRALPDDAAQALDALLTRRRQVLEMLIAERNRLEHAVPTVRRGITQHIRWLERQLADVDRDLDDTIQASPVWRAKENLLRSTPGVGPVLSRTLIGELPELGTLPRKQIAALVGVAPLARDRGTLKHKRLVWGGRAPVRAALFMAALVGTRCNPVLRAFYRRLLEAGKPKKVALTACMRKLLTILNARMRTNTAWRHIDLSPTT

SEQ ID NO: 303211 - protein, 401 aa, unidentified
MKRVCGLDVHKETIFCATIKGEKRGPVTEHSTLTPSIRAMGEQLWNDGIEEIAMESTGIYWVPVWNILEEMGFSLMLVNPYLIKQMPGRKSDVKDAQWIATLLHKGLLRSSLVPCQHIRELRTYSRKYIKIQQRQTSVLQEMERALEMCSIRITSFVSNLSGKSVYHVVQQIVQGETSAEVMVKAVHSRIVNAHKKERIIESLTGYITEHQRFMLELLLQEYEMLIDQSNRCLLKMEELCREYYPEQLKLLLTIPGISHISAMIVIAETGADMKAFENSGKFSGWTGLRPRNDESAGKFKSTATMKGNRFLRSTLVQVAWASTHIKGSYFKEKFSRLAMRKSRKKALIAIARKLGVLIWNVLYYEQVYNPTRLIVYDPGKLQAKVNYHQKEVERLQNLGRK

SEQ ID NO: 303212 - protein, 423 aa, unidentified
MRVVYQVCCGVDVHKSFLVATIITTVSNSFFPSYKKRRFSTFNKGILEFKAWLLENNCHHVCMESTGKYWVPVYNLLEDVIHVTIANPKWVKAVKGNKDDTKDSKWIGDLFRLGLVPGSFIPPKDIRQLRELTRYKAKLINARTAEKNRFQNALTVCNVALDSVVSDIYGKSATGIIDYLIESPDNSIVEEEITSRLLRSLKKKSATVIESIEGYTMTDSQKERMRIIRSHFDSINESISRIDAQIDLLIAPYENYITLLCTIPGVDRNSAIVIISEIGTDMSQFSNTKRLCCWAGLTPGNNESAGKKKSVRISRAGVYLKPALVQVAHAAVKCVDRPYYANKHRSIMKRRGKKRAVIAITRMILTAVYHMMKTGEVWNPSDLSDIDMTPEMAEKRKAKDIRRAVNLLVSAGIISAETQLSLS

SEQ ID NO: 303213 - protein, 349 aa, unidentified
MDRTTYGLDLAKNVMQLHWVDAQTGEIGRKKLARAKLAEHFGRLRPVHIVMEACGSAHHWARVLGGLGHQVELLPARQVKPFVRSNKDDAADARAIWLAAQQSDIRRVPIKTCEQQAALALHRTRQHWVSVRTATVNALRGHLYEFGVVLRGGRKAGLKALGEQRADIDAQLPAVMRGLVDGQLQTLAQVQQRIDALEHEIAALQKQLDNAPALREVPGIGLLGSTALAATLGDGQAWRSGREFSASLGLVPAHSGTGGKTRMGKLSKRGDPYLRTLLIHGARSVIEHAKHKPEWLEQMLQRRPPNMVAVALANKMARTAWALVAHGREYQREWKSTPPKGCAAQAAAA

SEQ ID NO: 303214 - protein, 330 aa, unidentified
MDAAGAVVLREQLVNTKESLMKFFKKYPGSLVAVEAGTHSPWISRLLESLGCEVLVGNARKLRAIWTAKDKCDGRDAEMLARFARLDRSLLYPIHHRGEASQMDLAVMRARDELVSVRADLVNHVRSTVKGTGHRVNKCSTEAFSSKSQESIPEGLRPALMPIIEAIEAISEKIRAFDKEIATTMQARHPEAKRLSQVPGVGPVTSMGFVLSLEDPARFTKSRAVGACLELTAKRDQSGQTDKQLRITKAGDEYVRRLLVGCSPCILGVFGPDCDLRRFGLKLAARGGKNAKRRAIVAVARKLGVMLHRLWVTGAAYDPDFLTNRMKQAA

SEQ ID NO: 303215 - protein, 355 aa, unidentified
MREYIAFDSHKHYTLMERQDAQTGRAMQQRLNHQRGALCAGLRECAAGDAVAVEATGNWYWIVGEIEAAGLRPLLVHPRKAKLMMGMVNKTDKLDVHGLNRLQQNGTLPTVWVPPASLRDLRELTRTRLAMTANRTRIKNRLSATLAKHGFMIEASDPFGVGARRQWEGLLPQLPPQTRFVSQQLLGQLDFLSTHIREQEKRLGELLEITPAMQRLKTLPGFGLILAATVALEIGDIERFASNEHLASYAGTTPRVHSSGDKTRYGRLRADVNRYLKWAYVEAANVIVLQKDRWSERHAVRLYRRVQARRGHAKAIGALARHLAEASFWVLKRGEDYREPAIFGPSKTGRSAITA

SEQ ID NO: 303216 - protein, 390 aa, unidentified
MERPMQKLNDLSRSLTALEPNGTLIAVIEMSLSSWLVAGIVPGVERQPLKKLAVDESALLKLLHRWREEAEKAGRRIERIAVAFEAGRDGFWLARWLKARGIEAYVIHASSVAVSREHRRAKTDRLDTELLKRSFLGWLRGERDHCKMVEIPTMQDEDAKRPNREHDSLIGERSRIVNRMKAALVRLGIRGFNPKLKRATTRLDGLHTPEGEPIPPNALAELRRDMERRRLVNNQIRQIEEERLERIEQAPCDGAHVMVRLLARVMGVGIETADMLVHEVLSRNMRDRRAIARYAGLTGSPDESGRKRREKGLARSGNARVRRGMIQLAWRFLLHQKNSALTKWFRSRTENARGTRKPMIVALARKLLIALWRLMREGIVPDGVVLRPAQ

SEQ ID NO: 303217 - protein, 336 aa, unidentified
MTIIRVGLDTSKHVFQVHGVDENEQPVLRRQIRRGAVEKFFAKLPSTRIGIEACGASHHWARLLRGLGHEVLLMPPQYIKAYVKRSKNDKIDAEAICEAMSRPTMRFVPVKTAEQQAALTMLGVRDLLVKQRTMLINAIRGHAAEFGVTAAKGPKQITELLARLASDEDVPGLAREMIGVLASQLNGLDIKLKALEARLMTWHRQDQTSQCLATIPGIGPIGGVSFALKVPDAKAFRSGRRFAAWVGITPREDSTAGRQKLGRISRAGDEDLRRLLVIGATAVIRAAKPGRTAPWLMGLLARKPKKVAAVALANKMARIVWAMMVSGETYRRPAQA

SEQ ID NO: 303218 - protein, 384 aa, unidentified
MIKHNILFIGLDTHKTFTEVAYIEDQRGAKSTHLGKILSNKAAFKKLARQLQSKYPDATLHFVYEAGPCGYWIYRLLTSLQHCCYVISPSLIPKKPGERIKTDKRDALKLAKLLKSEDLTPIYVPEPEDEAVRDLSRARETAMKDLKDAKYQLKALLLRNNINSKVKDNWSLQHLRWLAELILPHPCQQIVLQEAVSTITERLKRLKRLDNELTHQVKSWRYYPVVKAVQAMRGVRLLVATGVMAELGDLTRFDHPRKLMSYLGLVPSEHSSGGKRHLGAITKCGNSRARRLLVEGAHSYKHNANISKEMQLRQEGLSKEVIDMAWQAQLRLCRRYNRLMHKGKHRNVVVTAIAREMIAYIWAISREVVLPVVDVKLRLARMPA

SEQ ID NO: 303219 - protein, 430 aa, unidentified
MHNKNYISVGIDVGSAFSFMTILAPDETVILKPFKITHNNKDSLERAVSEIKKAEELYSLESRTFLEFTGIYHFPLFCYLVDCGFNASIINPIITHSTKNGNIRKVKNDKIDSKGIAKLGLSKDVPVSQFPEKLVLELRSLTRKYYDLTDERSAHINKLKGDLHTVFPQYLDIFCDVTGKTSTMILRQYGTPDKILRGHKKTMIEKISKASRKGLAKASERYEKLCAAANAAKTFGCQIDSIYFNISLTLDLVEKLDSALDSILNRIRQLITFNKNEKFIRQIKLLNTIPGVGFLTAVTIMCEIGDFSAFRNPKQLFAYFGLDPEVSESGKFVGTQLHMSKRGSRIARRAIFAVALASIRTKRNGEGINPYLRKYYELKSVQKPKMVAIGAVVHKVCNVVFAVLRDKKAFELRSPEEHCKQYQRAALAAA

SEQ ID NO: 303220 - protein, 342 aa, unidentified
MEEISIIGLDLAKNVFQAHGATADGSVVFRRKLTRGQVLKFFASQPSCTVAMEACAGAHHWARAIGALGHQVRLVAPGYVKPFVKRQKNDTADAEAIVEAALRPTMRFVAPKTEAQQAAAMAFRTRDLLVRQRTQTINALRGHLAEYGVVAPVGSVHLGRLIAVIEGESGILPGPVVKLAGMLVKQIMTLSEEIGVLEKELRARASSDETIVRLMTIPGIGAITAAAMTTFAPPAETFTKGRDFAAWIGLTPRQHSTGGKERLGRTSKMGQRDLRRLLIIGAVAVVRWAVRRGAPKGSWLGRMMAKKPRMLVAVALANRMARVAWALMAKGGIYRDPAVAAT

SEQ ID NO: 303221 - protein, 475 aa, unidentified
MNLKGTKKKNQVITANIFEQQELLKKAEVIREKLTASTWHELETNGKFGKNEKLSFVSDDMLILGCDVGSDTHYVRAIDTRGRELSKSAFPFSNTLEGFQGLMDWATKLAASNDKEQIILGLEPTGHYWFCLATWLIGNGISVVQVNPYAVKQTKEVEDNSQLKDDRKDPKLIANLVKDGNFGMPYLPEKLYADIRRLSMLRDQINEDRIRDLNRLHREMKIYFPEYKDAFGKIDGAFCLEVLKVAPFPEDLVTLGAEGIRQIWHEAKLRGRGYVNATAIFENAKKSIGIQDGAKSSKLAVKWFVHRMIESNEQLTDIERRLHQMCMEIPYAENILAISGIGENTLCGILAEMGDISRFDDVKEIQKLSGLGLVACSSGKHKGETKISHRGRKRLRYWLFQAAKSAVAHADEFKELHTYYTTRKDNPLKKMQSLIVIACKILRVIFAILTKGTTYDPKKMLRDIVRPNEQSVQVA

SEQ ID NO: 303222 - protein, 379 aa, unidentified
MERIIYIGMDVHSTSYSLCALEPIFGQENKFFFETKVAAEPSNIIKYLDDIESCFANDECTFVTGYEAGCLGFSLYNYLKGRGIDCKILAPTKMSEEKGGKKVKTDKRDARAIAQNLAYGTYSAVFVPTEEDLAVRDYIRMRNDHKAAVKRIKQQINALCMRHGYIYQRTNRTAEHLKYIQGMTLSPLYREILQEYLATMEQLNNKIKAFDVRIEELSKTKRYKDNVGKLACFTGITRSRALAIIAEIGDFRRFLKPLNFAAYLGLVPGEKSSGKKQNRTAITKAGNSHIRKELIEAAQSICRGLPGYKSRALLARQQGNDTTVINYADKASARLRRRYYKLGRCGKKHNVAVTAVARELSCFICGMMNGLTDVQIKKA

SEQ ID NO: 303223 - protein, 324 aa, unidentified
MSDSILGIDVSKETLDAYCARGQRKQGRTFANSPDGWKLVRAWLKAMGSKQAHVCMEATGRHSLGVALALHEAGHVVSVVNPAQIRDFARTKLGRNKTDKVDAALICEYAELFKPGPWTPPSPAMRRLCELQTMRAGIIRSRAEWKNRIGSGLGDSTATKLAAATIDHFTSQLEAIDRAIGETIEQDAELRGRRDLLLSVIGVGETLAASLMAEMPEPGVLRRSGEMVAYAGLNPSHHRSGTSIDRRTRISKIGNATLRSSLYMPALSAMRFNPAVAILVARLKSAGRLKPKQIVVAAMRKLLVLCFGVLKTGKRFDLAIAMPA

SEQ ID NO: 303224 - protein, 428 aa, unidentified
MDVLHPRCCGMDISKTDAKVCVRVQEGARVATQVTTWGATSSQILALGEHLVAERVSLVVMEATGDYWKPFLSLLCDAGLEVMLVNARSARQIPGRKTDVADAQWLAELGAHGLVRGSFVPPGHVRVLKDLVRTRTVVVRLRGEEAQRLDKVLESAGVKMSTRISDITGVSGRRMLDALVAGQRDPAVLASLADPRVKASPEDLREALTGRFGDHHAFLAKVHLDLVDQYTVQVEALDARIEACFVADDHDDEQTQQTKTGMAAARDLLATVPGISTTTAEKVLAEIGPDMSVFPTAKHLTSWAGVAPGANESAGKVRSTRCRPGSTYLKGALGIAALAASRTKDTFLAARYRRVRSRRGHTRALVAVERSMLVAVWTVLTTGQPYTDLGGDYYTRRRPGRAIANAVAQLRAAGVDVTFTSTNEAMVT

SEQ ID NO: 303225 - protein, 345 aa, unidentified
MKQYAGIDVSLEYSSVCVVDADGRIVREAKVLSEPDALIAWFCEYGVAMERIGLEAGPLSQWLYAAMAKAGLAVELIETRHVRAAFKTMPVKTDKKDARGIAQLMRLGWFRPVHCKSLPAQEVRALLTARKLIQGKLHDIEMSIRGILRGFGLKVGPTTRRTYAARIGELIEGHPTLEAIAASLLKVRAALMDEFAGFERKLRTMARQDDNARRLMTTPGVGVLVALTFMSAVDAPERFRSSRAVGPHFGLTPKKYQSGEIDYSGRISKVGDVGVRTALYEAANVILTRPVKGSDIKSWAVAVARRAGPRKARVALARKLAVVLHHILRDKTNFIPHRATPAMAA

SEQ ID NO: 303226 - protein, 423 aa, unidentified
MDVMRDCVAGLDVHQAMIVACVRRQSGGKASRDCRSFDTTTDGLLVLLAWLTEAGCTHVAMEATGVYWKPVWAILSDGAFELVLANAAHIKNVPGRKTDVNDAMWIADLLACGLIRPSFVPDEPTQELRALLRTRTQLVREQARHTQRIHKTLESANIKLSSVVSDIMGLSGRRMIEAMIAGVRNPAKLAELADRRLKATRKELYDALHGRLTEHHRFLLHLHLSQFDALAAAIEQIDIEVQASITRMDEEVAEGQATFLSLIGLLYTIPGVSRHAATVILAEIGQDMSRFPTAGHLVAWAGLCPGQNESAGRQKSSRLRKGAPWLKTLLVQCAWAATRKKDSYYRAQFHRLRARGGAKQAICAVAASILTAIYHMLKNGTKHVDLGATHFDQRPTLVKAKRLAARLEKLGFHVELHPIQSAA

SEQ ID NO: 303227 - protein, 408 aa, unidentified
MLVHGGVVPPLVAVAVDVGKRSAALSVTDAARCQLLGPVEFTMTASGLREVTARAAQVVPAGVVVRVGVEAAGHYHLPLAAPAVWPAGWQVVELNPAHVSEQRRVAGRRRVKTDAIDLEAITELLLAGRGVPAAAGDAVLLELAGWAAHRCRRAAARAGLKNQLLGQLDRSFPGLTLVLPDVLGTRVGRLVAAEFPDPARLAALGASRFVRFAAVRGLRVRQEMAGRLVGAARDALATAQADAARQVLAADLALLTALDTQITAAEAELARLLPASPFAPLISVPGWGVVRAASYGAALGDPGRWPSPRQVYRAAGLSPAQYESAGRRRDGAISREGSVTLRRALIDLGIGLWRCDPPARAYAAALRARGKHGGIIACALAHRAGRIAFALVRDQAPYNPSRWETTGP

SEQ ID NO: 303228 - protein, 361 aa, unidentified
MPGTMTYVGFDVHARSAHAAAIDVMSGELTRMRFGGGVAAPVQWLQSLSGPVKACYEAGPTGYGLYRAAVAAGITMEVIAPGKTPRGPSDRVKTDRKDAELLARCLIAGSLTAVMVPPPAVEAAREVTRAHDACRRDLMNARHRVSKMLLRHGRVYPETSTWTQAHRRWLAAQQFSEAMSAFTYAELIAAVDGLSARKKMLADRIGVLATDPTWWPTVTRLRAFRGIDTLTALGIHLELGGDWARFEKPTRVGSWLGLTPSRQQSGESDRQGSITKTGSMLARRLLVESAWQYAREPRIGATLANRQDGQPDHILAISNHAQQRLHHIYTSMKARGKPHNVTVVAVARELSCFLWAAATAP

SEQ ID NO: 303229 - protein, 375 aa, unidentified
MRNKVRFLGLDVHAETIAVAVAEPEGEVRSLGTIPNRAESIRKLIRKLGPADQLRACYEAGPTGYVLYWQLSELGVDCAVIAPTLAPVKAGDRVKTDRRDAERLARSHRAGDLTAVWVPDAASEALRDLVRAREAAKQDQLRARHRLGKFLLRQGQRPVTGVKAWTTAYMTWVWQLRFTQSAQDAARLDYLHEVEHMVERIKRLEESIREAVQQAPPQIQAVVQGLQALRGIALISAVTIASEVGAVSRFQNARQLMSYSGMVPSENSSGKRTQRGGITKSGNAHLRRILGEAAWSYRRRPAVGVALRKRQEAVPEEIRQIAWKAQVRLSKRYARLAAAGKDQRKIVTAVGRELLGFVWAIGVWVEASVAQAKAA

SEQ ID NO: 303230 - protein, 348 aa, unidentified
MDTQSDRDAGIVGGVDTHKESHTVAAVDGAGRLLGTSEFPATASGYRALLDWLGKRGAVSRVGVEGTGSYGAGLARYLAQEGVLVVEVIRPNRQLRRRRGKSDPVDAEAAARAALSREADAEPKSADGPVEAMRMIRLARSSAVKARTQAANQIDALVTCAPQSLRSQLKDLTLLRLTQRARRWRPGDIQEPLSACRATIKGLARRWSQLGAEIAGYDEQLLRLTRLVCPELLARLGVGFEVASSLLVAAGDNPDRLHTEASFAALCGVSPLDASSGQQRRHRLNRGGNRNANRALWVVAMTRLRVDARTQAYAARRTKQGRTRPEILRCLKRYIARELYPILLGATD

SEQ ID NO: 303231 - protein, 342 aa, unidentified
MNKYNTIGVDLAKNVIQVCVVSSANKELQNKELTRKKFAEFLIKQKPALVAFEACATAHYWSRVARRHGHETKIIPALAVAPFRQGHKTDQNDALAVAEAAKRPNIKEAPIKTVEQQSMQAIQRSRELLIQNRTALSNHIRGLLMEFGLVIPRGFASLHENIPWILEDGENELPDSYRPTLNLLYERLCALRDDLAFLDQQIAEVVKENVACRRLTQLEGVGPISSILLFATLGTGEAFKNGREFSAYLGLTPKQYSSGGKTNMIGISRRIANKRLRAVLIQGARAYVHRIKEPKTMKDQWLLALIQRAGYGRAAVALANKNVRTAWALLTKGCEYNKVQYA

SEQ ID NO: 303232 - protein, 322 aa, unidentified
MGKSITDLSSVTTVGLDLAKHVFQVHAIGAFGRVIVAKALRRKDVLAFFAQLPECLVGMEACGSAHHWARELIKLGHDARMMPPAYVKPYVRRQKNDAADAAGICEAVTRPSMRFAGVRTLENQAVLMHHKAREMLVAQRTQLINALRGHLAEIGVIAAQGLKNARELTRVILAEGDETIPACVRTALAPLVRQLHVLDQEIACSDRTIAAMARGDKRARRLMTIPGLGPVTASAIAASVQDFSTLSGPREFAAFLGLTPRQNSSGGKERLGRGSKMGNRYLRKLLVVGAHAVLYHRKSHEDAMLSWAKKHRLRDHARRDNL

SEQ ID NO: 303233 - protein, 348 aa, unidentified
MRFYTNQHKFYCGIDLHARSMYLCILDQEGNTMFHRNCRATPDDFLRAIQPYREDVVVAVECMFVWYWLADLCSQEAIPFVLGHALYMKAIHGGKSKNDKIDSKKIAALLRGGTLPVAYVYPATMRSTRDLLRRRNHLMQKRSELLAHIQNTNSQYNLPEFGKKIAYKANRDGVTDHFPDPSVQKSIEVNLQLIDSYDRLLTELELYIVKQAKGHNVRSFYLLRSIPGIGKILSLILLYEIHDINRFPRVQDFVSYCRLVKCTRESGGKKSGAKNSKIGNAHLKWAFSEAACLFLRGNEQAQLYHNRLVSKHGKGKALSIIAHKIGRAVYFMLKRKEPFSMDTFFART

SEQ ID NO: 303234 - protein, 466 aa, unidentified
MKPFYMGIDVSKGYADFMIIDAQKKPVIQGFQLDDTFVGHQALYNIVGRFLSKHSDSMLFVGMESTGGYENNWYNSLVAFQGSLGIQTARLNPLGVKRNSQADLKKNTTDKISAQNIAEYLVAHPEKVTYQQQDQLVGLRKQWGFIQTLTKQRTQFLNQFKGLLYTSNPELLRYCQTETPAWILKLVVKYPSAAKLKRAKVKTVAKIPYLPKTKAQQVVADAKRSVASATDMATEQLVVATAQQIIHLNKTIDGQTRRMIEVCAVPEVELLKTFSGINDKSAIGLIIEIQTVERFENAKKLASFFGVHPVYKISGDGVGGIKMSKQGRKEPRHILYMVTLSALNCNPLIKKIYEKHQKNGKHNMAAMGICMHKILRIIYGMLKHNKPFDPRIDIANRRRGMQARKASPKRNPSRRFQAYDTKAPVSRRQKKKRLERDRSHSVPDTKSGITAPVPVGDIIANILPEL

SEQ ID NO: 303235 - protein, 352 aa, unidentified
MTVTIVETPTQARAITGGVDTDADVHVAAALDPIGGLLGVQEFPASPAGYACLLGWLGEFGTVCLVGIEGTGSYGAGLARHIAAAGIRVVEVDRSDRQDRRRAGKSDPLDAVSAARAALSGRAAGMPKGRDGQVEAIRALMVAKRTARSERIQTINQARSLIVTGPDDLRARFAGHSADDLVAELASLRPRPGSMIRYHTLLSLRELGRRVVFLDGQLQRLDALIVPLVTARAPGLLALYGVGHDTAAKLLIAAGDHPERLRSEAAWAHLCATAPIPASSGKVTRHRPGPGGDRQANHALYRIVITRMSSHPPTRAYVDRRSKEGLSKKEIIRCLKRYVARQVYPHPRPGAR

SEQ ID NO: 303236 - protein, 311 aa, unidentified
MFQPRVHVGVDIAKATFAVRFLSRDLEFANNPAGQQAFCQLLREHAGLVQVICEATGGYERALVLALHRCGLEVSVVNPRQVRDFARARGQLSKTDRIDAAILSEYGAALQPAADLAPSPQQLELAELVSARQVLIELINAETSRQEHSTAQVLQRQHRARLQQLQRHLAQLQALIQGFICADAVLSAKSERLQAVQGVGPVTAATMLALMPELGTLKATQAAALAGVAPRARDSGRYKGQRRISGGRGAVRRVLYMSALSASQHNPILRAHYQTLIARGKLHKVALTALMRKLIILFNRLLADPNFQLAG

SEQ ID NO: 303237 - protein, 368 aa, unidentified
MNSIIYVGMDVHTTNYTLCCFSPDSDKVFAVAQVEPDYLNILKYLKRVEKNIGKPCRFLCGYEAGCLGYSLYKQLAQAKVECVILAPTTMMRAAKEIKTDRRDAEKIAKCLAFNTYKPVYVPTEEDNAVKEYIRMRDDAKAAAKRYKQQILSFCVRHGKYYDGKGHWTNKHIAWLSSLDFGNEILQETFQEYLRLLGQTLEALERFEKKINEISNSDKYAENVRKLNCFLGIANVIALAMLAEIGDFSRFSTAGQFASYLGLVPGEHSSGEKHCRCGITKAGNAHIRTLLTEAAQCYSRGRTGTKSLTLKRKQAGNTPEVIAYADKANDRLRKKFHKIMNQSNRNIAATAVARELACFVWGMMTNRIA

SEQ ID NO: 303238 - protein, 428 aa, unidentified
MSYRIAGIDVHKKMLAVVVSDVEIESEFQFERRMFSSNPEQLRSLAAWLVEQKTEEIVMESTAQYWKPVWETLERYWKPLCEKREGTRRRSGTLHLAQALSNRGRRGRKRDFVDAERLVKRLVARELTLSFVPDAEQRLWRTVTRKKYQLRRDVVRLHNQLEALLEEAHIKLSSLVSDLLGVSARRMLKALADGETNPAALAALAHERLRATPEQLCDALGACRELKPVYRRLLKMALEQLQLLEQQIGQLDHELATLLHPHQDAVERLAEVPGFAVDSAQQIIAEVGPTAATFPSEKCLSSWVGACPGEEESAGVNYSHRSPKGNRHMRRLLNQTANAAVKAKGSIFEIIYRRCVPRLGHNQAIGVIAHRQCRLIWLILHQGTRYEERGPAVTKRSRYQRTWRMIRQLRNLGYRIELPNPQASQAQA

SEQ ID NO: 303239 - protein, 385 aa, unidentified
MSQYSGSSQAAIDYNSTIIGALELSGKKWVLAVQLPGVSRHSRHVLDAFGDGLVSFIERLKARSVAAGRKITRVILTHEAGRDGFWLARFLARRSIEVHVMQPSSLPVDRRARRAKTDIIDVEMLLRTLMAWLRGEPRVCSMVPVPSEAEEEARRAYREREDLTGERRSIVNKIGGIFATLGVKGYKALRRDRREQLNCARQPDGEPIPPKAKARIERLLDRLDLVLKLIERVESERDAVLKKDAPADEAEGMIRSLTDLRSIGPSVATLLVREAFVRQFRNRRALGGYVGLGGTPFSSGGSEREQGIGKDGNRRVRAAMVELAWTWLRWQPDSALSVWFRARVGAMGGRIRKIMIVALARKLLIALWRYVTDGVIPDGAKMKAA

SEQ ID NO: 303240 - protein, 457 aa, unidentified
MDKQKQEKEKSKRVSVVKMPVVNPDAAGIDVSATMHAVAVPPGRDDVNVKEFGAFTEDLLTIAEWLKKCEVTKVAMESTGVYWKQLYLVLIEHGFEVALVNAKHVKNVTGRKTDMDDAQWIQKLHSCGLLTSSFLPDDTTESLRSLVRHRKKLIDDASRYVLRMEKALELMNVKIQSVISDLMGKTGTAIVEAIIAGERKPENFMQHIDYRIKADHEEIKKSLQGNWRDEHLFLLEENYKLYGFLQERIISCEKEIEVHLQKMVAMNNEGVIEELPKEGVLKKTKVKKSKNQPKYNVREYLLKIHSVDVIDIFGIRESSALEILAETGTDLSKWENEKKFVSWLNLCPNNKITGGKLISSTVLKKKAGLATMAFRAAANSVQKSDHWLGDYFRRKKAKGGNKYAVIATARKIAIIYYKMVRYKQGFKPMDADEYRENYKAAKVAWLEKQLAKLKAAA

SEQ ID NO: 303241 - protein, 415 aa, unidentified
MLKIVYPICCGLDVHRDFVYACIATTVNGVTTYKSHRFSTFTKGLRELLSWLLASNCKDVCMESTGKYWIPVYNILETDCKIVLAHPKYVKAIRGKKTDKKDAKWIADIFKHDLVSGSFIPPADIRQLRDLVRYHAKLTNFTTGEKNRAQNCLTVSNLKLDSVFSDVFGKASSKIISHILANPSEKLSDVSAFRTKGMKATDEEILEAVDGEIYPEQAEKLRIIRDHMSSLDFCKANLQSLILSTAEKYIPEIDLVCTVPGIATFSAISVIGEIGVDMSVFPTSKHLCSWAGLTPQNDQSAGKKKTTRISRAGAYIKPLLVQCALAAVKSKNKHPEVYNRYSALKKRRGHKKATIAIARMLLTAIYNILKKHEPYNAEIYRKSDAPPEHRNVSVEEAIFILQRQGYLISSPVSIE

SEQ ID NO: 303242 - protein, 312 aa, unidentified
MLYAGIDIHKQVFQAAVLDPETGELRESRFAATREKLDDWAMQWQGRLAAVAIEATTGWRWVARELQQRGLEVHLVDPGRASALQGRRRRPKTDRLDARWLAMVLARQLLSECEAWLPPAEIQRLHALLTHEGWPCARGRLLTVEGRRWVDGLALDPCVRAQVDVMLTMITALQQQLELLECELRRFARSDRRCQALQTIFGVGPILACHLLAEIGDARRFSRARQLVRASGLDPIVIESADSKRRGRLAKQGSRHLRWALVEAAQHAHRTTSPDRALYVSAVRRCGRGRARLTVARKIAHRAFHVLAVEAA

SEQ ID NO: 303243 - protein, 377 aa, unidentified
MRMAIGIDVHKDNCAACAVYAGTGEPPQRHRDNLEKFNKDFRRFSSDAKGMKELAGRIRDHDAYVLIENSTKSHDVYWMLRNLDIRVTVAHAADLYRITKSKTKNDDNDAMELAGYMRRKLLGEIEFAESHIPPQDVLLQRELCRFSLGDRFELSSLKRRIRSHILIRGLKLKREYDDITCALALAELKATRDHVLCLDAAKAEGLKIRDRQTERMIWLKMMSNRMFDIIWSIPGFGILSAAYVTCMTDDMKRFEDGRAFAASTGITPKLNESADRAKNCGISRRGDADLRRLLCQATFVHISHADSFITEKYKRLKARGKHHNEVLVACANTMARMIWTMVTNDTKYSADPSVLVKTRTLANSYEIEEAMEAVEKG

SEQ ID NO: 303244 - protein, 405 aa, unidentified
MRTEAMFAGAFTGKQDVTLCASVELGSTGWLVTSRASNQEKMQRTRIAANDWRGLIGVLQRQQKARQAGRVVCGYEAGREGFWPYRALQQAGMAAYVLDPASLAVSQRGRRTKTDRTDGVLELEAIEALECGQRTAGRPVVVPSADQEDARQPSRTRGRLVKERTALIAYIKSALARMGAELPVANQPGWIERLAGARQWNGQPLPRHLMRDIEFAHARLMLVCRQIDSLEAEQRAAVIACQAGGKRRQLKTRQAAQAWQAQASPAERGVAGLAERMHRLKGIGRIIAFNLAGEVYWRDFANRRQVGGYVGLGGAEHSSGAQRRELGISKAGNRRARFILVEAAWLWVEHQPDSTLTQWFKSRAPKGASARQRRVAIVALARKLAVALWRYLEDGIVPQGATMEA

SEQ ID NO: 303245 - protein, 308 aa, unidentified
MVNIGIDASKAELMLGTGAQTFKLRNDPSRLKAWASSLDKDTRVGVEATGRYHRPVLHALHEAGISSYLLNPMYVSRYIKSLKPKVKTDRTDAIFIARYLEREHDLLVPYKMPSPEIQELKDLLSFRETLVEKRVALRQSLSEQTFRLTSQSNLDAGFKSMLVELDARIESVAKSLPLYKRLLAIDGVGPLGAAALTWLFASHEFASSDQAVAFVGLDVSVRQSGKYVGKSKLTKRGPAFVRAFLYNGANSLRNLEDLKPLFEHHAKKGLSATAVNNLVARKIVRIAYAHATKPEAYFERKNLLPQLT

SEQ ID NO: 303246 - protein, 310 aa, unidentified
MITPDVIGCDIAKAHLDLFDSGCGRHCRIFNTPEAISAWLASLENRTVHVVFEATGRYDGRLRAALEAAGHPYSRVNPARARDFARALGLLAKTDVIDAQLLARMGQSLPLATQAPDDPARRSLARLHGRRDQLVAIRQQERTRLHEAEGGERTSLESHLVWLDTEITRIEMLCRERLRADEELYRQEQQLRSIPGVGPVAALTLMTLMPELGSRGPKAMAALAGLAPFNADSGTLRGQRHIRGGRKRVRDALYMAALSASRMQSPFRAQAETLRSRGKSFKVVIIAIARKLLTIANAIIRDQTAYKAAG

SEQ ID NO: 303247 - protein, 412 aa, unidentified
MEVYCGIDWAEDHHDIALADRDGKLLARRRISDDAAGLAGLLDLLAEHGDTPEDPVPVAIETPRGLLTACLRATGRPVYPINPMSVARYRDRHSVAGRKSDHGDSFVLANVLRTDLHAHRPLPADSELAQAIAVLARAQQDAVWDRTCAHNKLRSCLREYFPGFLAAYANARGGITRPEARAILAAAPTPADAAQLTVPQLRALLRKAGRRNRIDAEAARLREAFHAPQMRQLPLVEDAMGHQALALLRQLDAACAAAADLEHAVTQSFNQHPDAGIITSFPGLGALTGARVLAETGDDRSRFQDAKGLKAYAGAAPITRASGKTRSVTCRRVKNNRLNAAGYSWAFSALTASPGARAHYDRRKDAGDRHAAAQRNLFGRLLGCLWHCLTTGCEYDETTAFPTTPEKLPRAA

SEQ ID NO: 303248 - protein, 332 aa, unidentified
MDRVPVFVGIDYHPSVVQLCVKDAAGRDLGRARVGDSCEEIFQAVERFGQARRVAIEACCGAADLGEELADRYGWSVDLAHPGYVNRMRQTPDKSDLTDAQLLADLTRVGYLPKVWMAPHAVRELRLLVRHRQGLCNDRRDTKLRLRALLREQRVKEPPRPWTRPWLAWLKTSDAISAQGRWVLDEHLAHLEYTLARIKAAEAHLEQLTKGDQVVARLLEEPGIGRVTAWTLRAEIGRFDRFRNGRQLSRFCGLTPRNASSGKKQADAGLVKAGNPQLRAALIETAHRLARYVPRWKDMKQRLKGRGKSGSETAAAIANRWTRGLYHRMIAA

SEQ ID NO: 303249 - protein, 423 aa, unidentified
MDILYERVAGLDVHKDTVVGCVRIAAGGQTQRECRTFATTTEGLTALAAWLEESGCTHVAMEATGVYWMPVWKILGQGDFELIVANAAHIKNVPGRKTDMNDAMWIADLLACGLIKASFIPPEETQELRSLTRTRKQLVREQTRHAQRIQKTLAEANIRLDSVLSDPMGASGRRILEAMIAGVRQPGKLAELASKQIKATPKELYDALHGRLTDHHRFLLDLHLRQWDGLDAAIRNIDREIGQRINRMEAQIGTEKAPFRALIDLLHTAPGVSTVAAPAILSEIGHDMSRFATAGHLLAWAGMCPGHDESAGKRRSSRLRKGAPWLKTMLVQCAWAAKRKKGSYYRAQFFRLQSRRGPQKAICAVAASLLTAIYHMLKYGVEHRDLGDAHFDSRPPDLKAKRLVAQLAKLGFAVQLQPLTQAA

SEQ ID NO: 303250 - protein, 331 aa, unidentified
MNYSHFVGLDVGKKTFDASLMSAAEKELSHKSFDNTPEGIQSLLDWIAGYHLSLSKLLFCAENMGSYVTELSVSSVSMGFSLALVCPLTIKKSIGLQRGKNDRIDAKRIANYAVLHYRKLELYKLPNKDLVRLRGWIIIRDNLVKQKVSSIKLLETFSQMAKLADVTESISFLEEQLKSIKEKILEVEEDMEQLIAASTSLYTNYLLLRNIKGIGIINAIVLLCVTNNFQRFDNPRRFACYCGVAPFEHTSGISIRGKTQTSSLANKEVKVYLTRAAITAISWDPQMKAYYKRKIAEGKHKASVINAVRAKIIARSFAVIRRQTPFVTLAV

SEQ ID NO: 303251 - protein, 341 aa, unidentified
MYSIGLDISKASISVHIPINSLNIEIDNTLIDFKALYSKLKKLYKKDLDKLTFVYEPTGSYSFLTKKFCASKSIKSFIINPKQSSNFAKALGNRSKSDKIDAIMLSKAITIARTDEIRVPIIDDTLETIKEMMSYYKFTVKQRVALSNHQEALSCKDGNKYTLKDIAKRLKSFRDKESEILEKIKEIIEANDKLSTAYSNIQTIPGIGKIAGIVLVHLFISYPNANKNQIVSLTGLDPIIKDSGTSVKSKPRISKAGIKLYRGSLFMATMVAIKYNEQMKDFYNRLKDNGKHSTVAQIAVMRKLIVIAHSLYKNNCIYDVNTYNKACGKYTIKCDENGVIT

SEQ ID NO: 303252 - protein, 483 aa, unidentified
MISSVGIDLSRTGRHQVCCLDEQARPCDSFSFDSTLEGLETLERHVFSNCVTPTIVFEPTGLAWIPMAVYLRARHPDCRLVKARLQKVAALRRYIRSRAKSDRVDGVTLAKMPFIDAEQLDEAYLPPAEYHALQRLTRQRERLVKSITVRKNRIGSIIDGYLPGLRKAFSDDWSDRARAFYRELLNPFAVVSDGKDALEAFLARVKARGAQAKSHRVYQACRDLLELYERAKAAGMINRDFFNDLQDEIACELRLMEVEETEVERVSKRIEEIYRQLHPADHLRTIPGIGQRTAQVFLAIIGDPHRFRNQSAFANWTGVVPGARQSADTEGKGLRMTKAGPSMMKRALYQAGDIARRYDPQLADLYYREMVHHGKTHLQAMGAVMSHLGARILTVLREGRPYELRDTQDKPISKREAIEIIQSQFKVPEETRQARRHRKSNVGRLASRGTREAAKAPQSRHTSTSPVTVYLAEDKQSIGELMA

SEQ ID NO: 303253 - protein, 351 aa, unidentified
MTVTIVETRAEIRAITGGVDTHADVHVAAALDPIGGLLGVREFAATTAGYARLLDWLGGFGTVCLVGIEGTGSYGAGLARHMAGAGVRVVEVDRSDRQDRRRQGKSDPLDAVSAARAAQSGRARGAPKGRDGAVEAIRALMVARRSAARERTRAINQARALVLTGPDDLRARFARHTAAALITALASLRPRPGDVAGHATRVALRELGRRAQFLDGQLELLDELIDPLVTAHAPGLLALYGIGPHTAALLLIAAGDHPGRLRSEAAWAHLCGAAPIPASSGKVTRHRLNPGGDRQANHALWRIVLTRMSAHPPTLIYVERRTKEGKSKKEIIRCLKRYVAREVYRHLRAAG

SEQ ID NO: 303254 - protein, 343 aa, unidentified
MDHFAGLDVSVKETSVCIVDDTGKIVREVKVVSEPHALLVVLKNPAYHFKRIGLEAGPLSQWLFSALADAELPVICVETRHMQAVLKAQINKTDRNDARGIAQMMRAGLYRPVHVKTLRSQKLRMLLTHRKLLQSKAIAIENDLRGTLRNFGLKVGMVGTVKFEPRIKELIENLPDLAVLVEPLLLVRRVLREQITILHRRLLAIVRDDEVCRRLMTTPGVGPVVALTYRATVDVPARFRKSKAVGAVFGLTCSKYQSGEIDRGGRISRCGDEMMRVMLYEAAQSMLRSKKWSWLKAWAMQIARRRGMKKAIVALARRLAVIMHRIWVDGTEFRWTREAAAAA

SEQ ID NO: 303255 - protein, 323 aa, unidentified
MKKHSNSPKMSEPRSKSQGPVQRDTKEVLAELVGQLRKKLDPKARAASTGEEHQQGRPRPNLNRLTVGVDLGDQWSHYCILGLEGETLTEGQLRTTKQDVAEFFETLNAAGIVLEVGTHSAWVREIICSYGHEVLVANSRSMEGAKRRKRKNDRIDAHKLARLGRVDPQSLHPIEHRSAEVRQDLVMLRARDALVAARTQLINATRGLVKSLGTQLPKCSSPSFAQKVEEVVPAELGNALLPLVGLTVALSDCIKEYDEKIEILAREKYGHTALLRQVKGVGPITALAYVLTLENPQRFVKSRDVGPYLGLVPKQEDSGELVP

SEQ ID NO: 303256 - protein, 337 aa, unidentified
MTKIVLIGLDVAKHVFQLHAVAADGRVVFRRQVRRPQLTTLLMSIPSCRIAMEACGTAHYWGRQLEELGHEVLLIPPDYVKPFVKRQKNDVADAEAIAEAAQRPDMRFVRVKSEVSQAASVVFRARELLVRQKTQLLNAVRSHLAEFGFIFPQGAAASAKMQEVIESDDDLPPAAQGILRSLLRHLSSCEAQLVEFDKEIQKRARDDLDARRLTSVPGIGPVTAAAIAALAPDPATFRKGRDFAAWVGLTPLERSTGGKQRFGRISKMGERTLRRLLIMGASAVVSWVRRGKIHPSAWLASILHRKPPMLAIVALANKMARVAWAILKHGGSYMQPA

SEQ ID NO: 303257 - protein, 343 aa, unidentified
MKYVGLDLHKRNIFATVLDGDGNILSKANIGSKREDLSHYLKRQGGGNDLSVAIEASYNWLYYFRILETITDNITVAHPLKTRIIGEAKVKTDKIDSKVLAYMLKADMLPRVYIPTRISMENKLLLRSRISLVRVRTQIKNKIHTIIDRNKDSYSGLENLSDIFGKTGTGILKDTEISQPDYMILTNYLDLIKDINKKIADIEAEIDRRIAPDKDIELLKTIPGVGKFTAFILKSEIDNIDRFISKEKFASYAGLIPSVHQSGSKSYTGKITKQGNKFIRWALAESAHSAIRYSEYFRYHYNKVKARRGANSAIIAVARRIAEIVYVLLKEKRGYIEKQVIYS

SEQ ID NO: 303258 - protein, 310 aa, unidentified
MKTKVFVGVDVSKDSLDVAIGAEKQILTFANDQKGVDALIEKLSRIGPELIVFESTGGYERLAASSFVEAGLPVVIVNPRQVRDFAKSAGILAKTDAIDARVIVRFAAAVKPDVRQLKDRETLELTAMVTRRRQIIEMIVAENNRSKLANKRSKKDIKDHIRWLEKRLDKIESDIDKMIQISPIWRCKDNILRSVPGIGPITSASLICDLPELGVLSPKKIAMLAGLAPLNCDSGKFRGRRRIWGGRSSVRSGLYMATLAATRCNPAIKIFYQRLTAAGKCHKVAITACMRKLLIIANAMLRDQTLWQQN

SEQ ID NO: 303259 - protein, 419 aa, unidentified
MGKRRNRVCGADVHKDLIVATIDSSDGTEIQEQFGTTRSELERFRDWLIANNCEQVAFEATGVYWFPVYDCLSPSIDTIVANPWMVKGLLGDKSDSHDAKRIAGNCLDGKIKRSRVFSNEDRALRMMTRARSGYTKTQTQFRNRVHKYLALCGIKLSSCISDIFGKSGRIILDGLVEGKDADSILDSITSKKIKKKRDIIKAALANGLDDTSRMIVKDNLELLDLLKKKIEKTSLEVLSKFQKSAKDLAIVMSIPGISFRSGSTILAEIGDYRDFQTPEQIAKWCGLVPGLNESAGKKKQCGITKQGSKNLRTMLVEIAQVIAKMRNNKNKLSRYFHRLSARKCYNVAITALARKLITIIYHLLINQELYQENNCTTAASKPVKRDLLYLSKDERLKDGVAAIVDAFYHLKNRYSVGGG

SEQ ID NO: 303260 - protein, 423 aa, unidentified
MNKQNTTYTAYVGIDWADKKHDFCIRSAHESDSSKTFGVIPHNPAKIEEWVLSLQEKYGGKMAFAMELAAGPIVYALQKYDFIDIYPIAPTTLAKYREAFSPSRAKDDPTDAELALDLILRHPERFKMLKPQSTEMRSLIALVEQRRKLVQDKVRVTNRIRSTLKQYYPQSLEVFDRIDTFTFCDFIERWPTLDNVKRARQSTITSFFKDHSIRRKDLIDKRLELINSSMPLTKDKAVIATNSLQALVHIDLLRTILRSIKKYDETISELAPQHADYALFESLPGAGPSLAPRLLAAFGEQRERFTSAAELQQYAGISPVTERSGQKHWVHWRWHCPTFLRQTFVEWSAQTINKSFWAGAYYRQQRDEGASYNAAVRSLAFKWIRILFACWKTNRPYNESQYLSALQRRGSPLIANLGTVENA

SEQ ID NO: 303261 - protein, 349 aa, unidentified
MVVVGADVHKRTHTFVAVDEAGRELGHKTFQATTPGHQAAVMWARERFGTGLRWAIEDCRHLSARLERDLLTAGQSVVRVPPKMMAEQRRIARTRGKSDPIDAAAVARAALREPGLPAASHDEVSRELKLLVDRREDLVQHRTATVNRLLWRVHELEPSWAPKARSLDLAKHQQLLAGRLAGLPGVVAELARDELADVIDLTHRVNDLERRISALAARSAPALLALPGVGALTAAKIVGETAGVTRFKSEAAFARHAGIAPIPVWSGRTAGRVRLTRSGNRQLNAAIHRIAVTQIRLDGRGRTYYEKKKAEGKSTSEALRCLKRRLARIVFNHLTTDQAATPTLHTQAA

SEQ ID NO: 303262 - protein, 500 aa, unidentified
MKTDEPLERACPRVSVVLGHVDDIGEIAQATIPFERVSTTTYPNRRGIPNVMMEEGMARRKRAVLELAHPNAAGIDIGSASHFVAVPADRDDEPVREFKRFTDDLNALADWLRQCDVDTVAMESTGVYWIPLFELLESRGFTVYLVNARHVKNVSGRKSDVLYCQWLQQLMSYGLLSGAFRPKDEICALRAVSRQRDMLLSYQARHVQHMQKALAQMNVQLANVISDIVGDTGQKIVRAIIAGERDGRVLAKMKNVRIRASEADIEKSLRGNWRPEHLFALGQAMTLFDAYGEQLAACDRQLEVMLAALQQDDVGEPGKAKRRSRARNAPKFDVRAYLFGMCGVDLTRINGIDTTTALKVISEVGPDMSRFKSAKHFASWLGLCPGTKISGGKVLSGASKRTANRAAQALRLAAAALRSSQSSLGVYFRRLCARLDRAKAITATAHKLARLIYTMLTKGTEYTDQGQDYYEERYRQRVMHHLAKRAEKLGLQLTPIPQVA

SEQ ID NO: 303263 - protein, 328 aa, unidentified
MFYLGMDVAKAKLYCCLLLDEASGKRKTKVVKNTQSGIVDLLAWVAKQNVSPETLHIVMEATGIYHEQAAKALADAGVMVSIINPAQVKDFGRGLAVRTKTDGVDSVVLARYGALLKPKAWVPPPQEARVLQALLVRREAITQDLQRERNRQEKAGATDTPALIHKSLEESIGFLAKQLAQLQKDIDEHIDKHSNLQKDRALLQSIPAIGPQVGSNLLSVIHNHDFGSAEQLAAYLGLVPVERQSGSSVLGRARMSKAGPARIRAVLYMAAVVGTRYNPHVKAVYERLLARGKSKMSSLGAAMRKLVHLCFGVLKTQQPYQYDYLKNA

SEQ ID NO: 303264 - protein, 447 aa, unidentified
MNAVGIDVSKGKSKVAIIRSYGEVVAKPFDITHYPDQLAELAEYIHSLEGESKVVMEHTGKYSGPIADFLCDAGIFVCMVNAKLIHDYGGDTIRRDKTDKVDALKIAGYCLDKWTKLSRYEPVDDKRKMLKTYNRQLSEYTKIKTMLKNNLISLLDQTFPGVNELFSSPARVKDGHEKWIDFVAAFPHCHCVVSISKRTFVAKYEKWCRKNGYNFCPHKAEWVYSAALNCLPTLPNDHFAQTLIIQTVNQLNNLCQTVAAVKAQMSELASALPEYDTVLAMHGVGKTLAPQLIAEIGDIRRYPKRSSLARYAGIEPPENQSGSYNQHSRRISKQGSPHLRKALFQVMCCVLQNSNSDEPTFQFLDKKRAEGKPYKVYMIAGANKFLRIYYARVNECLDSINQSGISGLIIGNNMNTCKQDMAMPEGNQNGYAGFAIPTAEKIAARIC

SEQ ID NO: 303265 - protein, 434 aa, unidentified
MKILALDLGKFKTMCCFFDSKTRNHEFLTAATDRNYLTTVFKKHKVDLVVMEACGPSGWINDLATSFGLKTLVCSTNEDAWKWSNVKRKTDRDDALKLARMAAMNELKAVHMPSEAHREFRSLVKYRKTLDQRINKMKCTIRAWFVNHGIAIDTGEKAWNTGRERINSFRKPMAECSPEELWKAELDLELTQMDAVGEQLELVIKKLEVIGKSDPRIQRIKTIPGVGPRTAEILVACIDDPHRFENGRQVSAYFGLVPRQYQSGETDRNGRITKRGNPLARTILVECAWASLRYNPWASAVYERISGKQKTRKKKAAVALARKISVIAWALLRDDKDWEPKRMIEITESFGKMPEALKVTLQSMKPKENSDQRKSRLRKEAREANATAAGVTPRKTSATDAKENPQPKANQTATSTTPKPRRARKPVSRSAARA

SEQ ID NO: 303266 - protein, 343 aa, unidentified
MNTTTVGLDLAKSVFHVVCFNEHSKEVKKRMLRRNQVLQFFTQLPPCRVGMEACASSHYWGRELRALGHDVKLIPPQYVKPYLRGNKNDYNDARAIAEAATRPSMPFVAIKTVAEQDMQAIHRMRAQCIRDRTALSNSTRGLLGEYGIVLSTGLATLRKSIHGLLEDADNGLTDRFRNLLARRHEQLVELDKHIAFYTNELELLSQQDDACQRLQTIPGFGPIVSSAFRSAIGDGRAYARGRDASASLGLVPRQHSSGGKNVLLGISKRGDRYLRSQLVHGARAVVVQAARKDDSLSRWINRIREERGWNKAVVAMANKMARVGWAILRYNTDYQPALAPSTR

SEQ ID NO: 303267 - protein, 321 aa, unidentified
MIDVSSVVGIDVSKASLDVAFGLNEPVQKFPNEPTGHRALARALTKRNPARIIMEATGGYETALLRLLTTKQLPAIRVNPRQVRDFARATGLLAKTDALDARILARFAAAVEPQHRELPSLEQERISALQSRRTQLIGLRTAEENRVQQASDPFIKRTIIAVIKTIEQQIAAIEEESSEVIAEHAKLERTFTILTSVPGVGPVTAGIMIGQMPELGSLSRQAVAALAGLAPYNQDSGTQRGQRHIRGGRTAVRNVLYMATLAATRCNPVIQTMFERLIAEGKHHKVAMTACMRKLLTILNALVRDDALWGDKKRPNLPRST

SEQ ID NO: 303268 - protein, 342 aa, unidentified
MNVTTLGIDLAKSVFQVHGIDKDGKKVIQKRLRRSKVLEFFIQLPPCLIGMEACSSAHYWARKLREQGHEVKLMAPQFVKPYVKANKTDAADAEAICEAVTRPTMRFVPIKSVDQHGVLSLHRARSGFVKSRTAQANQIRGLLGEFGIVLPQGIVHVAGRLPEIIEDADNELPIVFRELLLRLRSHLLELNRQIQELEDQIDAWHKNNEDSQRLANIPGVGVLTASALVASIGDARCFKNGRELAAWLGLVPRQHSSGGKPLLLGISKRGDAYLRTLMVHGARSAVRVAAHKQTPTDSWTNELSTRRHMNVVSVARANKNARIVWALLAHQRDYDGEYKLAA

SEQ ID NO: 303269 - protein, 402 aa, unidentified
MNAVGIDVSKGKSMVAIMRPFGEIVSTPFEIKHTASDIRSLVELINSVEGESRIVMEHTGRYYEVLAHQLSEANLFVSAINPKLIKDFDNDSLRKVKSDKADAVKIARYALDKWQNLKQYNVMNELRNQLKTMNRQFGFYMKHKTAMKNNLIGILDQTYPGVNTYFDSPARSDGSQKWVDFASTYWHVDCVRKMSLNAFIDHYQNWCKRKKYNFSQSKAEEIYGKAKELVPVLPKDAITKLIIKQAVDQLNSASTTVESLRTLMNETASKLPEYPVVMAMKGVGTSLGPQLMAEIGDVSRFTHKSAITAFAGVDPGVNESGTYEQKSVPTSKRGSADLRKTLFQVMDVLIKTHPQDDPVYQFLDKKRAQGKPYYVYMTAGANKFLRIYYGRVKEYLASLPES

SEQ ID NO: 303270 - protein, 434 aa, unidentified
MHIPFPYLTWEAGMQVLYERCAAVDIGKDVIAVAVRLPADGPDGRATHKRTFKTFYGVLREAARWLNSLGVTHVAMEATGIYSMPVYHALIEHGKFEQVLVCNAGHVKNVPGRKTDLADAEWLVHLLECGLLRGSFIPPAEIKAARDVIRYRTKVVQSRASEAQRLGNVLQDAGIKIDSVASSIASKSGRAMIEALIDGERRPRVLADLAKGKMRVKIPDLTLALEGRFGEHHALMCRLHLDHIGHLDAMIARLDTQTETMMAPFRTERDLLTTIPGIGMLAAAAVLSEIGANVTEYFPDAAHLASWAGLCPGNHESAGRRHSGKRRHGNQHLQHILVEATWAAVRHDGYLKALYHRHVMKWGGYRSPTAKKKAIIVAAHAILVIIWHVLAAGKPYDELGTDFFTRRLDPERETRRLIAKLEALGHQVSLQPAA

SEQ ID NO: 303271 - protein, 412 aa, unidentified
MHYYVGIDIAKSFHVACVVNQDDKVIKKSLKFNNDESGFEELLLLLNSIDEVETFTIGMEATGIFFENLYLYLSEKGFNVLLLNPYQTNRFREMDSMKRVKNDNIDALMIAALIKSGRYSKAYVSEDMYQSIKSLYRHKNNLLEEMKKHKRQISTLLAVVFPEMEQVVKDPFNVTGLALLEKYPTAKHYHHASVDRILKTFRGIKGNNFNEEKAKKLLELAKHSIYQGNGVDERAYVIKSHIRVIKLLQEELKELEDEMLKLFNQQIVLDKDEEQEVMDIIDNLRTIPGVSDKTIFALISECGDLSRFKNNSHLIGYLGLYPTLEQSGNKLTYGPIAKRGAKLAKKALYQAAIAAIRHNNELNKLFRDKVSQGRAKKEAVVIVARKLAHIILAIYKNNVAYNPQRVFQASVS

SEQ ID NO: 303272 - protein, 391 aa, unidentified
MIYIGIDVAKDKHDCFITNSDSKVLFKAFTIFNNLDGFNDLYQKIESVMDDVTKVKVGLEATGHYSYNLLGYLIDKGLPTYVINPLHTNLYRKSLSLRQTKTDKVDARTIASMLMSDVNLKSYSDTSYHNEELKSLTRYRFDKVKERAKLKTSVSRLVCILFPELEKLVPTLHMASVYALLSEFPSAKHVATAHLTRLTNLLSKSSKGRYGKDTAITFRDSARASIGSNMPAKSLELKHTIKLIQELDSEIDEIENEIKIIMDEINSPILSIPGINYRMGAMIIAEIGDFNRFDSPDKILAYAGFSPSTYQSGQLDGAYAHMEKRGSRYLRYALYNATKYVCHWDPTFAAYLAKKRAEGKHYNVAISHAVKKLVRVIYHLEKTKQQYIKAA

SEQ ID NO: 303273 - protein, 320 aa, unidentified
MSKKESKTFIGIDVSKKLLEVATHESDYQFRCANKASAFPELIAELIALRPALIVLEATGGLEIPVTAALHAAGLPVVVVNPRQVRDFAKATGQLAKTDRLDARVLAHFAAAIKPPLRPIKSKDELELDALVGRRGQLIEMLTAEKNRRGSAATDTVREEIKKHIDWLEERIAELDEQLQAQLKTSSLWQAKDVILQSTPGIGPVVSFSMIADLPELGTLNRQQISKLVGVAPLNNDSGQQRGTRHIYGGRARVRSMLYMAAFSATRYNPVIKEFYERLMAKEKPFKVVMTACMRKLLTIINVMVRDNTPWKTNDEPILP

SEQ ID NO: 303274 - protein, 342 aa, unidentified
MSVYVGIDVHRKRSQVAVIDQAGQVLANRNVPNGVEPILKVIGGLPPGTAAAFEACYGTSWLVELLEDYGFDPHLVHPSRCKAIASARLKNDKVDAAILAQLLRADLLPEAWIAPPPVRQLRALLRHRVALVRLRTRLRNRIHAIVADYGHDRPAGGYWTGPGRAWLAALPLPAVSRELIGDDLGLIDALQERIDRLDGEICQRARSDPRVKILTQLPGVGPFTALMILAEVGDIRRFASARQLASWAGLTPTVRGSDRVAHYGHISKEGSAWLRWVLCEAAQTAKRSPQFAATFQRIATRRGKKIATTAIARKLATRAWHLLTDTGPGAAPQPAAPQTAAR

SEQ ID NO: 303275 - protein, 346 aa, unidentified
MDHYAGIDVSLESSSVCIVDAQGKIVKEAKVASEPEALIAWFVSQPILPARIGLEAGPLSQWLFAGLKSAGLAVELIETRHVRDAFKAMPVKTDRKDARGIAQLMRLGWFRSVHCKSLPAQEVRALLTARKLLQAKRHDLEMSLRGVLRGFGLKVGPTTPKTFEGRVRDLVAHHGTLGMIADALLKARTVLMQEFKAIEKRLYAFARGDTPTRRLMTMPGVGAMVALTFSSAIDDPGRFRSSRVVGAHFGLTPRKHQSGESNVTGRISKIGDHGVRVALYEAANVILTRAVKGSDLKNWALGIAKRAGMRKAKVALARKLAVVLHRMLADGTSFMARKAAHSALVA

SEQ ID NO: 303276 - protein, 389 aa, unidentified
MLHDHPSDGPSAIRTHIAAIFVSLELSRSRWLVTSLSPGKGERMSRHSVTAGDMAGLLALFAELRRKAEVRMGQSYPIITLQEAGLDGFWLHRVLQQNGIESHVVDPASIAMPRRRRRAKTDRIDGETLLRTLLAYKRGEPRVCALVVAPSPEEEDRRRLCRERATLIAERITHVNRIKGLLFAQGISDYAPLRRERRARLETLRTGDGRELPSHLRTQIGRELDRIELLLEQIEAVETERDGLLAAARKPASEEAAPDAVTMLLALKGMGANFAAVLWSEAFYRQFANRRQVAAYAGLAATPWQSGGIRHEQGVSKAGNPRLRTTMIQLAWLWIRHQPQSALTRWFKERSPQGRKRAIVALARKLLVALWKYVTQGVVIEGAVMKPAA

SEQ ID NO: 303277 - protein, 342 aa, unidentified
MQITTIGLDIAKNVFQVHGIDAAEKVIVRKQLRRGQMLAFFKALPPCLVGMEACATSHYWARELTKLGHQVRLMPAKDVKAYVKRNKNDAADAQAICEAVRRPTMRFVQIKSVEQQGQLMLHRARDLLMRQRTQLINALRAHMAELGIVAAQGREGVKELLKIIATEQDARLPVDAHTSLVLLAGGLQALQTMIRSIERRIIAQHRSDEASKRLRSIPGIGIVGATAIAATVPDPKVFRSGRDFAAWIGIVPRQDSTGGKQKLGPISKQGDQYLRRILVVGAHAVLKRARHQPEKYPWVTRLLERRPFRVVAVAVANKMARVAWALLARGGSYRAPALAAAA

SEQ ID NO: 303278 - protein, 341 aa, unidentified
MGIVGGFDIHRRQITFDYVDSGTGEVSRGKIAPADRAQVRSWLGRFDGRGDVAFALEGCTGWRFVVEELARVGAKAHLAEPADTAKERGRKQRAKTDRTDARLLRELLAMGRLPESWIPPDHVLEVRARVRLYKALADERRGWMQRIRATLFHQGVPALACHLLDADGQAHLEAAELSSSGRQAVEVALRQIEHLEGELSALRRELVAFAHHQMGCRALQGHYGIGALLSVAIWEELGDCRRFRSSSDAVRHSGLDVTVWASDSQRARGHLARQGPEILRWALYEAGMSAAKRTSPDHGYYLQVRDRLGPNRAALSVGRKLSRRCYHTLRELGDHALAPVA

SEQ ID NO: 303279 - protein, 313 aa, unidentified
MSQNNTSIFYVGLDVAKASLQLDLAGHPHSLTNDPKGHAQLLKLLREHPTAQIVCEATGGYEKAAVRVLHAAQVPASVVEAGRVRHFARALGQRAKTDLIDAPVLSAYGRAIQPPATPAPTAQQTRLAELSMRRLQLIETRIAASNRAEHYLEKLCVRQARQLFELLEKQIEQGDQAIIELIAADEKLQAQAQRLDAIPGVGAVTAATVLAEMPELGRLSDEAAAALVGVAPYNQDSGNKTGVRHIAGGRAGVRCALYMATLSAVRYDAILKAFYLKLLAAGKKPKVAMVACMRKLIILMNRLLKNPKFQLAN

SEQ ID NO: 303280 - protein, 366 aa, unidentified
MHYQGRESMNSLRSLIYLDKLNIMNSQLKETASDTRAPLFVGIDVGAEELVLVIRKNTKSLNPQKFSNTPSDRTRLVNKLSKLPNLIVCLEATGIYHFDLSLALHDAGVSLMVLNPKASHNFAKVLMKNSKTDAVDANTLAEYAERMTFVAWTRPSNEKIALRSFSRRIHSLNKQKAATKNHLHALSATIETPKAVLKDATLAISQLEKRIDNLTTAALLLIAKHPELARILHLLIGIKGIAETSAIALMGELLLLPPDLSHRQWVKFAGLDPQVFESGKSVHKKTRLAKSGNAHIRAALYMPALSAKQHDPHVKAYFQHLVDNGKLPLQAVCAVMRKLLHAIHGMLKHNQPFDNSRFYDIPVTEN

SEQ ID NO: 303281 - protein, 351 aa, unidentified
MRFYRGQHRFWCGVDLHAHTMFVCVLDANGETVLERNLASSPEAFLAAVAPYREELVVGCECLFTWYWLADLCAKEQIPFVLGHALYRKAIHGGKAKNDRIDAQKIAGLLRGGMLPQAYVYPAGMRETRDLLRRRLHLVRKRGQLLAHLQNLTHTYQRGAFEKRIAYPSNREGVVAHFAGEPRVQANAALDLALLAKYDALLLELEAELVRKAKREAPTGFHLLRSIPGIGKVLAMTIVYELHDVARFERVQEFASYARLVKCAKESAGKRKGTSGAKMGNVHLKWAFSEAAVLFVRHSAEAKALLARLARRHGKGKALSILAHKIGRAAYYVLKREKPFDAKKFFATANA

SEQ ID NO: 303282 - protein, 343 aa, unidentified
MKISRIGVDLAKNVFQLHGVDGHDQVVFKRRLRRDQWLRVLLENTDSDCVIGMEACAGAHHWARVLQARGYRVRLIPPQFVKPYVKSHKNDANDAEAICEAMSRPNMRFVSVKRVEQQDIQAVHRVRSELLTQRTAKANQIRGLVAEYGLVAPKQLAALRSAIPCWLEDAENGLTVRFRALLHDLWQDLLGLDGRVQGLDAEIEALAKADPVAQRLQQLRGVGPLIATALVASVGDGQQFGQGRQMAAALGLTPKQYSSGHREILGGISKRGDVYLRSILIHGARSVVSHAKHKEDRLSRWMTELAKRRHPNVAAVAVANKTVRMAWAMMTTGTDYDPEYVTA

SEQ ID NO: 303283 - protein, 372 aa, unidentified
MADDSVIFIGLDTSKLKISVAIADGSRNGEVRFLGDISSEPSCVASMVNKLSKRGAKLHFCYEAGPTGYGLYRQIVELGHECTVVAPSLVPKRAGDRVKTNRRDAVSLARLHRAGELTAVWVPDEGHEAIRDLVRAREAANDALTQARQQLQSFLLRHGRIYSGRKPWTRAHTRWLASQAFDHPAHHILLAEYRQVIEDAGVRLDRLTKLVMETAASWSMAPVVAAYQAMRGVAFMTAVTFVVEIGDVRRFDNPRQLMAYLGLVPSESSTGERVKRGGITKAGNTRARRVLIEGAWTYRFPARVSPTIQARLEGLPRTVREIAWKGQVRLCARYRKLVTAGKPKVVAVTAIAREMAAFLWAIGQEVAPTAQA

SEQ ID NO: 303284 - protein, 416 aa, unidentified
MQSAPTTVSSAPPNGLTCGIDWAKDDHAVAVVDSAGREVHRWTVEHTNAGLHGLLRRLARTGVAEVAIERSDGPVVDALLGGGLTVVVIAPSQLKNLRSRYGSAGNKDDRFDAFVLADTLRTDRARLRPLTPDSPATVTLRASCRARRDLVTHRVALANQLRAHLQTVFPAAVGLFRDLDSPISLRFLTRFDCQDRADWLSVNRLAAWLASVGYCGRVDPAVLHARLTAAPRGATGEHGTAAAHVTHALLAALTTLVEQIKALTEQIDEQLDLHADAHIFTSLPRSGRVRAARLLAEIGDCRARYPTPEALYCSAGAAPSTRQSGKHRAVTFRWACDKQLRDAVCDFAADSRHANPWAANLYQRAIDRGHDHPHAVRILARAWLYIIWHCWQHGVAYDPAQHKALQRLTQDHQAAA

SEQ ID NO: 303285 - protein, 410 aa, unidentified
MELLYRRCCGLDVHKDTVVACLRLVSDGKVTTEVRTFQTTTAELLRLSAWLAENECTHVAMEATGVYWKPVWHVLDDGDFELVLANAAHVKNVPGRKTDVNDATWLAELLAHGLIRGSFVPDTQTQEMRTLLRTRKQLVRENSRHILRVQKTLEDANIKLDSVLTDVMGKSGRAIIEALIAGETNPAKLAKLADRRVKASHEQLREALRGRVTRGHRFLLRLHLNQIDSLAAAIASIDAQVEADLGPFRAAVEQLTSIPGVKDVGAQVIISEIGLDMSRFATAGHLISWAGLCPRNDESAGKRRSNRLRKGAPWLKTTLAQCALAAARTTDSYFQAQFRRIKARRGPKKAIMAVAASILTTIYHMLKDGTMYKDLGRDHFDRQSKDQQRNRLVKRLADLGYAVDLKPLAA

SEQ ID NO: 303286 - protein, 392 aa, unidentified
MIIVGIDVASEKHDCFMLQKETGLVFRASSVTIGNTEEGYKKLHADIQSFCGATGDSDVRIGLESTGIYHTNIITFLIAQNYKVMMINPILTNMARKAAKVHSAKNDNLDAKTICRYLVDHPDEFSPYTPTLYHTSVLKSIARKRYFITEDLRKAKMAVNNIVQLIFPEFKKLFSNIYGESALAILKEYPSVKKLAKARVSKLAALIHGRCKCTAEQLIDAAKHSVGLSDDWYTFELEDAIAELEHIQKRIAAYDAQIKGYVDEICPNILTIPGVGYVTAGLILGEIGDISRFRSPDALVSFCGLDLTVYQSGKYKALHVSPSKKGSVYLRYALFQVSRVFWQCNSTFRDYYGKKQAEGKHHYVILGHIQKKLARVIFSVLKNNSAFQERPA

SEQ ID NO: 303287 - protein, 344 aa, unidentified
MIIIGCDFHPSWQMISWLDTESGETGELKLMHATGEARQFYEGLAGAVRVGLESTGNSHWFVDLLTELGHEVWIGDAARIRASQVRKQKTDRRDADHILDLLAKDSFPRIWTPSPQERDQRQLLIHRYKLVTLRARVKNELQHLALNQGMQKGRSLWSKEGQKQLLDLPLQLWAGTRRKNLLELLKQIDQQLVVLDQAVKKVAEENEKARLLMTQPGVGPITSLAYVLTMGDVTRFRRGKQVASYLGLIPQEYSSGGKQRLGGISKQGNRFMRMLLVEAAQTTVRYDPQFRKEYLHRCHHRPKAVAKVAAARKLAIRLYWMLRTNTAYPEIVRIESSSRVTLAG

SEQ ID NO: 303288 - protein, 343 aa, unidentified
MRLFVGLDVSLTKTAICVVSEHGKIMKEAQVASEPEELVRWAREQEGTIAAIGLEAGPLSQWLHRGMSAAGLDVVLMETRQVKGALKAMPIKTDRRDAEGIARLLHLGWFRPVHCKSVSAQEVRAVLGARKAIQQGMIALEMSMRGLLRNFGLKVGAISRGRYEHRIRELADGNSMLEAATGPMLLARASLRKELAGLERLVRQMAQDDPVCRRLMSMPGVGAVVALTYRSAVDDPTRFTSSKNVGPWVGMTPSRNQSGERDVSGGITKAGDVNLRRALCQAATVMLHRGRSTWLRTWAAQVARRRGGKRAMVALARRIGVILHRMWVDDTDFRSDTAVPHAV

SEQ ID NO: 303289 - protein, 399 aa, unidentified
MMYQQFCGIDISKDSFDITLLNSNGEIKLQDKLLMNRDGFNTLLKYLSSYSKENLLVAMEATGIYHLPLLSFLLENSFKCVVINPILIKSFIGSTTLRKTKNDKKDATSIALFSLKSYQSLHLATTDAIENIRPLIRERETLSKEIARLKTEIKAILTQLFPELSKNTNIFTRSILNLLLKAPSRKAIRNLKKQKIQKILDNTSGNKVRISADEILSLAKNSIAISDKYLEKVLTSKIRRLIYIQDELSFLDTELQNSLEDTDINNDIEILQSIPGIGSVTSKNFMIEVSSVEKFKSVKQLCAFIGIDPSVKQSGTSINYRGKISKRGNANLRRTIWQMAIGVIRSCDKFNAYFSKKREEGKKFKQAVIAVANKLLKTIFVLLKNKTKFDENLALGVSK

SEQ ID NO: 303290 - protein, 356 aa, unidentified
MQGVYTIGADTHCGFTEFAVLSPSGRLIRRERCPTAIPDLYGILSSVRRPRATVIEEGPLADWLFRGLGDRGETVVVCDPRRNHLIAKDSDKDDAIDAEKLARLYRGGYVKEVYHGASHERMRFKRRVALYHDRVRHRVGEANRLMAQCRGYGVFVQERTFADEEGWRVCRAQLPENKMLRSDLDLLWRGYIGAAMQVESMRRRLIVQARKEPMIRRLTALPGVGWIRASTFFAYIDTPFRFRKKQALWRYMGIGLERRVSGAGFERVRVSRDANRVLKNVIIGAAMSAIASKENFFADQHRGWLDGGLSRRNARRNVARSLATVMWGMWKSGEAYRPELVAESARRPVMAEPSGV

SEQ ID NO: 303291 - protein, 384 aa, unidentified
MKVVCGLDVHKDSVFCCILCANGEKIQHKFGVLTEELVTLRDLMVSEGVEECAMESTSIYWIPIWRVLEGSVKLHLVNPYFIKQLPGKKSDVNDAEWIATCLSKELIASSFVPDDKIQRLRQYDRRIFDLNVSISRNLVKLDQCIQRCNIRISNYISTTDSKGYRSIVKLISQGVTDAEVLVKELHGRTINRHGRETLVKALTGVVSETDIDIIKQLVEEIELQQRHKDEAQEKMTALCMEWFPQEVENLQTIPGVKERSATSIIAEIGTDMTHFQTPKKLVSWVGLRPRNEESAGKIKARGITHGNRFVRKTMIECSWGAARMKDSFFAEFSYRQCIERRKNKMKVQVAIARKILVAVWYVLSQGTQYIKPTDHYTAAHMTAV

SEQ ID NO: 303292 - protein, 367 aa, unidentified
MKKVSTTVAKQSRNISQQKLTIGLDLGDRNSWYCIVDESGQIQLEQRVRTNAKALREVFGEMPHSRVALEIGTHSPWISRLLSELGHEVIVANARKVRLIGESRKKDDRLDAQTLARLARIDPQLLYPVKHRSAQAQADLMTIRARAGLVRARTALVNTARGLAKSYGERLRGCNVRNMNPEKAESLSPELQAALEPLLNAIESLSERIVEYNDRIENLAQQSYPQMALLKQVKGVGTLIALTFLLTLEDPHRFRKSRDVGGYLGLQPGRRNSGQSEPQLHISKEGDPYLRTLLVQGAQHILGPFGVDCDLRRWGLKLAERGGKSGKKRAIVATARKLAVLLHHLWISGEVYEPLHNSSRLTVAAAA

SEQ ID NO: 303293 - protein, 310 aa, unidentified
MEQIFIGIDVAQDRLDAHVRPSDESFAVARDSEGLAALIERLRAFDPYLVVLEATGGFEVTVAAAVVAAEIPLAVVNPRQIRDFARATGQLAKTDALDARAIARFAEAVRPQPRPVPDAQARALGELVARRRQIIEMMTAERNRRRQLTSRRLVKSVDRLLTVLQQELSELEQDLDEGIRGTPAWRERDELLRSVPGIGNVVARTLIADLPELGRLDRKQIAALVGVAPINRDSGKMRGKRTTWGGRAKVRCTLYMAALVASRYNPLLKAFYQRLTSAGKAKKLALTAVMRKLLTILNAMIRDNTRWQSA

SEQ ID NO: 303294 - protein, 386 aa, unidentified
MEGRPRLSALCGGTDWQRIPPPAPPSVDEESSGTGGSLRDRRFVRKLTPVRAHLSDFKRSHWRDIMQTPSIALDIGADVGKDEIVIACAEGAFSRRKVRNCRTELKAFLKNLPAGSRIGMESTGIYHELLAETAYKLGFVIFVLNPKDVRHYAMGVGLRGKTDRVDAELIARMIAREHEKLNRWIPPTPEQRQIDRLLKRRAKVNRIQVALNQSIKGVTGLGTDLKAINERLNRLVKRIDDKVKTLIEADEDRKQHYARLRKIAGLGGVVVRTSVLNTLERIPLRSADAFIAFTGLDPRPDESGHHIGRRRLSKRGPSELRRLLYLAAMAAVKTKLWKPIYQHYRAKGLSTTAALVVIARRIARTAWSVYTHKTDFDPKRVALGLT

SEQ ID NO: 303295 - protein, 345 aa, unidentified
MTVLNIKKNNHEAKLSLQAGIDVGSEELILVIRKNSKPFNPQKFSNTPADRARLVKKLVKLPGIIVCLEATGIYHFDLSIALHDAGVSLMVVNPKASHNFAKVLMRNSKTDTVDANTLAEYAERMDFVAWTRPSDEKIALRCFSRRINALTHQKAAAKNHLHALTATQATPKAVLRDAKLAITHLQKRIDRLKAEALVLIGKHSELERVLELLTGINGIAETSAIALMGELLLLPPDLSHREWVKFAGLDPRAFDSGKSVHKKTRIAKAGNRYIRAALYMPALSAHQHDPHVGAYFQHLVVDNGKEKMQALCAVMRKLLHAIHGMLKHDKPFDNTRFYAIPAAVG

SEQ ID NO: 303296 - protein, 342 aa, unidentified
MSEITTVGLDLAKNVFQLHGADARGGALLRKKLRRAQVLAFFATLPPCVVTMEACGGAHFWGRELVKLGHDVRLIPPAYVKPFVKRQKNDANDAEAICEAAQRPSMRFVPIKSEETQGAASVFRVRELLIRQRTQAINALRGHLGEYGHVVPQGVRNVGRLIALIESEASDLPATARASLDVLAGMLAELDRQIGVLDAEIDRRARESEVVRRLMTSPGIGPLIATSLATLAPPPEIFRKGRDFAAWLGLTPRQHSTGGKQRLGATTRMGERSLRRLLIIGANSVIIKRHCHAAAQPGTWLGNMLTRKPPMLVRVALANKMARIVWAILKSKEVYRAPAMAA

SEQ ID NO: 303297 - protein, 419 aa, unidentified
MAFKILRRNCCGLDVHKTWIFACIGITDANGRTEYKQARFSSFSNGLRELAGWLARYSCADVCMESTGKYWIPVFNILEKTCWVTLAHPKYTKPQKGNKTDRKDAKWICDLYMCGMVKPSFIPPADIRQLRDLMRYRTKLTNMLTSEKNRALNCLTVSNLKLDDVFSNVFGKSSRSIVQHILEHPGEQFDVAPFLDRRCKHSVEDVQAAVDGAMSREQAAKLRECLLHIDQLNGHRETIETEILRLAQPYSHQLELLRTVPGFSAAPLTAVALISEIGVDMSVFPSAKHLASWAGCCPRNDQSNNKVKSTRISRAGSYLKPLLVQIANAVIKSDKYPECKERYRRIKARRGHKKAIIAICRILLTAIWNVLSKLEPYSVKGYLEDKLTEHSVVISKSQGLELLRKRGYIFKDEVSADSG

SEQ ID NO: 303298 - protein, 378 aa, unidentified
MNRIIKIGMDVHTTNYTLCIFEPSFENKGTVHFVTQVKPNVKNIVRVIDTFKRKNENDELRITCGYEAGCLGYSLYRELKDKGIDCVILAPTTMKTEKGGRKIKNDYRDARMIAECLAYGGYSAVHIPNELDNSVKEYIRMRDDIHENLKKIKQQIISLMTRNGKQFDGKSYWTKKHLDWIKATAFQEEFLNETLDEYMIEYHHLIDRVEALDKRIEEISTKEEYVEKVQQLQCLIGIKTHTALSLIVETSDFTRFTKGNVFAAYLGLIPGEDSSGEKENRLSITKAGNRHLRKLVVESAQGYTRGQIGFKSKDLKARQSKCSNEVIAYADRCNERLRRKYYRMIARGKSYNVAKVAVARELACFVWGIMTDRMELSK

SEQ ID NO: 303299 - protein, 339 aa, unidentified
MLAVIGLDIAKQFFQLHSVDPETGEITRLKLRRAEMMPFFATRPRSIVAMEACGSSHHWGRQLRGLGHEVRLIATKFVTPFVKNNKNDAADARAIWEAVQRPEMRFVPVKSEAQQAILALHTMRDGLVKARTAQLHQLRAAFYELGITLPEGRHWCVKRLPEAFAGLEDKIPAMVIDALHDQYQLIVQLSERVKAIERRLDVFRRSDERCQRLLEVPGVGLLTATSIVAAVGDAKEFRSGREFAAWLGVVPRHSGTGGRVRILGISKRGNPYLRAMVIHCARAVMARQKEHSTWLQRLMRDRPWNVAVVALANKIARTIWALLAHGRRYAPVAPQAAAA

SEQ ID NO: 303300 - protein, 343 aa, unidentified
MTKVTTVGLDLAKSVFQVHAADRDGRPVVRKKLRRGQIHGFFAGLSPCLIGLEACASAHYWARELQALGHKVRLIPPQYVKPFVKRNKNDAADAEAICEALARPTMRFAAVKSAEQQSVLTLHRARELLVRQRTMLINALRGHCGEFGIVVAQGASKVTALIEMIEYPEDERFPALARVALGPLVEQLRMAQIQILDLEKKLMAWHRTNEASRRLEAIPGVGVITATALVATIGDESQFHSGRQLAAWLGLVPRQHSSGGKERLGRISKRGDGYIRRLLVHGARADLRWSKHRKERRSIWQESLLARRPTNVVLVAMANKTARVVWAMLSRGEPFRSEARIAA

SEQ ID NO: 303301 - protein, 400 aa, unidentified
MRVIGMDIHRSFAQVAILEDGQIIRELRVDLVYGPLVNFAKTLSLDDEVVIEATGNSAAVERLMRPYVKRVAVANSRLVRAIAYARVKTDKIDAAVLARLHAAGFLPEVWVADEETLNRRRQIAERMGVLEQLVRLKGRIQAILHSNLIPKYSGHLFGKTGRKWLDSLPLPDEERAMLGRLVVELERVSAQMAELDKVLAQQALDDPRARRLMTIPGISSVVASTVLASIGDVSRFPSANKLSSYFGLTPKVRQSGNQPARHGRISKQGNGDARKMLVEAAWSAKTAPGPLRAFFVRIQSKRGAAAAAVATARKLAVMIWHVLSGDAQYHFARPAFTAMKLRKVALKAGAPREYGKAGPGRDYWIKEIRHQEMNYVERAERAYERMVAAWREKPKKTAGR

SEQ ID NO: 303302 - protein, 343 aa, unidentified
MLTKNVIAIDLAKNVLQACHISIHGELMSNKPLSRQKMKEFLAKAKPSIVAMEGCCGCHYWGQLAEKLGHEVRIINPKKVKGYLEGHKTDHNDALAIANAATQIGIKYSRPKSLEQQAMHSLETSRRFLSRSVVSLALHIRGTILGYGIANPRGEKGLKASVQTVLDGDTPIPSNVVSVLSMLWEQYKELKAKLIAFEKEKNALTRQIEPYQRLMGIEGVGETTAAMLYTTLGDGKQFKNGRQASAFVGLTPKQHSSGGKVFMIGIDKCGGVKELRSLLYLGAMSYVGRLPEKPKTQKDAWLRSIIDRIGFKKACIALANKVVRTAWAMLRYETEYKPVLLTH

SEQ ID NO: 303303 - protein, 358 aa, unidentified
MKYIGCDFHPSFQQIAMLDKETGELVERRLLHTEEARAFYEGLKEPVLVGIEASGNTHWFESLLARCQHQLWIGDAAEIARQYGRKQKHDRQAAGLILKLMLENRFPRIWVPTAGERDLRQLLIHRQHLVRMRTRVKNQLQHIALNQGWQKKHQLWSEAGLELLRSLKLDAWTQERRDTLLQMLEELEKKIQPLDLAVAKEAQAREAARRLATHPGVGPVISLATVLTMGEVQRFADSRSWVSYLGLNPSEASSGQRRRLGSISKQGNSFLRYLLVEGAASAVRGDKDLARMYARLKAKKHHGVAKVAVARKLAVRLYWMARTEKSYPEVVRTQGSLSHSVAEVMADPLNRPPASHPQ

SEQ ID NO: 303304 - protein, 360 aa, unidentified
MFTERTSVGLDVHARSVAAAAIDGVTGELRQARLTPSHDHILSWIGDLPGPAAVTYEAGPTGFGLARALTAAGVRCVVAAPSKLQRPSGDRVKTDAKDAVHLARLLRLDEVTPVVVPTVAQEAARDLVRAREDCRGDLMRARHRLSKLLLRQGIVYTGGQAWTGAHDAWLRRQRFANPATRTAFESDYDAVLTVKARRGRLDEAIAAMAADSEFTALVRRLGCLRGVSTLTAFALAVEIGDWHRFTGNTIGAFVGLVPSEHSSGQSRVQGPITKTGNTHVRRLLIEAAWHHRARYVVGKTMRDRWELTTPAARARGDAGNRRLHDRWITFNLRRKRHVIANVAIARELAGWCWSLAVLEE

SEQ ID NO: 303305 - protein, 347 aa, unidentified
MTEAYDGRQVVGIDLHRQRSVIVRMTEDGRKLETVRITNSPAALRREIAKAGKNPKVVIEATYGWYWAVDVLEEAGAEVHLAHPLGVKAFSYRRVKNDERDAADLADLLRMGRLPEAWIAPAEIRELRELTRYRHQLVKARTSVKDQVHGVLAKLGIPVTHTDIFGVHGQAWLDELPMPQPYAGKVASLRQLAGGLTAEIGLLEQVLGDLLAGHEGYAAIQQLPGIGPVLAAVIVAEIGDIRRFPGPGQLASWAGLTPRHYESDTKVIRGHITKQGSRMLRWAVVEAIQRQPAGTRPRQVKDGIIARRGKEAKNIAKVAAARELLTLVFYGMRDGHVRRALQRGQAA

SEQ ID NO: 303306 - protein, 343 aa, unidentified
MQVSTIGVDLAKNVFQVHGVDSAGKVVITRQLRRKQVIEFFSKIPPCLVGMEACGTAHHWAREVSKFGHTVRLMPPSYVKGYVKRSKNDAADAAAICEAVTRPSMRFVAVKSADQQALLMLHRTRDLLIRQRTQLINALRAHLAEFGLIAETGREGLAQLAAIITDESNREALPSAMKQALQAIVDQLAALELQIGTLDRAIHAQHRANDMSCRLETVPGIGVIGATAITSTVTDPSGFKSGRDFAAWIGLVPRQHSTGGKERLGGISKQGDRYLRRLLVIGATAVVRHARQRPQKHPWIMRLLAKKPAKLVAVAVANKMARIAWAIMAKGGYYRAPELAAAA

SEQ ID NO: 303307 - protein, 412 aa, unidentified
MEVVHTHCCGLDIHKKSIAACIIVPGTKGNSRKEIRTFGTMTNDIVKLSEWLSACVVTHVAMESTGEYWKPIFNILENNFQLLLVNPQHIKTVPGRKTDVRDCEWIADLLRHGLLRASFVPDRDQRELRDLTRYRTSLIEERSAEVNRLQKTLEGANIRLSSVASDVMGASGRQMLAALLEGKADPKEMAELAKGSMRGKIPQLEKALEGQFRPHQRFLVAQQLAHIDYLDELIAQLNEEVAKRVRPFEEVIQRLDGIPGVGRIVAEVIVAEIGLDMSRFPTANHLASWAGMSPGNNESAGKRKSGRTRKGNSALRQALVQAAHAAGHKRDSHLAAQYRRLASRRGKKRAAVAVGHSILVIAYHIIKEGSEYQDLGGNYYDLRDKETIKLRLIRRLEGMGLKVSVEPAKEAA

SEQ ID NO: 303308 - protein, 343 aa, unidentified
MKKVSIIGFDLAKNVFQLHGAAVDGTVLFRKKLSRPQFQRFISEHPRCLVAMEACGGAHHWARELHRAGHEVRLIAPHYVKPFIKRQKNDAADAEAIVEAALRPTMRYVEPKSGEQQARAIAFRTREQFVKQRTEAVNALRSHLYEFGYVAPQGIGYLPRLAQVIADPSSDLPPLAREICHELLDHIAHLTTRIHALKKRIDAIAREGETSRRLQTMPGVGPISALAVETFAPPMEQFKRGRDFAAWLGLVPRQASTGGKQRLGRTSKMGQRDIRRLLITGAMAVIRWALRRGAPQNPWLARMLERKHPMVAASALANKMARGIWAMLTRNEDYRGPAIRSAA

SEQ ID NO: 303309 - protein, 340 aa, unidentified
MQITTIGLDIAKNVFQVHGIDAAERVLVRKQLRRGQVMKFFEALPPCLVGMEACATAHHWARELTKLGHEVRLMPAKDVKAYVKRNKNDAADAEAICEAVRRPTMRFVHPKSAEQQGRLMQHRARDLLMRQQTQVINALRAHLAELGVVAAQGREGLKQLLAIIADKKDARLPIDARASLIVLAAQLQALHTMIGSIEKRLMVQHRANEASKRLQSIHGIGMIGASAIAATVTDPKVFRSGRDFAAWIGLVPRQDSTGGKQKLGPISKQGDRYLRRILVVGAHSVLRRAKQNPEKYPWLTQLLARRPFKVVAIALANKLARIAWALLASGGHYRPRLAAA

SEQ ID NO: 303310 - protein, 353 aa, unidentified
MRCTAYVVQGKEVFVGLEDSKKTWKLAVRTDRMVIHRTSMEARYGVLIRYLENKFPECTIHLIYEAGFKGFNLFDRLTQDGIDCVVIPPHMVTEPKVNRVKTDKRDANRLALILENHDFKDACHVPDKERREDRQISRTLIALQKDVIRTRNRIRKLLDFHGIEVSFPDRWRKDQFRALKELSLPDPLRISLDVLLTQLEELWAHQMTLRAALRTLCQKARYTKPFTIARSLPGIGWATAIRLVLELGEDLSHFTTGKKIASFVGLTCSEYSSGETEQKGHITGMGSGFIRGTLIESSWMAIKKDPVLLAKFSRIWRGTGSKKKAIVAVARMLIVRLRACVLSGTPYAVGVVH

SEQ ID NO: 303311 - protein, 376 aa, unidentified
MKKKTKPISDSEQDQASARRSTSKAKVKLGLDMHYRQVTVTMQEEDGPIKALGKMSHDGFSRWVEKKLQAGFELYSCYEAGASGYWLHRDLEGLGVKNLVVTPKPMGQDRHQKTDRRDSAELVDCLDRYLRGNSKALNPVAVPSAEVEEKRALIRYHRQLMADRGRCEARGKGLLCAQGIEVRGKWWQSESWQELKTHPRLKGWMEAQLEGWRKKRLVFERGQQPLRRQIEALAPALLPKGVGAYSAVALEYELKGWGRFQRARALSSYTGLCPGIHSSDSRGREGRINRCGNAAVRWNLVEMVWRLLKWQPQYEPVRQLARSLVKSKRARKRLAVKAARQLAIDLWRLQTGRVTAQELGLIMQPTALRPSSKARP

SEQ ID NO: 303312 - protein, 400 aa, unidentified
MDERQRFRWFLGIDVSKETFDACCIPSHGERLFNLSVSMDRKGFEELIKQVSALSIPQESVLVGMESTACYHINLYSFLVSLGYTVMVINPLLISNFVKLQLRKTKTDKKDAYVIAQFLLLNRDSLSQSILSSDISDLRDLSRQRESLVDQMSSTKSEIKRLLTITFPELEHMSGIFTKSMLRLLCQYPSAASIKEAKRSKIAKILIPGSYGKQTPASVERILKAAQVSVGTSSATKEIILRQKASLLVQLEEHLQELTDILIELCQGKIQGDMDILTSMKGIGEKTAANFLIEIGGDIKQFESHKKVIAIAGLDPALYQSGKIDRRGKISKRGNRHLRRVIWLMTTKVIQFNERFKQYYLKRIKDGLPYKKAVLATAHKLIRVMFAMLRNKTLFDARMN

SEQ ID NO: 303313 - protein, 457 aa, unidentified
MKKSRNKRGSRKIVKIESLKQINFNAAGLDIADEEIWAAIPEDRQETSVRQFATFTADLHALADWLEQSQVDTVAMESTGVYWIPVFEVLEARGFEVLIVNARHIKNVPGKKSDIIDCQWIQQLHTYGLLRGSFIPDAEIRSLRAYIRHRDSLIRHRSAHIQHIQKALQLMNLKLTNVLSDITGLTGMSIIKAILAGERDPHKLAQFRHGRCAKSEEEIAKSLHGNYKPEYLFSLRQMVEMYDFYNQQIANCDTQIQSQFAVMKPQVDLDTKPLPPPKRSGWRSRNEPAFDLRTALYRSVGVDLTAIDGIHVLTAQTVLSEIGLDMSRWPTVKHFTSWLGLCPHNDVSGGKVQKRYSKKSKNRTAQALRNAARSVSRSQSSLGAYYRRMRARKGVMQANVATAHKMARIIYFMLKHRTEYLDPGIEVYEANLITQRMKRLQRQAARLGMKLEPILAN

SEQ ID NO: 303314 - protein, 391 aa, unidentified
MVRVNDLSRSAVAFEQSTTLVVVVEMGAKSWLAAGNVPGVERQPMKKLEPDAAALLGLIERWRGEAIKAGQTIRRVVLAYEAGRDGFWLARWLIARGIEVHVIHSASVAVSRERKRAKTDRLDAAMLMRVFLGWLRGERGHCGMVAVPTLEEEDARRPSRERESLVNEKSRITNRMKSALARLGIRGFKAHLRKAAQRLEGLRTPEGTGLPPNITEEFRRDMARLALVREQIAAIEKARIERLQRAPNTGPNLMVRLLARVIGIAIETADMLVREILSRNWRDRRAVARYAGLTGSPDESGTKRREKGLTKAGNARVRRGLIQLAWRFLQFQKESALTKWFRSRTEGPSGVRKTTMIVALARKLLIALWRYVEHGVVPEGAQLKRTHVPAA

SEQ ID NO: 303315 - protein, 430 aa, unidentified
MNCVNDIRLEQFLQLKKEIRGSEQYLIVGLDAAKEKHNAFFGTAQGKTLVKNLVFDNTIEGFEKLDAYVERVKVQYSLSKVVFGIEPTANYHKPLAEHLIKCGRMVVLVGGVAVKNNRQLLDGRWDKHDVKDAANVADLIAQGKCLFYEYPLMTLRNVRILIALKRRLKKREHSISVCIRNHILAQYFPELDQQYGPSVTLAVVRECLDPSAIAGMEYDTFCRTVSPGKMTLAKSRRTEAIWRAAVNSIGCTMGEAASFEAQVMVDSLKQIRQTIKSVEDKLEDACLQFPEYTYLLSIPGFGPDVSSKVLGAIGNPHRFASGKQVLKMAGLDLCANRSGQTSSSSIPVISKQGKTDLRYALYQAALIASLKNKDFIAYYTNKLKGRAREKGIGVKMRVKLSAKLLIIAWTLMKKKEPFDPGRLNRLDKAA

SEQ ID NO: 303316 - protein, 339 aa, unidentified
MDYVIGVDTQRDAHTAAAVDQVGGVVEGITVAASLQGSKELLGFARATAPGQRLWAIEGTGLYGASLTRFLLAQGERVVEVERPGRPARRRGKSDPLDALAAAREALAGEHLAEPRAPGERAALQMLLTLRRHVVKSKVQAIGLFKTLLVAAPDTVRESLAPLSTIEQVRRAARLRERKDVAEDASAIALKSLARRILDLTAEAKELEGRIGRLVAVLAPELLARPGVGALAGGGVFAAWSHAGRLRSEAAFASLGGVAPIPASSGKTKRYRLNRGGDRQLNYALHIIVLARLKCHPPTQAYAARRLAEGKTPREIRRCLKRYVSRELFKLLEGSHKMP

SEQ ID NO: 303317 - protein, 357 aa, unidentified
MNYTQNQKIEQVTESTLALGVDIGSSEHYVRAFDYRGRELTRKVFRFSTDINGFNSFYDWVTQICIKHGKNEAMIGCEPTGHYWYTFYQFVKDHGMKLAFVNPASVKKAKELDDNSPKKTDLKDPKTIAKLVIDRRYSFPYVPEGIYAETREVTSSRDLIMKELNAASNRIQRWLKIYFPEYLTVYKKFDTTTGMMILEEVPLPTMVTALGVDNIIKIWREHKVRGKGASFNRAKTLVDAAHDSVGKSGGQGAVMEIQMLLEDYKVKKQQLEMVTSVMEELIMQIPNAEKMLSVDGVGLVTVAGFISEVGDISRFKNPKQIQKYAGFELVENSSGKHKGRTTISKRGRKKLRKSYIR

SEQ ID NO: 303318 - protein, 341 aa, unidentified
MRLFIGLDVSLAKTAICVVSEHGKIVQEAEVASEPEPLLAWLHTLDGTIAALGLEAGPLSQWLHRGLTDAGLDAVLMETRQVKGALKAMPIKTDRRDAEGIARLLHLGWFRPVHCKSVSAQEVRAILSARKAIQQNMIALEMSLRGLLRNFGLKVGAISRGRFEHRIRELAEGNAMLDTATAPMLRARASLRQELAGLEKLVRQMAQDDPVCVRLMTMPGVGAVVALTYRSAVDDPARFTSSKNVGPWAGLTPSRNQSGERDVSGGITKAGDVNLRRALCQAATVMMNRGRSTWLRTWGAQLAKRRGRKRAMVALARRIAVILHRMWVDGSTFQFEAAPTH

SEQ ID NO: 303319 - protein, 355 aa, unidentified
MNQEKYIGMDVHQATISVAVMDSSGKLIMECILETKAATILEFIAGLRGTLSVTFEEGTSAAWLHDLLKPHVSHLVVCDPRRNALLKDGSKSDRIDARKLAELLHGNKLHAVYHGEHGLRALKELGRSYLTITKDLTRVMSRIKALYRSWAIPCSGATVYAPRHRAEWLAKILEPGVRLRAERLYQQLDLLQPVRQEARRDLLVESHKHHAVKLLRQIPSIGPIRAALLVALLQTPHRFRTKRQLWAYSGFAVETHDSGEYRFVRGKLQRNRERITVRGLNHNHNHDLKNLFKGAALSASTRPGPLCDFYVALVEKGMRPTMARLTLARKMAAITLTIWKKGVEFDAKPLNRQAA

SEQ ID NO: 303320 - protein, 338 aa, unidentified
MMQFKFFVGIDVSKDTLDFSVVTDGKEVSVFKIENSLRIIKATLLNLKKIKGYELSQAVFCLEYTGLYNNHITHCLHSVGAHIWVEKAIQIKRSSGLQRGKSDKVDAQRIAFYAFRNQDKARLWVAPRAVIQQLKRLTGVRERLLIMVAQLNKPIQESKRFDSREVFDVIKKSCQSSLNAIKADLKKVEKKITEVIKTDASLNHLFELITSVDGIGSVIACEMILTTNEFKNINDPKKYACYAGVVPFEHTSGSSVRGRNRVSHFANKNTKRLLHMASLSIIRYQGELKTYWQRKLQEGKHKMIILNAIRNKLIQRVFAVVKRGTKFEKNYLCDLQGS

SEQ ID NO: 303321 - protein, 369 aa, unidentified
MEEVKRFVGIDVSLPRRERRLGRKPVFTQGVESLPIAILGFPGFFNTLLVAKAALDVFIGSDGAAFSVTNDEVGIRELLGQLKPTDFVILEATGGLETPVASALAAAGIAVAIVNPRQVRDFARATGRLAKTDALDAEVLARFGEAVRPQARPLADEQAQALEALVTRRRQLVEMLTAEKNRRTNAPKVLHRSIDEHIRWLEKRLSGFDDELGELIRDTPLWRERDELLRSVLGVGKVLSSTLLAHLPELGALNRKQIAALAGLAPFNRDSGTLRGSRCIWGGRAQVRHVLYMATVAGVRSNPVIKNFYTQLRARGKYPKSALTACMRKLLVILNAMLHNKTHWQTPALTSLRSSLSPFLGAVSEHGCC

SEQ ID NO: 303322 - protein, 322 aa, unidentified
METITTIGLDIAKSVFQVHGVDAQGKVIVRRQLKRRYVLAFFQKLPPCLVGIEACASSHYWSRELQALGHTVRLMPPAYVKPYVKRQKNDSTDAEAICEAVTRANMRFVPTKTTEQQSCLMLHRTRHLFIRQQTAVINAIRAHFAEFGIVAPVGRTGVEQLLNVARDGNDKRLPDVARACIAALGAQLQMLKARILEFDRLIMAWHRSNQVSQRLDELPGVGPALATALVASVADPKAFRSGRDFSAWIGLVPKQHSSGGKNKLGGISKQGDRYLRSLFVAGALAVIRYAKIHGSKHRVSPNEHCPPGAAQDTARRGSVCSS

SEQ ID NO: 303323 - protein, 408 aa, unidentified
MEVVHPRCCGIDVHQASLAVCVSIKEGGQSEKYKLRCGTTTAELLRLSDWLHGHGVTQVAMEATGVYWKPVWHVLEGQFKLLLANPTQVKALRGRKSDLRDGERIADYLQHGLLEGSFVPPQPIQELRDLTRSRTTLKQEQVRVSNRILKVLEDANVKLSSVMSDVMGVSGREMLRAIIQGESEATALAQLARGRLRGKIPLLQQAVTGTVNQHHRFLLEQWLGMWEELAVRIAQFEERIEEQIRPFEPVVKTWASLPGIDRVTAWTLVAEMGVDMTQFPTAAHAASWAALCPGLEESAGKRHSGRTRRGNVWLRRALTQAAWAASVTKGSYFKAFYHRLAARKGKKRAIIAVAHALLVTGYVLLRMGRTFQDLGVDYFERLDRERLTKRFVKRLERLGHKVSLQPAA

SEQ ID NO: 303324 - protein, 487 aa, unidentified
MPRKKSGRKNQSSTNKASLKSRASKRGQPIATTRRGGLPVNNAPQPIDSFSLVNVNAAGIDIASSVHFVAVPEGRDPDANVRSFGSFTADLEGLVDWLMQCKITTVAMESTGVYWIPLYELLESRGFEVLLAEPRQIKKFRRKTDVLDCQWIQTLHSFGLLTGSFRPDEKAIVLRSYLRQRGTLVKESARHIQHMQKALEQMNIKLTEVLSDIVGFSGLSIIDAILSGQRDPHVLASLRHESCLHDEATIALALQGNWRDEHLFALKQAVDLYRYLITKMAEVDQQIEAHMLTYEEKAPDSALTKPKNRQTKKRHDIKFDLRKLLHRMCGHDLTTIDGIGEQAAIQIVSEIGLDMSKWPTEKHFVSWLCLCPEPNKSGGKKQKKGKSKTQSSTNRVAGVLRVGAQSLFNSKCSLGAFGRRIRARDGAAVAVTAMARKLAIIVYKMLRDGRPYVDRGAEYYDARYRDRVLKNLQRKVASMGYEMKPAA

SEQ ID NO: 303325 - protein, 318 aa, unidentified
MVTGIDCSKDYFDVVLLDGNSKVFEGRFANNLKGFQKVLPHVQDSHVVMEHTGPYYFSLACFLCESHVRVSVVNPLIIRRFSQTKMNRAKTDRKDALTIAEYGIMYQPPLWSVPSEKIQEIRQLETFLKGVVKRKQVLMNQFHAFEHGGNFIGYIRERMESQIEGYDQEIQQIEAKIQALIQEAFPDLHRNLTSIPGIGPKSSVLMIVTTNGFQDFESHKQVISYFGLAPRIYESGSSVRGKASICKMGMSTVRAVLYMAARSARLYNRSCRELYERLRTAGKAHRVAMIAVVNKLIKQAFAIAKSGEIYRLEKVLAE

SEQ ID NO: 303326 - protein, 487 aa, unidentified
MRIYVGIDLAAKGKHEVFVLDQNGEVVLSRYRFATQADEINRLREKVKALRPGAEIWWISEPTGTQWVTVGQYLLGVGDRYFLVSNQKAHDLRRFWARHVKNDAVDAEALARIGFMAPQALQPVKLDARVHSLSRWVKRHYRMGRTVGELKRSFWALVESLLPGVQRVLPDPLTAVGRAFFRRYANPFAAVRIGPKRFTQALERSAGRYAKTETIAALYALCERAVELHRNAGMRLDFADLQEEVEFSLEELERAAERQEHIRSRLELLVGELDPNGLLQSIPGIGMVTAAACLAALESHDFKSSRAFRAYTGLVPRVAESGQSQSKGRSLTKAGPSWLRTALYMAAEVARRWDPQLAAIYRQAMVEKGQPHRKAICAVATHLADRVYAVHHGQRPYVVRDLQGNAVTSEQARALIDAFLSVPEEVRARLRKTRKEPRERKNGSMSAASKGRGSLEDSPSSTMLPEFYDTRPKGRVQDLMRQSFRAI

SEQ ID NO: 303327 - protein, 405 aa, unidentified
MVHVTGPSPVEQSVFAGIDWGGTRHQICLVDHAGKLIVQKRVGHDVGGFAELDDLLDIPGIRIAIERGEGLLVEHLQLSGLPVYCVSPKISARARERYRLSATKSDAFDAFVLADTLRHEHTHWRPLPLLSRDTAELKAVIRDRERIILSQRSVESQLRAVLDTYHPAPLHLFSTLDRDITLDFLADYPTPAQAARVGDKRMDAFCRRHGYTGRVPADQLVERIQPHLLAASEGTTAGKQFTAQLFASQLRLLNQHIRVCNKRIDQLLDVHPDAPIFLSFPGIGPVVAATLIAEMGDDRSHYPDARVLLAEAGLAPVTRASGRMHQVRFRYACNHRMRHAIDWWAFVSTRETDWAATAYEQARARGHGKYRALRGVGARWARVLWRCWQDNTIYNPEKHSSATAA

SEQ ID NO: 303328 - protein, 322 aa, unidentified
MHAFHLGIDVAKAKLDCALRLPDGKFFHKVVENKQTAFTQLLTFLGKHHAQGVHVCMEATGIYWEAIAEFLAAREGFTVSVMNPAQIQAFAASRLTRTKTDKVDAKLIAAFCAERRPEPWQAPSAPERNLRALVLRLENLQAIRIQESNRFEVARECVKDDICEHLQWLDGKIEVLIKNIRQLLHDDDDLGPKQKLLISIPGIGERTVAILLAYYAHPERFHNARQAAAFAGTDPRQHDSGSSVHGKPRLSKIGHAFLRKSLYMPAMATLYKTAWGQRFRQRLAAAGKAPKLIIGAMMRKLIHVAFGVLKSGKPFDPARHGV

SEQ ID NO: 303329 - protein, 364 aa, unidentified
MDTHKKQHRVAIAYPNDEVIVEFSVKNTPPEIRKMVRKIKRNAPGEIRFCYEAGVCGFTLQRRIEALGCKCSVIAPSLTPRKPGERKKTDRRDAKKLLGLFMADMLTEVYPPNEQQEAARELTRCREAAQENLKRIRHQLQKMLVRHGYVFTDGQHWTQKHYRWLEAIQFDQPLLQEVFDCYFTEMRHCLQRVQTLDKELEKLAQSEDYREVVGILCCFYGIKTLTAISIIAEVFDFSRFASARDFMSYLGLTPSESSSGEKEHKGPITKTGNKRVRRLLTEVAWHHRHAYGVSNVLRKRREGQPQWAIDIAERAGIRLRRRYRRLIHRGKLPCKAVTAVARELAGFIWSALIEYEARKKRKAA

SEQ ID NO: 303330 - protein, 400 aa, unidentified
MTEDAWQIAPGSFGPNLKLLKVVIKLLKTLNVGIDISLKEATISLLTWEGKYLGKSFKISNNPSGAKELEDRVLSILSLGNFEHIRFGMEATQNYGFHLAEYLATLDKLSAWKPLVYLINAKYIKDFKKAFPERDKTDLVDSQFIAEYLRFEKLPHPFEPNNRYLPLQRLVRYRYHLVKNIERETKFFLANLFLKFPSWVQNRPIKTLGKTAMDVLAEFYSLDEITQMPLEELSLFVARTGRNRSPKPEKIAREIKKAARESYRLKPDLANSVQFILESIIVNLRTLKSSLKELNKAIALEMKGFSNPLLSIKGIGPVYAAGIFASIGNIKRFSSDDKIAKLAGLVWKRKQSGKFEAEERRLIREADRYLRYYLVEAAISLSSAQRGVSLLLPKEVPGGE

SEQ ID NO: 303331 - protein, 323 aa, unidentified
METPQVSFKQVVSRGCGLDVHKKVVVATIDGEGLKKQTREFSTVTSSLKELRDWLLENGITHVAMESTGVFWKPVYNILEPAGITVWVVNAAHVKYVPGHKTDKKDSAWLCKLLLAGLLKPSFIPAKEQRELRDLTRYRTKLVQSNASNKNRIIRILEDANIKLSSVLSSTNGVVGTKLIDKICDGEEITMQDVDEVYHKKLAATKEEIFEACQGFITEHHVYMLQIIRQEIAGTQQTIESLTQRIKEVLSPYENALELLQKVPGISSKSVEDLVAEIGLDMGVFPTEKHLASWAGMSPGNNESAGKKKAVGQPGETNKLKLC

SEQ ID NO: 303332 - protein, 397 aa, unidentified
MYIVGIDIAKRKHEAAVIDGEGAVIIKPFSFTNNCSGYNRLLAMLTKAKLPLDEVSFAMEATGHYWLALFTRLQKEGFRVQVINPVQTNSIRNFYIRQAKTDPRDALLIAEVIRFGHFSESTLHPENIYELRELCRGRHAIVSMQADVKRKVVALLDQVFPEYETAFTNMFSDTSMAILQTCPTPKELSEMPLEELCHLIEVSSHKRFRMAKAQELQALARNSFGFAMAGDVFSTMIRLYAKHLDFLKQQVREMDRKIAEIMDSLDTPITTITGIGPTLGAYILSEIGDISRFSSAAKLAAYAGIDPTMRQSGEYNGVRNRMSKRGSPYLRHAIWLAASSAVLHDPALKLYFQKKRDEGKPYMASVGHACRKMVSIIYAVMRDNKTYTPHIPNEISA

SEQ ID NO: 303333 - protein, 338 aa, unidentified
MSIVFVGIDLAKNVFAFHGVNDAGKPELVRPNVPRAKLHALIANLPPCTIGMEACSGAHHWARLFLAHGHTVRLIAPKFVAPYRLSGKQGKNDAADAAAICEAVQRPSMRFVPVKSIEQQGQLMVHRARQAFVEARTGTINRIRGLLSELGIVLPLKAQTVRTQPAAALEDLPGWANTGIGDLLSELHRLDERIAVYDRHLASIAREDDRAQQLMRLRGVGETTATALLATVGNGHEFKSGRQLSAWLGLVPGQYSSGGKTRLGRITKAGDGVLRSLLVLGARAVLATAKDRTDSVSRWAMALQERRGYWKAVVAIAAKNARMAWAVLRRGEAFSLPA

SEQ ID NO: 303334 - protein, 313 aa, unidentified
MELYNNFIGIDIGKFNFVVAVHANKITKEYENSTLGIKSFLKDYKSLLPNALCVLETTGGHEIKLLTTLCDKNFAVHRANTRKVKNFIRSFGNKAKTDVLDAKALALYGYERKDTLAKFTPVTAKKSELYALSQRRHDLKQMIIAEKNRYQAPGSEHVKESCKYLLEILAKEVRDIDEKINTLVDDDAVLKDKKQVLKTIPGIGDVIANELLILMPELGTMNRREAASLAGLAPMANDSGKSKGYRRTNHGRDIIKPILFLAAMAARNSKSDLKKFYESLISRGKKKMVALIALMRKIIVIANARLKPFSTTC

SEQ ID NO: 303335 - protein, 448 aa, unidentified
MAQRSQLKRMEIANPNAAGIDVGSASHFVSVPPDRDDEPVREFKSFTEDLEHLADWLVSCGIDTVAMESTGVYWITLFELLESRGLNVFLVNARHVKNVSGRKSDVLDCQWLQQLMSYGLLSGAFRPKDEICALRSVMRQRAMLLSYQSRHVQHMQKALTLMNVQLANVISDVVGETGQKILRAIIAGERDPLKLADLKNGRIEASKEEIAKSLQGNWREEHLFALTQAVELFDAYSKALQRCDVQLESMLKALSRSEAEPGPSKRRVGKAKNAPKFDARTYLFRICGVDLTAIDGIDVTTALKVVAEIGPDLSRFQNAKHFASWLGLSPGTKISGGKRLSGATKGNANRAAQALKLAAAALRPSQSALGAYYRRMCGRLDKGKAVTAVAHKLARLVYAMLTKGTAYVDQGQAYYEERYQQRVIYHLRRKAAAMGLELVPIQAQGQSA

SEQ ID NO: 303336 - protein, 485 aa, unidentified
MAKRKMSTFERLQHGKLNRQQRRELGRRLHSADPGLQVVHPDAAGIDIGNESHFVAIPPDRDPTPVREFGSWTADLHEMASWLKEHGITTVALQSTGVYWIPVLEVLEQAGLEVYLVNARGTKNLPGRKTDVQECDWIRKLHTYGLLRNSFRPPEEIRIVRTIWRQRDRWVQESGRTIQHMQKALTTMNVQLANTISDISGTTGQAIIRAIVAGKRDPWELAELRDKRIAASKEEIAHSLQGHWRDDVIFELRQAVESYDFFQKQMAACDQELIKYMAAIESRETTPKQDPPKDASTLSSVKPARRSKTRRKNQPGFDLATELERTMGADLTRIDGIDVITAQVIFSEIGPDFSAFPDENHFASWLTLAPKRDISGGKVIRHIPAAGRNRVANALRMAAESLSRSNSYLGARYRRLRARLDGPVAVKAMARYLACLVYRIVTKGQAYVDRGAAHYEKKRQEREHVALQLRAANLGFKLVPVALTK

SEQ ID NO: 303337 - protein, 425 aa, unidentified
MNLLILKGVPMALKIVYKICCGIDVHKTFVVACIASTNDKGITSYESHRFSTYTSGLKTLLQWLLNRNCKDVCMESTGKYWIPIYNILENDCSIVLAHPKYVKAIRGKKTDKKDAKWIADLFKHDLVVGSFMPPADIRQLRELMRYRFKLTCFQSSEKNRLQNCLTVSNIQLGNVVSDTFGKSAQAILDKLLENPADTSFDLEPLVYKSLKKKLPELRDAIDGYITPEQVCKLKVIKAHYESLESRKAELEELILALAAPYQQELAILQTAPGIRSDFTAIGIISEIGTNMEAFPSAKHLCSWAGLTPTNNESAGKKKSVRVSKAGCYIKPLLVQCANAVVTSKKHPEIRNRYLRLKKRRGHKKAIIAIARMLLTALYHMLKNGENYNAELYRKSDLPPADWEITVEQAIIIARNQGYKIKSATA

SEQ ID NO: 303338 - protein, 395 aa, unidentified
MNDVAARPMSRVMIAVDPHKASWTAAAVDKSLQVLSTIRVPVSRGGYRSLRRFAQRWSDAGWAVEGATGLGAPLTNRLSADGMDVVDVPAKLATRVRLLSTGHGRKSDDADAVSVAVAALTSRGLTTARTDSAVTALRAVVEHRDDLVRTRTQTVNRLHVVLTHLVPAGAPRGLSAKRAADLLRTVRPRDLAGKTHRGLAVDLIAEVRDLDRRITKAANDIEAAVTESGSGLTELCGIGTLTAGKILARTGSIHRFRSAAAFASYTGTAPIETSSGDIVRHRLSRAGDRQLNCCLHTMAITQISRDTPGRAYYLRKRSAGKSHKEALRCLKRRLSDAVYRQLVHDATQPMGAGPAGHTGAALSSSAAGSHPFAGTSDQSLTGPANCHHTTGNQKP

SEQ ID NO: 303339 - protein, 353 aa, unidentified
MTSVTRLSEVVDVVIGVDTHVQTHTAAAVEARTGALLGQITVETTPAGYEELAAFADEHAALRAWAIEGTGGHGAGLARHLAHDQEVVVELDRPERARRRNGAKSDPLDAERAAREAMARTRLGTPRAGGDRQALSVLLAARRSAVEAATLAQRQLFSLVIAAPEPIRARFRGKKIPAMVATAAVLRLDPSWDTETTTTVTVLRSLARRARDLAAEAAEHEKAILALVRAWRPDLLDQIGVGPIVAATVLCAWSHPGRVHSEAAFAMLAGVAPIPANSGQTTTRYRLNRYGDRQLNRALHTVALSRQRYHQPTRDYTARRTSEGKTPREIKRCLKRYIARDLYRLLENPSPTT

SEQ ID NO: 303340 - protein, 362 aa, unidentified
MRHLSMGIDVGNKQCVLYAFSELGEVVLDAEKISTLNEEAWRKLLQDLSARFTVRACFEVGPHYEWLYDLLMEYCQDVEVVNPADFALISQSKKKTDKVDARKLAEGLHRGDLPLVYVPAKVVRADRRLVSFVHKLSQDLGKLKGQVRALLTPHRLRCPYSDVLGLRARSWLEQEVMEKLDGQEKMFLKMLLARAELMVAQRNELDTLLSERLAKYEGARYLKTIPGFGPLTTLAVISSIDDISRFEKPGQLASYFGVCGAIYQSGQTVFQGPMTKRGNAHVRWLLSQALHHLHRKDPKARQRYKRLKRGKPTGVSRGAQMRWLTEIIWRLLTKGEPYKITPHPQDGRSKADPNDQTSRKAA

SEQ ID NO: 303341 - protein, 348 aa, unidentified
MKEEKQAETRFVGIDLGKRTYEVAIVGKGGKVTMSNGKTFVAGRQSLYKKLRLSDKVALEAGNMAFMMAKEIQAAVGCRVYVLNPSQLEVIYSSMKKTDKEDALKLAHILEDCREERLPVVPVPSDKELGRRKVLANYRRAQQSRNRDINQLHALFVAQGITTKVRKDLSTGDFRKEAVLELAGIEREEAEYLLKRLELCEQRIAELEKQMEEEAAGDKVIELLQSIPGVGPKTAFAFAAHVAAERFDNASQVGNYLGLVPRVYMSGDTVRYGRITKRGERLFAGAVGAGSLGADEYEGGRKAEIAVFVYDGRKIEKQEEGDSGDSAPPCGDDVRDDEGQGMVCFKAV

SEQ ID NO: 303342 - protein, 340 aa, unidentified
MTELYVGSDLHSNNNVIGLIDEQGKRVFRRRIPNDREIVRDVLSPYKGDIVGIAVESTYNWYWLVDTWMDEGYKVHLANPSAIQQYNGLKHADDKHDAFWLAEMLRLGILPEGYIYPKQERPIRDLLRKRGHLMRLRTSLVVSLQNILSRNLGRKMEVNDVKGLQQDRVTPLLEGSEDLAMAGRISKETIDFLTHQIDQIERRIEKNVRLKEAYRFLQTLPGVGKILALTIMLETGPISRFETVGDYVSYCRKVPSQWVSNGKWKGSGNAKNGNRYLSWAYAEASDFARRYYPEPRAYYQRKRQETNAVVAHSALSHKLARAAYYVMRDQVPFDSEKLFR

SEQ ID NO: 303343 - protein, 480 aa, unidentified
MAKRSKSTFERLSGDRLNRKQRRELSRRIGAGDPSLSIVNPHAGGIDVGNESHFVAVPSDRDPSPVQEFGCWTADLDRMAKWLQCCRIDTVAIQATGVYWIALHDILTDHGIRVVLVNARNTKNIPGRKSDVQECQWLMKLHTYGLLRDSFHLAKEMEGVRTVWRLRARHVEEAGRSIQHMQKALTKMNIQLANALSDLSGVSGQAIIGAILDGERDPYRLADLRDKRVKASREEVARSLEGNWREDVLFELGQAVAAYRFAHQQMQECDRRLESYLSQLPSVPLATPTNGSPAKKPKKSGKARDNQPTILNLEAELERICGVNLCTIDGISIITAQTIVSEIGTNMSAFPSEDDFTSWLGLTPGKPVSGGKVLGKGQRKVQNRVAGALRMAATSLLKSDSYLGARYRHLRRQLPSHKAAVKAMARHLAVLVYRLFTRGEAWVDRGAELFDRRRKEIDLASLESKARAKGFQLIPIAQAS

SEQ ID NO: 303344 - protein, 356 aa, unidentified
MYIGIDLHKEVCYATTLDKEGVIIDRREFKNEREEWEKFVEEIPRDSKVAIEACSYWYPVCDFLEDRGIEMVLSHPSKTRIIAEAKIKTDKIDSKNLAKLLRADFLPQSYIPSKEIRENREVLRLRVQLGKDRTVVKNRIHAVLAKNGVKHEFSDLFGVEGTNFLKEIDLPHSQRITLDVLLRQLESTNKEIERVQEQIAVIAREDEDIKILMTIPGIDYHSAMIIKNEIGEIGRFPDYKKLCSFAGLVPRVHQSANTRWEGHITKEGNSLLRWILIQIVHQVVRYPGELRKFYHELKKKKGTKIAVVATARKLLRVIYCMLSRKGFIPKVNVNHGNTLQIISVGGKLFLVEEHIH

SEQ ID NO: 303345 - protein, 330 aa, unidentified
MIVQERAMSKEVFYVGIDVGSQGSLGFSVGFKPKRFSHNRVGIKELWGWAEKHAGEIPLYFCLEGTGVYSVSVASLLLKVRETRISIVNPAQIKAYANSQLRRCKTDQVDAEVIRNFAEANHPPIWEPATKAQQQLYELVQLRDQICTEIRQWDNRSHSRKYLSEIPKLVTQTHRSILRSLKRQLQKVEAQIKAFVAQNAEIAHQTALLTTIPGIAQKSAVQLIAYGQNWLISRTAKALVAHSGLAPHPKQSGSSLNSRGTLDKRGNWRIRKTLYMPTVVAIKHNPVIRDFYLKLCAKGKPKMVALIASMKKLLLIARAVLTTKTPYKTK

SEQ ID NO: 303346 - protein, 386 aa, unidentified
MPQLNDLSRSLVILEQDATLIAVIEMGQSSWLVAGIVPGVERSPLKKLAVDESALLKLLNRWREEAEKAGHRIERIAIAFEAGRDGFWLARWLRARDIEAHVIHASSVAVSREHRRAKTDRLDTELLKRAFLGWLRGERDHCKMVAIPTIGDEDAKRPNRERESLVGEQTRIVNRMKAALSRLGIRGFNPKLKKAAERLEDLRTPEEEPIPPNTLAELRRDMERRRLVRSQIRDIEDARLERIEQARGDGPHAMVRLLARVIGVGIETADMLVQEVLSRNLRDRRAVARYGGLTGSPDESGKKRREKGLARSGNARVRRGMIQLAWRFLMFQKDSALAHWFYARTKNAPQTRKTMIVALARKLLIALWRLVREGAIPEGIVLRPAL

SEQ ID NO: 303347 - protein, 315 aa, unidentified
MIQMKDKVKYLGVDCAKATFDSNLEDSSMTQSWENTPEGVDSFITWIKKHCGKVMVIVESTGGYERLLLRSLYKKTIAVARVDALRARRFAQSEGLRCKTDPIDAEMLTRFGREKNPALWQPPARSVEVLRQLVSRRRQLSDMIKQEKTRLEHAEGFARKDILSMIASLKKRECKIEQRIEAHLQTDEQLYERYEKLMAPKGIGPVTAYTVLAFMPELDSITAKRASSLAGVAPYTQISGTYTGKAKTAGGRKEIRRPLHMAAKSAIRFNPTIRAFYLGLKKRGKEDRVAVVAVMRKLITLMHRIDNDPEFILST

SEQ ID NO: 303348 - protein, 361 aa, unidentified
MEKCIISGMDVHERTIKTCTAAHNGTPEVKTFLNSEDGRGSLIRYLRGLAKTRGCRKIATAYEACALGFGLHDELSNAGIANFVLAPSLMRKSRKDVKRKTDETDARMIFETLRGHLLAGNALPTVWVPPPELREDREVVRARLELGNKTTKIKEQIQMLLKKYGARKPTGLGNSWTMVHRKWLHGLLTCGGPALPPGGKVVLSSLLRQLAMLEGEIRTLDEAVEILSRKPRYQVACQALVKQIKGVGLLTAMVFLTEIGDLNRFRNRRKLGAFLGLAPTSDESGEVTDRKGHINRSGAGRVRWVLCQATWVRLQHDSSESVVFERIRKGAKKLTRVAQTACMRRLAVLMWHTAKDALSAA

SEQ ID NO: 303349 - protein, 329 aa, unidentified
MSEATQLKRFSQSPDPDALYAHLVRNYPEAEYHSVYEAGFCGFWIHYRLVGLGIHNIVVNPADVPTTTSEKLRKTDAVDSAKLARSLRAGELKGIYVPGSESLETRSLIRLRDSITKDQTRLKNRIKSHLRYLGIEIPEEFSGPGRCWNRRFVVWLKGAETGTAYGRQTLDFLVRQYEALRGQRLEMLRAVRALSRTERFEKPLENLMTVPGIGQLTGMSLLSEIDDIRRFKSADQLAAFIGMIPMCHSSGEREGVGDITVRRSARLRSVLVEASWVAVRQDPALSMAYGNYCKRMAPGKAIIKIARKLVNRIYFVMKRNQPYVKCVVA

SEQ ID NO: 303350 - protein, 416 aa, unidentified
MRRPAVGQTADPNPSRNAGNLYIAFDLSATKWQLAISDGVAKPSDIVVDRATVQSAKEALVAQIRAAKQRFGLDPGCPVHAVYEAGRDGYWIARWLGQLGVNCLIVDPASIAVDRKAKHAKTDALDARKLLILLCDHLNGRAGLRVLQPPGATDEDARELHRLAQRLQKNRGQLALRVQSLLFAQGIDRAYHIGLAQEIGDLRTGDGRALGPTLHMEIAVLCRQIAALDTELDALDAKRAQALAAPTTATERVASQLENLVGIGPIGAWMLAHELFGWRQFKNGKHLASFLGLTPTPFASGAMTREQGISKAGPGPLRALMIQLAWSWLRYQPQSPLAQWFNERWAKGGKRSRRLGIVALARKLVILLWRHATTGEVPDGVEFKPGDRKLKVCYRQPRPEASPRRRSPVRQPRQTA

SEQ ID NO: 303351 - protein, 352 aa, unidentified
MNPIKYIGMDVHVSMTVITIMNSDGKVVTEAIIETKASTIKDFFRGQRGTLHVTFEEGCQADWLYDLISPYVAKVIVCNPRKIARSDRRSDRIDAKRLAELLRTNALTATYHGEHSTENLKELVRCYIAIVHDSTRVKNRLKAVFRGRGIACSGTSIYSKENREDWRRKIDNTARLSRADRLWKELGYLTELAEEAEKELLKEARKHAAIKILQSVPGIGPLRAAIILAIAVTPHRFRTIKQFWNYCGLAVRSKITGEYEMMGGQIRRTKKQPLIRGLNRNYSRALKNVFKGAAASAAMGPWKSQYNAKVEEGTKSSLVLLTLARKISAITFSIWIKGERYDDKKLKFTHAG

SEQ ID NO: 303352 - protein, 384 aa, unidentified
MIDVDQLAPHQAATQAQNARVVVSLELSPSSWLVTSLSPGSEKLSKRSMSGGDGAGLLSLLEGLRMKATRRVGGRVDVVCIQEAGLDGFWLHRLLEANGIESHVVDAASIAAPRRKRAKSDGIDGETLIRVLLAWLRREPRVCSMVRPPSIEEEDRRRLIGERERLVDQRISETNRIRGLLASQGIRGYDPLRRDRRDRLAALVTGDGRRLPADLRQELERALDRIELLQRQLRAVEAARDRELADAGQHEPATLLAHIKGVGEQTNALLCFEAFYRSFSNRRQLAAFAGLAPTPWRSGQLVHEQGVTGAGNPRLRTGLVQLAWLWLRHQPASALSQWFTKRVGKQRGPLKRIAVVALARKLLIALWRYVSHGVIPVGAGLANR

SEQ ID NO: 303353 - protein, 311 aa, unidentified
MVCAGIDTGKRQLDVALHKRRERFKVENSTEGHSKLSAWLREHGVKRVGIEASGGYEIDVVAVLRRDGFKVVMFQPGQVRAYARFHLQLAKNDKIDASLIAACTAAVVNIHAPPDPRLAPLAAHLTWIDQIGEDIKCHKTRLETCRDPRAREFWKQEIARLEKIGKSERAALEKAIRQHRDLAERLDLIASVDGIGLKTAVIILVRIPEIGRLSREQVAALVGLAPYDDDSGDRHGRRQIAGGRKRVRCGLFAAALPASFHHNPQLIAMYQRLIAAGKEHKVALVACARKLVIFANTVVARGTAWQPQGAL

SEQ ID NO: 303354 - protein, 346 aa, unidentified
MENIALDVHKHYTWAGVENQEGQQLYASRLAHSRGCIKNFVQRWSAGSPVAVETVGNWYWVVDEIEAGGGKPQLVNARLAKLMMGSVNKSDKLDAKGMNMLQRAGTLPTVWIAPSGVRDARELPRTRMVFSRQRTQLKNRVHATLSKYGYVVDEVSDAFGKRGRQIIEELSSKLPPHTKQALDHVLDQLDEVMGNLKAVEADMIKAFAPCAQTTWLESLPGVGQILAVVAWTEIGSIERFDRAEQLASYSGLVAREHSSGGKFHYGAIRRDFNVYLKWAFVEAANSAIVHRDHCGYQHVSQLYQRIQPRRGYNRAKVAVARHLAEASFWMLKKGEPYREPRLSTQR

SEQ ID NO: 303355 - protein, 407 aa, unidentified
MRLFVGDDWAEDHHDVELMNEQGRVLARKRLPEGVAGMARLHELIGEQLGEGADDAEVVIGTETDRGPWVAALVAAGYTVYGVNPLQASRYRERHGVSGAKSDTGDAHMLTDMVRTDSHQLRAVAGDSPGAGAVKVVARTHKTLIWERTRQVQRLRHQLREYFPAALEAFDDLDAPDALELLARAPDPARAARLTRAQISAALKRARRRDIPGKATAILTALRGAQLGQPPAITAAYAATVRSLIAVIITLNEQVKILQGQVGTDFGQHPDAEIYLSQPGLGPVVGARVLGEFGDDPHRYASGKARKNYAGTSPITRASGKKKMVMARFIRNDRLIDALMAQALSALGSSPGARAFYDAQRAAGVEHNAALRKLANRLVGILHGCLKTRTPYDESTAWSHRENKLTA

SEQ ID NO: 303356 - protein, 421 aa, unidentified
MKGSRTKKVNTIQEGTLIVAVDIGMVKNHGCCIAADGRSTKTVSFDNTREGIDSFWGLILASKARFQCTEVIVGYESTGPYAEPLAHYLRQKSVTIVQVNPLHTKKMKEINDNSPLKSDRKDPRVIADVIRLGHALSVVIPEGDAAYLRRLTNVRERHIKERTALLNQLQQFVFLIFPEFTRIIKTIASRTARYLLKEYTTPARIRSVKVEELAAEIRRESRRKFGAVHAIALINAAKTTIGIPEGVEGLVLDIQHGLLQLELVDSLIAEIEHELEMTLLRIPYSRKLLSIKGLGIVSVAGLIGEVGDFTKFNTQAEIAKLAGLNLYEVSSGKRRGQRRISKRGRSLLRKILYYAAIQTVRKNGILHEYYQRLIGRGMKKIMALVAVSRKLLRIIFAIVRDDSEFLLNYDSQRKEVTREAA

SEQ ID NO: 303357 - protein, 366 aa, unidentified
MQEISTMQASGSNNFKGQQTTIGLDLGDRSSNYCVLDATGDILVEDKLPTTSLAMKQLFGRMLRSRIAMETGTHSPWVSRLLTELGHEVIVAHAQKVRLIVKSRKKDDRIDARTLARLARIDPQLLSPVQHRSAEAQIHLTEIRARAELVRARTALVNSSRGLAKSYGERLRKCGTQQVGRELAMGLSAELRAALEPLLREIESLNEHIKEYDRRIEKMAKDTYPEVKLLKQVKGVGDLIALGYFLTIEDPHRFKKSRDAGCFLGLQPGRRNSGESEPQMHITKEGDRYLRTLLVQGAHYILGPFGEDSDLRRWGQKLAERGGKKAKRRAVVAVARKLAVLLHRLWVSGEVYEPLRNSKKAMSTAA

SEQ ID NO: 303358 - protein, 410 aa, unidentified
MNPLYVGIDVSSKSNVIYFMKPDGSKHSNFPVANSLDGSRLLVKRIISAITSESLSDVVIGLEATSVYGDNLVCFLREDGSLMPYNKKIYVLNPKQVKKFKEAYNNLPKNDYIDSFVIADCLRFGRINNEVYMDDYRFKALQNLTRARFFAVQNLTKEKQRFLNQLFKKYSSFTQEKVFSDTFSTTALAIYEEFDSADKLAYMDLHDLTEYIKNKGKNRFSDPDAVAKAIQKAARSSYRLPKTVNDSVNQVLSISISSMKALQTQIKAFDKAIAEQMELIPNTLISIKGIGPVYSAGIIAEIGDINRFHNHAALAKYAGLAWTQHQSGEFEAEITRQIRSGNRYLKYYLGEAAWSLVRCDTEYNAFYHLKFKEVNRFQHKRALALTARKFVRLVFRLLKDNCLYIPPENR

SEQ ID NO: 303359 - protein, 400 aa, unidentified
MNAVGIDVSKGKSMVAILRPFGEIISSPFEIHHTSGDIRLLIKQIKSIAGETRIVMEHTGHYYEPLAHELSNANLFVSTVNPKLIKDFGNNTLRKVKTDKADALKIARYTLDNWTDLKEYSLMDEIRNQLKTMNRQFSFYMKHKSAMKNNFIKILDQTYPGVNTYFDGPARDDGSQKWVDFATTYWHVDCVRKMSLSTFTDHYQKWCKRKKYNFSKYKAEEIYGTAKELVPVLPKDSLTKLIVKQASDQLNSTSKTVEELRTLMNETASHLPEYPIVMAMQGVGPSLGPQLMAEIGDVTRFNHKGALAAFAGVDPGVNDSGSRHQKSVKTTKRGSANLRKTLFQVMDGLIKTKPINDPVYLFMDKKRAQGKPYYVYMTAGANKFLRIYYGRLKEYLNTLT

SEQ ID NO: 303360 - protein, 315 aa, unidentified
MSESKVEVFVGVDVSKDTLDVRIEPPGESFQVGNDDEGIKALCSRVSELAPTLIVMEATGGLETRAAGELAARGLCLAVVNPRQVRDFAKASGQLAKTDRIDTHVLCGFGRAIRPAARPMKDALTQQLDDLVTRRRQLVEMRVQETLRLHGASKVQAKSVKAHIAWLDKRIKSVEIDLGTRLRSSDAWRVKDDLLLSIPGVGEITSRSMLSRCPEIGRLSRREIAKLVGIAPLNNDSGKYRGQRHIWGGRADVRSVLYMATVSAIRCNPVIKAFAASLKSTGKAPKVVIVACMRKLLTIMNAMIKTSTRWNPQAA

SEQ ID NO: 303361 - protein, 361 aa, unidentified
MNATTVAVDLAKSVFQLAVADEDWRVVETQRLTRTQFERWFANRDVSLVIMEACGSAHHWGRWLNGLGIEVRLLPAQYVRAYVKRNKTDAADAAALLEAARASDMRPVRVKSVEQQALQGMHRIRSLWMGTRTSRINALRGFCREFGIAIPVGARTGVEAISRVLADPNTAVPDLIRGTAKLLVEEIHLLEARIAQLERELAALAKLSPACTTLLSIPGIGLLTATALVAATSGDVSHFKDARHFSSWFGLTPKEYSSGNNRYLGHISKKGDRYLRMLLTHGARSVLRASKVADNAGREVCGVRRWALDVQSRSNHNKAACALANKLARICYATLRDKEPFGEQTVRLSKKISRESFVMPV

SEQ ID NO: 303362 - protein, 342 aa, unidentified
MLIIGCDYHPSVQQIAFVDTETGDYGDQRLKHSDEEAEKFYRDLKLRGVSVRVGLEATGHTRWFERLLAELGYELWIGDAAQITAMRVRKQKTDRQDAEFLLKLLLEDRFPRVWVPSPENRDLRQLLWHRHRLVQMRTRILNQLQSIAMSEGIQRRGGLRSKQGRKRLELLPLACWATRRRQDLLSLLDRLNESIEELSAAVQQEAEKRPEVRLLMTHPGVGPVTALAFVLIIGYPERFRCGKQIGSYIGLIPEEASSGNHRRLGHISKQGSSLLRFLLVEAAQAAGRFNPEWRSKFLHLAMRRERRIAKVAMARKLAVSLYWMWRKQRNLEQLGELGSHAG

SEQ ID NO: 303363 - protein, 411 aa, unidentified
MEAAVITAVGIDVSKSKSTVAVRRPGGEIALRPFEVHHTNSDLKKLASTLKKLGGDIRIVMEHTSTYWRPIALTLKEAGFFVSIVNAMLIHDFSDNTIRKLKTDRADALKIANYALTFWDTLPPFNNEEETRLLLKMQSRANERITATATALRNGLIALADQTFPGVNIAFAPNTKNANGHEKWVDFFLRYWHKDCVCQYSMEAFTESYRGWCKRKNYKFRTDTAHKIYLLAQEGVATLPKCESTKMLITQACKSLNAVCEAKQSTQLEMQRLAAMLPEYEVVMQMEGAGPITGPALMAEIGDVRRFKNKKALVAFAGIDAPPFQSGTFESKSRHVSKRGSPHLRRTIFIVSNIILTRSNPENAVYCFMDKKRSEGKHYYVYIVAGSAKFLRVYYARVTEFLRSQPSPDAC

SEQ ID NO: 303364 - protein, 323 aa, unidentified
METPQVSFKQVVSRGCGLDVHKKAVVATIDGEGLKKQTREFGTVTSSLKELRDWLLENGITHVAMESTGVFWKPVYNILEPAGITVWVVNAAHVKYVPGHKTDKKDSAWLCKLLLAGLLKPSYIPAKEQRELRDLTRYRTKLIQSNASNKNRIIRILEDANIKLSSVLSSTNGAVGTKLIDKICDGEEITMQDVDEVYHKKLAATKEEIFEACQGFITEHHVYMLQIIRQEIAGTQQTIESLTQRIKEVLLPYENALELLKKVPGISSKSVEDLVAEIGLDMGVFPTEKHLASWAGMSPGNNESAGKKKADGQPGETNKLELC

SEQ ID NO: 303365 - protein, 391 aa, unidentified
MIFVGIDVAKDKHDCFILNSEGTVLADVFTIANNRIGFETLLSRIQSCSQGESKIKVGLEATGHYSYNLLGFLLDSGLATYVINPLHTNLYRKSLSLRRTKTDRIDARTIAMMLMSDVDLKSYSNTAYHNEELKSLTRYRFDKVKERAKLKSSVARLVNILFPELEKLVSSLHIAVVYALLSNYPGASDIANANTEELAETLCTASKGRYTKSKTAEIQVAAGASIGSKMPAKSMELKHTIALIRELDKEISEVESAIDKITSQMDSPIFTIPGIGRHMGAMILAEVGDFSNFASADKLLAYAGLSPSTYQSGQLQNCYAHMEKRGSRYLRYALFNAAKYVCLWCPTFSAYLEKKRSEGKHYNVAISHAAKKLVRLIFAMQRSGKAFLADY

SEQ ID NO: 303366 - protein, 340 aa, unidentified
MSEKEAILGIDISKDKFSAALLKGEKKSQVKEFANNLEGFEQLKQWLEQNQLEKVHACLEATSTYGHSVATYLHGLGHVVSIVNPARIKGFAQSRLSRTKNDQADATTIARFCAALKPQAWIPPSPEMAQLQSYSRRLRALEQMATQEKNRLKTTVDESLIEDIEAHLVFLETQIDNVKKRQKELLNEYSSLKSQADLLTSIVGIGEPTAMTILAEIGDINQFSSARQLAAFAGLTPQEHQSGTSVKGKTRLCKIGNPHLRKALYFPALSSMRHCSPMKDLRERFLEAGKNKMQIVGVVMHKLIRIVYGVLKSGKPFDQTKLALPNVVLEEETDFLPVSP

SEQ ID NO: 303367 - protein, 319 aa, unidentified
MDNLSHGRIIGIDVSRDWLDLHCLPDGVQCRIPNIPEGHTAVADLAHDRDAVVCFESTGGQEWQLWAKLEAESVVARQVPPAQVKAFAQSRGTRAKTDRIDAELIARFFAFRPDAGRSLPAEKLRFLRALTSKRAQMVEMRKRLLAQVRAHQKLGTAEMFDGIDTELKVRLDSLIKELEDRIVAAISSDDLLSETVGVLRSIPGIGPVASTMLVAEMPELGTITGEQAAALVGLAPVAHDSGTMRGKRSIAGGRRALRHVMFQAALVAAHHNPTMKAFADRLQKAGKPHKVIVTAVARKLVNLANALCKKRQKWVLPKP

SEQ ID NO: 303368 - protein, 336 aa, unidentified
MAIVTVGIDLAKNVFALHGVNETGHVDLRRPSVARAKLHGLVASLPPCTVAMEACTGAHHWARLFAQSGHTVKLMAPKLVAPYRMSGKRGKNDAADAAAICEAVQRPSMRFVPIKSAEQQSRLMVHRARQGYITARTATINRIRGLLAEFGIVLPQKAEVVRREAAHHLDELPGFGKTVIEDLLAEVRHLDERVKQYDVHVRAMARDCTAAQQLMQLMGIGEATATALVAMVGNAREFDSGRQFAAWLGLVPGQYSTGGKMRLGRITKAGDAYVRSLLVMGARAVLNAAPSKNDSLSRWAVKLALRRGYWKADPVSHSRLEQVDSKIPPPRDDPKR

SEQ ID NO: 303369 - protein, 389 aa, unidentified
MFYLGIDIGKNTHVASLIDSKKKVLFKAFSFSNSIDGAESLICKLEPFKNQLEIGMEATGHYWLSLYSYLSEKNFTVRVINPIQTDGWRQGIEIRKRKTDIIDSLLIADLLRYGDFVETSLSNEDYLSLRNLSRFRSYLVSSIGDLKRKTIALLDQVFPEYASSFSNIFAKTSKEILANFSSPSDFEDINSEDLQSFLNNVTMKKFATRKLEELSKKASKSFGVNFCMDSFGLQIKMLIGQISFIQNQVLDVEKEIKSLLEKLNSPITTIPGIGAVNAATILGEIGDIKRFSNPSKLVAYAGLDSTVSQSGNFEFTSNHMTKRGSPYLRRALFQSALRAEFCDPVFSDYYQKKITEGKHHLVATNAVARKLVHTIFAVLTKNEPYQVQS

SEQ ID NO: 303370 - protein, 374 aa, unidentified
MIVIGVDTHKRSHTMVALDAATGATRGQLTIAASDEGTLDALRFAGELDNERVWALEDCRHVSGRLERGLLASGDRVVRVAPGLTETSRRAVREPGKSDPIDATAIARAALREGIDTLPVAFLDEQAHEIRILTDYRDQLVHERVRQINRLRWHLVQIAPQLEAQIRPAGLEGPRIRARLARQLGQLPRSPQLRVAKAILKRICEICREEQALLTELKTLIEAHCPQLLAERGCGPVTAAIIIGHTAGAKRFPTDACFARHAGTAPIPANSGNTKRHRLHRGGDRQLNRRVAHHRALPRPHRPHYPRLPRPPTRRRQNQERSDPLPQTPPRPPHLEAALHDHTSRKSGGRNPTTSPPRPSERLTRRRCERQGSE

SEQ ID NO: 303371 - protein, 313 aa, unidentified
MTSALEVFVGIDVSKRTLDTAIHEQETTWQLEHDEIGLGKLIDLIAPKSPHLIVLEATGGLEIDVTAALMEAGLSVAVVNPTRVREFAKAIGQYAKTDRIDAQLIAHFAFKVRPAAAGWKSQQQSVLSAYIRRRQAVIQNLTAEKNRLATTPEPLLKRVMKHIVWLEAERDELTQEVHELIRADPVWSKKEQILQSVPGIGPVTAATLLAELPELGTTSRQKVASLAGVAPFNHDSGRKRGKRRTFGGRAQVRRTLYMAALSASRSNPAIRRFYQRLLANGKEKKVALTACMRKLLAVTNTMLMRMEPWRLTG

SEQ ID NO: 303372 - protein, 346 aa, unidentified
MDYFAGIDASLETANVCVVDGDGAVILEQKVGAEPKDIAVLLKHFGKPLKRIGLEAGPTSSWLFSELRAAGYPALCLECRHVKAGLCAMRNKTDRNDARGIAQLVRLGWFRLVHVKSEEAQQIRMLLVNRTLLLGKLQDIENSVRGSLKVFGLKLGRVTKHSFEARARELIEGHSVLIAITEPMLRVRRVLMDEFFGLDRMARKLARKDPICRRLMTVPGVGVIVALTYRTGVDTPERFTRSRDVGAHFGLTPRRYSSGQVDYDGHISRCGDEMVRTALYQAAHVLLHHGRWSGLRGWAMRIAKRSGVKLAKVALARKLAVVLHRMWVDGTDFRWTTREQARALAA

SEQ ID NO: 303373 - protein, 333 aa, unidentified
MNPVNLVGIDVSDATFDAKKRCGEVVSHRQFDNTAAGHLQAIRWILRGTHDARVCLEATGIYHLQLSLALSEAAGIELMVLNPRASRRFAEARLTRAKTDKVDAEGLLEYLQRMPFRPWTPPNDEILELQSIAHRLAQLGKEQRREQARLHAAQRAGKHTRIAQSDLRQHLRYLAGRAKAIESEAIALMKRHPSLAEDLRLVDTAPGFAELSSMKLLAEIEVLPKNLRAPQWVAQAGLDPQPKESGNKKGPRQISKQGNSKISAALFYPAMSASQHDPNVNAFYESLIARGKTPLQALVAVMRKLLHAIWGMLHHRQPWDGNKFYRLNPVKST

SEQ ID NO: 303374 - protein, 345 aa, unidentified
MDYYAGIDVSLESASLCVVDATGRIVREAKVASEREILIGWFHALGLAVTRIGLEAGPLSQWLYAGMRDAGLPVELLETRHVRDAFKAMPVKSDRNDARGIAQLMRLGWFRPVHCKSLPAQEVRALLTARKLLQTKNHDVEMSLRGVLRGFGLKVGPTTPRTFPGRIRELVAGHTTLSTVGEALLAARGALFEQWQKLEKRLRSLAREDERVRRLMTAPGVGTIVALTYASAIDDPARFRSSKAVGAHFALTPKKYQSGETDVTGRISKIGDGGVRTALYEAANVILTRPVKGSTLKSWGMRLAARAGMRKAKVALARKLAVVLHRMLADGTNFLADKAAVAAAR

SEQ ID NO: 303375 - protein, 346 aa, unidentified
MTNTFYAGIDLHSNNCYIAVLDDEDRPVAQKRLPNELPAIFEFLSPWRDQIAGTVIESTYNWYWLVDALQKGGYAVHLANTAAIQQYSGLKYTDDKSDAVWLARMLRLGILATGYIYPKEMRGVRELLRRRMLLVRQQTMVLLGIKSMITRYENIKFTAQRIKRYCGDEENMGEKILNHVQDENVRMAVQSEMKVLHCILQEVANLESIILQQIEGDKSFNLLKTIPGVGPILAMTILLEAGNISRFKKSGNFSSYCRCVSTKRISNEKKKGSNNKKNGNSYLEWAFVEAAHNAIRYAPLVKKYYQRKTSRTKMVVARKAVASKLSKACYFILRDGVPFDVTKAFC

SEQ ID NO: 303376 - protein, 424 aa, unidentified
MSKFSAKPASSATPVILAVDVSRDRLNLFTRIAGREHELEFANRTDVIETELKALAARARAAGAKEVLVVAESTGRYHCSLLRVAGLLGLQTAWVSAEAVAKMRVVESNDTGKTDRKDPRVIYSLASLGKTLRHRELDEPYSLLRLYNGLYDEAESGVVQAKCAIHERLKTLFPDFGFKKDFLFGRSGRALLELYGCNPYRIVRAGRKRFMAAMKKAVPTMRRSSIEKLFAQAEISVRLNLPERYVQVLEMRLRQAFEDLDLHTDRKERLKRTMEGLYRELRRQDDRLPAAKKGVITSFHLARVVAETGPLSDFSSWRQVLRFAGLNLRERQSGTYRGKNRITKKGRSLLRKILSQIVLPLVKRTSLYGPYYHHKRKVEKMPGSKAITAVCRRFVKLLFGWYSSEKQFDQARVFVCESQYQKAA

SEQ ID NO: 303377 - protein, 462 aa, unidentified
MHPQMTNIQASAQDAFEHIFASAGALVFVNEYSGSAAPPAPYNAFAEHKLACPLAQRYHTLGRSHMQPEAPEAFAAFVGLDWADAKHDVCLQAAGSAQREHRSLDHTPEAIDAWVCSLQKRCEGQPIAIGLELNKGPIVFALRTYHVLVLFPVNPLTLARYREAFTPSRAKDDPTDAALQLALLRTHRDKLPPLTPQSPTLRALAQLVEHRRRVVGDTVRITHRLTSTLKNYFPQALQWFQDKDPVIFCDVLSRWPTLKAAQLARRSPLETFFREHHVRSADVIAQRINAIKAAIPLTTDESIITPNVLLVQALVSQLRATLQAIQDFDTAIAQHAQRPPDFPLFQTLPGAGPVFAPRLLVAFGEQRERSASAAELQPCAGIAPVTERSGKKCWVHWRFQCPTFPSGHASIPSSNAMRAKPTRPPCALWRSRGYACSFGVGRIARRTMSPSISMHSTAVGHP

SEQ ID NO: 303378 - protein, 458 aa, unidentified
MARAARRQGRSQSRKGHSRRTRSAQLEQLNYHAAGIDVGADAHWVAVPRDRDEQPVQCFGAFTADLYALAEWLRQCQIETVVMESTGVYWIALFEVLEERGFDVKLVDPHTVRQVPGRKTDVKDCQWLQELHTYGLLRGAFRPEDEVCVLRSYLRQRSMLVAMASRTVQHMQKALEQMNLKLTEVVSDITGKTGMTIIRAILAGERDPQLLATSRDKRCKHDQGTIAKALTGHWRAEHLFALQQAVDQHDFIAQQLRACDGQIEGCLQAFVPDVEAASLPSTPVRTWRSSRSNPLSFDVQTYLNAMTGVDLTQIDGIDSLTALKVISEIGLDMTRWPTSKHFASWLGLCPGNKLSGGKRYRMRSKPSANRAATALRLAAQGVANSHSALGAYYRRMRARLGAPKAITATAHKLARLVYSRPLAKVIWVVASPSCRDSPASAIASRIVSFCFYTSLQGF

SEQ ID NO: 303379 - protein, 335 aa, unidentified
MQIKHFIGIDVSKDTLDLSVVVNGNVLTHYCIANNSREIKSTVNKIMKSLGGSFEDTIFCMEHTGLYNRPIVKWLHNNQGKMWLESGVHIRKTLGLVRGKNDKIDSYRIAMFAYTNQHKIKLWALPRQVIEKIAALLSQRARLVKVRKQLTTANKEQKKFLEKDVMHSLNIYTDRTVSVIDKQIEAIESEIIALIKDDEKLNRMYQIITSITGIGFVTASYILVTTNEFININDPKKFACYSGVVPFEHTSGTSVRGKNIVSHIANKTIKALLHLSAMSTLNTPGEIQDYYKRKIAEGKNKMSIINAIRNKLILRVFACIKQNREYEKNYCYKFA

SEQ ID NO: 303380 - protein, 345 aa, unidentified
MKITVIGIDLAKAVFQVHGVDERGKPVLRKQLKRKDVASFFANLEPCLIGMEACGSAHYWASKLAELGHTVRLMAPQFVKPYVKTNKSDRNDAEAICEAVSRPNMRFVPVKTAEMQAVLALHRARQGFVKARTAQANQIRGLLAEFGIVIPKGIGHIAKRLPEILEDGENGLPGMMRHLLERLGGQLKELDRQVGELEQQIKLWHRENESSRKLEAIAGIGPIIASAFVASVGDAKNFKNARQVQAWLGMVPRHEGTGGRTTLGRISKRGDAYLRTLLIHGARAVITQFQRKPDQPEGWLKRLLARRNKNIAAVALAAKNVRIAWALLAHERSYQRDYVASRPAA

SEQ ID NO: 303381 - protein, 386 aa, unidentified
MKRNDLSRSLVAFDQASTMVAVVELSFRSWLVAGLVPGLTRQPLKKLGPDAQALLTLLRRWQGEATKAGSTINRIVVAFEAGRDGFWLARWLRARGIEAYVIHPTSIPVSREHRRAKTDRLDTGLLMRAVLGWLRGEPKHCSMAAIPTIAEEDARRPNREHQTLVQERTRIVNRMKATLIRFGIRTFNVKLRKASDRLAALRGPEDEPLPPNTGAELRRDMARLQLIRDQIKVIEEARLQQLKHAPRKGTHPMLLMLAKIIGVGVETADMLVHEVLSRKLRDQRAVARYGGLTGAPDESGTKRREKGLARAGNARVRRGMIQLAWRWLTHQKNSELAQWYQTRTTGAKPAARKTMIVALARKLLIALWRYVTTGEMPAGVTLHPAT

SEQ ID NO: 303382 - protein, 343 aa, unidentified
MQVSTIGVDLAKNVFQVHGVDSVGNIVITRQLRRKQIIELFGKIPACLVGMEACGTAHHWAREVSKLGHTVRLMPPSYVKGYVKRSKNDAADAAAICEAVTRPSMRFVPIKAADQQALLMLHRTRDLLIRQRTQLINALRAHLAEFGLVAETGREGLAQLAAIITDESNREALPSAMKQALQAIVDQLAALELQIGALDRAIHAHHRANDMSCRIETVPGIGVIAATAIASTVTDPSNFKSGRDFAAWIGLVPRQHSTGGKERLGGISKQGDRYLRRLLVNGATSVVRNARQHPQKHPWIMRLLAKKPAKLVAVAVANKMARIAWAIMAKGGYYRAPELAVAA

SEQ ID NO: 303383 - protein, 310 aa, unidentified
MDMMVAGIDVSKDRLDVCVLPKCEAFQVSRDAKGIDELVVRLAGADLIAVEATGRYESIVSASLAAAGLPLVVVNPGQVRHYAQALGQRAKTDPIDARVIALFAAATKPQIRPFADEATRLLSALIVRRRQIIEMIVAEGHRARMTSDGRLKKSIARLTKALERELSDIDAGIDEQICKSPAWSEMEALLTSMPGVGPVTARTLIGEMPELGRLNAKQIAALAGLAPFTRQSGKWRGKSFTGGGRSSVRSALFLAAMAARRYNRILKSFADRLAAKGKPKIVVIVAVARKLLTILNAMIRDRQPWTEQNA

SEQ ID NO: 303384 - protein, 367 aa, unidentified
MKKVSTVAARPSKKMSQQKLTVGLDLGDRNSWYCVLDESGQIQLEQRVHTNAKALREVFGEMPHSRIGLEIGTHSPWISRLLSALGHEVIVANARKVRLIGESRKKDDRLDAQTLARLARIDPELLYPVKHRSAQAQADLMMIRARAGLVRARTGLVNTARGLAKSYGERLRGCNVRNMNPEKAEGLSPELQSALQPLLVCIESVSEQIREYNERIEKLAQDSYPQVALLKQVKGVGTLIGLTFLLTLEDPHRFRKSRDVGCYLGLQPGRRNSGQSEPQLHISQEGDPYLRTLLVQGAQHILGPFGVDCDLRRWGLKLAERGGRNGKKRAIVATARKLAVLLHHLWVSGEVYEPLHNSRPTTVAAAA

SEQ ID NO: 303385 - protein, 315 aa, unidentified
MNEEKQQVFIGIDVSKKELEVALRPMGARSVFSNDEDGIALLVNFVRSFSPTLVVLEATGGLETGAVGALAAKGCPVVVVNPRQARDFAKATGKLAKTDSIDAHVLAHFADAVRPEVRTLKDVEAQNLDALNTRRRQIVEMLTAEKNRLLMSPSWTRKDIKSHIDWLEKCLHKVNKEMDKLLKKSPVWREKDNILQSTPGVGPVLSITLLADLPELGMLNGKQIAALVGVAPMNRDSGMFKGRRAIWGGRAGIRSILYMSAMSAIRFNPVIKVFYQRLRAAGKVHKVALTACMRKLLVILNAMLRNGNYWNVACS

SEQ ID NO: 303386 - protein, 389 aa, unidentified
MPNVSDRPEAPTAIQTHLAASFVSLELSRSIWLITSLSPGSGEKMSKHSVRAGDVAALLVRFSELKRKASERTGKSFPIVVIQEAGLDGFWLHRVLQSEGVESHVVDPSSIATSRRRRRAKTDRIDGEALLRALLAYKRGEPRVCAMVKAPTPEEEDRRRLCRERKVLIAERVKHVNRVKGLLFSQGVSGYEPLRRDRRQRLDELTTGDGRPLPVHLKTQIRRELDRLELLLDQIKQAEAERDVLLAAPQPAAPAPAGRMLLEFKGIGAELAAGLWLEALFRHFDNRRQLASYAGLAPTPWQSGSVDHEQGVSKAGNPRLRTTLIQLAWLWLRHQPQSALALWFKERVSGNGGHFKKSTIVALARKLLVALWKYVTAGVVIEGAVMKAA

SEQ ID NO: 303387 - protein, 404 aa, unidentified
MHEPDRRFVALDLHKSYIVAGAVDDQLNVVLHPRRISCAKLEEWAKRHLRATDAVVLEAGPNSWFVHDLLQPLVDSVTVVHSYHVKLIAASMVKTDKIDTLVLARLLAVDILPGIWVPPHHVRELRSLISHRSRLVKQRAAAKNRLHSVLHRHNLVAPEGTPFSESTRDWWSTLPISNAEKLRVRQDLSVVDHLSPLIREVEQQLAQLSVSEYWVEQVPFLVQIPGIGLLSSMTILSAIGDVTRFPTAKKLVGYSGLGGRVHISGRKRRTGGITKQGRRELRTVMVECAWAAVRTHPFWSAEFAQLEKRIGKQKAIVAVARKLLVVVWHVLTARAADRQADVPAVARSLMNWGAGHRLATGLGLSRPQFVREGLSQLGLGSSMASFSYCGRVYKLPSSVESADT

SEQ ID NO: 303388 - protein, 389 aa, unidentified
MKPDSQMTLDRYFRQCVGIDVSKDKFTACLQMYDRASDVGCHTMSIDFDNTKSGFNQFVKWSRKEAVKGFPLTYLMEPTGVYYEPLAYHLHKIGQTVYVVLPNKARSFCEAEGIKTKTDAMDARCLALMGCTSRKLKPWSPPAPIYRELRQMTRFHADLSQIMTSVMNRMESLNHVEEADKTVHKNCQKLIDEIDTLMENNDKAIMQKVAEDKELETRVKRIAKTKGLGVTTVVCIVAETEGFHLIENRKQLTSYAGLDVRAKQSGKEDPKHAISKRGNAHIRAALYMPALVAVRYNPQIKAAYGRICQKRPKEKKIGVTAAMRRLLLLIYTLWKNGEEYDPMRDKTHTPKKRMKEEDTELEYGPKDCIGPKHEPVDWNATDEHGNPPF

SEQ ID NO: 303389 - protein, 356 aa, unidentified
MATIAHFDATRVVVGIDTHKDEHVAIAIDGLGARLGGYRCRATPAGYSDLERWASSLGDVAAFGVEGTGSFGAGLARFLSSRGHTVIEVSRPDRSTRRRLGKSDPIDAEAAARAVLAGVAQGVPKSGTHSVEMIRMLKVAKDSAVKARTQAANQLMALVLTAPAELRQALSGLSAGRLVRRCAGLRPGDVVTPTAAAKFALRSIARRHRQLTAEVKTIGTELDRLVAETAPALLQAFCVGPDTAAVLLITAGDNPERLRSESAFAALCGVSPIPASSGKTNRHRLNRGGDRRANSALHRVVIVRLRYDERTRAYMARRTAEGMTKPEVIRCLKRYVAREVYSILRSLVQRDLAQAA

SEQ ID NO: 303390 - protein, 329 aa, unidentified
MYARCAGIDVQKRTVVVTVVLTGLEGPAQKQTRPFGTMTADLLALGEWLEEERVTPVALESTGVSWWPVSHRLEEGCRLLLVTPQHLKTVPGRTTEVKDSAWLADLVRHGLLHASVIPPAPLRALRELTRSRKTLIRERVHQANRLQQGLASATSKLAAVASAVLGMRARQMLEALLAGEEDGAALADLARRHLRRTIPALKQALEGRLLPPQRFLLRALRAHVDFLDAAIVRVQAEMEHHVVPSQEARRLVQTIAGVNETAAAAIRAAIGTDMSRFPSAGHLASWAGVCPGTKQRGGQRLKEATTQGSPWLRAILGAVVFAIAHTRDT

SEQ ID NO: 303391 - protein, 391 aa, unidentified
MFFIGVDIAKYNHEASIIDSNGKLVSESFSFSNSIRGLEKFQKFISSFSIDSNNCIIGMEATGHYWLSLYSFLIDLGFYCVVINPIQSDAFRKMYIRQTKNDSVDSFVIAQILRFGEFSLSHFSDEDTFALRNLSRFRFALVDEASDWKRKLVSILDQVFPEYSSLFSNIYGVASKELLSKYPLPEDMISIPADELAMLLSKCSKGRFGIDKAKEIQEKASNSFGVKFALKSFSFQIKQIIAQISFLEDQIIELEDEISSMINSLCPVITSITGIGDVLGAAIFSEIGDISRFERANQLVAYAGLDVAVKQSGNFNATDTKISKRGSPYLRRAIWLAASVAAFRDPALSVYYQKLRQRGKAHGTAIGAVARKLTNIIFAVLRDNKAYIPNI

SEQ ID NO: 303392 - protein, 339 aa, unidentified
MKLFGAIDLHSNNSVLVLIDEKDEVVYQKRLDNDLRLILEQLAPYQASLEGMVVESTYNWYWLVDGMMEQGYRVHLANVAAIQQYSGLKYTDDDSDARWLAHLLRLGLLAEGYIYPRETRPVRDLLRKRSQLVRQTTVNVLSIGNLYTRNSGQTLSAKRIKGLDEREVEQLLPHKDIALAAKANLAVLRSSMEQVEKLERTVIKRVKLRKEFKNLKSAPGIGPILSLTIMLETGEIGRFASVGNYASYSRCVGSQKISNGKRKGKGNSKNGNKYLSWAFIEAANFAIRYNDQIKSFYQRKKAKSHGVVAIKAVAHKLCRACYYIMRDGVRFDMSKAFAK

SEQ ID NO: 303393 - protein, 422 aa, unidentified
MKIVYPICCGIDVHKTFLVATIITSNGITPHYSKKRFSTFNNSILQFKQWLIDNNCFDVCMESTGKYWVPIYNLLEDTIRVTIANPKWVKAIKGNKDDTKDSKWIGDLFRLGLVPGSYIPQKPIRILREYTRYRSKLVSCKSSEKNRFQNAFTVCNVALDAVVSDMFGKSATYITDYLISSDTFDPEHCASLLQKSLKKKASSVIESIEGYQITQAQKERMVMIRSHLNYINNSIDKLDQALSKMLKPYESTIELLCTIPGVDRQSAITIISEIGTDMSQFSNSKRLCCWAGLTPGNNESAGKKKSVRITRAGVYLKPALVQVAHAAVKSDKSPYYKIKYERIYKRRGKKRAIIAIARMILTAIYYMFTTGEEFNPCDLYKIDMPQEMQDKQKEKAVKEAVRFLIAQGVIKDSNISIQESNH

SEQ ID NO: 303394 - protein, 351 aa, unidentified
MDEITTIGLDIAKNVFQLHGIDAHGRIVLRKSLRRGQMQQFFEKLPPCLIGMEACATAHHWARTLMTSGHDVRLIPPAYIKPYLRRQKNDAADAAAICEAATRPSMRFVPVKNEEQQATLMLHSTRDLLISQRTALINALRGHFAELGIVVAQGARNARQLIDIVNDEDNSVLPASARHALQPIAAMVVGIETQIGKLDKDILATHRNDDVSKRLAAIPGIGPIIASCLSASIPDASVFKCGREFAVWMGLVPRQFSTGGKPRLGSISKMGNRRLRTLLVVGAHAALYRMKSGKTQTLLADWARTLLSKKPFKLVAVALANKMARIAWAVMAKDIDYEPGSNGHKFVQIIA

SEQ ID NO: 303395 - protein, 353 aa, unidentified
MLAKHILGIDIAKLKFDVCLRERTDSGVRHVHQFPNTPKGFAALQRWLRQHKAEPVHACLEATSRYGDALAAFLHAQGHTVSVINPRRTRNYANGRLVRTQNDTIDAALIADFGASEPVRVWQPMAANRQLLQELMRTRAFFLHQKQQGQNRLETAFPTSAKLLRQQIRQLDAMLRQIEKQLAQLLKAEPELARQVKLITSIGGVGLITAAVAVAELPPVSQLEHAGQAVALAGLDPRRKTSGTSVHTAPRLSKMGSSLLRQTLYMAAMAALRYNPVVMALGERLRAKGKGGKCAIAAAMRKLIRLIYGVLKQGKPFDPNWLERDRAVQAQGPAGDGDGRPSTLLASPSVATA

SEQ ID NO: 303396 - protein, 387 aa, unidentified
MPEPNSLDRSLVALEQDSTLVAVIDMGQSSWLVAGIVPGVERHPLKKLEVDEAALLHLLERWRDEAAKAGRTVTRIAVAYEAGRDGFWLARWLRARGIEAHVIHPTSVAVSREHRRAKTDRLDTELLKRAFLGWLRGERGHCSMAAVPSLEAEDAKRPTREHEGLVGERTRVINRIKASLARLGVRGFKPTLRGAAERLERLRTPEGVGLPPNTLAELRRDIARLSFVREQIKQLENARAERLERAPGEGGNAMVRLLARVVGVGLETADMLVHEVLSRALRDRRAVARYAGLTGSPDESGASRREQGLAKAGNARVRRGMIQLAWRFLLHQKGSALAQWYRARTADARPGTRKTLIVALARKLLVGLWRLVTTGELPEGIVLHPTA

SEQ ID NO: 303397 - protein, 340 aa, unidentified
MEEYIGLDVSMKETAVSVRRGGKRIWRGKCLSDPKIIADLIRKRAPSAGRIVFETGPLAVWFYHALSAEGLPAICIDARHAKAALDMAANKTDANDADGLAHLAEVGFFREVRVKGFDSMLARTLVAARTRLVHIATELSNQIRGLMKTFGLLVPAGKGSKFEENVRSLLFDQRELAAIILPVLEAWRSIRIRAAELGRQLVTGARESEACQILMSVPGVGAITATSFATAIEDPNNFKKSSSVGAWLGLTTRRYQSGEVDYGGHISRRGDHHLRGLLYEAATVILTRSSAESDLRTWGLKLRERVGFKRAAVAVARKLAVLMHAMLKSGEMFNRSAVTA

SEQ ID NO: 303398 - protein, 427 aa, unidentified
MNNVTYQPTLCVGADVHLDEIVLRAVDKALGHEVVDRFRVTNNLPGAQLAAATIAAAATDLGYTRIEIACEATGMLWIPFHRYLSTAPPLQSFELELVCFNPKLVAKFKDGLVLRSPKDDDRDAFDVAARLRFGELPISYVPSDFWQGLRRLTRYRYRLSKAMSREKMRFQSHAFLKCSDWKRVKAFSDIFGATSVALLTQFTAAELQEMTHDQLVDLIAHRGHGRFTDPTATARAVREALRTSYPIDPRTDEMVTATLAAGWDHIRYLNRLMKRLDQLIARYIDLVPNPIITIKGLGAVITAGILAEIVDVLRFPQEKHLAQYMGLTWRKSSSGGFVSENTRLTKVGNVYLRYYFILGANLLRQNNLEYKAYYWRKYQEVSKYQHKRALVLTARKLVRLVHALLTKNEPYVRPRTTRQEQEDDRLQ

SEQ ID NO: 303399 - protein, 342 aa, unidentified
MEYYAGIDVSLECSSVCVVDASGKIVREAKVASEPQALISWFASLGVGLERIGLEAGPLSQWLFAAMKAAGLAVELLETRHVRKAFEAMPVKSDRNDARGIAQLMRLGWFRPVHCKSTSAQETRSLLTARKLVQSKLLDVENSLRGILRGFGLKVGKTTKQTFAGRIEELVAGHPHLQMIAKALLAVRAVLRAEFTAFEKQTRRMVRSDMQARLLTSVPAVGPIVALTYASAIDDPARFKSSKQAGAHFGLTPKKHQSGETDYTGRISKIGDAAVRTALYEAANVMLTKPVKGCSQLKSWAMRIKNRAGMNKAKVALARRLAVIMHRMLADGTTFNAAAAAA

SEQ ID NO: 303400 - protein, 446 aa, unidentified
MGNGSGLSRGDRNRNARLARLRELVPHSNAIMGIDLADDTQAAVVTDHDSRVIARRRVSARAWELGGLLDWALTQAAGAGFASVTVACEPTGHRWRVLDQLAAGRGLALVCVQPLLVYRAREGEDLTRDKSDPKDAVLIARLASELRCYEPERASAVWARLRHLGARRSQLTTGATAAVNQIRDLLECAWPAALAAAGSPFRSVSWCASLAVVLDRCAGDLRRVRRLGLDRFTAAVRRELPRWGGIRPCLRIIRAVFAALADSAGVTAHRPGALERAHLALGDWRDIRARLADTEARMGAVLEELGLAGLVTTIGGLTVTGAAAILAETGDPARFATARALVKHAGLCPRDNASGAAQGKTSISGRGRPGLRLAAWRAVWAAMPNNPVMAARFTYLTTRQDNRLARQQARTACAAALLRWIHVVITRRVAWDPAIAAGNAPAQRAA

SEQ ID NO: 303401 - protein, 463 aa, unidentified
MQKNRDKDSKPSKEVGIEGLPVIRPDVAGVDLGSEIHWVCAPNVERTGLEVETFGATTPELERMAEWLKARKIESVAMESTGVYWIAPHEVLERHGLEIVLVNTRELARVPGRKKTDRVDCRWTQRLHSCGLLKGSFRPNEPVCLLRTLVRDKGNLVAEAGDWLRRMQKSLDQMNVRVHRAVSDIDGVTGMRIVRSIVAGERDAHELAKLRDRRCGKSEEEIVEQLSGHWREDHLFSLRQALKMYDAIQERIADYEREILRKLAEMERAECHGQEPAKLKNPQKAKAIQKRGEEPLRQALYRLSGVDLTGIDAIGVETVQVVLSEYGPDLSRFPTEKQFVSHVTLAPRQAMSGGKPVKKKKRGSASTRVAAALRMAALSLRHSETALGAYYRRISRRIGGDVAVFATARKLATLIYRLLRWGQPYVDVGAAAYENRYRQARIQHLAAIVKDLGYQLTPTPTNA

SEQ ID NO: 303402 - protein, 360 aa, unidentified
MTDGSRELPNMTAGLDIGDKYSYLCLIDTDSGEVIEEGRLRTTPEALRRRLASEPSLRIAIEAGTHSPWVSRLLEECDHEVLVANSRKLRLIYANKRKTDEVDAENLARLARVDPKLLYPLKHRGEESQAHMAIIRSRQALVDCRTQLVNHVRGAVKSFGHRLPKCPARTFHKRASEHIPEALLAALGPILEQIGSLTERIRQYDHQLEAVSMEHYPETELLRQVEGVGPLTALTFVLTLQDPYRFEKSRSVGAYLGLVPAKDQSGDRDPQKRISKEGDEMLRRLLLSGAHYILGPFGSDSDLRRHGQKIASRGGKNSKKRAAVAVARKLCVLLHSLWVSGEVYDPLRNTHRRERREEAA

SEQ ID NO: 303403 - protein, 310 aa, unidentified
MDAIYVGIDVSKDRLDVHVRPSREAFVVARDGKGLEELIERLQALSPRLIAIEATGGFETIAAAAIAGATLPLAIVNPTQVRHFAQAVGKRAKTDPIDAEVIARFAEAVKPEPRPLPDEQARLLAELVARRRQIIEMIVAERQREKRAENVRVRKSLARTIKTLEKELPEIDGDIDTLVRGSPAWREKEDLLVSFPGVSNILARTFLAELPELGRLSRREIASLAGLAPYTRQSGRWKGKSMIGGGRAALRAALYMAALSASRCNRPLKVFYQRLLSAGKPKMVALIAVARKTLTILNAMVRDKKEWQIA

SEQ ID NO: 303404 - protein, 343 aa, unidentified
MEHYAGIDVSLELSSVCVVDATGRIVREAKVPSEPEALVGFLGQLGLPLTRVGLEAGPLSQWLHAGLTGAGLEAVLLETRQVKAALSAMIVKTDRKDARGIAQLLRMGWYRPVHRKSPPAQEVRALLVGRKLLHGKLVDVELSIRGLLRGFGLKLGEVSKGRFAARVRELVAGQPMLERVVEPMLRARDVLRAEYQVLHRAVLAIVREDAVCRRLMTVPGVGALVAVTFASAVDDPARFRRSRAVGAHFGLTPKRYQSGETDVTGGISKAGDGMVRAALYEAAHAMLTRTGRFSTLKRWALEVAKRRGMKRAKVALARKLSALLHRLWVDGSEFRFGREAAEA

SEQ ID NO: 303405 - protein, 408 aa, unidentified
MEPIYTCCCGLDVHRRSVAACVRRLEAGGRLHQETRTFGTMTRDILELADWLAAGGVTHVAMEATGVYWKPIYNLLEDRFTLLLVNARHVKHVPGRKTDVQDCQWLAQLLQAGLLRGSFIPARPQREFRELTRHRSQLVAEKSRVANRVQQVLEDANIKLGTVATNILGASGRDMLRALIAGEQDPEKLADLARRQLRNKIPELRRALEGKVTDHHRFLVGQLLAHVEHLEGQIEALSLRIEEVSRPFASANKAVSSLPGFEQRSAQNVLAEIGADMEPFPSAAHLASWAGVCPGNNESAGKRKSGRTTHGNRWVRTALVQSAWAATRKKDSYFAAQYRRLAARRGKKRAIFAVAHSLLTVIYHMLKTGSTYKDLGGDYFDKLNSKRLLPHLVKRIKDLGYQVTIEAA

SEQ ID NO: 303406 - protein, 406 aa, unidentified
MNDRVEWPVFAGIDWGGAHHQLCVVDGHGRRLTERRLPHDVPGLAELQRELSKHSARLPIAVERAEGLLVERLQADGHAVFAVSPRIAARARERYKVAAVKDDRFDAFVLADTLRYEHERWHRLAVPSPLLAEIKALTRDRHRLLETQQAVESQLRMILEAYHPAPVRLFSSVDRQITLSFVLDYPTPATASRVETTRMDGFLSRHHYTGRVPAQVLAERMRTNLLTGSAGTVAGKSFSAQSFTRLLQLLNSQLADYDDAIAAAVAEHPDAAIFASFPGVGSVLTGVLLAEIGEDRARFPEAAALLAEAGLAPVTRSSGRSRSVRFRYAANTHLREATMWWAFNSLKTSPWAAAAFRHARDQRGQRYHRALRGLAARWTRILWRCWTDHTTYDPQQHHAAQLLIAA

SEQ ID NO: 303407 - protein, 414 aa, unidentified
MLASGELVSSRSVGVRLEDLVAVPIDVGKHKAMAKVVDFSGAELAKAFEFGLDRGGVKELVGRVRQAAPGSVSLIRVGLEAAGHYHLPLAGGVLPSEWELRVLNPGHVSMQRKVNGQRGVKTDRIDLAAIADLLLAGRGTIAPPFADPVMTLSGWVAHRRRRSLLRRRTIQQLTTHVDRCFPGLGTTMWSVVLSKAGRLVISELADPARVARLGPSRLRTFAANRGVRMTTPLAERIVEAARQALPVPGAEVSRRLLASDLGLLADIEAQITLADTEIEALLPQTPFGVLNSTPGWGPVRVAHYGAAVGDPQRWPSHRQLYRAAGLTPRLYESAGHRHDGHITREGSVLLRVALVDLGMGLWHTEPTSRRYGAELRARGKPGGIIVCAMAHRANKIAYAMVRDQQPWEPTRWAA

SEQ ID NO: 303408 - protein, 369 aa, unidentified
MGKCITYVGLDVHKNSIAVAFAEGGCDSEVRSYGTIDSDLASLEKVARKLVSRGSEPRFVYEAGPCGYEIYRHLKRRNFACIVAAPSLIPKKSGDRIKNDRRDARMLARLYRSGELTPVYVPSSEDEAMRDLSRAREDAKKAERKARQQLGAFLLRHGHRYSGLSNWTLTHWRWISDIKMAHAAQQFTLQEYVDAVRSSAERVERITEQIRLLVCNWRLGPVVEALQALRGVSLIIAVAVVSELGDLSRFDNPRQVMAYLGLIPREHSTGERIKRGPITKTGNGHARQMLTEAAWSYRMPARVGRRLRDRQQKLPEKVWQIAWKAQVRLCARYSGLFARGKPSQLVITAIARELAAFMWAIARTVEISA

SEQ ID NO: 303409 - protein, 446 aa, unidentified
MPANKKRSPAPPPKVVHPNAAGIDVGSEAHVVAVPGDRDPQPVRTFGVFTADLRALAAWLKQCGVMTVVVESTGVYWMPLCDFLEAQGFEVLVVDPRSLARNLKKKTDVSDAAWLQELHAFGLLKSCFRPDQEVRALRTLWRHRDHLVTEAAKLLQMMQKVLVQMNVYLHLVVADIAGVTGMRILRAIAQGQHDPPTLAAMRDPNCKRTGAEIAKALEGTWDSAHLFELKQLLKAWDFYQEQLHGCDKEYAKAAGKMPDQTQGRPLPEPEKRPNKHRNSPTTFDSDALIFKMTGVRLTEVDGLGASTVLTVLSETGPDLGAKFASDKHFAAWTTLAPRQHQSGKRTKFPAQTASRVAKAFRLAARALLNCKSALGNFLRRLRARLGIGTAIRATACKLAKLFYRLITKGEAYRRESTAAEEAKQRERQLKNLEAKAHELGMHVLPA

SEQ ID NO: 303410 - protein, 457 aa, unidentified
MSQARRSRGRQELSPVHPNAAAIDIGATMHVAAVGPDCDEQPVRTFQTFTADLHRLADWFAQCGVKTVVMESTGVYWIPIYEILEQRGFEVMLVNARDAKHVPGRKTDVSDAEWLQRLHEYGLLRPSFQPQAEMAGLRAYLRQRERLLDYAAAHIQHMQKALTQMNLQLHHVVSDITGVTGMRIIRAIVAGERDPAILASYRDARCHASVETVRQALVGNDREEHIFALTQALELYDVYQAKVAACDGQIEAVLERLKQSAVPPAEKLPAARHKAHSSNAPAFEVREVLHAILGMDLTQIHGLGPYLALKLVGECGTNLSAWPTAKHFTSWLGLAPHNKISGGKVLSSKTRRTSNRAATLLRLAAITVGRTDTALGAFFRRLSGRVGKAKAVTATARKIAVLFYNTLRHGMTYADPGASYYEDRYRQRVLSNLQRRAKSMGFVLQQAEPAGAQAGVS

SEQ ID NO: 303411 - protein, 370 aa, unidentified
MLNTTTFVGLDVHARSIKAVALDAMTGEVRSATFAYDAAAVAEWVGSLDPAAKCVYESGVTGFDLQKRLASMGIDCVVGAVSKMIKPPADRKRKNDRNDAEFLARMLSVGNVVEVWVPDDECEAARDLVRALDDAREDLKRCRQRLSKFLLRHGYAFSETTPTGRRKGNWTAAHWAWIRSIEFPEKADGDVLAYYVDAVRQAMEDKKRLEKLVEAEASKPRWKKRVDSLRCLKGVDAMTAADIVFEAGEFSRFKNARSFAAWLGLTPSEHSSGESVRQGGITKAGNKHLRRVLVEAAWHYISASPHPKDLAKGQAPDPAARRHAAKGIRRLVKRREEMLGRGVHKNKANVATARELACWCWAVGRMVENG

SEQ ID NO: 303412 - protein, 353 aa, unidentified
MALNHRWCVGVDLHKDTLTACVFCGCCGEVSFQKIACRCRRQIAEYFAALPRPHAVAIESVGFYRWLWEMLEPIVDELVLADATQARALAGRRLKTDREDALNIAQLLAAGRLPTSYAPPIELQWLRDLTRHRNSFSRQHARILHRVKSIMNANNRPGPARMQSDGLIRYLKAQGEKLPARHVEMLWQCLDALALTERQIAQVERTIGQVMRRDFFREVYGILTSFPGVALVTAATVIAEIGDFRRFAGAKAIGRYAGLNPRVFASGGKQRMGHIAKTGSSDLRWILQQAAWTAIRYDEHVKRIFLRIAKRAGRKAAAVAIARKLLTWMHSAVIKGEPYRTPGTRHTILPGAA

SEQ ID NO: 303413 - protein, 351 aa, unidentified
MRVIGCDYHPSAQYIAWIDNETGECGDKPLRHNDGEAEKFYRDLKAKGANVRVGIEATGHARWFERLLAELKFELWVGDPAQIKASRVRKQKNDRQDAEHILKLMMENRFPRVWVPGPENRDLRQLLWHRHRLVQMRTRIMNQLQAVAMNEGVRRKKALWSQSGREQLESFRLAPWATRRRQDLLQLLDQLTPSIAELTAAIEHQADESADAQRLMTHPGVGPITALAYVLIIGSTERFRCGKQIGSYLGLIPCEDSSAGRQRLGHISKQGNTLLRFLLVEAAQAAVRGDADWRRQFLHLAMRRERKIAKVAMARKLAVRLYWMWRKRWDYQQLLKFGSHVGQPVTGHGVK

SEQ ID NO: 303414 - protein, 398 aa, unidentified
MTESSDYESVQVFIGVDVGKDTHHAVAINRSGKRLFDKALPNDENKLRSLISDLKQHGQILLVVDQPATIGALPVAVARSEGVLVGYLPGLAMRRIADLHAGEAKTDARDAAIIAEAARTLPHALRTLKLADEQIAELSMLCGFDDDLAAQTTQASNRIRGLLTQIHPALERVLGPRLDHPAVLDLLQRYPSPEKLASLGEKKLAAQLCKLAPRLGKRLAADIAQALAEQTVVVPGTNAAAVVLPRLALQLITLRKQRDEVALAVEQRVLAHPLYPVLTSMPGVGVRTAARLLTEVACRAFASVAHLAAYAGLAPVTRRSGSSIRGEHPSRRGNKALKRALFLSAFAALRDPLSRAYYTRKMSQGKRHNQALIALARRRCDVLFAMMRDGTFYTPQVS

SEQ ID NO: 303415 - protein, 339 aa, unidentified
MSIAIIGLDLAKSAFQAHGVDETGDKVLVRKLHRKQMIPFFSELSPCVIGVEACATAHHWARTFIAMGHDVRIIPPSYVKGYVKRGKSDALDAEAICEAVQRPSMRFVPVKTVEQQSILMAHRTRSLIVRQRTMTANALRAHLAEFGLVANPGIANLVKLADRAFADAALPAYAHRALAILIRRLAELTEEIGALDQELRAWHAENEASRRLAAIPGIGVITATAIAATVTDPDQFRSGRQFAAWLGLTPQQQSTGGKTRLGGISKQGDRYLRRLLVVGATAVMRHAKRSATPMTDWVNGLLEKKPFRLVSVALANKLARIAWAVLTRGETYRPYGASV

SEQ ID NO: 303416 - protein, 369 aa, unidentified
MKKNNIYVGLDVHKNSIDVALAEEGRSGEVRHYGSIGGDIDSVEKLLKKLSKPDRELHFVYEAGPCGYEIYRFLNKKGLKCCVISPAHIPKVSADRIKTDRRDAMSLARLHRSGDLKEIYVPDEEDEAIRDLIRAREDAVKAQRVARQQLSAMLLRLGVRYSGKTNWTKQHFKWLSEQKMPSPAQQTVFQEYINAINAASERVDRFDKYLAELCRTWRMLPVVESVQALRGISLVGAMTIISELGDLSRFKNPRQLMAFIGIVPSEHSSGTKTKRGRITKTGNTRVRRTLVEAAHSYRYPARVSNKLLERHANISRNILDIAWKCQMRLCARFKRLKASGKHHNTVVTAIGRELAAFVWAIAREAQVYA

SEQ ID NO: 303417 - protein, 482 aa, unidentified
MKATPKEPAPKATGQSTPPNWHQMNRKQRRDMERKIQRADLTLQLVHPDAAGIDIGNESHYVAVPPDRDSQPVRHFRCTTAELRTMADWPKQCGIRTVAMQSTGVYWIPVYDLLEQAGLEVYLVNARETKNLPGRKSDVQESQWLMKLHTYGLLRNSFRPSQQIRRMRTYWRQRKDLVESAGRHIQRMQKTLTQMNIQVANVLSDVSGVTGQAIIQAILAGERDPQKLAAFRDPRVKASEKEIAQSLEGNWQEDLLFVLKQEQAGYEFCQKQMAECDRQLEQYLRQLEDRSQGATLPEEMRKDRLQKRKGNKPKFDLRQQLFRMAGTDLTQIDGIDVMTAATILSEAGWDMIKWKDEDHFVSWLRLSPDNRISGDRIIGKGRLPTTNRVTVALKLAASNLRTSQSYLGAQFRRFRARLDTPVAIKAMAAKLARLVYRMLRYGTKYVDRGAQFYEVQQRTRQIRHLKQKAAKLGFQLVQAPAA

SEQ ID NO: 303418 - protein, 341 aa, unidentified
MGRGVRAAAGSVAAGDGGKRRANARQSVCAFRVLTQPALGEERRWGIEGGGGYGRGLAQHLVGLGEVIYDINPRLTAKERRRSRRVDKSDAFDAQAVAMVVHREEDTLPRVAAEDETVALDLLTAEREDAQAEATRLRNRLLHLDPEYHLHLPALTSIAGVRAAETYTTASGSLVQQERAAVVRRLAGRLRLVMEQVAELGRRIEALAQTRYAPLTRLCGVSLLTAGSLAGILGPGRRFASEAQLAAYAGVAPLETSSAGRVRHRLNRGGNRRLNAIVYRIALVQARSSPEARAYLARRVAEGKTKREAFRALKRYLIRAIWRLWRACLPPAGAEPADYAA

SEQ ID NO: 303419 - protein, 404 aa, unidentified
MKTYILREPKPVEPQKASRSPRPQPAAPVAAKGPRLFIGLDVHNDSIAVSLAPSDSTEVRRYGIIGGEHDDVLKLAHKLQAAHPGTRLKFCYEAGPRGFALCRCLWSHGWDCILVCPSKVPRKPGERVKTDRRDADDLARLYRAGELTGIYVPEPEDEAMRDLIRARFQVGRQQHRARQQLKMYLLRHNLRYGGQSSWTPAHLRYLAKIKMPFPVQQIVFQEMLEVISEATARLERYDQEIARAVPGWRWEPAVRALMSLRGMALLHAATLVAELGDFNRFEQPGQLMGYLGLVPSEHTTGKDRQQGGITKMGNAPARRALVEAAWQYRAPARLSPHLKKRQEGLPKTITDIAWEAQRRLHHRYTHLTRVGKKKSQVAVTAVARELAGFVWAIARQVKPKAAQL

SEQ ID NO: 303420 - protein, 418 aa, unidentified
MKKHNNSRKKSGPTSRRTKARGPVQRDTKEVLAELVGKLKEKLDPKKVTATSAEKKHQQGELRPNLDRLTVGVDLGDQWSHYCILGLEGETLAEGQLRTTPQDVAEFFEALNAARVVAEVGTHSAWVQEVIRGYGHEVLVANPRLMEGSKRRQRKNDRIDANKLARLGRVDPQSLHPIEHRSPEVRQDLVLLRARDALVAARTELINATRGLVKSMGTRLPQCSSPSFAQTVEEAVPTQIREALLPLVRMTAALSDGIQGYDEKIEKLGSEKYGHTALLRQVKGVGPITSLAYVLTLENPRRFVKSRDVGPYWGLVPRQEDSGESQPQLGISKAGDRMVRRLRVGSAHYILGPFGPDTDLRRYGLRLCERGGKNAKKRAAVAVARKLAVLLHRLWVSGEVYAPLRQGRSATTAHAVAA

SEQ ID NO: 303421 - protein, 355 aa, unidentified
MSQEKYIGMDVHQATISVAVLDSRGKLIMESILETKAATILEFIGGLHGSLSVTFEEGTSAAWLHDLLKPHVSRLVVCDPRKNALLKDGSKSDRIDARKLAELLRGNQLTSVYHGEHGMRTIKELGRSYLTITKDLTRVMSRIKALYRSWAIPCSGTSVYAPRHRGEWLGKIPEPGVRLRAERFYQQLDLLQPVRQQARRDLLTESRKHQAVKLLRQIPSIGPIRAALLVAQLQTPHRFRTKRQLWAYSGFALETHDSGEYRYVRGKLQRNRERMTVRGLSNNHNPDVKNLFKGAAISASTHPGPLYDFYIALLAKGMRPTMARLTLARKIASITLTIWKKGVDFDATQLRGQEA

SEQ ID NO: 303422 - protein, 424 aa, unidentified
MKFKMQDKQNQLIERISDKHLVVGVDIAQQLHVARAVNFRGIVVGDPLTFENNEEGFCDLLNWIYKLQRIHKLETAIVGMEPTGHYWINLSKWLLKQAIEVVTVNPHLVKRNKENRDNTQSKSDKKDALVIADMVKNGYYAFVRNTSESFEKLRVLMSNRDVIVKRLVSSVNQLNRWVDIVFPELRQVFKDITAKGAIATLRLFPSPMELGSMKPEEIVAGWKSVMKRQPGIKKAYLLLNVARKSVGTRQAIEAYKFHLEQLLEEYDLAVQQLERVELAVKAELSKIPFASKLLMIKGISEISLAGILGEAGDLSGFSHGNSLLRHAGLHLAEASSGKWKGQIILSKRGRSRLRRFLYLATMSLVMNNPEFKALHSNNVKVKKMKKMKSIMKLVGKLARIFVGIARKNESYCAKKVQPLTELAA

SEQ ID NO: 303423 - protein, 377 aa, unidentified
MHSENIAAYIGLDVHKETLAVAIAAPERLGEVRYYGTINNEAQAVRRLFQKLQGLYGNILSCYEAGPCGFGLYHQLTAMNIKCQVIAPSRIQKSPTDRIKNDHRDAISLARLLRAGELTPVWIPDLTHEAMRDLIRARAAAKRDSRVARQRILSMLLRTDKRYAGKHWTGKHRTWLANQSFSQPSQQIAFQHYCQSLEQIEDRILQLDQEISRLLPEWSLCNLVCQLQALKGVGQLTAITLVAELGDFSRFSSPKQLMAFLGLVPGEYSSGNSIRPRGITKVGNSELRRLLYEAAWSYRTPAKVGAWLIYYRPDSVTQYSKDIAWKAQQRLCSRYRSLTAKGKKSQVAITAVARELTGFMWDIALAAQSSFSQQKQN

SEQ ID NO: 303424 - protein, 357 aa, unidentified
MRCIPTDAVGITLGVDTHKDFHVAVALDCLGRRLGTLSIPTTPAGYEKLMDWANGFGALEGVGIEGTGSLGVGLARSLRAEGAKVLEVDRPKRRDQYRSGKSDPIDAELAARAVLAGTATGRPKGADGEVEMIRTLRVTRRSAVKARAQAINQLKNLLITAPEGLRSELRGLSTAKLVAKVSEFRPGTNPSDVEAATKFAMRSVARRHQRLSEEISELEEQLDRLVAEAAPELVAMEGVGTDTAASLLIAAGDNPERLKDEAAFAHLCGVAPIPASSGKSVRHRLNRHGNRDANRALYVVALCRMSRDERTRTYVAKRTAEGKTKKEIIRCLKRYIAREIYRVLASLSLNKPPILAP

SEQ ID NO: 303425 - protein, 428 aa, unidentified
MRLPIGFVETRKKERIFIYEKRKTAFIGVDMHKDIHVAVVIDCWTNILGEITFPNRPSKFDKFMQDVKKIYKDLTPCFGLEDTRGFGRNFASYLLGHKFTVKHVNPAYTDSMRSSAPMSKKNDSFDAFCVAKVLRDMVDTLPDEEHNDLHWTIRQLVKRRNSLVKGIVIAKNQLNSNLTNVYPSYKKYFCDVDNKTALLFWEKYPHPQYLKGVKPETLLEELRAIHKGMKQEQAEMILTLSEQNSPKEKEFQTERDLIIKSLVREIRFKKQENEDIDNELKWLVDLTGYKLQTMPGINLITAANIISEIGNIERFPNSDKLAQFCGVCPVNFSSAGKGKDQRSRQGNRVLNAIFHFLAIQLVQISPSGKPRHPVFREYFEGKIKEGKTKPQALVCVSRRAVRIIYGMMKSKTEYKPFEKAQEVTEIQE

SEQ ID NO: 303426 - protein, 367 aa, unidentified
MNKSSTVFVGMDVHKDSIEIALADAGEVRRYGQVGGDASAVDRVVRKLRSAHRDLVFVYEAGPCGFWIQRRLAAQRLACMVVSPSMTPRRPGERLKTDRRDAVKLARLARAGELTPIYVPDERDEAMRDLVRAREDAVAMQRQARQRLQALLLRNEVRYPQKTTWTAAHRRWIAHLKLPHPAQQIAFEEYVMAVEEASARLERFTAAIMMHLEQWRWKPVVAALQALRGVQVIHAVRIVAELGDLSRFESPRGLMGYLGLIPSEDSSGPRRRQGSITKAGNGSARRALVEAAHSYRFPARVSRLIARRQSALDKDVCAIAWKAQVRLCARFRKLAARGVNRNKIVVAIARELSGFVWAIARQVKPLD

SEQ ID NO: 303427 - protein, 416 aa, unidentified
MSQIPNTAIAVIGIDIGKNSFHVVGHDARGAIALRQKWSRGQVEARLANMPPCLVGMEACVGAHHLSRKLASLGHDARLMPAKYVRPYSKGQKNDYNDAEAIAEAVQRPTMKFVATKTAEQLDLQALHRVRERLVSQRTGIINQIRAFMLERGIAVRQGIGFLRTELPTILATRTDALSPRMLRVIEELAGDWRRLDQRIDGLSGEIEALARQDPACSRLMTVPGIGPIISSAMVAAIGTGDVFSKGRDFGAWLGLVPKQISTGDRTILGKISRRGNRYLRVLFVQAAWVVLVRIKDWERYGLNSWIEAAKRRLHHNVLAIALANKLARIAWAVLAKGRAFELTRTDDASVRPAWVLAPCSARSRRSLATPARAASQARRPALTTPARDAIDVLRAGTKERRLARTKELRDMRSKR

SEQ ID NO: 303428 - protein, 349 aa, unidentified
MAMVCGLDLHRRQITFDALEVGSGKEWRGRIWQPDRERFRRWLRSDLTRRAGGGPVALAVEGCTGWRYVVEEIEAAGFGAHLAEPADTQAARGRKHRAKTDRSDARLLRELLAAGELPASWIPPEGVLEWRERVRLYVSLVNQRTVWCQRIHAELYQHGVAVPEGAIRTAATRAMLAEGAVALSAAGRQRITVGYRMIDATDAEAQPLKKDLQRFGARQPACRALADAQYGIGGLIAVAVWSELGDCRRFSRSEQAVRHTGLDVSVDSSDRRRAGGFLSRQGPQTLRWALYEAAKNSSHHRSPDHDFYAAVKARHDGKIAAISVARKLARRCYHVLREVDPDLVYAIPA

SEQ ID NO: 303429 - protein, 342 aa, unidentified
MDHFAGLDVSVKETSVCIVDDTGKIIREVKVASEPNALLAVLKNPAYHFKRIGLEAGPLSQWLCSALAEAELPVVCVETRHMQAVLKAQINKTDRNDARGIAQMMRVGLYRPVHVKTLRSQKLRMLLIHRKLLQSKAIAIENDLRGTLRNFGLKVGMVGKAKFEARIKELVENLPDLAVLVEPLLIVRRALREQVVILHRRLLAIVRDDAVCRRLMTTPGVGPVVALTYRATVDVPARFRKSKSVGAVFGLTCSKYQSGEIDRSGRISRCGDEMMRVMLYEAAQSMLRSKKWSWLKAWAMQIARRRGMKKAIVALARRLAVIMHRIWVDGTEFRWTRVAAMT

SEQ ID NO: 303430 - protein, 408 aa, unidentified
MEIVGIDWGRKKHYCYLLHQGKKLVLKNKEEDFAKLLKIKEAVYVIEDGNNRIVDYLLRNNRQVYILPSRRSSEARSFFVIEGKSDFIDSKVIAMTYEHNPEWCLQVKREGIAFELDVLVEENAVINVSMMQDIGRLDAYLERYWPEVKEVFSGTSARKLAFISICPTAKDFLSMSDKEILQKLKEMGFLINSNLKSKLKELRKIALERYVPASIRTLIVAFSRYAMEKKVMKEEIGKQMKEIIEESEFSVLLTLPGVGAIIASQLIVAYLTHKFSSYRDLQRYAGTTPTYYGSGNKNTTKMRSNCNHYLRGTLHIASLAATNSSKWMKRFYDNKKSEGKSSAHALRALANTILKIAFAMLRDLTPYSEEKFFKRNPLSDYTPSKKEGKQKPEYSLKVSSVATCRSTA

SEQ ID NO: 303431 - protein, 470 aa, unidentified
MNQRRLVGIDLGIATAHTVRVLDGEGTVVAKRKAWPTAESLTTVEAAALAGSPEGTRLEVVIEPTGPAWLPVAVFFSARGHRVFRVSSQKAADLRRFLSRHAKSNGIDADTLARLPLFDPAGLRPLALPSAERAALDRRVRASDRLTRAAADHKRRIKDLARQLLPMTPLSGDLGSADLAVLEHYADPRALGRAGLDRLTALIATASHSHQGAQRARQWLDAAQASLDLYAGHPAVDFTGLAAEVATEIRLLRAVQAELAAHAGQRETCYRAVDPAGLARSLPGLAEVGGPALAACMGDPARFGAGKQFRSYTGLTPKASETGETDRKGQPMSKAGSSLLRTTLVRAADTARKQDPQLARIYHQQMTERGKDHLGALCVTAASLAERAWTVMRRGTPYIICDTDGRPVTAEQAKAIIAERWTVLPEIRARRRSKKTGKAPQKVLQGQYARGSLPRRTTPPQRERPVKQTT

SEQ ID NO: 303432 - protein, 369 aa, unidentified
MNEVITGYVGLDAHAESTAIAIADAGRTAPRFIGTVGPQLSQLTKALERLGEPQSLQVVYEAGPCGYGLARALLERGYHCEVIAPARIPRRPGERIKTDRRDALNLAGLARAAQLVKVVIPDPRDEAMRDLSRARVDAVRARLKARQQLNALLLRRGRRYEGKTRWTAAHERYLGLISFGHPAQDIAFAEYRQAVSESHARVERLGQSLAQELERWRMQPMVRALMSLRGLDLVAATTVVAELGDLRRFAHPRELMSYLGLVPSEHTSGPKRRLGAITKTGNGHVRRILVEAAWNYRFPPRLSRTLLVRQQEQPALIQQIAWRAQLRLSHRYRRLRARSLQHNKITVAIARELAAFIWEIGQQVTPVTS

SEQ ID NO: 303433 - protein, 381 aa, unidentified
MSTETTLMNQYNRFEPYLYLTFELSQNLWKLGFTIGVAQRPRLRNITARDLQALQYEIQAAKKRFGLPADVPVLSCYEAGRDGFWLHRYLEKHGIQNLMVDSSSIEVSRRARRRKTDKLDVNKLLAMLIRFHNGERKVWRVVRVPSREAEDARQLHRELMTLKSERTRHVNRIKGLLISQGIATAVQFDLPDRLETFRLWDGSRLSAALVMRLQREYQRWVLVNQQIDQLTAHRKELLKTSQQPSVEQVRQLMRLKGIGVNSAWLFVMEFFSWRDFRNRREVGACAGLTNAPYQSGDTSRDQGIEKAGNRFIRAIAIEIAWSWLRYQPKSKLSQWYQRRFGQGGKRQRKIGIVALARKLLVALWRYLETGTVPEGALLKPS

SEQ ID NO: 303434 - protein, 345 aa, unidentified
MQPMYYIGLDLHKRTISYCVKDVSGTIHAEGTIPAIRFHLDQWMNTLPQPWTAAMEATVFTGWIYDHLQPHAAGLKVAHPLMLRAIAAAKKKNDRIDTRKLSDCLRCDFLPECYMAPTAIRERRRTLRYRNLLVRQMVQMKNKIAVLLMEAGVSYNKQRLHKAGYFRELLATNPDINEGLCSLLRVCRETVVRLQRTESALVRSLERDSLLKERVERLMTIPAVGPITALTWALEVGDVWRFSSIKKAISYCGLCGAEKSSANTVQRTPLSKQRNKHLQTTLIEAAKMAARYSPHLALLYDKEKQKGSANRATLAVARKLVAYLMAVDRGQRPFELVEASYSTAA

SEQ ID NO: 303435 - protein, 443 aa, unidentified
MSFDRLKRTQRRKRLPGHKLKPSRATLFVQNSKPHLSMKPTYFLGIDAAKHKMRATLSNRSEHVLFEKELSVQATGLRQLLAAIKRQVNDPEQLLVLIEATGLLHLNWSAALTKAGYAVAVINPLIARRLYTLQNSIRDNKSDPIDARGLCTIGLLHGEKLLVHYRFSLRPEQFTLQRAQSVRKALRSALTNLKKTYQSLMDLSFPELGGLLQLDGVGIRQLLIQAPTPAAIAGKRLSTLENNWMVRPKAAALKALAADSMADPDLAAASGPALVALLQSVAAMEARLHALDQQIAKLACTSADPQTKALIETIPGFGPVNAAKTLAWLPTEILHSGSNRKVAARLQAFMGNDPRLRQSGQCKGHTKMSKRGVEMLRTAFFQSAFSAAHNDPELRAYYQCKRAQGKTHQVALSHLMRILTRRLVAVLRSGKPYQSHYNLKNAA

SEQ ID NO: 303436 - protein, 406 aa, unidentified
MRGPVITVDVSKGSCHYQPFLEKGKPFRKPKVLHDTIEGFADLQAVIQKVMEESGCDAVPVIFEATGVYHRCLQKYLDDHELPYYIISPLLSAAYRKTNLHSNKTDDLDCAHIAKAYYDEEKLLPHQKQKDLFVRLQKLNRYYEVELNHLRMYKVNFRSYLDIIYPRMDKCFKGHSSLYDPVAMEVLKKYPHPSLLLKHKEETIVKAIVKKTNHKLTFVYEIVHKMYECATRCYSGCDITEIEVIKLPELIEQLQSQMALCDSILSELVEEARAVPYFASIRSIVGIGDNLAARLIAELGDMSRFKNRRAIAAYAGLNPKIRQSGDVDGTHLRISKKGNRHLRCLLYLGASCNYRLRKKDPIYQFNQKKRQQSLSPLRSKAANIAAAHKLLAVIYALSKSGELYRS

SEQ ID NO: 303437 - protein, 376 aa, unidentified
MEHDSTVYVGLDVHKESITAAYAVGMGEVELLGKIGTTKTDIDHLCKRLQSKARHVNVVYEAGPSGYGLYRDLVQKGFECMVCAPSLIPKKPGERVKTDRRDAVKLVRALRAGDLSAVHVPDVEDEAFRDLARAWAAAKMDLRQARQRLKSFFLAHGVRYAGHADWGAAHRRWVSTFAFPNHWQQLTFDEFRRTIEDRLAQCDRLEATLHEAVVSWRFYPAILGLQAMRGIQFITAVGMLSELGDLSRFEHPRQLMAWLGVTPSEHSSGDRRRQGSITKAGNSYARKLLVEAAWSYRYPARVSPDIQRRHEGIPKPIIDRAWDAQVRLCRRYRKLAARGKNVNIAVVAVARELAGFIWDIGRLAMSLSVAYEAQAA

SEQ ID NO: 303438 - protein, 452 aa, unidentified
MEEKEITMEVVNPKAAGVDIGSRSHWVAIGQGPNDYREFGVFNEDLYQIVEFFRENGIKTVAMESTGTYWQSLYAVLISENIPVILCNGKFTKNIKGKKTDIQDCQWIQKLHSMGLLTGSFLPDEETEQLRTFCRHRAGLLDSAASASKKMQKYLRLLNFRLDVVVNDICGLTGLSIIKSICQGQTDAAKLASLRHGNCHKSEQEIAKALHSNGRKDYLFALNQELEMYELFQSKIVQCDHEIEKMLSQIIDNDDDKKQHHIDSKPHKKINKNTPKNIDLNLKSYQYFEGIDLMAIEGMSYSTVLAIMSEVGLEGIKKFPTAKHFSSWLRISPNNKISGGKILSSKVPRGSNRLKTALRNAANAIGNLKDSTPLRDFFQRINFRKGRVSAISATARKLAVIIWNMIVKGVPYHNPTEYLFLDQKRKLGLVKRIQKQITKFELKPTDFGFVTD

SEQ ID NO: 303439 - protein, 350 aa, unidentified
MDHYAGIDVSLECSSVCVVDASGKIVREGKVGSEPEALIGWLGSLGIGVSRIGLEAGPLSQWLYAAMREAGLAVELLETRHVRKALETMPVKTDRNDARGIAQLMRLGWFRPVHCKSMAAQETRAVLTARKLMQSKLRDIENSLRGILRGFGLKVGKTTARSFAARIRELVAGHSNLEMIAEALLAAHAVLLREFEGLQKHVRTMARLNVQAKLLMTTPAVGPIVALTYASAVDDPGRFKSSKAAGPHFGLTPKKYQSGQTDVSGRISKIGDAAVREALYQAAHIMLTKPVKGCSELKSWAMRIARRAGMRKAKVALARKLAVILHRMLADAKPFNPAARTETKTMAAAA

SEQ ID NO: 303440 - protein, 343 aa, unidentified
MKTVYSIGLDIHKKVIAYCIKTKDGHLVGQGAIGADRASLIEWVNGLPGPWVGAMEATIFTGWIYDFLALFAIFLKVAHPEMLKAISAAKKKNDRADAEMLCDLLRVNLLPQCHMLPEEIRELRRILRYRNHVVHTAVKMQNKMSGLLMEVGAGYSKRRLHGKKYFHELLERVEEIPPSVKDLLKLSRASFEMFRDVQKRLIAGLRNNDLIRERVRRLMTIQGVGEVTALTWALEIGDPSRFTSIRQAVSYCGLCSAQKESAGKEQRGPISKKRNKHLQTMLIEAAKIAPNWNPQLAVAHDRELKKGNRNRATLAVARRLAAYMMAVDKAQTDFVLHEAKKAA

SEQ ID NO: 303441 - protein, 345 aa, unidentified
MELHTIGIDLGKTVFHLVGLNLRGEVVVRKKFSRTQLLRFTANVHVGLIGMEACGGAHFLGRALREQRHEVRLIPAQYVKPYVKTNKSDYIDAEAIAEAVARPTMRFVPIKTDDQLDLQSLHRVRERWVMRRTAVINQIRGLLLERGITLRKGRCYVGAALPGILEDADAKLSGALRMLLAQLKLELDHLDLRIDEADALIKKTVRENEACQRLVAIPGIGPVTATALIAAIGNGAAFHKGREFAAWMGVVPREHSTGGQQKLLGISKRGNSYLRRLFVQGARAVLQQRTKQSSGLSAWLAQLTSRTHRNVAAVALANKLARIAWAVLAKNEPYRPPVLADVAAA

SEQ ID NO: 303442 - protein, 404 aa, unidentified
MKKIAIGIDVAKGKSMVSAVGPSLEILAKPYHVLHTECDLRTLVKSLQSMDGELRAVMEATGHYHEPVAKVLYEAGIFVSIVNPYLVKVFGNNTLRKVKTDKADAVRIARYGMHYWSELRQYAPADDTRGRLKEINRQFLYYTDRKTAQKDHLLSLLDRTYPEVRCSFGSKPKANGQMKWVDFVETFWHCDIVNQMDEDEFVEIYRVWCRENSYDFTLAKAAQIYRNSSGHICTMPKNEYTEALVAAAARQLTSISQEVEYLRWELCGLAEQLPEYPAATKLLGTGKSVAAQFMAEIGDVRNYKNGKALVAFAGLDPGRDQSGIRNKRSVSITKNGNQYLRRTLMGTVERYIKQKPPGEPVYEFYKRKRGEGKHYYVCRTAAAHKLLRIYFARVREYLEGLDAQ

SEQ ID NO: 303443 - protein, 404 aa, unidentified
MSVVGWDWASQAHDVTVLDDAGAVLDRWAFPHTEAGWAMALARLGCQGEPGDLPVIIEKTSGLIVDRLLAAGHPVVPVHPNAFHAARPRWGASGAKSDPGDSYKLADYLRTDGHRLRRVEPTDPGLRELQALVRLREDQVRARTAATNQLWAMLGNYWPGPRDLFHSLACGIALAFLTAYPTPQSAARLGEARMAAFLRRNSYRGGKSPALLLARLRAAPQAPLALPAATLTAMVGAHIQQLRSLQAAITGIEHLIAACVAAYPRTRLLARLPGVGTINLAQLLAEVGPILDRATSAEQAATECGTAPVTRASGKTTGVYFRWAASTRARKAITAFAHNARMQSPWAAKLYADARARGKRNPHATRIVARAWIRVIWACWHTGIPYDPATHRAARQPSPAKDLT

SEQ ID NO: 303444 - protein, 443 aa, unidentified
MNDPRSASDPRPVNDPGPGGASDAEARFDHFTHFGGFDWAQGEHQLVVVDRGGKIVLSLEFANDAKGWAEFGKRIAPLAPLAVAIETSCGPAVERLLDAGLSVYPINPKAAERYRDRKAPSGVKDDELDAWSMADALRTDGHGWRRLLNQDPLTAELRLLCRDEIKLIGQRTALVNQLRAALGEYYPVALDAFDDWTAEGAWQFVIAFPTPEQLLKAGKRKWEKFLHTRKLYRPETAQRRLELFAGAMNFANPNAAVTRAKSLLAVTTAKQLSLLQSQLNEYRQRIAKLFADHPDHDCFGSLPGAGEKIAPRLLSELGSNRLVFQDAGALANYAGVSPVTRKSGKSCIISLRRACNKTLRATIHLWADLSRRSSVWAEVYYQKKRAEGSSHAAALRCLGNRWIKILWKMWQTGKPYDEALHLKNQTKHGSWVVTLLPSPASNN

SEQ ID NO: 303445 - protein, 338 aa, unidentified
MALYCGIDLHSTNCWISIIDEDKKVIRETKVGNDLETILRFLAPDRAEIEGIAVESTFNWYWLVDGLMDAGYQLHLTNTWAIKQYEGLKYTDDRHDARWLAHLLSLGILPEGFIYPKQERVVRDLLRRRTFLVHKRASFLLSMRGAFECRTGMRTTSDDIKKWTPADVEQHIDDPLAALGITCLLEPMAVLSDQIKILEKEALKRAKVRNEFRRLQSVWGIGKILGLTIMYEVGDVGRFAKVGNFASYCRLVKSDRFSNGKRKGSGNSKNGNPYLSWAFSEAAHFAVRYYEPAKKFVQRKRAKTNGIVAIRALAHKLARASYYVMKDQVDFDPDKTFS

SEQ ID NO: 303446 - protein, 417 aa, unidentified
MTQYAAYLGIDWADKKHDLCLVDATTGKKTKLVLAHTPQALAEYFHKLSAQYPGQLIAVGLEQSRGPLLFALLQYDFLVLYPLNPTTLAKYREAFTPSRAKDDPTDADYATELIMKHNDRLKAWHPDDDQTRTLRYLVEQRRRLIGDRTRTSNRMTSLLKCYFPHVLSWFPDLATVLVCDFLLRWPALELLPGVKRSTLLNFFRAHHSMRADTLEKRLAAIKASVPLTTDRAIIDSSVLMITALAAQMKTTIGAIKQFDEAITKLCVVHPDFPLFQSLPGAGQVYAARLLAMMGTQRDRWTTANELACLSGIAPVLERSGQSVWIRWRYFCPKFMRQSFHEYAGESVKHSFWARAYYEQQIAKGKSRQAAVRALAYKWIRIIWKCWQTRTPYSEVKYLEALRRKGSTLLSYVATHAA

SEQ ID NO: 303447 - protein, 387 aa, unidentified
MPQPNDLSRSLVALDHNSTIIAVVELSQSSWLVGGVLPGIERQPRKKLEPSPERLLAVLHRWRDEAIKAGRNITRIALAFEAGRDGFWLARWLAARGVEAHVIHPSSVAVSREHRRAKTDRLDTELLKRGFLGWLRGERGHCSMVRVPTLAEEDAKRPNRERECLVRERTRLVNRMKGALARLGIRNFRPTLRNAAEHLAGLYTPEGSPLPPNVAAELERDIARLGLVIGQIKQIEEARRQRLEEQPESRPHAMVRLLVRVVGIGTETADMLVNEVLSRPMRDRRAVARYAGLTGAPDESGAKRREQGLAKAGNARVRRGMIPLAWRFLRFQKDSALARWYQARTADRRAGTRKTMIVALARKLLIALWRFVTTGETLEGVVLRPAA

SEQ ID NO: 303448 - protein, 427 aa, unidentified
MTKSQDLKFNAIENTDAIVGIDIAKNVHWAGIILPNGKEIKKSFSFHNNKKGFESLVEIVKNVLTMLNLKKVIIGMEPTGHYWKSCARYLQKEDWIKVVTVNPKKVKDAKELDDNCQTKNDKKDCITIARLIKDARFFEPYLPEGVWAELRNLSNTRAELVRKQNAVKNRLIATLDEYFPEYTKVFKKILSRTSEEILKRCPFPEDIKSLGKEELLKHIKETVKRGYSKKQVKEIYELAEESIGTTEGTNGAKFQLKVYIEEAEMLEKQIKMAEQELEKQLKETGFYESLLSIDGIGIVSAAMLVGEIGDINRFDSYEQIRRYAGLNLVENSSGNHKGKTTISKRGRGLLRSILYRMAFTMVNKNKEIKELYKYLTTRKENQLKKKQAMVAVIGKILQIIYAVVTKNEEYKAARVFTQERIVQLKAA

SEQ ID NO: 303449 - protein, 343 aa, unidentified
MQTVTTIGLDIAKSVFQVHGVDAEGNVLIRRQLKRRYVLAFFEKLPPCLVGIEACATSHHWSRELKARGHNVRLMPPAYVKPYVKRQKNDAADAEAICEAVTRANMRFVETKTPEQQSCLMLHRTRQLFIRQQTSVINAIRAHMAEFGIVTPVGRKGVEQLLDVVADARDRRVPEVARACIAALGAQLRLLKAQILEFDRRILAWHRSNETSRRLDELPGVGPALATALVASVADAKAFRSGRNFSAWIGLVPKQHSSGGKDKLGSISKQGDRYLRSLFTAGALAVIRYAKIHDTQHRPWLTALLARRPTKVAAIALANKIARMAWAMMARGERYREPVALAA

SEQ ID NO: 303450 - protein, 391 aa, unidentified
MLTDIMVKGSIVDASCGKASVASRAARRGRREIDSVLAFEAVAERDPRRHCGTNPNSRMNRRRPAGPVSSHLQDWEKTMVEPLFIGIDVAKDTFHIASCPAAINISLPNSSTGTKQLIKTLQPYNISLIVLEATGGYERPIVAELLGANLKIVVASPRQVRDFARGIGEFAKTDPIDAYVLARFAQVVQPKPKLPSSPETDELADLVRRRRQLTDLRTQELNRNETIRHPKVRKSVRKMIKTLDYQIAELDELIEQNIKSDDEFRGKDEILRSTPGVGPQTSAMLLSLLPELGQLNRQEIAALVGVAPYDFSSGRFAGKSRIWGGRKEVRGVLYMAALTAMRCNPAIRRFASRLYEQGKIFKVVITACMRKLLIILNTMMRNQTLWRPEKI

SEQ ID NO: 303451 - protein, 352 aa, unidentified
MQIVGALDVHRRQITFKTLEPASGESSRGRVSPAAREPLRKWLERFDGLAGEFVLEGTTGWRFVVEEIERAGHVARLADPAETAARRGRKRRAKTDDADCDLQLRLLLAGELPEAWIPPVHILELRSRVRLRKTLIDQRTAWLQRLQAQLFHQGVPPGLKPRTAAGRNALATVELSPAGREVVELCLRMLDQLDRELLPIDRGLQVFARRQPGCRSLIGQLYGVGAVTATAILAELGDARRFRSSDDAVRHCGLDVTVWQSDRKRAAGHLSHQGPSLLRWALFEAAQCAARRSSPDHAYYLEVAKRIDHNRACLSVARKLCRRAHHLLRELGDDALAPSDPPPITQLVDAPD

SEQ ID NO: 303452 - protein, 464 aa, unidentified
MGKGKLGRRGRVFQELFGPDFNPVQLIVIAIDVAKTRPKAAAFDYFGVPLGESFFFTPDQRGIEKVCATADEIANKAGKRFMVFGLENTGHYQEPIVAGLREHNRLVMPINAITTHEERKSLLDYSKTDDLDLYAIASAVTGGKVTFGRPPEGVQARLRFLTRTRRSCVLERAKAFTDLHTLLDHFWPALQGVPEVVDGKPKLSTIFDLKSDQAIAFLRQVKTPAQALALGAEGLARLSRDKRLRLGRRRIELILQAAELAAKTDESLLALYVEQLDNLLDKIENLGKRIEQLEDQSEEILADTPGVLLLSTPGVGRVTAAEFMAEVGLAIDAYPSASAIIKLAGTNPVPAESGTRRGRMRISKQGNPHLREIVFTIGRNLTELNPNPYFAAFRARLTRLTTNQQRIAVGNKFARVAYAMLTKAELFAPRTWQGPPLANNPLCKLKPQNRAKAQATLERLLRKE

SEQ ID NO: 303453 - protein, 409 aa, unidentified
MDVVYERCCGLDVHKKSVVACLVTPGSGRAPRKELRTFGTMTDDLLALGDWLAAAGCTHVAMESTGVYWQPVWNLLEDRFALLLVNARHIKAVPGRKTDVRDCEWIADLLRHGLLRGSVVPDREHRELRELVRYRTALTRERAAEVNRLQKVLEGANIKLAGVASDVLGVSGRHMLDALVAGATDPAALAGLALGQLQKKRPELERALAGRLGPAQRYLVAKMLAHIDALDATLAELSDKIREQMRPFEGAIERLDTIPGVGRRIAEIVVAELGTDLRRFPTAGHLASWAGLCPGNDESAGKRRSGKTRKGNRSLRWALIEAAQAASRTRGTYLAAQFHRLAARRGKKKATVAVAHSILVAAYHLLTRPDLYADLGGDYFDRRDREAVEHRLVRRLEALGNKVTLEKVG

SEQ ID NO: 303454 - protein, 411 aa, unidentified
MTATRENSTVGSGACLFVSFEMGWSKIKIASSSSIGEKPRIKEIAARDLQSLAEELAKAKKRFGLPASAPVQCCYEAGRDGFWLHRWLTAQRGIANVVVDPGSLKVNRRRKRAKTDRIDAVLLLSNLFDYLRGNKDVWSVVHVPTLVQEEQRQLHREYDTLKGERTEHVNRIKGILATLGLKLEKVDRKFTSWLDEQKLLETGAGIPADYRERLLREYRRWQLVNEQMGELETEQKQRVAARAEEAVGEKVSQKSQDERTLALVRKLMGLKGIGIKSAWLFVYEFFGWRNFKNRRQVGSLGGLTPTPYQSGDTAKEMGLNKAGNSWVRSVIVEVAWGWLQWQPKSALTQWFQNRFSRSGGRSRKKGIVALSRKLLIALWRWLEFDEKPAGAVEVDWRSKVKVAKKGQPQAA

SEQ ID NO: 303455 - protein, 355 aa, unidentified
MDKIKYIGLDVHRDTISAAVLNESGRLLQQSVLMTRTVAILDFIGGVRGSLHVTFEEGTHSAWLYDLLSRRVDKLVVCNPRKNALLKSGNKGDAIDARKLADLLRAGLLSPVYHGETSALEVQQLARSYLMLTEDTTRAMGRLKAVFRGQAISCTGRKLYGPKHRGEYLAALGGCALRRRAERLYQQLDALQQLRRDARHDLIVECRKHVEAKWLQTVPFLGPLRAAVLIGRVQTPHRFRTKRQFWTYCGLALETRDSAEYRVTDGQLERKRRPAQVRGLNWNYNHELKNVFKGAANAASTGQGVFREFYLGLLTKGMRPEMARLTLARKIAAIALKIWKKGESFDAEHLKSQAA

SEQ ID NO: 303456 - protein, 408 aa, unidentified
MLWGRRRGYGTIVVAKQPMERPMKRNDLSRSLVAFDQNSTLVAVVELSLKTWLVAGLVPGLARQPLKKQGSDPNALLALLARWRNEAIEAGSKIERMVVAFEAGRDGFWLARWLRVREIESYVIHPTSVPVSREHRRAKSDRLDTALLMRAVLGWLRGEPKHCSMVAIPTLAEEDARRPNREHEHLVGERTRVLNRLKATMVRHGIGNFNVKLRKACEQLAGLRTPEGEPLPPNTLAELRRDLERLRLVRDQINQLEKQRLERLQRAPQEGAHPMLLLLAKVLGIGVETADMLVHEVLSRNLRDERAVGRYAGITGAPDESGSRRREKGLAKSGNARVRRGMIQLAWRWLMFQKDSALAQWYRKRTADARADVRKTMIVALARKLLIALWRYVTVGEVPAGVKLRPAI

SEQ ID NO: 303457 - protein, 342 aa, unidentified
MKNIKVLGIDLAKNVFQIHGADAKGKCVLRKRLSRAKLIEFMANLSPCIIGIEACGGSHYWARLFKQYGHEVRMMAPQFVKPYVKSNKNDRNDSEAIAEACTRPTMRFVAIKTVEQQDILVIHRARELSIKNRTAQASQIRGILSEYGITIPEGISKIRRVTEIIELNKNKLSIIVIELMVQLYEQFQSYDGQVKKYDHQLEALAKNNNVCQEVQKIAGIGPLIASAIVATIGDAKTFKNGREVSAWLGLTPKQYSSGEKIVLGGISKRGDRYMRKLLIQGARTAVKVCDRKKDKLSLWVANKKQRCGYNKAAVALANKNARMVWAIMATGECYRQPKEIAQ

SEQ ID NO: 303458 - protein, 341 aa, unidentified
MTASSPSLFIGIDIAAKTLAAAWLRPGEAVSRPITLAQSPQGFATLHERLGQTGCVPAAIHVVMEATGSYWIALATTLAHTGYRVSVINPAQAHHFAKALLKRAKTDAIDAQTLAHLAALLKPALWTPPPAVYYEVQQRLAQRDALLDVQRQFMNQLHALLFAPLVVASVKARMEELIETLGQQITALDAEVREALAADAVWAASAARLQSIKGIGLITAAWLLVTTLNFTICSTPEAAVAYAGLAPNPYESGTSVRGRPRIGHTGNGRLRTALYLATLSAAQHNPVIKAFYERMRAAGKPAKVARCAAARKQLHIAWAVVCREQDFDPEYAQRQIQPVAA

SEQ ID NO: 303459 - protein, 458 aa, unidentified
MKRKGKRTKGMEEARPFEGMSKVNKNAAGVDIGATEIVACVSGGDDIQLVKTFGNYTVDLLAICEWFRQHDVKTVAMESTGVYWIPLFEELERQGFECLLISSRSLRRVAGQKTDVEDAQWIQTLHSYGLLKGSFRPQGDLVALRTLLRHRAQLLEHRAPHILHIQKALLQMNIQLSQAVTDVMGLTGQKIIRSIVKGERNARLLAGFRDPGCKHSEEEIEKALTGTWRAEHLYILKQSLELYDFYTEKVEACDAEINRQYGMVRPDWVSGELPAIPDKKRNSHSKNAPKDAKEIRKQLYRINGVDLSLVDGMGVSLAQTVTMEVGSNVGEKFATEKHFCAWLGLAPKHDITGGKVLSNRTLKTKNRAGQAFRLAANSVKKADCPFGVMYRRLRSRLGPAQATVATAHAIARVVYKMLKYKVEYDPLSVNEYQKKYEEQQVKYMRKRAAKLGYQLVPS

SEQ ID NO: 303460 - protein, 324 aa, unidentified
MQNFHAIGIDISKHTLDVCAIFDEKMRKQTFDNTESGFKNLVKWKEKLGAINPHICMESTGCYSESAAEFFDSFGYKVSVVNPLQIKSFRMSKMIRQKTDSSDSECIAKFCIQNNPNPWHPKLLENKALHEIRTRINSLNVELNRVTNSLEKKHLNKVVLASINKEIKFIKKSIETLEKEAKRIIEKSEKLKQQYDLLTDINGVGNKTALAILADMPDVSRFENAKQYAAFVGVTPSHFQSGISVNGKSKISRLGSKKTRKTLYMCALVVKNNNPHFKKWVQTLENKGKPPKVIIVAVMRKLLHIFFGVLKNNQKFDPELAFHD

SEQ ID NO: 303461 - protein, 424 aa, unidentified
MNNTQNQKIAQVTDKTLIVGVDIGSENHYARAILARGFEVSKKPFPFTNTEEGFESFANWTHNLATAHKLTKIMVAMEPTGHYWFAFVAFLKKYDVQVVLVAPQHVKHSKEMDDNTQEKDDRKDPIVIARLVPEGRYLIPYIPEDAFAELRVAFNRRCELVEEQVRIANRMIRWFDIYFPEYRKIYGRIDAKTGIMILKRAPLPADILDIGVDGICQIWKDAKLRGYGSKKAKQIYSAAEHSVGMKGGASVRWKLWQLLEEYELIERQLHDILQLIEGLLYQIPGADKLLKIPGAGLVTVAGFLSEVGDIKRFSDPKQIQKLAGLAVVENSSGKRKGLPGISKRGRSRLRWVLFQLARSMVMFNPEMKAYHQYYTTRKENPLKKLQSLVAISARIARIFYGILKNGTEYDPTMVMKDFNKTVAA

SEQ ID NO: 303462 - protein, 309 aa, unidentified
MQIILPCCCGLDVHKDTIQACILKGDPQEEPFSEMRKFSTLRDDLFNLARWLSDNRCTHIAMESTGVYWQPIYEVLEEYDLTIYLVNARHMKNMPGRKTDIKDSQWIADLLRHGLLRSSFVPAKFFRTLREYTRTYKNLSEDRAALLNRIERFLQSRGFKLSTVLSDILGVTGRGILEHLTKHGQITILQISALMKGKTKHSASEIALAINGFLNPDQCRLLSHHLRHLDYLNELSEDLMQDTIKLVEPYKAYIKQLTSIPGISDISALGLLAEIGVDMSTFETAEHLSSWAGLSRRNCESAGKKKVLE

SEQ ID NO: 303463 - protein, 402 aa, unidentified
MAAGQLWAGVDVGNEHHWVAVVDSAGTMVLSRKLANDEQQISKLVAEVDRLGAQVSWTVDLTTVYATLLLAVLAEAGKSVRYLSGRSVWQASVIYRGGEAKTDAKDARVIADQSRMRGDDLPVLHPDDDLVTELRMLTAHRADLVADRTRTINRLRQQLVAVCPALERAAQPAQDRGWVALLARYQRPKAIRHSGITRLTRVLADAGVRNAPVIAQAAVTAAKTQTVRLPGEEVAAALVAQLAQGVIALDERIKQIDADIEDRFRRHPLAEVITSLPGIGFRLGAEFLAAVGDPALINSADQLAAWAGLAPVPKDSGKRTGRMHTPQRYSRRLRRVMYMSALTAIRCDPHARSYYQRKRNEGKRAVPATICLARRRTNVLYALIRDNRTWQPDSPPITTTAA

SEQ ID NO: 303464 - protein, 351 aa, unidentified
MQIIGVDLHTRQQTVAMLNVETGEIVEKTLRHEGDSVREFYSTLAGPSRVGIEATGSMQWFLELMEELGIDCQVGHPAKIRAAEPRKQKHDRRDAALVLQLLVENRFPSIWMPSREQRDVRSLILYRHQWVRIRTRVQNALQAIALSHGLRRGSSLWSKAGQQAIASLSLSRYTAERRTALQSLYRHLEEQIDDLNRKVEELAWQRPQARRLMTHPGVGPITALATETFLGEPKRFLDGKAVASYVGLIPSEHSSGGRQRLGGLSKQGNPLLRFLWCEAVGHAVRKDAELQRFYQHKLVQKGLGKAKVAAARKLGIRLWILLRDQIDYQEFCRRGQLRQKHGGAHAGMPAR

SEQ ID NO: 303465 - protein, 339 aa, unidentified
MELYAAFDLHANSSFLGIVDEQGKRVFKKKLCNDRELILEVLRPRKEAIVGITVESTYNWYWMVDALMEEGYRLHLANPSQIQKYEGLKHSDDKDDAFWLADMLRLGILPEGYIYPKAERPVRDLLRKRGHLVKLRTSLILSLQNIISRNCGLRLNVNDVKRLRENRVSPLLEQNDDLALAGMVSKETIDFLTHKIRKIEGAIEGKVQLKQPYRYLRTLPGVGTVLALTIMLETGPISRFAKVGNYVSYCRKVSTQWTSNGKKKGGGNKKNGNRYLAWAYSEAAELARRYDSQARAYYNRKMQKANFMVAHSALSHKLARAAYYIMRDQVIFNPENLFR

SEQ ID NO: 303466 - protein, 342 aa, unidentified
MGEVSTIGLDIAKSIFQIHGVDADGAVVIRKRISRAKLLEFFATLPACLIGIEACPSAHYWSRQLQALGHTVRLLPPSYVKAYLKRSKNDANDAAAICEAVTRPSMRFVARKSQQQQCGLMLHRSRQLLVCQRTMLSNAIRGHMAELGVIAAKGRNGTAELLKIIADEHDDRIPAAARLSLDVLARQYAAVRAEIVAIEKRIHAWHRSSEESRRLEEIPGVGPIVATALVAEVGDWKEFTSGRSLAAWIGLVPRQHSTGGKQRLGGISKQGNRHLRWLLVAGAMAVIRYARQRGTKRPWLARLMERRPIKVAAVALANKIARMAWAMMVRGERFKEPKLLPA

SEQ ID NO: 303467 - protein, 384 aa, unidentified
MGVDPHKRLNAVVVVNAKGKVLARQQFSNSAEGFRELRSFARQWRPRTWAIEGCNGVGKHLAQRLVAVGERVVDVSTRRAALVRVFAGGNGRKNDDVDAHSIALVGLHTPDLPEVREDNRSAALRLMANRRKELVDLRTQCVNRLHRDLVGLIPGGAPRALTAAKAKALLASVRPRDEVGRLRRRLAADQLADLVGLDNKLAAVEAEIRALVKRTPTGLPSIYGIGPVITATILGEIGDVARFRDRHHFASYNGTAPDDKGSAGRPVHCVNLKGNRRLNHAIHMAAITQIRNRRSPGRAYHDRKLAEAKTKKEALRCLKRRISDVIYRQLIADAERQAMAGPGGQTGTTLQSSVTGPTPTTGSSDKPQPGPTPETTPTPLANTA

SEQ ID NO: 303468 - protein, 421 aa, unidentified
MSKQDVKDEVFYLLAAGLDLGKRSVVACVRVPHATSPGRWSLETERLGTVPAEVRRLLDWLIARRVEVVVLEATSDYWRSIYYPLQPHLNLMLVNPQHLKGIRGRKTDPSDAAFLARAAASGMVLASFVPPQAVRELRDLTRRRTELSVMKGSEAQRLEKELEDTGLKLTSVLSDVLGVTGRAILSALIGGERDPHRLSALAVAGAKKKADQLAEALDGQFTDHHAWMCRHLLAQIDHLDALIAELDIRIAAVTGDHDDDLTNLDTVPGIGRKAAEIIWAETGGDMDTFATAAHLASWIGVCPGMNESAGVSKSGTIRHGNTALKRVLGTAALAAIRKKDSYLAVFYRRIAARRGGKRALVAVMHKIAIAIWHVLKHKTTFQDLGADYLPKRDPQRAIRRMQREANSLGLTIRFDPIPQTV

SEQ ID NO: 303469 - protein, 342 aa, unidentified
MKVSILGVDLGKTSCSIVGFDGSCCVVLRRRVRREKLVEFVAALAPVVVAMEACCGAHHLGRVFGAAGIEVRLMSPEYVRPYVKAQKNDDRDAEAIAEAATRPTMRFVPVKSEEQSDIQALHRARERLVLERMALINPLRALLLERGIVAPKGRWELEDELAGFADEEGGALSPRIRLLIEGLRAEWRQLDERIAAFDAEFAKMAREDEAARRLATIPGIGVINATALVAALGDGHSFGLGRDLAAWLGLAPRQMTTGGKPRQLGISKRGNRYLRKNLSHGARAVLRRLLHQETPLGRWVRALAGRAHMNVVVVTLAAKLARIVWAVRRKGLPFDLAAAAMS

SEQ ID NO: 303470 - protein, 343 aa, unidentified
MNNVTLLGIDLAKDVFQLHGLNEYGKKVLGKKVSRTELPKFIAKLPICKIVMEACGSANYWSRKFMSFGHEVSQISPQHVKPFVQGNKNDKNDARAIAIASQQDGMTTVPIKTVEQQEVQMLHRYRDSLVQDRTALANRIRGYLREMGLFLPMGLSQVRKQVPSFLEDAENELTIAMREILLSCHKRLLELDVEIEKYTQKIEHFCKQHEVCQRLMKLSGVGPMIASIVYATVGNPSNFKNGRHFAAFLGLVPKEHSSGGKQCLMSISKRGNTYIRSLLIHGGRSVVKVSGKKDNYLNRWVQRVHKERGYNKAAVAVANKNARHMWAIMAYDNKYVDHLKLCA

SEQ ID NO: 303471 - protein, 379 aa, unidentified
MENAESQTQNTCFMAIELSKASWVIGMVTPLSDRVSLRKIACGDVRRLLEIVDCTLGHVGQATGRLVQIVSCYEAGYDGFWLHRVLEARGISNHVLDAASLLVTRKARRAKTDRLDAEKLLQTLMAYWRGEPRVCSVARPPSAAEEDAKRLHRERAFLMKERVQHIGRIKGLLATQGIYDFQPNRRDWQSRLDHLITGDGRPLGKRLKAELGRQCRRLAMVNMMLTEIDEERDAELDAAEAPAAVTGQIRRLVRLKGVGPQIARVLATEVFYRQFSNRRSLGSYLGLTPSPFQSGDTAREQGITKAGNPRARTTAIELAWLWLRYQPKSALARWFHERTSGHKGRIRRIIIVAVARKLVIALWRYLETGLIPSDAELKA

SEQ ID NO: 303472 - protein, 366 aa, unidentified
MIVIGADPHKSQHTLAAVEAATGELLDDLTVTSKPKGHRELMRWGRAFGEERLWAIEDCRHLTGNLERYLVAHGERVVRVAPKHMAGARRSVRERGKSDAIDALAVARAALREGPDKLPSAWLDDEAMQIKLLLDHREDLEQESTRIVGRLRWHLVDLWPELELPAKAFERMVWLDRVGARLARAEQSTRVRICREQVCTLKRLLRRSRELERELAVLVKAKNPALLELPGCGPLTAAKLIAQTAGAERFPSEAHFARLAGVAPVPVSSGRKDRHRLDRGGDRQLNCALHRIAVTQKRVHTPAQDYLARKQAEGKTKREALRCLKRQLVRTVLRLLRPPVSSVRTDPLPMKNLTKIKEPLQVAALT

SEQ ID NO: 303473 - protein, 342 aa, unidentified
MNYYAGIDVSLKCSSIAVVDANGEIVREAKVATDPMVVIEWFRSYGLQMERIGLEAGPFSQWLYAGMKEADLAVELLETRHVRNAFKTMAVKTDRKDARGIAELVRVGWYRPVHCKSMDAQETRTMLSARKLIDQKLRDVEMSLRGLLRGFGLKVGKTTPTRFADRIKELVSGNATLQVIAESLLAVHQVLLREFKGFEKRVRTMARDSAEARLLMTTTGVGPIIALTYAAGIDDPGRFKKSKAVGAYFGLAQKKYQSGETDITGRISKAGDAGVRTALYQAAHIILTRPVKSSALRSWALRLAKRVGMSKAKVALARKLAVVMHRMLVDGKPFNPAAGAAA

SEQ ID NO: 303474 - protein, 344 aa, unidentified
MKLFIGLDVSLAKTAVCIVSEHGKIVKEAEVGSDPAALTQFALEQQGEIAMIGMEAGPLSQWLHRGLTEAGLEVVLMETRQVKGALKAMPIKTDRRDAEGIARLLHLGWFRPVHCKSVSAQEIRALLGARKSIQQGVIALEMSLRGLLRNFGLKVGAISKGRFDARIQEQVASNTTLVAATEPMLRARATLRHELARLERHVRSLAQDDPTCRLLMTMPAVGAVVALTFKSAVDDPARFSSSKKVGPWVGLPPSRQQSGERDVTGGITKAGDAHLRRALCQAATVMMNRGRGSWLRTWASRVAKRRGTKRAMVALARRIGVILHRMWLDGRNFRWEGAPEPIHA

SEQ ID NO: 303475 - protein, 370 aa, unidentified
MKKQTKTTPVAVLTPTAPVLAGGFTIGLDLGDRSHYVCVLDAASQIIHEGPMLNDRVALALLLTRYPAATVALEAGTHSPWISRYLTGLGATVIVANPRKLHAITRHERKCDRRDAVMLARLARADVALLHPLQHGSAQAQLDLLGLKLRDSLVRTRVNLINTVRFTLKSLGHAVANPSSEAFHKSILTAVPAECLPVVQPVLAVLTLITDQIKTLERDLVARSKRDYPVTQRLQQIAGVGPLTALCFVLKIGEPTRFGRSRDVGPYLGLCPGRDQSGGMDKQLRISKCGDGLLRRLLVSAAHYILGPFGPACALRAYGQHLMGTSVREKKRAVVAVARKLAVLLLSLWKHGTDYEPRVPATPTLVMIPA

SEQ ID NO: 303476 - protein, 310 aa, unidentified
MTHCAGIDVSKDHLDLALDERAQVQRFPNAEEGVRRLVQQLHPTAVRRVVVESTGGYERKLVAALQSAGIPVALVNPWRVRRFGEGLGLLAKTDPIDARLLARFARQAEPSETTPRSAENRRLAHFVRRRRQLVAIIVAEKARLENADRWTRSSIRELVRLLERRVEKIDAKIDQAVERDPVLARKRDLVQSVPCVGPGITRALLIDLPELGSLTRKQIAALVGLAPYAKDSGRKNGQRFIRAGRHAPRTALYLAAMNASRFHPEMKIFYERLRAAGKPPKLALVAVARKLLTSINAIIRDQKPWREAHA

SEQ ID NO: 303477 - protein, 481 aa, unidentified
MKTKPPEKIQKATSPSTRGHWNEMNRKQRREMMRQIQSEDLSLEVVHPHAAGIDIGNESHYVAVPPTRDSQPVRHFGCTTVELKALAEWLKQCGIRTVAMQSTGVYWIAVYDILETAGLDVYLVNARDTKNLPGRKSDVQESQWLMKLHTYGLLRNSFRPSQEIRTMRTYWRQRNDLIRAAVSHIQRIQKALTQMNIQLGNVLSDVSGVTGQAILKDILAGERDPHKLAALRDPRVKASEEQIARYLEGNWQEDLLFVLKQEQEAYEFCQQQMAECDRQLQQYLQQREDRSQGASLPQEMRKGRLVRKKGNKPMFALRPELFRITGTDLTQVDGIDVVTAATILSEAGWDMSKWEDEHHFVSWLRLCPDNRISGNKVLGKGRLPTNNRASIALRMAASTLRLSNTYLGAQFRRFRTKLGAPVAIKAMAAKLARLVYRMLRYGMKYVDQGAKIYEAQHRQRQIGQLKWNAAKLGFRVVEAAT

SEQ ID NO: 303478 - protein, 310 aa, unidentified
MEIIIKRGCGLDVHKETVLACVMGEGIKKEIKTFGTFTRELEELKKWLKELGVTHIALESTGIYWKPIYNILEDSFEILLVNARHIKNVPGRKTDVCDSEWICKLLRSGLLQGSFIPPKDIRELRDLTRYRRKLIENISSERNRIEKVLQDGNIKLSSVISDNFGVNGNKIIKELIKDEPEIEEIVKGIKGKLKGKKDLIKDALEGQIDTHRKFMIKASLEHINSLKNLIEEIDKEIDKKLEKYREEYELLQGIPGVKEVGASTIIAEIGVNMEKFPTQEHLSSWAGMSPGNNESAGKKKRQTRHMGIKH

SEQ ID NO: 303479 - protein, 350 aa, unidentified
MNVNHYIGFDVHKKTASYCVKTADGTIVEEGKLRATHDALRQWAGKRQEPWHGAMEATLFSGWIYDTLRPFAAELQMGHPALMKAIAASKKKNDKLDARKIADMVRCNLLPACYVAPPEIRELRRMLRYRNLVVGQATRMKNKMSGMLMEVGAEYNKRQLHGKQYFTNLLDTLEEVPESVKDLLRLSRGAMEMFETTQQQLLARLGKDPLLAQRVRLLKSIRGVGPVTALTWALEVGDPHRFPSVAHAVSYCGLTSALVSSADKQQRGPISKQRNAHLQTVLVEAAKLAPQWNPQLAAVHAREVARGNRNRATLAVARKLVAYLLAVDKSGQRFAVYHPPAVETEAPKVA

SEQ ID NO: 303480 - protein, 414 aa, unidentified
MFAVGVDVSNGRSTVAVLQSKSIVTLKPFEVSHTPEALGKLVKKLNSLGGETRVIMEHTGRYYEPIAMFLNSSGFFVSALNPILLNRYQENPSLHNVKTDKADAVKIAKFGLDNWDQLRQYEPMDTIRYQLKTMHRQFQLASKSEVAFNNNLIALLEQTYPGIRKLLSSPARPDGSQKWVDYVGTFWHADCVRKLSLKAFTERYQKFCERHKYYFSEEKTAELYRHAQNVVTLVPKSDVTKMMVKEAISQLNAISRTVETYRAEMNRLASQLPEYETVMGMYGAGPSTGPQLMAEIGDIRRFPKKNSIIAYAGIDPEKNDSGDVTRKSNKSSKRGSPYLRKTLFVVMDVLIQRKPVDDPIYQFIDKKRSEGKPYYVYMTAGGTKFLRHYYGKVRDCLKEKGLWDQSVNDSQDSE

SEQ ID NO: 303481 - protein, 347 aa, unidentified
MRKIVKQVVGIDVAQKELVVSLGKMQDDWTPEVYARKTFTNTQKGFIDLMAWVKKLTDQTIAVRYVMEATGVYHESLAYFLNDQGQEVTIVLPNKISNYMKTLETKTITDKTAAEAIAMFGLEKKLDLWKKPKPIFKRIRQLTREREQLIQSRTMAKNQLHAEQAEAEPGKSTLERLKKQIAFFEKQEREINQELRALINTDEQVTSSIKLITSLSGIGYLTAATVLAETNGFELVKNKRQVSSYAGFDVKEKQSGTSVKGKSRISKKGNKYLRKAMHMPALSAIRLDERFKAIYARLVAKHGIKMKAAVAVQRKLLEMIYTIHKTGVPYDKNYLKKNGKEAVAEAE

SEQ ID NO: 303482 - protein, 272 aa, unidentified
MNNYAVYVGVDVSKHSFTATLLFNELRKTFNVPSKPEQFENRLRPFLEELGVDKSNVLIIMESTSNYHLPLAEYLAEKEYNVGLANPFSMKRFMDAKMSRAKTDRVDSYFIAEYGRQIFKGPLFKPKTEAQKEIEAMVKTLEGFNKQLTMLKNQKEALSLIPMKGLKKILGYYDRIIEAIEKEIKMLKKEIMELCKKYFPEEYKLLKSIPGIGERAIAVVVSILRKFEGFKRSKDVGSFVGLCPSPVESGSSVMVKGSIKSCFFGKSLRKKL

SEQ ID NO: 303483 - protein, 391 aa, unidentified
MLSRGTEPVKNAPNEFEAFVEMVKKYKLEGTSLVFGFEDVSEYGRQLVSFLLKKRFIVKHVNSYLVAHERKSLNVTQKTDEFDAECAARVLLNRFDSLPKADVQDKYWILKNLVTHRDAMVKSNIILKNRLHSLLASHYPSYTNFFCSIDTLGALAFYEKYPSPSKIKDVTAAELNKFLTGVSGRGNPKDKAQKIIDYINADGDTTIEHQEIRDSTVISVVKMIRSNMEELHTIDKKLEELLEHFDYKLTSIRGVSTAIAAGLISEIGDISRFPKPAKLARYSGVAPITQASGKSEAQFADTRGNKALHHIFYSLALSLISVSQSKKARNIYFHNYFEKKVSEGKTKRQALNCLQRRLVNIIWGMMTYKTEYRNPELQLIEELDKSKQKMI

SEQ ID NO: 303484 - protein, 345 aa, unidentified
MMKVMAGIDLHSNNVVIGVTEMDGKRVGHRKVPCELKEVVKFLAPFRERLEKVAVESTYNWYWLVDGLRALNYPVVLANPAAMEQYSGIKHADDTNDAFFLAELLRLKILPTGHIYDARLRPVRDLLRRRLSLVRQRTALMLSFKSLYTRTTGQEMTLGQLKKLEVKAAQDLYEHPANQLIAGMQIKHIEQLSESIDKIEKVVRASARELPSYDRLVTLPGVGIILGMTITMEVGEVNHFASPGDFASYCRTVQAQRTSNNKKKGENNSKCGNKYLAWAFVEAANFARRYDAQCRKWYDRKAAKTGSVIATKALACKLAKAAWHVMSQGSDYEAQRMFGQPTTKT

SEQ ID NO: 303485 - protein, 422 aa, unidentified
MNEQKSVVYSVYVGIDWADTKHDICICPRDSDTREFDVIPHRAEVIDAWVKDLHQRYGSSIAIAVELSKGPIVSALQKYDFIDIFPVNPNTLAKYREAFQPSKAKDDPTDAELAVDMLLRHPEHFKVLKPQSTKMRALATMVEQRRRLVNERGRITNRLRSALKQYYPQVLEWFEHIDTPLFCAFLKRWPTLTQARRARANTLKQFFHEHHMYREGVVERRRKAINAASPLTLDEAVIVPYRMQVLILVEQLELMFKAIDQFDDEIAKLASQHPDYALFEPLPGAGSSLTPRLMVAFGEQRERFSSAADVQKLSGIAPVTERSGQKHWVHWRLQCPTFMRQTFVEWAAQTINKSYWAGAYYRQQRDKGSTYQAAVRSLAFKWIRILYRCWQTGVAYDESRYLKALERRGSPLVKRQEMLKSA

SEQ ID NO: 303486 - protein, 429 aa, unidentified
MKIIYPRVCGIDVHKKFIVAVICISESVEPVYLKKRFSTFHNDLIRFRDWLIQNDCQNVCMESTGKYYIPVYNILESHISNIVVANPKWVRAVKGEKDDDKDAKWIADLFKLGIVKSSFIPQKDFRILRELTRYKYKLVNMRSSEKNRYQNALTSGNCKLDMVFTDVFGKSASNIIDLILSDNPYTDEDILSKVHKNCKASPDMILNSINGTDLTPVQKSRIELVNNHIKQLSSNIQRLDKLIDLMIEPYEDYISFLCQIPGVSRNSAITILSEIGVDMNQFTSTRRLTSWAGLTPSSNQSAGKKKSVRISRAGVCLKPCLVEVAHAAVKDTNHPYYANKFNKISKRRGKKRAYIAIARKILVAAYHMLLTGEIWNPADLAEVETPVEQRIKYVKNNLKSDIKQLLDIGLTVEELTLMIQQNANNIATQ

SEQ ID NO: 303487 - protein, 411 aa, unidentified
MEVLVERQSALDVHKAQVTACVRLPQEGGGRRELIEQFPTTVPGLLVLADWLASYGVKHVVMEATGDYWKPVWHLLEEDFELMLVNARHVKQVPGRKTDVSDAAWLCRLAEAGLLTASFVPPKPIRDLRLLTRYRRTQIAERKREAQRLHKALEDTGIKLDCVATDILGKSGRAMLDALVAGTTDPEVLADLALGKLRSKIPALRDALQGRFEPLHALLIGSILAHLDFLDEHISGLSAAIEEQIAPFAAARDLLMSIPGVGQRTAEIVIAEIGVDMSCFPTAGHLASWAGQCPGNDQSAGKRRSGRTRKGSKNLNLALKDAAMAAIRSNGTYLQALYRRKRPALGHGRAVGAVKHAMLCACWHMLSTGELYNDLGGDYFQRRDPERQTKRLVAQLQRLGHTVTLQTANAA

SEQ ID NO: 303488 - protein, 367 aa, unidentified
MQKVRFVGLDVHKASIAIAVADGDGSAPETVATIPNDTSALLKRLKKLAVGGKVRCCYEAGPTGFGLQRALQAADVECVVVAPSLVPRTAGDRVKTDRRDAVKLARFLRSGDLTEVHVPDAATEAMRDLERCRDDAKRAERTARHQLSKYLLRHGRIYDGKSAWTGMHLDWVRRQVFEHEAQNRVLVDCVHAVESATARVERLTKDIVDLVESWSLRPLVKALQALRGVQVISAVILAAELGDFARFASAPALMAYLGLVPSEHSSGESQRRGRITRTGNGHVRRILVESAWSYRHRPAMGGAIRKRNEGVAPAVQAIAWKAQHRLHGRYKKLLGRGKNKQQTVTALARELAGFVWSIAQQPQLLAS

SEQ ID NO: 303489 - protein, 345 aa, unidentified
MNSNKVPQRIKKINSNGICDFDHYIAVDWSLKVMAIAHMNQKSGAPKIHERPSNIKELKEYLVSLKGRKILALEETTTSQWLYLELVDIVDRIIICDPFRNRLLSDGPKTDKIDAGKLCMLLRAGLLKEVFHSSDTLYDLRVLVSAYEDVLGSGVRIINQQNALERGHFTTSDNAPFILEHMKKNIEIYRASKKEYKRKFEEIVKKHTMAKYQDEIPGIGVIGAVKVVATVVDAHRFPYIGKYWCYCGLAQNEKFSGGRSFGDRRPRFNRRLKSVYKTAASSCINGKTNPMKQYYNFLIEKGIAEHNARNAVARYIAKVSYGMLKNGHRYDPHYGRSETSEHHDA

SEQ ID NO: 303490 - protein, 374 aa, unidentified
MGKDIRFVGLDVHKETIAVAIAEPGGEVRSLGTIPNEAEAIRKLIKKLRADGAFTCCYEAGPTGYVLYWQMVKLGVPCVVIAPSLVPTKAGDRVKTDRRDAEKLARCYRAGDLTPVWVPTPEHEALRDLVRAREAAKKDERRARHRLQKFLLRRGVRAPKGMREWTETHRKWVSSLTFELAAQQATLTDYAAEVDHGKQRIQGLEKAIDEAIAAAPAAMRAVIEALQAMRGISKLTATTIVSEVGELSRFEHPRELMSYSGSVPSEHSSGGKTARGSITKTGNAHLRRVIGEAAWHYRHRPRVIGQLRKRQEGVSSQAIDIAWKAQERLHRRYRQLSERKCKQKVVTAIGREMLGFIWDIGMQVERSMQAKAHI

SEQ ID NO: 303491 - protein, 359 aa, unidentified
MNYIFVGCDSHDKTLVTKIAVNREAAEKKTFSATKTGRRKFVQYLKERAKGGAKVVVAYEASGNGFILCDELRAAGLTCHVLAPTKIERSTKQKRNKNDDRDADRLLEILRGHYLAGNRLPSVWVPDVQTRDDRETVRTRQDMSQKATAVKTQIQMLLKRNGEEKPEGIGKGWSKGYRLWLKGMAESGAERVGMKTALGSLLRQLEFLENEIDRLDQAMQQLSDSPRWKPITEALMKGKGVGLNTALKFATDIADFSRFRRGRQIGAYYGLVPSSQESGENNDRKGHITREGSPSTRQILCQSTWARVRHDEKEREVYRRLTARNPKKKKVALVACMRRLSVRLWHVGLQAQLKMKMEG

SEQ ID NO: 303492 - protein, 344 aa, unidentified
MEPMYYIGLDVHKRKISYCVDSSGKVYSEGSLSATRVDLDVWMKTLPHPWSAAMEATMFTGWIYDYLKPHAAVLKVAHPLMLRAIAAAKKKNDRIDASKICDCLRCDFLPECYMASTAIRERRRTLRYRNLLVRQMVQMKNKISMLLMEAGVSYNKQRLHKAGYFRELLATTPDINEGLKPLLQLCRETVVRLQKTESAMVRSLERDSLLMDRVERLMTIPAVGPITALTWALEVGGVQRFSSIKKAISYCGLCGAEKSSGNTVQRTPLSKQRNKHLQTTLIEAAKMAPRNSPELAMLYDKEKQKGNANRATLAVARKLVAYLVAVDRRQKEFLTVERENRTAA

SEQ ID NO: 303493 - protein, 385 aa, unidentified
MSSTDDPSQPTTVHPAPASIFASLELSRSRWLVTVMMPGGDKMSKYSVPGGDGGALLALLARLRARAERHAASPVGIVTIQEAGFDGFWIHRLLQANGIESHVVEPASIAVPRRHRRAKTDAIDGEALLRTLMAFQRGEPRVCSMVVPPSPEAEDRRRLSRERRTLIKERIGHVNRIKGLLAAQGIAGYEPMRQDRRERLEELRTGDGRPLPPRLKAEIGRQLERLELLGRQIAAVEAERGALVQEEAPAQTPAGLLMRLRGIGPEFATVLWLEGLFRRFGNRRQLAAYAGLAPSPWQSGTVKGEQGISKSGNPRLRTTAIELAWLWLRHQPETALSRWFQERVRSDRGRVRRVSIVALARKPLVALWRFVTDGVVPEGATLKAA

SEQ ID NO: 303494 - protein, 417 aa, unidentified
MNHPLLVGVDVHRKQNVFALMDESGHEIAARCRVDNNRPGTAQTIEQLIGHMESGDYDGLQIGAEATGYYWFHFFQTLQSDEFLNQWPLELYSFNPRVIAHYKKTFIDLDKTDGNDAFVIADRLRLGRELPVPFQLDEQYLALRFLTRYRYHLVHNLAREKSYFLAILYLKASEYTRQETKPFSDVFGAASRAVLLEFASIEEIAALPFGELQEFIDAKGKRRFPDPSDNTRKLQRVAQDSYPLPQRLLPSVNLILSTSLRQITQLEQALKRIDTAIEEHLQAIPHTLDSIPGLGPVYSAGIIAEIADIARFDFNQAKVAKFAGFKWRKNQSADFEAEDTKLTRTGNRYLRYYFCEAANIIRLHDADYKRFYQRTFKEVRKHQHKRAIVLTARKLIRLVVRLLTTNQTFRPRRATID

SEQ ID NO: 303495 - protein, 411 aa, unidentified
MNNTLFVGIDISKRSNVATFMNCEGKVVGRLTFSNNGSGADQLVAKILSYYEKEDFEAIRIGMENTSVYSKNLVWFLYEHEALNEHKLSIIPLNAIMVANYKKSFLDMDKDDITDSFAIADFIRIRPGLLPFKLDDRQEALKIMTRSRYNYVQALSRMKSQFLTRLFLSFSEMEAGKPFYSIFSKTSLSLLEEAFTLDELAEKPIPELVEFLQEKGGGKFQNPEEIAKVLKKAASSSYRVPAMVRESLNRTMASDMEIMRILENEIHNCDKNIEKLMKSVPAILVSIPGIGPVLAAGIMSEIGDISRFQKQESLGKMAGFKWKRNQSGKKESEDKAAVLSGNKKLRYYLVEAANRVRIHDPVFEAYYRKKYAESKTHAHKRALILTARKLVRVIFYLLKENKLYKPDVGIS

SEQ ID NO: 303496 - protein, 344 aa, unidentified
MTNIIKQVAGIDVAQNELEVSLGRIDQSLEKEVYASKTFANKASGFAALEVWIKKHTNPGAEVRFVMEATGVYHEKLAYYLSDQGRQVSIVLPNKISNYFKTLDVKTSTDKTASQAICQFGLERKLEIWQKPKKILRDLKQLTRERDQLIADRTALKNQLHAENAEAFPNESSIKRITKRMQLINKQELEIRGELAAIVKTDSELIRKINKITTIPGVGKLTAVIVLAETNGFELIKNQKQLVSYSGLDVKLKDSGTSVKGKPKISKRGNRHLRKAMHMPALAAMRYNEHHKALFVRLVSKHGIKMKAAVAVQRKILELIYTIYKTDKAFDPNYEDAKNKVAQI

SEQ ID NO: 303497 - protein, 391 aa, unidentified
MFYIGIDIAKKNHEASIIDSSGKSLSKSISFPNSTKGIEKFNNFIAEFGVTTNNCIIGMEATGHYWISLFSYIVDLGFTCYVINPIQSDAFRKMYVRQTKNDSVDSFIIAQIMRFGEFSISNFSDENTFALRNLTRYRFALVDECSDWKRKLVAILDQVFPEYSSLFSNIYGVSSKELLSKYPLPEDMLSIPAEELGNLLYECSKGRLGINKAEEIQSRARETFGIKFAKRSFSFQIKQIISQISFLEEQLKEIEIEISYLLEDICPIITTITGIGSVLGASIVSEIGNISRFERANQLVAYAGLDTRIKQSGDFSATNTKLSKRGSPYLRRSIWLAATVAAFKDPALSIYYQGLRARGKAHGTAIGAVARKLTNIIFAVLRDQKPYTPNI

SEQ ID NO: 303498 - protein, 348 aa, unidentified
MEQQSHYVGLDVSLETTSICVIDDAGAIIWRGKCSSDPDTITAILRQHAPGAVRVGLETGQLSNWLTLSLGRRGVPVVCMDARHAKAALSLQINKTDANDAFGLAQVVRTGWYREVAVKSMDAHTLRMLLVARSHLVSQRQATANTIRGLLKTFGLVVARGSKGLFSVRVREQIAGNPALIAIIEPLLAVWYAIRAQVTMLDRQILARARNDQVARRLMTIPGVGVVTALAYTAVIDDPARFRRSVSVGAYLGLTPRRYQSGEVDTTGHISKCGDSLLRGYLYEAAAVLLYRDGRASILKSWGLGLAKRIGMRRAKVAVARKLAVIMHRIWSDHSEYRWTAAVPPAAA

SEQ ID NO: 303499 - protein, 415 aa, unidentified
MNDHECAPAAGIDWAKDEHALCVLDEAGRKIFEGRFAHQEGGIVKLGGSLVERGVERVAIERPEGILLERLLECGITVVAIHPNQLKASRPRFRASGYRAKSDSFDAFCLAELARTDHHRFRALVPDSDETKALKVLTRAREDLVGSRVALANQWRAELEAFWGGAVLLFSEIDSSISLAFLARYPSPTDASRLAEKRLENFLSKNRYCGRKSAPELLERLRKAPQGKAGEAEIEARREAVLALVETLGALVERIKGLEQRIAKAVRAHPDGEIFLSLFVSHNSTLTAASLVAQIGECRERYPTNEALAAAAGMSPVAIESGKRKVASFRRACDKRLRRAVATLAESTRHHNGWAKDIYLRARGRGCDHAHAIRILGRAWVRVIFRMWREWLPYDPARHGGFKRLRSAEGLTQGV

SEQ ID NO: 303500 - protein, 342 aa, unidentified
MEKVSIIGLDLAKRSLQAHGAHADGGMVFRKKLSREKVLAFLAEQSPCVVAMEACGSAHHWGRAIHDLGHEVRLIPPIYVKPFVKRQKNDAADAEAICEAASRPTMRFVAVKTEEQQARAMLFRTRDLLVRQRTQLINALRGHLAEHGVVATQGPANVKELELAVEEEKTSLPLLVVELSRVFLEQIDGLSKKIGELEKATVHEAARGATSRRLLTMPGVGPITAMAIETFAPPMAVFKRGRDFAAWLGLVPRQHSTGGKQVLGKTSKMGQRDIRRLLIIGATTVVRWACRKGAPGGTWLQRMLARKPRMLVAIALANKMARSIWVMLTKGVDYRAPAAAAI

SEQ ID NO: 303501 - protein, 357 aa, unidentified
MLSSNVKYIGLDVHKEAIAIAVLNGAGKLVMESIVETKSSTVLDFLHGLRGELHVTLEEGTWAAWLYDVLKPHVREIVVCNPRRNALLKEGSKSDKIDARKLAELLRAGLLRAVYHGENGLQTLRELARCYLTISKDLKRVKNRLKALYHSGGICCAGKQVYAARHREQWLSKIAQVGVHRRAELFYQQMDGLLVLRNTVRGELLAESRKHQAVKILRQVPSIGPLRSALLLALMQTPHRFRSKRQLWTYSGLAVVTHDSAQHRYVDGQLRRSKKPQQIRGLNQNHNHAMKEIFKSAALNASRCAGPLQDFYARLLAKGMKPDMARLTLARKIAAITLALWKKGGSFDAEHLKSQAA

SEQ ID NO: 303502 - protein, 347 aa, unidentified
MKKIFIGIDVSKEKCDATAISAENGLTEVEKLDYLVFENRPKGFRTLLSWAKKLKPDIIQEDILFVCETTGAYDRALCDYIYSKGLDIWRESALQILWSSGVRRGKDDKTDSLMIAEYAMHHMDRAHLYESPDGRILEIRAVFLYRRKLEQEKTSKLVRIKEIEATAGKSKTLTFILRDAKKSIRQLEKSIRECEEKIRELVEEDDALVKSYQHLDSVKGLGIVNITALIVYTNNFKAFKTSRKMATYWGVAAFRSKSGTSVDKRADVRNLSSSMLKSYLTQAAMHTIAKGGIYYDYYQRKIAEGKTHSIALNNAKNKLLHLAMSLVTHDRDYEENHEFLRTQRAAN

SEQ ID NO: 303503 - protein, 482 aa, unidentified
MKKRNIYQNQSQELLSLFEEAGSSAKVMCVPMDYAKKDHLVMFCNGHGDILRKPFSVKNSPEGIKYLIDQVTRSCRRRGIKKEHVFLGGEDANSFAENFVSTLRVKGWLVAGVNAHDAKKQRVNLQASTDRIDLMGIATMLLNCRANCCPAATGIYRNLRTLVRHRRKLVVMLTEVKNRAHGIVDRLFPGFLNENKSGIVPFTQSSLYLMENRFSPKQIRRRRRQPLIEILKRFGTSKAQETAFKLQQYAAKVLHTPDEYIDTLQISLAQHVKHIRCLKESIVQLEKEIAVNLAQTQGAFLTSVRGIGIVLAAGVSAEIGDPYEQKPLNNVISYSGIIPRVKQTGGVDGKTYTGHVAKRCNRILKDYVVKSAYHLGLYGPEDLMADYKRRDASGQHADFGIGRRYLRMAMSLMRTSQVYLSPRLRKADTALEERAGHYLTSWPFLRDKWKKAGALEAAFSKDRPLGLWRQIVQKLYDIKLKL

SEQ ID NO: 303504 - protein, 411 aa, unidentified
MDLLYARCAGLDVHKVTVVGCVRVPSAEPGARQAETQTFATTLRGLGALTEWLTTHGVTHVAMESTGVYWRPVFAVLEGTVQVQLVNARHVKMLPGRKTDVRDCEWLAQLLECGLLRGSFIPPAAVRDLRDLTRLRKALIRERGHHVNRIAKTLELANIKLGSVVTDIMGKTGRAILHALSAGLDDPEPLAACAQGSIRKKQAALYEAVEGRLTPHYAFLLQQHLSLIEALDAHIAMLDARIEAAMAPFAETAALVQTMPGVAARAAQAILAETGMDMSPFPTAQHFASWARLCPGTHESAGKRRPTTTGKGATWLRATLQEVAWAAVRTKKSYYRALYYRLKARGGPKKAIVAVQHAMLVALWHMLKRRVPHQDLGADSFAQRNTERTLRHHVRRLEQLGYQVLLAKEAA

SEQ ID NO: 303505 - protein, 461 aa, unidentified
MAKKAKKVKTAKGAELRIVNPDAAGIDIADGIMQVCVPADRSKDNNRAFGAYTSDLHAISAWLRECGIKTVAMESTGVYWIPLFCRLQEDGLDVVLTNARDVKNITERKTDESDAEWLMLLHQYGLLKASFQPHNDAKRMRTLTRHRDTLSREASSIVLRMQKAMQQMNIKLTLVLSDITGKSGIRIIEAILAGERDPKRLADLADIQCKTPKEEIAKALEGNREEDLMFVLRQNYDTFKHYCTQLGECDAELEKLMENYRAEVAKVEDTSYSPAKKRRDYKKTRHTVGFDVERKAYEMWGVNVFEIPGISHLTALELMSELGHDFTRKFPSSKQFCCWCNISPNTKISGGKRISSHVPHRRNNVGLIFRSIASSLANAKNQLGNFYRRIRSRAGGKAAVIATAHKVAEIFFAMVANQTTYNPERVGIDEKVLLEKRITRYKRELERITGTHIEIGNACVP

SEQ ID NO: 303506 - protein, 381 aa, unidentified
MTTAVTHHEPENTIEATLFVAFELSEKTWKLGFTTGHGQKPRERTVTARQQERVLDEIVQAKRRLGLPETATVVSCYEAGREGFWLHRFLQGHGITNHVVDSSSIEVNRRRRRAKSDGLDVRKLLSMLMRYHHGERHVWQVVKIPSVEAEDQRHLHRDLETLKQERASTMTRIEGLLSSQGLRVTSLTKLPEQLDALRLWDGSPLPPGLRRRVLRVYAQYNFLSEQIAAVEAERRALLQTSPEASIDKVRQLMQLKGIGINGAWLLVMEFFGWRAFKNRREVGALAGFTPTPYQSGESAREQGITKSGNRHVRWMTTELAWSWVRFQPDSALSCWFRERFGGGGKRMRRIGIVAVARKLLIALWRFLETGVLPAGAVLKEG

SEQ ID NO: 303507 - protein, 345 aa, unidentified
MNILKQTVGIDVAYKTFDARFGTTNTQQLITLSSSKSFKNSPAGFKLFLQWLKKYILSNDIPLVFVMEATGVYYEQLAHFLHSHGYQVAVILPNKIRNYAKSLESKSKTDPIDAATITRFGLERKLSLWTPPSDTLKTLRDLCREYHCLKANCTQIKNQLHALKSSFKPHRESFKRKTQLLKFLERQVALIKKELLALVKTEPDLAQRLKNIKTAKGLGYITILTVLSETRCFQLVTNQKQLASYAGFDIVFNDSGLKKGKTSISKKGNTFIRKALFMPALSACRANPKMKELYKRLVAKGKNKKLAIIAVARKLLLLIYTLWKSNSPYNPDYKPLHSAAEALPA

SEQ ID NO: 303508 - protein, 336 aa, unidentified
MRYIGIDLHTTQVTVCYLKTGEDYQFKKYRLDEMEKFLAELAETDEVAVEATGNTRWLVNLVKEKVRRVVIVNPREFEVIKQSVKKTDKADALSLARFLAVDMLPEVRAKSERAETVQRINETRTKLVRLKTSLLNKIHALAVSKGRKLKKESLSSERGLEKVLAAEWTAAEGVELEIIIEQIRALKTGIGKLEKALEEQSKQMSGFENLITVTGIGSRSAGVLLSVIGEVKDFPDENKLASYFGIVPSVANSNEKVNHGRITKRGSKTGRTTLVQCTLVAIRYNSYLKKYYEQVKSRRGHGKAKIAAARKYLGIIYNTLKNKWVFEDFNNFVLAE

SEQ ID NO: 303509 - protein, 394 aa, unidentified
MILAGIDIGKDSHFFSLVRKEDGEVLAQPRKFTNTSEGFKTLTDSFIPYDKESILIGMEDTGHYHFALLRYLLSRKFNVALINPTATDFTRKANGSISKNDRLDTITICDVLSSNKPKKPYRISKFSSFDLYEQRGLTRHHHNLKEEINVYTNRLQKCIDIVFPEYNSLFPSKYGRVYISVLKTYGSAANIAKADIRSLRKCFEYKARGKRISLTAEKLKEAAKASIGIDSACEVIQIRHLLEQIELLNKQIKEIDKKIEEYSLANDSPILSIPGISHFSGTSILAELTDINNYDKAAQIIKRAGVAPLVYESSKYQAKHTAITKSGSKYLRKTLYQIILPVIRYNPVFQKYYDLKISQGKSHRCACGHCVRKLLRIIFHLLKTNQKFDPALLR

SEQ ID NO: 303510 - protein, 291 aa, unidentified
MHQYSVGLDVHSKQRTFVIADGTGTVVAEGEVPTTPAGLKEWCARQASPSGTPVALETGTTAFFVARQLSTVGMAPVVVDAHEVRLKAHRPTQKSDRRDARELCEGLRRGAGEQIQALEALLAAHQRPFAADLQRLQTIPGVGPIVAATGVAVFADVQRFPDAKHAASYAGLTPSTYQSGLRDVHGRITKRGSAELRAMLCEAAHHAARPQHPLHPYFAQQCAKHGYKRAVVAVAHRLCRIMFAMRRHGRDFDVSKLGIDVGPFEHTSVKLYRLKLVPRRPGLRPVATPAA

SEQ ID NO: 303511 - protein, 506 aa, unidentified
MNRPRHPSLCSCRFIQVAHRHCRPAANETVLDLRRAVGTEVVHRLGANKPAYKLDPEFLEHPRLSPRVVIGPGARFLEFLFTGLHADDATQEKVMELLHRRCCGLDVHKETVVACLRLVSNGKVTTEVRTFQTTTADLLRLSEWLAANDCTHVAMEATGVYWKPVWHILDDGEFELVLANAAHVKNVPGRKTDVNDATWLAELLAHGLIRASFVPDTQTQEMRNLLRTRKQLVREQSSHVLRVQKTLEDANIKLDSVLSDLMGKSGRAMIEALIVGETNPAKLASLADRRVKASPEELREALRGRVTKHHRFLLRLHLNQIDALDAAMATLDAQVAANLGPFRTAVDLIMSVPGIKNLGAQAIVSEIGIEMSRFPSDAHLISWAGICPRNDESAGKRRSNRLRKGAPWLKTTLVQCAWAAVKKKNSYLQAQFYRIKARRGPNKAIMAVAASILTAIYHMLKDGTMYQDLGRDHFDRRSTDQQKKSLVKRLADLGYAVEIKPLVASA

SEQ ID NO: 303512 - protein, 370 aa, unidentified
MAEYSGAYVAFDVAKTKHAVAVAEGGRGGEIRYLGEIGSAPASVARTIGKLAARYGQLRVCYEAGPTGYGLYRQIRELSHDCMVVAPALIPQRRGERVKTNRRDAVTLARLHRAGELTGVWVPDAKHEAIRDLVRAREAAGDDLRRKRQQLLSFLLRHGRLYTVGRDHWTQAHRRWLARQGFEEPAQQIVFQEGIDAIDDAARRLRRLEEQMASIVPSWSLAPVVTAYQAMRGASFLVAVTFAAEIGDVRRFDTPRQLMAFLGLVPGERSTGDTVRRTGLTLAGNRRARRMLVEAAWTYRFPARVSEALRARLEGLPKPVLDIAWKAQIRLCARYRRLSAAGKKLPVVVAAIAREIAAFLWAIGREVAPV

SEQ ID NO: 303513 - protein, 351 aa, unidentified
MRQYIAFDSHKHYTLAEQEEVVSRVTQQSRIEHKPGAIRAYLAACEPGTKVVVEATANWYWIVEEIEQAKLVPVLAHPRKAKMMMGMINKTDALDVHGLNRLQRNGTLPTVWIPPGPLRDLRELTRGRLMLGKDRTRLKNCIHAMLDKYGLRVTGYSDIFGKRARLELESLIARIPPHGRFMTQQKLEHLDYVCRQIQEVETRIAELAEATQEIVLLQTMPGIGPILGTAAALEIGDVHRFPTQEHLAAYSGTVPRIHASGGKVRYGKLRPDVNHYLKWAFVEAANSIAVNYKLWPDRFVCQRYMNVRRRKCHAVAVGAVARHLAEAAWYVLKHKQPYRDPNVVRGQAVGA

SEQ ID NO: 303514 - protein, 394 aa, unidentified
MRFVGIDIASEQHVVAVVDEGGNVVARPTPFGEDAAGYRALLEAAAAPGDTLVALEATGHYWKNVFAFLAGQGYAVALVNPLRTRRFAEEELERTKTDSVDALGIARFAAQKRPPVTRLAEEVTLELREMVQLRDRLQQDLGDRVRQLHRAVDLGFPEFTRYVTDLSSELATSILKDRQTAKSFVALRPRALSNLKYDGRHFVGLELATKLIEAAKVSVGAHHGEAYRVQVRYFCEDIEVLRERIGDIDHDIESKLDTHEVGKLLTTIPGIGPTTAARLIAVLGNPADFVDAAALAAYAGVVPGLRQSGKKAPSSARLTPIGNASLRAKLYMPTLTAVRLNPWLKAFYERLRARGKPAKVALLAAMRKLLAAVYSVAKHRQPFVPRLPSFGAQP

SEQ ID NO: 303515 - protein, 349 aa, unidentified
MRFYTQQHRFYCGVDLHARTLSVCVLDQTGQVVAEATVAASPATFLKAVAPFRDGLVVGCECLFAWYWLADLCAQEQIAFVLGHALYLKAIHGGKAKTDKIDAAKLARILRGGTFPLAYVYPRGMRETRDLLRRRTFLVRRRAELLTHLQILNSQCNLPPLTKKLAYAANRAELDLAARFADPSVRQNVVTDLKLIDHYDDLLADLERFLVRTAKVEDVQTYHRLQTVPGIGKVLALVLLYEIHDVRRFPEVGHFLSYARLVRCAHESAGKKQGSGGHKIGNAHLKWAFSEAACLLLRSCPEVQRWKERRERKYGAKRALAALAARLGRAVYHLWRKGEAFDLTRFLAS

SEQ ID NO: 303516 - protein, 389 aa, unidentified
MKIFVGIDIAKLNHFAAAISSDGEILIEPFKFTNYADGFQLLVSKLESFDKNSIIIGLESTAHYGDNLVRYLVAEFYQVCVLNPIKTCQMRKNNVRKTKTDKVDTFVIAKTLMMQDDLRFITFFDLDMMDLKALGRFRQKTIKQRTRLKIQLTTYVDQVFPEIQYFFKSGLHQNAVYALLKEAPSPKEIASMHMTHLANLLKVNSHGHFTKEQAKELRVLAQKSVGANDSAISIQITQTIQQIELLDSQLEKIEAEMTDIMKFNDSVIMTIPGIGYINGGMILGEIGDIHRFSNPNKLLAFAGLDPSVYQSGNFQAKTTRMSKRGSRVLRYALVNAAWNVVRNNATFKAYYDAKRSEGRSHYNALGHCAGKLVRVIWKMLTDEVEFNLE

SEQ ID NO: 303517 - protein, 347 aa, unidentified
MGKLIRVGMDTSKQVFQLHGVNAAEEVVLRRKLRRKEMVAFFQRLEPTVVGIEACGGAHHWARVLREFGHQVKLLPPKYAKAYVKRGKNDAADTAALCEAMSRPTMRFVPVKTAEQQAAQMLAGTRDRLIRCRTQLTNAIRGYAAEFGLIAARGVDKIEPLLARLDTEPMLPALARELFSWYAKEYAQLQAQLKAVDAKLMAWHRQNEPSRRVAEIPGIGPIGASLLVMKVAQPDAFRSGRHFSAWIGLTPKDHSTAGKTRLGAITRAGDEALRSVLVIGATAVIQQVRRGKGQPSPWLVELLKRKPPKLAAVALANKMARIAWRLMVGGQHYKPAPVTATAMDKAA

SEQ ID NO: 303518 - protein, 356 aa, unidentified
MEAIYHIGLDQHKKFSQVAVIDKDGKVEENTRVMNTGNNIREFFEKIPKTSIITMEATRDWYWMYDLLEELGFKVKLAHPRKVRLIAEAAIKTDKIDCEILAQLERTNYLPESYVPTKEVRDLRELMRHRSSLVGLRTSLKNKVHALLAKRGICHEFLTDIFGKAGREFLGQIELPVIYKFKLDIYLKLIDQLQEETKVLEKIIKEKALKEDKYAKILMTVPGIAHISAMFLSAEIADIGRFKNYKKLCSYAGLASSTDQSADKVRHGHIIKESNKYIRTVLVEAVYKAMQKDPHLAQKYYKLAKRRGANKAKIAIARKMLISIFYMLKEEKPYLIRKVEFNTGKNYIENNLEMPA

SEQ ID NO: 303519 - protein, 419 aa, unidentified
MKIIKTKKHKIVNGKTLLVAVDLGKTKHMGYYRCPNGTDIKPFEFSNNRPGYQRFYDCICQAKAVHHLEEVVVGFESTGVYGEPLVHFLNNKGIRLVQVNPLHTKRMKELEGNSPGKTDRKDPKVIADIMELGHFLTVVIPEGVSAELRRLTQARERSVERRTAFYNQLQELVFIIFPEFLEVMKDIKTRSAQYLLRHYPTPQGIVQCGVEGLSSLLRQVSCGKLGRPRAEALYEAAGRSVGIKEGQRSIVLEIEEILLGIERCQCFIAKLEREMRRLLDQIPYSRSILSVKGIKEVTAAGLIGEVGDFRKFRTISEILKLAGLDLYEISSGNHTGNRHITKRGRSLLRKLLFFASLNMIRKGGVMHEPYQSYIGRGMPKHKALVAISRKLLRILFALVRDHREYVVNYSERENLKLAA

SEQ ID NO: 303520 - protein, 394 aa, unidentified
MKLVGIDVGKNSHHFCVMDKETGEFNVTPSSFSNNKEGFDFLINSLKPYSKKSILIGMEDTGHYHVALLKFLLSNGYTVALINPKTTDLTRKMEGGITKNDKLDTITICDVLDTPERKKQYRITKVDRFDLYEQRQLTRHHHNLKEELNVYCNRLQKSIDLVFPEFNTLFSSKYSIVYMNLLKTFGSAEAIASTDIRTIRKCFEIKGRGGRISLTAEKLKECAKNSIGISSEVETIQIKHLVSQITLIKEQIAEIDKKIEEFSITNNSPILSIPGISHFSGTSILAELGDIGNYSKPSQIIKFAGVAPYHYESSQYNAQHTAITKKGSKYLRKTLYQIILTVINNNPVFKKYYRLKISQGKGHRCAQGHCIRKLLRVIYHLLETGQSFDPALLR

SEQ ID NO: 303521 - protein, 380 aa, unidentified
MAEITRALIARVGVDLAKNVIQVHAVDGAGRRVVARAFKRDAFLAWCAQLPAGCLVAMEACSGAHHFARRLRAMGLDARLIAASLVSPYRMEGKSGKNDMTDAAAICEAASRPAMRFVPIKSTEQQGVMSVHRLREGYKEERTACINRIRGVLAEAGLVFGKSPKVLRAVLGEVIEDASNELSTTARLVLQRAFEHWRELDEHMRWCDRQVGQHVRSSAQAQRAAKVTGIGELGASAVTASVGDFGQFKSGAQFGAWLGIVPKQNSSGGKASLGRITKRGDDYLRTLLIQGAKSAVMSAGKRDDATSRWLVGLVARVGWQKACVAMANKNARILWAVMTRDKPFDAAHVSDKPPAKCSSKSVGAQRPVPPRPAAQPLCPA

SEQ ID NO: 303522 - protein, 343 aa, unidentified
MEHFAGLDVSVKLTSLCIVDDAGGIIREAKIESDPDALLQVLKNGAYHFKRIGLEAGPLSQWLFSALAEAGLPVICVETRHMRAALKAQINKTDRNDARGMAQMMRAGLYRPVHVKTVRSQKLRMLLTHRKLLQSKAIAIENDLRATLRNFGLKVGMAGAVKFEARIKELVENIPDLAILVEPLLIVRRTLREQFGIVHRRLLAVVRQDEVCRRLMTVPGVGPVVALTYRSTVDVPARFRNSKAVGAVFGLTPSKYQSGEIDRTGAISRCGDEMMRVMLYEAAQSMLYSRKWSWLKAWAMQIARRRGIKKAIVALARRLAVVMHRIWVDGTEFRWTRQEAAAA

SEQ ID NO: 303523 - protein, 344 aa, unidentified
MEITTVGLDLAKNVFQVHAIGSAGGVVVRRSLRRAQVIPFFSKLPPCLIGMEACGTSHHWARELVALGHEVRLMPPAYVKPYVKRGKTDAGDAEAICEAVTRPTMRFVPIKSVEQQAALALHRTRDLLVRQRTQLVNMIRGLLAEFGIAIPKGITNALAFVRRAAAGEANEVPDLATKVIAALAEQAIEVQCRIRQLERDLLASFRSNDLARRIATVPGVGLLGATAIAATVTDPTQFRSGRQFAAWLGLTPLNNSSGGKERLGRISKMGDQYLRRLLVTGMTSLVRRNKHHPGSADPRINALLARKPPRLVTVAMANRAARAIWAIMVRGEIYRMPALGSAVA

SEQ ID NO: 303524 - protein, 408 aa, unidentified
MSHIVAGIDVHKRLLVVVAADVSLDPPDFSGRRFGTLAGDLQQLVEWLSSQGVQEVVMESTAQYWKPVWLALEQHFHPHLAQAQSNRAPRGRKTDYRDAERLVRRFAAGELILSFVPDAVHRDIRLLARRRVQWIRDRIRLQAQVECHLEECNIKLSSVITDLFGASGRRILAALAAGELDPAGMAALGDGRLHCTIQQLSDALQTRISTDQREILRMFLEQLNLIDTHLHTVTQLIANAVKPHQEAVLRLCQVPGIRVVAAQQILAEIGSDARAFPSSAQLSSWAGVCPGRHESAGDNHSSRCAKGNRFLRSIVCQCAQAAVKTNNSWFQTTFRRLLPRLGFAKAIWAIAHHMMRLIWKILHEGAQYQERGAQTSPQALRRRLQYLRKECLALGYDLQPKTLATTTQ

SEQ ID NO: 303525 - protein, 400 aa, unidentified
MNPVIGLDVSKGESEVQAFLDKRKPYKKSFSVLHNNNGLENLLRFLIEVEGETGVRPTVIFESTGHYHTSLVQFLEENDYLYIMVNPLLSYQAKKSSLRKVKTDAIDAYNLCELFYKEELEPYKQRGIQLLNLRNLSRQHETVTGIYVQTKLQFHAILDQVFPEYRGVFGDLFSKVSLNTLLEFSTSEAVLKAGENRLSDKIASECVTRSERWAKDRAKKLVEAAHRNPFKNTLYQSHLISLQMYIQMLLQYQEHLSKLDDQIDALAEEIEEYKIIQSIPGIGGKIAATIISEIGEIERFNHPKKLVVFSGIDPSVHSSGKFTATINRISKRGSSRLRHALYMGALCGIRSSRNKRLREFYDRKREEGKPFKVAMIACTNKLVHWIFILLKRKETFLDLA

SEQ ID NO: 303526 - protein, 400 aa, unidentified
MRAVFGIDVSKTSSEVAILVNGEKVHGYTILNDAIGFNRLLGDLKTVHNPEIIFEATGVYSRRLQAFLEEYSYAYTRLNPLEAKKQLDSLRVRKTDKIDAEKLAKSQLVHNRKPTYVQEEVYQHLRDLSRFYQNMTEDLVRTKNRLHKVLQVTFPELETLLSTPTGEQYWNLVMAFLCKEFVLSLSQSNLCKIIHQSTSKRISEKRITYLTDKLIKLAKQSFCAVKNTSPMLEEVRYYAQELLRLSERRQVVLNDMVALAQPLPEYDILRSIPGIAETTVTSIIGELGDIRRFQSSNQINAFIGIDLRHYESGNFLAKEHITKRGNPYARKILFKCIHNIASASHTNPCHIADFYEKRKRQSQVTSTKPHTIASIHRLIRTMYYLITHNKLYDYSLTQNR

SEQ ID NO: 303527 - protein, 341 aa, unidentified
MEVTTIGLDIAKNVFQVHGIDAAEKVVVRKQLRRGQLKKFFGALAPCLIGMEACATAHHWARELTKLGHQVRLMSAKDVKAYVKRNKNDAADAEAICEAVRRPTMRFVAVKSAEQQGRLMQHRVRDLLMRQRTQLINALRAHLAELGIAAAQGREGIKELLAIVAQDGDSRLPVDAHASLIVLAAQLQAVQTTIGSIEKRIVSQHRSNEESKRLQSVPGIGVIGATAIVATVPDPKVFRSGRDLAAWIGLVPRQDSTGGKQKLGPISKRGDQYLRRILVVGACSVLRRARQQPEKYPWLIQLLARRPFKVVAVALANKMARVAWALLAKGGTYRAPQLKAA

SEQ ID NO: 303528 - protein, 354 aa, unidentified
MTASYDYHIGVDYHKSYSHLVVQDSSGKTLRAGRVKNDRQSISGFLDRYSENSHAVVEATRNWMVMYDWLDDICDDVVLAHPLKVRAIADAKIKTDKIDATVLAHLLRANLVPEAWAPSEKSRDLRVALRERMFYVRLRTMTKNRVVTVFDRYPEQTAQLKKLGDLFGKAGRVQLAQVKVSEIDRIQIDRSLDFIGDIDVRIKQSEATIRAMTKANANVKLLKTIPGIGEFFARLIDAEIDDISRFRNPKKLAGYAGLVPSTYSSGGKTFHGKIIKQGNKWLRWAFVEAVAPAIASDPRLRLQYEHLKTIGTNKARVAIARKLLTIAFQILRDQRAYEQRDVNGESTSTISRLS

SEQ ID NO: 303529 - protein, 356 aa, unidentified
MSHDVKYIGMDVHKEAIVIAVQNESGKLVMESVIETKASSILQFLHGLRGELHVTWEEGTWAAWLYDLLQPHVQHIVVCNPRRNALLKEGNKSDKVDAGKLADLLRTGMLRPVYHGENGLRTLRELGRSYQTISKDLTRVMNRLKALYRGWGIPCAGTQVYAARAREKWLSKIPHTGVRRRAELLYQQLDGLLALRRNVRPELLAESRKHKAAKLLRQIPCIGPIRAARLIGLMQTPHRFRSKRQLWTYSGLGIETHDSAQYCFVRGQVQRSKKPQQVRGLNRNHNHEMKEIFKSAATRASCGRGPFHDFYTGLLAKGMKPEMARLTLARKIAAITLTLWKKEERFDVEQLKTQAA

SEQ ID NO: 303530 - protein, 304 aa, unidentified
MPIVGGLDIHRKQLTFDYLDTGSGEVKRGQIAPADRAHLRAWLARFAGRDDVAFALEGCTGWRYVAEELAGAGVAAHVAEPADTAFARGRKRHAKTDKTDSRHLRELLAEGRLPECWVPPPVILECRALLETYHDLRAEHTAWVQRIHAVFFHQGAPALGDGALRTDRDLQALRAAAAAHLSPAGQLQVATALDMLAALEARLGVLRHRLLAAARSLTGAKVLTERLYGVGPVTGLAMTCWLGGAGRFSSSRKAVRFAGLDVTVWSSDRKGPPGRLSRQGPPVLRFSSALAVSGGTRVAVGLPC

SEQ ID NO: 303531 - protein, 330 aa, unidentified
MKQYDHVFGVDVSKKTVDITHVINQQFTHRQFMNNDTGMEQLMEWFKEFAPEFDKTLFCMEATGLYCFTLTHFLASHSIDTWIEHAAQIKKATALTRGKNDKVDSQRIAVYATKNLDRLRLWKPVNATLEKIRHLASLRERLVDTKKRLVTPIKEFEDVGNLAMAKLLTKTIKSSLAAIDKDLKNIETKIIDIINEDDNLKLLYKLITSVVGIGFVTAINLIVHTNGFTVLKDTRKLACYCGVAPFEYSSGSSIRGRTKVHYMANKKLKCNLHMASLTAVKLDADLKAYYERKVGEGKSKLSVLNAVKNKLLARIIAVVNKQELYVKKIA

SEQ ID NO: 303532 - protein, 362 aa, unidentified
MKPLRSRSLRELEQLHEARGVAPKRPRIQDRASARAPLGGFSMSGFIGIDVSKDELVVGSEGQVQLESYPNTERGHEHLIRDLLASSAPVEMIVVEATGGYERRLVTAMGSRGLPVVVVNPRQVRDFAKATGQLAKTDKIDAHVLADFAAKVKPEFRPLESEEQEELRDFLVRHEQLIQMLVAEKSRLLQAQGGSRHVLRKKIKSHIRFLERELELLDSDLDDTLRKSPMWKEKDDLLQSVPGIGKQTSLTLLAMVPELGTLNAGQIGALIGVAPFNRDSGKFRGKRHISGGRARVRAVLYMAALVATRFNPVIRAHYQRLVAAGKPKKVALVACMRKLLIVVNAMIKTKTQWQAQPAPTTA

SEQ ID NO: 303533 - protein, 340 aa, unidentified
MSSITIGLDLAKNVFQVHGVDAGGCVVFRKKLRRSEVLRFFEDLSPCLIGMEACATAHYWGRTLSALGHQVRLIPPAYVKAYVRRQKNDAADAQAICEAVSRPSMRFVPIKNAERQSVLVLHRSRDLLVRQRTMLINAVRSHCAEFGLIAPQGALRLADLVVQIRSADEARLPPIVASAMLLMVAQIEALMTQINQLGRVLLVWHRQDEASQRLASIPGVGIITATALVATVTNPTHFRSGREFAAFLGLVPRQNSSGGKERLGRISKMGDRYLRKLLVMGATSVIRRARTSTQGAAAWIRSLLERRPARVVTVAMANKTARIAWALLARGDVYRTASHA

SEQ ID NO: 303534 - protein, 312 aa, unidentified
MNDVTIGIDISKALLDVATFPDGQVKQFTNNKKGHKELVKWLASLHTKLIVFEATGAYHRGLERFLGEHGVAFSKVNPRQARQFAQATGKLVKTDRVDALMLARFGELLEPPHSASKSQTLEELNELVVARRALVKDRTAAKNRQHNLRSPLLKRQTKQRLKQIRKQIETIDARCMELVQSDRLLSKRYNILISIPGLGKLTAIIILSEMPELGSMDKRQTAALAGLAPITRQSGAWKGKSFIRGGRANLRQALYMPALVAIRFNEEMAQKYKSMTQAGKPAKVAITAIMRKLIITANSLLRDGRKWSKISA

SEQ ID NO: 303535 - protein, 373 aa, unidentified
MKYSTVYVGMDVHKETFSVCCYTNEKEEAEYCQTMDAQYSKVLNYIESMHFHYGEEAMFICGYEAGCLGYTLYHQLTDHGIKCVILAPTTMSKPTNEKKMKTDRRDARLIARCLAHHDYKSVYIPTEHDEQVKEFIRMRDDHNLALKKIKQQILSFCLRHNYRYEGGKQHWTQKHLDWLRALEPEEIYKEILNEYLLTYQTLVDKIERLDRRIEYLASDEAYNDKVNKLVCFLGIKTHTALSVIVETGDFKRFKDARSYSAYLGLVPGENSSGPKKNGLSITKAGNRHIRRLLVETAQSYTRGQVGYKSKAFKARQKGNAADVIAYADRSNERLRRKYYNMTLRNNKKTNVAKTAIARELSCFIWGMMTANYI

SEQ ID NO: 303536 - protein, 343 aa, unidentified
MSYKLYFGVDVSKHWLDIAYYDGVDVDWKHGHIRVDNDEKGFAQLGRWLDRLGVGKGTCIFCMEYTGLYSQEFRQWLERMKIVYGMASPRKMHRFEPDLGEDERALDRIKTDEMDSFRIAIYCKEHSMKIRRKPSHLPSDAYFKLKRLLAERRQYVKQSTLYKQQLHDIGKYDTEASRHRKEAELASLTEKALQAGKEMEAIIMEDADIKRSYDLLCSIRGIGLVVAAETIVLTENFTSITNPRRYACYVGIAPGRKESGVSIQGGDHVGRKGFTQAKADLSMAALHGIRFDKGIRAYWLRRKAEGKHSGVVLNAVKFKIVLRMFAVIRRQKPYVEMEEYGKK

SEQ ID NO: 303537 - protein, 343 aa, unidentified
MLTNNVIAIDLAKNVLQICHISVHGELLFNRPLSRQKAKEFLTKAKPSIVAMEGCCGCHYWGQFAEQCGHEVRIINPKKVKGYLEGHKTDHNDALAIANAAIQIGIKYSRPKPIEQQAMHSLESSRRFLSRSVVSLGQHIRGTILGYGIANPRGKKGLKASVQAVLDGETPIPANVVSVLSMLWEQYKQLKTKLIEFEKEKNALTRQIEPCKRLMEIEGIGETTAAMLYTTLGDGKQFKNGRQASAFVGLTPKQHSSGGKVFMIGIDKCGGVKELRSLLYLGAMSYVGRLPEKPKTQKDAWLTKIINRIGFEKACIALANKIVRTAWAMLRYETEYKPILLTD

SEQ ID NO: 303538 - protein, 364 aa, unidentified
MFVGLDVHKDSISVAHVPEDRRADVTYVGRIGTRPADIDRLVRRLQEKADRLIVAYEAGPCGYVLYRHLTRRGITCLVVAPSLIPKKPGDRVKTDRRDAVQLARLLRSGDLDSVYVPSVEDEALRDLCRAREAAVVTLKAAKFRLKSFLLRLGLHYTGRADWNDAHLRYLAEVVCPTPAQQIVFQESLRSVDEQVERLQRIEAELADLVPAWRLAPVVRALQALRGVQDTVAVTMLAEIGDLTRFDNPRQLAAFLGLVPSEDSSGDSRRQGPITKSGNGHARRALVEGAWAYQYPAKISPHIRKRLEDLPQPIQDIAWKAQIRLCKRFRRLVAKGKHPNVVVTAIARELAAFMWAIAKEVPVTA

SEQ ID NO: 303539 - protein, 359 aa, unidentified
MQLVEATSHPRPRVVVGVDTHKDIHVARAKDGLGHLVGELSVPATSQGYRQLLAWAEGLGERLTFGIEGTSSYGAGLSRFLLGRGHGVIEVTGPNRKARRSNGKSDPADADAAASAVLSGEADGLPKHGSGPVEMIRALRVARSGAVKAHTQGINALKGLAVTAPEALRADLAGKSTRELVHVCSRFRVAECSSPHDANRLAIRSIARRLVVLEDEIALLNRELIRLTQAAAPKLMELPGVGAEVAGSLLVSVGDNPERMRSEAAFASLCGVSPVQASSGKTVRHRLNRGGDRRANQALWRTVVVRIRYGHEPTAAYVARRTAEGLSKREIIRCLKRYVAREFYAVLMADQSGQASNAA

SEQ ID NO: 303540 - protein, 412 aa, unidentified
MDVLVRRCAGLDVHRDTVVATVRVPGSGRRRRVQHTRTFATTTAGITALADWLAEHRVTRAGMESTGVYWKPVYYLLEDQLEVWLINAEHLHNVPGRKTDVADSAWIAQMVEHGLVRPSFVPPPPIRELRDLTRHRRTLVEERTRVVQRLEKVMQDAGIKLTSVASTLLTKSGRAILEALLAGQDDPDTLAELARGRLRAKIPALREALAGRFRAEHHGLLVAQMLAHIDFLDAAIAELDTTLERAAAPFQAVIKQVCTIPGVSVRTAIMLLAECGADMTVFRTPAHLASWAGICPGNNTSGGRSRSGRTRHGSIALRTALTEAAHAAARTKNTYLAAHHAHIRGRRGLPKAIGATRHDLLIAYWHVVHDQVDYADLGPDWAQRRRSTEHRTRRLVHQLERLGHTVTLESNT

SEQ ID NO: 303541 - protein, 486 aa, unidentified
MPDKIANQLKEEVILMSEYFLGIDSSKGYADFVLLDSQKVTVESNFQLDDTFDGHVRLFEILSGFIREHPEPIIYAGIESTGGYENNWYHSLRKFQKDIPIKVVRLNPVGVNHTGKAEMNRNITDKISAKNIAIHLINHRDKINYEEDSLFSSYKRIWTYLRLLKKQRTQLVNQLDPLMYSAHPQLQQYCREGTRQWILKLMILYPTAKHLSRARIKGITKIPYISKERAHELIEGAKFTTASATDDIMAGLIKSIVKKILDLDKETNQQKKVLEQNCDLPEVELLKTIKGMGTYSAVGLIIEIGAIERFPSKKHLASFFGLHPEFKISGDGIKCIGMSKKGRRVPREILFNVAKSAINTDPYINRIYNYYVVEKGKNKMAVIGIIMHKILRIVYGMLKTDTPYNFDIDSSNRIKIYVKKKDLSFIDSSRRYQTFDPKAPTSRRQDKRRKEREEAHNVFTLNSGSSPALGGVSTPLSKRKVKSIAV

SEQ ID NO: 303542 - protein, 451 aa, unidentified
MANSKTRADRIISRQLSHCTVEAAHLSAVGIDVHHDQLICCFQKLDPIAGELTSEHRSFGTTIPQLLEFAAWCRVRESSVILMESTGVLWFSPYRSLEDVGFDNDTLALVNARDVKAAVGRKTDAQDAKRLAEYARLGKFHKSFVPSRPFRDMRMVFRDIIRLSDDISRQKNRYNKNLNSVGCRATSVFSDVHGKAAGKILDAYIRGDRDFEEIVRSARKQLRATQQEILEAINFAMSDALRELLRSSYEHLQYLIARRDSQIALLERMQAPYQEYIDRLMTIPGVKELSARLLFCEFTNEQQSFPDAAHFASWLGLCPGNNKSAGKSSSGKTPKGNRWARKTLTEVAHGIGLMKRGALKALFQAFKERRGARRAVVAIAHKVAMIMFAMIWDGSEYVETTCSALRDTRVKRLLQTSKNLREQRTVITLSGQIVDKDTGELIGQLSVDAAT

SEQ ID NO: 303543 - protein, 355 aa, unidentified
MTHYVGLDVSMEVTSVCVLDGDGAIVWRGVCASRPEAMAAAVAKHAPDAARVVLESGPLSHWHWHGLHALGVPVVCIDARHAHGVLSARLNKTDANDAEGLAQLARSGWFVPVQVKSAHAHHDRTLLAARDRLVKIKRDIENQVRGSLKVFGLLIGKVASGGYEARVRELLAGAPALAAIIEPLLAVRRTLLRQYDVLHKQLLAVVKESGVCRLLMSHPGIGPVTSLAYRAGVDEPARFAKSSSVGAYFGLTSRRYQSGEVDWSGRISKCGDTMVRSLLYEAANVLLTRVKKSCALKTWGLKLKKRIGGRKAKVAVARRMAVILHRMWRDGTAFDWGCPESGATEVTDLSIAAPA

SEQ ID NO: 303544 - protein, 325 aa, unidentified
MGIARLLDQQQPDNMNKIPTTALTEEVSKNNGPKGSKTKQIFLGIDAHLRSYQVAIKRDNGAIQAAQRFGLSELLLYAHKQLQWAEEVYAVYEAGPLGYALYRQLKELGIKPYVSAPECLEQGKRKTNKLDARKLCSRLYSYVQGDKEMMRVVRVPSVELEQMRIESRQYDQLVKMRKALSMQARSLVLSQGCGTKNGSWWRPIAWAKWSQLLPPWLVKHLELWQKNLQLLDQQISECKIALIKSLKEALPKGFGAQSMCQLDREIGDYQRFNNRRQIGCFGGLVPQEYSTGAHQRLGSITKVGSPRIRRLSVEMAWRLVRFQPN

SEQ ID NO: 303545 - protein, 408 aa, unidentified
MEKRLFVGIDTSKMGHQVCLMNPTKIKQDVYIENNRAGFDRLTTILSQYRKEGYQVTVGCEPCGHYWENLGYRLVEDGYAVQLVNPFHVNRYKEIFDNSPQKDDRKDSRIIATLVKDGKSLHNNLPRGGYAELRHLTHLREQLLKEGTRLRNRLHGWIDRYFPEYSTLFCDLLGVTCLGLLKKYGGPRGMVEVCVGELTGEVRSLSRGKLGRKRAQEVQARAARTIGQTIAPRAARAELNWSLTRIESWREEVKGVERLIKAELIQQKEDKYLQSIPGVGWWGSAVFLGEVEDIGKYPRAKSIEKLAGLNLYHKKSGKTESSLRITRRGRSLLRKMAYQLAVSGTHGAEEFREFYQRKLNKGKPKVSALVALAAKILRVMYGVVKNEEEYRPLKERAGDAGGFQEGPC

SEQ ID NO: 303546 - protein, 366 aa, unidentified
MRKISTVGLERIEIFKDRKLTIGLDLGDRFSQYCILNEAGDVILEDRFPTTPKGIIEVFSRIPRSRIALETGTHSPWVSRQLARFEHEVIVAHARNVRLIGDSSRKDDRFDARTLARLARIDPGLLGPVRHRSAKAQIHLTEIRARAVLVSARTALVNAARGLTKSYGERLEKCGTRQMNRETAKGLSQELREALDPLLEEIESLNERIIQYDRRIEKISNEAYSSVSLLKQVKGVGTLIALTYVLTLDDPHRFRRSRDAGCFVGLRPGRRNSGMSQPQLHISKEGDRYLRTMLVQGAHYILGPFGEDSDLRRWGMRLAERGGKNAKKRAVVAVARKLAVLLHKLWVSGEVYEPLRNNHKVVCRVA

SEQ ID NO: 303547 - protein, 394 aa, unidentified
MRFVGIDVAAETHMVAVVDESADVVIKPTPFTEDAEGYQKLFTLLGDAADTLVAMEATGHYWKNLFAVLASRGFMIALLNPLRTSRFAGEDLERTKTDSIDALAIARFAAQKRPVPTRLPESATEELRELVRHRDRLVQDFGDRIRQLHRLTDLGFPEFTRIVKSLDSELATSILHDYPTARSFQGVSLRRLAQLRYDGRHKVGEEIAAALIEAACVSVGQHHGEAYRIQVRHACEDLAVLRRRLRQLEGDIERKLGEHEVGTLLTSIDGIGPQTAARLIAELGDPAQFRDAAALASYVGVVPALRQSGKCRSTRAGLTSIGNARLRAALWMPTLTAVRKNPWLRAYYRRLVARGKVRKLALVAAMRKLLVAIYSVAKNRRAFIPYLAPAEASP

SEQ ID NO: 303548 - protein, 423 aa, unidentified
MPYRIGGIDVHKKRLAVVVADVEVDEEYQFERRWYGSNPEQLQKLAEWLIAQQVEEAVMESTAQYWKPVWSTLERYWKPNCQNREGTGKMSGTLHLAQALSNRGRRGRKKDFRDAERLVKRLISQELVLSFVPDSEQRLWRTLTRTKYQRTRDKVRLQNQLEALLEEAHIKLSSLVSDLLGVSARRMLQALGDGATDPAALAALADQRLRATPEQLRDALGACAGLNPVYRRVVKMALTDLQLIEQQIGQLDQEMASLLHEHQDAVQRLAEVPGLGVDSAQQIIAEVGAKAATFASPKNLVSWVGACPGDEESDQVNRSKRSPKGNRQMRRILNQAANAAVKHKGSIFEIVYRRLVLRLGHNKTIGAIAHRLCQLIWIILHKGARYEERGPAVSEKSKRLRTSRMIRTLRMLGYRVEPALIPA

SEQ ID NO: 303549 - protein, 391 aa, unidentified
MTTALSFQEKSPLFVGVDLAKSVFQVAYQNPKSSRFCNRQLTRKEFRRFLTEHQGSLCVGMEACGSAHYWGRECVKMGHEVRILPAITVKYINQGNKDDRNDAHCIWQAMHLPSIKTVKIRDESNQALMSLLKLRDLIIKQKTQLQNNLRGCFYEQGVICGSGSESLIETAEAQVKELREENKEWSELIAKVSICAIGLIKGQAKQLQTIDEYITKYTQENESCRKLMTIPYVGPVTAAALYAVMFDPGNFKNARQFAAYAGFAPTHTGTGGRITMGGIPLKGNQVLKRVLYQVCLSLYSRNKRMKNQAGQNENTWLARLSRRLPVKKTVCAAADKICRIAWALLHNGECYADEKSTLGIARIKSKRIMRRHMYDSIITLSEEAEDNKYNR

SEQ ID NO: 303550 - protein, 500 aa, unidentified
MKTKRSKAKIRAGRRGLSVTASEPEQKLEILKPDAAGIDCGAQEHYIAVPPDRVRAGQPTVRCFSAFTEGLHAAVDWLKQCRVSTVAMESTGVYWIPLHQKLEEARIEVYLVNARHVRHVPGRKTDVQDSQWLRQLHRFGLLNASFRPDDIICRLRSLHRHRDNLVSSSASEIQHMQKALQEMNLHLHHAVSDITGLSGLRIIDAILAGECDPEKLVKLRDRRVSKSTPEQMKAALEGDCRPEHLFVLSQSLQAYRFYQARIEESDREIEPLLEKLAQQVEAASGNVNLDALGPSVLEGGSTTPEQLSQAKPASGPKSKRKRKPRANEPKIELADLLERICGIDLTQVVGLNVLNVLLIISEIGVDMSKWRSAKAFCSWLGLCPGNKISGGKVLDSRTRQVVNRVADALRLAAQLAGRTQTCLGIFYRRKQAHLGAPKATTATARKLACLIYQLLRNKRPYQEPDPVIYQLRLQKSAFTRLQKQAASLGYTLLPTALVPA

SEQ ID NO: 303551 - protein, 343 aa, unidentified
MHTITTIGLDIAKSVFQVHGTDAAGQVVIRRQLKRRAVLAFFQKLPPCLVGIEACASSHHWSRELQALGHAVRLMPPAYVKPYVKRQKNDMADAEAICEAVTRANMRFVPTKTPEQQGCLMLHRTRHLFIRQQTAVINSIRAHLAEFGIVAPVGRKGVMELLQVVADPSDKRVSEVARACLAALGNQLLGLKEQILEFDRMIMAWHRSNEPSKRLRYIPGVGPMLATALVASVADPKTFRSGRNFSAWVGLVPKQHSSGGKDRLGSISKQGDRYLRSLFVAGALSVIRYAKIHGTKHRPWLTALLARKPTKVAAIALANKLARMAWAMMARGERYRNPVALAA

SEQ ID NO: 303552 - protein, 424 aa, unidentified
MSCLPALAGVCPTHHQVRRDIVILTESTLIVAGADTHADTIHVAAISMTGAAVKDREFPTTRSGYAAAIKFLTSLGQVERIGVEGTASYGAGFTRALIAAGIEVVEVTRAVKSTRRLKGKSDPLDAYSAARTALAGGGLAAPKDDATAGLRALHIARRSAVKHRTAAINQLKAMLVSAPDEVREKYCRLTIFRLIEAIARCRPDTQNEPWAQSVLTAAKMLAQRVQFLEAQAETLEAQIDALVTDANPGLRAAYGVGADTAAQLLITAGANPHRLHSEAAFAALCGVAPVPASSGKTTRHRLSRSGDRAANNALHRIALVRLSHHQPTKDYAQRQLVNGHSRSKMEVLRKLKRAIAREIFKLLTRQIAVPEYTDLRPARQAKNITLTAVANHFGVWPAVISRIERGRQRDDTFADTYRNWLKAA

SEQ ID NO: 303553 - protein, 349 aa, unidentified
MTQFSRIGLDTSKALFTLHCVDAAGKPLLRVNLRRAQLLGFFKRHPPTVVAMEACGGSHHWARKLAALGHEVRLIPPQYVKPYLKRGKNDRNDAEAICEAAGRPGMRFVPVKSVDQQAEAMVLKLRATLVEQRTQLINAMRGHAAEFGVISGRGTGKAAALLAVIAADTAIPPVAQEMLGLLGEQIDHLDCRIKALEAKLEAMHKANVISQLLATVPVIGPIIGLSFAIDVDPAAFASGRHLAAWLGLTPQEHSTGGKQRMGGISRAGNERLRALLVSGAMAVIRAAERAGSKLATEWLLKLLARRPRKVAAVALANKMARMIWAMMTTGEAYRVPASAATAHFSAAIS

SEQ ID NO: 303554 - protein, 350 aa, unidentified
MKRAGSMGLMEARGRKALAMSQISSVTVAWMSATGTATCASSTLCLIDTISGEVLEESRIATSPAAFERRFSGCEPMRIALEAGTHSPWISRLLEGRGYEVLVANARKLRLIYAEGKKTDRLDGENLAHLARLDPKLLSPLKHRGEAPQAHLALVRSREALVGARTKLVNHVRGSVKSFGARLPKCSAESFHKKVAGRLPEELLPALEPLLDTIASLSAQIREYDRRLETLAEELYPETQLLRQVPGVGMLTALVVVLTLEDPFRFDDGRAVDAYLGLVSGRDQSGDSDPQRRISKKGDRVLRRLLVGSAHYLLGPFGEDSDLKRHGEKIAERGGRIAKKRAEVAVARKL

SEQ ID NO: 303555 - protein, 367 aa, unidentified
MKNGSTGATKQSRNISQQKLTIGLDLGDRNSWYCVMDEAGQIQREQRVRTSGKALREVFGAMPGSRIALEIGTHSPWISRLLSELGHEVIVANARKVRLIGESRKKDDRLDAQTLARLARIDPGLLYPVKHRSKQAQADLTLIRARAGLVRARTGLVNTARGLAKSYGERLRGCNVRNLNPEKAESLSPELQAALEPLLNAIESLSERIVEYNERIENLAQQSYPRVALLKQIKGVGTLIALTFLLTLEDPHRFAKSRDLGCYLGLQPGRRNSGQSEPQMHISKEGDPYLRTLLVQGAQHILGPFGPDCDLRRWGLKLAERGGRNGKKRAIVATARKLAVLLHHLGLSGEVYEPLHNSQRTTVAAAA

SEQ ID NO: 303556 - protein, 346 aa, unidentified
MNQIIRIGMDTSKHIFQLHGVDAAEQPVLRKRLRRKQVLAFFAKLPPTVIGMEACGASHYWARELGRLGHEVRLIAPQHVKPYVTRNKNDGRDAEGTCEAMSRPTMRFVPVKTAEQQAALMLAGIREQLITRRTQLSNTIRGYAAEFGVTAAKGLDKIEPLLAQIAQDEDLPALARELFATEGREYARLQAELKPIEARLMAWHRANACSRRLAQIPGVGPIGATALVMKTPDPRAFASGRHFAAWLGLTPKDHSTAGKTRLGKITRAGDEVLRRLLVAGATAVIQQVRNGRGRPSPWLLAVLKRKPPKLAAVALANKIARIAWKLMTTGESYDGARMPGASAIAA

SEQ ID NO: 303557 - protein, 449 aa, unidentified
MSKRRQSVSGLPVVQPRAGAIDIGSRFHVVAVPPDLCDEPVQTFQAFTGDLQRMATWLKANDIVTVAMESTGVYWVPVFEMLESHGIEAVLCNARDARMVPGRKSDVNDAQWLQRLHACGLLRASFRPVREIAALREYLRLRENHVQDAAAHIQHMQKALTYMNLQLQHVVSDINGLTGMRIIRAILAGERDPKALATMRDVRCHSKIETIEAALVGNYQPEHLFALKQAVALYDFYQEQIQQCDREIELNLIRLSAQKSAPTEPPPKPRRRGKQSNALDFDVQPLLYQLLGIDITQIHGLGPYVSLRMIAECGTDLSRWPSAKHFTSWLSLAPGCKISGGKVLSAHTRKTGNRLTSILRMAAVTVGKTNTALGAFYRRLGARVGKAKAVTATARKIAVLFYNAMRFGMKYVDPGADSYEAHYRERVVKQLHRRAAQFGFKLQSVEAVS

SEQ ID NO: 303558 - protein, 400 aa, unidentified
MGQPLWAGVDAGKSDHYCVVIDADGKRLLSRRVANDEAALLELINAVTALADGGELTWAIDLNAGGAALLIALLIGAEQRLLYIPGRTVYHASGGYRGEGKTDAKDAAVIADQARMRRDLQPLRPGDDIAVELRILTSRRTDLVTDRTRAINRLRAQLLEYFPALERAFDYSASKAALILLSGYQTPDGLRRAGAARLAAWLRKRKARNADAVAAAAIEAAKSQHTVVPGQQLAAAMVARLAEEVMTLDTEIGDTDAMIEERFRRHRHAEIILSMPGFGVILGAEFLAATGGDIAAFGNTDRLAAVAGLAPVPRDSGRISGNLKRPRRYNRRLLRACYLASHIAIRTDTASRIYYDRKRAEGKRHTQAVLALARRRLNVMWAMLRDHKPYQPTAPNAAAA

SEQ ID NO: 303559 - protein, 365 aa, unidentified
MSERITYVGIDAHKRELHVAMLIEAATTPVTWVVENEPKAVERLHRKLEREAPGRVQVCYEAGPCGYALQRQLTKGRVGCVVIAPALMPRKPGDRVKTDRRDARRLAELLRAGLLTEVRPPTPAEEAVRDLCRARDDARDDVQRARHRLGKLLLRRGLHWAGRNWTKAHRQWITTIQWEHAAERAVVDDYLLAIAQVERRLEDLDAQLAATAQTDPYREPAAWLRCFRGIDTLTAMLILAELHDFRRFPSPRALMAYLGLVPSEDSSGDRHRRGRITKTGNTLVRRVLIEASWHYQHRPGVGAGLAARRKGQPAHVVAIADKAQHRLCRRFRRLAAKDKPSGKVVVAVARELTGFIWAALQPVAA

SEQ ID NO: 303560 - protein, 323 aa, unidentified
MQGKVSFQEDAMPVVYAGVDVSKEWLDIHLHPLGESRRFCNDKTGIRQLKRLLARHRLASIVMEATGKFHRPAHRSLWLDGFAVAVVDPLRARMFARACGYLAKTDRLDARFLALLAESLRPPADTPPSPHVEALQELVNARSAAKCDITAHQNRSKTATTALLRGELNRLVRRLEQHVERLDKEIERRVGEDPQLYRKAEILTSIPGIGRVTALALMAGMGELGTCSGKQAAMLAGLAPIANDSGARTGRRSIRAGRPAPRRALYMAALSACRYNPALARFADTLKAAGKPAKVILVAVMRKLLVLANCLLSQDRLWTPTPP

SEQ ID NO: 303561 - protein, 416 aa, unidentified
MSKRKNSVCGADVHKDIIVATIQNSDDTEFQEKFGTTSIELGRFRDWLIAHNCEQVAFEATGVYWFPVYDALSPSIDTIVANPWMIKGIPRNKSDTLDSKWIAGNCLDGKIKRSRVLPKDDRDLRTLTRARSAYTKTRTQLRNRIHKYLALCGITLSSYISDIFGKSGRHILDGLIESKDIDTILDGIPSGKVKKKRELIRASLGNGLDDVSRMLVKDTLELLDHLDEKVNDTSLEILGRLQEKAKDLAIVMSVPGIGFVSGSIILAEIGDYHDFQMSEQLVKWCGLAPGLNESAGKKRPCGITKQGSKHLRTILVEIAQVVAKMSKNKLSRFFHRLRARKNYNVAITALARKLISIIFHLLINQELYQENTTAKTKPLKKDLLCLSKEEQLKDGVAAIVDAFYHLKKKSSSEGGG

SEQ ID NO: 303562 - protein, 338 aa, unidentified
MTTPISMLAIDLAKGSFQVCAIGLDGAVLYNRVLSRTRLAALLAEQQSCIVAMEACATSHYWGRVAQFHGHEVRLVPAAYVKPFVKRQKNDKADAEAIAEAASRPTMRFVAVKSAETQGRAVAFRTHQCLVRQRTQLINALRGHLAEFGLVAPKGPASLKVLENALADETSVLPIQVREMGAIYLDQIARLTEVIEQLAGELEAASKTDDQLRRLCTIPGIGPVTAGAVAAFAPDLDTFDSGRNFAAWLGLVPRQRSTGGKTRLGAVSKMGQTDIRRLLIVGAMSVIRWVVRKGGSANRWLATLVMRKPKMVAAVALANKMARMIWALTTKEQDYRMA

SEQ ID NO: 303563 - protein, 395 aa, unidentified
MRTLGLDVHKRFTEVAVHEGGELRSLGRVETRPEQLRLLAQSLGRDDHVVIESTSLAWPVAALFAEHAGTVTVSNPLRTRAIASAKVKTDKVDARTLAELAAAGVLAKVWAPDEPTRALRRRNAHRARLVRQRTRLRNQVHALLVRNLVAVEVSDLFGKRGRRLLAELTLPVDERAQLDSTLRLHDALCEEIATCERPLAQHALESPEVRRLMTIPGVGAITALAIVGVIGDIRRFPSQRQLVGYLGLDPRVRQSGERPARHGHISRQGQAHARGLLVEAAWSAIKTPGPLRAFYLRLRQRRGSQIAIVATARKLAVLSWQLLTKDEDCRYTPPVRLERKLQELERQAGITTNRTTIRKATERRADERELLNRAQHDYEQQIADRLNCRPGPGGT

SEQ ID NO: 303564 - protein, 368 aa, unidentified
MDDDITGYVGLDVHKNSIAVAVAEPGRAAPRFVGTTGPQLCELLEALSHLGQSSQLHLAYEAGPCGYTLARELIARGYRCEVIAVAKTPRKPGERIKTDRRDALALARYLRSGELTPVTIPDARDEALRDLSRAREDAVRARLKARQQLKALLLRHGHPYTGKTSWNAAHERYLAQVSFAHPAQNIAYAEYRAAAKDANDRVERLAQALREQTEDWRFAPVVHALMTLKGIDFVAAVTLVAELGDLARFAHPKELMSYLGLVPSEYSTGESRAQGKITKTGNAHVRRVLIESAWSYRYSPRMSRERVVRCEGQPKPVRDLAWKAQLRLCSRYRKLSARGVHQNKVCVAIARELAAFVWDVARHVQRER

SEQ ID NO: 303565 - protein, 344 aa, unidentified
MDHFAGLDVSVKETSVCIVDDTGKIVREVKVASEPEALLAVLTNPAYRFKRIGLEAGPLSQWLFSALAEAGLPVICVETRHMRAVLKAQINKTDRNDARGMAQMMRVGLYRPVHVKTLRSQKLRMLLTHRQLLLSKAIALENDLRGTLRNFGLKVGMVGKVKFEARIRELVENLPDLAVLVEPMLIVRRVLREQIVILHRCLLAIVRDDEVCQRLMTTPGVGPVVSLTYRATVDIPARFRKSKSVGAVFGLTCAKYQSGEVDWDGRISRCGDEMMRTMLYEAAQAMMRSKKWSWLKAWAMQIARRRGMKKAIVALARRLAVIMHRIWVDGTEFRWTREQATATA

SEQ ID NO: 303566 - protein, 344 aa, unidentified
MTAIDYIGFDIHKKTISFCAKALDGTILDEGTIPALRTKLLAWVQARPRPWIGAMEATLFTGWIYDLLKPLARDLKVAHPPMLKAIAAAKKKNDKVDARTIADLLRCNLLPECYMAPCAIRDLRRVLRYRNLVVRQARRMKNRIAGLLMETGTPYSKERLHGRAYFGELLGSLREVPRSVVELLKLSRGQLEFFAAIQRRLLKALCTNPDLSERVARLQTIPGVGEITALSWALEVGEVDRLPSIAQAASYCGLTSAQHNSAGKEQRGPISKQRNKHLQTILIEAAKLAPRHNPQLAVVHERELKRGDRNQATLAVARKLVAYLMAVDKSGKPFAMRASGEEAA

SEQ ID NO: 303567 - protein, 305 aa, unidentified
MDVSKEWLDIHLHPLGESRRFCNDKTGIRQLKRLLARHRLASIVMEATGKFHRPAHRSLWLDGFAVAVIDPLRARMFARACGYLAKTDRLDARFLALLAESLRPPADTPPSPHIEALQELVNARSAAKCDITALQNRSKTATTALLRGELNRLVRRLEQHVERLDKEIERRVGEDPQLYRKAEILTSIPGIGRVTALALMAGMDELGSCSGKQAAMLAGLAPIANDSGARTGRRSIRAGRPAPRRALYMAALSACRYNPALARFADTLKAAGKPAKVILVAVMRKLLVLANCLLSHDRLWTPNPP

SEQ ID NO: 303568 - protein, 453 aa, unidentified
MACRYAGIDWATEKHDVLVADEDGSEVLAGTFAHDESDVTSLCRTLVRLEVALVAIERPDGMLVERLLDAGLRVLALHPNKVAAARDRFRVSGGKSDRFDAFVLCELARTDHHRFRILEPNTDQTKAIRALTRARGDLVAARTGVMNQLRAELERFWPGPLRLFSHMDAEIFLAFLERYPSPADAHGLGVARMQAFLVRERYSGGQHPTALMAKLRSAPRGRVGDQELAARRQLVQTYVAMIRTLNAQIKDLERDIRTRMSEHPDGRIFLSLFKSPNSVITAAELLAEIGDCRERYPTRDALAADAGHAAVAKESGKRKTAGFRWGCNKRLRVAFCRLADSSRHWHPWAQSLYAQARQRGHEHPRAIRTVGRAWCRVVWQCWRNHTPYDPEQHRSLQRHITVTIPARSGPVPDLTATQRMAGAAVTEPVARRAEREALDSKPPPATPSRRLMS

SEQ ID NO: 303569 - protein, 394 aa, unidentified
MGVGSVGTSRRDVRGLGVRVVLSPTPQLWEVPTVESMSLVGLDVHALQTQAAVLDLGTGELRQVRLRMAPTEVLGFLEGLGPGVRAVYEAGPTGFGLARAAAERGIEVRVVAAGKTPRSAGDRIKTDRRDAARLARLFAAGELRFAFVPSVADEQFRDVIRAIEDCRGDLMRNRHRLSKFLLRRDHRWPGPGANWTRRHMTWLRAQHFDELCSQATFIDYLSAIEMLLGRRAALIAALEQAIPDSRHAATIAALRCFRGIDTLSAAGLCAEIGDWSRFPKPRQLSGFLGIVPTEHTSDTQRWQGSITKAGPSHARRLLVEAAHHYRHNPTVGDTLARRQHGQDPRIIEIAWRAQRRLYQRWQTLARDRRKPSGVVAIACARELAAFCWEAATLT

SEQ ID NO: 303570 - protein, 410 aa, unidentified
MERVIERCCGLDVHKKTVVAGVRVPGGTGGRDQHVRTFGTTTAELLALRDWLDAYGVTHVAMESTGVYWKPIFYVLEDAFTCVLANAAQIAQVPGRKTDVRDCVWIAQLLEHGLVRGSFVPPVPIRELRDLTRYRKALIHEHTREANRLQKGLEDAGIKLASVASDVLGVSGRAMLDALLRGTTDPDVLADLARGKLRKKLPALRQALAGRFRPHHAFLVSQLLAHLDYLDEVIETLSTHIAEVIAPFAEEVSRLDTIPGVNRRTAEVLIAEIGVDMGVFPTAAHLASWAGLCPGNNESAGKHKSGKTRKGNRWLRGALIQAALAAGTRSTKGAFAARYRRVMRHRGHQKAVVAVAHAMLVTAYHLLARKTTYHDPGADYYEHRHAERVRHRAVQLLERQGYRVILEPAA

SEQ ID NO: 303571 - protein, 416 aa, unidentified
MRDLILQLSKSSIYSTKPWADKKHDVCVQFKNGERVFDVIEHTAEALDAWLTELHQKVKGRIAIALELKKGPVVYALQKYPFITVFPVHALSLARYRQAFSPSGAKDDPQDAELALELMLRYPQKIKAIEPDNADIRLLQQLVEQRRQLVEDKRRFVNRIINTLKQYYPQPLEWFSHRGSLLLCELIIRWPSLQQLKRARRDTIRNFLNAKGGRAMALTEQRVASIDNAIPLTTDPSVIEANALMAAALATQIKVVSEIIKTYDERIETLFDTLPDAGLFKSLPGMGPCMGPRMLAALGDNRDRFNSAEEIQNYAGIAPVTERSGQKSWVHWRWQCAKFVRQTFVEWAAKTVNSSYWAKLYYQGLREKGKSHQSAIRALAFKWIRIIYRCWKARTCYDEAKYLLALEARHSPLLKP

SEQ ID NO: 303572 - protein, 353 aa, unidentified
MQEHFVGLDVHKQVIAYCVKKIDGTIVSEGTVKATRTALDEWVKTVPGRWQGAMEATMFSHWIYQHLKPHAAGLEMGHAARMKAISAGKKKSDKIDARTIADLLRCNLFPSCFVIEPELGALRRQMRFRRRLVHEQVSFRNNTAGLLMGAGVEYERRRLHGKRYFDSLMKDNEWIGRELRPLLEFNRAQIVSLEAMDRRLVRMLERHPALRERVAALTKIDAVGPVTALSWVLETATPDRFRSAQKAVSYCGLTSALHESAGKQQRGPISKQRNAHLQSVLIETAKLAPMHNEKLKEVYRRETEKGADRNQATLEVARKLVSYVLAADRAFFARQREPEPGTDIACDRQPVAS

SEQ ID NO: 303573 - protein, 397 aa, unidentified
MYIVGIDIAKRKHEAAVIDGEGAVIIKPFSFTNNCSGYNRLLAMLTKAKLPLDEFSFAMEATGHYWLALFTRLQKEGFRVQVINPVQTNSIRSFYIRQAKTDPRDALLIAEVIRFGHFSESTLHPENIYELRELCRGRHAIVSMQADAKRKVVALLDQVFPEYETAFTNMFGDTSMAILQTCPTPKELSEMPLEELCHLIEVSSHKRFRMAKARELQELARNSFGFAMAGDVFSTMIRLYAKHLIFLKQQVQEMDRKIAEIMDTLDTPITTITGIGPTLGAYILSEIGDISRFSSAAKLAAYAGIDPTMRQSGEYNGVRNRMSKRGSPYLRHAIWLAASSAVLHDPALKLYFQKKRDEGKPYMASVGHACRKMVSIIYAVMRDNKAYKPCIPNEISA

SEQ ID NO: 303574 - protein, 345 aa, unidentified
MQITTVGLDLAKRIFQVHAVDASGDVVVRKALRRSQVLPFFAKLPRCLIGIEACGTSHHWARELTELGHEVRLMPPSYVKPYVKRGKNDAVDAEAICEAVTRPTMRFVAMKSAEQQAALSLHRTRNLLVKQRTQLVNMIRGLLAEFGIDIPQGLERALRLAHQIAAKEATPEVPAMATQVLGLLCGQVLDTHVRLQAIDRSISALQRTDDVARRLSTIPGIGPVGATALAASVADPGQFRSGREFAAWLGLTPSQNSSGGKDRLGHITKMGDRYLRKLLVIGATSLIRRARHKPEAADPRLLALLARKPARVASVAMANKMARVVWAIMARGETYQARHAASLAA

SEQ ID NO: 303575 - protein, 413 aa, unidentified
MEVVWQRVAGIDVGKRDAKVCVRVQGRGSTPTSTTVTTWSTTMPQILRLRDHLVESRVELVVVESTSDYWRPFFYVLSEAVPVMLVKASDVKGMPGRKSDVSDAEWLADLAAHGLVRASFVPAEPMRQLRDLTRARVGLFEERTRELQRLEKELEDACIKLSAVVSDLAGASARSMLEALIGHESDPATLANLAKGRMRPKIDQLTEALTGRFNNHHRFMVGFRLSRIDRTTAEIAELDRRIDEVMEREDLVIARELLVEIPGIGRHGAEELLAEIGADMSVFPTPQALACWAGVAPGSHESAGKRHHVRTRAGNRYVKRSLGIAAKSAARTKACFLGARFKRICARRGYNKALVAVEHSMITAIWHMLSTGETYRELGGDYYQRHAPQHALKRKIRDLEAAGYRVTAVAATA

SEQ ID NO: 303576 - protein, 353 aa, unidentified
MMIIGCDFHPSFQQIAYVDEETGEYGERRLGHREEALRFYRSLSGRSVRVGVEATGNDRWFRKLLSESGHELLVGDASAIHASSPREQRTDKRDARHILRLLVEKRFPVVWQPPASNEEQRHLLLHRCRLVRMRTRIKNQLDSIAKSEGLTGTRSWSRKRRQQIEALPLTGWYGERRLDLLGLLDGLELRIKRLDQAVQLLAEQNVEARLLMTHPGVGPVVSLTYVLVLGDWRRFPRGKQVGSYLGLIPSEASSGKHQQRMGHITKQGNTLLRWLLVEAAVKAQRHDPSWHRQYLRLSVQKHHGVAKVAIAHKLAVRLYWMLRSGQDYRQMMERGSHARQSECPVGRSTRPIE

SEQ ID NO: 303577 - protein, 363 aa, unidentified
MDEITRIGVDLAKNIIQVHGVDSMERVVVRKAISRQKFPEWFANLEPCLVAMEACSAAHYWGRKLHALGHKVRLIAPQLAAPYRKGGKHVKNDRLDAEAICEAAGRPHMRFVAVKTADQQNVLVLHRMRDGFVEERTALVNRLRGELVEFGAFLPQGIDAFRAHFVEALEDGATELNGVARTALARGWEHVQALDRQIAWCDAQVATHVKHDSNAQRVMAVIGIGPLTVSATVATVGDARLFKNGRQFAAWLGTVPKQASSGGKTRLGRITKQGNTYLRTLLFQGARSAVTSAHRRTDRLSRWIVQLQARVGWYRTLVAVANKHARILWAILAKGERFDPSYVSTPSTLRPATVGQQHEQVNS

SEQ ID NO: 303578 - protein, 315 aa, unidentified
MTESHYKFYVGIDISKALLDVSLNESNVLQVSNEETGWKKLVKELLPQRGQVLITLEASGGYEKGLTTYLRKKQFQVAVVNARRVREFAKAAGQMAKTDSLDAKIIREFGKTFRPKPQGGMSEVEEQRQGLVNRRRQVVNLIAREKQYLEHACTLNRKAIIRHIRWMEKELGSIEEKLKKLFQEDKDLQEKCERLDEIKGVGEVTAMTVLVHLPELGKLNHKEISALAGLAPFNRDSGKRNGKRQIAGGRSCVRTALYMATLSAKKYNPALKAFYERLINKGKLKKVALVACMRKLIIIMNAMMKKGTRWESVIT

SEQ ID NO: 303579 - protein, 362 aa, unidentified
MKKLSKQSQRIEATQEKPSLTMGLDMGDRYSHFCLLNEEGDVIEEGRLQSTEESLRRRFASEPRLRVALECGTHSPWVSRLLTALGHQVIVANARKIRAITGSESKNDRNDAEKLARFAAHDPRLLSPLEHRSQERQVDLNLIHARATLVRARTMIVNALRGLVKSAGGRLPACSTESLPARALPAIPSPLIVVATPLLEQISLLTAQIDGMEKQIEKLSAKYPEIVLLRTAPGVGPIVAAAYVLTMDRPDAASNRSAGAFLGLRPRQSQSGDSDPQRRISKTGNSCLRSLLVQSAQYILGRFGPDSELRRWGLKLAASGGKRGKKRAIVAVARKLAVMLHSMWRNGQRFQPFPQATAAVAA

SEQ ID NO: 303580 - protein, 418 aa, unidentified
MKVVFPTCCGVDVHKSFLVATIIKTPKESLQPSYQKKRFSTFNSDLNHFANWLHENNCLDVCMESTGKYWVPVYNILEKRGIRVIIANPKWVKAVKGNKDDTKDSKWIGDLFRIGLVKSSFIPAKDIRILRELTRYRYKLTSMKSSEKNRFQNAFTVCNVALDSVVSDMFGKSATAITDYLTSDENFDAKHCISLLHHSLKKKADDVFQAIEGYEMTAEQKTRIGIVRDHLHYIDALIERVDSCINTMVDKYEGYIALLCTTPGIDRSSAITILSEIGVDMTQFNSSKRLCCWAGLTPGNNESAGKKKSVRISRAGVYLKPALVQVAHAAVKDKHSPYYALKYERIAKRRGKKRAIIAIARMILTAVFVMLSNLEEWNPVDLYRVDMPEHLKEKQLAKAVKQAVRFLETQGLTVLDSV

SEQ ID NO: 303581 - protein, 333 aa, unidentified
MDTETGELQERRLQHREEAELFYRELASQGVTVRVGMEASGHARWFERLLAELNFELLIGDAAEIRTKRVRKQKTDRQDAQLILKLMLKDDFPQIWVASWENRDLRQLLWHRHRMVQARTRIMNQLQAVALNEGLRCKKRLWREAGREQLESFPLAPWASRRRRDLLELLDRLSPTITDLTQTIEQEVEKCPEAHRLMTHPGVGPLTALAFVLIIGRAERFQCGKQIASYLGLVPSEESSGDRRRLGHISKQGNALLRFLLVEAAQVTVRSIPEWRSKYFHLAMRRGRKIAKVAMARKLAIQLFWMMRKGWDYEQLKNFGPHAGQPENRRGVQ

SEQ ID NO: 303582 - protein, 416 aa, unidentified
MMEGLRPTYTVGIDWASDKHDVCVLAAAGESRLAFAIPHTADGLAALVQRLHRYGAPADLPIAIERPSGLLVDTLVEAGFPVVPIHPNALKASRPRYAAAPAKSDPGDAYILADLLRTDGHRFRPLRAPSDPTKALRAAVRTRDDLVATRVQLANQLRTLLDSFWPGAAVIFAAVDTPIALDFLDTYPTPDSAARLGEQRLTRFLQRAAYCGRRPAAELLGRLRAAPRGQAGPLERETKGQLVRALVAVLRPLVTQLRELEGLIAAQLAQHPDGALLQSFPRSGTVNAAQLLAELGEDRRRFPTAAQLAAEAGVAPVTHTSGKHRAVACRFACNKRLRQAATTWADNSRHGHAWAAAVYRQARVRGCDHPHAVRILARAWLRVLWRCWQDRTLYDPAQHGRALPFLTPQPPSSAAA

SEQ ID NO: 303583 - protein, 388 aa, unidentified
MYRILKIGMDVHSTNYTLCAMEPTIGAEDRVFGEIQVAPDYKEVICFIESLKMKLGICDDYSIEYGYEAGCLGYSLYHQLTGAGIKCVILAPTTMLTQQGQRIKTDKRDARLIAQCLCYGGYHSVYIPTGEDDAVKEYLRMRDDHKLALKKLKQQINAFVLRHGHQYVGVKWTIKHVTWLSKLELEPMYRETLNEYMASYEEQVAKIGRYDKRIEEIAAEARYQENAKKLGCFLGIRTHTALSLIVETGDFKRFSKGNTYAAFLGLAPGERSSSTNVNRLGISKAGNTHLRCLLIEAAKGICKGAIGHKSKELRSRQSGQSAEVIAYADKANTRLRSKYYKMIRHGKKKNVAVAAVARELACFVWGMITGNISIASGAGTSVTAVSQG

SEQ ID NO: 303584 - protein, 393 aa, unidentified
MIGGIDSHKDTIHVAVITGLGVDVADREFTTTQAGYHEAIDWLRTQDCLDVVGVEGTSSYGLGVTTALREAGARVIEVNRTRVAERRRKGKSDRLDAYRAARGVLSGEASTIAKSDTIEPLRAVHNARKSAVKAKRVAWQQISATLINAPAPLRDRYRGLAEDKAVQQLIAARPARGTEPAVAGIMVALKVLARRHRALSAEIDELGDHLAETTTAINPGLAALQGVGPVVAAQLLITAGDNSDRLRSEASFAALCGTAPVQVSSGRVTRHRLSRGGDRQANAALHHIVTNRLRHDPRTRDYRDARLAKGGTKAAAMRALKRAVAREVFRALRGRCPVPDYSDLRPARQARNLTLAAVAVELKVWPSALSQLELGQRVDNDLVARYRNWLTAA

SEQ ID NO: 303585 - protein, 538 aa, unidentified
MNFCPVAGIDVSKSFSDMCILSPDNKIFAQEKIYHDETSINRANALLQKAEQIFSSKPVIVMESTSHYHLILFQFFSEHGYDVIVVNPLQSSSMKDFAIRKRKTDRVDAFKLAMLYRTKTLHPSQIPQAAMRALRQLCRERVECLNDVTSYKNRLTAFLDQAFPGYDKIFSDVGGITSCAVLVHFPTPAILLAAEEAELVEVIAAASKSGYGFAKKKAELLISAAQKAQTLGIHSCADETLIVCTIQMLRTLSESVFQIEKAINNLLAQVKEVRNNVSLLQSIPGIGSHSAALLLGEIGDFTLFKKPKQLAAYFGLDPSERQSGTFRGTKNKLSKRGSPYARAALHMGVVNAICKHGKKTAPNPVLLSYYEKKCKNKPAKVAQAASMHKLVFIIFAVLRVPAVEVLAQLLDRLAEALEMHDLPRAEEADDVVHIRIVRQAQNVVIRRAGLLLGRKVLAQIADGVAHDLHRCGRPGRAGGRLRIDASRVIDEIRRKGALLLLLLRQVPRELVDDRADHLQMPELLRAQRSIGNVPKYQI

SEQ ID NO: 303586 - protein, 351 aa, unidentified
MIIGVDPHKASHTATALDPATNTPVSSIRIDASIAGYRQLIRWAAQFEERRWAIENAKGLGSHLTQWLIARDEAVVDVATTATSRVRELSRGGRRKNDVIDASAAASVAALHGDATVATADDETTVFALLEERRANLAAQRVRTVNQLHALMRDLTAGGARVALSANVAAAKLRSVRPSTPTGKARKAIAWDLVRDIRALDRQLAAIADQMTVALDDYETSLLEVDGVGPVLATRLLGRTGRPSRFRSADAFASYTGSAPIEASSGERVVHRLSRSGDRQLNSALHLVAVTQVRMRNSAGRAYFDRKIAEGKTRNEAMRCLKRKLAGHIWRRMLADERTRLNRHDPVTIAA

SEQ ID NO: 303587 - protein, 416 aa, unidentified
MKKNSKSPMKKEQKAKRAKAQRPGPRDTKEVLAELVEKLQGKLAVKATSASPAEAGPRAELRPNLDRLTVGVDLGDRWSHFCILGLHGETLSEGQLQTREAEVAEFFQAIPPARVVMEVGTHSAWMQEIITGEGHEVVVANPRLMEGSKRRKRKNDRIDAKKLARLGRVDPQSLYPIRHRSREVRQDLVVLRALEALVAARTELINATRGLVKSMGTRLPKCSSPSFGQKVKDAIPEKVREALLPLVQLADALSDCIQSYDQKIEEMSSEKYGHTKLLRQVKGVGPITALAYVLTLENPAHFAKSRDVGPYLGLVPKQEDSGESQPQLGISKTGDTMVRKLLVGSAHYILGPFGPDSDLRSYGLRLCERGGKNAKKRAAVAVARKLAVLLHRLWVSGEVYEPLGYAASRAIVQQAA

SEQ ID NO: 303588 - protein, 343 aa, unidentified
MQVITTVGLDIAKSVFQVHGVDAAGKVLIRRQLKRRQVLPFFQRLPACVVGIEACATSHHWSRQLRALGHTVRLMPPAYVKPYVKRQKNDAADAEAICEAVTRANMRFVETKTPEQQACLMLHRTRHLFIRQQTSVINAIRAHMAEFGIVARVGRTGVAELLAVAGDPRDRRLPEVARTCVAALGVQLRMLKAQILEFDRRIGTWHRSNQTSQQLDQIPGIGPALATALVASVPDPKAFRSGRNFSAWIGLVPKQHSSGGKDRLGSISKQGDRYLRGLFTAGALAVIRYAKLHGTEHRPWLTALLARRPTKVAAIALANKLARMAWAVMAKGERYKEPAALAA

SEQ ID NO: 303589 - protein, 341 aa, unidentified
MKQYVGLDVSQKETAVCVVDEHGRLIFEGRARSDPGALARILAKKAPLAERVGFETGAMSSWLWHELKRIGLPVVCIDARHAHAVLSVRMNKSDENDARGLAELVRIGWYREVAVKSEASQQVRALLVARSRLVAIRRDLENQVRSMLKEYGLIFPRAIAGQFRRRVIELAGDEHVLWHVLLPLLSVHDHVCCKLEELDRQIREMARTDETTRRLMTVPGIGVVTALTFRHTIDDPSRFRSAASVGAYLGLTPRRRQSGDMDTIGHVSRWGDRLLRTYLFEAASVLLHRTKRWCALKAWGLRLAKRNGMKKAQVAVARKLAVILHCIWVDGTSFEWGKEPA

SEQ ID NO: 303590 - protein, 394 aa, unidentified
MIQGEFCQLDLDVSTPYAKKVFLMRCKCLVFLGCLRRASGLYRSGVSRMAISLVAVDLSKSVFQLSLADAKHHIISRKRLNRAQFHRFLAQSGPVRLIMEACGTAHYWGRTAQLHGQEAKLLHAKYVKAYVRRTKTDAADADALILADRDESLHPIPVKTEELQALQGLHRIREQWKRARNARICEARALLAEFGVSIPKGARGIGRRLTAGAEHAPDLLQPTLLDLIREIDELQQRIKSVDHRLAAYADTDCDVEVLLGIHGVGVTIATAAVARVPSIHAFKRGRSFASWLGLTCREYSSGSTRRLGGITKQGDRYLRMLIIHGARAALVAARRKAANGKQLTRLETWAVNTQMRIGHNKATVALANKMARIMWAVWTRHERFNGDDALRFAA

SEQ ID NO: 303591 - protein, 347 aa, unidentified
MAIVDSARLVVGGVDTHRDSNVAAVVDMYRGLLGVESFPTTADGHRALASWMTAFGAIERVGIEGTGAYGAGIARHFIAAEVAVIEVDRPNRQKRRQHGKSDQLDAIEAARGTLSGRCAGRAKSGNSHAEALRALLVAKRSARSTRIRTLVQLRHLMFTAPDELRARLGGLSATQLVNDSAKLRPHAGGDIVVQATKTTALILARRIHALDAELATIDEQLGPTVKAAAPDLLNIFGVGIDTAAVLLVTAGDNPERITSEAAWAMLCGVAPVPATSGKIDNRFRLNSGGDRHANNAIWRIVITRLGQHDPRTVAYMTRRLAEGKSKRSIIRSLKRYVARETFQALAR

SEQ ID NO: 303592 - protein, 334 aa, unidentified
MENIALIGIDLGKNSFHIHCQDHRGKAVYRKKFTRPKLIEFLATCPATTIAMEACGGSHFMARKLEELGHFPKLISPQFVRPFVKSNKNDFVDAEAICEAASRPSMRFVQPRTESQQAMRALHRVRESLVQDKVKTTNQMHAFLLEFGISVPRGAAVISRLSTLLEDSSLPLYLSQLLLKLQQHYHYLVEQIKDLESQLKRKLDEDEVGQRLLSIPCVGTLTASIISTEIGDGKQYASSRDFAAATGLVPRQYSTGGRTTLLGISKRGNKKIRTLLVQCARVFIQKLEHQSGKLADWVRELLCRKSNFVVTCALANKLARIAWALTARQQTYEA

SEQ ID NO: 303593 - protein, 398 aa, unidentified
MSRIWAGIDSGKGHHHSLALDADGKTLLSRRVANDEPELLKLIGDVLDLSDDREVTWAIDMTGGEPALLLALLVSHGQEILYIPGRLVNRASDGYRGDGKTDARDAYVIADQARMRRDLRPIRPGDEAAVELKLLTGRRSDLVEDRTRAVNRLRGTLLSMFPALERALDVTNTGPLKLLTGYQTPAAIRRAGVTRLTKWLANRKVRNARALAETAVEAAERQHTAIAGEKTIAKLVHTLAEEVMALNEQISEMDKLIEGRFRQHELADIVLSVPGIGATLGAEFLAAVGGSLDDFDSPDALAAFAGVAPAPRDSGKVSGNLHRPLTYHRRLQRVFYTSALVSVRCDPNSRKFYDRKRAEGKKHVQAVLALARRRVNVLWALVRDRRCYQVTPPATANA

SEQ ID NO: 303594 - protein, 405 aa, unidentified
MNAVGIDVSKGKSMVSVMRPLGEVVSKPFTVRHTGSELKELADCLKSLDGETRVIMEHTGRYYEPVAQFLHDAGLYVSAVNPKLIKDYGNNSLRKVKTDKADSKKIAKYGLDNWVELRQYASMDTIRYQLKTLNRQCNLYTKTKTMMKNNLIALLDQTYPGVNALFDSPVREDGTQKWVDFVAPFWHVDCVRGMSLTAFTERYRKWCKRHGYHFSSDKAAEIHAGAKEQIAVMPKDDLTKRLIRQAIDSLNAVSKTVEQLKAEMLKLSAQLPEYPVVMEMRGVGDSLGPQLMAEIGDVARFTHRGALAAFAGVDPGKNDSGRHIQKSVRISKKGSPSLRKTLFQIMDGLIKRSPADDAVYAFMDKKRAQGKPYYVYMTAGANKFLRIYYGRVKEYLSTLAEAEET

SEQ ID NO: 303595 - protein, 451 aa, unidentified
MSSRSDKPAGLPVIHDRAAGIDIGSRFHVVGVPPELCAESVQTFQAFTGDIERMADWLMSIGIKTVAMESTGVYWVAVFELLQSRGIEVIVANAREARAVPGRKSDVNDAQWLQRLHACGLLRPSYRPERSIAALRSYLRLRERHLDYAGSHIQHMQKALTLMNLQLHHVVSDVTGVTGMKIIRAIVAGQRDPDVLATMRDVRCKASIETVRSALVGNYQPELVFELTQALALYDFYQLRLGECDAEIERALAELNADKTEPAEPMPKPRHKTVQPNAVNFDTRPSLYQLTGVDLTQIHGIGPYLALRLVAECGTDLSKWPTAKHFTSWLTLAPGCMISGGKVLSAHTRKTTNRVSAHLRLAAVTVGRTNTALGAFYRRLAARVGKAKAVTATARKIAVLFYNAMRFGMSYQDPGADAYERRYRERVVKQLHRRAAEFGFTLQDAATPSVS

SEQ ID NO: 303596 - protein, 334 aa, unidentified
MQNITLIGIDLGKHSFHIHCQDKSGKALLRKKFTRTKLMQFLATCPPSVVVMEACAGAHFLARRISDFGHETKLISPQFVRPFVKSNKNDFVDAEAICEAASRPSMRFVQPRTETQQAMRALHRVRESLIRDKVKTTNQIHGFLLEFGISLPTGDAVIKRLSLVLAEHEIPEYLSRLLVRVHTHYLYLVEQIAELESELSQSINADDTAQRIMTILGVGPITASLLSSQLGDGKQFSCSRDFAASTGLVPRQYSTGGKSTLLGISKRGDKNLRRLLVQCARSFMMQLERQHGKLTEWVREQLNKKHSNVVACALANKLARIAWAITTQQKEYQA

SEQ ID NO: 303597 - protein, 343 aa, unidentified
MELNAIGIDLGKTLFHLVGLDASGNVVVRKRCSRAQLLKYTANLRVQRIGMEACSGSHFLGRALREQGHDARLMPAQYVKPFVKTNKSDSIDAEAIAEAVQRPTMRFVPIKTEEQLDLQAVHRLRERWVMRRTAVVNQIRGLLLERGVTLPKGRSHVDEALPEILQDADLKLSGSFRLLLAELQLELEQLAEHIQQMDSAIQHTVKENEACQRLTTIPGVGPVIATALIAAIGNGSGFRKGRDLAAWVGMVPREYSTGGKQKLLGISKRGNNYLRTLFVQGARAVMRYRAKQAPGLNHWLTQLLARTHQNVVIVALANKLIRMAWAVLCKNEVYRAPALVASD

SEQ ID NO: 303598 - protein, 321 aa, unidentified
MESAILGIDIAKQTFQVALLVEQKVTTGKFNNTTAGFGMLERWLVKHGAERVHACLEATGTYGEALAEHLHHAGHMVSVANPARIKGFAQSELSRTKTDKADAQLIARFCSVMQPEPWQPAAPEVKELQSLVRRLEALNGMLDQERNRLETAEDIVKESIERVIKHLQQEIKATRKLIRTHINRHPDLRGKRDLLETIPGIGPGTSAMILAEFGDVSRFHDAGCMASFCGLTPRHRQSGTSVRGRSMLSKTGSSRIRKALFMPALAAIRYNPVIKAFRARLLANGKHKMLIVGAVMRKLVYLAFGVLKSGRPFDPSIAAVA

SEQ ID NO: 303599 - protein, 353 aa, unidentified
MSKVKALCFEGETIYVGLDAHKTNWKIDSRMGNVDLTAFSQDPNPQVLSNYFKRNYPGAKVKVAYEAGFCGFGIQRSLTQLGIECIVVNAADVPSTDKERKRKDDKRDAHKLSRELANGKLKAIYVPSAEMEQARSLVRQRYRLVQDQTRCKNRIKHILMFNGVSLNIGSQRWSNRYVKALQEVQCDYALRKALDLAIEQYKQIRLIIKQAEEDIASMATRSPFVQVQPYIQSIGGIGLINGMVIQTEIQDMHRFKTLSRLCDYAGFVPDISSSDQKVVIKGITYRCNEFLRKAIIESSWMLLRRDPAMLMKYTEYRKRMSKNKAIIRIAKHLLARIRYVWNNQKKYENGIVA

SEQ ID NO: 303600 - protein, 409 aa, unidentified
MKLYVGIDVSSTDLYTCIMDQEGNICAQFKVDNHLLGATSLRDQILLWANQRQPSEILIGMEATSVYSWHPAMFFHQQEELKSWHVKVFTINPKLIRKFKEAYTDLDKTDGIDAWIIADRLRFGRLKVTAVMHEQFIALQRLTRMRYHLVHQLTREKQYFLQHLFYKCSSFTQEVDSSVFGHAILELLLESFSLDEISQMDVQQLADFLRQKGRNRFADPECIAKSIQKAARSSYRLSKCVEDSIDLLLGLSIQSIRSLQAQIKALDKAITRHLEGIPNTLQTIPGIGPVYAAGILAEIGQIERFDNQAALAKYAGLTWSKHQSGRFQAEETSLIRSGNRYLRYYLVEAANSVQRHDATFRAYYRKKYEEVPKHQHKRALVLTARKLVRVIDALLRNGQIYTPRKEVDR

SEQ ID NO: 303601 - protein, 417 aa, unidentified
MKSIKAEKIKTINEKTLVVALDIGKKVHYGYFRTPKNQDVKPFPFYNTGQSFNKFWEKLTRFKEKHMLDEVIIGFESTGPYAEPIVNYLRKKPVKLVQINPFHTKRIKELTGNSPNKTDKKDPRVIADVILLGHSLTVVVPEGAAAQLRRHTHARERAMERRTAMSNQLQDLIFVIFPEFGDIIKPSTKTGMYLIKHYPDPKSIVSIGIETLCNIVRKISRGKFGIDRVEKLYSAAKESVGITEGKEGILLETNHLVSNIEAENIYIKSLEEQMIVYLEQIPYSHSILSVKGIGNITVAGLIGEVGDFGKFKTISEVMKLAGLDLFEVSSGKHKGKHRISKRGRALIRKLLFFAAINTVKSHGIMHAKYQKMLNNGTPKIKALIAISRNLFRIIFALARDNTKYVENYKSHEFKLAA

SEQ ID NO: 303602 - protein, 450 aa, unidentified
MIEGLSRSIYPSAAKLFLPGEQTARRDRVMRKADTGKVKVVRDDALIVAVDIGMEMNRGYCTTPDGRSTKTFKFENTREGLDTLWGMIMASKNRFKCNEVIVGYESTGPYAEPMVHYLMKKPVRVVQVNPMHTKRIKEINDNSPLKTDEKDPRVIADIIRWGHALSIVIPEGDAAYLRRLNNSRERHVRERTALVNQLQQLVFLLFPEFMTVIKDIKCKTPLYLLKRYPTPEAISVLDKQLLGEEMRKRSMGKFREHHADMLINLAKHTVGIREGVSGLSMDIRHILIQLEMLKNLIAEIEGEMEIALGRMPYSSKLLSIKGLGVVSVAGIIGEIGDFKKFKTRSEIMKLAGLDLFEISSGKRKGQRRISKRGRSLLRKILYYAAIQTIRKNGILYDYYTRLTDRGMKRMMALVAVSRKLLGILYAIVRDDSEYSVNFESMKRQVIKKAA

SEQ ID NO: 303603 - protein, 346 aa, unidentified
MYQDNLFCLDLAKKSIQGCLLDKKHREQFNRRFSRQKLIEWLSRQQPMTVAMEACSTAHYWSRVIQRLGHNPLLVPTRTANRYREGHKTNATDALAVGVAARQPKTRFVAPKTIVQQEMQSVERIREHISDDLTATSNLMRALLGEFGLLIPRGKAAFKRNMVELLEDAENDIPQVLRTELISEWMRYRQLELRLKEVERARDILFNQHESCQRLAQLGGVGPVNAIGLYLALGDRGSSFKNGREAATCIGTTPKQHSTGDEVKMMGISKKCANKRLRSNLIQGARAVIQALKRREPQNAQETWLKALIERRGEGRAAVAFASKTIRVAWAMLHYGNAFKLHSNLA

SEQ ID NO: 303604 - protein, 398 aa, unidentified
MDLPVYYELETNNGNRDYRIQIGGHYMNYNTVYVGMDVHKESFTLCSCKYEDEKASHYQRTPASYKNVLRYLAFLRTIYGEDTRFVCGYEAGCLGYSLYHQLENFNVECVILAPTTMLEQRSKRRIKTDKRDAEIIAKSLAQHNYSPVHIPTKMDNQTKEFIRMRDDHKAELKKIKQQILAFCLRQGYQYDGSGNWTAKHVKWLRSLKPAGLYKEILDEYLLTYTILTDKLNRLDQRIEELASKEEYKESVSKLTCFLGIKIHTALSVIVEVGDFQRFVSARKFAGYLGLVPGQHSSGDDRNGLGITKAGNTHVRRLLVESAQSYTRGKIGYKSRVLRSRQAGNSPQIINYADRANERLRRRYYQMVLKDGKKYNIAKIAVARELACFIWGMMTDNIY

SEQ ID NO: 303605 - protein, 343 aa, unidentified
MQIRSVGIDLGKTTFHLVALGDNGKVLLKKKFTQRQLIAFTANLQTCLIGMEACSGAHFLGRTLRQQGHDVKLIPAQFVKPFVKSNKNDFLDAEAIAEAVDRENMRFVPIKTDDQLDLQALHRVRDRLIARRTSVINQLRAFLLERGLVFAKSPARLRERMPEILENADEELTPRMRNLLALIWNEWKDLEQQLVDLNQEVERIASSDAACTRLRQIPGIGPLVATAIVAAIGNGAAFRKGREFAAWMGLVPKQYSTGGKAKLAGISKRGNHYLRKILIHGARAVVLRSKRDRIAMGQWMTALEARAPRNVLIVAMANKLARIAWAVLSSGQDYRAVQEPVAA

SEQ ID NO: 303606 - protein, 429 aa, unidentified
MNYNTQNAKIASITEKTLIIGIDVGSETHYARAFSWRNYEYSKKPFAFSNDEAGFAAFKEWMDDIAEKHGMEVIIPGMEPTGHYWLNLGAYLQEQGMKPVHVNPHHVKKSKELDDNNPSKNDRKDPKTIAGLVNEGRFSYPYIPTGIYAEIRNLSNLRIQTQEEITRIKNRMARWFSIYFPEIKDVYRNPDAVSGLMVIKQAPMPCDIRELGVEGVNKIWRDARLKGAGIKRATTLVTAAEHSIGNTEAPRSARKEIRNLLEDYEGYKKRMDELMEEIEKTLSEIPYIDKLMKINGIGIKTVSCFIAEVGYIGRFDNPKQVQKLAGYAIVADSSGKHNGESRISHRGRKRLRYALYESAISVIGKNKEFKEIHSYYRTREKNPLKKMQSVIAVACKLIRIFYTILTKGVDYDGQKMLNDIVRPEIQPAA

SEQ ID NO: 303607 - protein, 355 aa, unidentified
MTSTKYIGMDVHKESISSAVMNASGKIVMECVIETKASMILQFIDGLRGDVHVTFEEGTSAAWLYDLLKPHVTKLVVCDPRKNASMREGNQNDKIDARRLAELLRLNHLNPVYHGEHGLRGLKELVRSYLTITKDLGRVMSRVKAIYQSWAIPCTGKQVYATRHRAEWLGKIGEPGVRRRAEFYYQQLDALRVVRQQVRRDLLAESKKHKAWKRLCQIPSIGPIRSAVLLGILQTPHRFRTKRQLWTYSGFGIETQSSADHRSVDGHLQRAKKQISIRGLNRNHNHDLKNLFKGAAIVASSKPGPFQEFYAALLAKGIKPEMARLTLARKIATIVLIVWKRGACFDAQYLKPQTA

SEQ ID NO: 303608 - protein, 453 aa, unidentified
MKGKRRSKAKVAVMTHVTEANAAGIDVGSTEMYVAVPPDRDEQSVRRFATFTADLIRLAEWLKQCGITSVAMESTSVFWIPLFQILEEHGFRVCLVNARHVKNVPGRKTDVLDCQWLQYLHSVGLLRASHRPSQSICALRSIWRHRESLVQSAAVHIQHMQKALDQMNLQLHHVISDITGTTGMAIVDAILAGERDPQKLSELRNKQIKASPDTVRQSLIGDYRAEHVFVLRQSLTAYRQYQTWIADCDREIEKQLAKLESKVDPVEKPLPKSKDRHKPRRNEARFDLRTHVYRIFGVDLTAVPGVSSITAQVLLTEVGPDLTKFATPSAFASWLGLCPDNRISGGKILSVRTRHVVSRLSAALRMAAQSLHRSHSHLGDCFRRMRTRLGTPAAITALAHKLARILYHLITTREPYAESVFAAAEQRGQERKLNHLKKQASVLGFRLVENCVP

SEQ ID NO: 303609 - protein, 341 aa, unidentified
MSNTNTYIGADLHKKTCYVTVMNHLGTIKKQVEISTDKDKVSMFFKKYADVPVAVESTMNWIPFYENLESLGCKVLLSNPLQTKAIASARIKNDKVDSKVLADLLRTNLLPTSYIQPRDIRDLKEVVRERANFVEMRTKIKNKIHSVLFKTDNKHCFTDLYGKAGMEWLKELELRSVYKQELNRYLETLKHLNEQIDEISKIIEETAKEDYDCKLLMTIPGISFYSALMIKSEIGDISRFRNANKLCSYAGLIPATYASADKVRHGRITKRGSKWLRKTLVDAITSGSRNPNRISVFYQKLKKNKGTGKAKVAAARKLCSVIFAMLTDKQPFREFTPIKQR

SEQ ID NO: 303610 - protein, 341 aa, unidentified
MDEYIGLDVSLEETHICVVDGAGRAQHRLIARTEPDELAQAITEHAPKAKTIILETGGLSSWLQQGLASHGLPAVIVDARQAKKALSARLNKTDVNDAEGLAQLARTGWFKQVLAKRPETRRIRSIMMARELIVRQRRDVSNQVRGLLRGFGLKLGPVSHLRFEARVYELAETEPALLVALEPLLRVRDVLGVQLAKLDKQLGTLAHENSDAMRLMSVPGVGSMTALAFMTALDQPARFARSADVGAYLGLTSRRYQSGEVNWSGRISKHGDALARAMLYEAANVLMSRVKRWTREKAWAVRLASRRGAAKARVALARKLAVILHRIWVDGTTFNWSAQTA

SEQ ID NO: 303611 - protein, 353 aa, unidentified
MQRPRQGQVIIGVDTHKEIHVAAAVDRQGTLVGEERFPTTRQGYRQLESWARSLGDVLRVGVECSGSYGSGLTRHLAKNGFAVLEVTFPDKTVRRKRGKGDFIDAEMAAEAAFTGARTVTPKSRDGMVEALRMLRKTRSTAVAARRVALQMIRADIISAPEELRDQLRGMTRMQLIRHLVATRPDSTDFRTPLGAAKIALKRLAKRYVDLDDEVSELDDMIDAILADAAPLLVQLKCVGAQSAAQLTVTVGDNPERLRSEASFAMLCGVAPVPVSSGMTYRHRLNRGGDRQANSAIRIIAIGRLRTDERTKEYVAKKMSEGHTKMEAIRCLKRYIAREVYYIIKRQSELVNCS

SEQ ID NO: 303612 - protein, 452 aa, unidentified
MAQAKPQVIDDEEHERVYERVAAVDVAKDSGMVCTRTPHRSRPGARQSTVWTVKARMTAIRALGRQLTKDGIEMVTLESTSDYWRIWLYVLEACGLAVQLVNAAQARNLPGRPKTDKLDAMWLARLTELGLLRASFVPPAAIRALRDYTRARTRLVQERTRCFQRLEKLLEGALVKLSSVASKLTTESAKDMIKAMIAGERDPHTLAALARTRMKAKHDQLVEALAGMFDDHHGELAQILLDQAAFCDARIAQLTARITAAVAAMPAAWGVDADGTTGPDAGTGPDAAALPAVQRLAEIPGVSPDLARSIIAEVGLDMSRFPTAAHLVSWAGLCPRARQSGPRTRAGKKNQGDSWLRNSLGQAAIGAARTTTTFLGERYGRIARRRGKAKAQVAVARSILTIIWHLLADPAVRYADLGAGYYQTRTDTDRKLRNHIRQIQALGFEVTLTKAV

SEQ ID NO: 303613 - protein, 419 aa, unidentified
MVDIVIECCAGLDVHQATIVACVLGGKSKPGTAARPGKTTKTFATTREGLLALVAWLKEEGVTHAGMEATGVYWMPVYATLEAAGGIEPIVVNARHIKNVPGRKTDVKDAEWIADLVRHGLVRKSFVPDKPFRELRELTRYRRSLVETQASERQRLIKALETAGIKLAGVLSDVFGVSGRAIVRALIAGARTAKDMADLARGRARKKYAALVKALDVELGAHHRLVLECQLQRVESAEADIAKLDVEIDRRLEPYAEQMAALVSIPGIERVVAATVIAEIGVDVTMFPTAAHIAAWGGLCPGNHESAGKHKPTGARHGNPHLKTALCNAAISASRKKGSYFKAKYHKLKARRGGGKAALAIAHKLLISIYHVLRGNVFRDLGETYLDQRNLKRTAARHVKSLEALGFQVKIEPLAQNAT

SEQ ID NO: 303614 - protein, 485 aa, unidentified
MTKRRCVTDKKQAQARRYHRQLEMIDPDAAFIDVGSAEHWVCIPENRFSEQEQDKRVRQFEAFTSQLYEIRAWLLEHQIKTVSMESTGVYWIPLYQILADAGLEVSLVNARDLKSVKGRPKTDRLDCQWGQRLHSYGLLRASFRPAAEICAMRSIWRTREQWVREMSRCTQRMHKALHEMNLLLPKVVSDITGKTGMSIIKAILAGERDPVKLAQCRDPRCRSSKERIAEALRGDYRPELLFVLGAELEHYEFLLHKLEEFDRQISQRLAQLPNKTQLSATQKAHNAKEHAKLKRRYVKAPCFDSRSVVHELSGVDFGAVPGIGSTVALAVILEVGLDSSKWPSADHFAAWLGLCPNPRRSAGRDLGTHTKKCANRAAQQFRKAASTLRRNHSYLGDFYRRMRARHGEAHAITATAHKLAVLFYTLLSRGDQFVELDRSEYQRMVQQTRVSNLLKRARKLGFELKPVHPQAEQTLASIDTVRNTA

SEQ ID NO: 303615 - protein, 357 aa, unidentified
MEARLVDTTPTARNDALARCLIAIELSKASWVVGVQTPLSNKTSQYRLAGGDWQSLLKLIERIRRQVSRELGRPVEMISCYEAGYDGFWLHRLLEAHGVRNHVLDPASLLVNRRARRAKTDRIDVERMLRALGRYLRGEPDACSVVRVPSVEQEDARRLHRERHRLIRERVQHVNRIKGLCATQGIYDYEPLRSDRKAQLDGLRTGDGRTLPTRLKAEIIRELQRLELVLKMIAQIEAERDAIVKEAAPQHLNAGKIKALVNLKSIGPEFATTLVGEVFYRSFDNRRQVGGYIGLAPSPYSSGSMDRDQGISKAGVGDRKGRVRRIAIVALARKLLVALWRYLETGLVPAGAVFKTR

SEQ ID NO: 303616 - protein, 349 aa, unidentified
MTTQRLSYVGQSVYVGVDVHKDTYAVTCVCNKQIVKTATAKADPAGLTASLSQWFPGARLYTAYEAGFSAFVLHRALTKAGIMNIVVNPASIAVAANDKVKTDRRDSKKLALDLSDGRLQGIYVPTEDEELARLLPRTRAQIVEHRATIARQIKAKLHQFGLIAPASRRLISNRYLREIDAWPLPPDLRVSLTFLAEPWRFATRQLIEMRRLLREQAKAHPAIEQVYRSVPGIGEVVARTFATELGDMTRFANERALFSYTGLTPSEYSSGPSVRRGHISRQGSSRVRHLLIETAWRALPRDAVLKEIFDRIAATRGKKRAIVAIARRLTGRIRACFRQGTTYAVGTYA

SEQ ID NO: 303617 - protein, 359 aa, unidentified
MDGSKEQPKVTAGLDLGDKYSYLCLIDTHSGEVMEEGRLRTSPEAFKRRFASEQPPIRIAIEAGTHSPWASRMLEECGHEVLVANARKLRLIYANKQKTDEIDAENLARLARLDPKLLYPLKHRGEDSQAHLALIRSRQALIGCRTQLVNHVRGAVKSFGARLPKCPASSFHNKAPRYIPEALWPALGPILETIGSLTGRIRDYDQQLETISKEHYPETELLRQVEGIGPLTALSFVLTLEDPYRFEKSRSVGAYLGLVPAQDRSGDRDPQKRISKEGDEMLRRLLVGSAHYILGPFGSDSDLRRHGEKIASRGAKNAKKRAVVAVARKLAVLLHSLWLSGELYEPLRNTERSSGGQAA

SEQ ID NO: 303618 - protein, 370 aa, unidentified
MSVRRILAKTIDTDLEYEAIGIDLAKNCVSAALLTTDGEVVCIDRLDYSELEKSAQALSSTTFAMEPCTEMNYLVQKLEAWGHRCLVIGGKNVQNYVENHFSGQKTDLNDAQALAFLAQDTQLRTIKAKDVEQQKYASLTTLREQYIKQYRQTIVSLKGICQAWGLNISKGISGKARLKDLIENHAAFPEELKESLVDMVTHAQTAQKALNKITKTLEELAKSDKVCQLIQTIPGLGSICSCRLRATVGDIKRFKSPKDFLAYYGLVPRSIATGHNERKGKITHRGDRTMRSLMVQAAGSLVNMATKGKLKSKQLTKWILKKQKEKMPWGKLVCAVAAKLLRIVRAVLISNKPYNSKIAGVAKCSLPKGS

SEQ ID NO: 303619 - protein, 338 aa, unidentified
MEHYAGIDVSLECSSVCVVDASGKIIREGKVASEPEALIAWFGSLGFGLVRIGLEAGPLSQWLYAAMQQAGLAVELLETRHVRDAFKAMPVKSDRNDARGIAQLIRLGWFRPVHCKSLVAQEVRAFLTARKLVQSKLFDIEMSLRGILRGFGLKVGPTTPLRFAGRIKELVSGHATLEVVAKALLAAHAVLLREFAGFERRVRTMARADARVRLLMSTPGVGAIVALTYVSAIDDPTRFKSSKGVGAHFGLTPKKYQSGEKDITGRISKLGDGLVRAALYQAAHIILTRPVKGHHLKSWAAKLAKRAGMKKAKVALARKLAVILHRMWTNNTPFAATA

SEQ ID NO: 303620 - protein, 337 aa, unidentified
MDYFAGLDISMDETHVCVVDRDGEVVYENKTASTAQAIAVELAKAPSCRRIVFETGRMAPILFHGLSRLGLPVVCIESRQAYQALKSLATHKTDRNDARGLAHLARTGFFKPVHVKSLPAHALRSLITARKKLVGQRVTLENQIRGLAVVFGIRLPRALTAAFVNQALKASEGITGLSAAMRGLIAARAAVMTAVAAIDADMRRMTRASAACRRLMTIPGVGQLTALAFVAAIDDPSRIRRSRDVGAYLGLVPRRYQSGEVDYVGGISKCGDRRVRTLLYEAANVMLTRYKGQLKLKDWAFAIARRSSMRKARIALARRLAIIMHAMLRNETEFVPA

SEQ ID NO: 303621 - protein, 339 aa, unidentified
MNITTVGLDLAKSVFHVVCFNDRDKEVKKRILRRNQVLEFFTQLPPCRIGMEACASAHYWGRQLSDIGHEVKLISPQHVKPYVRGNKNDYNDARAIAEAANRPSMPFVGIKTVQEQDMQAIHRMRSQCLRDRTALSNSTRGLLGEYGIVFAKGVPTLRRKIPEILEDAENGLSLDFRNLLARRYEQLVEIDEHISFYTKKLERVSREDDPCQRLQTVPGFGPIVASAFRSDIGDGRAYARGRDAAASIGLVPRQYSSGGKNVLLGISKRGNKYLRTQLVHGARAVVLQAANKDDPLSLWINRIREERGWNKAVVALANKMARIGWAILRHNTIYQPSKT

SEQ ID NO: 303622 - protein, 346 aa, unidentified
MIIIGCDYHPSWQQVCWLDQESGETAEQKLVHASGDAEKFYKQLPAPALIGMEATGNCQWFVEMVTAAGHQVWIGDAAKIRASDVRQQKHDKRDAALLLKLLLEGRFPRIWTPSSEQRDMRQLLIHRYKLVRLRAQAKNELQHLAMNQGVQKKRRLWSEAGQKLLRELPLQPWASRRREDLLKVMALLDAQILSLDMAVKQAAETDANARLLMTQPGVGPITSLAFVLTMGDVRRFQRGKQVASYLGLIPREYSSGGHQRLGSISKQGNRFMRMLLVEAAQIAVRCDPRMRAEYLHRCHSKPKGVAKVAAARKLALRLYWMLRTQKRYPEIVAIESSSRVALAGAS

SEQ ID NO: 303623 - protein, 392 aa, unidentified
MVVSVGIDVAKDKHDCFIHSSEGEVLADVFAISNNMDGFHTLLEKIQACTAPQDKIRVGLEATGHYSYNLLGFLLDNGLATCVLNPLRTNLYRKSLSLRKTKTDRVDARTIAAMLLSDAGLKPYTDTAYHNEELKSLTRYRFDKVKERAKLKTSVSRLVCILFPELEKLVPTLHMASVYALLEEFPGAKQVAGAHLTSLKSLLEKASKGRYKRDMALSIRDAARMSIGSRMPAKSLELQHTIRLIRELDAEIHEIEAEIETMMDEIRSPIMTIPGIGCRMGAMILAEAGDLSGFDSPDKLLAYAGMSPSTYQSGQLNNCYPHMEKRGSRYLRYALFNATKYVCLWDPAFAAYLAKKRAEGKHYNVAISHAAKRLVRLIFAMEKSRQPYCSAA

SEQ ID NO: 303624 - protein, 352 aa, unidentified
MQHFIGCDMHTRNQVVAWVDEETGEIKGRRLEHEGEEVRKFYGQFPRGTVVGIEATFPALWFERLVAELGQELWVGDAARIRAREVREQKTDTRDAELLLDLLRTGRFPRIWVPSAEDRDLRQLLVHRMKQVRARTQVKNQLHALAISQGVCRKRKLWSAKGRAELEKLTLLPWAAQRRKELLEWLDRLDEQVRELDRAVEEAGRGRPEVALLRTHPGVGMVVGLAFVLTVGPIERFANSRKLVSYWGLNPREHSSGGRQRLGAISKQGNTLMRWLLVEAAQTAARFDAGLRRIYQRLKSRRNSGVAKVAVARRLAVRLYWMLRRRHNYAQLVRMSGSPSSAVVPSKSESNI

SEQ ID NO: 303625 - protein, 346 aa, unidentified
MMIIGCDFHPSWQQIAWLDTETGETGEQRLVHAGGDAERFYRQLAAPTLIGIEATGNSHWLVDLLSELGHELWVGDAGQIRASYVRQQKTDKRDAAHILKLLAEGRFPRIWMPSSEVRDLRQLLLHRYKLVIIRARVKNELQHLCLNKGVQRKRKLWTKAGQQLLRELPLKPWAGRRRDDLLGLMAMLDQQIEPLDQAVKEEAQRDKMALLLQTQPGVGPITALAYVLTMGDIRRFPRGKQVASYLGLIPREHSSGGRQHLGAITKQGNRMLRMLLVEAAQTAVRLDPQFRKEYLHRCHQKPKAVAKVAAARKLAVRLYWMLRTQKPYPEVVRIESSPRVRLVGEN

SEQ ID NO: 303626 - protein, 373 aa, unidentified
MGVGRYAEAASPPEAAESLQEGSMRHIGVDLHKLAFTACFLEEDDSQHLATFPLTPEGLAAFRAQLVAADKLALEVGQNAYFFHDQVRDAVGEIQLVSPYQFAVIAKSTKKTDRHDARALARFLKLGCLPTVVMPDDRIRELRQLFTAREAFVKVSRQLKNMGHAALVRNGVASRKSDFASGVGRRRLGLLQGLRPSDRRILDSVLRQLEAVEAELIELERAIIRAGKNLPGLKRLLQVRGLGLVAAIGVLSEIGDIARFASAKQLVSYSGLATAVHQSGGTERYGHITKQGRKRLRGFMVEAVLSLARNPAPNPLVDFYQRKKKEKGTGKAICATARKLLATIYVLLTKGLDYWFLEERLYQTKLRALAAAA

SEQ ID NO: 303627 - protein, 389 aa, unidentified
MQTARMTTPRTIATVECSAIFVSLELSRSTWLVTALAAPVGSRLSKHQVQGGDMPGLLARFSDLQRNVHHRTGQLAPVIVIQEAGLDGFWIHRALVAEGIESHVVDPASIAVSRRHRRAKTDKIDGEALVRTLMAWKRGEPRVCSMVRAPTPEEEDRRRVCRELKTLIGERIRHVNRLKGLFFSQGIGGYEPRNKDRRERLEDLRTGNGRPLPKHLKALALRELDIIELLNRQIETVKIERDALLEEARADGCAPEPVRMLLGLKGIGPGFAGALWSEGLFRQFANRRQVAAYAGLAPTPWNSGKINHEQGVSKAGNPRLRAIAVEMAWLWLRHQPDTALARWYHQRVRRFGPRTRKVTIVALARKLLVALWKYVNAGVVIEGARMKAA

SEQ ID NO: 303628 - protein, 428 aa, unidentified
MIKINPLSTLYVGIDVSSKSNYVCALDFYKNKYINSSFANNQPGAEELAQKILECLKEHPDLNTVVAALESTSVYSIHIANYLSSCEELMHMKPYVFVVNPKCTANYKKSFIGLGKSDPIDAFIIADYARGGNIETEPWRGSQFLALKRLTRHRLHLVECMTREKTYLVSNLYLKFSELQMLEGENQPFCDIYGATSSSVLVEYLSPEEIIDSSEEDLVSFLAEKSRNRIKDISKTADLLKKAARDSYRLDKALYEPLNVSIASSFNCIETFRREIKTIDQAIEREIKGLNPNAFIILQSIDGIGPVFAGGIVAEIGDIAAFSSSDALAKYAGLMWKSNQSGDFDGEDTPMSKAGNRYLRYYLGEAANSMRKHNIEYGEYYRKKYNEVPKHQHKRALALTSRKFVRLVYGLLAKNQLYSGVSLDTSNE

SEQ ID NO: 303629 - protein, 429 aa, unidentified
MTKPQSTPEAVVWVAIDVAKDRHEALIEAPGWKSRKKFRVQNTAEEFRAFADFLHGLGSTVRIGFEPTGNYHRALAYFLHSEGFQLELISSLALARTREAMHNSWDKNDPKDAQVILHLLKARLTQHYHDPIVHNLNDLQELSKTHHHVSLEKTRTQHRLLTHYLPLYFPEIARYHSSSRSEWLWNLLIEFPTPRSITRLSRDEFVRKAWNLVGRKVSKERILTDIYLTAESSVGLPAEENSETVAMLRFVLRQLLTLCQLRDTIEKRADELLSNNEDYQRLRRIPGIGPILALTILAEAGDLRRFSHHRQFLKFCGFDLATEQSGQFRGLSRLSKRGNARLRAVFWMAASVAVRMRENSFRAKFERYMRSDPGSADRKRKAYVAVAAKIAHVTYALIRSGADYRCFHEVAVPSGRTRSARAVEAIPTS

SEQ ID NO: 303630 - protein, 310 aa, unidentified
MEQTFIGIDVAKDQLDVHVFPSDDAFAVARDSEGLAALIERLGPLDPHLVVLEATGGFELTVAAALVSAAIPLAVVNPRQIRDFARATGQLAKTDALDAKVIARFAAKVQPEARPVPDEQARALGELVARRRQVIEMMTAERNRRRQLISRRLLKSVDRLLAVLQKELTELDHDIGEGIRGTPAWRERDELLRSVPGVGDVVARTLIADLPELGRLDRKQIAALVGIAPINRDSGKMRGKRTTWGGRAKVRSVLYMAALVASRRNPVLAAFYRRLVAAGKPKKLALTAVMRKLLTILNAMVRNKTRWQTA

SEQ ID NO: 303631 - protein, 411 aa, unidentified
MELIQDRVAGLDVHRDSVTACARRTGPRGGTVTDKERFKTTTSGLGRLAGWLADQQVALVAMEATGVYWKPVYYALEGRFLVWLCNAHHVKNVPGRKTDMSDAGWLADVAAHGMVRPSFVPPPPIRELRELTRYRKTQIDVRAAEIARLEKVLQDAGIKLTSVASKVLTQSGRAIVEALIAGQRDPAALAGLAKGKLRPKIPQLTAALRGHFGAHHAIVAARILAHLDFLDETIGALDAQIAARVAERYQSAARLLADVPGLERRSVEVIIAETGADMSRFPSPAHLASWAGLCPGNHESAGKRRRVATTPGNQWLRRTLIESARAAARTKDSYFGAQYRQMARRRGPNKAAVAVAHSLLDVIWHMLTTGEVFTDLGADYFTSRQDKEHQTRRLVSQLEKLGYTVQLTAAA

SEQ ID NO: 303632 - protein, 442 aa, unidentified
MARKKASVGRNKLQIINRLAAGIDIGASSIFVAVEPGCSEPAVREFSTFTDDLHSLASWLRSCRITTVAMEATGIYWIPLYEVLESKGFEVILANARHVKNVPGRKSDVLDCQWIQQLHSYGLLSASFRPGPEVVTLRSYVRQRGTLIRYCSSHIQHMQKALGQMNILLHQVVSDIAGQTGLKIIHAILGGERDPQKLATLRDWRCKRSEAEIARALYGNYRPEHLLQLRQAVRSYEFYQAEILECEQAISHQLELIMRESDPDNDQGGGYGPSGDLTRAEALERICGVDLTKIEGISQASALTILAEIGTDMSRWKSAKHFASWLGLCPGIKKSGGRLISSASRQVSNRAAVALRMSAYCLHRSKSALGGYLRRLKSRIGAPKAITATAHKLARLIYTLLKHGQEYVQAGQEAYEKQFQARKLRALHNNAKSMGFKLIPAE

SEQ ID NO: 303633 - protein, 343 aa, unidentified
MDHFAGLDVSVKETSVCIVDDTGRIVREVKVASEPEALLQVLRNQAYHFKRIGLEAGPLSQWLFGALAEAGLPVICVETRHMRAVLKAQINKTDRNDARGMAQMMRAGLYRPVHVKTLRSQKLRMLLTHRKLLQSKAIAIDNDLRGTLRNFGLKVGMVGTVKFERRIKELVENLPDLAILVEPLLVVRRVLREQLGILHRRLLAIVRDDDVCRRLMTVPGVGPVVALTYRATVDVPARFRRSKSVGAVFGLTPAQHQSGESDRPGGISRCGDEMMRVMLYEAAQIMLIRTNKWSWLKAWAMKIARHRGMKKAIVALARRLAVIMHRIWIDGTEFRWTREVAAA

SEQ ID NO: 303634 - protein, 407 aa, unidentified
MEVLHPRCAGLDVHKDTVVAAVRCVSEPAHQEVRTFPTTTTGLHALTDWLTSHGCTHVAMEATGIYWKPIWHILEGNFELVLANAQHIRNVPGRKTDVNDATWIAELLAHGLIRSSFVPPPPIQELRDLTRTRKQLVREVSQHTLRIQKVLEDANIKLASVLSTVLGRSGRAMLDALIAGETNLERLADLAQGTARKKRADLVEALRGRITPHHRAMLKLHLQVISALDAALQEVDLAVGKALEPIRAAARLLTTMPGVSDIVANVIVAEVGTNMARFPTAGHLVSWAGLCPRNDESAGKRRSTRLRRAGTWLKTTLVTAAWAAARTRGTYLRAQFLRIKARRGAKKAIMAVAASMLTASYFMLRDGVDYTDLGPNHFDRHDKTKTISRLVKRLRDLGCQVQVAHAG

SEQ ID NO: 303635 - protein, 326 aa, unidentified
MIQLGVDVGKSKIDVCLLPEGPGGRKKTKVLSNGPDVARQLLEWLAVRKVALSELQVILEPTGTYHEHLAYGLHEKGLRVVVASPVRVRSFATGMGILTKNDHVDAHVLALYGALRQPEAWVPPPPAIRELKALLKRRDALREDLQREQNRLEKLHVTRFSTRVEASVTKMIAALDAELLSVQQQIDDHIDNHPDLKQDMKYLTSVKGIGKQVGSNMLAVLRGNAFSSPEQAAAWLGLVPREKRSGSSVNGRSRLTKTGPADLRAKLYLSAMTAIKHNPMLRIFYERLLKAGKAKMSALCAVMRKLVHICYAVLMKQEEFDPNYSA

SEQ ID NO: 303636 - protein, 384 aa, unidentified
MHKHNIVFIGLDTHKVSTEVAHIEDQRGAKPVHQGKIKTTKAAITKLARQYQSKYPQATLHFVYEAGPCGYWIYRLLTSLGHCCYVVAPSLIPKKPGDKVKTDKRDALKLAKLLKSEDLTPIYVPEDEDEAIRDLSRARETAMKDLKDAKYQLKGLFLRNNITCKVNDNWSNQHLRWLTELVLPHPSQQIVLQEMIQTISERIKRVERLVNELMHQAKKWRYYPVIQALQAMRGIRFLVAVGTIAELGDLRRFDHPRKLMAYLGLVSKENSSGDNRKQGGITKCGNGRARRLLVEGAHSYKHNANVSTELQKRQEGLPKVVIDIAWKAQLRLCRRYKRLMQRGKHRNVVVAAIAREMVAYIWAISREIVLVPIAPKTRLSRVPA

SEQ ID NO: 303637 - protein, 341 aa, unidentified
MNYYAGIDVSLEASSICVVDASGKIIKEAKVLSEPEALIAWFKALPFTLARIGLEAGPLSQWLYAGLKDAGFAAELLETRHVRDAFKAMPVKTDRNDARGIAQLMRLGWFRPVHCKSAPAQETRALLTARKLVQAKLYDVQMSLRGILRGFGLKVGRTTPVGFAVRIRELTEHHPALSTIAKALLAVHEVLLRELNGFEKQVRKQARCDSRVRLVMTAPGVGAIVGLTYVAAIDDPERFSSSKTVGAHFGMTPKKYQSGETDLTGRISKSGDKGVRAVLYEAAHIILTMPVKGGALKSWAARLAKRAGMQRAKVALARKLAVILHRMLADSAPFDAAKAAA

SEQ ID NO: 303638 - protein, 341 aa, unidentified
MSVIKAVGIDLAKLVFSIHAIDEHDKCKFRKTVKRNNLLAEIAKLPPCIIGMEACSGAHYWAREFTKLGHDVRIMASKFVIPYRQNEKNDANDAEAICEAATRPKTRFVSIKSEEQQAVLCLHRIRQGAIKDRTARINRLRGLLAEFGIIMPKGRYPAQKAISEILEDAQNNLPFLARELLNDLWLNIKTLNEEILKYDRKLYALAKQMKDAKRLMSIPGIGEITATAIVATVNDAKHFNTSRSFAACIGLVPRQYSTGGKAHLGRISKRGEKHIRTSLIHGARAVIANCKNKTDRTSMWVKDLVERRGFKRATVALAAKNARLIWALLHSEKKYQADYVK

SEQ ID NO: 303639 - protein, 455 aa, unidentified
MNKKQQSKKQQSNQATTLQLGIIYSGAAGIDVGSMNMMVSYPGAEGIQTVEEYGAYTEDLHAMANQLKESGITHVCMEATGVYWMAVYEILEQYGFKVTLVNARHYKNVDGQKTDVKDCQWLQQLHAHGLLRASHIAEEQYRELRTYIHERGVLQKQKSDTLNRIHKVLTQMNIKVQHVISDIEGVIGMQIVERIAAGVNTPDKILEGLKTDKLKARKQDLEKSLKGIFKPWYIKVLKQHLTAYHFFKKQMLAYETEIEATLKILLPSQAEQITIEKKTVKVRKNQYHFNLKEYLHKIAGVDLTEIDGLDENTVLTIIAVVGLNMHKWPTAEHFTSWLNLSARPKKSGGKTIGHQRRFTNNSATQAFRMAAQTMWQQKGMLGHLYRRLSHTKGTKKAIKAVARRLAVIFYNMVKKKTAYNVKIVALDEAKIKARKIARLQKDAEKLGCKIEILAA

SEQ ID NO: 303640 - protein, 390 aa, unidentified
MYLIGIDISKFKHDCFIATETGQVVKSSFSFDNNQEGFNQLLTVLLSLDHSQQIRIGLEATGHYGTNLKLFLHEHNFSFMEFNPILSDRFRQVSSLRKTKNDKIDAKLISQMLLSFDYKPNSLLSYHISKLKSLTRFRKKLVKDCTIYKERLINILDLVFPEYSNYFTQVWGKVSLYILKNYPTIQDIASINVESVLPIIKALSRGHYSMPKLIKLIEAAKVSIGCKNDSHTLELKLTINLIEQMNYAIENVENEITIIMNKYNFKTATIPGIGIISAASIVSEFNDFSNFNSSNQLLSFAGLEPSIYESGTQTTYGHLVKRGSSYLRETLMNVAPFVMNYNNVFYQYYLKKRNEGKHHRVALTHLVKKLLRVIYYLETNAVPFDSSKLK

SEQ ID NO: 303641 - protein, 345 aa, unidentified
MKKVVAGIDLHSNNVVIGIMDMDGKRVASQKVSCELKEVAKFLAPYEKRLEQIAVESTYNWYWLVDGLRALKYPVVLANPAGMQQYNGIKHADDTNDAFFLAELLRLNILPTGHIYDPELRPVRDLLRRRLMLVHHRTALMLSFKSLYTRTTGQELALGKLKDLEVQEAQELYQHPANQLIAGMQVKHIEQLTESIEKIEQGVLSCARELPCYSKLTTLPGVGRILGMTITMEVGDVKRFAGQGNFASYCRTVEAKRTSNSKKKGENNSKCGNKYLAWAFVEAANFARRYDEQCRRWHDRKAAKTSKVMATKALACKLAKAAWYLMAGEVGYDAKRMFGQPATTK

SEQ ID NO: 303642 - protein, 345 aa, unidentified
MKSTIVGVDLAKNVIQVCVFTNNKVHSNTEMTPNEFIDWLANSAPLTIVFEACGMSNYWKQKAMTFGHEAKLISAKLVSAVRQNQKTDKNDALAIVQAALLPEVNFITGKSVEQQQLQSIMRLRELAIKQKTAMSNQLTSLLAEFNLMVSSRNGGLRGVIESTLEDAENDFTSEFRGALAAAWQQYLSVVTSITTYDLCLEKSLDTHPEAQKLLKIEGVGTLNAINLYIALGCADIGVVSSGKDASACIGLTPVQYSSGGKVKLGSIGKHVKNSILRSQLITGALSAVSQMVKREAKTTKERWVQALVERRGKKCAAVALANKTVRTAYAMLTQGTEYKAELISA

SEQ ID NO: 303643 - protein, 378 aa, unidentified
MVKRTTQQEFNAISSFLYLAFELGSKDWKLGFSIGHGQKTRIRAITSGDVESLRQEIKAAKERFKLPKQCQVMSCYEAGRDGFWLHRFLTSEGIQNVIVDSSSIEVNRRKRRAKSDRLDANSLVTMLMRSTYERKVWSTVRVPSVEDEDRRQLSRELATLDKERTRVRNRIRAFLITQGIKIRGSMDRLDSKLEHLQTWDKQPIPPGLRNRIRREWERLMFLNEQIRAARREREDVEESEPGVEKIQRLQQLRAIDSSAWPMVRELFGWRHFKNGKQLGSLCGLTPTPYQSGTSYGEQGISKAGITHVRRIAIELAWSWIRYQPKSQLTCWFNDRFQKGGKKSRKVGIVALARKLIIALWRYLETGVLPEGAELKATI

SEQ ID NO: 303644 - protein, 361 aa, unidentified
MRIIGCDLHARQQTLAMLETTTGEVVNLTLMHEGNEVRDFYSQLPRPVRVGIEATGSMQWFLNLMEELGIECRVGHPATIRAAEPRKQKHDRRDADLILKLLAENRFPAIWLPTKELLDLRALVLHRHQWVRMRVRMQNALQAIALANGLRRGPGLWSYDGQAKIAFLPLLPHASYRRSALQTMYKHMEEEIENLTKQVAEQAGHRSGARLLMTHPGVGPVTALATDVFLGDPKRFVDGKALASYVGIIPREYSSGERQRLGGVTKQGSPLLRFLWCEAGAHAVRRDPELQRFYRRKLVQKGLGKARVAVARKLGIRLWIMLRDEIDYQEFCRRGQKQQSGAACAGMPETGYGANSHRPID

SEQ ID NO: 303645 - protein, 370 aa, unidentified
MGKRSMFVGLDVHKESIDISIAEEGRQREVRHYGVIAGDLEALAKVVRALRAPDRHLRFVYEAGPCGFGIHRYLTTQGEDCVVVNPSSMPKRSGDRIKTDRRDGEALARLHRAGELTAIYIPTPDDEAVRDLVRAREDAVGLSTQAKHRLKAFLLRQGRRYPGRAAWTTAYRRWLADLSFPLAPQHIALQEYRDTIDETERRVARLTDQLRQLTPMWRWAPVVDALQALRGVSFVTAVGLVAEVGDIRRFTHPRQLMAYLGLVPSEYSSGPSVRRGRITKAGNPHARRLLAEAAWAYQGVPRLGRQMLYRQEALPKPICDIAWKAQLRLTSRFRRLVARGKEKPKVATAVARELTGFIWAIAREVPAPVA

SEQ ID NO: 303646 - protein, 313 aa, unidentified
MSAAHFIGIDVSKEHLDIAIRPTKGLFRFLNTDEGVDALIQQFHPLKPTLIVLEATGRYHQLVLSRLLAAGLPAIAINPRQARDFARAIGRLAKTDAIDADVLAEFAEKIRPELRAIADEATQELEAICTRRRQLVTMLSAEKNRLHTAAQRIRSEIQKHIHWLEKEISQLEKDMDKRIRSSPAWREKDDLLRTCKGIGPVTTHTMLSCLPELGTLSGRRIAALVGVAPFNDDTGKRNGPRHVQGGRLDVRAVLYMATLAAIRHNRTIREFHRRLIATGKAKKVAITACMRKLLTILNAMLRDKKPWQSDFVA

SEQ ID NO: 303647 - protein, 338 aa, unidentified
MFIIGIDPHKGSHTAVAIDNDERLVGEVMVRADRRQRERLLRWASEFEPRLWAVEGATGTGALLAQQLIGAGETVLDVPPALSARARLLDSGHKDKTDPYDARSAAIVALRNRNLRTIALEDYRQVLRLMARRHHQLTAARTRAICRLHAVLCEMTEGGLTKNLSAKRAASELRKLRPKDAIGIERKRIAVEFLDEVRRHDQALTELHGRIDDAVRAAGTSVIEVFGVGPIVACYLIGHSGDVRRFPTAGHYARYNATAPIEASSGPKVRHRLNPNGNRQLNHAIHIAALGQISHDTPGRAYYLAKQADGKSRKEAMRCLKRRISDAIYRELRADTTR

SEQ ID NO: 303648 - protein, 374 aa, unidentified
MHWEALVFNERMAIGLDVHARSVRAAALDTVTGELCEARLAFDVGQVVAWLVMMEHGHGTSAVAYEAGPTGFGLARAIQAAGLRCVVAAPSKILRPSGDRIKTDARDAVLLARLLRNDDLVAVRVPTEAEESARDLVRAFDDARIELMAARHRLSKLMLRHGHVYDPGKDAWTGAHDAWLRQVRRDQLPAAGAGTLAAFDAGYDAVVTIGARKKRLEIDIEAMAADSEFTPLARRLGCLRGISTVTGFALAVEIGDWERFTGGTIAAYLGLVPSEHSSGGSRSVGPITKTGNKHARRLLIEAAWHHKATYRPGKTMRDRWALAPAVVAARGDAGNRRLHHRWQVLMAHKKRHTVANTAIARELAGWCWSLATLN

SEQ ID NO: 303649 - protein, 371 aa, unidentified
MKQQTKSSNITVGLDLGDRRHRFCALDERGEVVEQDSICNDRVSLRKLAGRYHGALGVTEAGAHSPWISRFLEALGWRVVVSNPRKVRAIYQHERKSDQRDALMLARIGRMDLALLYPVRHGTAEAQQDLLRIKLRDSLVRARVAVINSVRFTLKSLGYTVRNPSSERFHKVVMEEVPESVREMITPSVQALAELTARIKMLELEINTLAQMKYPQSAQLQQIPGVGPITALYFVLKIEDPNRFAHVRDVGAYAGLCPRRDQSGESDPQLRISKCGDAYLRRLLVSAAHYILGPFGPQSALRAYGLMLAADGTARAKKRATVAVARKLAVLLLSLWKSQQPYQPFPGACLNGEQEDRRSGTIALHRMEATD

SEQ ID NO: 303650 - protein, 425 aa, unidentified
MHERMEIGDRNEYIHPICCGLDVHKKSVFAAVFIYDNSDSPVKYYTAQFTTYPKDLKKMTDWIISKNCHDVCMESTGQYWHPIYDAAEEAGLHPLVSHPKYTKPLKGKKSDPADAKWIAKSYASGRVVASFIPSKEFRIMRSTIRYCQKIHNAMTGEKNRILNCLTGEGIKLDVVFSDVFGKTSRSIIDYMLNHPGEKFNVTPFIGKRCKTPIPVIQEAVAKASSVDISSLSKLKVAFSRLDRTVKDEAVLKQDVAERMKPYAHQLELIRTVPGFDRDPFTAMRVLAEIGPDMSVFPSARHLCSWAGVCPSHDSSAHKVKGRKISRAGKYLKPLLVNIARSVVRSKDHPEITSRFNRIKSRRGYMKAIIAICKMFLTAIWHILSKDEPYKTDGYMTAKKRKKAKRVMTRTQLAEYLASQGITVVD

SEQ ID NO: 303651 - protein, 407 aa, unidentified
MQLTCGVDWAEAHHDVALVDVDGAVVARSRIDTGASGFNELLALIAEHGGSAEHTAIALETDKNLLVVALAEAGFTVYPINPRAVARYRERYGQGGGKSDPGDAAVLAHILRTDRYLHRPLPAVSEQARAIKALARQHQEAVWALQQTVNRLRSVLLEFYPQALQAFPNLKHCAAATVLAAVPTPAAGQKLTRSRLVALLRRAGRGNHPALVEQILADLRTPALRQSARIEDAYGNTVGGLIGIVVAQQQAVDQLQTALGHEFDTHPQAAILRSVPGLGAILAARVLGEIGDDPTRFTDPNGLRAFSGTAPVTIASGRSRYVKARKVRNKRLADACHWWAFAMLTKSPGAREHYDRRRAAGDHHNAALRNLANKLLGRLWWCLAHNQLWDDNAAWPHRTEHLNPVAA

SEQ ID NO: 303652 - protein, 341 aa, unidentified
MEQYIGLDMSLKETAISVRQGGKRIWRGKCASDPKVLAAIIRDRAPEAKRVVFETGPLSVWFYHALMAEGIPAICIDARHAKAALDMAPNKTDTNDADGLAQLAEVGFYREVRVKQYDSMLSRTRVGARNKVIKITIELSNQIRGVLKTFGLIVGKGSGRVFEGNVRALLAGNAELARIVLPLLEAWRDLRARATELDRQLVAAARESAACRLLMSIPGVGSVVAASFAAAIERPENFRTSRSVGAWLGLTPRRYQSGEVDFDGHISRRGDNHLRGLLYQAATVILTRSLADSTLRSWGLKLREKVGFKRAAVAVARKLAIVMHTMLKTGERFDRTIGASA

SEQ ID NO: 303653 - protein, 336 aa, unidentified
MFQLGIDVSKKTLDLCLLREGVKGRVKTRKLKNDFNAASAVINWLCKQHVELTDVHIIMEATGVYHESLAYGLHKAGAMISLANPHRSREFARGMGILTKNDRVDAYMLACYSALKAPDAWIPPPGNIRHLSALLRRRDALVADSTREKNRLEKCRAADTPAVITESIENVLQSLSAELKHLDALIQDHLDQHPELKKNFELLTSIKSVGFQLSLNMLVILRSHHFETAEQAAAFLGVVPVEKNSGTSVRGRGRLSKIGPPEIRAKLYLASLCGMRFNPTMKAMYERLCQRGKAKMCAIGALMRKLVHWCYGVLKTQKPFDAEYRFSDEHSACKVT

SEQ ID NO: 303654 - protein, 389 aa, unidentified
MKRLFCGIDVAKYEHVVSIYDPSTGEYILDSLHFENNEKGYKSLDSRLSKLKRKNDLVIGFESTGHYHMALFSFLSGKKYRCFLINPYMTSRFRSVSLRDAKNDNIDSRAIAQFMSFEYERLSEEEFVNNELKELSLQRSFLMIDSSKMKIKLKSYLDRVFPELESIADINTAAIRAILKEYPCASDIARTRIDKLKNMAYKASKGKYPSAKIERIKEAAAVSVGYYSKAIGLNISQCIETLELKERQIEKIESSIVNHPLVIKSPLKQLKGINDIEIGYIMSAIISISRFTSAKKLVAYAGLDPKIRQSGTWQAPKTRMSKRGNRLLRYALIWTAYNMSRHEGPIKRYYELKRSQGKSHYNALGHCAAKLCRYIFWILSNPDKQFTYQ

SEQ ID NO: 303655 - protein, 351 aa, unidentified
MDHIGIDVHKRDSQIYILAEGGEVIERRIRTEPERFDAVLGTRPRARIVIEASTDSEWVARCLEALGHEVIVADPNFAPMYATRTRKVKTDRRDARALAEACLLGAYRPAHRLSDPQRHVRGRLVVRDALVRTRTRYISIIRALLRQHGYRVPSGSAEHFVHRVQSLPLPGRLRSVVAPLLALMRPLNAQLTYSDATIEHLAVQDPRVPRLRSVPSIGPVTAAAFLAAIDDAQRFRHAHQLEAYLGLVPGERSSGETQRRGAITKAGHSRTRWLLIQAAVSILRRRPPQAEDLRTWAVRIAARRGKQVAVVALARRLAGILYALLRDGSIFEPQRVRPPRPPAAAAAPVGM

SEQ ID NO: 303656 - protein, 413 aa, unidentified
MVKREKIELVKRQRIFVGIDIAGSKHRARFIDNMGEEQIKPLSFFNDREGLEKLERRVNEIPRIGDDIIFGLEPTGDYWKPVAQYLREKGYPVVLINPYHLKRTKEIIDNSQDKTDDKDSYLIADLTKQSKYFFPVIPEGVYAELREVSINWKRTSQQLARLKCHLSNFLAKYFPEYKGIFSDILGKTSLYILKHFPLPEDIERLGINKLYRVMKKVSKGSIKEGKIQLLYEKARTSIGLKGGSQTAKVLLKEVLSDIEILKKRKEKLTKMMDELLYQSGYLKNLLSIPGVGIVTGSFFLGEIGDPDNYERASQIEKMAGLNLVENSSGSMKGEKKISKRGRSTLRYVGHLVTTVAIGKSPEIKALYRYKVEECKKEKMKALTGLSAKMLRIMFAVCKNKTFYKHEEITRYFR

SEQ ID NO: 303657 - protein, 403 aa, unidentified
MCRRRCRQFAHTLVVRPHGRPDSRPCTVPTTRAGFDTAVAFIRQVSGGAAPATILVGIEFAGNYGFTFAHYLAQLGFAVVSVLPAHTKRWKDVVHNQPLKTDAKDAATITDLLAQGHFVTFPFLKPAYADLRYLAAGRARLSLLRRGALTQLRTLLQVVFPEFEALFPRITKKTPLALLRAYPAPQDLLATPRRQVLRVLRQASRGHCSMATYELLIAAARTTLGLPGAQSGLRHEIGLTLERIDTYDRQIRLLEQRMVTALGAVPETPSLLSIPKLGPVTAAIFLGAVGDPHAYESGEQILRVAGLSLIERSSGILHGTKRLSKRGRPLLRAAAYMFAVRSITTGGLFRREYDALMARNGGVALKALAAVMRSALRLMYSVTRDGRTFTVEPPPRRGVRATA

SEQ ID NO: 303658 - protein, 346 aa, unidentified
MDESYVGQQVVGLDLHRRRTVMVRMTPAGEQLEAVRFVSDPVVLAEQIAKAGPSPEVVVEATYNWYWVADVLDDAGARLHLAHPLGVKGFAYRRVKNDFRDAADLADLLRMGRLPEAWIAPKQVRCQRELVRHRHKLRQLCSGLKAGAHAVLAKNALLIPHTDMFGLDGRRRLQELALPEAYRLRLNSQLRLIDTLEAEIEDLDGRIRGLFDADAGYRALLRVPGIGPVFGAILRAEIGEISRFPSPRQLNSWAGLTPRHRESDTTVHRGAITKQGSRLVRWAAVEAVQRTRAGTPMRARYEQVVTRRGVTAKHVAKVAAARELLDCVFYALRDGHVRRLGQTSAA

SEQ ID NO: 303659 - protein, 343 aa, unidentified
MEHYVGLDVSLKLTSICVVNQTGSILQEGVVDSDPEAIASFVRLKAPGTVRIGIETGPTTTWLWSELKRLGLPVICIDARHAKAVLKMQINKSDRNDAAGIARIMQTGWFKEVHVKDLDSHAVRALLASRALLVKIKRDLENQVRGLLKNLGLVIGRAKFNVFATRAEELIEDRPELVAAIRPLLEARKAIEKQVADLDRKVHRLARHDVQVRRFMTVPGVGPITALCFKATINDPTRFKRSRSVGAYVGLTTRRHASGEIDWSGRISKCGDAMLRMYLFEAAGVLLTRVPKWSGLKAWGAKLTKRNGLRKAKVAVARKIAVILHRMWIDGTEFNWSTNKAPA

SEQ ID NO: 303660 - protein, 334 aa, unidentified
MENIALIGIDLGKNSFHIHCQDHRGKAVYRKKFTRPKLIEFLATCPATTIAMEACGGSHFMARKLEELGHFPKLISPQFVRPFVKSNKNDFVDAEAICEAASRPSMRFVQPRTESQQAMRALHRVRESLVQDKVKTTNQMHAFLLEFGISVPRGAAVISRLSTLLEDSSLPLYLSQLLLKLQQHYHYLVEQIKDLESQLKRKLDEDEVGQRLLSIPCVGTLTASTISTEIGDGKQYASSRDFAAATGLVPRQYSTGGRTTLLGISKRGNKKIRTLLVQCARVFIQKLEHQSGKLADWVRELLCRKSNFVVTCALANKLPRIAWALTVRQQTYEA

SEQ ID NO: 303661 - protein, 455 aa, unidentified
MPDAITGDRPELKPVNIGAAAIDIGSKMHVAAVNPTCTDVPVRAFGTFTQDLHDMADWFKACGVTSVAMESTGVYWIPAYEILEQHGFEVILVNARYAKNVPGRKTDVSDAAWLRQLHSYGLLRGSFRPDAEIATLRAYLRQRERLVEYAAAHIQHMQKALMEMNLQLHHVVSDITGATGMRIIRAIVAGERNPAVLATYRDVRCHSSIETIRAALVGNNRDEHLFALTQSLELYDTYQAKMLDCDRKLEALIAALSDKGAKPVGKLSRPRVKTKQVNTPSFDVRAALYGVLGVDLTEIHGLGPSLALKLIGECGTDLRAWPTAKHFTSWLCLAPGNKISGGKVLSSRTRRSSSRAAALLRLAATTIGRSDTALGAFYRRLSSRAGKAKAVTATARKIAVLFYNTLRHGMTYRDPGADHYEEQYRSRVLANLKRRAKSLGFVLQAVPGDTEAAVS

SEQ ID NO: 303662 - protein, 337 aa, unidentified
MHKVPVFVGLDYHQRSIQVCVLDRAGRVLGNRSCPNQWQEVARFAGRFGDVRRVAIESCTGAANFAEELLQEAGWSVDLAHPGYVRRMKQNPDKTDYTDARMLADLTRVGYLPRVWLAPHDVRELRRLVRYRQQLVNERRAIKLRITASLREQRIGDAPVKRWRVVWYQWLEQCPDLSEQSRWIIGRQLARLRAIEQEIQVVMKRLGQVTAEDAIVQKLLTLSGIGPVTALTLRAEIGRFDRFVSGKQLSRFCGVSPRNASSGQRQADAGLIKAANGQLRAVMIEAAHRLARYDPRWSVMATQMRAAGKPGSVVAAAVANRWLRWLFHQMQPAAVAA

SEQ ID NO: 303663 - protein, 330 aa, unidentified
MQGRDIKEEKPMEKEKVYVGIDVAKASMDIAVHSTGQRWSFLNDDTGIAQAVTCLRELAPELAVMEATGGIELPLTAALVVAGVPVVIVNPRQVRDFAKATGRLAKTDALDAKVMAHFAAVVRPTPRPLPDVQTQEFSAILARRRQVLEMLTAEKNRLGTARKAVRERIRAHITWLEQELANLNQDMRRSIQESPVWREKDNLLRSAPGVGPILSATLLAELPELGTLNRRQIAALVGVAPLNRDSGTFRGKRTVWGGRATVRAALYMAALVATRYNPVIRTFYQRLCAAGKAKKVAITACMRKLLIILNAMLKHRTPWGLVPKILVPCH

SEQ ID NO: 303664 - protein, 346 aa, unidentified
MKINRIGVDLAKNIFQLHGADHKGKAVWKRKLSRDKWLKVLFETVEPGTVIGMEACGGAHHWSRVLIEKGYEVKIIPPQFVKPFVKSNKNDANDAQAICEAMVRPNMHPIKVKTIEQQDLQAVHRIRDEIKSHRIAKANQIRGLVTEYGLVAPRELSSLRKAIPQWLEDADNGLTIFFRQLLHGLWEDLLSLDKRMSELDKQIAVIAQENPVAKRLQQLRGVGPLIATALVATMGDAKQYRKGRDMAAAIGLTPRQHSSGGKDRLLGISKRGDAYLRCLLVHGARSAMRTAKNKDDRVSRWITNLQDRRHANVAACAMANKIARMAWVMMSKGVDYDPNFKPVMSN

SEQ ID NO: 303665 - protein, 345 aa, unidentified
MQTMYYIGLDVHKKKISYCVKDGSGHLHAEGAIPAARSDLDRWMKTLPAPWTAAMEATIFTGWIYDHLKPHAAALKVAHPLMLRAIAAAKKKNDRIDAHKIADCLRCDFLPECYMASSEIRERRRTLRYRNLLVHQVVQLKNKISGLLMEAGVSYNKQKLHKVGYFKELLATNPEINEGLRPLLRLCRETLVRLQKIESALVRSLQRDSLLAERVQRLMTIPAVGPITALTWALEVGDVKRFSSIKKAISYCGLCGAEKSSADTIKRTPISKQRNKHLQSVLVEAAKMAPRLSSELALIYDREKQKGNANRATLAVARKLVAYLVAIDRSQRDFLVVEKENCAAA

SEQ ID NO: 303666 - protein, 411 aa, unidentified
MEAIYESVCGLDVHSGSVQACVRRWKERRIEQEVRAFGTMTRDILALADWLAAEAVTHVAMESTGVYWKPIYNILEGRFEILLVNAKHVKHVPGRKTDVKDCQWLAQLLQCGLLRGSFVPDRPQRQLRDLTRHRSQLVHQTAAVANRIHKVLEDANIKLGLVASDILGVSGRDMLRALIAGQQTPEEMAELARRQLRGKIPQLRLALEGALTEHHRFVLAELMDQLEDLGRRIERFTRRIEEISGPFAAAIRAVAEIPGFDQRSAQNVVAEIGTDMTRFPTDAHIASWAGVCPGSNESAGKRKSGKTTKGSRWLRSALCQAAWAASRTKRSYFRSQYRRLVGRRGKKRALVAVGPSLLVVIYHVLLTGRPYQDLGIDYFDKLDAARIVKSHVRRLESLGYKVTLATSEKAA

SEQ ID NO: 303667 - protein, 351 aa, unidentified
MIIIGVDFHPSFQQIAFMDQETGECGERQLNHSDGEAEKFYRELQQRGVSVRVGMEATGHSRWFERLLAELGFEMWIGDAAEIKKLRVRKQKTDREDARLMRKLLLESRFPRIWVPSPENRDLRQLLWHRHRLVQMRTRIMNQLQAVAMNEGYRWKKKLFSAQGRALLEKLSLAPWASRRRKELLELLDQLDPKIAELTAAVEREAHKRPEVVRLMTHPGVGPLTGVAYVLVIGTPERFPCGKQIGSYTGLIPCEDSSAGKQRLGHISKQGNTLLRFLLVEAAQAAARCNPDWRRRYVHLMMRREKRIAKVAMARKLAVRLYWMWRNNWQYSQLLEFGSNAGKLGTGHGVK

SEQ ID NO: 303668 - protein, 380 aa, unidentified
MNRIIKIGLDVHTTNYTICIEEPLIGGEKNVYVQTQIKSELRLLINVIDTFKAKFKDDNLDITLGYEAGCLGYSLYKDLKAKGYNCIILAPTTMRTLKGGKKIKNDYRDAKEIADCLCDGGYSAVYVPSIEDNAVKEYIRMRDDVKQNLKSIKQQIIALCTRNGFNYSDSSYWTNKHISFLSKIEFEDELLKETLDEYMAEYYHLTDRIDAFDRRIEELANKEIYVERVNKLKCFSGIKTHTALSLIVETSDFKRFAKGSDYGAWLGMIPIQDASSNKDNRFGITKSGNSHLRKLLTEASQSFTRGTVGYKSRNLKSRQAKCSSEIVNYADKANIRLKKKYYRMIQRGKKANVAKVAVARELACFVWGMMTNNIEVNIAK

SEQ ID NO: 303669 - protein, 331 aa, unidentified
MVHIPKAKSTAIATLGVDIGKNTFHLVGLDKRGAIVLRERLSRAQIEVRLANLAPCLVGMEACVGAHHLGRRVEALGHDVRLMAAKYVRPFCRKQKNDFNDAQAIAEAVTRPTVRHVALKTPEQLDLQALHRVRQRLISQRTGVINQIRAFLLERGLAIRQGWHALRAELPRALSMTDRLTPRMLHIVEDLAGDWRRLDERIEGPIISSATVAGIGKGDVFEKGRDFAAWLGLVPKQTSTGGRPILGRISKRGNRYLRQLFVQASRVVLLRPQTWERYGLKHWIDAAAQRLHYNKLAVALANKLARIAWGVLHSGRTFETRRENGHAPQPT

SEQ ID NO: 303670 - protein, 412 aa, unidentified
MDVLYPRCCGLDVHKKTVVACCILSTKGRKPVKETRTFRTMTTDLLALANWLQEQGCSHVAMESTGVYWRPVYNLLEGQFELLVVNAQHIKAVPGRKTDVKDAAWLAELLRHGLLRGSFIPSKPQRQLRELTRYRSTLVQERARTLNRLQAVLEDANLKLASVVTDINGVSARAMLEAILAGQRDVEILADLARGRLRAKRDQLKEALEGRVTAHHSFLLTEHLSTLEYLDEAIARVSREIGQRLTADQEAIVLLDTIPGVGQRAAEILIAEIGTDMSRFPSAKHLASWAGMCPGNHESGGKRLSGKTRKGNRWLRQVLVEIAHVASKTKNTYLAAQYKRIAARRGKKRALIAVGHTILTIVYMMLTRKQPYQDLGAAYFDQREQERVERRLVHRLERLGYEVSLQPRALAS

SEQ ID NO: 303671 - protein, 316 aa, unidentified
MNTHIVVILGVDVSKSMLDVGVQDGSWRASFPNDATGIKSLIRMARKRFGSFIVGLEPSGGYERSLVEALLDENLDVRFADARRVRDLARAHNAPAKTDAIDACFIARFIAETGGRVIKRDPATQALSAIMSARAFLVESAQRLEQRLSHEHQVDARRALTRQLRRLKAEICALDLAAQKHVAAHAHLAEASRRLQTAPGVGPIVAMTLLGELPELGSLNSKQIARLVGLAPFIRESGQWKGRAHCSGGRMRPRNILYLAAMAAKRCHKPSKAFFDKLVSNAKPKMVALNALMRKLITQLNAMMRDLTDWAKTTPS

SEQ ID NO: 303672 - protein, 379 aa, unidentified
MQKNTTFVGLDVHKDSIDIALADAGRDGEVRFYGTIGGDLDSLHKVVRKLQSTGATLRFVYEAGPCGYDLYRSLTSQGFDCIVVAPSKIPRKSGDRIKTDRRDAVNLARLHRSGELTAVYVPAAEDEAMRDLTRAREDAVKALRVARQVLLAFLLRHGYRYSGRSHWSTAHKNWIADIKMPHRAQQIALQEYVHAVQEQGERVQRLTQQIQELLPLWSLAPLVIALQALRGVSLIIATTIVAELGDLTRFDSAKQLMAYLGLVPSEHSSGGTTRRGGITKTGNGHARRVLTEAAHAYCHPARESRILLARLEGLPQEIRQIAWKAQLRLCGRFKKLMARGKNRNTIITATARELAAFMWAIACALLPVAPASPNPVLAN

SEQ ID NO: 303673 - protein, 415 aa, unidentified
MEPVLESCAGMDVHEKKVDVCIAHGSLDKSPKFEIRTFSTMTSDLGELASWLKKYKVTTIGMESTGVYWKPIFNIMEGKFTIVLANAQRLKAIPRKKTDIMDCKRIAKLLRYGLLPNSFIPPREIRELRDLNRTRRKLVGMMTSEKNRLIKVLESANIKLSSVVSKICGVSSLAMIRSLLEKDKLSKDEISQLAKGSLKKKVGLLEKALNGELTDHHRFLIKMHLENLDHLAKQIERIDEEIRRKMIPFQKEAKLIQTIPGISEVSASAILAEIGTDMSQFPDAAHLSSWAGVCPGNNESAGKKKSGRTQKGNSFLKGTLTEVAWAASKTKGSSYSAFYHNIVRRRGKKRALVALAHRMLTDIYCVLKFGEPYQDTGAEATNERAMKRRERSMIRSLEKAGYSVVKTSVAEMAVA

SEQ ID NO: 303674 - protein, 356 aa, unidentified
MAIVAHARPFVIGVDTHARNHAVSILACPTGEIVDEAQFPATAAGLSRAVSWAGRRTGGDVTVLWVIEGTGTYGARLRAVAADNGYTVVEAPRINARANRTIGKSDPLDARRIAAAALPLHETQLREPRADDGVRAAVKVLLASRDHMSTERTATINALTALLRVVDLGIDARRPLTQAQIDATAAWRARHEALATATARGEATRLGKRVAALDKELKDITKRITDLVRQSPAGGLLDQPGIGPVTADVALTSWSHLGRIRFEAAFASLAGASPIPASSGNTVRHRINRGGDRRLNRALHMAIVTRMRMDPRTRAYVERRTAEGRTLREIRRCLKRYLAREIYRHLTTAARAQLAA

SEQ ID NO: 303675 - protein, 316 aa, unidentified
MAFLHQHPVRCLGCDVAKDSIVVSDGTTLPQTIANDRRSIGAFVRTCGADLVLCEPTGGHERRLIEACMRAGLPVHRVDTLKLKAFIRSFGTLGKTDAIDAAKLAAYGSERWSVLPLWATPDAGQQRLKALVRRRHELIALKVAEHNRAKAPAPPAARELAASFKAMLAAIGRQIKAIDAAIERLLAKSPSLNRRIAVCTTMDGIGAPTAAALIATMPELGTLSRRQAAALAGLAPHPRDSGRTRAYRKIRGGRPEIPTILFMPALRAAAGKGEFAPFYRRLIQNGKKPMLAIAAVMRKIIITLNARLRENTMPQS

SEQ ID NO: 303676 - protein, 402 aa, unidentified
MNAVGIDVSKGKSMVAILRPYGEIISTPFEIKHTSSDINALVEQIKSVEGESRIVMEHTGRYYEVLAHQLSQANLFVSTVNPKLIKDFDNDSLRKVKSDKADAVKIARYALDKWQNLKQYSVMDELRSQLKTMNRQFGFYMKHKTAMKNNLIGILDQTYPGANTYFDSPARSDGSQKWVDFTSTYWHVDCVRKMSSNAFIDHYQKWCKRNKYNFSQAKAEEIYGTAKELVPVLPKDEVTKLIIKQAVDQLNSASQTVENLRTLMNETASKLPEYPVVMQMKGVGPSLGPQLISEIGDVTRFHSKGALTAFSGVDPGVNESGTYAQKSVPTSKRGSADLRKSLFQVMDALIKTMPQDDPVYLFLDKKRAQGKPYYVYMTAGANKFLRIYYGRVNEYLATFNKN

SEQ ID NO: 303677 - protein, 415 aa, unidentified
MNYTQNQKIEQVTESTLVLGVDIGSSEHYVRAFDYRGRELTRKVFRFSTDINGFNSFYDWVTQICIKHGKNEAMIGCEPTGHYWYTFYQFVKDHGMKLAFVNPASVKKAKELDDNSPKKTDLKDPKTIAKLVIDGRYSFPYVPEGIYAEIREVASSRDRIMKELNAASNRIQRWLKIYFPEYLTVYKKFDTTTGMMILEEVPLPTMVTALGVDNIIKIWREHKVRGKGASFNRAKTLVDAAHDSVGKSGGQGAVMEIQMLLEDYKVKKQQLEMVTSVMEELIMQIPNAEKMLSVDGVGLVTVAGFISEVGDISRFKNPKQIQKYAGFELVENSSGKHKGRTTISKRGRKKLRKIIYQVVLPLIQSNKEFRSIYDYYRKRIKNPLKGRQAMIAVGCKLIRVFFAIMTKVLSTMDQK

SEQ ID NO: 303678 - protein, 326 aa, unidentified
MSKVYEQIFIGIDVAKDTLDIAFRGQAKTTQFANSESGVKAFLEFLAQFKDRVAVVLMEATGGMEREVAQHLCLAGYAVMVVNPRQAHDFAKSLGYLSKTDATDACALAQFAHTLHHSDKRDKLIMCMPSVEQELLQALVTRRAQLIVMRVAESNRRAGAHRSQRKSIEIVLKVLNAEIKKTDAEIDGHLNKHFHAKLDLLKGLKGVASATKAMLMASLPELGQLNHREIAKLVGVAPLNRDSGKMRGKRTTWGGRADVRAALYMAALSAVRHDPALRVCYKRLRSAGKLAKVALVACMRKLLTIINAIMKSGKPWEANHGYPQVA

SEQ ID NO: 303679 - protein, 430 aa, unidentified
MQSYRVAGIDVHKKMLAVVVADVGGSGEFDFERRKFSTAPKDLHVLAQWLVEQEVEEVVMESTAQYWRPVWEALEQSWQPAMRKREQISKLSGTLHLCQAQSNRAPRGRKKDFPDAERLVKRLVAEELTLSFVPEPDLRLLRTVTRRRYQLSRARVMFQNQLESLLEQARIKLSSLVSDLLGGSARRMMKALAEGERDPAVVAAMADCRLRATPEQLQDALSACAEMNPHYRRLIKMALEELHLVETHIEALDREAMELLQEHQDVVRRIAAVPGFGVDSAMQMIAEVGVEAANFATAKNLASWVGVCPGDQESAGKQQSTRSPKGNRHMRRLLTQAAHAAVKVKGSIFELTFNRHMRMHPTQYKRSIWAIAHRLCRLLWLLLSKRVDYEERGPEVSAKSKRVRTNRMIRELRKLGYRIEGGPVALANHV

SEQ ID NO: 303680 - protein, 341 aa, unidentified
MEQVSIIAVDLAKQVFQLHGAEPDGSVVFRKKLSRVKLLPFLASQPKCIVAMEACAGAHHWGREISEMGHEVRLIAPAYVKPFVKRQKNDAADAEAIAEAAMRPTMRFVAVKSAEKQGSGMVFKMRDMLVRQRTQSINALRGHMAEYGIIAPQGTFYVTRLAVEIGAPDSGLPPIVVELCTMLLQHISALDEKIGELDRQIRQRASKDETIRRLTTIPGIGPICATALETMAPPPETFSKGRDFAAWLGLTPRQNSSGGKERLGRTSKMGQRDLRRLLIIGAMAVVRWAARKGAPAGSWLARMLERKPRMLVAVALANKMARIAWSLMAKGGLYEVPAVAA

SEQ ID NO: 303681 - protein, 419 aa, unidentified
MNKLFVGMDISLDDVKVHILDQDGNDACPRFSVDNNPSGCDILVSHILDCCNKYKIQKVFIGLESTSVYGWHIQYYLADHVSLKPFNPSVTTFNANTVKAFKKSLGNLPKNDWVDAFTIAEKLRFGRLPKSCPVDFRYLALQRLTRHRFHIVDSIVREKNYFLSNLFLKFSGLCQIKVFSNNFGTAATEIFNEFLTLDDIAARPLEDLIAFLVDKGRDHFNDPNATAKLLQDAVRKSYRINANVNDSLNFVIKSCLDNIQYLEKLKKASEKTIANEVKGFKNQFLCLTSVNGIGPTIAAGLISEIGGISRFDNDNALAKFSGIYWSEYQSADFKAEDTYLKRTGNEYLRYYFIQAADQLRKYCPEFSQYYARKFNEGKTHKHKRALVLTARKAVRLVFALLREEKLYKPPAMKGDDCKY

SEQ ID NO: 303682 - protein, 425 aa, unidentified
MLGVGIDWSEEFHLVALGRPGEGVIDISRVEHTPTAVDTLVGRIAGLEPDPAEVRVVIETRHGLLVERLIDAGYVVVPVNPDLVARRRGPAKKKDDSEDARIACLIALDRHERLRPLIPHGEIAGELRSIARDDERAARDERRLGNRLRQDLIATFPAALQIGGDDLGAPTFLRLLERWPTANALAGASREELVAFARSCRHGWPERFADRVATSLAADHFRPKEYLVRAKADTIRLAATQLLAIARQRRAWERRMGELLLGAPRRGRDHQPRGDGLGNGFPDGEIYLSFPGLGDRLAARIAGEIGDHPEQFDSPSSLQCYAGKAPVTRRSGKSELVVACRLAHNRFLGAAVQQWAFCSLKRSGWAREFYDAQRARGKGHHAALRALGDRWLEILWHCVRRGVLYDETVHVANRNRALGRTAEAA

SEQ ID NO: 303683 - protein, 423 aa, unidentified
MMKLKYSICCGLDVHKNVIVATIVTTNKDGISEYLQKSFSTINSDIQRFHNWLIENNCYHVCMESTGKYWIPIFNYLENDIDVCLTHPKYVKAIKGKKTDKKDSKWIADLYKFDLVRCSFIPPKDFRQLRELSRYRFKLVCMKSSEKNRIQNCMTISNVGIASVLSDPFGKTATEIISYLLEHTADSMDEKAVRKLIKKGAKSKSDEIIEAIKGYTIETDQAKKLELARGHLEYLDDMITQTEVELYVRIKPYYEFVEFVSTMPGMTELSSTIVLAETGVDMDIFDDAKHLCSWCGLSPANNESAGKKKSVRIAKAGDYLKPMMVQCALAAIKSKKQPYFAIKYGRIKKRREHKKAIIAIARMMMVCIYHMVSEKKPFTPTDYEELMDPQNHVESVVLNENNVFAYLESLGYDSSKLVKRNDN

SEQ ID NO: 303684 - protein, 337 aa, unidentified
MTKITLIGIDTAKQVFHLVGVDAKGHYVWRKKLRRTQLLSRLAKLEACEVVLEACAASHHWARCMGESGHKVRLIAPQLVTPFRRGQKNDYRDAEAIISASLSPGMHFVGVKRVEQQSEQALHRVRSRVLSNRTAAANGLRGLLGEYGQAYRKGMKSLREGARCFAGTTLARELGLVDLIEDVLEEIQGLQQRMDYYERQIKQRVKTDAISARLRDELSGVGPLSASALRVKVADVREFRNGRNFAAYVGMAPAHRGTGGKVKIGKLKRGHDRYLRQLMIHGARSVVTHLGNKQDPQSRWLRELVARRGINIASVALAHKNVRQAWAILAQEQALQG

SEQ ID NO: 303685 - protein, 381 aa, unidentified
MSAETTHTNQYTTMQPHLYMAFELSQTKWLLGFTIGFGQRPRLRNIAARDLAALQTELRLARERFGLGEQVPVISCYEAGRDGFWLHRYLSSMGVSNLVVDSASIEVNRRAKQAKTDKLDLGKLLTMLIRYEAGEKKVWRVVHGPSSAVEDHRHLHRELADLKAQRTQHTNRIKGYLSNQGICLEVRDDFPEQVEHLHLWNGESLPPGLQARLLCEYQRFQLVQQQIKALEAERRETIRNSTQPEAEQVRRLLRLRGIGINCAWLYIMEFFCWRAFRNRREVGALAGLTPMPHKSGEEDRELGISKIGNRHIRAMAIEIAWIWLRYQPNSELSRWYQRRFGKGSERLHKIGIVALARKLLIAIWRYLEFGTLPTGAVLKST

SEQ ID NO: 303686 - protein, 357 aa, unidentified
MKITKKKVIGKAYVGIDVHKTSWKVCVLSSGGFKKEFSCNPQVEALVASLENMLPDFEFQCAYEAGFSGFWLADGLNETEGFNCIVVNPADIPTSDKERAQKEDKRDARKIASQLKAESLEGIYIPSAEDIAFRELQRLRSTITKDLVRSKARIKSFLFRSGINITSQEFPDSKQHWSARFIKRLNELPIENSALRFTLTQLVQTLINLREQQKTVLLELRMQIRNSKKEKMHEALCKITGIGEITSATIISEVIDINRFSSYEKYHSFIGLVPSTNSSADIEVVRGITNRANKRLRKVFVESAWIAIRKDAELHHLYHSLKMRMKPNKAIIRVAKKLANRVRFTLLELENEMLITT

SEQ ID NO: 303687 - protein, 362 aa, unidentified
MDNLLFDSCGIEVSAKTLLVRRSQGENTLPTQTFANTPAGHRKVIRFLKPQGRPVRICMESTGTYGLDLALALGGIAGLELTVANPRAVRRFAQALQVRGKTDRLDVEVLQEFARRMPQQRWLAPSQACLQLRALARRLEDLAQQRTIEKNRLHALSVTNSTPAILLRQLKLTVQRLEQDSQEILGEALRLIEQEANLKSRYQLLLTITGVGKLSAVQILAELAVLGEERTARQWVAFAGLDPKPCQSGSSVDRKACLSKAGCAHLRRALYMPALVAASHDPQVRNFYNHLLQRGKLPLQALCAIMRKLLHAIHAMIRTAQPFDSKRLFAPHLHADTKPHSPEPAANNIPPSPPEISALSSP

SEQ ID NO: 303688 - protein, 406 aa, unidentified
MMNAVGIDVSKGKSTVTIRRPGDEIVLPPRDVRHTRSGIDALIDQIKSLDGETKICMECTGRYYEPMATWLTEAGLFVSTVNPALIKAFGDDSLRAPKTDKADSKKIARYTLDRWAKLKQYGRMDETRNQLKTMNRQFGFYMDQKTSMKNNLIALLDQTFPGANDFFDSPARSDGSQKWVDFVYTYWHVDCVTGRTLDAFTEHYRNWCSRKGYNFSAAKAKTIYDVSKDLIAVFPKDDVTKMIIHQAVDLLNAASKTVETLRAKMDETASKLPEYPIVMDMNGVGPTLGPQLMAEIGDVMRFEKRGSLTAFAGVDPGKNESGQYVQKSVPTSKKGSPHLRKTLFQIMDGLIQRSPVGDAVYDFLNKKRAQGKPYYVYMTAGANKFLRIYYGRVKEYLASLAANKSE

SEQ ID NO: 303689 - protein, 324 aa, unidentified
MEAEAVYVGIDVSKAGLDVAVWPGAERFRVGNDPRGIAELVEKVVALTPQAVVLEATGGLEAMAASELHAAELTVAVVNPRQVREFARSLGRMGKTDRLDALVLAQFAQSAHSNERLPKLRLPDAAEAELKALVTRRRQLVAMLTAESNRRERAPKVIRKSIVASIRALKRSIAEIEQQVREVMSDSPVQQAKAVLLAAVPGVGPQLTATLLAELPELGNLGRRKIASLVGVAPHPHESGKFYGRRRCWGGRATVRTTLYMAALSGVRFNPALRSHYRALLERGKARKLALVACMRKLLLILNAILRDSASWNPHHQLDFQHSR

SEQ ID NO: 303690 - protein, 482 aa, unidentified
MSSKTTKPICVGLDVHKNNVWACVCTDDPTDTMHFKTRKFASNHSDLTSMCEWIRATAVKALASGKAKPFNAQGPIDVYMESTGKYSTPVYNVCEEMGLNPYMVNPKHVKTIAGQKTDQKDCAWIAELGCRSLLRPSCIPDLEIRQSRRLSRTRTKLVQNRGDEMRRIQNILTEANIRLDLIFSGIQDQSARNVIEYLIETDKPVLEEVRARIRKSCKIMQFKDEKEYRKKEEELLKAFSGAKFSSSQKFELRSAYERIDHYSVQIQNYEYIMMETLNPFKEKLELLETIPGISHLSAMQILSEIGADMEAFTSEKSFISWCGLCPQSNQSNNKHKSLKTGKDGYYLKLVFIQCALNAIRNPYYKGKYKKIAARRGKKRALIAIVRKMMVAAYHMLLSGEIFRLSDSVKEEAPAMDEAEAEKKSVSAEEAGKEAAIQETAKELITLSQKISPALVKKVEGLLHQIGLMIPAVQTAVAPPELI

SEQ ID NO: 303691 - protein, 388 aa, unidentified
MIYVGIDIAKLNHYASAIDSDGVVLIEPFEFLNDNAGFYTLLSKLNSFELDDIIIGLESTAHYGNNLVSFLVTKGLHVCVINPIQTATLRKNNIRKTKTDKVDTLVIAKAIALMDHPRFVTLYDIALMQLKNLGRFRMNLVKQRSRTKIQLTAYLDQVFPELQYFFKSGIHQKTVYAILKEAPSAIQIASMHLTHLKNLLVSNSHGHFKKETALELRVLAQKSVGTADRSLSIQITQSIAQIELLDSQIDAVESEMKDIVTSLDSVIMTIPGIGPINGGMILGEIGDINRFSKPRKLLAFAGLDPSVYQSGNFTAKKTKMSKRGSSALRYALMNAAHNIVKYNQTFKEYYDSKRAEGRGHYNALGHCAGKLVRIIYKMLKDDVEFNLD

SEQ ID NO: 303692 - protein, 325 aa, unidentified
MHDKLFIGADVAQDWIDIAASGQPKMARRIANTPDAIAAWVATLAPARVSLVAFEPTGGLERPLRHALVTAGLRCARVHPNEVAALRVRRGVKAKTDAIDARLLTEFAEAELSRRGLAPLVEGDDALRDLVARRRQLLASRHAERCRASRAGTAAVRASIEAVLALLAQQLKAIDRAIAAHIEARPALARASAHLRSLKGVGPITAATLLGELCDPRIKSGDGQFGGKEIAARVGLAPRTRDSGKTRGRATTGHGRPGVRQVLFNAARCAIRWNPVMRAFHARLVEINKRPGKVALIAVMRKMLVTLNAIARDGQPWKHSTPIAA

SEQ ID NO: 303693 - protein, 338 aa, unidentified
MKLYGGIDLHSNNSVLNLVDESAKVELKKRVVNSLEAILLLLEPYHDAITGLVVESTYNWYWLVDGLMEAGYKVHLANTAAIQQYSGLKHGDDDSDANWLANMLRLGILPEGYIYPKEERMVRDLLRKRLQLVQQKTQNLLSIQGLYDRHLNKRLNSNKLKQLTAEQLTVDFFDPNVRMAVNGNLVVQQCLSQQINLIEKSLKAQLRLKDEFINLTSIDGIGLILALTIMLETGDISRFQQVGHYASYCRCVSGARYSNGKKKSKTNTKNGNKYLAWAFVEAANFAIRYNDTVKRYYQRKLAKTHMVVAKKTVAHKLARACFYVLRDQIEFDVNKAFG

SEQ ID NO: 303694 - protein, 345 aa, unidentified
MQTMYYIGLDVHKRTISYCVKDGSGVIHAEGTIPATRLNLDLWMKTLPQPWTAAMEATVFTGWIYDHLQPHAAALKVAHPLMLRAIAAAKKKNDRIDAKKICDCLRCDFLPECYMASTAIRERRRTLRYRSLLVRQMVQMKNKIGMLLMEAGVSYNKQRLHKAGYFRELLATNPDIPEGLRSLLRLCREMVVRLQKTESALVCSLEQDSLLMDRVERLMTIPAVGPITALTWALEVGDAKRFSSIKKAISYCGLCGAEKSSGNTMQRTPLSKQRNKHLQTTLIEAAKMAPRNSPALALLYDREKQKGNANRATLAVARKLVAYLMAVDRGQRNFQVVERSNSIAA

SEQ ID NO: 303695 - protein, 321 aa, unidentified
MLPALGIDISKSNFHVELSLGDNKLRHRKFANRKEGFAELAAWLTKHKTQPVHACMEATGPYSEDLALYLQQQGHTVSVVNPAQIKAFGQSELLRNKDDKPDAGLIRRFCEKQQPAAWVPPPAHLRQLQALTRHLENLAETKQQQVNRLESTKAKDVVKSLRKLIAYLDTEIERTEKQIQNHIDTHPDLKEQFELLDSISGIGTRTAATLLGEINFKQYRTARQLAAFVGLTPKNNRSGTFSGRTRLSKIGNQRVRKALFMPAIVAKQHNPIVRAFCQRLARRGKPKMAIIGAAMRKLIHIAFGVVKTGRAFNPDHELLLS

SEQ ID NO: 303696 - protein, 346 aa, unidentified
MKKIVKQVLGIDVAQKELVVCLGRMYDDLTLELYARGSFPNHKTGFAALVKWIKKLTVETTPVRFVMEATGVYHESLAYFLEEKGYEVSIVLPNKISNYFRTLDVKTITDKTAAEGIARFGLERKLDNWRRPRKVFKSLKQLTRERDQLMDQRTMAKNHLHAEKAEAFPNPDSIARTNAHIRFLNKQMIEIMKEIAALVREDAQVNNSVEMICTIPGVGRLTAAIVLAETNGFDLIRNKRQLTSYAGLDVREKQSGTSVKGKPRISKKGNRHLRKSMHMPSLAAITHAPKFKAVFARLVSKHGIKMKATVAVQRKLLEMIYTIHRTNTPYKKDYVKAKTNYETSMA

SEQ ID NO: 303697 - protein, 339 aa, unidentified
MKYTPVGVDIAKHVIQIHFINEHTGEVVDKQLRRQDFLMFFGNREPCLIGMEACGGSQHWARELTKLGHKVRLLQARFVKAFVMGNKNDVMDARAIWMAVQQPGKEIAVKTEEQQSVLVLHRTRMQLVKFRTAQINALHGTLLEFGETIHKGRAAMEREFPEALERMKERLPPYLIMVLENQYNRLNELDSLIEDIEKQLTSVARQNETCKRLLDIPGVGPLIATAAVATMGEASAFKSGREFAAYVGLVPKQTGSGGKVRLLGISKRGDTYLRTLFIHGARAVALVAKEPGPWITELKKRHPASVAIVAMANKLARTVWAITAHDRKYDRNHVSIRPY

SEQ ID NO: 303698 - protein, 482 aa, unidentified
MKKRNVFQNQSQEILSLFEMTKDRSKVMCIPIDYAKKDHVVMFCNGNGRIIRKPFSINNSKEGKDYLLDQVKKSCRHHGISLQHIVFGGEDCGSYADNFISTLRSESWLVAGVNAHDAKTQRENVQASTDRLDLLGICKMILSCRGNCSPAQSGDYLDLRTLVRQRRKMVNMTTGVKNRIHTIVDQIFPGFLNEKNSGILPFSQCSLLLMEDRFSVHQIIRRKRPTLIKLLTRCAIHQPDNCAKKLQQYATQVLKPPENHLVTLQISLKQQVKLFNCLQESTEQLEKEVAESLAQTQGAFLTSIRGIGIILAAGVCAEIGNPNKQKSLSNLVSYSGIIPKVKQTGGTQGKSKTKKVGKRCNRILKDYLVQSASHIGLHGPEELMSDYKRRDTQGQHADFGMGRRYLRMAIGLMRASQTYLPKSLRGKKSSIKGRGQYYLMTWPKLREKWRTVNALDIAFDKDMPLGQWRNIVQELYGIELKL

SEQ ID NO: 303699 - protein, 343 aa, unidentified
MGIDISKEKLNICLRKGTQTVREEEIKNTVAAIKKCVKRIEKENGVTHDDMLVCAEFTGRYIYPLACACDEMGLFLWMEDPTRIKNSFGVTRGKDDRVDARRIAEYAFRFSDKAVAYEMPDKTLASLKNLLSDRDTLSADRRKYEMQLHDQKGYMAPEDYARKKRSWSAVVKTLDKQIALIDDEIQRLVESDEKIKHQTELLKTVDGVGDRIAVSMVVLTMAFTRFETPRQFNCYAGLAPFRYTSGKSIYSKSKVSQRANKHIKSLLHLAAVSVATHMKSGEYKDYYKRKTEEGKHPMCVLNVIRAKLVNRMFAVVKRDEAYQRNYKSFTPTEKNFQKAIANS

SEQ ID NO: 303700 - protein, 411 aa, unidentified
MNNTLFVGIDISKRSNVATFMNCEGKVVGRLTFSNNGSGADRLVAKILSYYEKEDFEAIRIGLENTSVYSKNLVWFLYEHEALNEHKLSIIPLNAIMVANYKKSFLDMDKDDITDSFAIADFIRIRPGLLPFKLDDRQEALKIMTRSRYNYVQALSRMKSQFLTRLFLSFSEMEAGKPFYSIFSKTSLSLLEEEFTLDELAEKPIPELVEFLQEKGGGKFQNPEEIAKVLKKAASSSYRVPAMVRESLNRTMASDMEIMRILENEIHNCDKNIEKLMKSVPAILVSIPGISPVLAAGIMSEIGDISRFQKQESLGKMAGFKWKRNQSGKKESEDKAAVLSGNKKLRYYLVEAANRVRIHDPVFEAYYRKKYAESKTHAHKRALILTARKLVRVIFYLLKENKLYKPDVGIS

SEQ ID NO: 303701 - protein, 349 aa, unidentified
MRMVGGLDLHRRQITYDVLDVDSGEIWRGRLWQPDRSRFRHWLEREVRPRAQGSSVALAVEGCTGWRYVVEEISAAGFAPFLAEPADTQAARGRKHRAKTDRTDAQLLRELLQAGELPESWIPPQDVLEWRERVRLYKSLVDQRTLWCQRIHAVLYHHGVTIPEGAIRTERTRSMLADDNLGVSSAARERIDVGYKMIDAADAQALPLKHALQRFGTRQPACRALVEAQYGIGGLLAVVLWTELGDCRRFSRSEQVVRHSGLDVTVDASDRRRAGGHLSRQGPETLRWALYEAAKNSSHGRSPDHGYYAKVKERHDGKIAAISVARQFARRSYHVLRAVEPDEVYAIPA

SEQ ID NO: 303702 - protein, 341 aa, unidentified
MQITTIGLDIAKNVFQVHGIDATEKVVVRKQLRRSQLIKFFEAVAPCLIGMEACATAHYWARELTKLGHKVRLMPAKDVKAYVKRNKNDAADAEAICEAVRRPTMRFVMVKSAEQQGRLMQHRVRDLLMRQRTQLINALRAHLAELGIAAAQGREGVKGLLAIVAQNEDSRLPVDAHASLIVLAAQLQAVQTMIGSIEKRVVGQHRSNEESKRLETIPGIGFLGATAISATVPDPKVFRSGRDFAAWIGLVPRQDSTGGKQKLGPISKQGDRYLRRILVVGACSVLRRARQQPEKYPWLIQLLARRPFKVVAVALANKMARVAWALLAKGGTYRAPRLTAA

SEQ ID NO: 303703 - protein, 333 aa, unidentified
MKANKWIGVDIHKKQITVCILRGKEKENKVYERTLEGIQEFLKEVDNETIIGVESTTWTRDFAIKCLDKAKDVIIFNTIELSKIMSKVKKTDKIDAGCIALILKRFDKEELSKCMIKSKEYAEIKGLLKIRESLVEKKRRTKNEIISMLDYWGCYREERFRFNEKDKKWIETQKDLPESIKKEILNLIELIEIYENQIKEIEMELNKLLEKDKKYKKLLEIKGIGRITGAYVVSKIENINRFTNSKKLVSYFGLAPRVSISDGKGCNGRITKNTDKDLLRVLVQSAWIMIRYNREMLMFYNRLKSRTCKQKAIIAVARKIVIMIFYVLKQAEA

SEQ ID NO: 303704 - protein, 418 aa, unidentified
MNMNAVGIDVSKRKSTVAVLRPGGQVVVKPFDVPHLSADFQSLIKMIRGLEGETRVVLECTGRYYEPVAHELAQAGLFVSSVNPQIIRCFQGQDNPLRRVKTDKADSVKIARYTLDSWDKLKQYTLMDELRSQLKIMNRQFDFYMKHKTAMKNNLISLIDQTYPGANTYFDSPARDDGSQKWVDFLDTYWHVDCVRKMSLEAFTDHYQKWCGRKKYNFSKSKAEEIYGKAKGLIPVLPKDNFTKRVIKQAVEQVNSVSQTVEQLRCLMNETASKLPEYPVVMAMKGIGPSLGPQLMAEIGDVTRFTHKGAITAFAGVDPGVNDSGDYSQKSVHASKHGSPVLRKTLFQVMDILIKTKPDDPVYRFMDKKRAQGKPYYVYMTAGANKFLRVYYGRVKEYLASQQTRQQGAAAAGSQPCV

SEQ ID NO: 303705 - protein, 400 aa, unidentified
MNPVVGLDISKGESEIQAFLNKSIPFGKSFKIYHTSEGLNFFLQFLKDLENKTLVKPTIILEATGHYQAPVIQFLEKYNYLYIMINPLVSHQSKKTSLRKVKTDAIDAYNLCKMFYKEELEPYKKRGIDLLNLRHLTRQHEAITGLYIQAKLQFHTMLDQVFPEYRRVFGDLFSKVSLNLLKEFPTSEKVLEVCEEDLADKIHTLCKTRSYQWALKKAALLKEAAQNNPFEKIIYQSHLISLNMFIHMLLQYQEHLSILEEQIDTLAKDIEEYKIIQSIPGIGEKIAATILSEIGEIERFNHPKKLVAFAGVDPSVFQSGKFNATINRITKRGSTRLRHVLYMAVLCGIRSSRNKRLKEFYDRKRVEGKPAKVAIIACVNKLLHWIYTLLKRKETFLDLN

SEQ ID NO: 303706 - protein, 366 aa, unidentified
MDTIYIGVDFHARQQTICYLKTETGELVTCELKHQDKEVVRAFYAQFSGQIIVGLEASGYSPWFERMLEELGCEVWLGHATEIRRRARWRQKNDRRDAELILDLMLHNEFPRLHRPAVQSREVLRMLRYRQKLIKIRTMSKNSLQAIALQAGLAKGSRLFTKDGQQQLGAAEMSPVLHWQREHWLQLMEPLNQQLLETMVWFKTQSKGDVSITRLRTHPGIGLLTSLCIVHTLQPVSRFRNTRKVAAYVGFDPVERSSAERKCFLGISKAGSRLLRYLLVEAAHTAVRKDEDLKRFYQRLAERRGRPKAKVAAARKLLIRAYIMLRDEIDYAEFRHRAVAARLARRGQGPSNVPEVLIGQPASPEQ

SEQ ID NO: 303707 - protein, 348 aa, unidentified
MRFYTKQHKFYCGIDLHARTMYLCVLDQKGKILLHRDIKTSPDIFLKTIAPYRKDVVVAVECIFTWYWLADLCSEENIPFVLGHALYMKAIHGGKAKNDKVDAYKIASLLRGGMMPMAFVYPSDMRATRDLLRRRTHLARKRAELIAHIQNTNHQYNLSDMGRISRKCDRNKQGVADRFSDPVVQKNIELDTALIDHYDKLLNHLEQELSIIAKVHDADSYFRLRSIPGIGRILGLTILYEIHHIDRFPRVQDFVSYCRLVKCAKESAGKIIGSSGKKIGNAHLKWAFSEAAVLFLRRNPEAMKYRAKLERKHGKAKSLTILAHKLARAVYHILKRKEVFHPKVFFAK

SEQ ID NO: 303708 - protein, 407 aa, unidentified
MPFHAGLDWGGASHAACIVDETGRIVARLDVRHDATGLADMLARLKRVAPPAELPIAIERPSGLIVDALLAAGHPVIPIHPNVVKACRPRYRAAGGKSDPGDAYMLADILRTDGHRFRPLIAVSDEIKALRALVRGRDDLVVQRVALANQLRSLLEGFWPGAAAIFAEIDSPIALAFIGRYPTPDSASRLGEKRLARFLVQHAYSGRRSAADLLVRLRAAPTGLASDAETEARGEIVRALVGVLERLILAIAKLSSRIEQAVAQLPDGRIVMSFPRAGRINAAQILAELGDVRERFPTEEQLAAEAGVCPVTHASGKSRGVVFRWACNKNLRVAITCFADNSRHACAWASEHAREGAAIYQKARQRGCKHAHAVRILARAWVRVLWRAWQDGKPYDPARHAGAARII

SEQ ID NO: 303709 - protein, 324 aa, unidentified
MIIIGCDFHTRYQQIAMLNTETGELVERRLEHENGEARRFYAQLPKAVRVGIEATGFTQWFEQLLAELGHELWVGNAAEIRASVVRKQKTDTRDAAHLLELLVQERFPRIWTPTAAERDVRQLVLHRVKLVQMRTKVMNQLHALAMGQGLCRKKKLWSTVGRQELEALRLGPWASRRRQELLQLLDQLQASLVELDRAVQQQAAGNSAAALLMTHPGVGPVTSLAFTLTLGPSSRFRRGKHVASYLGLNPHEKSSGARSAAHGADQQAGQFDDALVAGGSRTDSGAVGSGITARLSALEVSPGQQRGQSGHRSQTGREVVLDAA

SEQ ID NO: 303710 - protein, 354 aa, unidentified
MSIAADTGLVVGVDTHLDTHTAALCDARGRALGQLQVPADPGGYAAVLAWARGAAAGSGLRWAVEGTRHYGLGLARYLAGAGEHVEEIDAGKHVGKRRQGKSDAIDAVRAARELLARPHPAKMRADGDREALRLLMCDRDNAVHSCKTARTLLASVIVTAPADLRQRLRHLPRQQRALACAALAVPAGADRQTTVLYQTLARLGQRITALASEAAGLEAQIAAIVEHTTPGLVTAEPGMGALSAAQILLSWSHAGRIRSEAAFAMLSGTAPVPVSSGRTDRHRLNRLGDRQLNRALHVIAVNRMRCHPPTQAYTRRRLAEGKTERDIRHCIKRYLARHLYRALNNQLNQALQPT

SEQ ID NO: 303711 - protein, 331 aa, unidentified
MNFNLFIGIDVSKSTLDVHLKPIGCYKAFSNDPHGFIAMVEWIMDQAGKFCHKELVFGLEHTGLYSENLILFLDQNDFAFTVIPGLELKRSLGIRRGKSDKADARNIAEYIYEKREKIKLYKLPSQTLDRLKKLASLRERMVKERAAYQVRMDEYLEQFPDSTFETYLQTQQELIHCFNSQIERVEKDIERLIKEDSSLSDQYKLINSIKGVGPQTAIMMIILTNGFSSFDNWRKFASYAGIAPFPNQSGTFNGRTKTNKLANKRIKSLLTMCASTAIQFNPEMRKYYENRVQMGKNKMSTLNIIRNKLVARIFAVITRNTPYVEIHKYAA

SEQ ID NO: 303712 - protein, 392 aa, unidentified
MLYIGIDVAKSKHDCFIIDSDGAVYTDNLRIPNNRAGFNRLLETILNALNGEPVKNAKVGLEHTGHYSINIKRFLESQGFVVTSFNPLGTNAFRKASTLRKTKTDKGDAKTIAAMLFSNESIPTLNPSYQIQELKSLTRHRFRLIGYRGKLKTSLTRIIDIVFPEFPDFVWSVHQKSSQQLLLELPTPDAIAHCHLTRLTNLIRKESRGRYGREKAVALRKLAASSIGLSDEALAFELRQTIRMIQNVQTEIDALDQKIKSIVRELDTPLLTIPGISYTLAAIILAEIGDIDNFSNPSKLQAFAGLDPSTYQLDKYTASHSTMVKRGSTYLRWAVFQAARLVAMRDKTFADYLAKKRSEGKHFNVALSHVSKKLLRTIFYMLKHNEAFVPQN

SEQ ID NO: 303713 - protein, 369 aa, unidentified
MKKNNKNRKDDARRNALQAKSRKTKLTVGIDLGDEWSQCCFLDEEGEIVEGCRVKTTREAMKTRFGELKPALIAIEVGAHSRWVSQLLSELGHEVIVANARELRAITGSDRKSDKVDAEKLARYARVDRRILRPLRHRGEEAQLDLLVIRGRAVLVKTRTQMVNSVRGIVKSFGYRMPKCSAEKFAQLKNLVPAGVKESLAPMMEALEQVQKKIEEYDERVKKLATEKYPETKVLRQVWGVGEITTVSFVLTIEDKNRFGKSRDVGPYLGLRPRRSQSSESDPELRITKAGDCFLRSLLVECAQKILSEKAPDTALKQFGKRIEARGKKKAKKRAIVAVARKLAVLLHKLWVTGEVYEPFPGARERKAA

SEQ ID NO: 303714 - protein, 409 aa, unidentified
MRYYVGVDWADQTHAVWVVDESGTKITVRTVPHTAAGFSEWGRELDEWRAQGIERWAAIERPDGRVVDFLLDHGVVVYPVNPKALDRARDRFRQSGAKSDPFDARVLADFLRTDHRHLQALQPSSDAAQELKLLTEDCQRHIRQQTRLVNQLTATLKAYYPRALEVAELTTALAREFLQTYPTPEALTTLTARQWQRWARGRRVSAARIGALWAVLHQPQLPVPAHVVRAKARLMQSLVEQLTPVVTAVAQYRTAIDDFFARMPAAQWARTLPIGKHGITAPTLWARLGDAPGRWESFRHLQAQAGAVPVTKRSGKQRVVHFRFACDKSLRHVVGQVAFLSLLSSDWARAYYDQQRARGHAHHQALRALGAKWLKIIFVMWHRQVPYDEPYHLATMTRQQLRQRQTTIA

SEQ ID NO: 303715 - protein, 406 aa, unidentified
MQGPVITVDVSKGSCHYQPYVSNGHPMRKPKVLHDTVEGFQSLSDLIDTMKDRYECETIPVIFEATGVYHHCLQKYLDDHQIPYYIISPLMSASYRKTTPNSNKTDDLDCSHIAKAYYGECNLFPYDKPSKSFHNLRELNRYYECELNHLRMRKNTFRKYLDIVYPRLDKCFKGHSSLYDEIPMEVIKQYPHPSLLLKHKEETIVKKIEKKTSHNALFIQNIVHEMYECSMHCYSGADVTDVESMILPELVDDLQSQKERCDEILKQLVSEAQKTPYFTSIVSIVGIGDNLAARIIAELGDMSRFSCRRAITAYAGLNPKIRQSGDMDGIHLAISKKGNKHLRCLMYLAVSCNYRLKKGDVLYEFNQKKRQQSFSLLKPKAATIATAHKLLLIICALCTNGTVYRS

SEQ ID NO: 303716 - protein, 437 aa, unidentified
MKRSRIQVGFDISKKKLDMCILEPDGQVVVRHRSFANTMTGYQEVKQTLIPFLGSDSWDGVDLGGESTGYYWLPFFMQLGEDTDLANYDLNTYVLNSRQVHWFKKGYAEDDKTDQKDSFYVTEKLRTQRRKHVWQPDLDWLRLRFYTRYRFHLGQNLTRMKNYFWAHMFLMCNTYSKGKPFSDGLGACGRALVRTYPDWQELQELPIETLIEQLASWSGGQLPDPAQDVRQLRKIIQQSFPLHPDLCIALHDLLSMTIEHIAFIEKQIVQVEKRMENEIRRHHPEVLHLIDIKGIGIVFAAGIAAEIGDLERFFHGQKWDCRKKRFRNKNLRDVEDAVAKFAGIWWPRKESGDFIGQERRMNKKGNRYLRYYLVEAADKLRQYLPEYQAFYHRKYAETKKHQHKRALVLTARKSVGLFVGLLHRNEPYRSPEVNLTI

SEQ ID NO: 303717 - protein, 412 aa, unidentified
MLKIVYPICCGIDIHKTFVVACIASTDSKGVTTYKSKRFSTYTKNLRELADWLAANNCKDVCMESTGKYWHPVWNMLESTCNPVLAHPKYLKAIRGKKTDKKDAKWIADVFKHDLVSGSFIPPLIIRELRDLMRYRFKLTNYTTGEKNRAQNCLTTSNIQLDHAFSDVFGKSATKILDYLLENPNDKNFDVTPFVDRRCRTPIEEIQLSIDGAISPEQAEKLKVIRSHMTSLQLCKANIESAILNIAEPFLPQINLVASVPGIKDFSAIAVIAEIGVDMSVFPTAKHLCSWAGLAPQCNESGGKKKSSRVSRAGAYIKPLLIQCSNAVVKSDKHPEIKNRYLSIKKRRGHKKAIVAISRMLLTAIFHILTKNEPYNAELYRQADIPPIDPIENAIALLIKRGFDVSHPGMTT

SEQ ID NO: 303718 - protein, 403 aa, unidentified
MFAGIDWASEEHAVCVLDDDGRAVDRFTIAHSADGFDRLTTRLARHGTAAELPVAIERPDGRLVDRLLEAGHPVVPVKTNAIKAWREAEVLSGAKSDPGDAEVIADYLRQRRGRLRVLLPFSGETRALRAVVRSRTDLVEQRVAAANQLNAILDAFWPGARAVFADIWSPIALQFLERYPTPASASRLGEARMAAFLTKHGYSGRRPAAELVERLRAAPAGIPAGPEAEARRDTVLAMVRVLRALGQAIKNLDRSVAAHLDEHPDAEIFRSLPRSGQTNAAQMLAEWGDCREAFDNPEAVAALCGAAPVTKKSGKHMAVHFRWACNKRFRNAMTTFADNSRRASPWAQAIYQAALDRGHDHPHAVRVLARAWIRVIYRCWVDHTPYDPARHGAIARMNQPAAA

SEQ ID NO: 303719 - protein, 347 aa, unidentified
MKNTVIGIDISKKSTDWCLMRGTEIVSYHCVDNEASAIEQQLQELMDLYLIDKCDLMVCAEHTGHYIYPLAIACQNKQVDLWLESGYNIKCEARKERGKSDKEDSRRIAEYGYKNRQDARYYSIPEHDITVLESLLSERSDYVVERAKLEGQLNDQKGYTDMEVYKAKAKRLKKLIRQYDRLIEETEKELERLMRENKTMGHQAALLETIPGVGRQTAMRMIAATKGFTLFENGRQFCCYAGTAPFEYSSGTSIRSKHRVSQRADKSLKAMLHLCALTVSRRCKPNHFSEYYQRKVDEGKNPMSVLNAIRSKLVLTMFALIKTNQPYSPEIVHNYVEKFSLKPIAIS

SEQ ID NO: 303720 - protein, 332 aa, unidentified
MENFYFIGVDVSKRKLDFCVMLQGKVLREDQVSNHQQAIKALINEFKNDLGMDNNQFLICAEHTGQYTYPLICACKLHECKLWLENPYQIKYSSGMQRGKNDRIDAKRIALYASRFGDKVRYYDGPTEQIERLKQLERERDLYTGHLAAYKAQLKDQKDFMPEDIYQRKAKRLDSVMRNLQTVIASITTEMENIIRSTEVLYRQMQLLMSVDGVGKVVALNMIIETGAFTRFNDSRKFCCHAGVAPFSYTSGSSQHSKNKVSHKANKSIKRLLHLAAVSVIHKTGGQLKEYYLRKVDEGKNKMLVINALRAKIVARMFAVIKRNEFYEPIYI

SEQ ID NO: 303721 - protein, 332 aa, unidentified
MVPRIKTPEPSAERVGIDISEEKFDACLRYKDGKPKAHFKLNGQGMDQFRQWLKRHGIVSPELWMEATGRYFEKLAEWAIKLGWKAVVINPRAARYFAISKLKMNKTDPLDAEVILRFAESSDQDEFNYWMPRSAARKELRDLQVAITGLKKEIGQERNRLKCGLISECVKATIRQTIDYLKGQVKKLHKESMRVIKADPDLGAFHACLKRIKGFGDVTIALVLWKIDFHAFRKGRQLVKFAGLDSAEWSSGKSVKRKAHISRVGHAELRSALFLPAVAAMTHDSEMKAFAEKLIARGACKKVAICAVMARLLRISFALVRDQREGTLAIAA

SEQ ID NO: 303722 - protein, 419 aa, unidentified
MNQQPAQPGLFIGMDWADQKHDIYVIDRNGKGFHQQLEHSAENIDAWVGEMLKLAGGQPIAIMLEQSRGALIYALMFREDVLLYPINPKQLARYRESYPGGGKNDPTDAMYLARMLRERITTLTAWQPDDENTRLIANLSQQRRKIVDGQTKLRLQLKALLKSYFPVALELFGKQRQLPLLLSVLCRWPDPRKLRRADRQLIRRVLREHSIRNEEQQSEIIERIRSAQLLTRDDALITPSAMAVKLLANQIQQAQKTIEELDTQIAEAMKRHPDAHLFTNLRGAGSALAPRLLCAFGSQRDRWEDAESLASFSGIAPVTIKSGKSRGVYRRYACPKYLRQTFHEFADCARRYCPWSKARYRMLRDRGMKHHAALRKIARSWIRILFRVWQTRVPFDCDRYIAKLQQRCPEITPYLAQEN

SEQ ID NO: 303723 - protein, 392 aa, unidentified
MNNQTYFCGIDVAKDFFVVSIKNGSFVIKNKIFNMDIDGFQNFQQTINNFKNSIIIGMEPSGIYHLNLFNFLKSHNYNTIILNPYTLHQFFKFTNNKPSKTDKKDSQTIAQFLEFNQNQLQTINKDDQRYHLKYFLREKEKIIHQIAQTKTEIKRIISIIFPELEKFNIFTNNILSLLAELGGAYTIKNMPKDEFIKKAQQICNTNPKGRKNILSYEKIYQLAQNSIASYYPEYEIIIKFKINKLNNLIQQKYILSNIIQQHAQNLFKTQIQILTSIPGIAKETAISFIAEIVDIKRFSNYRKLVGFCGLDPIIKQSGKFKTSYKISKKGNAHARRIVWIMANCTKKYCPYFRNYYIKKRNQGKSFKEAVIAVASKLLRVIYALLNENRTFK

SEQ ID NO: 303724 - protein, 334 aa, unidentified
MADKLDSVIDVIGIDIGKNSFHVVGLDGRGAVVLRQRWSRGQVESRFANMPPCLVGMEACVGAHHLSRKLASLGHDARLMPAKYVRPYSKGQKNDFNDAEAIAEAVQRPTMKFVATKTAEQLDLQALHRVRERLVSQRTGIINQIRAFMLERGIAVRQGIGFLRTELPSILATRTDALSPRMLRVIEELAGDWRRLDQRIDSLSGEIEALARQDQACSRLMTVPGIGPIISSAMVAAIGTGDVFSKGRDFGAWLGLVPKQISTGDRTILGKISRRGNRYLRVLFVQAAWVVLVRIKDWERYGLKSWIEAAKRRLHRARDRACQQACPHCLGGAG

SEQ ID NO: 303725 - protein, 351 aa, unidentified
MEKIIKQAVGIDCGKQELVASIGFLDRSLQTSIKATHTFSNDKPGGKALIDWVKKYADPKAPLQLVIEPTGVYHERFCYYVTSLGYSISIVLPNRAASFLKTLKVKTINDRISASGLAIMGLEKKLDNWIPPKVVMKQLKQLCREREELTEDITSIKNQLHALTSSAVYAETSVQRLQQRLAFSQAQLKEIEQELKDVATADADLKQRFDNVCTIKGIGLITAITVVAETDGFSLIRNQRQLVSYAGLDVIKKQSGTSVNSAARISHRGNRHIRRALHFPSLAAMRFDENMQSFYGRLLSRHNIKMKAAVAVQRKLLVLIYTIWKKNEPYNPKYLEQSKKTALIELAQGRS

SEQ ID NO: 303726 - protein, 365 aa, unidentified
MNTLPTNIPTIETPLVSSEKRAKRIKLGVDVHADHYVVVRQIDEAAAQPPQKFTPELFLVFARKQLALAEEVHCCYEAGPFGYVLHRRLTAMGVHNIVVRPRNWSTYGEAVKTDGRDAGALCSCLDRYLAGNRGALAPVWVPSEAQEQLRAVGRQRQSLRQERVRLTLQGKSAAVLCGLRLPKEWWEPKRFAALVGELPVALATQLQCWQRVLVCVDTELTALTMPLEQQQTAPRPLGVGALTLELLSREVGDWHRFKNRRQVASYTGLCPSEHSSGATRRQGAITRHGNPRLRHLLVEAVWRLFKFQPHYRALVKWHGELLDPKLTRSRKKKIIVAVARQLAVDLWRLATGRTDAATLGLKLNA

SEQ ID NO: 303727 - protein, 342 aa, unidentified
MEYYAGIDVSLECSSVCVVDASGKIVREARVASEPEALIAWFGALGFSLERIGLEAGPLSQWLFAGMKGAGLAVELLETRHVRKAFEAMPVKSDRNDARGIAQLMRLGWFRPVHCKSMSAQETRSLLTARKLVQSKLQDVENSLRGILRGFGLKVGKVTKREFEGRIEELVAGHPHLQTIAEALLAVRAVLRTEFAAFEKLTRRMARSDLQARLLTSIPAVGPIVALTYASAIDDSTRFKSSKQAGAHFGLTPKKYQSGETDYTGRISKIGDAAVRTALYEAANVMLTKPVKGCSHLKSWAMRIKQRAGTSKAKVALARRLAVIMHRMLADGTPFNDAAAAA

SEQ ID NO: 303728 - protein, 346 aa, unidentified
MTIVAEKFDHVIGVDTHAKTHTLVVLNPSGVLLKADTFPTSGPGLRRAQNWIGRNAPGEILVAMEGTGSYGAQFAQLLENAGIVVAETKPPKRGARRNGKSDEIDAELAARFALFQPVEKLLVPRRNHGDRTAIQVLLVGRRYRTHERTAAVNRLTALLRIHDLGVDARRSLAAATIDTISHWRPRVNDAAATAVIRTEATEIAARIRTLDAELTRNETALKNHVTALAGWLLDEFGIGPVTAAQLLASWSHKDRVRNEAAFARLGGVAPIPASSGNIVRHRVHRGGDRQLNYALWVIANSRTMNDPATKPYVERRIAEGKNRDEILRSLKRYIARSLFRKLQQMS

SEQ ID NO: 303729 - protein, 333 aa, unidentified
MGLEPEPSKEGSWMMAQNDLVVAGIDVAKDKVDGCIRSLSLRRTFESTAEGRHELTSWLRRHKVAKVVMEASGGYERQWAKALRDAKIEVRIVDPKRVRSFARSAGRLAKNDTIDAEMIAWFAETFDEARGQAYDATREQLHQMVNARQAMKDMQAKLESQGEHAVPAAVQRMHARISKKIAVELVKIEAAISALIQATPRFTELAEIIESVPGLGRTTSAALIAAMPELGQANNKIVAALLGVAPYDDDSGRRRGERHIKGGRRRTRNVFYMACLGAATQHNPVLKAFYDRLVAKGKEKKVALIACMRKLISILNIMIERRQKWDANRYALS

SEQ ID NO: 303730 - protein, 400 aa, unidentified
MQGNCIAIDVSKDKSHIQGFRNLNEPISKAMEIGHDREGFKKILELTNQFTRKEEDKPKVIFEATGIYHRGLQCYLEQNGLEYYIVNPLQSAKCRKQDLRTKKTDKRDCVNLAKMFYTMELRKTTIEDEKYYKLRQLSRHYEDILNHLRKAKVSFNATLDIVYPKYQDVFDKLYTTSSMAILRKYPHPDELGRKHPETVAKQLMRCGDHTEAWCMAKAEQLIAYAKTTVSGCRASDINVRIMVEELDQVEHYLGLAETTLTQMIQIAETIPNCKVIRTIPGIGDNLAARLLAEIGDISRFLGSKQLIAYAGIDPIIYQSGQMDGLHLKISKKGNKRLRCLLYLAVTCNLRTKNEANTIREFYNKKTRQASPLCAKAASVACANKLLRIIYGMCKTGTVFK

SEQ ID NO: 303731 - protein, 344 aa, unidentified
MYHYAGIDVSLESSTICVVDGAGKILRETKVASEPEALIGWLRSLGLALERIGLEAGPLSQWLFAALRGAGLAVELLETRHVRDAFKSMPVKSDRNDARGIAQLMRLGWFRPVHCKSIEAQETRAILTARKLLQSKLRDVENSLRGVLRGFGLKVGKTTERTFAERIRELVAGHPGLELVARALLEAHAVLRHEFNGLDKHTQKLARLHPPTRLLMTTPAVGPIVALTYAAAIDDPKRFRSSKATGAHFGLTPKKYQSGQTDYTGRISKIGDAAVREALYQAAHVMLTKPVKGCPALKSWAMRIAKRAGMRKAKVALARKLAVIMHRMLADAKPFNPMAKAMAT

SEQ ID NO: 303732 - protein, 346 aa, unidentified
MGKSIIDLSSVATVGLDLAKHVFQVHGVDASGRVVVAKAIRRNKLLEFFASLPRCLVGLEACGSAHHWARELVKLGHDARMMPPAYVKPYIRRQKNDASDAAAICEAVARPSMRFVGVRSLKNQAALMRHKTREMLVSQRTQLLNALRGHLTEVGVIAPQGPRHARELAKLIEACDEKIPFEVCEALAPLVVQLRNLGEAIARLDRIIARLAQKDETARRLMSIPGFGPITASAMAATIQDTSSFAGPREFSAFLGLTPKQNSSGGKQKLGRISKMGNRNLRKLLVVGAHAVLFHRKPHTDPLRMWAKKLIEKKPFKLVAVALANKMARIAFAIMRGRTVYREIPA

SEQ ID NO: 303733 - protein, 390 aa, unidentified
MPLDHHSEEPTAIRTNLGAIFVSLELSRSTWLITSLSPGGGEKMSKHSVSAGDIAALLSRFSELKQKAFARVGQSFPIIVIQEAGLDGFWIHRVLQSEGIESYVVDAASIATSRRRRRPKTDRIDGEALVRALLAYKRGEPRVCAMLRAPTPEDEDRRRLCRERKTLTVERIQHVNRIKGLLFSQGVSGYEPLRRNRRQRLDELKTGDGRPLPPHLKGQIGRELDRLELLLGQIKAVEAERDALLTPATETEGMPAPQAVLIDLKGIGAEFAAVVWSEGLCRSFANRRQIAAYGGLAPTPWQSGSVAREQGVSKAGNQRLRTTMIQLAWLWLRHQPNSALAQWFKERVKRNGGRLRKTTIVALARKLLVALWKYVTAGVIVEGAVMKAVS

SEQ ID NO: 303734 - protein, 367 aa, unidentified
MKKNITARQSPEGGKRVSQPITIGVDLGDKSSRYCELEGDAMREGSMATTKKAMLQKFGSLRRCRIAIEVGAHSRWVNRLLTGLGHEVYVANARQVKLISESSRKDDRLDAQTLARLARVDPQLLRPIRHRSEEAQQDLNVIRVRERLMDMRTSAVNAVRGMSKASGERLPKCDADQMGVERSEALPQQLQETLKPLLEAVESLTEKIQQCDRKIEQIARDKYPETKLLKQVSGVGTLIALTFVLTLEDRARFQKSRDVGCYVGLRPKRSESGARQPQLGISKEGDLYLRKLLVQGAHGILRHRGPDTDLKRWGLKLAERGGRNAKKRAIVAVARKLAVLLHKLWVCGEVYEPLRNSLARQRLRPAA

SEQ ID NO: 303735 - protein, 384 aa, unidentified
MKKNSSRSVEMKATAYERNSGVRNAAGRTVIQPSDYLAVVGLDVGDRKTHYCILDLDGDLVVEGEVATREASLRVQFAGKGRMRIALEAGAHSPWISRLLVELGHDVIVANPRNVRMISRSDSKNDPADARLLARLAHVGPELLSPIQTRSQQTQVDLALVRARDVAVQSRTKLINTVRGIVKSTGHRVPKSSTLTFARKAKDACPEALQPALLPLLRVIEELTREIELYEKLVVHKAEAEYPETKAIRTIHGVGHLTSLALVLLLNNDRSRFRKSRDVGCYIGLRPKQRESGLRAPQLGITKAGDPLLRRLATQSAQYILGPFGKDSALRRWGLSLALRGGKNAKKRAVIAVARKLVILMHRIWITQEVYEPLRGVTLKSTAA

SEQ ID NO: 303736 - protein, 387 aa, unidentified
MPQPNDLSRSLVALDQNSTIIAVVELSQSSWLVGGVVPGIERQPRKKLEPNPERLLALLHRWQDEAVRAGHTITRIAVAFEAGRDGFWLARWLEARGVEAHVIHASSVAVSREHRRAKTDRLDTELLKRGFLGWLRGERGHCSMARVPTIAEEDAKRPNRERDCLVGERTRIVNRIKSTLARLGIRTFKPTLRKAADRLATVHTPEGVPLPPNTLAELQRDMARLGLVVSQIRQIEEARQKRLEQQHEAGPHAMVRLLARIVGVGVETADMLVHEVLSRAMRDRRAVARYAGLTGSPDESGARRREQGLARAGNARVRRGMIQLAWRFLMFQKESALTLWYRGRTADSRRGTRKTMIVALARKLIIALWRFVTTGEPLEGVVLRPAT

SEQ ID NO: 303737 - protein, 312 aa, unidentified
MVEHCYGGIDVSKDRLDVQVLPQGRCFSVANTSAGWSQLVDRLRGLSIAALGIEPSGGYERGVIRALLAAGLSVRRINPNKLRQFARARGVLAKNDRLDARLIAEYVAIMPTRVVHRDPAAEQLAAVVTMRRQLSDEHVAVENQTAHIEDAMLRRLNKRRLARLEADILLLDKRMAEIVASNANLARRYDLLTSMRGVGPTLAFTLIALLPELGQMSRKQIAALVGLAPYDFDSGKLKGHRCIYGGRIPVRNVLYMAALSAARYNPALKTFHNRLAAANKKPKVVIVAVMRKMITTLNAMLRDNVAWQPKSA

SEQ ID NO: 303738 - protein, 354 aa, unidentified
MIIIGVDYHPSFQQIAFCNQDTGECGERRLNHSDGEAKRFYRDLQQPGIRVRVGMETTGYSRWFEQLLAELGFEVWIGNAAEIKTQRVRKQKTDRNDARLLLKLMREDRFPRIWVPSPENRDLRQLLWHRHRLVQMRTRILNQLQALAMNEGRHWKMKLWSEQGRAELEKLALAPWASRRRQELLELLDRLHPTIEDLTAAVEQEARKRPEVLRLMTHPGVGALTALAYVLIVGTPERFRRGKQVGSYVGMIPKEDSSGGKQRLGHISKQGNSLLRFLLVEAVQAAARINSEWRRRYVHLAMRRHRSIAKVALGRRLGIRLYWMWRNGCEYSASLEFGSYAGQLGTGHGVTAAP

SEQ ID NO: 303739 - protein, 391 aa, unidentified
MVCVGIDVAKDKHDCCILDSDGTVRADCFTIPNNSDGFKSLLQTIQDCTQKSDKIKVGLEATGHYSYNILGFLLDNGLPTYVINPLHTNLYRKSLSLRKTKTDRVDARTIATMLLSDVDLKSYTDAAYHNEELKSLTRYRFDKVQERAKLKQSVSRLVTILFPELEQLVPILHIASVYSLLSEYPGAKQVSEVHLTKLTNLLATVSKGRYGKDKAIQIRDAARTSIGSVMPAKSLELKHTIKLIRELTSEIDEIEDSIQQIMDELHPPLLSIPGMGIHSAAMILGEIGDFSNFESPDKILAYAGCSPSTYQSGKLTNCYAHMEKRGSRYLRYALYNATKYVCYWNPVFTEYLAKKRAEGKHYNVALSHATKKLVRLIYALQKSGKTYLTAA

SEQ ID NO: 303740 - protein, 354 aa, unidentified
MIIVGCDYHPSFQQIAFVDTETGELKEQRLVHREGAEDFYRALAASGQLVRVGMEASGHARWFERLLAELKFELKMGDAAEIRRKRGRKQKTDRQDALHILGLLLKDDFPPIWVPSGENRDLRQLLWHRHRMVQARTRIMNQLQAVALNEGLLCKKKLWRERGRQQLEAFRLAPWASRRRHDLLELLDRLNPTIAELSRAIEQEAEKCCAAQRLTTHPGVGALTALAFVLIIGDAKRFHCGKQVASYLGLVPLEDSSGNRRRLGHITKQGSSMLRFLLVEAAQVTVRSLPEWRGKYVHLMMRRGRKTAKVAMARRLAIRLYWMMRQEWDYQQWSKFGSHAGQPGTGDGVPSNIE

SEQ ID NO: 303741 - protein, 311 aa, unidentified
MSHVFVGIDVAQDHLDVHVLPSGEAFASPNDPAGVATLVQRLQAARPALIVLEATGGYESLVAAELTAADLPVAVVNPRQPRELARALGILAKTDRIDARTLALFAEKAQPRCQTPRDERELRLKALVTRRRQLVTMRTAELNRRPLATAEVRKSIDRVVKLLHRQIEELEHDIDGTIRHMPQWREKDDLLQSVPGVGPGTARTLLAALPELGTLNRRQIASLVGLAPFNRDSGQWRGQRSIWGGRGEVRAALYMASLAAVRFNPQLRAFYQRLRAAGKKAKVALTACMRKLLVILNALLRTQQKWQPQNA

SEQ ID NO: 303742 - protein, 396 aa, unidentified
MINDVTIYVGIDFSKEKFNACLLMEQGVMGESEFPNTKTGYLKLTKWVKNTSELGRSFDSSLVLFCGEHTGTCSIGLCEYLYAKGMKIWLESALKIKYGSGLKRIKDDKADAEMIAYYAKRFYEPGSCALFEPDSADLKTLRTLYQFRNRVVCDRVAIGNRISSGAFDCSTLVRNRMVKHHKEARKDEKDIEKEMVKLMETSEELASNYQILISFKGIGPITAAALIIYTSNFKKFDNPRKFACYCGIAPFGKQSGTSINTKPHVSRFAHIGIKAAMVQACKSAMQHNAVIKAYAQRLYAKGKHEGIVMNNVKNKVMHIIFKMIQTQTLWEQEYQQKHTKECKAIPGKNGIGATEAAPIINATLKTSSSVVECTFLEKHSFQKNSKKTSSFSCVET

SEQ ID NO: 303743 - protein, 346 aa, unidentified
MTNITTEVIGCDLGDKQSELCLIQTDGTIKTGRVKTTCFAMSRFFNRARAHVVIEVGAHSRWVSELLQELGHQVTVANPRRVQLISKSQSKTDRTDAELLARLGRADVALLSPIQHRGRQAQADLAVAKARDVLVATRTKLVNHARGVVKSFGERLPTCTAESFRRRTLENVPADLKAALDPLYAALEQIDTQVKVLDGTIEQLAKKYPDVAVVSQPHGVGHLTALAFMLTIEDKNRFKKSRMAGAFLGLRPRKDQSGNGDPQLRITKAGDPFVRRLLVNSANHILGPFGKDSDLRRWGLRLAERGGKNARKRAKVAVARKLAVMMHRLWVTGEEYKPVGYPQRAV

SEQ ID NO: 303744 - protein, 359 aa, unidentified
MQTQSNKIDFNGQNIYVGFDVHLKSWTVTIMTDKLTHKTFSQPPSPEVLHHYLVKTFPGGTYHSAYEAGFCGYWIHNKLTEFGIKSMVVNPADIPTTEKEKVQKTDPRDSRKIARSLRNGDLKAIYVPSLTTLEDRGLVRTRATLVKDLTRFKNRIKAFLYFHGIEFPDTFKASGTHWSNRFIKWLEDVEMSTPSGKASLNAYLTQSKNLRVSILQVTKQIRDLANTDNYRNQQLLLRSIPGIGLIIAMIILTEIENIGRFNNFDQLCGFIGLVPSTNSTGDKIIIGDITPRGHSILRSAIIESAWIAARLDPALNKSYHDYCKRMESNKAIIRIARKLTSRIRFVLKNNQNYVCSTVK

SEQ ID NO: 303745 - protein, 383 aa, unidentified
MEATRIGIDLAKSFFHLVAMDSRGKVLWRKALTRRRVPEFLAQLKPSMIGMEACATAHYWAREIQKLGHEAKLMHPGFVAAYRKNSKNDFNDAEAICEAMSRPTMRFVEVKSVAQQDMQSLHRIRRLIIKQRTQVAHQLRGLLAEYGITVRPSIAALRREAAALAGDAERCTAALRRVVANNLEQLTLLERQLRELDREIAHTCAIDERCRRLAEVAGVGPLTATALVAKVGNARQFASGRALSAYLGLVPGQNSSGGKTVLLSITKKGDRYLRSLLIHGARAALQVAGRYDDPRSQWAIRLKRKSGPNVATVALANKNARVLWKLLTSGQHFRVQPPVAEAERAQAAQRLASPKPAGRRAAVRLEHDARISDDFSTSPPEGN

SEQ ID NO: 303746 - protein, 378 aa, unidentified
MNKIIKIGMDVHITNYTLCIFEPSFEHDGTVHCITQVKPEVKNIIHVIETFKKKHENEELNIVCGYEAGCLGYSLYHELKEKGIECVILAPTTMKTEKGGRKLKNDYRDAKMIAECLAYGGYSAVHVPTELDNSVKEFIRMRDDIKENLKSIKQQIIAFLTRNGKQFEGKSFWTRKHIDWINTVSFSEPLLQDTLKEYMIEYNHLCDRVETLDKQIEEISLKEEYVEKVQQLQCLIGIKTHTALSLIVETSDFNRFKKGNMYSAYLGLIPGDDSSGGQENKVGITKAGNSHLRKLLVEAAQGYTRGKVGFKSKVLKSRQEKCSSEVVAYADRANERLRRKYYRMTLRGKRYNVAKTAIARELACFVWGIMTDHIDLCS

SEQ ID NO: 303747 - protein, 358 aa, unidentified
MSVYVGIDVHRKRSQVAVIDSGGEVLANRNVPNGTETILGVIGGLPPGTPAAFEAAFGWGWLLELLEDYGFDPHLVHPLQCKAIASARLKNDKVDAAILAQLLRADLLPEAWIAPPAVRQLRALLRHRAQLVRVRTLLRNRIHAVLADHGHDRPSGCWSGPGRGWLASLPLPPVSREVIEDDLALIDALQVLIDRLDWEVRQHARSDPRVKILTQLPGVGPFTALVILAEAGDITRFASARKLASRAGLTPTVRGSDRTVRHGHISKQGSAWLRWILCEAAQTAKRHPGYAASYTAIARRRGKKIATTAIARKLLARAWHLLADAERTASHHATATTSAPAPPAGMPATSREGSPSPG

SEQ ID NO: 303748 - protein, 316 aa, unidentified
MSQSERVIGIDVSKNFLDVAVVPENDTWSVDNDEEGIRTLIKDAKRLRPRLIVLEATGGLETAAVAFLAAARLPVVVVNPRQVRDFAKSLGKLAKTDKIDALVLAHFGEATKPEVRSLKDQQAQQLSALVARRKQLVEMLTAEKNRLMTAPEPVDNDIKAHIAWLEQRINDINKDLRKAIKASALWRAKDKLLRTVPGVGPVLSVSLLAGLPELGKLNRKQIAALVGVAPFNRDSGKFRGRRSIWGGRAHVRAVLYMGTLTAVRFNPVISAFYQRLCAAGKAHKVALTACMRKLLTILNAMMKNHAPWQPYFRETA

SEQ ID NO: 303749 - protein, 283 aa, unidentified
MIVLGADTHKRSHTIAAVAAASGELRGEQTVQVGRRGLDGLLRWARRLDGERVWALEDCRHVSGSLERFLIERGERVLRVPTHLSAGARKRARQRGKSDAIDALNVARAALQEGLDTFPAAHLDGPELDLRLLVDHRERLVRHRVELNSTLLWHLHDLWPELQLPGGALFSKKWGTRISRRLARADQTMRVRIARDELRRLRELTLAVRQLEREITELVGQIAPQLLSEPGFGPLIAAKLVGEIAGASRFATPAKLARACGVAPIPASSGNMQRQRLDQGGNR

SEQ ID NO: 303750 - protein, 375 aa, unidentified
MSSYASPRMIVYLALELSASSWVIAYRLPANEKAKLRRLEAGDNDGLLAFIADLRSQLHSSDDAEVLVVSCFEAGRDGFWLHRLLSAHGVINHVVEPTSILVTRGARRAKTDRLDAVGLLRVLAARFAGDVDACRTVNVPSVEEEDAKRPHREREFLVQERIRVENRIAALLATQGIRKRPSLRSWGADVNALRTGDGRPLPTHLVAELNRLRRGLSLTLEMIRELDAEREIALEEQQDPASQTVKMLCTVRGIGVNFASVLTREVFYRTFDNRRQIASYLGLTPTPFQSGGMDRDRRINRAGNSRARKTLVQLAWLWLRYQPESNLAAWFRERVGTLQGRARRVAIIAMARKLLIAIWRFVTLGLAPEGAIITA

SEQ ID NO: 303751 - protein, 332 aa, unidentified
MKHMSLDAHSDYCEFSVRDARGKEIDLRHIRTEAPQLIDAISSFRGEKTLVVEEGNLAGWLKRVLEPHVTRFVVSNPKENHWIARDEGKDDPVDARKLSHLLYGGFIKEVYHPSESQQRFKDLVLHCERLTRQVIRFKNHIGARLRANGLKNGGYGDRDHESLDPFTQQELAELYDALDALEGIRDRARGRLAAKARRYAQVKRFQKVPGVGPVHASVFFGIIDTPHRFKRKSKLWTYCGLGLKRRKSGGQIYRQGRNQEYNRYLKAMAMRSAQIAVNSRNDNRYKSQYGRLVEKGLDSRQAHVIVARSIVSTLWGMWRSGETYHANREHNR

SEQ ID NO: 303752 - protein, 322 aa, unidentified
MDAQPHASPSAIGIDVAKGHCDVKFPDQTRTVAFQFNDAGFKGLLEQLVRFPNAMIVLESTGGYERRLVAELVAVGHRVAVVNPRRVRDFAKALGQLAKTDSIDAHVLALFGDRMQPRESEKSSEKQQELQQLVVRRRQLVLLRTAESNRFEQTTSKLALKGIRQVLALLDKQRAKLDAEIARLIEADDDWKAKDEILQSVPGIGPGTSATLLAELPELGRINRQRVAALVGLAPFNSESSTIKGRRTIKGGRRSVRCALYMAAITARRCNPVFQTFAKRLEQSGKRFKVVITACMRKLLVTLNTMIQKKTAWNQQITPASP

SEQ ID NO: 303753 - protein, 429 aa, unidentified
MTRISVGVDVSKNRSTVCIMDQDGKVIMRPFLVWHSTEELDFLADTLKRLNGEVRVIMESTSVYQYPIALQLKERGLFISIVNAYKVKKFANTDFRGGKTDKKDSRTIASYGISYWDKLVEWQIPKDTYFNLDLLNRTYMNAKKHRQIILQELQHYIDCAMPGMDKELHPLNLSTKKDFMLDFVEKFWHRDEIVNMTEAEFTEVFTAWAKKKGYRPVEGKAAKIYAIAKSCIPYYPANPTVKTILQCIVDKLSGVNRTLVTIVTQMIEEAKKLPEYQIVREMPGVGDPLAARFFGSAGDIRRFKNSKALVAYAGIDSPPDESGDFSSTHRHITKKGSKVFRDTGYEIMMALRAQKRTWEKVRKNPEVYDYMLKKKAEGKPRKVAKIAALNKFLRIVYARIKELYDNMALAERAKAKTRSKTKAKTKATA

SEQ ID NO: 303754 - protein, 422 aa, unidentified
MLEETQDREEIIERVAALDIGKAELVCCARVPGPPGKSRRVQEVTTYKTMTRALLVMVDRLRELGVTRVVMEATSDYWKPPFCLLEAAGFETWLVNAKDVKHLPGRPKTDRLDAVWLCKVAERQMLRPSFVPPPPIRVLRDLTRYRCDQVTIRTAEKQRVEKLLEDAQIKLSVVASDIFGVSGRDMLAALIAGQRDPKVLARFARGRMRGKITDLEEAFTGRFGDHHAFLLDKMLHRIDAVSADIADLDERIDAEIAPFATAAARLDEIPGVGHTAACVIIAEVGIDMSRFPTAAHLCSWARFAPGIKESAGRKKGNGATGHGNRYLARVLGEAALSAGNTDTFLGERYRRIARRRGKKKAIVAVGRSILVIVWHLLNDPEVGYVDLGSDFYDTHLNTSNKKRNHIRQLEALGYKVTLEPAA

SEQ ID NO: 303755 - protein, 365 aa, unidentified
MTVIHYIGFDVHKKTISYCVKAADGRIVQQGKLAATRPALQAWAKAQRVPWHGAMEATLFSAWIYDTLKPYAERLVMGHPARMKAITAGKKKSDSIDARTIADLLRCDLLPTCYVMAPEMRDLRRLLRYRNMVVQQSVRMQNRMAGLLMETGTAFHKDKLHGKKYFSELIKSLQEVPESVKDLLRMSRGSMEMFESTQKQIINRLLSEPALEQRVERLMSIRAVGPITALTWALEIADPHRFASIADAVSYCGLTAAFRSSAGKQQRGPISKQRNAWLQTVLIEAAKLAPRWNPQLAALHAHELERGHANRATLQVARKLVAYLLAVDKSGQPFRVHTPAPPASTKKKTKTARKSKKAVALTPAA

SEQ ID NO: 303756 - protein, 353 aa, unidentified
MNSLTDLGEVVDVVIGVDTHVGTHSAAAVNAATGGVLGEITVEATAHGYAQLVEFADEHAVLRAWAIEGTGGHGAGLARHLAQHQEIVVELDRPKRAKRRNGAKSDPLDAIRAAREALARPRLGTPRSGGDRQALSVLLAARRSAVQAATEAQLQVFSLVIAAPEPIRARFRGQKLPGMLATAASLRVQSSWDVETTTTVRALRSLARRFRALSIEAKEHEKAIRAIVRSWRPDLLEEFGVGAIVAATVLCAWSHPGRIHSEAAFAMLAGVAPIPANSGQVTNRYRLNRYGDRQLNRALHIIVQSRIRYDGPTRDYVARRTTEGKTGREIKRCLSRYIARDLYRLLESGPITA

SEQ ID NO: 303757 - protein, 358 aa, unidentified
MVVVGADVHKRTHTFVAVDAVGKQVGQLTVAATTAGHLKALGWARREFGDELTWAIEDCRHLSARLERDLLGAGQAVVRVPPKMMAEQRRVARTRGKSDPIDALAVARGFLREPELPVATHDEVSREAKLLIDRREALVNTRTRTINSLLWRVHELDPAHAPKPRSLHLTKHQQALRAWLLSVAEGADGVPAVVAEMALDELEDVTALTARIKDFDKRLSVLARRQVPALLTLPGCGELSAAKLLGESAGITRFSGEARFARHSGVAPIPVWSGNSIGRVRMTRSGNRQLNCALHRIAITQIRLTGSLGKAYYDKKLAEGKSRTEALRCLKRRLARTVFHLLTADHHNRQTSCLPAAA

SEQ ID NO: 303758 - protein, 450 aa, unidentified
MGRRQAQVQEWEGLKVIHPNAAGLDIGSEEIWAAVASALTPATVRKFGTFTPDLYALADWLVQCGVDTVAMESTGVYWIPVYEILEACGLKVYVVNARHLKNVPGRKSDIQDCQWIQGLHSVGLLRGSFRPEADFVALRTYLRHRAALIEYRSAHIQHMQKALQQMNLQLAQVITDITGVTGLAIIRAIVAGERNPQQLATFRQHGCKRDEATIAKALTGNYRREHLFALEQALALYDFYTAQLQVCDAEIEQQFINLKPIEDDLPPLPPSTKADSHSKNGPAYDARTLLYQLTGVDLVAITGLNASTVQTIIAEIGPTVDAFPTVKHFCSWVGVAPHNDISGGKRLRSRTLPTNNRAGQAFRIAAQSVAKSPNSAFGAFYRRLKARLGANQAIVATAHKIARTFYFVLKHRVPFHDLGGEEYERLTNERERKSLQKRAAKLGMALVPAT

SEQ ID NO: 303759 - protein, 347 aa, unidentified
MQSYTHYVGIDISKHTLDVMLWHVGRHQPAKTRLQTSNDTPGHRQLVQWLEEHHAPREGTLLCLEQTGRYDDVLLEHLTLSGWMCALAKTTALKKVRPEHHRKDDRFDADLLAEYAYRFSDKLRLYEAADPVIEQIRLLYRERRRLVKKRAAVLQLHNEQGYNRAGKPNKAERLTAKLWQEQLQLYDRQIQRLEQQMDGLVRSDEDILHRFEQLKGIDGIGPKAALLWLCLFYGQSHLDARQIASRFGVAPHDRISGTSCWSPARSSGHGLSEARKILTMCARSAGAHHEKYRQYKARKLAEGKASHLVTNNIINKLIRVVCAVWNQGATYDRHHVSRFVQTATTTA

SEQ ID NO: 303760 - protein, 485 aa, unidentified
MKRKSIFRNESQKLDAAFIEAGLPERVLLVPLDFAKITHYACFCDGRGTYVRKAFTVKNTREGVDYLVDQIERTRAARSIKSKRHVIIGGEDSASYTRNFMDRLFELGYLTVRLDSKEVHRQAESVDSSTDKTALRAIAKTLLNRDARLTGGSDLYAQLRGLTRQRRRIVHLSTAVKNRIHTHADCLFPGFLAKDSAVAAFRQASLELMGRNFSATTLARKSEKTLARMLSRQGVRNALEVAAKLKEQARNAICADEATVRLSSQLIASELCLFQSLQSSLDELDIASARILLQLPEAFAVSIKGIGITLASSVFAEIGSLSQVQHCDQINAFAGIAPKVKQTGGPETPARIGGKRRQFNRILKDYTLQAGNHLYLHGPTDLLHDAARRKLAGKAVDTAMARRFLRIARALAKTHCIYLPSHLRTEQTGTVAEAEARAQYIIKTWPDLLLKWKRLGLHEEAFAPETPLGNWRIIVQEIYEIELPL

SEQ ID NO: 303761 - protein, 414 aa, unidentified
MTGDIKVSVGLDLHKKFILGTVLWQTGEMIQERFDRTKEGLFSLKAWATGHHADVVACESTSDYWVQIYDLLNGIIPVIVGNAHDIKVLSHKKTDKIDSLMIARLALHGMIQPSRVFAQKHREFRKLVRLRHGLVQKRTDIKNQIHHILDSELLQLSSVMSDIFGATGMHLLQGLVDGTPLDVLFQKLPPRIRKREEEIRSVLSDTLSPDALFRLDCCLRLIRCLDEQIEVITESATAYASENHPRQVEILLSVPGIGKVGALTLIAEIGDVGDFSSAEKLASWVGVVPTVAQSAGKLHTGSITKRGSAHVRWILTEIAHATARSRMNGLKTFFERKKKALGTGKAIIALARKIISLVWHLLSNDELYSDPQFPPKQNTDFVSVKVPKSLTLDELLQILVEANVYLKKKDPEIL

SEQ ID NO: 303762 - protein, 402 aa, unidentified
MNAVGIDVSKGKSMVAIMRPFGEIVSAPFEIKHTAGDIHSLVELINSVEGESRIVMEHTGRYYEVLAHQLSKANLFVSAINPKLIKDFDNDSLRKVKSDKADAVKIARYALDKWQNLKQYNVMDELRNQLKTMNRQFGFYMKHKTAMKNNLIGILDQTYPGVNTYFDSPARSDGSQKWVDFASTYWHVDCVRKMSLNAFIDHYQNWCKRKKYNFSQSKAEEIYGKAKELVPVLPKDDITKLIIKQAVDQLNSASITVESLRTLMNETASKLPEYPVVMAMKGVGTSLGPQLMAEIGDVSRFTHKGAITAFAGVDPGVNESGSYEQKSVPTSKRGSSDLRKTLFQVMDVLIKTHPQDDPVYQFLDKKRAQKKPYYVYMTAGANKFLRIYYGRVKEYLASLPES

SEQ ID NO: 303763 - protein, 429 aa, unidentified
MNYTQNEKLLQVGEKNLIIGIDIGSQKHYARAFDWRGIEYSKKAYAFSNDVEGFAGFLEWVSDIQEKTGKETVIPGMEPTGHYWFNLALFLRDNGIQPVLVNPLHVKRSKELDDHLPSKNDMKDPKTIAKLVIEGRYVNPYLPEGIYAEIRNASNMRFQIEAELTRNKNRIQRWFAIYFPEYTEVYGSFDAISSMMILRQAALPCDIINLGAERINQIWRDAKLRAVGKKRAQTLVDAAQRSIGYTEGLDTARFEMTLLLEDYDRLQNRLKQITELIEKLVRKVPYTEKLLQIKGIGMKTVSGFIAEVGDISRFTDAKQIQKLAGQAIVENSSGKHNGKSRISKRGRKRLRYLLFEAALSLAATNPEFREIHRYYTSRKTNPLKKMQSLTALSNKLIRVFFTILKHGVDYDPKKLLSDIRRPEEMPQAA

SEQ ID NO: 303764 - protein, 331 aa, unidentified
MNYSHFVGLDVGKKTFDASLMSADEKELSHKSFDNTPTGIQSLLDWIAGYHLSLSKLLFCAENMGSYVTELSVSSVSMGFSLALVCPLTIKKSIGLQQGKNDRIDAKRIANYAVLHYRKLELYKLPDKDLVRLRGWIIIRDNLVKQKVSSIKLLETFSRMAKLADVTESISFLEEQLKSIKERILEVEEDMEQLIAASTSLYTNYLLLRSIKGIGIINAIVLLCVTDNFQRFDNPRKFACYCGVAPFEHTSGISIRGKTQTSSLANKEVKVYLTRAAITAISWDPQMKAYYKRKIAEGKHKASVINAVRAKIIARSFAVIRRQTPFVTLAV

SEQ ID NO: 303765 - protein, 390 aa, unidentified
MSAAPRWHVRSAGKWLNSPALMKNTIVHHEGAASLEAARTKVKRCGSIIKIGLDVHARIYVAVAQYDQLLPKPARRLAPSEFVPWVRQLVRAGHVVYVVYEACGFGFGLYRNLQAAGAHCYVIAPRKLDEQCTRVKTDPRDATTLCQRLSRYVEGNTRELAVIRVPSEAEEQARHVSRQREQLVRHRQKLEAQGRSLLVGHSLPSPAHWWKNQTWSRLTKLLPSWICLRLEVHRPALLTLEQQISALSAELEAAAPADVPAGVGKLTTVVMTREICSWERFRNRRAISCYTGLCPGEHSSGTKRVPGSVTKRGNPRLRVALVECAWRMVRFQPNYPPVKKRLSVLAKGARATGAQRKKAIVAVARHLAVDLWRVHTGRNTAAQLGLTIND

SEQ ID NO: 303766 - protein, 320 aa, unidentified
MMAQDDRVVVGLDVAKDKVDACIRPLSLRRTEPSTAEGRRKLVAWLRKHKVGKAVMEASGGYEREWATALRKAGIEVRIVDPKRVRNFARSAGRLAKNDVIDAEMIAWFAETFGEAPAQAYDAAREQLAQIVNARQALLELRTKLQNQAEHAAPEPVQKMQARLLKKVAFELAKLEAAIAALVKLTPHFAERAAIIESVPGLGEITSAGLIAAMPELGQVSNKIAPALLGVAPYDDDSGKRRGERQIKGGRRKVRNLFYMACLGAATRHNPVLNAFYRRLIAKGKPPKVALVACMRKLIVILNTMIARRQKWDANLYASS

SEQ ID NO: 303767 - protein, 403 aa, unidentified
MNSVGIDISKGRSTVAVMRPFGEVVISPFEVHHTDSELSALARRLKSLNGETRVVMEATGNYHAPVAKLLHDAGLYVSVVNAKLVHGYGNNELRRVKTDKKDAVKLANYGLDRWLTLPRYVPEEGARLLLKNCYRQYRQYSKVQTVLKNNLISLLDTVFPNVNRLFSSPIRGDGSEKWVDFVAEFWHCRCVSEKSEKAFANKYQRWCKKHSYNFSVAKAHTIHAEASGHIGVMPKSETTKLLVEQAVAQLRATSVALTALKREMLTLAAQLPEYPVVMGMFGVGPTLGPQLIAEIGDVRRFYSKKALVAYAGLDAPPNDSGDVTGKHKSMSKIGASSLRRTLFLVMSVYLRSAPLDEPVYQFMDRKRAEGKPYHVYMMASANKFLRIYYATVKAYLESLEHTT

SEQ ID NO: 303768 - protein, 454 aa, unidentified
MAPSTSKKRGRSPRLSTVNPNAAGIDIGAQFHVVAVPAERDDEPVRSFKSFTGDLYRLAEWLLACGIETVAMESTGVYWIPLYQVLQERGIDVIVANARDVKHVPGRKTDVNDAQWLQQLHSYGLLRGSFHPPAGIATLRAYLRQRERLLEYAASHIQHMQKALMQMNLQLHHVVSDITGQTGMRIIRAVLDGVRDPLELAALRDPRCKASLETIAAALQGNYLPEHLLALRQAVALYDSYQAHVAECDRESEAVLGQLQAEEPPQEPLPAPRHRTKQHNEPAFDVRAALYAMLGVDLTQIHGMGASLALKLVGECGTDMSQWPSAKHFVSWLCLAPGNKISGGKVLSAKTRRTKSRTSAMLRLAAVNVGKTDSALGAFYRRLAARVGKAKAVTATARKLAILFYNTLRYGADYSDPGASYYEEQHRARVLHNMQRRAKQLGYTLEPLPEAGVS

SEQ ID NO: 303769 - protein, 332 aa, unidentified
MAQTDRVVVGIDVAKDKADACIRSLSQRQTFPSTTEGRRALIRWLRKHKVGTAAMEASGGYERDWAKALREAGIEARVVDPKRVRSFAQSAGRLAKNDPIDALMIAWFAEVFIEAPGQTGDTARDKLVQIVNARQNLLDMQTSLRNRSEHATPDVVQKMQARLLKKIASEIVELEAAITAMVKATPHFAELAAIIESVPGLGKTTSAGLIAAMPELGQVRNEVAAALLGVAPYDNDSGQRWGDRHIKGGRRKLRNLFYMACLGAATRHNPVLKAFYDRLIAKGKEPKVALTACMRKLICIINTMIARRQKWDAARSNACNPARHLPSACPAQ

SEQ ID NO: 303770 - protein, 350 aa, unidentified
MTVNHYIGFDVHKRSVSYCVKIADGTIVEEGKLRATHEALRQWAEKRQEPWRGALEATLFSGWIYDTLNPFAAELQMGHPAMMKAIGASKKKNDKLDARKIADLVRCNLLSACYVAPVEIRELRQMLRYRSLVVAQAVRMKNKMSGLLMEVGAKYNKQQLHGKKYFTELLRTVTEVPESVKDLLRLSRGALEMFETTQQQLLARLEKDPLLAQRVIVLKSIRGVGEVTALTWALEVSDPHRFSSVARAVSYCGLTSALISSADKQQRAPISKQRNAHLQTVLIEAAKLAPRWNPQLAAVHARELERGNRNRATLAVARKPVAYLLALDKSGHPFQVTSQSPAKTEIEKAA

SEQ ID NO: 303771 - protein, 333 aa, unidentified
MQNFYFIGIDVSKKKLDICVMSNSKVLKEEQVSNHPQAIATVIAGIKEELSMSNDCFIICAEHTGQYTYPLICACKSVGSKLWLENASQIKYCSGVTRGKNDKVDARRIAEYAMRFFDKAKPYQRPIEELMRLKQLEAERSLYLTDLAKYKAQLSDQEGFMEDKIFKRKAMRLKEMIKSLEKTLKEIAQEMADVIYSSEELSRQMRLLKSVEGVGPVVAMNMIIATEAFTRFDNPRQFNCYVGVAPFAYTSGSSQHSRNRVSQRAVKYIKCLLHMAAVAIAHKKTGDLKTYFERKVAEGKNKMTVLNAVRAKLVARMFAVIRNNRVYQPILSV

SEQ ID NO: 303772 - protein, 367 aa, unidentified
MKKLSTAAGKESRDFRQQKLTIGLDLGDRSSWYCVLDEAGNLAMEQRVSTTPKALREVLGGMPRSRIALETGMHSPWVSRLLSELGHEVIVAHARNVRLIGESRKKDDRLDAQALARLARIDPQLLCPVKHRSARAQADLTVIRARAGLVRARTALVNTARGLAKSYGERLRGCNVRNMNPEKAEGLSPELQRALEPLLAALESLSEQIREYNERIESLAGESYPQVGLLKQVKGVGTLIALTFLLTLEDAQRFRKSRDVGCYLGLQPGRRNSGQSEPQMHISKEGDPYLRTLLVQGAQHILGPFGVDSDLRRWGLRLAERGGRNGKKRAIVATARKLAVLLHHLWVSGEVYEPLRNSHECVVTAAA

SEQ ID NO: 303773 - protein, 412 aa, unidentified
MDVLYERCCGIDVHKKNVVACVLTPGGAGTPAKEVRTFGTMTADLVALLGWLEAAGCTHVAMESTGVYWKPLYNLLEGQVEVLVVNAQHIKAVPGRKTDVKDAEWIATLLRHGLLRASFIPDRDQRELRELTRYRTALIRERSAEANRLQQTLEGANIKLGDVASNVLGKSAREMLAGLVAGEEDVVVLAECAKRRLRSKIPELQRALEGTVGPHQRFLLAQQLAHIDYLDEAIADLCGEVARRLAPFEEAIVRLDAVAGIGRPTAEVILAEIGTDMSRFPSAGHLASWCGLVPGCNESAGKRKSARTRKGSPWLRAALVEAAKGASRTKTSYLSAQYRRIAARRGAKRAAVAVAHSIIEIVYHLLSTGEVYHDLGATYFDERDRRVIERRLVHRLERLGFDVTITPKESAA

SEQ ID NO: 303774 - protein, 346 aa, unidentified
MDYYAGIDVSLEASSVCVVDGAGKIAREAKIASEPDALIGWLASLGLDLARIGLEAGPLSQWLYAAMKEAGLAVELLETRHVRAALQTMPIKTDRNDARGIAQLMRLGWFRPVHCKSMAAQETRAFLTARKLVQSKLYDIEMSLRGILRGFGLKVGPTTPKRFARRIEELVAGHATLEVIAKALLSAHAALLREFDMFEKRVRAMARQDKRARLMMSAPGVGAIVALTYVSAIDDPARFSSSKRVGPHFGLTPRKYQSGETDVTGRITKIGDAGVRTALYEAANVILTRPVKGAGLKSWATKLARRAGMKKAKVALARKLAVILHRMWVDGAAFDACKASTVVAAA

SEQ ID NO: 303775 - protein, 416 aa, unidentified
MEQVTWYVGIDWGSERHAVCVVDAAGHRREERGVDHTADAVQACLEWIMTFTGAAPAQIAVAIETPRGALVDACLARRWLVFAVNPKQLDRFRDRHTVAGAKDDRRDAWVLADSLRTDPAAFQHVHGEDPIVVQLRELSRAEEDLDAEFRRLANQLRSQVHRLVPAVLALCPGADEPWFWALLQVAPTPAAQRRLTRARVDHLLRAHRIRRWRGADVVARLQAPLFPHAPGVVEATEAQIHLILPRLEVVHTQQLACGRQLEQLLQQLRDRPREADQRGEHRDIAILESLPGVGRKVAVTMLAEAAEPLAQRDYDRLRAHLGTAPVTTASGKRRLVSMRRACNRRLRWAAYHWGRASVQHDAPSAAYYRDLRARGHRHGRALRSVVDRWLRILVAMLRQNTLYDASRFAVAVDNGA

SEQ ID NO: 303776 - protein, 563 aa, unidentified
MRGVRVTLPALQFMLSQTPKGLEGSINSPGASRRWRCQFRRRGSRRESAVAGMSSKVIQPAARRGVAGSPQATVNNFAATKFATGDKSKLGRIAPRRTRSAVAKPARLKLRAPVGAAARPQTSERTTPCEGPHTSPTRGRPTMPRKARMKNYSELTHFAGLDWAKDHHDVNIMDRQGQVVARFRFAHSGPGWQEWREKIQGYPALGVAIETSHGAAVEQLLASGVTVYPVHPQAAKAYRQRQAPSGTKDDELDAWSLGDALRMDGGHWRALSPQDAIVEELRLLCGDEAALIEQRTALVNQLQAALHEYYPAALEAFEDWTAPFTWAFVAAFPTPQRLVQSTVHRRRVFLHTHKLWRPGTAERRLEIFARADQFCGGDAVTRAKSRLALALCRSLDALQAQLDDYRAAIEKLFAEHPDHDVFGSLPGVGVTLGPRLLSGLGANREQYPEVQGLQCVAGTAPVSFQSGQIKRAKIRWHCDRFLRHTVHLWAGCSLKSCTWAAAYYAAKRKDGMSHACALRCLAQRWLKILWKMWQTHTPYDPEYHARNQQRHGSWVLQLNPKTT

SEQ ID NO: 303777 - protein, 424 aa, unidentified
MNCTQNERINQVSEQTLVIGVDIASELNYARAFNWRGIEKGKVFKFFNNLEGFQAFNEWAHQVMSANKLTNLIVAAEPTGHYWFGLADYLKDEKLKLVLVNPFHVNRAKELDDNHPSKTDAKDPKTIAKLVIEGRYMEPYIPEGVYADLRIMYNCRQKVTKAMISLENQLKRWFRIYFPEYLSVFGNLSGQGSMAVLEKAVLPEDIISLGVDGINKLWRERKLRAVGMKRAESLYEAAVKSIGRREGNVGGRAEFRMLWEDYCHKMEQMEKLNIELESLLHKVPQAEEVLKMKGIGVVSVAGFFAEVGDLRRFESPKQIQKLAGLAIRENSSGKHKGQTTISKRGRARLRAVLFNAAIALVGRNGAFKSIHEYYIGRKANPLKKKQSIVAVSCKLIRIIYAICRHKEAYDEAKMLRDIRREQLA

SEQ ID NO: 303778 - protein, 378 aa, unidentified
MKRILKIGMDVHTTNYTLCAMEPIIGEDDRVFATIKVTPDYKNILMFIENLKLKLGLNDEYDIQCGYEAGCLGYSLYNQLTAAGIKCVILAPTTMLTPQGVRIKTDMRDAYMIAQCLSYGGYHAVYIPTEDDDSVKEYLRMRNDHKLALKKIKQQINAFCIRHGFCYDGTKWTLSHLKWLKKLEITNGLYRETLDEYMASYEEQEAKIERYDKRIGEIAEQTRYHDKVKKLGCFLGIKTHTALSLIVETGDFERFAKGNQYASYLGLAPGENSSSDNIHRLGITKAGNSHLRQLLIEASGGICKGAVGHKSKELRARQNGNTAEVIACADKANTRLRSRYYKFIRHGKKRNVAVAAIARELACFVWGMMTDNIEMKAA

SEQ ID NO: 303779 - protein, 363 aa, unidentified
MNYVGVDIHKKYSVLCALDESGRKLREGRVEGNSARGFAQFFAGLEGPSKAVVEACWNWGLIHDELEELEPVKEVVLAHPYKTRLIADAQIKTDRLDAHALGTLLRGNLVARAHVPGRETRARKNLLRQRLYWARLRTMLRNRIHALLDRQRELELPQCSDVFGVRGLGFLRRLELAEPDATLLREQLALHDLIAQQMKAQEKRIAAEFKTEAVHQHLLSVPGIGITLAAVIGCEIDQIERFNSAEKLCAYAGVVPTTHASGGKTSHGRLLPFCNKWLRWALVEASWVAIGCSPYFGSLYRQHRARGKKANTAILIVARRMCRIIWQLLEQKRDFEKLAPRPKLYSFPGCSALALTVNPALAS

SEQ ID NO: 303780 - protein, 315 aa, unidentified
MKYHIGIDISKREFHVCFEKGGTIEKFSTDLAGIDTFLNRLQERKMTKGKTLIGMESTGSYHLPVAYQCMKAGYIVHVINPLITKTQNQTNLRRVKTDSADAVLVRNCLLNGAGYPFQETAETIKLKTLVRQRARFSMLRHRTRLRDEEVVNRERYLDVKITALDKELYDFLDEKIRRLDAQLRTYESPTQKLLKSIPGVGPQTAVTCLSEVGNIHRFPDGQKLTAWLGLDPRVHQSGTSINGKGYITKRGNKLLRTRLFNAASVAVLHENMFQKFFLQKRSEGKAYRVALCAVMRKMVHVIHAVWSRGTPFINS

SEQ ID NO: 303781 - protein, 397 aa, unidentified
MKFFIGIDIAKHDHWVAAFDEQGKRHLNRKLTNTPQDLAQLVAELGALGGERVVGIDIMGGIASLVSATLLDAGEKVVHVSGLAVNRSRDALRGGQNKSDPRDAKVIADLVRVRSDLRAVTVQDDVLVGIRLAVARRQDLVRDQTRRLSRLHDLLVTVHPGLEAAMDLTNKSPLLLVAAFVSPAELRDAGVESVQAHLVERGVRPDRAEKLSKAALEAAHAQTLAVPGERFLAAQCKELAQEALDARQRIASLERELEELLPQTQHGDIVRTMPGMGVNLTAEFVASVGDLSRFDSPDALAMAAGLAPVLRQSGTVRFTRRNYKGDKGLKRLFYQAAFASLSHPPSKAFYDRKRAEGKHHHQAVIALARRRINVLWAMIRDGRPYQADFPRNLPAVA

SEQ ID NO: 303782 - protein, 431 aa, unidentified
MNCNTQNAKIETIKEKTLVVGIDVGSENHYARAFDWRGYEYSKKAFPFSNTEAGFVSFLEWMQDTAKDNGKEELVPGMEPTGHYWFDLGKFLQDNGIKPVLVNPYHVKQSKELDDNNPSKNDRKDPKVIAGLIKDGRFTYPYLPEGVYAELRSASNLRFQTQEELTRIMNRIARWFSIYFPEYKEVYGKSDSKSGLMILEQAPLPADISALGVEGVNKIWRDAKLRGVGMKRAIKLVEAAGHSIGSREGLTTARMEIKNLLSDYERYSKRMEELVELIDELVKEIPYVEKMLQIKGVGIKTISGLVAEIGDIRRFDNPKQIQKLAGYALVEDSSGKHQGETRISRRGRKKLRYLLFEASLSLVGKNEEFKELHYYYTHREENPLKKKQSLVAVACKFLRIAYKILTTGVDYDGAKMISDIRRPQKQMLQAA

SEQ ID NO: 303783 - protein, 338 aa, unidentified
MKKYIGIDLHSNNSVVVVTDEDDRIIYQKRLANKLDEILMALAPHKEEIIGVVVESTYNWYWLVDGLMDAGYQVHLANPSAIKKYEGLKYSGDFADAAYLAHLLRLGLLPEGYIYPRELRAVRDLARKRMQLVRCRTAQILAIEGILVRETGGRMSGEKVKTMTTDTVEAFGFMPDVTLAMESNRVICQALQQQIKVLEKRLDSQVQLQPGYQLIKTIPGIGQVLATTIMLEAGPMTRFAGVGNFSYYCRCVDSLRESNGKKKGEGNAKNGNKYLAWAFMEAANFALRYCPEAKRFYERKKSRTNRIVALKAVAHKLARACYYILREQHPFEVKRCFV

SEQ ID NO: 303784 - protein, 341 aa, unidentified
MQAPRHIGIDLHRDKFTCCVRLENGRNYLTDWKLEDLPAFVKKLRPSDEIAVEVTGNTRLFRDAVAPHVKRVVAVDPNQFKVISHSVKKTDPNDARNLALYLAKDLLPEVRMKDKTRAQLASLTQTRDTLVKLRTALKNKINNILSAHGHNLEKEALSSEKKLNEILVVRFDPMVKLELEVMVEEIRSLNQRIAQLEKAIADEGSKLEGHKNLTSIKGIGPLSGSILLSVIGDINDFADEGKLAAYFGIVPRVSKSNETEHTGRITKRGSKLGRTALVQCALIAQRYSPYLKRYYEKIKARRGTGKAIIALARKLLGIIYRTLKNKWVFEDFPNFVLAEAA

SEQ ID NO: 303785 - protein, 345 aa, unidentified
MQYDAGIDVSLEQSSVCVVDAAGKIVKEAKVATDPHVLVTFFKGLGFPVTRIGLEAGPLSHWLYAGLTQAGFGVVLLETRHVKAALSAMVVKTDRKDARGIAQLIRMGWFRAVHAKSASSQEIRALLTARRLLLDKLRDVELSLRGVLRGFGLKLGKVTQRGFETRVCELVANHPMLQQITRSMLLARATLQREHNTLHKALLKIVRRDKVCRQFMTVPSVGPIVAITYKTAIDDPHRIKNSKGAGPLFGLTPKRYQSGETDVIGGISRIGDAMVRAMLYEAANVLLSRTMRFSALKRWGLGVAKRRGKKRAKVAVARKIAVILHRMWIDGTSFRWSNQKAAAHA

SEQ ID NO: 303786 - protein, 420 aa, unidentified
MSWKSIVKKRATVKGDVVIVGIDVGKRSNVASTSLRNPKRPKELQFSNDRQGFNLLLGRIGEWKRICGWSDVIVGLESSGHYWEPLAYWLAEHGIKVVQVNPLHVKRNKETVDNSPEKTDRKDAFLIADLVEQGKYLTLVLPRGVFAELRQLVASRKRMLEELNTKLNHVHESVDRIFPEFGTVFKDLRGKTARYILRHFPLPDEIVSIGYVDLVIRLKRDCYQRLRKDKLKALWDAAMSSVGVREGLEAARDVLHDELGGLEGVLERLEGVESRIERLVAEIDEARYMLSVSGIGVMTVAMVLSETCGMRNYERASSVLKLAGLNLYEISSGQMKGSRHITKRGRSLLRQVLYFAAVRQAKRGSVLYGFYRSLVDQGKNKIKALIAVACKLVRLLFALVRDSRYYTEQRPCLLAVGAAA

SEQ ID NO: 303787 - protein, 352 aa, unidentified
MNATTMAVDLAKNVFELAVADGGGRVVEHQRLTRAQFERWFANREVGRVVMEACGSAHHWARRFGARGIEVRLLPAQYVKAYVKRNKTDAADARALLEAARSGDIKSVAVKSVEQQALQALHRTRSAWMATRTRRINTLRGFCREFGLVVPEGAVRGLAQVARYLTDEHSGLPAILRGSMRLLLEEIQLMEARIGQLEQELCALAQQSPACQALQSVPGIGLLTSTAMVAAVGDPRSFDSGRRYASFLGLTPREFSSGNQRYLGRISKRGDRYIRMLLTHGARSILRAATVAHRAGRELDRLRSWALEVQARTNHNKATCALANKLARIAWAVWVKHEKYQSAPIPLDAPDL

SEQ ID NO: 303788 - protein, 464 aa, unidentified
MAKPARSSRARRVPRKTNPAPHVMHPDAGGIDIGATQVYAALPPDRGAEPVRVFETFTEDLYALAAWLKAHHVTTVAMESTGVYWIPVFQVLEAAGIEVYLVNAHHAKNVPGRKTDVSDCQWLQYLHSVGLLRGSFRPPDEICAARTLLRHRTTLVAQAATHIQHMQKALVQMNVRLQHVLSDLSGKSGLAIIDAVLAGERDPERLAKLRDPHVKASAETIRKALVGDWRAEHLFTLRQAREAYRHCQTQIRECDAEIEQRLAQLRSQVDPTQTPPPPPPPRPPRQHKGDIHLEGADLRTELYRVLGVDATEIPGLGAHSVAGLVMHLGTDLAAFPKVACFCNWQGLCPNPQISGGRVLKRGTRDVRNPVANIFRMAAQSLHHSDSVLGVYYRRMRAKLGAPKAITATAHKLARIYYHLVTTQQAYDESVFAQNEQREAKRRVERLKREATALGFVVSPAAVAA

SEQ ID NO: 303789 - protein, 350 aa, unidentified
MQIITIGIDLAKHVFQVHGVGANDKVAFNKPLRRAQMLPFFAKLAPCLIGMEACASAHYWARELKKLGHDVRLMPAKDVKAYVKRNKNDAVDAAACCEAVRRPTVRTVPVKTPEQQAQLMQHRVRDLLVRQRTQTINALRSHLAELGIIAAQGYEGLKTLLSIITGGSDARLPENARASLSALVAQIASCQAEIGAIEKRLLAEHRKNEDSKRLETIPGIGVIGASAIVATVPDASIFKTGRDFAAWIGIVSREDSTGGKQRLGPISKQGDRYLRRLLVVGALAVLKRAQLHPGKYPWLTQLLARKPAKVAAVALANKMARTAWAVLTKKENYRAPQITVAAPPVPATCG

SEQ ID NO: 303790 - protein, 366 aa, unidentified
MKKTSTIRVNGNMIFKGHKLTIGLDLGDRWSFYCVLDEAGQIILEQKLPTTPEAMKQTFESIPRSLIALETGTHSPWVSRLLRELGHEVLVAHAQKVQLISKSHRKDDRHDAWTLARLARIDPELLGPVRHRRAKAQIHLTVIRARAERVSARTALVNAARGLAKSYGERLRKCGTQQVSRELAAELSVELREVLEPLLQEVESLNERIKEYDARMEKIARESYPQVELLKQVKGVGTQIALTFVLTLEDPHRFPKSREVGCFLGLRPGRRDSGESQPQMHISKEGDPYLRTMLVQGAHYILGPFGEDSDLRRWGLKLAAREGKNAKKRAVIAVARKLAVLLHRLWVGGEVYEPLRNSHQAMRAVA

SEQ ID NO: 303791 - protein, 371 aa, unidentified
MADYSEVFVGIDTSKLRNAVAIAQAGRNSEVRYLGEIDNTEAATSKLVKKLAAQHRRLTFCYEAGPTGYGLYRLIKTLGHECVVVAPSLIPKKPGDRVKTNRRDALNLAKLLRAGELTAVWVPDARHEAMRDLVRAREAAVDDLKSKRQQVLSLLLRLGRHFTGKRTWTRAHMNWLASQKLAHREQRIAFEEMLLAVRQAGERVIRLERAIAAAVPDWSLAEVVPALMALRGLDLISATIFLAEIGDLSRFASPRQLMAYLGLVPGEASTGDRVWRGGITKAGNHRARRILVECSWSYRHPPRVGKKKLAKVEAAPPAVQEIAWKAQARLTARYRALARRGKRPTLVVTAIARELSGFIWAVSRAVGAPAR

SEQ ID NO: 303792 - protein, 370 aa, unidentified
MNDLIRIGIDTSKSVFVLHGVNAAEQPVLRRKLRRRQMAEFFAKLPPVQIGIEACGAAHYWARELMALGHEVRLLPPQYVKAYVQRGKNDAADASAICEAMSRPRMRFVPVKTAEQQAALMLVGVRDQLVARRTQLSNMIRGYAAEFGVTAAKGLDKIEPLLARLVRELGVPEEAKALFVVLGEEFAALKPKLRKVEADLLAWHRGNELSRRLAEIPTVGPIGSALLTMKVTDPHAFRCGRDFAAWVGLTPKDHSTAGKQRLGVITRAGDEALRSVLVVGATALIQQARKGRGNPSPWLIGLMRRKPPKLVAVALANKTARIAWKLMVSGERYNRQHARGGFVPPTGSLAPDARRQGRVAPPAAVACGQP

SEQ ID NO: 303793 - protein, 334 aa, unidentified
MEHCAIDLGGRKSQICIRSSEGQIAWEERCETAALKERFRQWKPMRVVMETCAEAFGLADAALIAGHEVRVVPATLVRTLGVGARQTKTDRRDAQVLSEVSCRIELPSVHIPSARSREWKTLSGMREVQVGCRTSLINSVRGWLRGQGLRVRKGQTPTFARRVKELGSLPDYVQSQLKLIEAASEQIKSADKRVKELAGSDPLCRRLMSAPGVGPLTALRFSATLDEISRFPDAHHVESYLGLVPGESSSSEHQQRLSITKAGPRALRWVLVQAAWAVRRCHTEAAKPLQAWVNQLEQRRGRHVATVALARKLAGILFALWRDATTYDPAQLTR

SEQ ID NO: 303794 - protein, 415 aa, unidentified
MDVIEERCGGADLGKTDVKVCIRVPGTGKRARYEVRTFSTMNDGLLELRDWLAENRIARIGMEATASYWKPLFYLLEATEGIEPWLLIARHIKTVPGRKTDVKDCQWICKLVEHGLVRPSFVPPRDIRQLRDLTRYRTETVRDRARDVNRLAMFLEDTGIKLSSVGTDITGRSARAMLDALVAGERDPQRLASLALGSLQGKVPLLTRALAGDFNGHHAFMIASMLRAIDEADNRISRLSEEIDRQLQPLRQQVDLLITIPGISLTLAQVLIAEIGVDMSRFTTAGHLASWAGVCPGNKESAGKRLSGRTSHGDTWLKTALFIAGASAAHSKTTYLGAQFRRLVPHRGAKRATLAVGHSILVASWHILHDLVPYRDLGPDHFTNRLGKERQTRRLIAQLTALAMDVTITAHEQTA

SEQ ID NO: 303795 - protein, 350 aa, unidentified
MTIIGCDYHPGFQQIAFVDTETGDYGEQRLEHSEGAEKFYRDLAAQGKQVRVGMEASGHARWFERLLAELNFELWIGDASEIARKRERKQKTDRQDAQHILQMLMENRFPKIWVPSGENRDLRQLLWHRHRMVQMRTRIMNQLQAVALNEGLRCKKRLWRQHGREQLESFRLAPWASRRREDLLQLLDRLNPTITDLTQVIEQEVEKCPEARRLRTHPGVGALTALAFVLIIGRTERFQCGKQIAAYLGLVPLEDSSGNRRRLGHITKQGSSMLRFLLVEAAQVTARSIPEWRSKYFHLAMRRGRKIAKVAMARRLAIALYWMWRKGWNYEQSRKFGSHAGKLGTGDGVQ

SEQ ID NO: 303796 - protein, 452 aa, unidentified
MSESKREFAVMNPDAAGIDLGAEHHWVSVPEERDSPCVRRFGCFTAELYAMANWLQQCGIKTVAMEATGVYWIPVFQVLETQGFEVKLVNARHVKTVPGRKSDVLDCQWLRQLHSYGLLAGSFRPDDQVCVLRSYIRQRDSLIKSASAHIQRMQKALIQMNVQLHRVISDISGTTGLAIIRAIVAGERDLHKLAALKDFRAHASTEEVAAALQGDYRRELVFVLQQELHLYEVFQGQIAACDAQIEQCLNQFADRVDVSTTPLLHSKRRGKKQPGNAPDFDLRTHLYRISGVDFTQIDGFGVLTVLTLLSELGLDPSRFPTSKHFVSWLGLCPGSRITGGKSKSSKTRQVANRVATALRMAAQTLVRSHSALGAFYRRLQARLGAPKAITATAHKLARIFYHFWTSGGTYVDPGMNAYERQHQERVIKHLKKKAQALGFDLIAQPIPQECVS

SEQ ID NO: 303797 - protein, 370 aa, unidentified
MLDTTTFVGLDVHARSIKAVSLDVMTGEVRAATFGYDAGAVAEWVRSVDPRARCVYESGVTGFDLQKRLSGLGVDCVVGAVSKMIKPSADRRRKNDRNDAEFLARMLSVGNVVEVWVPDDECEAARDLTRALEDARDDLSRSKQRLSKFLLRHGLAFDERTPTGRRKGNWTRAHWSWIESIRFAEGADNDVLAYYVDAVRRAAEEKARLEGLVEAEARKPRWRRRVDSLRCLKGVDTATAADLVFEAGEFSRFGNARSFAAWVGLTPSEHSSGESDRRGAITKAGNKHLRKALVEAAWHYLTCSGRPKGLAKGQAPDRGARRHAAKGVRRLVERREALLARGVHGNKANVATARELACWVWAVGLMAEEA

SEQ ID NO: 303798 - protein, 347 aa, unidentified
MSVTTIGLDTAKSVFQIHGVNEAGKVELRRKLRRSELIGFFEEREACTIVMEACGAAHHWARVLTGLGHTVKLIAAEAVKPFVKKGKKNDAADAAAICEAASRPDVKFVAAKSVEQQGILALHSARSLLVKQKTMLANAMRGLATEFGLTVPKGIQKLDELMALVNSDDVMPPQARQAITGLHDYCNDIQEGIETFEAEIVAHARGDDTARRLATIPGIGPITASLIAATVGDIGLFKTARHFAAWLGLVPRQNSTGGKTRLGRITKAGNREIRRLLVLGATSMVYRADGWNSAVGAWVRKILERRPVRLVTVAMANKMARIAWAVMTRKEVYHPKGGVAAAAKAAA

SEQ ID NO: 303799 - protein, 356 aa, unidentified
MNDIKYIGMDVHQGSIVIAVLDTSGKLVMESIIETRGETILQFIRGLRGTLHVTFEEGVSADWLHELLVPYVARVLVCDPRKNALLKSGNKNDRIDAHKLAGLLRAGLLTAVYHGESRGRLLKELARSYRALTKDTTRVMNRLKSLYHSQAIRCGGTQVYTQRHRQRWLEQLQETGARRRAERLYQQLDLVQPLRRQARQELVTEACKSVAAARLRGIPFLGPVRVAVLLAIVETPFRFRTKRQFWSYVGLAIETRISGEYQMAGGRVQRTRKRVALRGLNPNHNCELKRLFKSMALEASTRLGPWHDWFTAKVNQGLRPEMVRLTLARKLAAITLAVWKKGRKYDDGEPLKSQAA

SEQ ID NO: 303800 - protein, 362 aa, unidentified
MAQVRSWVGLDVHRASVVAATMDRDTGEMRVRRLSGETREVVAFCVALPGLTRVAYEAGPTGFGLARALVAAGVQCVIAAPGKIERPSSDRVKTDQRDAERLLRLLMIDGLHAVRVPSSEEEALRDLVRAREDIRGDLMRARHRMSKLLLRHDVRFDGTAAAWTTHHRRWLGAVDLGDRGAQVTLLDYLGAIDALIVRRDTLEHTIDELVPDSPWADTIARLRCLRGIDTLSAVGLCAEIGDWQRFPKAGHVMSYLGLVPSEDSTGQTRRQGSITKTGSGHGRRLLVEAAWHYRRAPAKGQALKRRQAGQPAHVIAISWQAQQRLHRTWRRLDAERGKRRTIVAVAVARELAGFCWAAANAD

SEQ ID NO: 303801 - protein, 413 aa, unidentified
MDVIVERCAGLDVGKDEVVACVRTPSLSGRGRTSETRTFKTFTSGLEALADWLTDNGVVEVVMEATGQYWKPIWYLLEDRDFDLKLVNAKHVKMVPGRKTDVADAAWLAELLEHGLLGSSFVPPPAIRELRDLTRYRKRLIQTHTAECQRVQKVLEDAGIKLDSVASDVLGVSGRLMLRALIDGERDPAVLAEMSKGVLRKKIPMLREALRGRFREHHATMLRLTLDHLDYLEHAITALDTEVDRVMTPFTEARDRLDTIPGIGKRAAECIIAEIGIDMTQFPTAAHLVSWAGLAPGNNITGGKRRPASSTHGNRWLGETLNQCAWAAAQSRDTYLAAQFWRLARRIGKKRAAVAVSHSILAICWHLLTNNVDYHDLGGDWFTRRTNTTNHRDHLIRQLHDLGYTVNLTPTAA

SEQ ID NO: 303802 - protein, 408 aa, unidentified
MNAVGIDVSKGKSMVAALRPMGEVALLPQEFLHTEVGLEQMAYAIIALGEDTRVIMEATGRYREPVAAALHEYGIYVCVLNPLFIKQSGGGSIRKVKTDKADAMKIAKYGLDNWVDLREYTPMDTVRQQLKLCSRQYNLYMKTVVSLQNNLISLTDKTFPGVNELFSSPERADGHQKWVDFVMTFYHCDCICRVSENAFAERYQKWCKRKGYHFSAEKAQDVYLGSCGHFTTLPKNDNTKLLITTAAQQLLAGKMTLAALRTEMTRLAKQLPEYDIVRAMYGVGETTAVQLMAEIGDVRRFPRRSSIVGFAGVDPAVDQSGKHSAKSVPTTKRGSPHLRKTLYQIVCTYLKKSPVDEPVYQFLDKKRSEGKPYFVYMTAAQNKFLRIYYARVKECLEAFDAQQDTSQR

SEQ ID NO: 303803 - protein, 355 aa, unidentified
MSVYVGIDVHRKRSQVAVINEGGEVLANRNVPNGAQPVLGVIGGLPPGTPVAFEAAFGWGWLVELLEDYGFAPHLVHPLQCKAIASARLKNDKVDAAILAQLLRADLLPEAWIAPPPVRQLRAMLRHRAQLVRLRTLLRNRIHAVLADHGHDRPAGCWSGPGRAWLAALELPAVSREVIDDDVALIDALQVPIDRLDWEIHQRARSEPAVKVLTQLPGVGPFTALVLLAEIGDISRFGSARKLASWAGLTPTVRGSDRTVRHGHISKQGSAWLRWILCEAAQTAKRHPDFAASYQAMARRRGKKIATTAIARKLLTRAYHLLTAASGGEPASREGRQAPGELAFSHEPASPRSMT

SEQ ID NO: 303804 - protein, 397 aa, unidentified
MYIVGIDIGKRKHEAAVIDGEGTVIIKPFSFINNCSGYNRLLAMLAKAKLPLDEVSFAMEATGHYWLALFTRLQKEGFRVQVINPVQTNSIRSFYIRQAKTDPRDALLIAEVIRFGHFSESALHPENIYELRELCRGRHAIVSMQADVKRKVVALLDQVFPEYETAFTNMFSDTSMAILQTCPTPKELSEMPLEELCHLIEVSSHKRFRMAKAQELQALARNSFGFAMAGDVFSTMIRLYAKHLDFLKQQVREMDRKIAEIMDTLDTPITTITGIGPTLGAYILSEIGDISRFSSAAKLAAYAGIDPTMRQSGEYNGVRNRMSKRGSPYLRHAIWLAASSAVLHDPALKLYFQKKRDEGKPYMASVGHACRKMVSIIYAVMRDNKAYTPCIPNEISA

SEQ ID NO: 303805 - protein, 412 aa, unidentified
MRVIGLDVHRTFATVAVLDNTQLSHPGRVELTREAVLAFGRKLRPDDEVVIEATVNTAMIARLLRAFVGKVVIANPLQVRAIAHAKIKTDKIDATVLAKLRASGFLPEVWMPDEATETLRRLVSQRTQVVQQMTRVKNRIHSILHANLIPPYRGRVFGAAGRAWLEAQPLAPDEKLAIQRYLADLDHRARDLTVLDQALAERALQDDRVRRLMTIGGVHMTVAVGVLAAIGDIARFSSPDKLVSYLGLNPSVRQSGNGPAHHGRITKQGRSHARAMLVEAAWAAARVPGPLRAFFLRIQRRRGQQVAAVATARKLAVIVWHLLAKAEDYAWTRPAPLEAKLRKVELAAGQPVVKGQKQGRAHAYNSKAVRDRERAWLEQTEKAYARFVANWQTKPPQGCTGATTGTRSSKAT

SEQ ID NO: 303806 - protein, 337 aa, unidentified
MKHCGIDLHSNNSVVIVSDEEDRIVFNKRLPNDLGQIRAALEPHREELAGVVIESTYNWYWLVDGLMDAGYRVHLAHPSAIKKYEGLKHSGDFAEAAYLAQLLRLGLLAEGYIYPREERGARDLARKRMQLVRYRTAQILSIENTLIRETGARIKGAAVKRLTAEQVDEFGFAPDVTLAMEANRAVSQALGEQIEALERRLKERVSLRPEYRLLKTVPGIGEILATTIMLETGCIGRFARVGNFSSYCRCVESVRESNGRKKGEGNTRNGNKYLAWAFVEAANFALRCCPQARSFYERKKNKTNRILAIKALAHKLARACYHMLRDQKPFDVSRCFA

SEQ ID NO: 303807 - protein, 318 aa, unidentified
MKKLTTTMMQRTLNKQDGRLTIGLDLGDRSSFYCVLDEAGEVLLEQKVSTTPKAITEIFGAMPRSRIALETGTHSPWVSRLLKELGHEPIVAHARSVRLIGESRRKDDRLDAMTLARLVRIDPELLCPVRHRSAEAQADLTVIRARAALVRTRTMLVNATRGLTKSYGERLRGCNARGMKPQAAQDLSPVLKSALEPMMSEIESVSERICEYDQMLESMARNRYPEAERLKQIKGVGTLIALAYMLTLEDPHRFSKSRDAACYVGLQPGRRNSGQSEPQMHISKEGDPYLRSLLVQAAPRSRPLGSRQRPAPMGHEAG

SEQ ID NO: 303808 - protein, 335 aa, unidentified
MKYRVFIGVDVSKEVLDFVVIVEGKKLFHLKVSNNKKGISLLYKRLGKEVGTYHSDWLFCCEHTGIYCNPLLEFVGNKGISVWLENAVKIKVYHALERGKNDALDALRIAEYAYAKRDKVRLWEAPREIISQLKSMIGLRKRLLTSKKRLLDPLQEEKQFGNKQWTKEHEKLLRPVISKIEKQLKDVEQKIQQLISKDDRLKELYQLITSVSGVGPIVAINTLVVTNEFKQISDPKKMACHCGVAPFKYDSGKTIRSRARVSHRADKSMKVLLHLAAMSAISSKGELREYYLRKVEEGKNKMAVINAVRNKIIHRIFVCIRENRKYEKIYTHALA

SEQ ID NO: 303809 - protein, 482 aa, unidentified
MKKKTIYSNQSQELLRLFEEAGNNSKMMCVPIDYAKKDHIVMFCNGYGDILRKPFSVKNSPEGVKYLTEQVRRSCRHRGIKSKHVFLGGEDVGSYAENFVNTLRVKGWIVAGVNAHDAKKQRANIQASTDRLDLMGIASMLLNRRANCSPAQSGIYRNLRTLVRHRRKLVVMSTEIRNQIHTVVDRLFPGFLDERKTGIVPFTNSSLYLMENRFSARQIHRRKRDRLIEILKRYGTSKPEHTAAKLQEYARQVLITPKEYMSTLQLSLAQHVKHFRCLKENIKQVEREIALWLSQTQGAFLTTIRGIGIVLAAGVTAEIGDPSVQKPLNNLASYAGIIPRVKQSGGVEGKTFTGKVAKRCNRILKDYVVKSGLHLGLHGPEDLMTDYKRRDAAGQHADFGIARRYLRMAMCLMRTSQIYLPARLRKKGVDVQQRSSYYLMTWPYIREKWYKLGALEATFEKDRPLGQWRYRVQELYDIKLKL

SEQ ID NO: 303810 - protein, 533 aa, unidentified
MDRHTLPTKIIHYSQRPETSSVKQVIRHEIHTSALIDTGQDRTLLTMCCTDMPAGALFAQVEAFQTVNPVCFLVVNRPAFPPQLNMNTRTTVADPGFRYFPDTQGYRPIIPPALPVINGSALHQQSASPPDTDTVSLPQKMHRLTFQTLIFILQLPQTPQFGHAQTSEFLLPVNGMDYLLPLRLTVRNVLTRRITMNIVFLGIDLAKNVFQLCGLNQAGKPVYTKRTGRKELLQTLANIPACLIGIEASTGAFYWQREFEKLRHKVKVISPQYVKPFVRGQKNDGNDAQAIAVALMQPTMQFVPPKSPEQQDIQALHRARQRIVNRRTATVCQIRGLLLDRGSPIGSAVSRARRAIPLILEDAENGLSSRMRRTIAELYELFNDLGRRIHFFDKEIETVFRQSEACQRIARVKGIGPKTATAIVAAIGKGTEFKNGRHFAAWLGLVPHQHSSGDRQALMNMMKKGDKHLRTLFIHGARAVVRVATNNNDGHMNQWVNQLKERRGFNKTTVAVANKNARIIWSMLRNETEYQVV

SEQ ID NO: 303811 - protein, 349 aa, unidentified
MSDGIAVGRQFVGVDLHLHRSVIGRIDEHGNQLGWVRIDNDPKALVAECRRAGGGAPVAIEATYGWYWAVDALQAARFDVHLAHPYGMKAMRNRKRVKTDSRDAYELANLLRLGSLPEGYISPAELRELRELVRHRHQLVKLSTALKAGVRALLAKHNIRLPARQLDGDTAIAVMDSLTLPGTYAVRLAAQRRLLMALAEEIAATEIELVGRLKDHQGYRRLLTIGGIGPVLAAVFIAEIGDISRFPNAAALCCWAGLTPRHYESDKTVRRGHVSKEGNKLVRWAAVEAVQRNCEPAIKAVRDSIIARRGKDARNTAKVAAARVMLEAIFYVLRDGYSHRLNNEWHAIA

SEQ ID NO: 303812 - protein, 342 aa, unidentified
MYYIGLDVHKKTISYCIKDASGQVHREGTIGAARNELDWWLKTLPQPRMMAMEATIFTGWIYDHLLPHAEQVKVAHPLMLRAIAASKKKNDRIDAGKIADCLRCDFLPECHMASTEIRDRRRTLRYRHLLVRQMVQMKNRISGLLLETGVSHNKQRLHKVGYFRELLSSNEEVHENIRPLLRLSRETIVRCQKTEHALVSSLERDPLLAERIKRLRTVPGVGIITALTWALEIGDVSRFRSVKQAISYCGLCGEEKSSADKVLRTPLSKQRNKHIQHVLVEAAKLAPRQNHELALIREREMQKGNRNRATLAVARKMVAYLLAVDRREREFVPAEVRSTVAA

SEQ ID NO: 303813 - protein, 311 aa, unidentified
MSFKIFKFNCCGLDVHKTWIYACIGITDSNNRTEYKQARFSSFSKGLHQLCVWLAKYNCNDVCMESTGKYWIPVFNILEQHKIRVTLSHPKYTKPMKGNKTDRKDAKWICDLYMCGMVKPSFIPPADIRELRDLVRYRFKLTCMITGEKNRAQNCLTVSNLKLDDVFSDVFGKSSRSITEQILQHPGEKFDVSPFVDSRCKTPIEEIQAAVDGNISKEQDVKLRQCLDHIDELQKHISEVEQEILRLSDKYEAALNLIRTVPGFDKNPMTAIQVLSEIGGDMSVFLTAKHLVSWAGCCPPVSYTHLRAHET

SEQ ID NO: 303814 - protein, 349 aa, unidentified
MPIVGGLDIHRKQITFDYLDTGTGELRRGQVAPADREHLAAWLAGRFTGQDAHFAVEGCTGWRYVAEELAAAGAVAHVAEPAGTAALRGRKRHAKTDKTDSRHLRVLLADGRLPECWIPPSHILECRALLELYHDLRTEHTAWGQRIHAVLFHQGARQLGGQRLRTGEGLAALRAALAQLSPAGQLQVTVALDMLQVLDGHLDALRRRLIEAARRLAGARELHARLYGVGPVTALALTCWLGGAGRFSSARKAVRFAGLDVTVWSSDRKGPPGRLSRQGPEVVRWCVYEAGKAHARRCAPDHAYYQQVKDRIDGKRAAISEARKIIRQAVHILAALGDDALIMDPAPSR

SEQ ID NO: 303815 - protein, 342 aa, unidentified
MKSIAQTMIGVDIAKQVFQVHEVSAETGEVISKQIKRAKFLDYFANRESCLIGMEACGGAQHWARRLMALGHAVKLLPAQQVRPFAVGNKNDVTDARAIWVAMLQPSIRAVAVKSEAQQAVLALHRMRQQLVKFRTAQMNGLRGLLAEYGEVMPRGRAALTKMIPLVLERLTDRLPTVLIETLREQYARIAQMEGQIADIERRLQLWHREDEDCQRIAAIPGVGLLTATAVVASMGDPRAFRSGREFAAWLGLVPRQTGTGGKVRLLGISKRGDTYLRTLLIHGARSVLARSRTPSAWTMAILQRRSLNVAAVALANKMARTVWALIAHQRAYQSSYVSQPA

SEQ ID NO: 303816 - protein, 401 aa, unidentified
MTAGIDWARDDHAVCIVDGRGRQIARTMVEHTATGLRDLIAFLGRHGVDEVAIERPDGPVIDTLLDAELTVVVISPNQVKNLRGRYGSAGNKDDRFDAFVLADTLRTDRARLRRLEPDTPETIALRRACRTRKDMVSHRVAATNQLRAHLQDVFPGAVGLFAHLDSEIALAFLTRFTTQDQADWLTPTRLGHWLAMAGYSGRTSPQVLHERLTAAPRGLTGPTATTQTHSTHALLALLTTLVQQIKTLSTQISDQLDAHVDSHIFTSLPRAGRVRAARLLAEIGDCRAKFPTPESLACLAGAAPATRQSGKLRAVTFRWACDKQLRNAVTDFAGDSRHANPWAADLYNRARARGHDHPHAVRILARAWLYVIWHCWQDGIAYDPTRHHALQRFLATQNAAA

SEQ ID NO: 303817 - protein, 343 aa, unidentified
MAYFVGLDVSVKETSVCIVDDAGKIVREARVASEPEALLQVLTNNIDRLARVGLEAGPLSQWLYSALAEAGLPVICVETRHMRAVLKAQVNKTDRNDARGIAQMMRVGLYRPVHVKTLRSQKLRVLLTHRKLLPSKAIAIENDLRASLRNLGLKVGMVGTVKFEARIKELVANLPDLAVLVEPLLIVRRVVREQLGILHHRLLAIVRDDDVCRRLMTIPGVGPVVALTYRVTVDVPTRFRNSKAVGAVLGLTPVKYQSGENDRTGAISRCGDEMMRMMLYEAAQSMLVRSAKWSWLKAWAMKIARHRGMKKAIVALARRLAVIMHRIWVDGTGSRRTREVAAA

SEQ ID NO: 303818 - protein, 331 aa, unidentified
MEIIKKNVAGIDVSSETLDLVIRKKAKKFTNTPDGHASLASWMTKHNVSHVCLEATGIYHLDLAVTLDREPGLDVMVLNPKIARKFSEATMVRGKTDAIDAGILAQYADTMKFVVWKAPTPKILQIRSFSRRLEALTKMKVQAKNQLHALRATIHTPSQVVEDATFMIEHLEKQLEVLGGCALEIIQSDKEINNVLELLTSIKGVAEKTAIQLIGELLVLPDDMTPKQWAAYAGLDPRVVESGKSISKKRRISKAGNRHLRRALYMPALSSTQHELHVSAYYQHLINDNGLTKLQALCAVMRKLLHAIHGMLKSGKPFEGTRFYAIPVEIK

SEQ ID NO: 303819 - protein, 339 aa, unidentified
MKIIGCDFHPGYQQIEMWDKGTGEVLEKALSHARKEEVRAFNAGLEGPVRVGIEATGQSQWFEQMLAELGHEVWIGDAAKIRAASDRRQKTDRRDAGLIVKLLDQDRFPRIWRPTSAERDARQLLLHRHKLVRMRTQVKNQLQALALNQGMQQKWRLWTERGRKELQGLPLLPWASRRRAELLTLHDQLEASIEELSQAVLQQANTRPVVQRLMTHPGVGPVTALAFVLTVGPAGRFRRGKQVASYLGLIPTEHSSGGKQRLGHLSKQGNSFLRGLLAEAAQSAVRREPEMRRAYQRLAQRKCRALAKVAMARKLAVRLYWMLRKEADYAQLFQGSHAG

SEQ ID NO: 303820 - protein, 274 aa, unidentified
MIKYHKHIGIDIGKYNFVVGIEGIKDTKEYENTSSGIFEFINDNKDILANSLTVVETTGGYELELLYSLCERGYVVHRADARKVKNFIRSYGNSAKTDKLDAKALGLYGKERADKLEVFKPESKQNIQLFRLVQRRNDLKQMLVAEKNRLQQANTDKFVKNSCINMIDVLSNQITEITNQVEVIISSDQLLKAKHEILKEINGIGNIVAFELLILLPELGKLTRRQIVSLAGLAPKANDSGKYQGYRKVGHGRAGVKLYYSLLLCQPVIARLLV

SEQ ID NO: 303821 - protein, 394 aa, unidentified
MKLVGIDVGKNSHHFCVMDKETGEFNVAPSSFSNNKEGFDFLINSLKPYSKKSILLGMEDTGHYHVALLKFLLSNGYTVALINPKTTDLTRKMEGGITKNDKLDTITICDVLDTPERKKQYRITKVDRFDLYEQRQLTRHHHNLKEELNVYCNRLQKSIDLVFPEFNTLFSSKYSIVYMNLLKTFGSAEAIASTDIRTIRKCFEIKGKGGRISLTPEKLKECAKNSIGISSEVETIQIKHLVSQIMLIKEQIAEIDKKIEEFSIKNNSPILSIPGISHFSGTSILSELGDIGNYSKPSQIIKFAGVAPYHYESSQYNAQHTAITKKGSKYLRKTLYQIILPVINNNPVIKKYYLLKISQGKGHRCAQGHCIRKLLRIIYHLLETGQSFDPALLR

SEQ ID NO: 303822 - protein, 414 aa, unidentified
MNYNKKMEEMKGVKVFAGVDVGKEKHFMSLIGEDGLVKNTGICISNSLEGFEKMVGMLKSTGTEKEVVVGMEPTGHYWKALGYYLKEKGYMIYLVNPYHVKLSKEMRDNSQRKTDKKDSELIAHLVREGKFLNSRLLDGNYEELRRLTTARERMVQEIVRCRIRLISILDEYLPEYERCFCKITAKTSLKLLNKYGIKGLREKSVALEVVKDIVLFSRHKIPKERALEILGKLENTIGLKEGLTGAEIELKIWLEELEGYLNKLSNIEKEIKKVLDSTEEAKYLLSIKGVGYITAAIVLGQTGSFRSFNNAKQLEKFAGLDLVERSSGKRVGGKRISKRGRKLLRHGLYRVAIVAIARCKEFKALYEYKVNILKKNKMVAVTDITVKILRIMFAVVKNQAMYDGNLVLKAIAYS

SEQ ID NO: 303823 - protein, 340 aa, unidentified
MKFIGLDAHSKTCFFVVMNKRGRVLAKKRVKTNESDILSFVRAVKGHKKLAYEEGVLSQWLYILLKDEVDELVVCQPSEHAGPKTDEIDAGEIADLLRVGRLKTVFHADSELMNLRTLTSGYGDLIQVLNQEKNRLSALFRQVAIPVKGSKLYNTPDMAWQLPTDTQQYVACTLFEQIDLLEEQRRGYLERFESNAKRFKEIKRLMSIPGIGPIRANQIVAIMVTPFRFPDKYHFFSYAKLTRHGRESDGKQYGKKPANGRPVLKEVFKMAVFGAMKSDTAFKRKYDQMRRAGADDRMARNAVAKKIAATVLAVWKTGKKYNDKHEEVTRRRNQKSHSET

SEQ ID NO: 303824 - protein, 382 aa, unidentified
MDVVHPRCCGLDVHKQTVVACILLASPSGPPQKLVRTFGTLTDELLALGDWLTSESITHVALEATGSYWKAVWNLLEGRFELLLVNAQHIKAVPGRKTDVKDAEWIADLLRHGLLKPSFVPDRPQRELRELTRYRTSLIQERAAEVNRLQKVLEGANLKIGDVATDVLGRSARQMLEAIVGGATEADAATLAQLARGRLREKIPHLERALAGRVAPHQRFLLAQQLAHIDFLDETIERVSSQIAERLCPFDESLANLDAIPGVGRRTAEILLAEIGTDMTRFPSPAQLASWAGMCPGHAESAGKRHSGKTRKGEPSTTPRADRSGTRRRPLQEHLPGCSVPSTRGTPGRQAGGRCRGPLDPQHRLALAPARTPVPRPGRQLL

SEQ ID NO: 303825 - protein, 339 aa, unidentified
MKLYSAIDLHSNNSVLVILDEEDRVVYERRHPNELPVILAQLAPYRENIQAIAVESTFNWYWLVDGLMEAGYTVKLVNTAAVKVYEGLKYTGDEHDARHLAHLLRLGVLPTGHIHPKEDRAVRDLLRKRSQMVRYRTMQILSIQNLVIRNSGKRITTDGVRKLNDETISQFCGGNNMLAMAIQSNLKMLRCLDEQVSALEEVILKQAKLKPKFKKLLTVDGIWNILGMTIMYEAGDMERFKKVGHFASYARCVGSSRWSNGKKKGEGNRKNGNKFLAWAFIEAAHYAVRYNKRIRSFYERKKAKTNKIVAAKAVAHKLARACYHVLKEQTPFDESRAFA

SEQ ID NO: 303826 - protein, 325 aa, unidentified
MTNETREPVYVGIDVSKDSLEVALADKAASVRFVNDEQGVKALLEHLAGHNVAVVLLEATGGLEKRCAHALYLAGMTVVVANPRQAHEFAKSMGYLAKTDGIDARILSHFARTLHGSERFDKLLFKMATPQQEQLQALVTRRSQLVQMRVAESNRLNLAHALSAKSIQAVIKLLDKQIKTLDEDIGNRLKQHFAQKLKLLEGFKGIGEGTKAVLMAALPELGRLNRREISKLVGVAPLNHDSGKMRGRRSVWGGRADVRSALYMAALSAVRFDPTIKAFYERLRAAGKPPKVALVACMRKILSILNAVIKSNTAWEQRCPQASTA

SEQ ID NO: 303827 - protein, 312 aa, unidentified
MEAKFVGIDVSKARLDVDCLPVSTSRQFSNDAGGITALVEWLLGSGVERIVVEATGGYEIAVASALAAAGLPVVVVNPKRVRDFAKAQGVLAKSDRLDARVLALFGERIAPPVRALPEAAQRDLTELLDRRHQLVTMRAQEQARLATVLPVARGDVEQHIAWLDQRIRKHETVLLKRLRANEIWDAKVKLLDSVPGIGPVNVFTLVGRLPELGTLNRQQIAALVGVAPFNDDSGKRRGQRYIRGGRAEVRCALYMATLSAKRWNPVIAQMFERLIAKGKPFKVAMTACMRKLLTILNAILKSTQPWENRLAT

SEQ ID NO: 303828 - protein, 327 aa, unidentified
MFFIGIDVSKSKLDCCLLVDSNHKRKTKVVINSKKGIADLLVWTAKQHISNEQLHAILEGTGVYHEQIAQALYDSGARISIVNPAQIRHFAFGLAIRNKTDDMDSFVLARYGALVQPKLWTPPSQEAQILKALLKRREAIVRDLLRENNRLEKADATHTPEVIRQSITDGITFLKSQLTKINNDIDEHINKHPHFKEDLKLLTSIPSVGPQVGNQLLAIIHNHHFDSAEKLAAYLGLVPVQRQSGTSVLGRSCISKNGPSSIRAILYMAAMTAIRFNPHIKTMYLRIISQGKSKRSALCAAMRKLVHLCFGVIKTRKPYQSDYPISA

SEQ ID NO: 303829 - protein, 376 aa, unidentified
MERGSLMLNTTTFVGLDVHARSIKAVALDAMTGEVRSATFAYDAAAVAEWVGSLDPAAKCVYESGVTGFDLQKKLTALGVDCVIGAVSKMIKPPADRKRKNDRNDAEFLARMLSVGNVIEVWVSDDECEAARDLVRALDDARDDLKRCKQRLSKFLLRHGLVFSETTPSGQRKGNWTAAHWAWINAISFKERADNEVLAYYVDAVRQKLEDKRRLEALVKDEASKARWRKRVDSIRCLKGIDVMSAADLVFEADEFSRFKNARSFGAWLGLTPSEHSSGESVRQGGITKAGNKHLRRVLVESAWHYLNASAHSKDLAKGQIPDPAARRHAAKGVRRLVKRREGMLERGVHKNKANVATARELAAWVWAVGCIVESA

SEQ ID NO: 303830 - protein, 329 aa, unidentified
MNQQGGVAAGAGPNAGIDVSKQHLDVCFADTARRLVNDANGWDELTAMLEAASIDLVVVEATGGYERGVVSALQHAGIAVARVNPRQARDFAKSLGVLAKTDEVDARVLRDFADVLARHPGRERYITPLVEAARLELAELMTRRRQLVEMRVAERNRLEQAGKSTRRGILSVIKLLDKQLGVIDADIDDHMDRHFKQQRELLDSVKGVGPVTILTLTAALPELGTLGRRQIAKLVGVAPLADDSGKRQGKRRTWGGRAHVRAVLYMAAIVAVRHNPVIREFYERLLAAGKPKKVAIVASMRKLLTILNAMLRDKSTWAAARHVQEASPA

SEQ ID NO: 303831 - protein, 402 aa, unidentified
MNFFVGLDWASQAHAVCVLDATGQVRWQGSVPHSAEGLAELRRQLARFGPPASIPIALERPSGLVVDTLLDAGHPVVPIHPNALKASRPRYSAAGGKSDPGDAFILGDLLRTDGHRFRPLQPLADDTRALRALVRSRDDLVVQRVALANQLRALLDRFWPGAAAIFADIDSPIALAFLSRYPTPHSAERLGEKRLARFLGQHAYCGRRPVPELLARLRSAPLSQTGELEAEASGEIVRVLVAVLLPLVAQIQQLSAAIAAALPQHSDGPLLQSLPRSGSVNAAQILAELGDDRTRFPTDEQLAAEAGVAPVTRESGKHRAVSFRWACNKRLRQALTTFADNSRHASPWARATYADARRRGCDHPHAIRILARAWVRVLWRCWQDRRPYDVTLHRAAQRVAAA

SEQ ID NO: 303832 - protein, 360 aa, unidentified
MSGTVTWVGLDVHARSVVAAVVSAESGEVVRGRFGGEAEPVAAWLARLPGPVHACYEAGPTGYGLARACAGVGVRCDVIAPSKTPRAAGERIKTDRRDAERLVRLLMAGSLRAVAVPAPEVEAVRDLVRARAHVRDDLARARQRVSKMLLRYGRVYPKRVCWTKQHRLWLADQRWDHAASELAYLDYLAAVDGLVARRAAIDERLSRIAQEPRLWPTVARLRCFRGIDTLTALGLTVEIGDWHRFARPAQLSAWLGLVPSLSQSGESLTRGAITKTGSQHARRLLVEAAWHYLRIPRIGATLDQRQAGQPAHVLAIAWRAQTRLYRLYHRLRERGKPPNLVTVAVARELAGFLWAAALAP

SEQ ID NO: 303833 - protein, 317 aa, unidentified
MAKDCGVGIDIAKATLDVALSTASGQPWQTTNDEAGWAAVVAYVAPLPPRVIVLEATGGYETGIATALTAAGLPVAIVNPRQVRDFARALGSLEKTDRLDAAVLAAFAARIQPTPRPLADDLQADLHARVTRRRQLVERCTAERNRLPLARGAVRKNLLAHIAWLEKQVSQTDRDLRRRIEASPIWRGRDQRLQSVPGVGPTTSACLLAYLPELGTLTHRQISKLVGVAPLPDDSGPRSGYRRVQGGRSDVRSALSRATVTAITHNPTIRAAYRRWRAAGKLPKVAIVAAMHKLLIHLNALLKHQTDWHARPVAPTA

SEQ ID NO: 303834 - protein, 428 aa, unidentified
MKKRSYRAVKVQDINAEKIARSIDRTQPCILGIDVAKEDFYAGVGGADGRAKHFIKWKHPVETRDFLRLVSELQKAGFRLQAAMEPSGTYGEALRYQLQRLEVPVYRVDPKRCHDLAMVLDGVDSQHDPKSASLLVYMQSRALSQPWPQQSEQRKELRARVMKRELYADPLRRHYGRLEATLAAHWPELSYILDVYGGSILALLLRYPSPAEVARDAEGAATLLRKYSRGRLGTEKIDQVIESAKNTLAVPMNAVEQEVLKALVEEIERLGGQEAQCDEILKQFARQSPATRNMCDTVGLITSVVLVALAGEPSEYACAQAYQKALGLNLKERSSGKHKGRLKITKRGSGTARKYLYMAALRLIYKDPVVSAWYDKRVHPEHKRQAVVAVMRKLAKALWHISRGSTFDATKLFDVRRLDLGEQHKQAA

SEQ ID NO: 303835 - protein, 450 aa, unidentified
MSNGNGVSRGDRNRNARLVRLRALVRVENAIVGIDLADAKQMVVVCDHDSKVLARKTYRCRAWDLGAALDWARERAVAKGFAGVTVACEPTGHRWRVLGQLAQQRGMSFVCVQPMQTSLARRSEDLTFDKTDEKDAVLIARLTAQLRCYEPEPVDETWGRLRHLGARREPLIAETSGQVQQMRDLLECVWPAALDTAQQPFRSRTWVAALTVIVDRDGGEFARTRRLGPARFEQAVRREIARRGGHKPCRRITRNLFAALADPAGVIAHRAGALERVQLLLEDWAHAHQRLADTEARMTGVLDELELTGLVTSITGISAVGAAAILAQTGDPRRFATARALVKHAGLAPREKQSGTFTGRTKLTGQGRPGLRLAAWRAVWGAQRANPVYGARYRHLTSREHNRLKPTQAQTVIAAAILRHLHAVISTGQAWDPHIATHGTRTVMPITVAA

SEQ ID NO: 303836 - protein, 353 aa, unidentified
MKRTTKYVGLDIHQASTVVSVREDSGRVIARSVLPTQGPALTEFIGGMRGAVHVALEEGTQAQWVHELLTPIAHRVLVCDRRGDARRGTKGDQADADALSEALCRGGLRAVYHGSGPQATLKELTRAYQQLVEDATRVMLRLKALFRARAIPTPGAGVYHPQERARWLALLTDRGARFRAEALYAQLDQLRALRPKAKAAMLAEATRDPAWVVLRAIPFLGPVRVALLLATMQTPWRFRTKRHLWAYTGLAVVTRSSADYTIVHGQPVRRRRAPLTRGLNRNHNRILKDVFKGAATAATARRGPLQDFYHGMLARGMRPELARVTLTRNLAALTLRLWKRGERYDPRRLTRQA

SEQ ID NO: 303837 - protein, 338 aa, unidentified
MIAVGVDTHKQQHHAVALDGLGQVLGEIVIATTFAGYSQFVCWLRELGESVLVGIEGAGSWGAGLCEFLQAEEVEVFEVERPQRRERRGGKSDRIDALLAAKKVLTREGLSTPRGSGKRLALQMLLAGYRSIVSERSRLYNQLQALQVSAPYALRERIGQARNGATLANRLTGMRTRPTASQQENLTLQVLRDIANRARALDAEAESYTHQIEEMVNSLAPALLEEPGVGPICAGRLLAFNPSRFTSEAAFARANGTAPQPASSGKTVRHRLSRGGDRQINAAIYTIALSRSVHHPQSRAYIQRKITEGKTKREAMRSLKRHLSRHLYNQLAKTPLTT

SEQ ID NO: 303838 - protein, 401 aa, unidentified
MDPHLCVGIDVGCRSHRVGIALPDGSILEEFDISHSDAGFQEFFRRVDEHRNRLSLPVAVAMEGYNGYARPLDRLVQDKGYRLYNVNNLKLARFKEVFPGAAKTDPIDARKILELFRLKDQLPLAKDAIQEVVTAPVVNEKLKRLSRRRRHLVIEKMRVLNRMQADLQAVCPELLAATNDADNLWFLRLLTFRDDLRQLARLRRSTILQIPSVGQKYAGLIQAWQAKAQFSSEVEYVGPMIIQDARRILQLREQIHALDEVMAELADQSEIARRLSTIPGFGKTSIAELAGEIGTMERFASEASLALYLGMCPLTHQSGEMCRARIPRQVNTRCKSAMMTTVVRHIGCVPQSRAYYDRKRAEGKTHNQAIRSLGRHLVRVIWAMLRDGRDYEIREDQHSTA

SEQ ID NO: 303839 - protein, 395 aa, unidentified
MITCGVDPSRGSICVSYVEDMVEIDYKEYENGPGGYKVFVEDIHGMGGVEGVYIEGYGDTARSLMVYLKEEGIKVYEVNPHMLSRLREGITEQKTDHIDSYVCGLIPFFWDIKEIKTKLEVEEIKVLGRAYIRVIREIVRFKNQLHSSLHHVFGKEYKRMFRELNETSIRFFMRFNSYEKIKGASVEEIHEVIGSVGSKRYKGEHGLRKAMEIKEIAEGVEYSDGMKELLEAEGYIITVWGELLLKSMEKAKELKEAIEERVKEVFPGYKEYFRDIRGMTPLRFGILMGEIKDIKRFSKEGELASYAGQAPCKYQSGLREKERHKRKYNRFLAHVIHQIACDNVRKNAMYYEEYKHQKERMRVKLRALKTVKRKIVRLLYYRLLAYENLILNNAA

SEQ ID NO: 303840 - protein, 342 aa, unidentified
MKFYCGIDLHAKDSYLCVIDQKEKIHLRKKVPNQLPIILHELCQFSPKPSVVLESTLNWYWIVDGLQEAGFKVKLAHIFGLRLITGAKVKTDRRDAFSLAKLLRLDAVPEAYIYPKEKRPIRDLLRRRNRMAALRGSTYMSMKTILLQHGIYGYSLTAIKAFDEDQITKHFDHPAIQASLQLELERSRLYTREINVLEKTILETVADEPLFELLRTIPGVGTILALTIFYETGDIQRFDGPKQFCSYARVVPGVAQSGSTTRRGRGSKQGNPHLRWAFGQAAAIAVRYDSPVRRFRQAHLDRRRSKGRKMISLSIVAHKLAIGAYHVLKGNVPFRQELMFSA

SEQ ID NO: 303841 - protein, 422 aa, unidentified
MLRQTQDNEEIIERVAALDIGKAEVVCCLRVPDEDHPGRRLQEVESYSTMTRSLLSMSDHLACLGVTRVVMEATSDYWKPAFYVLEAAGFETWLVNAKDVKHLPGRPKTDKLDAVWLCKVAERQMLRPSFVPPPQFRTLRDLTRYRADLVAARTAEKQRAEKLLEDACIKVSVVVSDLFGASGRDMMAALVAGERNPKVLAQLARRRMRSKITVLEEAFTGHFTDHHAFLLARMLGRVDAISADITDLDTRIEAEIAPFADVVARLDEIPGINLAAAHAILAEIGLDMTRFPTAGHLTSWARLAPGVKESAGKKKGKASTGHGNSYLARVLGNAAAAAGRTDTFLGERYRRIARRRGAQRAVVAISRSILVIIWHLLSDPGTQFCDLGSGFYASRIDPDRRKRNHIRQLEALGYTVTLQPAA

SEQ ID NO: 303842 - protein, 360 aa, unidentified
MSSTNEPTRSVVIGGVDTHKDLHVAAVVDHQDRVIGSRSFASTRQGYRQMLAWMRSFGELQRVGVESTGSYGAGLLRFLQQAGVTVLEVTAPDRQDRRKRGKNDDLDAQNAAHAAFSGQRTVTPRSRDGMIEALRVLVACRKTAVTARRIALQMIHNTIAAAPDGLRDLLRAMTRMQLVRTLAAWRPDLTAYRDVEAAYRISLKSLGRRYLELHDEIADLDVMIAAIVDDLAPTLITRNSISHVGAAQLLLTAGGNPERMRSEASFAALCGVSPVPASSGKTVRHRLNRGGDRAANSALHIIAIGRLRTDQRTKEFVARRVAEGHSKLDAIRALKRYLAREVFTLIMQRQREINASRIAA

SEQ ID NO: 303843 - protein, 338 aa, unidentified
MDHFVGIDLHSNNSYIAVIDTDNNRIFKKKARNNLKEILKLLTPFEKQIKGIVVESTYNWYWLVDGLIDNGYKLHLANPSAIKQYEGLKHSDDVTDAFHLANLLRLGILPEGYIYPKHERPLRDLLRKRIHLVHHRTALILSFQNLVSRNLGRTMHVSTISKLNEEDLEDLFEDEYLILSAKASISTIHFLKSRIIHLEKAIHKAAKLTKEYKLLKTAPGIWNILAVMIMLETGPIERFKKVGNYASYCRCVQSNRFSNSKSKGKGNRRNGNKYLSWAYVEAANHALWNYEYVKRYHQRKTAKTNNIVAIKAIAHKLARACYYIIRDQKEFDPAKAFA

SEQ ID NO: 303844 - protein, 340 aa, unidentified
MEQYVGLDVSQKETVICVIDGNGKQVWEGVCSSTPGAMAAVLHRKAPLAVKIGMETGPLAVWHWHELRRAGLPIVCLHARHAKAALSVQSNKTDANDAFGLAQIVRTGWYREVEVKSLESHALRLLLAGRARLVSMRTTLYSQIRGLLKTFGVVLQAGKGGTFERLVIKGVPADRHVKLVIESLMATWRHLTLELRKFDREISKISSTNPTCRRLMTLPGVGPITALAYLTTVDEPRRFARSKDVGAYLGLTPRRYQSGEVDHSGRISKCGDRMTRSLLVEAAGVLLCRNKRASVLKSWGLKLRRRVGFAKARVAVARKLAVLMHRMWIHEMVFQSNPAT

SEQ ID NO: 303845 - protein, 412 aa, unidentified
METIVERPAALDVHKAQVTACARVPDARGRREQHVAEFATTVRGLLALRDWLAGHGVTQVVMEATGVYWKAPWAILEDEFDCMLVNARHVKQVPGRKTDVSDAAWLCQLAEAGLLKANFVPPKPIRQLRNLTRYRKTQIQARAREVNRLHKALEDAGVKLDTVASDILGKSGRDMLDALVAGETDPNVLAELARRQMRKKIPALRDALAGHVDAHHRLWIGAILRHIDFLDEQIEQLTGMIEEQIRPFSPAVELLCTIPGIQHRGAQCIIGEIGIDMTRFATARHLASWAGLCPGNDKSAGKRRSGKTRDGSKWLDFALEEAAMAAIRVKGHYLEAQYRRLKPRRGHKRALGAIKHTMIGAIWHMLCTGETYHDLGGDYFTNRDPERQTKRLLAQLERLGHHVTLQEGAAAA

SEQ ID NO: 303846 - protein, 386 aa, unidentified
MQASTLGTPTVDHCGTIFVAIELSQRSWLITLHSPARDKISRHKLEGGDHAGLLALIDRERDRAIRMRGASPAVASCYEAGYDGFWLHRLLLAAGITNYVFDPASIAVDQRARRVKTDRIDGEKMLRTLMAHLRGEPRVVRIVRVPAVEQEDARRASRERDRLIKEQTAHTTRIKALLRLLGMAVGNPRRRDWLNWLAAQRDWQGQAVPPRMLSEIRHEHARLMLVRERIEALTQEAAAADPTAAEAQMIRRSELLLRLKCLGPAFATTLTSEVFYKDFRNRREVGSYFGLTPSPWQSGGIDRDQGISKAGNPRARCAAIELAWLWLRHQPDSSLTREYRKRTLDAGKRIKRVAIVALARKLMVALWRYLTTGLVPEGAVLKAAKA

SEQ ID NO: 303847 - protein, 345 aa, unidentified
MPIVGGLDIHRKQITFDYLDTGTGQVQRGQIAPADREHVRAWLARFAGREDVAFAAEGCTGWRYVTEELAAAGIAAHLAEPADTAFARGRKRHAKTDKTDCRHLRQLLAEGRLPECWIPPSHILECRALLETYHDLRAEHTAWVQRIHAVLFHQGAPALGEGTLRTEQGVAALRTAAAAHLSPAGQLQVATALDMTDMLESRLHELRHQLLDAARHLTGAKVLAERLYGVGPVTALAMTCWLAGEGRFSSSRKAVRFAGLDVTVYSSDRKGPPGRLSRQGPPVLRWAVYEAGKTHARSSAPDHRYYAQVKDRCNGKRAALSEARKILRQACHILTELGDDALSAA

SEQ ID NO: 303848 - protein, 384 aa, unidentified
MEKSSTLYVGLDVHKDSIEIATADAGRDGEVRHVSGIGGDLVALDKALRKLLSKGHRLHVVYEAGPCGFVIWRHLTAQGLTCEVVAPSSIPKRPGDRVKTDRRDAMMLARLSRSGDLTAVRVPGAADEAVRDLVRAREDAVREQRNARHRLKALLLRNGIPYAGKTSWTAAHLRWLATLKLEHAAQQIGFQEYLHSITEAGSRIARLEQAMRDTLSEWTLKPLVQALQAMRGVQLIAAMTLVAELQDFLRFENPRQLMAYVGLVPGEHSSGPKRRQGSITKAGNSVARRMLVEVAWHYQHSPRVSPIIATRQDQLPKEITDIAWKAQLRLNAKYKRLVARRVMKTKAVVAVARELAGFVWAIGQEVQTSGWQGIEIKPASSTRA

SEQ ID NO: 303849 - protein, 324 aa, unidentified
MTQAVLGIDVGKSKLHVCLLLPLGKSRAKSIDNTSCGHTELLDWLQQQQAGTVHACMESTGIYGNEVAEVLYAHGHTVSIVNPARVKGFATSEMVRTKTDKVDAGVIARFCAALKPAPWQPPAPQMKQLQALVRRLEALQQMHRQESNRLEAASAEAVRASIQTLVTHLETDMETIRQAIRDHMDQHPDLKQQQDLLMSIPGIAETTATAILAEIQSWQMFENARQLAAFVGLTPRERLSGTSVRGRPQISRTGSNRLRKTLYFPALVAKRHNPLIKAFCARLEGRGKRKMQIVAAAMRKLVHLVYGVLKSGKPFDPEYAKAGT

SEQ ID NO: 303850 - protein, 337 aa, unidentified
MKKYLFFVGIDVSKSKLDVTFLEKPLGKKIVHFVVSNDNKGIKEIVKQLNNRKIALEEVLISFEDTGVYSLPLGCYLTRYKIDYWMIPAIEIKRSKGISRGKTDKNDSKDIAFYTLTHLHKLRLTQLPELSLMELKLLFTEREKLLKSLRIIGSTSEGIGYIPKEAMGDVLKINKVVIKQLQKAIEKVERKMKEIIQSNEQLKLQNELIQSIPGVGPQTALYIILVTKSFQSFENWRQVACYAGVAPFQYSSGSSIKGRTKVNHLADKKLKSLLNMCALNSKKHDAELKQYYARKVGEGKSKMLVLNNIRCKLLGRIFATINRGTPYVNIQKFAAYF

SEQ ID NO: 303851 - protein, 343 aa, unidentified
MDKFGAAGVEVSAKVLVVALQTDGQLRSSEFPNTGSGHKQLIRFLHRYSHRVRVCMESTGLYGLDLALALQGEKGIETMVANPRSVRHFGEAMMKRSKTDPIDAKLLAEYAQRMPFHAWQPPSKAARQLCAIARAIHQLTEINTMQKNHLHAAGSTATTPKIIVQELRRSLARQERAIKRLLQEAMQVLQPDSVLQKRFQLLLGVSGIGELSAVQLLGELVLIPAACDVRQWVAYAGLDPQQYKSGESVERKVRISKAGNRHLRRALFMPALVAVRHNPHFRAFYRQLLGKRKLKMVALVAIMRKLLHGIYGIFKSQEPFDAAKLFPSSLVSDLEPATKKMAC

SEQ ID NO: 303852 - protein, 355 aa, unidentified
MNSEKYIGLDVHQATISVAVLDSTGKLVMESILETKAATILELLAGLRGTLSVTFEEGTWAAWLYDLLKPHVAKLVVCNPRKNALLKDGNKSDRIDAHKLAELLYLNKLSSVYHGETGVRMLRELARSYLTIVKDLTRVMCRLKAVYRSWAIPCAGRDVYYTRHRAEWLGKIKEAGVRRRAERLYQQLDMLQYLRQQARRELLAESRKHAITVKLRQIPSLGPIRSALAVALIQTPHRFRTKRQLWAYSGLALETRTSAEYCYVKGGLRRSKKQISIRGLNKDHNHDLKGLFKGAATRASVLPGPFQDFYQRSLAKGIKPTMARLTLARKIAAITLTLWKKGENFDADKLKSQAA

SEQ ID NO: 303853 - protein, 345 aa, unidentified
MELHTAGIDLGKTVFHLVGVNLRGEVVVRKKFSRTQLLHFTANLQVALIGMEACGGAHFLGRALRGQGHEVRLIPAQYVKPYVKTNKSDYIDAEAIAEAVARPTMRFVPIKTDDQLDLQSLHRVRERWVMRRTAVINQIRGLLLERGITVRKGRRYVDAALPLILEDADAKLSGALRILLAQLKLDLDQLAERIDEADAVIERTAGENEACQRLVAIPGIGPVTATALIAAIGNGGAFHKGREFAAWLGIVPREHSTGGQQKLLGISKRGNSYLRRLFVQGARAVLQQRTKQSSGLSAWLAQLTSRTHHNVAAVALANKIARMAWAVLAKNEQYRPPVLADVAAD

SEQ ID NO: 303854 - protein, 430 aa, unidentified
MKYNTQNAKIASITEETLVLGIDVGSETHYVRAFDWRNYEFSDKPLAFSNDEAGFLTFMAWVEDIKEKAGKTAVIPGMEPTGHYWFNLGKFLQDSGMRPVHVNPHHVKKSKEMDDNNPDKNDRKDPKTIAALVNEGRFSYPYIPTGVYAEIRSLSNLRFQTQEEITRIRNRIARWISIYFPEYKDVYGKLDAVSGMMVLKEAPLPVQIKELGAEGINQIWRNAKLRGAGMKRAKTLLSAAEHSVGSQEAPEAASLEIRNLLEDYEKYSSRMDGLMAKIEEKTKEVPYVDKLLEIKGIGLKTVCGFIAEVGDLSRFDDPKQLQKLAGYAIVKNSSGKHAGESHISYRGRKRLRYVLYEAAISVIGKNDGFREIHRYYQTREKNPLKKMQSVIAVACKVLRVFYAILTKGVDYDGEKMLGDIRRPERGVQAA

SEQ ID NO: 303855 - protein, 430 aa, unidentified
MKDIMAGIDLHSNNLMLALVDSQGKRLFHKRLPCKLEDTAKALAPFRKRINTIAVESTFNWYWLVDGLDELGYQTVLANPAGIVQYEGIKDTDDKHDAFWLAEMLRLKILPTGFICERTLRPVRDCLRRRLGLVHKRTALILSLKSLHARMHGSALELGQIKRMSVDEVWRLFDNPSDQLVAREDQRLIQELGQSIERIESHVLKRAQKMPEYKRLLTIPGIGRILGMTIALETGDVKRFASPGDYASYGRCVRSERRSNGKKKGENNSKCGNKYLSWAFVEGANFAQRYDQPAQSFYERKKAQTNTMVATKSLACKLAKAAWHVMSKDVDYDSQRIFGGPQSPASGQEGCGAHQRKVSFSPGTAVENSNQKEKQAGEINTSPIEGSQLAGQAALGLRSRRALPSAGGGKRSKGGGAKPDKLNTNRAMKK

SEQ ID NO: 303856 - protein, 415 aa, unidentified
MKKHNNSAKKSEPTSKRTKSLGPVRRDTKEVLAELVAKLKEKLDSKKVAARSGEEDERGELRPNLDRLTVGVDLGDQWSHYCILGLEGERLAEGQLRTSEEDFATFFQGLNAARVVVEVGTHSAWVQEVIRGCGHEVLVANPRLMDGSKRRKRKNDRIDANKLARLGRVDPESLYPIQHRSREVRQDLVMLRARDALVAARTELINTTRGLVKSMGTRLPKCSSRSFAQKGEEAVAVEMREALLPLVRLAATLSADIKEYDKKIAELGREKYGHTALLRQVKGVGPITALAYVLTLENPKRFAKSRDVGPYLGLVPKQEDSGESQPQLGISKAGDTMVRKLLVGSAQYILGPFGPDTDLRRYGLRLCERGGKNAKKRAAVAVARKLAVLLHRLWVSGEVYEPLHHAKSVPIAAAA

SEQ ID NO: 303857 - protein, 393 aa, unidentified
MEVRVVNTPSAGRNNDPVHCFVAIELSKSNWVVGFQTPLTDKASRHQVKAGDAKGLIELIERVRMRVGRQLSRPVEIVSCYEAGYDGFWLHRVLEAHGIHNHVLDPASLQVSRRARRPKTDRIDAERMVRALIRHLRGEPEACSVVCVPNVEQEDAKRLHRERRRLIAERVQHVNRIKGLCATQGIYDYSPLRKDRLARLDGLRTGDGRALPTRLKAEIVRELKRLELVIEMIATVEAERDAILTNPASTHVPASTHVNAGKIKMLAKLRAIGPEFATNLVGEVFYREFANRRKLGSYVGLGSSPFCSGSVDRDQGISKAGNSTARSMMIELAWTWLRYQPGSALSVWFRERVGNLKGRPRRIAIVAMARKLLVALWRYLETGLVPTGTALKA

SEQ ID NO: 303858 - protein, 449 aa, unidentified
MSEIEKALAEEPAFAAFVAIDWADKKHAWALQATGSRLVEEGELVNTPEATQVWAAGLAQRFPHQLIAVGLEQRRGAVIAMLSKYAHLVLFPISPTTSAKFRQAFFPSGAKDDPADARLLLEVLLKHRDRLTPLRPDTVATRALQFLTEDRRKLVDQMTAYSNQLTGYLKLVFPQVLTWFEVHTAVLCALLERWPSLQKLQQARRSTVEQFLREHNSHNAERNRERLDSLAGAVAATDDAALLEVAQLAIATLLAQINGLRKSIAEYGARIEKHAKAHADYHIFSSFPGAGPALTPRLIAAFGTYRDRFATANDVQCFTGIAPVREASGKQLWIHWRWACPKFIRQSIHEMAGHSIRFCGWAREYYDAQRAKNKGHHVAVRALAFKWLRIMFRCWQDGVAYDEARYLQARLTRRQAPAGPADTPTPSLKKPRVLMKSSGGFTKVAGLEV

SEQ ID NO: 303859 - protein, 465 aa, unidentified
MKRHHRPHPQQPASRPALLERINANAAGIDCGAEAHYVAVPPARAPTPVRAFKTFTADLHRLADWLAACGVTSVAMESTGVYWIPLFEILEARGLEVLLVNAHHVKNVPGRKTDVVDCQWLQELHSVGLLRGSFRPAAAIAALRAYLRHRETLVQSAATHVQRMQKALVQMNLQLPVVISDISGVTGLRILRAIVAGQTDPHALAQHRDARCRASEAEITAALTGHYRPEHLFVLQQNLELFDAYHRQLAACDVAIEAHVRTLAAQAPAPPAPLPTPRTSKKPRDNEPRFDIRTPLHHLTGVDLTQLDAIGPYSALRLLAEIGSDMSRWPTEKHFTSWLTLAPHNKISGGRLLSSKTPRSANRAAAILRMAAMSLGRTETALGAFYRRLAYRVGKAKAITATARKLAILVYRTLKEGLLYHDAGAAAYDAQHRTRVLRRLRQRAANLGFALVYRDTGEVLEGAVS

SEQ ID NO: 303860 - protein, 412 aa, unidentified
MNQIRDKVAGLDVHRDTVVACCRVQRRGRGAAVTKRSFSTTTTGLADLAAWLAESAVSTVAMEATGVYWKPVYYALEGLFPELWLCNAPHVKNVPGRKTDLSDAEWLADVAAHGMVRPSFVAPPAIRQLRELTRYRKTQVDMRTQEIQRLEKVLQDAGVKLSSVASGVWSKSAREMIEAMIAGERDSAVLAQMAKGRMRTKIPQLEEALAGRFGDHHAVACRRIIDHIDYIDLAIAGLTEQINFRLDPFAGALTILCSITGVSDITAQIMIAEMGVDMSRFPTAGHLCAWAGVAPASYESAGKRRPAGTRKGGTWLRRALLEAAHAAARTKGSYFSAQYVRIARRRGPNKAVAAVANSILTVAWYLLSNGELYDDPGADYFTKRHDPAIEAKRLQRRIEALGYTVTVTEQVA

SEQ ID NO: 303861 - protein, 350 aa, unidentified
MTMVGGFDVHRQQITFDYVDSDGLVRWGQIRPATRDTLRRWLGEHCPDGDAEFALEGCTGWRYMSEELAAAGVGVHLGDPAEIAALRGPKKRAKTDRADARLLRMLLLEGRFPESWVPPAHVVEMRSLGRLYCTLMDERRAWQQRIHAQLFHQGCPPITALLSVAGRDALARAELSTTGRQYVDTALRRIDELSDEIDPLRAQLVRFARRQPGCQALQRHYGIGWLCAVIIWAEIGDARRFASSDQLVRFAGLDVTVYSSDGKRSPGHLSRQGSPELRWAAFEAAKCAARRGSPDYAYYHKLAAKHDGHNGKNPPLAVERKILRRCYHTLRELGDAALALPDTQPQQAAA

SEQ ID NO: 303862 - protein, 449 aa, unidentified
MSRPQVIDDEQHERVRERVAAVDVAKDSGMVCTRTRHPSRPGARRSTVWTVKARMGAVRALGRQLHKDGIEIVTPESTSDYWRIWFFILEACGLAVQLVNAAQAKNLPGRPKTDKLDAQWLARLTEMGLLRASFVPPKAIRDLRDYTRARTRLIRERTRCWQRLEKLLEGALVKVSSVASKLTTVSAQDMIKAMIAGERDPHVLAGLARTRMRAKHDDLVQALDGMFDDHHGELAGLLLDQIAFLDGRIAQLGARAAELTAAMPEAWGINADGTTGPDAGGTPGAPVLPAVPRLAEIPGISEDLARAIIAETGLDMTRFPTAGHLVSWAGLCPSARQSGPRTRAGKKGQGNGYLRGSLGQAATGAARTATFLGERYHRIARRRGKAKAQVAVARSILVIIWHLLADPAARYTDLGASYYQTRTDTDRKLRNHIRQIQALGFEVTLTKTP

SEQ ID NO: 303863 - protein, 360 aa, unidentified
MINVGIDVHKKRCQACLKDEKGRLIEELSIPNTTEGAEQLARMLTTYGEAKIVLESTGNLWIRLYDTLNQHAPTFKVVLANPNKTRIIAEAKIKNDRMDARVLADLVRADLVAESYVPTNEIREERALLRQRRSLVNDIVAVKNRIHNQLDKYDLQPHYSDLFGKQAREWLRNLQLPPIERTILDVNLKQLQSLEESIQAITVKIAQEAIHQPDVKLLMGFTGIDYYGAMLLINEMGPVTRFPSAKKLVSYAGLAPGIRQSADHTVHGRITRDGNKYIRWILIEAAQNASRFDPKLRPFYLRIAARRGHQKAITAVARKMLVFIYHVLKRREEYHGQRDELLERKINRLQRTVDSSLQAK

SEQ ID NO: 303864 - protein, 337 aa, unidentified
MQVYGIDLSKEKFDVNFFDADGKQKNKTVKNGLTAISKFLSKVPEGSVLCAENTGTYGDLLVFLCNQHGVSISLVPGYTVKHSLGLIKGKTDPIDAARLREYGERFFDKLTFKEYQSENVSELRQLHSLRSQLVKSRKMLRTGEHAREQMPMQSIRVKQILKSALEILDTQIRAVDEEMIKIIKSDEQLVENYELSVSVVGVGPVIATEMIIKTGNFKTIDSSRKAASYAGVCPFPNASGNMVGKSKTSPFADKELKTLLYMGAKAAVKHNKEYRLYYQKKQQEGKPHYLIMNNVMNKLLRTIYSVVNSKTPYSRDYICLDPRESNKNHNGSEKIVT

SEQ ID NO: 303865 - protein, 319 aa, unidentified
MDSMYYIGLDVHKKTISYCVKDGSGQIHAEGAIPATRFDLDRWMKTLPQPWTAAMEATLFTGWIYDHLHPHAAALKVAHPLMLRAIAAAKKKNDRIDANKIADCLRCDFLPECYMASTEIRERRRILRYRNLLVRQAVQLKNKIAVLLMEAGVSYNKQKLHKVGYFRELLATNKDIDDGLRPLLRLCRETLVRLQKMDSALVRSLERDRLLAERVERLMTIPAVGPITALTWVLEIGDVKRFSSIKKAISYCGLCGAQKSSADTIKRTPLSKQRNKHLQSVLVEAAKLAPRRSPDLALVYYKERKEGNTNRATLAVASL

SEQ ID NO: 303866 - protein, 391 aa, unidentified
MSVQRRVVIGMDPHKRSVTVEVMEADETIVGHGRFGTDVAAFAQLVAYAKGWPDRVWAIEGCEGIGRHVAQRLLAVGEQVVDVPAKLSARMRMFATGQGRKTDDTDAHSIALVGVRISGLQPVVADEQLEMLRLLVDRRRRIGQEHVTKICQLHQLLLELVPGGAKKDLSAAQARKILAGVRPKDEVGKLRKRVALELVVDLERIYLRKKQANKELVTLLKTTGTGLLELRGIGPTGAARLLVEVGDITRFPNRGHFASWTGTAPIDVSSGDKQHHRLSRGGNRQINMVLHMMAVVQLRNPTEGRAYYDRKVAGGKSPNEAMRCLKRRLSDIVYRAMLDDYVATKATGPGGHRGASLRSSAAGSHPHTDTSEKSLPGPVTTKPTTDLPKAS

SEQ ID NO: 303867 - protein, 416 aa, unidentified
MNPSDPPSCVVDASSFQYVVGVDIGMESCSFCVCSPEKSLLIKPTTMTNAAQGFAQLHEQLQQLGVAPDRILIGLEATSRYGENLYHFLEGHGYELCLLHPRQTHEFAQRRGLRAKTDKLDAQTIARALLSGEARRGYVPSELIASYRELVRLHTQLNDEVARYRNEIHAELSVLFPEFTQVFADPSRPTALAVLQLYPSARAMAAASVESLTTKLRELAPRKYGERTAKLLVALAQHSVSSGRATAARATSLKILCNQLQQTQKNLALLEAEIDRLLVGDSGASGLGSVPEFGPKTVVVLRAELGDVSRFQRMDQAVAYAGLDIQVKESGKWKGQAKLSKRGSGRLRRILYLAALRCTRLAGSAFGVYYHRLIARGMRKREALMAVMRKMLIVAVHLLKTEEEYDPGKVAVAGAG

SEQ ID NO: 303868 - protein, 411 aa, unidentified
MAKRFEAGAEEDRAVAQALKLGCRLAPPSHLRLVKSNRIQRKIYPRKSAHTSMSPMPGVLEKPTALASSQAANEPKRKIGKENKTMNSTDSVAAALPVLGLDVAKASVQAELRSSGNKVRFGFDNNLKGFAQLAGILKEHNVPKVWAGLEATGPYSHALALWLHGQAHRVSLLNPRRVKQYARSAGKRNKTDLLDAAIIADFVCAHEPAPWQPPTLEVAQLQALVRRREELSSMLQAEKNRLEGVAPNVRSSLERILATLSAEKARLEKLITQQIRSHPQLSRDHQLLCSIKGIGSLTAAILLAEMARPGQVERARQAAAHAGLVPRREQSGTSVRRNRGLGKEGNRYLRKALYMPALVAIKYNAPLRHFASRLRAAGKPKMSVVCAVMRKLIHIAFGVLKHQKPFNPSLA

SEQ ID NO: 303869 - protein, 405 aa, unidentified
MVRYIGMDVHREFAQLAVVEDGLVRDEGRIGVTPEALRRWAVGLRADDQVALEATGNSDAIANLLGPLVGRVVVSNPSKTRAIAEAKVKTDKVDARILAQLLAADFLPPVWLPDERTRSLRRQVMRRAHVVRQRTRIKNQVHAILARNLVPTPPVSDLFGVAGRHWLSRQELPADECSAVAALLRQLDFQGGELAAVDKELAAEALADPVVARLMTIPGVDAIAAISIVAAVGDFSRFASPDKLVAYVGLNPKVRQSGNSAPVHGRISKAGRAQVRGVLVEAAWSASHAPGPLRAFYQRIKARRGFQTAVVATARKMTVLAWHLITKDQDYAFARPALIAHKRRKLELTAGAPSRRGNYRQPGAAYNDKQRRNAEAAAAEHAEHAYQVLVAHWQSRKPAGQRHKA

SEQ ID NO: 303870 - protein, 345 aa, unidentified
MSVYVGIDVHRKRSQVAVVDQSGEVLVNRNVPNGVEPILRVIGGLPPGTAAAFEAACGTSWLVELLEGYGFTPHLVHSLRCKAIASARLKNDRVDAATLAQLLRADLLPEAWIAPPPVRQLRALLRHRVALVRLRTLLRNRIHAIVADYGHDRPAGVYWSGPGRAWPGSLDLPAVSRELVEDDLGLIGALQERIDRLDWEIRQRARSDPRVKVLTQLPGIGPFTALVILAEIGEVSRFGSARKLASWAGLTPTVRGSDRVAHYGHISKEGSVWLRWVLCEAAQTAKRSPQFAASYQAIAKRRGKKIATTAVARKLLTRAWHLLTDAEHAAATQPAAASAPQAGTR

SEQ ID NO: 303871 - protein, 419 aa, unidentified
MPSKKDNTSVVSVVHHICCGLDVHKKTIAACIISSDAGEGQRSEVMEFETFTDDLIKLRDWLLERECPVVAMESTGPYWTPIHNILEGYVQVILVNPRHMKNVPGRKTDISDSRWLSGLLRYGLLKAAFIPPKYQRQWRDLTRMRKNYMETAGHFKRRVHKLFQEANIKIDSVLADLFGTTGRNLMRLLVSKESSLTFSEVENCLRGSLREKGRELYRSVKGFFEEHHRMLLTVLLDTIEKLESQIVELELRISQVLKTSEELIERLKEIPGVGDVSAHAVLAELGPTLEAFPTAAALAAWCGVCPGNNQSGGKRFSGRSRVRNHHLKTIMVEIAWPAVKKSGSYYKAKYYALKSRLGAKKAIIAVAHRILKAIYYVIKHGVRFKDLGEAYLLERSKASKIRYLCKQASLLGFELKPVI

SEQ ID NO: 303872 - protein, 312 aa, unidentified
MDTKYFVGIDVAKDHLDIAVRPNGGEWTIPNDESSAMELAKRLKEIQPEVVVLEATGGYEMTAATSLAAAGLSVAVINPRQARDFAKSTGKLAKTDKLDAQVLAHFAEAIRPEVRFLSDEQSQKLQALVTRRRQLIEMLVAEKNRSPKSHKSTQKRIQEHISWLEKELDDLDQDMRKFIQESPLWRQKDQLLQSVPGIGPITSSVLLASLPELGSLDRKKIAALVGLAPFNRDSGNMRGKRSVWGGRAHVRSIFYMATLSAIKHNPVIKQFYTRLIEVGKKPKVAITACMRKLLTIINAMIKNSTTWRNQPA

SEQ ID NO: 303873 - protein, 415 aa, unidentified
MTLKIVYKICCGIDVHKTFVVACIASTDSKGVTTYESHRFSTYTSGLKDLLQWLLKHNCKDVCMESTGKYWIPVYNVLENDCSIVLAHPKYVKAIRGKKTDKKDAKWMADLFKHDLVAGSFMPPADIRQLRDLMRYRFKLTCFMSSEKNRLQNCLTVSNIQLGNVVSDTFGKSAQAILDKLLENPADTSFDLEPLVYKSLKKKLPELRDAIDGYITPEQAGKLKVIKAHYENLESRKAELEELILALAAPYQQELAILQTAPGIRSDFTAIGIISEIGTNMEAFPSAKHLCSWAGLTPTNNESAGKKKSVRVSKAGCYIKPLLVQCANAVVTSKKHPEIRNRYLRLKKRRGHKKAIIAIARMLLTALYHMLKNGENYNAELYRKSDQPPVDREITVEQAIIIARNQGYKIKSATA

SEQ ID NO: 303874 - protein, 331 aa, unidentified
MSVFVGVDIAAKTFEVVVRRDGKNARAVSFEQTPQGHAQALKQLKALNPKHVVMEATGIYYLDLAVLLSEAGLPVSVINPKSARHFAELKMAGSKTDGIDSALLAEFGERMSPKLWVAPDSTRLALRDLGRQINRLTASRTQAKNRLHALQAKSMTLPLLLKDEREGITLLDRRIDRLKRAALELVAASAQLQAQFDAMLAAKGIGELSAISIISELCVLPEHLKAPQVSRYAGLDVRLCQSGTSINRPARLSKAGNAYLRAALYMPAMSAIQHDQRAKAFYDALVARGKKKMQALCAVMRKYLTGLWVCFNCCTPFDSSKLFSDQYGKKA

SEQ ID NO: 303875 - protein, 349 aa, unidentified
MPMLADEVDVVIGVDTHKHTHSAAVVMAGTGAAVAEATVDADPDGYLALLDLAAGQPGLRAWAIEGTGGYGAGLTRLLLEAGERVIELDRPERAKRRGGEKSDSLDAVRAAREALARTQLAEPRARGERAALSVLLAARRSAVESSTDAQRQLHALVVAAPETLRSRFRGKTTTQMLRVAAGARVDARWDLETRTTASVLRSLARRSLELTKEAERHEADILAVVRSWRPDLLVEQGVGPIVAAVVLCAWSHPGRCRSDAAFAKLGGAAPIPASSGTVTRHRLNPYGDRQLNRALHTVVLSRLRYDPATRAYAERRIKEGKSRREVKRCLKRYVARQLFRLLEAPQPGA

SEQ ID NO: 303876 - protein, 359 aa, unidentified
MSAISKTCDRVVIAIDPHKASWTAAVVDASSQPVATIRVPVSRDGYRALRRFARRWPDPTWAIEGASGLGAPLTARLRTDGIDVVDVPAKLAARVRMLSTGHGRKNDDADAVSVGIAARSARTLNSAAVEGTITALRAIVDHRDDLVKTRTQTVNRLHVVLTNLIPAGAQRDLTAERAAELLRGIRPRDTAGKTLRGLAADLISEMRQLDQRIAKAAADVQTAVTASGTTLTELCGIGALTAGKILGRVGTIDRFHSAAAFATYTGAAPIDVSSGDVVRHRLSRAGDRQLNLCLHVMALTQIRQDTPGRAYYLRKRTEGKSHKEAMRCLKRRLSDVVYRQLRHDANRLDPFSAVNGRKF

SEQ ID NO: 303877 - protein, 408 aa, unidentified
MDVLIERGAGLDVHQATVVATVRVPGEGGRQMVTETFGTMTPDLWALREWLQAYGVTHVALESTGVYWKPVYYMLEDAFTLLLINMQQLKRVPGRKTDVKDSEWLAQLLECGLLRSSFVPPPPIRELRDLTRYRVQQVRDRAQEVNRLCKVLEDSGLKLTSVLTDVMGVSGRAMLAAMVEGTTDPAILADLARGRLRKKLPELRRALQGHFRRHHAFLIEQILAKVDFLDETLDRLMGEIDARLVPFEPLLTALDTIPGIDRIGAISIVAETGGDMSRFPTAGHLCSWAAMCPGHNESAGKRRSGKTRKGNRYLRGTLIQAGLGAIHSKGTALQARYHRVKRHRGHKKAVVAVGHQILEIAYYVMRDGVTYQELGADYFAQRHAERAVRRHMRQLEALGYRVTIEKAA

SEQ ID NO: 303878 - protein, 367 aa, unidentified
MIINKVAQNVETIIAVDTAKNSFQVLVVNQKTGKKKNVKVQRSKFVDHILKQGPCLIFMESCSASQYWARLFESHGFTVKLIAAQHVKAFLRNKRVKNDERDAEAIYTCGIQPDTKFVRIKTEEEQTVALLHTLRKAAVSERVEISNRIRGILAEFGIITAKGKGNFNNDIQELFEQSEQIHNVNLKNSITRLFEDYHRMEEREKELSKQINLLNKDNELVQLAMTCPGVGELTASALVAEVGDASQFKSGREMAAWTGVVPSQHSTGGRSTLGSITKTGNKYLRALLAQCANVVIQTAAHRLEKETETHLDRFALRLKSQGKPAKKIMIAVANKILRILWSMLTERKPFENKVNQLESVSDAMKLC

SEQ ID NO: 303879 - protein, 315 aa, unidentified
MSENKVEVFVGIDVCKSTLDVRIEPPGESFQVANDDAGIRGLCTRLSELAPTLIVMEATGGLEMRAAGELAARGLCLAVVNPRQVRDFAKASGQLAKTDRIDTQVLCGFGRAIRPAARPMKEALTQELDDLVSRRRQLVDMRVQETLRLQGASKVQAKSVKAHIVWLDKRIKSIESDLGTRLRSCDAWRVKDDLLLSIPGVGEITSRSMLSRCPEIGRLSRREIAKLVGIAPLNNDSGKYRGQRHIWGGRADVRSVLYMATVSAIRCNRVIKAFAERLKRTGKAPKVVIVACMRKLLTIMNAMIKSNTPWTPKIA

SEQ ID NO: 303880 - protein, 471 aa, unidentified
MTPRKQKNLHQPPSLEQQPMIHPHAAGIDIHLNEHWVAVPPESVPPPSDRWPLKLPPWVRKFGTCTADLEALADWLAACGVDTVAMESTGIYWVALFELLERRGFQVYLVNARQTRQAPGRPKTDVLDCQWIQRLHRYGLLTASFRPADEVVVLRGYLRQRQLLIEYGSHHVQHMQKALEQMNVKLREVINDITGRTGMAIIKAILQGRRDPELLAKLRHENCKRTEAEIARALYGNWREEHLFALKQAVALYEFYRKQLKECDEQLARYLGTMTDHSQGKSLGAPRKTGTHTVNEPQFGARQLLFRMSGVDLTVIEGISASTALTVLGEIGRDMSKWPTVKHFVSWLGLCPQTHLSAGKRKKGRVRRIAGRAGRALRMAAQGCHHAKNALGAFYRRVQARAGAPKAVVATARKIAERVYRLLKYGAKYVQEEMNAYEEAYRQRLLKGLARRAKELGYQLTTLTGATGATP

SEQ ID NO: 303881 - protein, 413 aa, unidentified
MMSALVYRFHVGIDWATEKHRVVVLDAERRVVREREVCHEGAALESFADWLTHLAASAVETVAVAREVPRGAVVDVLLARGFHVFALNPKQLDRFRDRFTVAGAKDDRRDAQVLASALATDQPAFRRLEPEPPLLLELRELSRLEDDLQEELGRLTNRLREQLHRYYPQLLHLVPAADEPWLWTLLERAPTPSVAQHLPRATVRTILSRHRIRRVDTDAVLATLRAPALPVAPGTVQAAQRHLAVLLPRLRLIHQQRAECATQIEGLLERLGESQEHRDVPILRSVVGVGRVVAATMLAEASRLLAARDYHGLRAQTGVAPITRQSGRRTLVCMRYACNPRLRQAAYHWGQSAARHDPVSRAHYERLRARGHNHARAVRGVVDRLLHVLIAMLTAGTLYDPARRRLPVGEAVA

SEQ ID NO: 303882 - protein, 377 aa, unidentified
MLNTKTFIKTADKLFIGMDLHKNTSTFVVKDKEGKLVNSAKVLTDKNDVTRYIYSLKRNNGNKELSLVVEPVSQWYYYADLIENLGVDVHLAHPMDVKAIAHARIKTDKIDAGVLADLLRTNFLPEAYFAPAEVRSWKEQCRFRASVINLRTQVKNKIHAILFKHSLRHNFSNLFGKSGRRWLAGLDLKEPFKTNLDKYLNLVDYLTTEINYAEERITNTVINCPQANLLISIPGISYCSALTIMAEIGNIDRFISVKHLQSYAGLIPSTYNSGDKQIHGKITKRGSKWLRWIMIEAAYHQMNCKRIPGFGSYYNTLKKRKGSKTAAVATARKLLAVVWRLLKDNRPYEAIDPRCWKSRPIASKYSSVSTVVNTTED

SEQ ID NO: 303883 - protein, 343 aa, unidentified
MAIIGGFDLHRRQLTYDYLDVVTGEVERGRVVPADRGHLRSFLARFERPGEVAFAVEGCTGWRYVVEELERAGIGAHLAEPAETAAKRGRKRRAKTDRSDARHLRELLVKGDLPESWIPPAQVLEARARVRLYKDLEEERTAWLQRVQAILYHQGVPVIASLTSAAGQARLAMAALSPAGQQAVEVGLRQLDRLTGELDPLRAELARFSRRQPGCRALRTTHFGIGPITSVAIWAEMGDTRRFSSSDDAVRHTGLDITVYASDSKRARGHLARQGPATLRWALYEAAVCATRPNSPDHAYFLAVKRRADGHLGVISVARKLARRVHHTLRALGDQAWEPVAAV

SEQ ID NO: 303884 - protein, 436 aa, unidentified
MRKQKPKKSTFERLAQGEANRRQRRELKRRLYSEDPGLELVHPDAAGIDIGNESHFVVVAPGRDTQPVREFGSWTSDLNCMAEWLKSCGIRTVAMQSTGVYWFAVYDVLEQHGLEVFLVNAHHTKNLPGRKTDVQESQWLLKLHTCGLLRNSFRPLEQIRKLRTIWRLRDRHVKEASRSIQHMQKALTSMNVHWQEDLLFELEQAVAACDFVQKQLEECDRRLQTYLTAMPSRVMAENNGGDKPATPPAGERGTGGKKKKRIPSRNAPKSFNLAVELKRICGVDATRIEGVDVMTVQTIVAELGADLQSYWPSENHFASWLKLSPQRDISGGKVIRHTRETSRNRVAAMLRMAATTLLRSDSYLGARYRALRTKLGAAKAVKAMARHLACLIYRLFTKGQEWVDRGSQNFERKCEEREKAALQRKAAALGLKLVAA

SEQ ID NO: 303885 - protein, 422 aa, unidentified
MLAESNDEEQIIARVAALDIGKAELVCCVRVPAPTGGKRRLQDVWTHSTMTKALTELANRLVEMRIERVVMEATSSYWKPVFYLLEAHGLDPWLVNARDVKHLPGRPKTDVLDAVWLCKVAERQMLRPSFVPPWPIRRLRDLTRYRTDLVAARTAEKNRVEKLLEDACIKLSVVASDIFGVSGRAMLGALVAGERDPKVLAQLSRARMRGKIDRLEQAFDGHFADHHRFLLSRMLSRIEALDADIAAVDAQIEAQLAPFAEAAAHLDEIPGIGPVAAAAIIAEIGVDMSRFPTAGHLCSWAKFAPGINSSAGKTKRSASSGHGSPYLARVLGEAAVGTSKTNTFLAARYRRIARRRGQPRAVVAVGRSVLVIIWHLLHDPDARYQDLGADHYNRHVDPSAKKRSHIRQLEALGYTVTLTPAA

SEQ ID NO: 303886 - protein, 429 aa, unidentified
MPYRIAGIDVHKKMLAVVVSNVEVESEFQFERRMFGSNPEQLRSLAAWLLEQEVEEVVMESTAQYWKPVWETLERYWKPIREKREDARRRSGTLHLAQALSNRGRRGRKKDFLDAERLVKRLVARELTLSFVPDAEQRLWRTVTRRKYQLTRDRARLQNQVESLLEEAHIKLSSLVSDLLGASARRMLKALADGETNPAALAALADKQLRATPEQLCDALGACTELNPVYRRLLKMALEQLQFLEQQIGDLDQETASLLRQHQDAVERLAEVPGLGVDSATQIIAEVGPTAATFPSGKHLSSWVGACPGNEESAGVNYSHRSPQGNRHMRRLLNQAANAAVKVKGSIFEIVYRRSVPRLGHNQVIGAIAHRQCRLIWLILHQGVRYEEHGPAVTKQSRQARTARMIRQLRKLGYQVELPNSQPANSAGR

SEQ ID NO: 303887 - protein, 407 aa, unidentified
MQNDTLVAVDIAKEVFELGGSERPGRVAWRRRLDRCRFLEFFAQLPPATVVMEACGSAHYWARRIEELGHVVVLLPPQYVRPYVVRNKTDRTDVEGLLEAFRNQQIRPVPIKTVTQQVIGTLHRLRSGWLADRTRAINSLRGLLRELGFFIPEGRKHVLPDAWEIIHDPTRGLPEALKPSLSSLCQEIVSLSTRIEEIEAQLEALAKQIPAVARLRTVPGVGLLTATALYAFVGDISRFPSGRHMASFIGLTPREYSSGLRRRLGRISKRGDVYLRMLLIHGARSVLWHAKRMKNRDRLRAWALRLERKLGHNKAAVALANNSRASPGPSGTTTAASSPCPSCRPPSQPTHISAHPRTLLDKHSDGETGRTGTGKADNKPGLRGRFHRLAPLCADSIMARSAWSTPR

SEQ ID NO: 303888 - protein, 335 aa, unidentified
MEGYCGIDIGSKSSFVCVLNNKGEVVREFKERTESISKKVRELGRFKCVVEASPLAQWLSQELEREEQEVKIICPRKAKVAMGTGKKKTDRKDAQELAKLSQRGWYEEVYRKSDRSRELRTYLVARQQIVQTAVSSSNAIRGLLRAYGIRIKAEAGGAAFLQEVREAIKGLPAFVQDPLRSLLMCFEQMRREEKRLYKQLFYMARRQADIKLLMSCPGVGPLVATAFVATIDDPKRFKNSKQLAAYLGLVPSLYQSGETEYRGRITKNGDALLRRLLVEAATVLLTRTRKDCSLKTWGLRLQDSKGFAKARVAVARKLSGILWSMWLDNAEFAYA

SEQ ID NO: 303889 - protein, 416 aa, unidentified
MNAVGIDVSSRKSTVAVLRPLGEVVCLPFDVTHDIAGLASLAEKLKALDGETRVVMEHTGRYYEAVEKALHEAGLFVCAVNPLLIKEYGANSLRRVKTDKADAVKIARYALDNWADLRDFTPMDAIRYDLKTLNRQFQLASKQRTASANNLIALLEQSFPGIRKCFDSPVRSDGTQKWVDFAHSFWHVDCVRKQPFAAFCERYRKWCKRHAYLFKLSNAEEVYALAKRAVVLTPKAKVVKVLVQEAANQLISISRSVEVYRAEMDRLAAMLPEYPVVMAMYGVGKSYGPQLMAEIGDVRRFERKQALVAFAGIDPMPNQSGDKNVRSNKSSKRGSPYLRKTLFNVIRTYLQCAPQDEPVFRFLNRKRAEGKPFYVYMLAAANKFLRRYYAKLRDYFASLDTLQPVDPIPTILKATL

SEQ ID NO: 303890 - protein, 310 aa, unidentified
MSTLPSSVLSIDISKDILDTDAWPKPWRHRLGNDVQGITAIVAEAKRRKAFVIFEATSVYDRPLMAGLDAAGIAYHRANPRKARDFARASGFLAKTDRLDTAMLCEYGRSIALRPSEPVAPERQALRALLDRRGQLATMRKQERTRRHQIADAAICAEVDENIAHLARQIQNYEKQITAHLKAHPELLRSVQLLSSAPGVALITAASLVAFLPELGRRSAKAISALVGVAPLAKDSGRMRGQRRIWGGRRSVRSLLFLAARHAEKNAAFEPFAQRLKDKNKPTKKVRIAVARKLLIVLNTMLNQQRPFYA

SEQ ID NO: 303891 - protein, 326 aa, unidentified
MHKIGIDVSKAKLHGSLLTNPDLRKSKDKAADNNQAGFKSLLEWAGRHGKCEAAELHFIMEATGVYHEALAQYLAEAGCRVSVVNPFQVKRFAESHGFKTKNDRHDGLVIALFGHERQLATWTPPPPEVRHLKALLSRLAALETDIRRELNRLEKAQVGRAPAQVMDSLANSLAFLNEEKKRLLKEINTHFGNHPKLREERDLLLSIPGVGDKLAAQLLALFASKDFSRAPEVAAFLGLVPVEKQSGTSVLGRPRMSKAGDSQLRKALYMPAIVATKYNPDVQALYQRLIKGGKTKMAAIGAAMRKLVHIAFGVYKNLTPYQPQNV

SEQ ID NO: 303892 - protein, 366 aa, unidentified
MVGCDLHDKSMLIKLAHNRAEPVQKSFNNTPGGRKKMISILKESAEAANNARIVFAYEASSLGFGLHDELTDVGIDCYVFAPTNIPRSVKHRRRKTDARDAQRILEIVRGHFLAGNKMPTVWIPDPQTRDDRELVRMRLGVGKKITAIKAQINILLKRNKFRKPGDIGNNWTKKHRTWLAKSAGSDSALSIGASSALNSLLRQLAAMEEEVIYLDKQIRVLAQTDRYAIPVRELSKLKGVGIFTAMVYLTEMGDLSRFKNRQQVGSYLGLVPSSYETGNTSDRKGHITHHGPGRVTRVLCQACWSRVRTDHHERAVHKRICDRNPKHKKIALVACMRRLGIKMWHDGLKAQLIANSFTPKTNQTTA

SEQ ID NO: 303893 - protein, 388 aa, unidentified
MHDGANLPVPVPERTDIRVDCATLFVSLELSRSTWVATSLAPGSKKMSKHTLAGGNGRELLDLLARLKARAEQRIGAPVKVVAIHEVGLDGFWVHRLLGANGVESHVVDPASIAVPRRHRRAKTDTIDGETLLRTLMAWQRGEPRVCAMTVPPSPSEEDRRRISRERATLLRERIRHTNRIRGLLFGQGIVNYNPLNKKRRECLEELRTGDGRSVPARLKAEILRELDRLELVLRQISQVEAERDEMLRSAEVSSPAALLMQLKGIGAEFATVLYLEGLFRHFENRRQLAAYAGLAPSPWKSGSIDHEQGISKAGNPRLRTTMVELAWMWVRYQPDSALSCWFRQRVGSERCRTRRISIVALARKLLIALSRYITHGEIPAGAVMKPV

SEQ ID NO: 303894 - protein, 370 aa, unidentified
MKKSSMFVGLDVHKLSIEIAIAEAGRDGEVRSYGGIEGTLDALDKVVRKLVSKGCDLRFVYEAGPCGYDVYRHLTAQGYDCVVVAPSKIPRQSGNRIKNDRRDAQMLARLHRAGELTAVYVPCIEDEAMRDLTRAREDAKALERKAKQLILAFLLRHGHRYSGKSPWSRAHFRWISILKMPHPAQQIVLQESLDTLAECTSRVDRLTEQIQMLSTQWRLFPVIQALQTLRGVSLIVATTTIAEIGDLTRFEGPTELMSYLGLVPSEHSSGRSTRRGSITKTGNGHVRRVLVEAAWAYRLPARVSRKLLIRQEGMSQEVCAISWKAQLRLCARYKRFIAKGKSHQLVVTAIARELCAFMWAIAQEVQGSRV

SEQ ID NO: 303895 - protein, 352 aa, unidentified
MKIIGCDFHPSFQQISMLDEETKQRVRKKLHHASGAAEQFYRSLQGQSVRVGIEACGNTRWFERLLQQLGHKLLIGDAARIRAAAVRKQKNDERDADHLLELLESGKFPAIWVPSPEERDLRQLLLHRHKLVELRTRIKNQLQHVALDQGLQKKRQLWTERGRQWLLQLPLPPWTERRRGDLLVLLDGLEPAIAELSQAVEAAAQRDPRAQLLRTHPGVGPITALAFVLVIGDVQRFAHSNQLASYLGLIPSEDSSAGRRRLGAISKQGNTLLRTLLVEAGQSAARWDPQLKRAYQRCCHRKSHTGIGKVMVARKLAVRLYWMLRSNQPYTPARMQGSPSHPVSTRSGSSIV

SEQ ID NO: 303896 - protein, 388 aa, unidentified
MIYVGIDIAKLNHYASAIDSDGVVLIEPFEFLNDNEGFYTLLSKLNSFELDDIIIGLESTAHYGNNLVSFLVTKGLHVCVINPIQTATLRKNNIRKTKTDKVDTLVIAKAVALMDHPRFVTLYDIALMQLKNLGRFRMNLVKQRSRTKIQLTAYLDQVFPELQYFFKSGIHQKTVYAILKEAPSATRIASMHLTHLKNLLVSNSHGHFKKETALELRVLAQKSVGTADRSLSIQITQSIAQIELLDSQIDAVESEMKDIVTSLDSVIMTIPGIGPINGGMILGEIGDINRFSKPRKLLAFAGLDPSVYQSGNFIAKKTKMSKRGSSALRYALMNAAHNIVKYNQTFKEYYDSKRAEGRGHYNALGHCAGKLVRVIYKMLKDDVEFNLD

SEQ ID NO: 303897 - protein, 453 aa, unidentified
MPTCGVRALLLVKESGNLPHSGEAADKLDEDGPCAIPRISSRRLRSRVRKQEPAAEQKGDPMIYAGVDIAKADHVIGAVDETGAEAAKPMAFKNSEAGFERCIAWLESVAQTEDDVFVGMEATGHYWMACFAHLTAAGYRVCVVNPMQVHAMRRLKGLSGVKNDRIDSLLIAETLRQGDYDQTRLATDEVQALKQLTRYHQGLKRELATVKTQAICVLDAYFPEYAGLFSDMFGAASLKVLSECPTPSEAARKRASSIAKMLSEGSHGRLGAERAARIKAAARSSVGIRLGEDAASFQIKTMVSQIEFLNATIAKVEREVGMLLERIEPNITTIPGVSTTTGAQIVAEVGDVKRFKNAASIVKYAGLNSGVDESGKFSAEGVPITKQGSPYLRRSLWLAANRARQFDPRLKAFYDKKRREGKPHRVAVTAVARKLCHVVYAVMRDGEPYDPGK

SEQ ID NO: 303898 - protein, 411 aa, unidentified
MEAAVITAVGIDVSKSKSTVAVRRPGGEIALRPFEVHHTNSDLKKLASTLKKLGGDIRIVMEHTSTYWRPIAPTLKEAGFFVSIVNAMLIHDFSDNTIRKLKTDRADALKIANYALTFWDTLPPFNNEEETRLLLKMQSRANERITATATALRNGLIALADQTFPGVNIAFAPNTKNANGHEKWVDFFLRYRHKDCVCQYSMEAFTESYRGWCKRKNYKFRTDTAHKIYLLAQEGVATLPKCESTKMLITQACKSLNTVCEAKQSTQLEMQRLAAMLPEYEVVMQMEGAGPITGPALMAEIGDVRRFKNKKALVAFAGIDAPPFQSGAFESKSRHVSKRGSPHLRRTIFIVSNIILTRSNPENAVYCFMDKKRSEGKHYYVYTVAGSAKFLRVYYARVTEFLRSQPSPGAC

SEQ ID NO: 303899 - protein, 316 aa, unidentified
MQTPLVVVGIDVAKTHLDVAVRPSAEPLRAPYDATGITAVIARLSQLRPTRIVLEATGGLERPLLRALVDAALPVIVVNPRQVRDFAKATGQLAKTDALDAQVLARFAEVIQPKVRALPDPQTEELAALLARRRQVLAMQHAEHNRLDRAPVRVQKRIQAHLRWLHAELARLEEDIDDRIQQSPLWREREDLLQSVPGIGPVMSRTVLAELPELGLLNRKQIAALVGVAPFNRDSGRLRGQRTIWGGRASVRRALYMAALVATRWNPVIRAFYQRLRAAGKAPKVALVAAMRKLLTILNAMVHHGTRWRSTAEMAA

SEQ ID NO: 303900 - protein, 320 aa, unidentified
MSKSTKFIGIDISQKVFDVWSKEFGHKQFKNNQQGFENFALLLDDKSWCVMEFTASYYQHLAIFLYQNGVKVSIVNPLVIKRFIQMKLQHNKTDKSDAKMLVQYASEQKLVAWQPNPQYINECKDLHTTISLFFKQLTALKNKHHSLVSKGVKGKILTSIKRQVRQLEKEINLLETEIELRIKNNEPEMLTNISSIAGIGKKTAMMLIACTNGFKTFDNPNQISAFFGLAPVETTSGTSVRGKPRISKKGYPLMRNYLFMCSFTACKNNPQCKALYDRIVAKGKSKKLALIAVANKLVKQAFAIAKSGIPYNPEYKPVLN

SEQ ID NO: 303901 - protein, 405 aa, unidentified
MEIFVGIDWAEAHHDICVLNEMGMVLAKRRIAEGLDGVGQLHALLADHAAEPNQVVIGIETDRGLLVGALLAAGYQVFAINPLAASRYRDRHSTSGAKSDPGDAKMLADLVRTDRHNHRPVAGDSELAASLQVLARAHQNLIWSRQRLVNQLRSNLREYFPAALAAFGTDLAHPLALGVLDAAPTPAMGRTLSQAKLAAILRRAGRERGVEEKAAAIQAQLRAPQLAAPALIGEAYGKSVAATVRILRELNAQLASLAAELTQSFDGHPDAELYRSLPGLGVVLGARVLSEFGDDRTRFAHPKARKNYAGNSPITKASGTRRVVLARMARNRRLADACHLWAFCALSGSAGARHYYRTLRQRGKTHHQSLRALANRLVGILHGCFDHGQVYCEEIAWPQSPTVAA

SEQ ID NO: 303902 - protein, 273 aa, unidentified
MDHFAGLDVSVKETSVCIVDETGKIVREVKVASEPEALSSVLKNPAYRFKRIGLEAGPLSQWLFSALAEAELPVVCVETRHMQAVLKAQINKTDRNDARGIAQMMRVGLYRPVHVKTLRSQKLRMLLTHRKLLQSKAIAIENDLRGTLRNFGLKVGIVGTAKFEARIKELIENLPDLAVLIEPLLVVRRALREQFVILHRRLLALVRDDEVCWRLMTTPGVGPVVALTYRATVDVPARFRKSKAVGAVFGLTCSKYQSGEIERSGRNHAAEMR

SEQ ID NO: 303903 - protein, 398 aa, unidentified
MLSIGIDVSKGKSTVCGMKPGGEIVYTPFEVQHTREGMSELVSLLRGSGEEVRVVLESTGSYHCPVVAALLENGIFVSVVNSLRMKRFCSQSIRRVKTDQIDAMQIALYGLAYWQELQPTRLPENTYRELQLLARQYYQMTSLLIKAKVDFNALCDQVLPGMQELMSDHAGRHKLSDFVLRYHHTAHILKMGETRFRKDDCKWAEKKGYRNRERMAALIFATAQNGIPVLPDAPSTQIVITEAIRVLHTVEASRDAILTQMQALAKTLPEYSLVREMPCIGDTLAPRLIAEIGDVRRFHSKRALIAYAGIDAPPYQSGKFSANNRHISKRGNRYLRKTGYEVMQSYVMHKPANDPIFTFIEKKRSEGKSGKLAMVAGLNKFLRVYYGKVTELYRSLPQ

SEQ ID NO: 303904 - protein, 344 aa, unidentified
MDHFAGLDVSVKQTSICIVDDTGRIVKEVKVASEPEALLKVLGNPIYRFKRIGLEAGPLSQWLFSALAEAELPVVCVETRHMQAVLKAQINKTDRNDARGIAQMIRAGLYRPVHVKTLRSQKLRMLLTHRKLLQSKAIAIENDLRGTLRNFGLKVGMVGKVRFEARIQELVENFSDLAELVEPLLIVRRALREQIVILHRRLLAIVRDDEVCRRLMTTPGVGPVVALTYRATVDVPARFRKSKSVGAVFGLTCSRYQSGEVDWSGKISRCGDEMMRTMLYEAAQSMMHSKKWSWLKAWAMQIARRRGMKKAIVALARRLAVIMHRIWVDGTEFRWTREQAAAAA

SEQ ID NO: 303905 - protein, 318 aa, unidentified
MNTKTNQNINVGVDTGKFQLDIYIRPIDIYFTVSNDEKGIKEAVKIIKKHNPERVVIEATGRLEMPFILACANAKLPFTIANPVHVKRFAGALGQRAKTDKLDAQLIAHYSEAIKPKLSQLKPETMQAMSDLVSRRNQLLTMQTMEKNRLQIMPKELAMTIKPVLTLFKNMILKTEAKIAKLIESCPEYSAKNEILQSMTGIGRIAAASIISNLPELGYINSKQASALIGVAPMNKESGRFKGHRKIQGGRPQVRTVLYMAMMSAMQSNPVFKATYQRLLAAGKPKKVAIIACIRKMIVILNSMLRDGVLWEAPKVIN

SEQ ID NO: 303906 - protein, 411 aa, unidentified
MEIVNARCAGLDVHKATVVAGVRVPGPPPGARRGETTTFAPTTRGRRDLTNWLRTHGVTVVAMESTGVYWRPVYEALEGIVPLVVVNARHVQMVPGRTTDVQDWEWLAQLLECGLRRGSFVPPRAVRDLRDLTRLRKALIRERGHHVNRIAKTLELAHLKLSCVVTDLMGKTGRAILHALSAGVDDPERLAAGAQGVLRKKQAALREALGGRLTPHYAFLLQQHLSLIEGLDAHIATLDTRIEAALAPLAEAAALVQTMPGVAARAAQAILAETGVDMDLFPTPAHFASWARLCPGNHESAGKRQRTTTGKGATWLRATLQETAWAAVRSKKSYYRALYHRLKGRRGAKRAIVAVQHAMIVALWHMLKHRVAHQDLGTDYFERRNIARIRRHHVRRLEQLGYDVTLRGKAA

SEQ ID NO: 303907 - protein, 319 aa, unidentified
MAQNDLVVVGIDVAKDKVDASIRRFTLRQTFPNTAQGHRKLVTWLRKYQVGKAVMEASGGYEREWRNVLHNAGIEVRIVDPRRVRSFAQSAGRLAKNDPIDAEMIAWFAETFSQAPGQIPDAAREELAALTKARKVLIDVKVRLQAQDEHAAPEPARKAYARVLKSLATEIDKLEAVISAKVKATPEFAERAEIIESVPGLAQAASAILIAGMPELGQVSEKVAAALIGAAPYDDDSGKRRGERYIQGGRRWVRNGIYMPCLGAATQCNPVLNAFYQRLLAKGKEKKVALIACMRKLIVILNTMLARRQKWNPGRHAMG

SEQ ID NO: 303908 - protein, 464 aa, unidentified
MARPKKTTAALPVLNADAAGIDVGADELFVAVPEDRDPQPVRKFGTFTADLHAIAGWLKQCRVRTVALESTGVYWIPLYQVLEAQGFNVCLVNARHLHSVPGKTDVADCQWLQYLHACGLLQASFRPEQAVCAVRSLLRHRDNLIRYASGHIQQMQKALTQMNLRLHNVISDITGKTGLAILDSILAGERDPAVLAELRDSRIKASRETIIKSLEGDYRSEHLFALRQSLSAYRTYQSMIAECDVEIEKMLSAFDTRPPRGSEESAAGGVAKPAQPAKPAKPAKPEGGNALRFERTDLAAELYRLYGTDLTLVPSFGALTVYQLFSELGRDLSAFQSDKRFCSWLGLCPDNKISGGKTLSSRTKRVTSRAARSFRMAAQSLYKSECYLGHYYRRMSAKLGKPGAITATAHKLARIYYHLVTTGESYDEGIFAQEHERQRNRAEYRLRKQAARLGLDVVPRSSVT

SEQ ID NO: 303909 - protein, 367 aa, unidentified
MKKSSTATIKQSKNISQQRLTIGLDLGDRNSWYCVLDEVGQKQLEQRVRTTAKALQEIFGKMPRSRIALEIGTHSPWISRLLSELGHEVIVANARKVRLIGESCKKDDRLDAQTLARLARIDPQLLYPVKHRSAQAQVDLMMIRARAALVRARTGLVNAARGLAKSYGERLRGCNVRNMDAEKAEGLSPELQRALEPLLATIEELSEHICECNDRIEALAEASYPQVEVLKQIKGVGTLIALTFLLTLEDPHRFGKSRDVGGYLGLQPGRRQSGQRDPQLHISKAGDPYLRTLLVQGAQHILGPFGIDSDLRRWGLKLAERGGWNGKKRAIVATARRLAVLLHHLWVSGEVDEPLHNSKRMAVAAAA

SEQ ID NO: 303910 - protein, 416 aa, unidentified
MKLFVGIDVSSEKLDVCFLTDDDQLSILSEIPVTNDIEGATSIRDMILEFNENYHFNQIVIGMESTSMYSFHPSMFFHEDEELKKLNTLVTIENPFRIKQFSRMFDEDKTDRNDALRIADFLRIQRFTTSPIKEEKYMALQRLTRTRYQLIKQLTRTKQHFLENLTYKCNTLAREMRDESTSLFSATVISLMTEDFTLDELAELPLEAFCDLLQEKGRGRFKQPEKIAKAIQRAIRSSYRLGSVAQESIDIVLGVLLCEIRALEKNIKELDKAIEQLVVVIPEYQCLTSIPGVGKVYAAGLIAEIGQIERFEDQTKLAKYAGLSWKVKQSGNYQSQNTPLTKQGNRYFRYYLVEAANSVKNYLPEYKAFYQSKYKEVPKHQHKRALVLTARKFTRLVDTLLRNHQLYTPPRSVIDK

SEQ ID NO: 303911 - protein, 363 aa, unidentified
MKTNQMFIKQSVGIDVSKDRLDVSICCLNSHIEICNIAQASFENTKKGVIRLENWIRNHSIKGLDYTVVLEATGIYHETLAYHLYEQNIKVAIVLPGKISAYFKSTNKRSINDKISARLIAEFGLMRKLDTWAPPSPCLRKLKVLVRERLRLIEMRNMVKNNEHAYKYAANRIDTTQERICELRNMLNKQIKEIEKEIRVILRENPELYEKVKKICTIKGVGLITVVTIVAETNGFSLIRNARQLVCYAGYDIVKKESGTSVRKGGSISHKGNKNIRRALYFPAITAKEKNEFFSNFYDRLYSRHSIKMKAYVAIQRKLLMLIYTLWKNNEKYEQEKHKSYKFLEQPNETALIELDQCPLIVE

SEQ ID NO: 303912 - protein, 317 aa, unidentified
MDVETKADRFVGIDVSKARVDVHVRPDGIAFGCATDPEGLGALGARLKPLLPCLVVLEASGGYEGAVAAALVEAGLPVAIVNPRQVRKFAGAIGRLAKTDAIDAAVIAHFAQAVRPPARPLPDDLSVRLAELMARRRQLVVMINAEKQRLAKARDRIAQSSFKAVLKRLEAERARIDKAIDRLIEVSPLWCAKQDLLKSVPGIGDVVARTLIAELPELGRVDRHQIATLAGVAPMNRDSGRYRGKRKIQGGRVEVRAPLYMACLVAIQHNPALKSFYRRLREAGKPARLALVAAMRKLLIFLNAILRDQRPWAHAQR

SEQ ID NO: 303913 - protein, 342 aa, unidentified
MTMIGIDPHKATHTAVAIDDNEDVVDEFTVRASSRQVRRLREWADGFEKREWAVESANGLGYLIGQQLVASGETVFDVPPMLASRVRLLGSGRSQKNDPNDARSIAIAALRSDRLAVVRPDDHARVLRLLVKRHRDMARLRAKHASRLHALLGELHPGGVASPISVGKANRLIDRITVDGEVTRYRVLIIRELVADIARLDETLAASKRRVTTAVAASGTTLTDIVGIGPICAAIIIGYGGDATRFPTRGHFATYNGTAPIDASSGDNTRHRLNTRGNRRLNHAIHIAAVTQLRYDTEGRVYYDKKLAEGKTSKEAIRALKRRISDVVYRHLIADTHRTRID

SEQ ID NO: 303914 - protein, 407 aa, unidentified
MRLFVGDDWAEDHHDVELMDAAGRVLARKRLPEGVAGMARLHELTGQHLGEDAEDPEVVIGIETDRGPWVAALVAAGYVVYAVNPLQASRYRERHGVSGAKSDRGDSHMLADMVRTDSHQLRAVAGDSPDAAAVKVVARTHKTLIWERTRQVQRLRYQLREYFPAALAAFEDLDALDALELLARAPDPARARRLTRAQVSAALKRARRRDIPAKATAILAALRSAQLGQPEAVTAAYAVTARSLIAVITVLNEQVKALESEVEAVFGRHPDAEIYLSQPGLGSVLGPRVLGEFGDDPHRYASGKARKNYAATSPLTRASGKKKVVVARFIRNDRLTDALMAQAFTALSVSPGARALYDAERARGTEYNPALRKVANRLVGILHGCLKTRTLYDEATAWPHHENRLAA

SEQ ID NO: 303915 - protein, 351 aa, unidentified
MVVIGIDAHKRNHTAVAVDEVGRQLATRTVAATTAAHLDLLVWAKELAGERLWAVEDCRHVSRRLERDLLGAGERIVRVPPKTMADHRRGGRDYGKSDPLDALAVARAALREPDLPTARLDGPERVVRLLVDHRDDLVGERTRIMARLRWHLHELDPEWDPPARSLDRPITWARIEARLDQLRPTLHGHEAVVARLAGDLVARCRQLTTEINALAAELTALVAPLVPVLLAIVGCGPLTAAKIVAETAGIDRFRSADAYARHTGTAPLPVWTGNHRRHRLARTGNRQLNAALHRIAITQARCHPGARALLERRQAQGDNRREAMRVLKRRLNDVVYRALHQDHQQALAQAA

SEQ ID NO: 303916 - protein, 485 aa, unidentified
MVQSVGIDFHEGLHQVRCLDERAQLCDGFSFRTTPQGLAALEERICRDGSSPIVVFEPMGLAWLIVAAYLRARHPGCRLVKAKGQKVAALRRYLRGPAKSDRIDALTLAKMPFIDPEQLGEVYLPPAEICALQRLTRQRQRLEGEVVARKNRIGRIVDGYLPGVREAFSSPWSLQARAFLRSHLDPFAVVHAGEEALHTFLTKARSRSRGDKAETHMIYMACQNAAALYELSRPSSGVDEGFFADLQEEIARELRLMEAEEAESEASSLRVEELYRKLHTSDNLRTIPGVGEHTAPVFLAVVGDPTRFRCQAAFANWTGVVPGASQSSDVEAKGLRMTKAGPPIIRWALYQAGQIGRRYDPQLACVYYRQMVHHGKNHKQAMGAVMSHLAARVLTVLREGRPYELRDAEGKPISREEARGLLSMYRVPEEIRREKRRRNPSKRNAPARSRGAEGMALHRTSEAADAPQSVAATAIPHEPVYRGST

SEQ ID NO: 303917 - protein, 386 aa, unidentified
MQAPNVSTPTIGHVGTIFVAIELSQKSWLMTIHSPDRDRMSRHKLTGGDHAGLLSLLEGIRTRASHKLGSAPAIVSCYEAGYDGFWLHRLLTAAGIRSHVFDPASIAVEQRGRRAKTDRIDGELLLRTLMAYCRGEPRVVRIVRPPSPEQEDARRETRERERLVTEQVAHTNRIKALLRLHGMAVGNPRRRDWLKWLSAQRDWQGQAAPPHIKAEIEREHARLMLVREQLTALERRAAQAQPAPAAAETARHRGNLFRLKALGPAFSGTLTNEVFYKDFDNRRQVGAYVGLAPSPWQSGGTDREQGISKAGNPRARKAVVELAWLWIRHQPNSALTHWFLARTVKASKRTKRIAIVALARKLIVALWRYVTTGLVPVGAVLKPVEA

SEQ ID NO: 303918 - protein, 328 aa, unidentified
MYSFFIGIDVSKDHFDAAYVLFGKVFYLGRFKNSQEGFISLLCELKQVANYKLDKWFFCFENTGVYSETLFFWLHENGIAFKAENPIQIHRSLGLKRGKNDKADAQAIALYCFEKRDSLQATKPAKPIVYKLKKLVLRRDFLVKQRTAVLTSFKMQRQTLDEDLMNIFEEQTQELVLTFNKQIKEIERKIKQVKSQDIYLNKNDELVRSVVGIGHVISTFMLAYTENFERITEPKKLASFIGIAPFENSSGKFVGKTKISYLANKKIKSLLSNAAYSAINYDPQIAKYYERKIKEGKPQSAVINAVKNKLVQRIYAVVKRQTPYVKLN

SEQ ID NO: 303919 - protein, 360 aa, unidentified
MFTERTSVGLDVHARSVAAAAIDGVTGEVFKARLVPAPEVVIRWVESLPGPSAAVYESGPTGFGLARALSAAGIRCEVAAASKLQRPAGDRVKTDARDALHLARLLRLDEVVAVRVPSEVEESARDLVRCREAARADLMRARHRLSKLLLRHGIVYSGGKAWTQAHDYWLLRLSFPLAGTQAAFQDAYETVVLAAGRRERLDAAILEMAADGQFTAVVRRLSCLRGISTLTAFSLAVEIGDWDRFTGAGIGAYLGLVPSEHSSGASRSQGPITKTGNAHVRRLLVEAAWHHRKPYRPTAVLRRRWQLAPPAAVARAQAGNHRLHQRWVGYAERRKRPVLANVAVARELSGWCWSLAMMPD

SEQ ID NO: 303920 - protein, 416 aa, unidentified
MNAVGIDVSSRKSTVAVLRPLGEVVCLPFDVTHDIAGLASLAEKLKALDGETRVVMEHTGRYYEAVEKALHEAGLFVCAVNPLLIKEYGANSLRRVKTDKADAVKIARYALDNWADLRDFTPMDAIRYDLKTLNRQFQLASKQRTASANNLIALLEQSFPGIRKCFDSPVRSDGTQKWVDFAHSFWHVDCVRKQPFAAFCDRYRKWCKRHAYLFKLSNAEEVYALAKRAVVLTPKSKVVKVLVQEAANQLISISRSVEVYRAEMDRLAAMLPEYPVVMAMYGVGKSYGPQLMAEIGDVRRFERKQALVAFAGIDPMPNQSGDKNVRSNKSSKRGSPYLRKTLFNVIRTYLQCAPQDEPVFQFLNLKRAEGKPFYVYMLAAANKFLRRYYAKLRDFFASLDTLQPVAPIPTILKATL

SEQ ID NO: 303921 - protein, 387 aa, unidentified
MRAVCGLDVHKDSVFLCILCETGEIIEKVFGVLTHQLREMRRMMQSHGVSEVTMESTAVYWIPVWRVLEPHFHLKLVNPYFIKQLPGRKSDVKDAQWIAECTLKDLVRGSFVPPERIQQLRQYDRRIFDLDAEIVRKLAKLDAVMQRCNIRLSNYVSNTDTKSYKNVVRKLCEGVTDPEELIKEIYSRITNRHGRETILAALTGVVSDAEKDTMRQLRDELDLAERHKQECMDKMSHVCRTYYPEELRRLMTIPGIGERAATSLIAEIGVDMTKFQTAAHLASWSGLKPRNDESNKKIKSRRITHGNIFLRKTIIECAWGASRTKDCFFSRFSYHQTQVRKKNKMKVLVAVARKLLIAIWHVLHDETDYKDFSVKNDCETSVSESNG

SEQ ID NO: 303922 - protein, 435 aa, unidentified
MEKIRANVAGIDVGAKKVFTSVEGQPVVSHLTFTEDFLLLRDYLLKYKVKTVAMEATGVYWVILYEILEEAGIDVWLVDGRQTKQVPGRKTDVKDCQWIQELHSFGLLNRCLVVDADIKELRSYLRIREDHIQSSAMHINHMQKALTLMNIRLKEVLSQIHGASGMAIIEAILNGERNKHILVGLCHQSVLKTKKDFVLKALEGKYTQAGLFALKQAHDGYMFYLQQIAECDKQINTVINRIGQSGKGQNLKKKRKAIRHHRPCVEKLEKNLLNVFEGKDATVISGITDYTWMQLLAETGADLQKWPTEKHFTSWLNLSPGQHNSGKMRRSAKKKGHPAAGQIFRTIAQSLINSKNIAIGSFGRRLRGRKGPRIAIKAMARKIAILYWRMMVKGVDFVEQGVTHYEEQLLANKVKTLNKLVKELNIKLPENVPVA

SEQ ID NO: 303923 - protein, 328 aa, unidentified
MQKNKEYVGVDVSKESLDMVVYSTGEIRSFGNDDASIAKATTWLKQVNPAIIVMEATGGMEVSLYVALQEASLPVAVINPRQIRDFAKSMGILAKTDKVDAKVLARYAATIQPEARPLPDEEARQLNTLVTRRCQLVEMIIAETNRATITRDKTMKQRIHAHIDWLKQELADIDKDVSQMIKENPAWHAKDKLLQSVPGVGPVLSATLIAELSELGILNRKKIAALVGVAPLNRDSGKHRGERSIWGGRCRVRQPLYMAALTAVRFNPAIKSFYERLLANGKGKKVALTACMHKLLMILNVMLKHNSYWSCNYAISDNTCIPVAKTVA

SEQ ID NO: 303924 - protein, 345 aa, unidentified
MELHTIGIDLGKTVFHLVGLNLRGEVVVRKKFSRAQLLRFTANRHVGLIGMEACGGAHFLGRALREQGHEVRLMPAQYVKPFVKTNKSDYIDAEAIAEAVTRPRMRFVPIKTDDQLDMQSLHRVRERWVMRRTAIVNQIRGLLLERGITLPKGRSHVDTGLPPILEDADLKLSGALRTLLAQLKLELDQMAMRIDEADTVLSRTAHQNPACQRLVAIPGVGPVIATALIAAIGNGAAFRKGRECAAWMGIVPGEYSTGGKQKLLGINKRGNSYLRRLFIQGARSVLQHSAKQTSALSAWLKQLQARTHPNVAAVALANKLARIAWAVLAKDEPYRPPLLNSPAAA

SEQ ID NO: 303925 - protein, 404 aa, unidentified
MEAGMVWVGVDVGRYSHALCAIDASGSVIWERKRVLNTTWAMRRVLAKLLHFLRGRPVHFAVEEPNGNATALLRLLAADGLPVFLAQPLRVYRFHLALGQPHKSDPYDAQVIAQFARQNASKLPPVRILTPTTQSLRVLSRRADAVGKDMRRCVSRLRGVLAEYAPEWLACSVFRDFSSAAALGTLERYGCISKLQRTRVSRLGRALSKWTQGRYGETHARTLIEAFSEVVLPSQVEQAYHQVICSLVKQIRALVAERRHLLSLIRAQGESLPAMAEVQSEFGYGPELSAIIVSEVGDMADFPSEAGFATYCGVTPVKRKSGVSRGSSRLSRFTNKRLLRAVTQAARTAATHEPESRTYYQRKLAGRSDPHAKTLALIALARHRTRRLYKLLRRVSTQPEELVA

SEQ ID NO: 303926 - protein, 418 aa, unidentified
MREEVSTVELLVPRCAGLDVAKDEVVACIRVPDGQGGRRQEVRTFPTFTSGLEGLADWLTAEGVTQVVMEATGQSWKPAWYVLEEAGFQLLLVNARHVKLLPGRKTDVGDAAWLAELLEHGLLRGSFVPPAAIRQLRDLIRYRKRLIQTHSAECQRIQKTLEDAGIKLDSVAADVLGVSGRAMLAALVGGERDPKVLAELARGRLRTKLPQLRQALRGRFSDHHALLVGLSLAHLEHLEGAIAALDAEVDQVISPFARARDQLDTITGVGKRAAETIIAEIGVDMAVFPTASHLASWAGRCPGNNRTGGKRRSGRPTKGNRWLGEVLTECAWAAARSRDTYLAAQYWRLARRIGKKKAAMAVGHSILVIAWHLLVNDCDYQDLGGDFFVRRDADRARQRAVAQLQALGYRVTLEPLAA

SEQ ID NO: 303927 - protein, 357 aa, unidentified
MKIVGCDLHARQQTIAMVDTETGEFTEKTLSHEGNAVRAFYAALEGPVVVGIEATGSMQWFLELLDELGIQCRVGHPAEIRAKETRKQKHDRRDARLIWELLIEDRFPEIWMPSTEQRDLRTLLRDRHQWVKMRTRLQHTLQAIALNHALRQGRALWSQAGQSALQALPLPPYTGQRRTELLSLYVQLQKRIQELDKEVEAQARQRPQARRLLTHPGVGAVTALATEVFLGDPSRFATANQVASYIGMIPCEHTSGKRQRLGKLSKQGNSLLRYLWTEATMHAVEKDPELKRFYRRKLIQKGMGKARIAAARKLGIRLWIMMRDQIDYEEFCHRGKLRQTGKAHVGMPDFNSGPAQQ

SEQ ID NO: 303928 - protein, 450 aa, unidentified
MPKLFVGLDVSQKSVAACFLLEDGSEPIKRFSFPHNPTGVESLVSRINATADSLGVTHLFVGMETTGLLWWHLSEALRTCEQLQRLEPAIYTINAKLVANFKKAYIEAEKTDPGDAFVIADRLRFGRLPRLAEPDERYLAIQKLTRHRFHLMNSLGREKNRFLSHLFLKFSNFCQQQPLSDPFGAAAGALLTEFLSVDEIANTPIQDLADFLIEKGRNRFTDPEAVASAIKQAARNSYILSKALSNPVNVILAMTLENIRFFEHQVDAIDKAIARELAALPSAQVLLSVPGLGPVFTAGIVAEVQDINRFDTDAGLARFAAIVWKKNQSGEFQGDETPMMHSGNQYLRYYLIEAANSLRMHNEEYAAYYQIKHRESTTHHHKRACVLTARKLVRLIHTLLRKGQLYQTPDQRKETSAASPLPTGMTPGELARQVVRRRQARDRTRVHLDH

SEQ ID NO: 303929 - protein, 403 aa, unidentified
MDVHKSFVVACIATTNERGVTTYKSKRFSTFTGDLRRCAAWLAENNCKDVCMESTGKYWIPLYNILERTCNIVLAHPKYVKAIRGKKTDKRDAKWIADIFKHDLVTGSFIPPADIRQLRDLVRYRWKLTSFTTGEKNRAQNCLTVSNFKLDDVFSDVFGKAAFAITTRILNNPAEKITDVSNFRTKGMKATDEQVLAAVDGAMCEEQAEKLRIIRSHMDSLHLCKLNLESLILATAEKYLPQLNLVMTAPGIQSFAAIGIISEIGVDMSVFPTSKHLCSWAGLTPQNNESAGKKKTTRISRAGAYIKPLLVQCALCAIRTKQFPEVRNRYLALKKRRGHKKAIIAIARMLLTAIYNILKWNEVYNSELYRKADRPPAHREVSVEEAVFILQRQGYLVTAPAVT

SEQ ID NO: 303930 - protein, 373 aa, unidentified
MKTSITHVAMDTHKKQHQVAWVHPDTGEIQEFTVANTAREIERMVKRLRKQAAGEIHVCYEAGLCGFVLKRRLEKLGCVAKVIAPSLVWRKPGDRVKTDRRDAKKLLAQFVAGQLTEVFAPDPAQEADRELTRCRESAQTDLKRVRQRLNSLLIRHGYIYPEGTLWTGKHAQWLKALVFDQPKLRTVFEEYCSEIEHCLGRVQSLDKQVESLAQSERYRSAVGVLRCMRGIDTLTAITLLTEIFEFGRFDSPRALMAYLGVTPSEDSSGESRRPGAITKTGNRRVRRMLTEAAWHYRHPYAVCKALKARRRDQPAWAVDLADRAAKRLYRRYRHLIERGKSAPVAIIAVVRELAGFVWAMLRQLQQQTQSPPP

SEQ ID NO: 303931 - protein, 332 aa, unidentified
MDKTINAVGIDVAKASLSICFHYTDDSEKVLTIRNTDTDISIKLLPLLNNCKSKIVMESTGHYQWLVALLLSKNGYNVYVVNPLLASQYITKNIRKVKSDPADASGLARMARVADNLPEPFKSNENTLWMRKKLGLLSSLSKQIQALKASITSVKEAQEIIKVKDSLTIIELEETLNSLEKSKEKLEKECVEESKKNEKVKKEIELLNSIPGISEFAATLCLHWFDRDNGNTAKSWIAYSGSDISVKESGTWRGKCKLTKRGNAYLRKRLYCCAWGAYMHDPNFKKYYTELREQGRPHVESLLIIMRKLIRIMYSVLETGQPYDAKKCFLHE

SEQ ID NO: 303932 - protein, 369 aa, unidentified
MIIIGCDYHPGFQQIAFVDTETGDYGEQRLAHSEVAEKFYRDLAGQGKKVRVGMEASGHARWFERLMAELNFELWIGDATEIARKRERKQKTDRQDAQHILQLLMENRFPKIWVPSGENRDLRQLLWHRHRMVQARTRIMNQLQAVALNEGLRCKKKLWREKGRQQLEAFRLAPWASRRREDLLQLLDRLNPTISDLTQAIEQEVEKCPEARRLRTHPGVGALTALAFVLIIGRTERFQCGKQIAAYLGLVPLEDSSGNRRRLGHITKQGSSIVRFLLVEAAQVTARSIPEWRSKYFHLAMRRGAKNRQGGDGAETGYRSLLDVAQGMGLRAVKKIRFARGTARISRWCEAEHRVIDWVSRSSLGRSSK

SEQ ID NO: 303933 - protein, 359 aa, unidentified
MTSMTMSGGPVTGGVDTHGQTHHAAVIDQVGRHLADREFPTTPAGYRAVVRWLRGHGGPLERVGVEGTGAYGAALTRHLRAESIMVVEVDRPDRKARRAQGKSDPLDAYAAARAALSGAASGTPKRRDGRVEAIRALRVARRSAVKARTQAMNQLRALLLTGPAELREHLRHLSATELIATCARLRPAADLTDPEQAVKTALRRLARRHQHLTEEIRDADTDLGQLVRAAGPRLVALQGVGTDVAGQLLTSAGDNPDRLHSEAAFAHLCGVAPIPASSGRTHRHRLNRGGDRAANNALHTITLCRLRYDPRTADYVAKRTKDGLSKKEIIRCLKRYIAREIYNALQPTPAHAKDHAAAA

SEQ ID NO: 303934 - protein, 341 aa, unidentified
MDVHLKQWNVCIIQGGISRKPFQQEPTATALMNHLRSHFPGMNYYSAYEAGVCGLSIHYALMSAGINSIVFNPADIAQRDKDRKRKTDPTDARKIARALYNGELDCIHIPSEARAADRNLLRLRGFCIDDVKRAKIRLRHFLHVNGIAIPSEFSHGHWTKAFFCWLESRYRNVAGGVSTAATLKNMTQSVQSCTERLEGVNSQLTTLMKRPAYAEDFRLLMSVPGIGPTAAFTLLLECGDLRDFSSADKFCAFIGLVPDINRSGDHDCQCGITRRRHKTLRYMLTESAWHAIRIDDNLSALFADYTRRMPRQKAIVKIANKLAKIIKFVLKNKTAYKNAHG

SEQ ID NO: 303935 - protein, 348 aa, unidentified
MAMLADTVELVIGVDTHKETHTAAVVAAATGAVLDQATVTATPAGYQQLLKLADQHDGRRVWAIESTGGYGAGLTRFLQSHAEQVVELDRPKRAARRHGAKSDPLDATRAAREALGRDQLAQPRAAGRRAALSVRLAARRSAVQAASDAQRQLHALVVAAPDVLRGRLRGLTTARLVSTCARLRQRSDGDVQTAATVASLRALARRIQLLEVEIADHTRAITVLVRAWRPELLARTGVGPIVAASVLCAWSHPGRCRSDAAFAMLGGAAPIPASSGQTVRVRLNRSGDRQLNQALHVIVLTRLRYDPATRAYAQRRRAQGKTNREIKRCLVRYIARQLYRLLEATPAL

SEQ ID NO: 303936 - protein, 347 aa, unidentified
MNITRVGVDIAKSVFHVHAVDRHESTQWQAKLKRSRWLESLCEHVDPGAEIGMEACASAHHWGRELQKRGYRVKLIAAQFVKPYVKSNKNDRVDAEAICEAMSRPGMRFVAIKSVAQQDTQAAHRIREELVGQRTAKANQIRGLVGEYGIVAPVGIQKLRLALPQWLEDAENGLTDEFRVLLADLAEDLQHLDRRISGLDERIAQCVKNDPVARRLLELRGVGPLTASALAGALGDGKGFRKGRDFAASLGLTPRQHSTGGRDRLLGISKRGDSYLRKLLVHGARAVLRHAKARDDGLSQWLNELAVRKHVNVATVALANKTARIAWAIVHNETAYDPMLATAKQTA

SEQ ID NO: 303937 - protein, 346 aa, unidentified
MDQQQHYVGLDVSLETTSICVVDDKGTLVWRGKCATTPEAITEAVRTYAPAAVRVGLETGQLSNWLTLNLRRRGLPVVCLDARHAKAALSLQINKTDANDALGLAQIVRTGWYREVAVKSMDANTLRMLLVARAQLVSQRQTIANTIRGLLKTFGLVIARGSGGLFAVRVREQIAGNDVLVAIVEPLLVVWHAIREQVQMLDRQILARARADAAARQLMTIPGVGVVVALAYTAVIDDPARFRRSASVGAYLGLTPRRYQSGEADTSGHISKCGDGLLRAYLFEAATVLLQRHSRASTLKTWGLALAKRIGMRRAKVAVARKLAVIMHRVWSDRSEFRCGDVPVAA

SEQ ID NO: 303938 - protein, 374 aa, unidentified
MTNHSEAFVAFDTSKLRNAVAIADAGRSGEVRFVGEIENGGAATAKLVRKLAAKYERLTFCYEAGPTGYGLYRQIKSLGYECLVAAPSLIPTKPGDRVKTNRRDALNLAKLLRAGELTAVWVPDARHEAMRDLTRARGAAAEDLRRKRQQASFLLRQGLHYPPGRKTWTKSHMIWLASQKLEHLEQRIAFEEMLFALRQAQERIERLEQAIRAAVPDWSLAEVVTALMAMRGIDLISATTFLAEIGDLSRFQTPRELMAYLGLVPSEGSTGDTVKRGPITKAGNRRARRTLVECSWSYQHPARVGKEKQEKVAAAPRAVREIAWKAQCRLSARYRALVRRGKPKTVAVTAVARELAAFIWAINREVTTARAAAK

SEQ ID NO: 303939 - protein, 390 aa, unidentified
MVRETQDSKVVGLDVHPYMFSASALAGADAREAREEWVVDRIPLDRLEEIIKKRTTSRDILVMEASGNSFAVAERLFRCQRKVIVLESQSVGKVGKAYCSTDRTDAMKIARVYLSGLAHIVWIPDSKSFERRDLFFAHRNAVKDSIRARNRIWAFFNGRSVKKPRDFRLTAGNALCKLKALHKWSDVEAVILTELYNTFIEAENRRCKFASIIAEQVATNPDILKLIRLFGIRDKVAFAVVAFIGDINRFANPRKLVSYFGLNPSVNRSGNSGGNGGLSGYGRKDVRSLLIQAANSALRYGTGQTHQWALALKMRKGKNISVAGLARKMVVSIWYLLKGMFTPLIELTNTIIVKIHKIASEIGKTKIMAMGFKSVTDFERIIHEKLLQTA

SEQ ID NO: 303940 - protein, 357 aa, unidentified
MLAELVDHVIGIDPDRDWITAAIVDAKTTGVIASARFGADSSGYDEAVAWADSHTVAGERAWAVEGTASYGRGVTAALSHVGEWVIEFDRPHEKATKDGAKTDELDAVRAARETLGRARISTPRAHDGHREAIRVHTVTRAAAVRARTAAINELKALVVTAPDALRSELRELRTPGLVKKCVGLRDTPQRPVAERCVRNSMRALARRISFLRDEIASHNTALKTLVDEAAPQLVAEPGIGYTTAAMLLVAWSHPGRCRNEAAYARLGGASPVPANSGQNQNRHRLNRRGDRQLNRALYTVALTRLRHDDRTTTYKAKRLSEGKTDREITRCLKRYIARRVWRLLEHQNEPLKLLDRT

SEQ ID NO: 303941 - protein, 389 aa, unidentified
MQTEAAHAEPSTAIQTDLAAIFISLELSRSIWLITSLSPGSGEKMSKHSVRAGDVAGLLARFSELKQKAFARTRKSFPIVVIQEAGLDGFWLHRALEQEGVESHVVDPASIATSRRRRRAKTDRIDGEALLRALLAYKRGEPRVCTMVRAPTPEEEDRRRLCRERKVLIAERVEHVNRIKGLLFSQGISSYEPLRRDRRQRLEDLTTGDGRTLPTHLKIQISRELDRLELLLDQIKLAEAERDGLLAEGQAAAPELPARMLLEFKGIGAECAATLWLEALFRHFDNRRQLASYAGLAPTPWQSGSVDREQGVSKAGNPRLRAILIELAWLWLRHQPQSALALWFKERVKRNGGRMKKTTIVALARKLLVALWKYVTAGVVIEGAVMKPA

SEQ ID NO: 303942 - protein, 428 aa, unidentified
MIDHSDCTASLNLVAIDIAKDWNAVLVRESAGIRRSFKVANRLADHDRLVAYLKSLAGRIRAAFEPTGDYHRPLAYRLLTEGFEVVMVSSVALARIREARFGTWDKNDPKDAQVILFMLEQNMVQVYYDPLLAGTHDLQELANTYFQITLARMRLQHSLMLHHVTLYFPEFTRYWNSTRSEWFIRFLLRFPTARAIRMLDFETFTREAWNLIGRKVAKRAWLAEAYAMAAESIGLPVPVESTAIDMFRLQLSRYLDLTTQRKQLDEHAQQLLAANADFQRLQSLPGVGAVMALTILAEAGDLRRFRHHRQFLKYCGLDLAKIQSGQSRGHEKLSKRGNKRLRMVFWMAAVRAVHMRENAFRDKYERYLADDPFDADRKRKALTAVAAKMARVVYAVIKTGTDYQRFFELRVPGGSIPLARAVEATSTS

SEQ ID NO: 303943 - protein, 404 aa, unidentified
MYYVGIDVAKEKHYVCILDDTGEFAMKPFWIYTNIVGLNDLVKRFADLSLDNDDFIIGLESTGAFSENIYEYITDSDYKAVLLNSYQTAKFRDFSTMKKIKNDAIDAFVIAELLFIGKYKESHISNDAYHSLKVLGRTKKSISDKIKTIKREISTVIATVNPEISRVFPNIFTKTALEVIKVYPTATDIAQATPKKLTRLFRHIKGNNFSEDKAKFLIDLAKNSVYAGRACKARALLLSSYIRILELYCQEKKEIEAQIKILIEEEIDTIDNSIENLQSIPGVSDKTISAILGECGDIRRFDSAKAFIGYLGLYPTQYQSGNSLSVGRLAKRGIPIAKHALYMAAVGSVLHNPQLNKLFKDKVSSGKSKKEALIILSKKIATIMYSIVKYNKPYTPNRVFISNR

SEQ ID NO: 303944 - protein, 317 aa, unidentified
MQTFPNIGVDVAKDAVVVACAAQSFPVHSITNQRASLLDWLKSLPAGSRIGLESTGCYHELLADLAHAQGHTVFLLNPLDTRHYAKAMGNRAKTDRVDAELIARLIEQEHTRLRPYTPPTANQRKLDQLIRRRAKIVRIKSSLKLTMLNLSGFATELKAVLCRLDALIAQIDAAMSAIAACSPKHVEAQQHLQTIVGVGPVVGMALTNTLERVPFRNADAFVAFTGFDPRANDSGHKAGRRRLSKRGPAELRRLLFNAAMSAAKTKVWKPVYEHYRAQGWSTTASLVIIARKIARAAWSIHHYHSTFNPDRITKCLT

SEQ ID NO: 303945 - protein, 318 aa, unidentified
MAIQVVTRDYGVDVSKGSLQMAAEQGPESIPNEPKSIRRWLKSVPAGSCFAVEATGTYHVLFVQQTHQLGHTVYLIDGFRLNRYRDSIGGRAKNDVLDAVLLRRYLQREKADLRPWEPAPKGYTELMRLLHRRERLVTARVALEQSLGDMPESRSTIQALLRQLRRLADRLERRIVATVRTRGWGEDMRRCQQIEGIGPLTSAALATVFQRGQFRNADAFIAFLGLDVRVRDSGKQRGKRKLTKKGDSELRRLLYNAAMSASSTPQWHPYYERHLARGLTKIQALVALGRKLARVAFALMQNQSDYQPKTPQEACIAA

SEQ ID NO: 303946 - protein, 477 aa, unidentified
MTPYKDAFPEPCPPPPTVPEPTVLTLPLQLYNPHAAGIDIGEAEHWVAVPPDRSPQPVRRFGTCTADLDALADWLLDCDITTVAMESTGVSWIPLFELLEARGVQVFLIDPRQAKRAPGRPKTDRLDCQWLQRLHAYGLLAAAFRPADQICVLRSYLRHRQMLLTYGAHHIQHMHKALQQMHLKLSQVVSELTGATGMAILKAIIAGERDPLTLAKLRNPHGHHSEDEIAKARQGTWRAEHLFALQQAVELYQFSHQQLTLCDQHIQTHLATFADKSAGQPLPPKARRHKKANEPRFDARTPLYRLAGVDLTTIEGIEEGTALVILSEIGTDMSRWPSVKHFCRWLGLSPPHKISGGKVLSRRVRPGAQRVAVALRLAARTVHHARTALGAFFRRLRSRLGAPKAITATAHKLARLVYSLFKHGSAYVQQGLEAYESQYHERKVKGMARQARALGYTLVALGTPEGQSLDAVAAPTS

SEQ ID NO: 303947 - protein, 378 aa, unidentified
MHRQGQGQGALRVMGWPAPSGGAVCSSASANQGDNAMSINTLGIDLGKTVCHMVALDEGGQILFRRKLRRDQILRMTANLPACRIGLEACCGAHHLGHRLSAQGHDVRLMPPEYVRPYVKSNKNDDRDAEAIAEAVGRPTMRFVPLKEEAQLDLQAIHRARERLVRDRTALINQVRGILFERGITVPQGRLRLGRCLPEILCDDRVGISPRIRLLLSDIRTEWQELDRRIDAFDRELAECARRDDKACRLVEIPGIGVTIATALLAAIDNGAAFSRARDLSAWLGLVPKQHTTGGRPRLGGISKRGNVYLRRLLIHGARSVLPHLAKQSSPVGCWLRGLLSRAHRNVAIVALANKMARIAWVVLRTGTHYQAQTLPTA

SEQ ID NO: 303948 - protein, 343 aa, unidentified
MDKNTMIGVDLAKNIFQLHIATMTSKVLSKKKLSRDRFKEFMKSHEPAIVVLEACGSAHYWAETLADMGHDVKLIAPQYVKPFVKRQKNDAADAEAIVVAAQRPEMRFVAAKAKEQRAKGILFRSRERLVHQRTEQINALRAVLYEYGYVIPQGIASISRIEDILARPNCDLPDLVCDECRHLLEQISSNTKLINAKTDLIKQLAKQTNMARQLQTIPGVGPMTAMAIDAFAPPMDLFKNGRGLSAWLGLVPRQYSSGGKERLGRVSKAGQADIRRLLIIGAMSRLTWLGRKSIPRGSWLDRMMARKPKMLVAIALANKMARTIWAMLTKETDYRDPMISATA

SEQ ID NO: 303949 - protein, 391 aa, unidentified
MTMYFVGIDISKYKHDCCIISAANQKVVSKFTFKNDKSGFEQLNLILNSLSTPEDIKIGFESTAHYALNLELFLENANHSFMEVNPVLIKEYKKSTTLRRTKTDSVDCESIARWLMTVEYKPHSKGFYHAYSLKSLTRLRDRLVRQRSFYLVKITNVLDHTFPEFKPFFHERLSKTALYLLENYGSAEKIARMNSASYEKLRSISRGKFSPQQFIRFKELAANTVGVNNSIFDVELNSLLTLYKSLVDEIKTLESEINRLVDEVHPHYMSIPGIGPISAAIIYAEYGDISNFSSPNQMLAFAGIEPSVHESGTEAYNGKMVKHGSSQLRYVLINCCLPLIRFDVTFATYYARKRSENKPHRVAITHVAKKLVRVIYALESQDIDFDPKKLR

SEQ ID NO: 303950 - protein, 427 aa, unidentified
MYRIAGIDVHKKKLAIVVADVEVHGEYQFERCWFGANPEQLRLLSQWLAEHQVEEVVMESTALYWKPVWGALERYWQPICQKREGAVPTSGILHLAQAQSNRGPRGRKKDFRDAERLVKRLVADELKLSFVPDREQRLWRTLTRRRYQLTRARVQLQNQLEALLEEAHLKLSSLVSDLLGISARRMLQAIAHGETNPEALAGLGDRRLRATRAQLWDALGACTELHPVYRRLIKMMLEELKVIEEHTAELNQELATLLRPHQDAVKRLAEVPGLGVDSAQQILAEVGAEAATFASDKNLCSWVGVCPGDEESAGESSSHRSPQGNRQMRRLLNQAANAAVKTKGSIFEIAYRRLVPRLGHNQTIGAVAHRLCRLIWLILRKGVRYEERGPAVSQRSRQNRTSKMIRELRILGYRVEFLNAVPSIPIP

SEQ ID NO: 303951 - protein, 523 aa, unidentified
MARAPKSKKHSSPAPQTIHKARGVISPRVQRVGPEHFGIVCVDCAKARSKWMLTDFYGRILVPPTEVEHTQACFASMIERLRTALEQAGIRDQIVVIERTGRYHRPVQRAFAKAGFEVRIIHPLTTKQHRQPANPGNKTDDTDLAAMQRGAVNGFGLLEPPADPLSIRLQLLARHRRDLVEKSVALRSQIHEHLYAIMPGYSKYFEDIYDARIPLWIARQFGSATAILQAGLPGLIVQLRRAEIRVHLPTLEKILAWARTAPAAEDESHLHLKILTELDDDRLSKVRGVRAIEAELAGLLVQTPYVLLMGIPGINVVSAAEFAGEMGPIERYATARAITGRAGLFPSRYQSDHVDYPDGQLVRCANRNLRRAIMMIADNLVKCNDHFRVLATGWRLHGRDARAVRVQVAGRFSRIAYQMVAGRKAYRHPCCQQRDYILNKLLIFHTDNEIGYDQLMRNLDAAVAQLPRSEYREAAVPLADELDRVLKKRGKGPRPLSEILPVVLAKLGVKPVRLPKSGEAILT

SEQ ID NO: 303952 - protein, 390 aa, unidentified
MFYLGIDIGKFHHAAALLTDEGKVIATVPSFSNTHAGFEQLLTLITYHLPPKEELRIGMEATGPYWIPLAWWLKTHGWPPVVMNPIKTSSLRNYGVRGSKTDNIDSVLIANALRFEGDKPQQVSPKHSEELCHLTRLRADMVKDRTRVALRVTSLLDRMFPELLCSFSKTLSPCCLALLSQAPTPTRVLALGEERLTTLLYHASRGKLGVTRAREIINKAAVSIGVNSQALEEILPLLLEQIDLIGSQLTTLDHRISELYEQAGLYFTSIAGVGTLTAATILGEFGSVERFKQAQQMVAFAGVDPKLRDSGQHRGAVHISKRGSRYLRRALYLACRGVVRKDDYFNAIYQRHRDNGKCYKEAIVAVMNRFIHVIYAIWRDNRPYYPLTPV

SEQ ID NO: 303953 - protein, 344 aa, unidentified
MNATTVAVDLAKSVFELAVADERWKVLERARLTRRQFERWFENRVVRLVVMEACATAHHWARTLRARGIEVLLVPAQYVRAYVKRDKTDAADALALLEAARASDITPVGVKSVEQQGLQALHRLRSGWMGTRTRRINTLRGFCREFGMEVSVGAARGLAQIARLLADEHSAIPAMLRAPMRLALEEIRLMEARIEALERELAAIARTSAACQALASVPGIGLLTSTAMVAAVADPRSFDSARRYASFFGLTPREHSSGHTRHLGRISKRGNRYVRTLLTHGARSVLRAATVARRAGRNVDRLRSWALEVQARSNHNKATCALANKLARIAWAVWVKHERYQAAA

SEQ ID NO: 303954 - protein, 339 aa, unidentified
MRLYAAIDLHSNNNVLTILDENDHVVFERRLPNERREVLAHLAPYRESIEAIAVESTYNWYWLVDELMDAGYTVKLVNTVAVKVYDGLKYTSDEHDARHLAHLLRLGILPTGYIYPKEERAVRDLLRKRSQLVRYRTAQILSIQNLVSRDTGHGIKTDQIRELDEEMIRQLSDNDEDRAMAVRSNLEVMRCLDGQIRILERAVLAKAKLKPSFEKLLTVPGIGNILGLTIMYEAGDVGRFAKVGQFASYARCVQSSRWSNNKKKGEGNRKNGNKYLGWAFVEAANFTVRYSECARRFFQRKKAKTKAVVALKAVAHKLARACYHVLKDQVSFDESRAFA

SEQ ID NO: 303955 - protein, 402 aa, unidentified
MNCVGIDVSKGKSMIAVMRPFGEVVVSPFEVRHTTNELSKLAGLLKSLDGETRVVMESTGNYHAPVARLLHGAGLYVSVVNAMLVHDYGNNSLRRGKTDKKDAVKLANYGLDHWLTLPRYVPEEDARLMLKTCYRQYQQYSKVQTMLKNNLISLMDTAFPDANRLFTSPPRTDGSEKWVDFVAAFWHCECVCGLSEKAFTAKYQKWCRKHGYNFSENKALDIYASACGHFGVMPKTDTSKLLVEQAISQLQATSAALAALKQEMQSLAASLPEYPVVMGMFGVGPTLGPQLIAEIGDVRRFHSKKALVAFAGIDAPPYQSGQIDVRSRSISKRGSASLRRTLFLVMGVLLQCAPMDEPVYQFMNKKRSEGKPYRVYMMASANKFLRIYYASVKAYLDSLEHD

SEQ ID NO: 303956 - protein, 482 aa, unidentified
MVVPNEEPKKPTKPNKPTKPNKLTKPNKSRERSLPVPVPVSAAALHVINPDAAGIDVHSDMHMVCVPADRDANPVRQFGANTADLQEIVAWLKKCRIKTVALESTGVYWIPLFELLESEGFEVNLVEPGQLSRCGARPKTDVLDAQWIQRLHSYGLLRASFRPPDSVLALRAYWRQRQMQVRYAASHVEHMQKAMEQMNVKLTEVVSDITGLTGMLIIGAILEGERDPIKLAQLRNERCQHSKEQIALALQGTWRPEHLFELRQAYELYQFHHRQITECDQQVQAELANFPNRAGEKTRTVKRRKRGRKSNDVRFEATGPLFQALGVDLTSIEGIDVGTALVILAEIGVDVSRFPTEKHFASWLRLCPPQDESNKTKKRRGHRKGTNRVTIALRMCARSLGKTMTPLGLFYRRIRSRIGGLGAVKATAHKLACLVYRMLKYGQQYVTQSMEEYEAKVKANMLKALKRKAAALGFQLSPLPTQ

SEQ ID NO: 303957 - protein, 335 aa, unidentified
MIYIGIDLHARHFSMAVLDQDNSIIFEETLPTSSRNLKAAVSAFAEGKSVVFEESTLAAWAFRVLQPCADQVVAADPLHNHWIAGDEKSNDVTAARKLAQLLRAGLIHPVHHSSEQRQLFKELVLAYHDATGELVRFKNKLKAKFRQHGIQCSGQGVYGSRGRDEWLTGLKAAGARFQVSLLWESIDHHHQQKEKLRGEIARQCKAFRAIEAFGHVPGIGLIRAATFFAIIDTPHRFADKRKVWAYCGLGVVGRQSDQMIGPKHLTRSGNRRLKDLAKGAAISAIGMGENQYARQYRRLLTKGIKAENARLTVARAIVSTLYAMWRDDTAYQPRT

SEQ ID NO: 303958 - protein, 341 aa, unidentified
MQTITTIGLDIAKSVLHGVDATGQVVIRRQLKRRSVLTFFQKLPPCLVGIEACASSHHWSRELQALGHIVRLMPPAYVKPYVKRQKNDMADAEAICEAVTRANMRFVPTKTPEQQSCLMLHRTRHLFIRQQTAVINSIRAHLAEFGIVAPVGRKGVTELLHVVADPSDKRVPEVARACLAALGTQLLSLKQQILEFDRMILAWHRSNETSKRLHYIPGVGPMLATALVASVADPRTFRSGRNFSAWIGLVPKQHSSGGKDRLGSISKQGDRYLRSLFVAGALAVIRYAKIHGTKHRPWLTALLARRHAKVAAIALANKIARMAWAMMAKGERYKEPIALAR

SEQ ID NO: 303959 - protein, 345 aa, unidentified
MTIVGGLDIHRKQLTFDYLDTVTGEVKRGQVAPADRVHLRAWLARFGGRDGVAFALEGCTGWRYVAEELAAAGCAAHVAEPADTAAARGRKRHAKTDKTDSAHLRRLLAEGRLPECWVPPGHILECRALLELYHDLRAEHTAWVQRIQAVFFHQGAPQLSAGALRTRKGAAAVRVAAAAHLSPAGRLQVATALDMLTCLEEHLEELRRRLLDTARHLTGARELSARLYGVGPVTALAMTCWLGGAGRFSSSRKAVRFAGLDITVYSSDSKRSPGHLSRQGPAVLRWTLYEAGKVHARSSAPDHAYYAQVKDRNGSKRAALSEARKIVRQGCHILAELGDDALAAA

SEQ ID NO: 303960 - protein, 391 aa, unidentified
MTSSHRIDTLAAGDKDGTLYVAFELSKSKWLIGLVVSGESKLSRHQVSGGDTAAVWQLISKKRAYAEKKLGRAVRVVSCYEAGYDGFWLARRLGEQGIDNRVLDPSSIEMPRRARQAKTDRLDLERLMRVLIRHDGGEPRVCSVVHPPSPEQEDARRLSRERDRLIGERTGHGNRIKGLLHGQGVREVEPRRKDFLERLAQARTGDGRVLPARLVAEIKREHARLVLLGEQLAEVEGQMRAEREAAAPDSRARQVNQLLGLKGIGAVGGETLVNEVFWRDFQNRRQVGAYFGLVGTPFDSGQSSREQGISKSGNGRARTLAIELSWLWLRHQPDSALSLWFKRRVGDQKGRVKRVAIVAMARKLMVALWRFLTLGVVPDNAIVRAAAPAGR

SEQ ID NO: 303961 - protein, 234 aa, unidentified
METPQVSFKQVVSRGCGLDVHKKTVVATIDGEVLKKQTREFGTVMSSLKELRDWLLENGITHVAMESTGVFWKPVYNILEPAGITVWVVNAAHVKYVPGHKTDKKDSAWLCKLLLAGLLKPSYIPAKEQRKLRDLTRYRTKLIQSNASNKNRIIRILEDASIKVLSPYENALELFKKVPGISSKSVEELVAEIGLDRDIFPTEKHLASWAGMSLGNNESTGKKKRTDNPWKQTR

SEQ ID NO: 303962 - protein, 411 aa, unidentified
MRVHHTVCCGIDVHKRSVTACLMWGPADREPQYEIRRFGTMTSELKTMVEWLKQRNCEIAAMESTGAYWKPVWNVLEGEMELVLANAKQVRSLPGEKTDNKDGKRLASYLRHGLIRSSFVPPRDIRELRDLTRYRQKLLANGAAERNRIQKLLEDANIKLGSVLSDVFGVSGQRMLQALVNQPTADVEQVAALAHWRLAPKIEQIKQALEGHVTSHHRFMIDLSLGHMQYIEQQILRLDEEIARHIEPYQKQFQLLQTIPGIGGNASAAVLAEIGPDMSPFDDDGKLASWSGICPGNNESAGKKFSSNTRKGNPHLVSTLVESAWASTHAKNCQFKSRYYRLRSRRGSQRAIVGVAHALLRTIYVVLKTGEPYQEPLRLALTQNRRSRKAERLTRELRHLGYEVTLKIKTA

SEQ ID NO: 303963 - protein, 338 aa, unidentified
MYYTGIDLHKFTSYLTTVDSTGLIVKQENIKNVAHNFIQYFGSLPGEHKTTVESTMTWYWLNDLLNSINIPMVLAHAKYVKAIAYAKVKTDKVDSHTLAQLLRMDYLPAAHKISAENRLLRDALRARLKIVQRHTSITNSMQLLLAKYNYDSPTQLTGITKFHYEQLSEVEEILNEQMLELEKQLYPSLIPNEDIQRLLWIPGIGKMNAFTILLEVDDINRFADVKNFFSYCRLVPSARNTGGKSKQRSSKDGNKYLKVVFCDAAIHAVQHYPVIRKYHGKLLRKKNKQITKTIIAKEIAEIVYHVLKNKTEFNNKFKGQELEHKKSLQWPRITSPYA

SEQ ID NO: 303964 - protein, 392 aa, unidentified
MLFVGIDVAKSKHDCCIIDSNGVIITDSLRISNTKEGFDTLYASIISALESTDFSNVKIGLESTGHYSTNITNYLYSKGFHITVLNPLATNAFRKAGTLRKTKTDKCDAKVIATMLFSDESKSYSPSSYQIQELKSLTRHRYRMIGYRSKLKLSVTRLIDIIFPELPALVWSIHQSSSYQLLLELPCPDEIRRCHLTHLTNVISKASRGKYGREKAIQLRELAANSIGSSNRSLTFELQQTIRLIQSVQVEINTLDKQIKLVVDELNTPLMTIPGIGYTIAAIILAEIGDINNFSSPAKLLAFAGMEPSTYQSGKYNASKTPMVKRGSTYLRWAVMQAARLVSMRDSSFAAYMAKKRSEGKHFNVAQSHVGKKLIRVIYSLLKNNTAFVPQM

SEQ ID NO: 303965 - protein, 341 aa, unidentified
MEQYIGLDVSLKETAISVRQGGKRIWRGKCASDPKVLAAIIRDRAPEAKRVVFETGPLSVWFYHALMAEGIPAICIDARHAKAALDMAPNKTDANDADGLAQLAAVGFYREVRVKQYDSMLSRTRVGARNRVIKITIELSNQIRGVLKTFGLIVGKGSGRVFEANVRTLLAGHAELARVVLPLLEAWRDLRARAAELDRQLVAAARESAACRLLMSIPGVGSVVAASFVAAIERPENFRTSRSVGAWLGLTPRRYQSGEVDFDGQISRRGDNHLRGLLYQAATVILTRSLADSTLRSWGLKLREKVGVKRAAVAVARKLAIVMHTMLKTGERFDRTIGASA

SEQ ID NO: 303966 - protein, 411 aa, unidentified
MENIFPRCAGLDVHKETVEACVRRLEPGGRLHQETRPWGTMTRDIQAMADWMAAQGVTHVAMESTGVYWKPIYNILESRFTVLLVNARHLKQVPGRKSDVRDCQWIAQLLQHGLLKGSFIPPRAQRELRDLTRHRTQLVEATTRTVNRLQKVLEDANIKLASVASDILGVSGRAMLEALMEGEEDAIKLAHMAQGQLRGKIPELEKALEGHVTEHHRFLLQLLWKELAQQEDLITELDAKIEEVTRPFAAEIERLDPVPGVDRQVAQVVLAEVGADMSPFPTHQHLASWAGMCPGNEESAGKRRRRRITPGNRWLKRTLVQAAWAASHTKNTYLASQYRRLAGRRGKKRALIAVGHSILVILYHMLKDGTTYADLGGDFFERLEPERLTRYYVRRLERLGHKVTLEPCVAA

SEQ ID NO: 303967 - protein, 367 aa, unidentified
MMGWMAPLRHLSAKVLSDRNSSEWEPSMGEVTTIGLDLAKHVFQVHGVDAEGATVLRKQLRRAQVLAFFSRLPPCLVGLEACATAHYWARELRALGHEVRLMPAQYVKAYVKRNKHDAADAEAICEAVVRPTMRFVPVKTADQQAAVLLHRGRERLVRQRTGLVNALRGHLAEFGVIAPQGLRNVGKLIAIVRDERDARLPDLARQVLQVLAAQIEQLEAAVAAIEKQLMAWHKSNPVSQRLASVPGIGPIIATAIAATVVEPSGFRSGREFAAWLGLVPRQNSTGGKHRLGGISKRGNQYLRRLLINGASANLLRSKATKADPWVIGLRRRRPPLVVAVALANKTARIAWAVMHRHENYQRVAAAA

SEQ ID NO: 303968 - protein, 439 aa, unidentified
MAKKKVVEFAMLNPDAAGVDIGSKEHWVAVPEDRAQESVRKFSSFTEDLHAIASWLKECRIKTVAMESTGVYWIPLFLILQEYGFEVYLVNAKHVKNVSGKKTDEQDCRWIQRLHSCGLVTASFQPDLKTRELRSYIRHRRNLTQSASTHVLRMQKAFEQMNVKLHHVITDITGKTGTKIIEAILAGERDAIKLAKYADTRIRPSKIALIVKSLQGNWREEHLFELKQSYELYQFYQAKLQECDIEIQKIISCYLPPESTAHKQDQWGDKEEKGTIVSQYLKMIFGVDVTDIWGIKERTAIELLSEIGTDMDKWRTDKHFVSWLGLAPNTKVSGGKIISSRITKKQNKAGQLFRMIAFAIQRSDHWLAVFYRRMRAKGGPKKAIVATARKLAIIFYKMVKNKEEFKPIDRMEYEQQYRGQKIKWLEKQALKLGGTLTFG

SEQ ID NO: 303969 - protein, 325 aa, unidentified
METKMLCCGIDVSHLTLDVTYQNNLGELFHLQVGNNIAGFKKILEHTGVTYHFVMEATGVYYIRLAFYLHGQGCRLSVVNAMSIKRYIQMHLERNKSDKKDSGWICKYAIEQRPGFWEMPDSAYFESKQLFNTIREYAEQVKRFNNQLHSLKLLPVPSKETIKSIEKMKACLEKEMAVLEKKLEACLKQWQPDQYKSINSIKGLGKRATALLIIFTQGFRHTKSHRQLISFAGLSPTEYSSGSSIKGNNRIYKKGGKTIRDVLYMCAMNAKQTNVACKQLFERLKANGKTGKQALIAVMNKLLKQVFAVVKNNSLYQPNYCSAKP

SEQ ID NO: 303970 - protein, 343 aa, unidentified
MQTVTTIGLDIAKSVFQVHGVDAAGQVVIRRQLKRRTVLAFFQKLPPCLVGIEACASSHHWSRELQTLGHTVRLMPPAYVKPYVKRQKNDATDAEAICEAVTRANMRFVATKTTEQQSGLVLHRTRHLFIRQQTSVINAIRAHLAEFGIVAPVGRHGVEELLNVVTDTNDKRVPEVARMCLAALGAQLRRFKEQILEFDRLITAWHRSNETSRRLDDIPGVGPVLATALVASVADPKAFKSGRNFSAWIGLVPKQHSSGGKDRLGSISKQGDRYLRGLFVAGALAVIRYAKIHGTKHRPWLTALLARRPTKIAAIALANKIARMAWAMMAKGERYKEPVALAA

SEQ ID NO: 303971 - protein, 324 aa, unidentified
MDMAWLGIDIAKRKYEVALLRPDGKWRSKSIANTPAGHGELLAWLRRQHEGPVHACLEATGTYGAAVAESLHDAGHRVSVINPAAIEAFGRSRLSRTKTDPTDARLIAQFCRTQEPPPWAPLPREVRELQALVRRLDALEGMRQQERNRLAADPGSAAVCASIQHLIDTLDEEMTALKGQIVDHFDAHPTLRQQRDLLTSIPGIGAATAAILIAEFGPMARFAHARQCAAFVGVVPRERRSGTSLRGEPVLSKLGSAAVRKALYYPALTALRCNPIVTALRDRLRLRGKHPMAIVGAAMRKLVHLAYGVLKTAQPFDPNFLQTT

SEQ ID NO: 303972 - protein, 344 aa, unidentified
MSIKVVGIDIAKNLFQVCVLSADGQILSNRKVKRDKLLDTVRQFPEQTAIALESCATSHHWGRIFQELGHRVALIPAQHVKPFVRRQKNDANDARAICEAFSRPDIHFVPVKSVEQQDLKAIRSVRKRLVENRTALANQIRGLAAEYGVVFPLSIKSLRSHLPLAIEDAENQLSHVMRSLLQTLYCNFINISDEIDEVTQSITRLSQQHPRYEAVKNIPGFSPILTAAIISEVGSGKQFQNGRQFSAWCGLVPKQNSSGGKSSLGALSKSGNRDLRTLLIHGARAVVRCRTNSMDPMGVWLRSLIARRGKAKAIVALANKLGRVVWRVLSTDCEYDINRAFRPL

SEQ ID NO: 303973 - protein, 482 aa, unidentified
MAKRKRSTFERLRDGKMSRQERREWQQRLCGEDTGLEVVHPDAAGIDVGNASHFVAVPSDRDEQSVREFGSWTADLRRMAEWLKRCGIRTVAMQSTGVYWVAVQEVLEDEGLEVYLVNARGTKNLPGRKSDVQECRWLMKLHTYGLLRNSFHPPEQIRAVRTIWRQRDRLVKEAGREVQQMQKALTSMNVQLANAISDVSGVTGQAIIRAILKGQRDPQQLAKLRDRRIAASEAEIAHSLEGNWREDILFELQQVVDAYDFHQKQIAACDVQLQRYLAALPMRSGPGCGEGSRADAPSEKPHKPRKHKLQKNQPVFDLAAELQRTMGVDLTTIDGVDVMTTQVILSELGPDLSASFPSEDHFASWLELAPRRDVSGGKVIRHQSRKSNNRVANALRMAAQSLWRSHTYLGARYRHLRARLGGQKAVKAMARYLACLVYRLLTKGRAYVDRGAAHFESKRTEREVLALRRKAAELGMQLTTIS

SEQ ID NO: 303974 - protein, 343 aa, unidentified
MKLIRVGVDLAKNVFQVHGVDRNEKVVWRRKLARESWIKVLLETAAPGCAIGMEACGGAHHWARRLQAHGFKVRLVAPQFVKPYVKSNKNDANDAEAICEAMSRPHMRFVSVKTVEQQDIQAVHRIRAELTKQRTAKANQIRGLVAEYGLVAPKELMHLRRALPCWLEDAENGLSARFRRLLNGLWGDLRTLDERVAELDREIAVIAQNDPAAKRLQQLRGVGPIIATALVAAVGNGEQFANGRQMSAAFGLTPRQHSSGGKERLLGISKRGDAYLRVLLIHGARSVIHHSKGKDDRLSQWVTRLAARSHTNVAAVAMANKTARMAWAMLRNGTDYQPAMVTG

SEQ ID NO: 303975 - protein, 312 aa, unidentified
MRKAIIGVDVSKEWLDLSLAGEAQIQRLNNIEFEIGEWLDRIEPAYVAFEPTGGYERNLVAALKARGIAFARVHPNDICAFRQSRGIKAKTDRIDARVIAEYAAEVVMRRQGAQTILGDDGLRELAARRRQLVDTLQAERCRLQQAHSKAVRISIETMIDVLKRSLDLLEAEMKGWIERDPQLLHRFRLLQTLRGVGPMVAMILVAQLPELGLLNGKQIAALVGLAPLTRQSGKLKWREKTGHGRIDVRQSMFNSARAAIRHPSPQKAFYDRLVTENNRPGKVALTAVMRKQIVTLNAMVRENKPWRGATEA

SEQ ID NO: 303976 - protein, 424 aa, unidentified
MASHEFAAFVGIDWGDQKHAVCLRTEGVEVEHELSQKADEIDAWATELRTRFGGRPVAVCLEQSRGPLIYALLKYEFLVLFPLNPLQATRYREALYPSGSKDDPLDARLLCLFVETHHGQLRAWQPDDEATRLLRLLAEDRRRFVDQRTAHKNQLRQRLKEFFPLALELLRSGDLEDEWFLQLLIKFPSHAELRRAPPRTLERMLPKHHRLPDDESLDPRVARIRAAVPLVTDGAVVKAARLQVMELARLLLRLNTTIAEYDHELSAELARHPEAELFRSFPGAGAALLPRLAAAFGTDRERYADAQDLQQLSGIAPVQIRSGKSCSVRRRRACPKFLRQTFHEYADHSRKRSLWAKAYYRMLRGRGLRHNAAVRALAFKWLRILFRCWQTRTPYDEHRHLKQLRLKQSPLLQYLDLPDPVEQT

SEQ ID NO: 303977 - protein, 357 aa, unidentified
MEGNQERSDRRIVGGVDTHKDLHVAAVVDEVDRVLASQCFATTRHGYKQMLAWMRTFGSLQRVGIEATGSYGAGLLRYMQKAGIEVLEVTTPDKHDRRKRGKNDDLDAQNAAHAGKRTVTPKSRDGMIESLRVLKACRKTAVAARRVALQMIQNTIVCAPDELRETLRKMTRMQLIRTLAAWRPDLTDYRNVASAYRITLKSLGRRYLELHDEIADLDTMIVAIVDELAPALVARNSIGHETAAQLLLTAGDNVQRLRSEASFAALCGVSPMPASSGKTTRHRLSRGGDRAANSALHIIAIGRLRTDPRTQTYVAKRITEGHSKLEAIRCLKRYIAREVFSLIKQRSQERHPAPTAA

SEQ ID NO: 303978 - protein, 343 aa, unidentified
MEYYAGIDVSLESSSLCVVDATGRIVRESKVASEPEALIAWLQSLGFDLARIGLEAGPLSQWLYAGLKQAGLAAELLETRHVRNAFKIMPVKTDRKDARGIAQLMRMGWFRSVHCKSLPAQETRSLLGARKLLQSKLHDIELSLRGTLRGFGLKVGKTTPKTFEARIRTLVADHPTLTLIAEALLRARAVLLDEFIKLDKKVHALARQDPRARLLTTAPGVGSMVALTYAAAIDDPARFKSSKTVGALFGLTPKKYQSGETDITGRISKTGDAAVRTALYEAANIILERPVKGGWLKAWALGVAKRAGMRKAKVALARKLAVVMHRMLVDGTPFDLNRVTATA

SEQ ID NO: 303979 - protein, 358 aa, unidentified
MKVYRVQNSVVEGKEIFVGLEDSKKTWKIAVRGERMLIHQATMEAKYAALIGYLRNKFPDCLIHLMYEAGFKGFNLYDRLTEDGIDCVVIPPHMVTEPKTNKVKTDKRDARRLALVLESHDYDKSCHVPDKERREDRQISRTLIALQKDIIRERNRIRKALDFHGIEVPFAEKNVWGRKEFRALRDLSLSEPLKVSLSVLLTILEELWNQQALLRSHLRALCKKERYRKAFVIARSLPGIGWYTAIRLILEMGEDLSRFTTGQKIASFVGLTSSEHSTGETERKGRITGMGSGFIRSVLVENSWAAIKKDQALLSKFSRVWRSSGSKKKAIVAVARVLIVRFRACLVSGTPYRIGVVR

SEQ ID NO: 303980 - protein, 365 aa, unidentified
MYFLGIDIGKRTHVASIMNEEGKVLLKGFPFPNTTEGAESLIERMVNYSGAPSDFVIGMEATGHYWLSIFSYLHESDYLIHVVNPLQTDGWRKGTEIRKRKNDIIDSVLIADLMRYGSFVETVLSDENVFSLKQLSRYRTYLVGTASDFKRKIIAVLDQVFPEYATIFTKQGVFGKASKELLLAFSAPIDLENISSETLAQYLAELSRNRIKAEKAEQLKQAASNSFGVKFAQEAFTFQLRSMIEQLKFIESQIKKTEREIKHIMDTLNSVILTIPGIGPINGATILGEIGDIQKFSNPKKLVAYAGIDASVTQSGQYEATHNVMSKRGSPYLRKALFSAALVAAQCDPVFSAVYQKKIPKENII

SEQ ID NO: 303981 - protein, 473 aa, unidentified
MCDEIFIGDALVVFPYRMLSYLIHNRPSFLYIIKNYSVMKKSLEVVHPHAAGIDIGSRSFYVDAGEENIRIFPTFTEDCHALRAYLQSCGVTTVAMESTGVYWVVLYSVLEEAGIDVYLVNGRDVKNLPGRKSDVKDCQWLRQLHSYGLLRKSFIPENNIRTVRSYLRLRQDHIRASATQVNLMQKALTQMNIRLAEVISDITGASGLKILEAIVKGERNPETLLSMCVSQLKEKKGDQIIKSLQGHYRLEHLFALRQALDTWHYYNKLIVECDSEIAKQLELMTKDKDDIDSQNPRKPIRYNKPQIENLHKPLLKLSEGKDPINIAGITDYSFLQIMSEVGTDMSPWKTEKHFTSWLKVAPMRASSGKMSKRITMKRHNNAGQLFRNIAQGILTSKHLALGAFGRRIRARRGSGVAIKAIARKIATYYYRVMTQGTEFVEKGIEKYEQSIKEQQLKRLGRMALKHNLQLVQI

SEQ ID NO: 303982 - protein, 415 aa, unidentified
MALKIVYQICCGIDVHKTFVVACIASTNKQGVTNYKSHRFSTYTKGLKELLQWLLESNCKDVCMESTGKYWIPVYNVLEKDCSIILAHPKYVKAIRGKKTDKKDAKWIADLFKHDLVAGSFMPPADIRQLRDLMRYRYKLTCFMSSEKNRLQNCLTVSNIQLGNVVSDTFGKSSKKILDKILENPLDTSFDIEPLIHGSMKDKIPELELAIDGYITPSQAGKLKIITKHFADLESRKTELEELILALASPYQQELDLILTAPSFHNAFSAITVISEIGVNMESFPSAKHLCSWAGLTPTNNESAGKKKSVRVSKAGCYIKPLLVQCANSVVKSEKHPEIRNRYLRLRKRRGHKKAIIAIARMLLTALYNMLQNGEPYNVDLYRKSDALPASREITIEQAILMAQFQGYRIKSATV

SEQ ID NO: 303983 - protein, 425 aa, unidentified
MNYKQNEKINQVKESTLVVGIDIGSTTQYARAFDWRGIELGKVFPFSNSREGSEAFKLWMKHLQDKYRKSDVIVGIEPTGHYWFDLGAYLEDEGILLVMVNPYAVKQTKELDDNSQSKNDRKDPKVIAKLVAEGRYSAPYTPDGVYADLRIMVANRKRLIREMTQIKNRFARWFAIYFPEYTDVFGDYEAQSSMLLLKKVCTPEAIVELGAEKINQIWRDAKLRAVGMKRATTLCETAKRSIGLKKGSSAARYEMKLLLEDYEYKKAQLDAVMEEIEKLCRKIPESRQMFAIKGIEVITVAGFLAEVGDVRRFESPGQIQKLVGLSLRENSSGKHKGQTTISKRGRSKLRAVLFNAAIPLIAKNSEFKSLHEYYTTRANNPLKKKQSVIAISCKLIRVFYAILANGVTYDSQKLLSDIHRQPQAA

SEQ ID NO: 303984 - protein, 351 aa, unidentified
MCSISVDFINPLNKLIMQIKHFVGIDVSRDTLDLNVVVDGSSQKHHSIPNRTIDIGSSLNKIMKSFGATFDDTIFCMEHTGIYNLPLINWLQSHDGKIWMESGVHIRKTLGLVRGKNDKVDSMRIAMYAYLNRHRIKTWRAPRKLIARLAALLSQRSRLNKAKKQLGTANQEQKLFMDKDIMRSLNTYTQKTIAVINKQILAIENEILSLIKEDEKLNRIYQIITSVAGVGFVTASYILVTTNEFININDPKKYACYSGVVPFEHSSGSSVRGKTRVSQMANKNIKTLLHMAALSTIKKRGDLQEYYIRKVAEGKNKMSVLNAIRNKLILRIFACVNQNRVYEQNYCYKLV

SEQ ID NO: 303985 - protein, 372 aa, unidentified
MLDTTTFVGLDVHARSIKAVSLDVMTGEVRCATFGYDAGAVAEWVRSVDPRARCVYESGVTGFDLQKRLSGLGVDCVVGAVSKMIKPSADRRRKNDRNDAEFLARMLSVGNVVEVWVPDDECEAARDLTRALEDARDDLSRSKQRLSKFLLRHGLAFDERTPTGRRKGNWTRAHWSWIESIRFAERADEEALAYYVDAVRRAAEEKARLEGLVEAEARKPRWRKRVDSLRCLKGVDTASAADLVFEAGEFSRFRNARSFAAWVGLTPSEHSSGESDRRGAITKAGNKHLRKTLVEAAWHYLTCSARPKEPARGQAPDPGARRHAAKGVRRLVERREALLARGVHGNKANVATARELACWVWEIGCRSEGTVL

SEQ ID NO: 303986 - protein, 393 aa, unidentified
MDERGRVLARGRLPEGVAGMARLHELIGEQLGEDADDAEVVIGTETDRGPWVSALVAAGYTVYGVNPLQASRYRERHGVSGAKSDRGDAHMLTDMVRTDSHQLRAVAGDSPDAEAVKVVARTHKTLIWERTRQVQRLRHQLREYFPAALEAFDDLDAPDALELLGKAPDPAKAAKLTRAQVSAALRRARRRDIPGKATAILAALRSAQLGQPPAVTAAYAVTARSLVAVIAVLNEQVKALESQVEADFGRHPDAEIYLSQPGLGPVLGARVLGEFGDDPDRYVSGKARKNYAGTSPLTRASGKKKVVAARFIRNDRLIDALMAQALSALGSSPGARALYDAERARGTEHNAALRKLANRLVGILHGCLKTRTLYDEATAWPHREKTPQSDIAA

SEQ ID NO: 303987 - protein, 398 aa, unidentified
MSATSGNDCSRGPAGLYVALELGLKEWKMASTVGLGQKPRIRTLPARGLAALWRELATAKQRFGLSPEAAVFSCYEAGRDGFWLDRVLRERGVQNVVVDSSSIEVNRRKRRAKTDRLDAQKLVTMLLRYHWGEAKLWSVLRIPSLEEEDQRHLHRELLAVKGERTRHINRIKGLLISVGIALPTVDTSFPEDLERLRLWWASRAGTAPPLPAALRERCRREYERLALAERQIRDLEEARLAQIGSSSSPAMETVRQLMKLRGIGPAISWLLTMECLAWRKFANRRELASMAGLTPTPYSSSQGEREQGISKAGNRRLRTMLVELAWGWLVFQPESALSRWYAERFGSGSQRQRKIGIVALARKLWVALWRYVETGEVPEGAAVGDWEEKVPRRLRTAA

SEQ ID NO: 303988 - protein, 355 aa, unidentified
MTSTKYIGMDVHTESISIAVRNSAGKMVMESVIETKASVILQFLNGMSGELHVTFEEGTAAAWMYDLLKPHVARLVVCNPRRNALLKVGNKDDRIDARKLSELLRGNQLQSVYHGEHGLRALKELVRSYLAISKDTARVMTRLKALYRSWGIPCSGTQVYSRLYRVSWLSKITEPGVRLRAVFYFQQLDALRSLRQEVRRELLAESKKHKVWKRLCQIPAIGPIRASVALGILQTPHRFRTKRQLWSISGFAIETRSSADHRKVNGQLRKVKKRVSIRGLNQNHNHDLKNLFKGAAVIASTKPGPFQEFYSALLAKGMRPEMARLTLARKIATIVLVVWKKGVNFDAQYLKPQTV

SEQ ID NO: 303989 - protein, 361 aa, unidentified
MAKARTLVGLDVHAAKVVAAILDAETGELRFQRLGGESGPVVELCRVLPGPVRATYEAGPTGYGLARGLAAAEVQCLVAAPGKIPRGATDRVKTDRRDAEHLVRLLLAGKLSAVRVPGPAEEAMRDLVRAREDLRVDLMRARHRLSKLLLRHEIRFEGPGKNWTERHLAWLATLEFADLAAQATFDDYRGAVEALLHRRGELERQIEGLIPASAWATEVGRLRCLRGIDTLTAIGLCVEVGDFARFGKAGQLMSYLGLVPSEHSSGESRRLGSITKSGSRHARRLLVEAAWHYRNPPRVGREIERRQQGQPAAAVAVAWSAQRRLHRTHSRMRKRNKRSTVTTVAVARELAGFCWAIAQIE

SEQ ID NO: 303990 - protein, 370 aa, unidentified
MLDTTTFIGLDVHARSIKAVSLDVMTGEVRAATFGYDAGAVAGWVRSVDPEARCVYESGVTGFDLQKRLSGLGVDCVVGAVSKMIKPSADRRRKNDRNDAEFLARMLSVGNVVEVWVPDDECEAARDLTRALEDARDDLSRSKQRLSKFLLRHGLVFDERTPTGRRKGNWTRAHWSWIESIRFAERADNDVLAYYVDAVRRAAEEKARLEGLVGAEARKPRWRKRVDSLRCLKGVDTASAADLVFEAGEFSRFRNARSFAAWVGLTPSEHSSGESDRRGAITKAGNKHLRKTLVEAAWHYLTCSGRPKGLAKGQAPDRGARRHAAKGVRRLVERREALLARGVHGNKANVATARELACWVWAVGLMAEEA

SEQ ID NO: 303991 - protein, 307 aa, unidentified
MRFYTQQHQFYCGIDLHARTMYLCSLHRDGEILVHRNMSAGPEPFLKAIAPYREDVVVCVECLFTWYWLADLCAREGLPFVLGHALYMKAIHGGKAKNDKIDAQKIAVLLRGGMLPQAYVYPAEMRATRDLLRRRLHLTRKRAELLAHIQNTNSQYNLPELGKKIAYKAHRGGVAERFPDPAGQKSVEVDLALIDFYDQLLRDVDLTIVQTAKQHDAQTVYRLQSVPGIGKILSLVLLYEIHDITRFPRVQDFVSYCRLVKCAKESAGKRYGTAGTKIGNAYLKWAFSEAAVLCLRNHPAGQKYLAR

SEQ ID NO: 303992 - protein, 317 aa, unidentified
MATREPLWIGIDTGKDELVIDDGRRTITVSNTSAAIRQWLKQLPGPARIGVEATGTYHLQVLELASEKGHQPYVIDGFRLNRYRDVVGDRAKTDLTDARLVRRYLRNEFDELRPWQAPPVAYTRLKSLLRRRAKIVQARTALRQSLAGVPELRAVSRGLLERINGALAQIDRLLKRWVEKAGLQDAVRRLDQIEGIGPLVAAAFATSYLRGEFRSSDAFVAFLGLDVRVRDSGKRVGQRRLSKKGDGEMRRLAYIAAMAASRSGRWKEQHLANQARGLSRIQSLVIIARKLVRLAFALLKSGEEYRPQLPQGATATT

SEQ ID NO: 303993 - protein, 424 aa, unidentified
MKVTYQTCCGVDVHKSFLVATIVKTTGGIEPSYQKKRFSTFNNSILEFKQWLLDNDCHDVCMESTDKYWVPVFNLLEDKINVVIANPKWVKAVKGNKDDTKDSKWIGDLFRLGLVKGSYIPCKKVRILREYTRYRYKLVSCRSSEKNRYQNALTVCNVALDSIVSDIFGKSSTSIIDYLLEQSGTSINHEEIASKLLRSLKSKEDAVIESVEGYQMTDAQKYRMRLVRAHMDYITAEINDVDKMIENMISSNPDFENAVQFLCTIPGVKRDSAITIISETGTDMSQFSSSKRLCCWAGLTPGSNESAGKKKSVRITRAGVYLKPALVQCAHAAVKSDKSPYYKKKYESLVKRRGKKRAIIAIARMILTAIYQMLSTGEQWNPSDLYKIDMPVALVEKQKAKAIKQAKKLLQREGLLPPDEPLAS

SEQ ID NO: 303994 - protein, 344 aa, unidentified
MTNIQHKETAREAKPDLFAGIDVGAEELILVIRKNGKPFDPQKFANTPADRDRLVKKLVKLPGIIVCLEATGVYHFDLSLALHDAGVLLMVVNPKASHNFAKVLMKNNKTDVVDANTLAEYAARMDFVAWTRPSDETIALRSFSRRINALTGQKAAAKNHLHALTATSETPKVVLKDAKLAITQLEKRIDCLTAGALVLIGKHPELERILALLIGIKGVGETSAIALMGELLLLPPDLSHREWVKFAGLDPRAFDSGKSVHKKTRISKAGNRHIRAALYFPALSAKQHDKHVKAYFQHLMDNGKTPLQGVCAVMRKLLHAIHGMLKKNEPFDNTRFYAIPESIG

SEQ ID NO: 303995 - protein, 353 aa, unidentified
MSKQIVSTGKPDMLANKLTNPQQARVFCGIDVSAETLSVAVIEPDRPLQRREFANSASGHTALLRWLGKWKAAVRVSLEATGIYSLDLALALDAAEGIEVAVLNPKRIHDFARSLCRSKTDSTDAQVLAEFSMRMDFKPWQRPSRSALALRAISRHIEALGVEHTRAFNRLHAAQGSMGTPRCVIDDMKRSLATLERRILKLRREARAQIDSNDRLREQFRLMIGMPGIGEISALQILGELVLLAPDLKARQWVARSGLDPVHQDSGTSLHKPARISRAGSRHLRRALYMPALAAVRCDPHLKAFYETLLGRRKSKLQALTAVARKMLHAIHGIFKSRTPYDGNKLFPQLKTT

SEQ ID NO: 303996 - protein, 426 aa, unidentified
MKVIYEKACGVDVHKSFIVAVICDSTSITPKYLRKRFSTFNNSLIQFRNWLIDNDCQNVCMESTGKYYIPVYNALEGFISNVVVANPKWVAVIKGEKDDNKDAKWIADLFKLGIVRSSFIPDKDFRILREFTRYIYKLTCNKSSEKNRFANALTVGNCKLDMVFSDTFSKSAQSIIDIILNNDNFSDEDIIGCLRKNCKSTHEDILSSVSGVTFTFEQKLRIKIVEDHIDYLTNQINTLRDIVDTLVSPYEDYINLLMSIPGVDRKSAITILSEIGTDMSQFSNHYRLTSWAGLAPGCNESAGKKKSVKISRAGVYLKPCLVEVAHCAIKDKTNTYYANKFNKISKRRGKKRSYIAIARKILVAIYHMLSTGEVWNPTDLATNETNDKDRIKYTKNNFKQSLKQLLSLGLTSEELLEIVNQNAMLE

SEQ ID NO: 303997 - protein, 319 aa, unidentified
MTPTLVFVGLDVAKATLDIALRPSGEQWSVPNDEAGVAALLERLRPQSPALVVCEATGGFERAAIAMLAAAGLPVVVANPRQIRDFARATGQLAKTDQIDAAILALFAERVRPVPRPLASEAAQLLDALLTRRRQLLEMLVAEKNRLGFAPRPLHQGIQQHIRWLERQLDDVTTDLADQIERSPVWRAKDDLLQSVPGVGPIVSAVLLAELPELGTLSHKQIATLAGVAPLARDSGTLRGKRMVWGGRAGVRTALYLAALCGRRWNPQLRIFYERLIAAGKPKKVALIACARKLLTILNAMLRDTARWTTPELAIQHSC

SEQ ID NO: 303998 - protein, 354 aa, unidentified
MSNRINSIVTTIGIDIGKNAFHVVGLDQRGAIVLRQRWSRGQVEARLANMPPCLVGMEACVGAHHLSRRLQSQGHDARLMPAKYVRPYSKGQKNDFRDAEAIAEAVQRPTMKFVATKTAEQLDLQALHRVRERLVSQRTGIINQIRAFLLERGVAVRQGLRFLRAELPIILATRSDVLSPRMLRVVEELAGDWRRLDERIAGLSKEIEDLARQDPACERLMTVPGIGPIISSAMVAAIGNGAVFTKGRDFGAWLGLVPKQISTGDRTILGAISRRGNRYLRALFVQSAWVVLIRIKDWDRYGLKTWIDAAKKRLHHNVLAIALANKLARIAWAVLNKERAFECVKTHATARQPA

SEQ ID NO: 303999 - protein, 342 aa, unidentified
MEHDAGIDVSLECSSVCVVDGNGKIVRETKVASEPAALIGWLSSLGFGLGRIGLEAGPLSQWLYMAMKQAGLAVELLETRHVRDAFKAMPVKSDRNDARGIAQLMRLGWFRPVHCKSMAAQEVRAVLTARKLVQSRLLDVENSLRGILRGFGLKVGKTTRTNFSGRIRELVKDHLNLKTIGEALLSVRAVLLGEFNAFEKQVRAMSRLNANARLLMSTPGVGQIVALTYDSAIDDPARFRSSKRAAPLVGLTPKKYQSGETDRSGRISKIGDAAVRAALYEAAHIMLTKPIKGCPRLKSWAMRIARRAGMNKAKLALARKLAVILHRMLVTATPFNDAAAAA

SEQ ID NO: 304000 - protein, 340 aa, unidentified
MHANIIGVDLAKSVFQIHGEDEAGNVVFRQRLRRAQVLRFFEKHPPALIGMEACGTSHYWGRELEKLGHRVKLMPPSYVKPFVKRNKTDERDAEACCEAVRRPSIRAVQIKSVDQQCAGALHRSRDLLVRQRTQLGNSIRAHLAEIGVISAQGLIGFAKLAEMVQAEDEKIPITLRPCLELMLQQWQGLDQAIHKLEAKVIEEVKANPTTRRLMEPPGIGPITVHATLAAIGDGSQFHSARAFAAWLGLTSKQHSSANKKRSGGISRQGNKVLRRAFVLGASAMIRQLRSRPDRASPWLRGIMARRPVKVAVVAQAAKNARLVWAMLVSGEHYRARPSAV

SEQ ID NO: 304001 - protein, 412 aa, unidentified
MQAIIERCCGLDVHQGTVVACLLVGAPGAQPTKEVRTFRTVTRDLEALRDWLRAAGVTHVGMESTGVYWRPVYTVLEGHFELIVGNARHIRNVPGRKTDVKDSEWIADLVRHGLIAKSFVPPRPLRELRELLRYRRKLVESQAAERNRLLKLLETANIKLASVASDVFGVSGRAMLRALIEGEASAEAMADLAKGQLRRKRADLILALDGRIEEHHRFLLAMQLRRLEAIEADIAALDLRIGERLDPYCTQHALLMQIPGVDWLVAAVLIAEIGVDMSVFLSVYHLAAWAGVCPGSHESAGRQKSGRARKGNIHLRTILVGAAISAARTKGSYLKDKFHRLKARRGALRAALAIAHKILVSAYHMLAKSLPYRELGEAYLDQIGQTRTVANLKRRLERLGYRVTLEPTVQAT

SEQ ID NO: 304002 - protein, 341 aa, unidentified
MLVRATKLKKMMDRFDNAIGIDVSKYTLDVHGYCENAHVQFSNNEQGFKELTQWIKKGNPNREVIICFEHTGLYSLPLAVFLADKCLPFCMVGGLEMHRSLGIKRGKNDKADAKDISRYAYLRREEINVYKMPSKALLKLRGLLSLRERMIKQKAGYQTNLKEMKRVFQEKDNPLWFSSQQKMIKELIKQVVKIESQMQQIIQEDDQLKKLFELATSVKGVGLIVGISFLVYTNAFTSFNNWRSFASYSGTAPFPHQSGISIKGKTKTSPLANKKMKGLLSNSANVAIQHNPEIRQYYNRRIEEGKSKMSTQNIIKNKIIARVFATVNRGTPYVDTYKHAA

SEQ ID NO: 304003 - protein, 355 aa, unidentified
MIIIGCDYHPGFQQIAYVDTETGELQERALQHREEAEKFYRELAAQGMKVRVGMEASGHARWFERLLAELNFELWIGDAAEIRTKRVGKQKTDRQDAQLILKLMLKDDFPRIWVPSWENRDLRQLLWHRHRMVQARTRIMNQLQAVALNEGLRYKKRLWREAGRKQLEAFRLAPWASRRRQDLLELLDHRLNPTIAELTQAIEREVEKCPQARRLQTHPGVGSLTALAFVLIIGQADRFRCGKQIASYLGLVPLEDSSGSRRRLGHITKQGNSRLRFLLVEAAQVTVRSDPEWRSKYHHLMMRRGRKIAKIAMARRLAVRMYWMMRKGWNYEQLKKFGSHAGRPGTGDGVKENIE

SEQ ID NO: 304004 - protein, 356 aa, unidentified
MDNKKYIGRDVHQATISVAVMDSAGKVVMDSVIETKAVTILEFIQGLRGALWVPFEEGTSAAWLYDLLKPHVAKVVVGDPRKNALLKAGNKNDRIDARKLADLLRSGLLSPVYHGGAGVRTLKELARSYLTITKDLTRVMNRIKGLYRSWAIACAGQKVFSPRYRSAWLKKLTEAGVRRRAEWLYQQLDDLQPLRREARRELLAESRKHPVNTLLRQVPWLGPIRVALLIARIQTPHRFRTKRQLWAYSGLALRTRVSGEYRVTGGGQLQRAKRPPALRGLNENHNHELKSVVKSTATRASTSAGPLGDFYAALLTTGMRPTMARLTVAGKIAAIVLTIWKKGERFDPEHLKRQAA

SEQ ID NO: 304005 - protein, 324 aa, unidentified
MSDPDVFVGIDVAKATLCVHIQPEGDAGGHERTFEVANAGKGISSLVADLLKLSRAGRRLAIGFEASGGYERELGQALFDADLPCFLIDPARVRAFARAERQIAKTDPLDARLIARCLKAVGHSLRPYAPNPLVLLLAENVRTRRHLLDQAVELEAQIETLSAPTLRRMMARQIASLRATAKAIEIEMRAILAGDGGTEQLYRRLRTAPGVGPILAATLVASLPELGRLSSRQIAALVGVAPFDRQSGRTDLRRTCHGGRPAVRSVLYMACISVTRMKRGPLKAFYQRLRENGKPPKVAIIATMRKLLVTLNAMVAKNTDWRVA

SEQ ID NO: 304006 - protein, 390 aa, unidentified
MPKYEDLSRSLAAFDQDSTLVAAIEMGSEGWLVGALVPGLKRDPRKKLQPDGPALLRQLRRWCEEAAKAGHPIKRICVAYEAGRDGFWLARWLREQEIEAYVIHPTSIPVSREHRRAKSDRLDLALLLRALLGWLRGEVKHCSMAAIPTVEEEDAKRPLREREALTAEVTRLSNRMQSLLMLHGIRKFKVRQKKAEEKLFELKTACGEPLPPATLAQLRRTFAQLRLAQEQIATIDKERHQRLAAAPEAGVHPMIRTLARVYGVGLMTAESQVREVLYRNLRDRRAVARYVGLTGSPDESGKKRREQGLAKAGNGRVRRSLIQLAWRMLRHQPNCALVKWYRARTADGRRDTRKVMIVALARKLLMAFWELVHNGIVPEGMRLHPVKVVG

SEQ ID NO: 304007 - protein, 319 aa, unidentified
MSKYYLGIDIAKNKFDVALLIEEKFKTKVFNNTAKGFTDLLEWLNKHNCNELHSCMEATGTYGHGLATFLVEHDYKISMVNPTRIKGFGKSETMRNKTDKEDSKLIARFCKAMVPALWKPAPKHIQLLQGLVRRLESLVAIKQQEENRLSVTTEDLIKKSVAAVIKIIEEQILEVKGEIKNCIETNEDLSKKQELLVTIPGVGEATIITTLAFLVGSEQFDSAKQMAAFIGLTPRHHESGKSVKGRTKISKVGNSQLRKAFYFPALVAKKYNPIIKAFCDRLEKNGKSKMEIVCAAMRKLIHIIFGVLKSKKAFDPKMA

SEQ ID NO: 304008 - protein, 412 aa, unidentified
MRVIVERCCGLDVHQETVVACLLIGASGDRPTKEVRTFRTVTRDLEALRDWLAAAGVTHVGMESTGVYWRPVYAVLEGHFDLTVGNARHIRNVPGRKTDVKDAEWIADLVRHGLIAKSFVPPRPLREMRELLRYRRKLTESQAAERNRLLKLLETANIKLASMMSDVFGVSGRAMLRALIEGRASVEAMADLARGQLRRKRSDLILALEGRMEEHHRFLLATQLRRLEAIEQDIAALDLRINERLEPYRMPHALLMQIPGVDWLVAAVLIAEIGVDMSVFVSVYHLSAWAGVCPGSHESAGRQKSGRARNGNVHLRTMLVGAAISAAKTKGSYLKDKFHRLKARRGTMRAALAIAHKILVSAYHMLAKGLAYHDLGEAYLDQIGQTRTVANLKRRLERLGYRLTLEPKAQPA

SEQ ID NO: 304009 - protein, 342 aa, unidentified
MTYYAGIDVSLEYSSVCVVDGAGKIIREQRIASEPEALIAWFRGLGFGLERIGLEAGPMSQWLYAAMRAAGLAVELLETRHVRDAFKAMPVKSDRNDARGIAQLMRLGWFRPVHCKSMAAQEMRALLTARKLVQSKLLDVQMSLRGLLRGFGLKVGLTTPSRFAGRIRDLVEGNATLEMIAAALLAVHETLRRELAGFEKRVRSMARSDGRVRLLMSTPGVGTIVALTYVAAIDDPARFKSSKGVGAHFGLTPRKYQSGETDITGRISKIGDDGVRTALYEAGHIILTQPLKGCTALKSWAMRLAKRAGMKKAKVALARKLAVIMHRMLVDGTLFKSAAVAA

SEQ ID NO: 304010 - protein, 344 aa, unidentified
MTEITRIGVDTSKAVFTLHGVDAKDRPVLRCNLRRGDVLKFFRKLPPTIVALEACGSSHHWARQLAALGHTVRLIPPQYVKPYVKRGKNDRNDAEAICEAAGRPGMHFVPAKTLEQQAAGMVLKARDTLVGQRTALINTVRGHAAEFGLVVAKGTARVEALFAAIEQQPDIPPEAKEMFTLFRQQIDDINVRIAQLDARLNASHKANPVSQRLATIPGVGPITALTLAIEVDSAQFESGRHLAAWAGLTPLDHSTGGKQRLGTISRAGNERLRALLIAGATAVIQAATKPGSRQMTEWLRALLARRPRKLVAVALANKMARIAWALMTSGETYRRDATTGAAKA

SEQ ID NO: 304011 - protein, 320 aa, unidentified
MQSPSAVLNIGVDVAKDAMVVACSEGSFPVREVANQRPAVLAFLKGLPAGSRIGVESTGTYHALFAETAHQLGFPVFLLNPKDTRHYAKAVGLRGKTDRVDAELIARMIAHEHTKLHAWNPPTPQQREIDRLIKRRATLISLREAVEMSLHDLGGFADELKALRTRFNQLIARIDLRTKALVEASPDRKQNFTRVCTITGVGPVIGTALVNTLERVPVKSADAFVAFTGLDPRPDDSGQHRGKRRLSKRGPGELRRLLFLAAMSAAKTKTWRPLFEHYRAKGLSGTAALVILARRIARTAWSIYTYKTEFDPLRLTNPLT

SEQ ID NO: 304012 - protein, 462 aa, unidentified
MQKFYLGCDVSKGYSDFVIIDDQMNCVEENFQLDDTAIGHAELSERISTFFEKHPSATLYAAVESTGGYEDNWYAFLLRQQGKFNLHAARVNPNGIAHDNKAGMIRNLTDKISARSVAEYQIRHPDKIPYGKRDPNKSLKKMWGRYRSLKKQMGVLLNELESLLYSANPELLPYYRSRMPQWLMLLLLKYPTAKMLARARVATVASIPFLKKPLASVLVKNAKASTAEESDDLTAFLVSSTVSQIASLSKQITIFEQRFEKECDWPEVQLLMSINGVGRMTAIVLMLYIEDITRFKSAKKLASFLGVHPELKLSGDGSKKGSYKMSKKGQKAPRAMLYMSVLAGLSKGSRNDVIKRIYDEKRASGMVAKAAIGVCIHKLVRLAYGVLASSKPFDPAIDDKNREKSKPAEKPVPLSKDRRYQGFDTAAPVSRRQNKKRMEQIKSQDSYAVECGIKDHAPRALQ

SEQ ID NO: 304013 - protein, 315 aa, unidentified
MRNLCGVDVSKAWLDSWSAGRYQRFANTAEGVAQLLAFCREHSVELVVMEASGGVEQAAFLALWKQGQPCAIANPRAVRSFADAMGNLEKTDRIDAEMIAGYADARQLVATPPPSEDQRRLTALTARLRQVTADLSVQKQRLHSTSEPTALASLKEAIALFNRQAKALAAQIAALITADPLWAELDKTIRSIKGLADRTVAVLLADLPELGTLSNKAIAKLAGLAPLANDSGQRNGRRRVRGGRPSVRSILYLVADVARKYDDDLASFRDRLLAQGKAKMVVRIALARKLLVRLNAKARDAKGDMATMLAPAFSE

SEQ ID NO: 304014 - protein, 360 aa, unidentified
MKKVSKQMRKMEAAGKPEMTLGLDMGDRYSHYCLLNADGDVVEEGRMQSTEAALRRHFEGEPPMRIALECGTHSPWVSRLLKALGHQVIVANARKIPAITGSESKNDRNDAGKLARFAAYDPQLLSPLEHRSPERQLDLNLIHARATLVRARTMIVNALRGLVKSAGGRLPACSTESLPARAPAAIPAALATVATPLVEQIALLNAQIGGMDKQVEALAAKYPAIKLLRTVPGVGPIVAAAYVLTLDRPDAASNRSAGAFLGLRPGQSQSGGSDPQRRITKTGDGCLRSLLVQSAQYILGRFGPDSELRRWGLRLAATGGKRGKKRAVVAVARKLAVVLHSMWRNGERFQAFPQPVSKAA

SEQ ID NO: 304015 - protein, 366 aa, unidentified
MNQSSTVYVGMDVHKDSIDVAIADAKEARLFGRIGGEAAALDRAIRKLRAVHCKPVFVYEAGPCGFWIYRRLRAQGLRCMVVSPSMTPRRAGDRVKTDRRDALQLARLARAGELAPIYVPDHRDEAIRDLVRAREDAVNMQRQARQRLQALLLRNEIRYVGKTAWTAAHRRWIAHLKLPDPAQQIAFEEYVAAVEEAGARLERLGAAIAAQLEPWRWRPLVEALQALRGISAIHAVRIVAELGDLTRFDSPRKLMGYLGMIPSEDSSGRRRRQGRITKAGNSSARRALIEAAWAYAHPARVSWPIARRQTGLAKRVTNLAWRAQLRLCARFKRLAARGLNRNKIVVAIARELSGFVWAIAQDIQPL

SEQ ID NO: 304016 - protein, 337 aa, unidentified
MEDYDGRQVVGMDLHRRRSVLVRMTEDGRRLGTGRITNSPAELRREIARAGKAPKVVLEATYGWYWAADTLAAAGAEVHLAHPLGVKAFSYRRVKNDERDSADLADLLRMGRLPEAWIAPQEVRELREITRYRHKLVGLRTSCKDQVHGVLAKLGVTVTCTDIFGVAGSAWLDQLRLPQPYAGKVTSLRHLAGELTAEIIMLSEVIASLLAGDRGYQVIQQLPGIGPVLAAVIVAEIGEVTRFRNAGQLCSWAGLTPRHRESDTKVARGHVTKQGSRLLRLSRPGARFRDCSRSVSPGRSPNPACPLLSTGLSTVPAVRRGQEPRGWGSCRHGIGTG

SEQ ID NO: 304017 - protein, 386 aa, unidentified
MVTPIRTRIEQETPPQSTLFLAFELGQNTWKLGFTIGVAQQPRERTIPAGALETLQQEITRAKQRFGLPEDACVVSCYEAGRDGFWLHRHLVAHGIQNHVIDSASIEVNRRQRRAKTDRLDVRKLLTMLLRHSAGETKVWSVVRVPSVEEEDRRQLHRELTTAKQDRTRVINRIQGLLAGHGVQLTLQGDVDAQLDQGQQWDGSPLPSALRTRLKRAWQQVCFLTAHIQTLEAERRALLRRHEDPVIAQVRQLFTLRGIGVNSAWLYVMEFFAWRDFQTSKQVGALAGLTPTPYQSGQARREQGIAKAGNRHIRAMAIEIAWAWRRFQPASALAQWYERRFGHGSARLRKLGIVALARKLLIALWRFLKTGVLPEGAVLKAETPSR

SEQ ID NO: 304018 - protein, 366 aa, unidentified
MKKLSTKGVCRAGKLQDQHLTIGLDLGDRSSFYCVLNGAGEVILEARVATNPEAMKKTFEKMPRSRIRLETGTHSPWMSRLLSDLGHEAIVAHARNVRLIGESRQKDDRLDAQALVRLARIDPRLLSPIQHRSAQAQADLSVIRARYALVRARTALVCAARGLTKSFGERIRGRNPKGFSPATGEMLSPQLRVALAPMLSALETITARIREYDAQIEKLAEESYPDVALLKQVKGVGTLIALTYILTLEDPRRFRKSRDAGCYVGLQPGRRNSGQSQPQLHITREGDSYLRMVLVQGAQHILGPFGEDSDLRRWGLKLAERGGKSGKKRAIIAVARKLAVLLHHLWISCEEYEPLHNTRKRRPAAA

SEQ ID NO: 304019 - protein, 325 aa, unidentified
MAYIGIDVSKQKLDCLWVRDLSKGKVKTKVFPNRHQDYPGLLDWLIKQTGEDVDNLHVYLEATSIYHEPLAYWLHDVGVTVYVLNPAQVRHHAKGMGVRSKTDRKDSMMLARYGIERNPQPWQPEPTEVRELKRLINRLEAVEDDLQRERNRLEKAEFNTDTKASESISYMLVALEREVQRLQQAITDHFEAHPPLKQDRQLLESIPGIGNVLSARLVATLRSRDFRSARQAAAFLGLVPILKESGTSVKLRSHLSKAGAPSIRRKLYMAAVVSTRCNPGVSEQFARLKARGKPTLSALGAAMRKLVHIAFGVLKSQSEYRPQGT

SEQ ID NO: 304020 - protein, 458 aa, unidentified
MEIFCGIDWAEAHHDIAVVDEQGRVLAGQRISDDLAGYLALSELFSRVAGQHLPADGPVGLDIAIETDRGLLVAALRAAGHRIWSINPKAVDRYRDRFTSWRAKSDAGDAVLLASILRTDRHAHRPLPADSDLAVAIGVLARAHQDATWRRRGDLNRLRSLLREYFPAALTAFSDLTTRTALLILATTPTATAAAGLTEDDLVEVMRQAGRGTQRARAAALRQVFTAPAWRQPPAVEQAMGQAAAAIVASVQAANTAIARLEDAMAAHLSRHPDAGILTSMPGLGLILATRELGEFGDDPNRFTGPAARRAYATTAPVTRASGKRRVVIRRGGNRRLADACRLWAFATLTASPGARAHYRRRRAAGDGHEAALRHLANKLVGQLHHCLHHRTIYLEHLAWPAEHTPPEPDTPPISAPQPHAPAISGIVSSGCVNQNWPRSDGLIWPRRSWGLRGCLCA

SEQ ID NO: 304021 - protein, 344 aa, unidentified
MDHIGIDVHKAQSQVCMLTESGERSEQRILTDRVRFGEVFGGLPRARILIEASTESEWVARCLEELGHEVIVADPNFAAMYATRSRRVKTDRRDARTLAEACQLGAYRPAHRTSDAQRLVRANLAVREALVRTRSRYISVVRSLLRREGLRVRSGEAKSFGRRVGELAVPQALASATEPLLVVLEHVNHQIDRADRELAHRVTEDPDLRRLTTVPGVGPVTATTFKATVDEVSRFRRAGQVSAYLGLVPRERSSGEKQQRGRITKAGNSRARSLLIEAAWLILRSKRSDTLALRTWAERIAARRGRRIAAVALARRLARILYAMWRDAINYAPGMIRHPQVDAA

SEQ ID NO: 304022 - protein, 464 aa, unidentified
MVLTLGIDVACRAAHQATLVRDGATVWRGRKFWTRPADLDRLWADLDLCDPGDLTVVVEPTRNAWIVVAEWFRRRGARVVMVPTTQSADLRKYYSKHTKNDRIDSELLARLPMLHPEGLREYSGQGPADALRRLVKQRSTMVKRRTAVYSRLDALVELLGPAWYEVLGSNYGIAALEFLARYADPNAVIRLGQARLARFLIARSRGAWRQDHAAGLVVAAKDTLALWGPAGMDFAELADDIGHEAEQALFLTRQIKQIDERVANLYAEADPQGIVASAPGVGPVISAVIAGRIGDPHRFTSLAAIRAYTGLVPKVSQSGVRKVESSITKAGDPLLREMLFTAADQARKIDPQIAAKYQRLMVGDRHHDSAICHLATQLLTRIATCMRTGQPYALRDVDGTPITEAEGRAIVKERYQIPARHRDNLRHKQMRDRRKQAASPESQKSQSAPTSGPANTKPTSRQVA

SEQ ID NO: 304023 - protein, 322 aa, unidentified
MSAPILGIDIAKQRVEVALLVEGKVRNRSFKNAPDGFESLAIWLSKWGIDQVHACMEATGNYGEALAIYLHEAGHTVSIVNPARIKGFAQSELIRTKTDKVDAGIIARFCLAMKPGSWTPPSQEIRSLRALVRWADSLTGMLTQEKNRLGSAHESVIPLIKGHIDYLDKEIEEVRHQIADLIEEDPNLRQKKDLLASIPGIGTVTIPVILAELDNLEKFKHVRELVAFIGLAPKERLSGSSIKGKPRLCKTGNARLRKALYMPALVSIQYNPLMIAFYNRLKEKGKNGKVIVCAIMRKLVHLIFGILKSGKKYDPNYKPAFA

SEQ ID NO: 304024 - protein, 347 aa, unidentified
MNFYTQQHKHYCGIDLHARAMYVCILDEQGTKLVHKNLPTTPEAFLRLIAPYREDLGVGVECMFTWYWLADLCSQEGIAFVLGHALYMKAIHGGKAKNDKIEAHKIAVLLRGGMFPQAYVYPSEMRATRDLLRRRCHLARKRAELLAHIHNTNSQYNLPEIGKRLANKSNREDVADHFPDPSVRKAIEVDVALIDQYDQLLGEVELYLTRSAKAPDVQPFARLQSVPGIGQILALVILYEIQDIARFPRVQDFVSYCRLVKCAKESNGKRFGTSGKKIGNVHLRWAFAEAAVLFIRQSQPGKEYFAKLEHKHGKAKALTVLAHKLGRAVYYMLSREQAFDLKRFVTA

SEQ ID NO: 304025 - protein, 351 aa, unidentified
MIIIGVDYHPSSQTIAFLNQETGECGERQLNHSDGEAEKFYRELKQRGVSVRVGMEATGHSRWFERLLAELGFELWIGDAAEIKTKRVRKQKTDREDARLMLKLLLENRFPRIWVPSPENRDLRQLLWHRHRLVQMRTRIMNQLQAVAMNEGYRWKKKLFSEKGRGLLEKLPLAPWASRRRKELLELLDQLDPKIAELTAAVEQEAKKRPEVLLLMTHPGVGPITGLVYVLVIGTPKRFPCGKQIGSYTGLIPCEDSSAGRQRLGHISKQGNTLLRFLLVEAAQAAARCNPDWRRRYMHLMMRREKRIAKVAMARKLGVRLYWMWRNNWQYSQLVEFGSNAGKLVHVHGVK

SEQ ID NO: 304026 - protein, 393 aa, unidentified
MISVGIDVSKGKSTVCILKPYGEIVSKPFNITHTQKDLSELSSMLFRLNDEVKIVMEATGIYHLPVLTYLQEKGFFVSVINPYLMKSYRNESLRKAKTDKIDSRIIANYGIDHWFKMKEFQTSGEIYEELKLLGQQYRHYMKLHLLSLAELTHLLDLTMPGIKNLLASWNETNRKDKRSDFVERFWHYDVITSMSEQEFTEEYILWAKEKKYVPSQEKAKVIYTLAQESIPTLPSETSSIKMLVTEAVRVLKEVDATLGLILSRMQEIAKTLPEYSVVREMGGVGNTLAPKLIAEIGDVRRFRNGKALVAFAGIDPPPYESGQFVGCNRKISKRGSASLRKVGYETMRSLKMRSRPEDPVYRYVVKKESEGKSKKSAKIAGLNKFLRIYYARL

SEQ ID NO: 304027 - protein, 344 aa, unidentified
MTIVTLGIDLGKNLNSVVGLDEQERVVLRRRVRRATLADLADKLPPCTVAMEACCGAHHVGRMFAAKGHEVRLMSPEYVRPYVRAQKNDDNDAAGIAEAATRPSMRFVELKSQDRLDLQTLHRARSRLVAARKTLVNQLRAILLERGHTFRQGREILEREIDPFLAEPPADLSVRMLRLLGDMRAEWRALNERIDVLNDDLSEHARKDEAANRLTSIPGIGVLGATALVAAVGNGEAFRQARDVPAWLGLVPKQMTTGGKPRLLRITKRGNVYLRMLLIHGARAALPSLSKQATPLGEWLRGLLSRAHRNIVIVALAAKLARIAWATLRRGVRFHPQMGAAAMT

SEQ ID NO: 304028 - protein, 424 aa, unidentified
MNCTQNERINQVSEQTLVIGVDIASELNYARAFNWRGIEKGKVFKFFNNLEGFQAFNEWAHQVMSANKLTNLIVAAEPTGHYWFGLADYLKDEKLKLVLVNPFHVNRAKELDDNHPSKTDAKDPKTIAKLVIEGRYMEPYIPEGVYADLRIMYNCRQKVTKAMISLENQLKRWFRIYFPEYLSVFGNLSGQGSMVVLEKAVLPEDIISLGVDGINKLWRERKLRAVGMKRAESLYEAAVKSIGRREGSVGGRAEFRMLWEDYCHKMEQMEKLNIELESLLHKVPQAEEVLKMKGIGVVSVAGFFAEVGDLRRFESPKQIQKLAGLAIRENSSGKHKGQTTISKRGRARLRAVLFNAAIALVGRNGAFKSIHEYYIGRKANPLKKKQSIVAVSCKLIRIIYAICRHKEAYDEAKMLRDIRREQLA

SEQ ID NO: 304029 - protein, 458 aa, unidentified
MGRNESKNKDRRTMSVLHPNAAAIDIGATMHMAAVNADRTPEPVRSFGTFTTDLHRLVDWFAECGVDTVVMESTSVYWIPIFELLDARGFAVFLVNARDAKHVPGRKTDVSDAQWLQRLHSFGLLRASFRPKGQIVELRAYLRQRERLLEYGASHIQHMQKALTEMNVQLHHVVTDITGVTGLRIIRAILGGERNPAVLARMRDRRCHATVETVEKALAGNYRAEHLFTLEQALALYDMYQQKAFACDARIEAVLKELSVRRGRGGGQLPAARQNRSRQQNSLLFDVRAALFALLGKDLTQINGLGPYLALKLIAECGDDLSAWPSAKHFTSWLCLAPSNKISGGKVLSSRTRRSGSRAAALLRLTAATVGRTDTALGAFYRRLSARIGKAKAVTATARKIAVLFYNAVQHGMEYVDPGASSYETRYRARVIDNLHRRAKAFGFALQPIDPTPGIAVS

SEQ ID NO: 304030 - protein, 385 aa, unidentified
MTTTEEVGTFIPRDYDVFAGLDVDKRSIAITFTDHGTMRKSLKLPYSASQLLNYTGKHFPGQRVAFVYEAGPTGFGLHDELTAASHRCLVVSPSMVPSAPRNKVKTNRLDSKKLSEGLRGGQLRGIHVPPPSYRELRHLVQLRDTQVAQLTATKLRIKSLLLYEGIPFPAANGKWSGRVLRQLETLPCNATVRFKLDQLIDTLQFHFQSAAKVQKQIRYFCQNDPELNQCISFLISLPGVGTITATHALARLGDWRQIKDVRQIAGFLGLVSSEHSTGDKENRGQITRIGDKRLRSKLIQCAWTAIRKDPELRAFYRRIYERHPKKVAARKAIVAVARKLTTRMYAVLKEQRPFVIRTDSSIAPLTAEETTGLGERLDGAQNDQP

SEQ ID NO: 304031 - protein, 406 aa, unidentified
MDVFCGIDWAEDHHDVALADRDGGLLARLRISDDAAGLARLLELLASHGDSAEAPIPVAIETPRGLLVACLRPAGRMVYCVNPMAVARYRDRHSAAGRKSDHGDAVVLANVLRTGMHAHRPLAADSELAQTVAVLARAQQDAVWDRVTAHNRLRSHLREYFPGFLAAFAAVKGGIMRPEARAVLAAAPAPADAAKLTVAQLRALLRKAGRSRGIDAEAQRLRGAFRQQQMRQLPLVEQALALLRQLDAACQSADDLEAAGIEAFNQHPDAGIITSFPGIGALTGARVLAEIGDDRSRFKDARGLKAYAGAAPITRASGKTRSVTRRHVKNNRLAAAGYIWAFSAITASPGARAHYDRRRDAGDRHAAAQRNLFSRLLGCLHHCLLSGQHYDEATAFPAKAAPPAAA

SEQ ID NO: 304032 - protein, 378 aa, unidentified
MQSMNHGMRRVIGGVDAHADSHHAAVLDDRGALLGSESFAASRAGYRQLLAWLRSHGELDRVGVESTGSYAAGLTRYLLADGVRVLEVNQPHAHTRRRRGKTDAIDAELAARHALSLASMVTPKQTTGIVESIRQLRVAREGAIKSRSAAMLALGGLILTAPASLREQLDQPRTLKGKAALCRRLRPDTDRLADPVNAAKLALRSLARRIALLDDEIAGLDAQLAPLVATAAPRTTALLGISTGHAGQLLLTAGQNIDRLHSEGAFAALCGASPIPVASGKTGRHRLNPGGDRQANRALHLIAVCRLRYCPKTAAYAARRTSEGKTKNEIMRCLKRYIAREAFNALRADLADLQSTRPHQAVSITCGAGFIGRNRRQL

SEQ ID NO: 304033 - protein, 364 aa, unidentified
MRKHTNRESASLEATRGQFNGRPSAIKLGIDVHQAFYVVVEQVDGSNPKPPQRMSKEGFLVWAAKLRRERPAAAIHAVYEACGFGFGLQRQLSALGIACHVVCPQKLDERHQRVKTDGRDAKALCLKLDRYVEGNREALAVVRVPSEEEEQVRALHRQREQLVRTRKQLEAHGRSLMVNHGMEPVQKWWKARTFGKLDVPGWLQELLGHTQPLLLALERQIRALTRQLEEEAAPGQPRGLGAMSSVIIDREIGDWHRFRNRRQVGSYTGLCPSEYSSGQTRVQSCITKHGNPRLRAALVETAWRLVRFQPEYRAVVKWRHLLGKGALATGAARKKAIVAVARQLAVDLWRIRTGQVQPETLGLI

SEQ ID NO: 304034 - protein, 343 aa, unidentified
MNNTTIGVDLAKDVIQVCVFSQQNVISNSEMNVADFTIWLTQRKPSTIIFEACGTSNYWKQKATSLGHTVHLISAKLVNVVRQQQKNDKNDALAIVQASHLPNVKFIKGKTLEQQQLQSLIRIRDLAVKQKTAIKNQIKALLLELNIRVSTKNGGLNGTIQLVLEDAENGCAMYFRQAISTVWKTYLQLCQSVSKYDKVIERAIRKSPECKRLIQLEGVGPINAINLYLAIGCSDSMVFKQGKDVSACIGLTPVQHSSGGKTKLGKISKNIRNQMLRSQLVTGAFTFVNSIAKKEAKTEKERWLKSLIDRKGKKCASVALANKTVRTAFSMITKNTEYKVTPV

SEQ ID NO: 304035 - protein, 364 aa, unidentified
MSTLHYVGMDVHKETIDVSMYKENDSRPYCEKRIPNRDTSIKKLFKGIMKTGSVVACYEAGCMGFTLQRTLEGMGVTAVITAPGKMPRRSSDRVKTDRRDARTLATYLRNGDIEAIRVPTEDEEVVRDYLRGREDVRLDQARTKQRLQKFLLRHGYVYESVRYWTGPHEKWLRSLEFKNPLMKETFDEYHVGIQELGGKLRMMDKRIDEIALSEPYAAKVKKLRCFKGIDFLTALTLVSEVGDFRRFKSAEAFMAFLGLVPSEYSSGGKRRQGGITKAGNTHVRRFLIESSWHYRYSLSPSKRLMERRYGQPTDVIAYADRAMKRLQHKFFKLVLRGKTSQVAVTAVARELAGFVWGMMVGCTA

SEQ ID NO: 304036 - protein, 330 aa, unidentified
MEPQYIGIDLHKASFHACAIDAHGSRLWESAFPRTREGIAAFAARGIRDAQLAVEATAPTWSFVDAVTAYGVHAHVVDPRKTKLKAGFAAKTDRLDARRLADALRRESVVSIYVPPAAIRELRELSRGRQQVVRLRTKVVQAIRALLLRHDVADPPVRTLTSRTGLAWLREVHLGPASEASLRRLERLLHAIHAEARAADAVVRVAAGEDHIARGLMGLSGVGPVLSVALRAEIGDITRFPRGAALACYAGIVPGVYASSTTYRTGAITRAGSPWLRWALVEVAMRAMKRPDPLGRWARRLAVAKGIKRARVALARRLCDQIVSTWRALD

SEQ ID NO: 304037 - protein, 381 aa, unidentified
MTTKATRNTQAKTSAGPLFMSFELSEKTWKLGFTTGPGQKPRERNVTARDQERVLDEIARAKRRLGLPETAPVVSCYEVGREGFWLHRFLEAHGITNHVVDSSAIEVSRRQRRAKSDGLDGRKLLSMLIRYHEGARQVWQVVHVASVEAEDQRHLHRDLETLKQERGDTTRRIKGLLSSQGLRVKNLTRLPEQLDALRLWDGSPIPPGLRQRVLRVYAHHQFLSEQIAAVEAERGTQLQDSNDTSIEKVRQLMLLKGIGINGAWLLVMEFFAWRGFKNRREVGGLAGLTPTPYHSGESAREQGITKSGNPHVRWMITELAWGWLRLQPQSALSVWFRERYGSGGKRLRRIGIVAVARKVLIALWRFLEMGALPEGAALKTR

SEQ ID NO: 304038 - protein, 326 aa, unidentified
MTHPVAASKAELPPASITIGIDVSKDHLDAARHPAGDTVRVANTRKGQTALLRWIGDIKAVARVVFEPTGPYHRILEERLAAVGIPLVKVNPRQARRFAEATGKLAKTDRVDALMLARYGALLDPVARPVRTDIQNRLAELVAARRSLMRDRTATLNRLKTLTIGLLQRHARHRLRQIEAQVTSLDAATDALVAEDAHLSRRRDVLASIPGLGTVTAHALLADMPELGMMEEGQAASLAGLAPITRQSGTWRGRSFIQGGRAIVRQALYMPAIVAMRFNPDLKRVYDRLIAKGKHAKIAITAIMRKLVVLANALLHKDRLWTPKAA

SEQ ID NO: 304039 - protein, 342 aa, unidentified
MSIVILGIDLGKNSCSVVGLDEGGKVVVRRRMRRDGVIAFASRLAPCVMAMEACCGAHHMGRSLAALGHEVRLMSPEYVRPYVKAQKNDDRDAEAIAEAATRPTMRFVELKSEEQLDIQTLHRVRDRLVGERTSLTNQIRSLLLERGHIVAQGHARLRLLLRQILDDGSDALSPRMAFLLGDMRARWEDLDRRIAAFDAEFAAMARSDDRARRLTGIPGIGALNATALVAAVGSAATFGKGRDLAAWLGLVPRQATTGGKPRLLGITKRGSRYLRKMLIQGARSAMPTLARADTAVGSWLRALLRRAHPNVAVVALAAKMARTVWALLRHGRTYDPVPLATG

SEQ ID NO: 304040 - protein, 321 aa, unidentified
MQKDLLYCAIDVSKDKLDIDAAALALPAQLGNDHAGFRQLIKAAKKYPGPVQFVFEATGPYHLGLALALWEAKIALSVLNPARVRFYAKAQGKAKTDPLDKQVIGDFARSFRPQPTPAPDPVRRELTELLQRRDGLISSRAAEQNRLGQCRHKIIKGQIRRMMAQSIEQIDQIDGLMKKLVHSSQELKDKVKALCQVKGVGHLTAVTLLITLPELGTLGRNRISRLVGLAPLNDDSGLQKNKRFIQGGRKRPRCALYMPAFSASRHNPVLKDFYERLRKAGKLKKVALTAVMRKLLICLNALLRKLANQHASEEGLCLAKP

SEQ ID NO: 304041 - protein, 388 aa, unidentified
MNKIIYIGMDVHSSNFTLCSFEPGYGFEADKIFGQTQIKEDIFNSTVKYINKLKSMRPDVDVICGYEAGGLGYNLHRKLKAKEIESVILAPTTMAVARNSSKKKNDYRDAITIAKCLASSAYKAVYIPDEKDEDVRDFIRMRDDHKTALKQIKQQLNAFCLRHGHHYDKPKWTGLHLNWLRKLELSKVQRETVEEYLATYEALTSKIAALDVRIEDIASEERYSEKVNKLKCIKGIKTHIALSFVCEIGDFNRFKSADKFSGFIGLVPGECSSGNTERMLGITKAGNRHLRRLVVEISNTYRRGAVGRKSVALRERQKDMPKDVVAYADKATNRCQRKCQRMMFKGKNSNQAVAAVARELCCFIWGMMTGNYSRTAQAEASVYRSELD

SEQ ID NO: 304042 - protein, 357 aa, unidentified
MRCYMKQHKFYAGIDLHARTLHLCVLDHTGTVVCDKNLPARPETLLKALAPFRDDLVLAAECMFAWYWVADRCALEKIPFVLGHALYMKLIHGAKAKNDRIDAGKIARLLRGGNFPLAYVYPKGMRETRDLLRRRNHFVRQRAALMTHLQILNAQYNLPPFSKKLSFAANRAALNIADRFEDKSVQKSALANLAVIDCLDEQIARLELYLVRTAKVEDVQTYHRLQTVPGVGKVLALILLYEVHNMLRFDDVGQFLSYARLVRCKHESDGKVVGSGKKKIGNAHLRWAFGEAACLFLRASERARHWKERQAKKRGEGKALGILAAKLARAVYHIWRKQQAFDEERFWSGQAQPAARS

SEQ ID NO: 304043 - protein, 329 aa, unidentified
MDNFYFIGVDVSKKKLDFCVMFEGKVLHEEETANHQVAIMSLLRHLEEDYGMSNGQMLVCAEHTGQYTFPLACACKAVEWLENASEIKYSSGVQRGKNDKVDAKRIAIYASRFQDKVRYYERLTEDIEGLKQLESERTLYVTDLAKYKGQMKDQKEYMPKTLYERKMKRLQALMDDLEEAIQAITDEMDEVIAFCPVLFRQRELLMSIDGVGRVVATNMIIATEAFTRFDDPRKFNCYAGVAPFSYSSGSSQHSKARVSHRADKVMKRLLHLAAVAITHRIGGELKKYYERKVAEGKNKMSVINALRAKIVARMFAVIKRNEIYKPILS

SEQ ID NO: 304044 - protein, 353 aa, unidentified
MKYVGLDWAYRRAQWCALSPGGQVAGEGQIPADRDGLARLVLELGAEVKACLEMMSGALWVRDQLVACGWQVEVADARRVKTIAPLAAKTDKVDARLLAELSRRELVPALWLPSLDERALRERLRRRMHLVRLRTSAKGRIFGLQTQWGVRVSLARLRRADGLTLLERAGVPEVWRRSVSECLSVIDFLDARLEPLDRELKPFAHADPRAVLLDTIPGVAELLALTIAVEVGEISRFATPEKLVSYGRLAPRVRQSGQARQRSGPLSKSGSRLLGWAAVEAAQQAWRESNPWHELYLDVGRRSRHSNAAKAAVARKILIAAWHMLSRKEPFKPAPRTTNGTSAPASSRLALAA

SEQ ID NO: 304045 - protein, 375 aa, unidentified
MKKNSSGCKSPKASIKATKSTNVTAGMDLGDKTSRYCMLDENGEVLREASVGTTKEAIAQVFATMKPCRVAIEVGTHSPWVSRLLKSFGHEVIVANARQVQLISKSSRKNDRMDAQMLARLVRVDPRLLRPIQHRSEQAQEHLRVIRVRAALVEARTMLVNAARGLTKATGERLPSCDADQMGVERVESLPAGLQNSLRPLLEEVESLTEKIQALDQQVEQIARTDYPETSLLRQVSGVGSLIALTFVLTVEDRERFQKSRDVGCYVGLRPRQSDSGESEPQLRITKEGDPYLRKLLVQGAHCIMGRRGPDTDLKRWGLKLSARGGKNAKKRAVVAVARKLAILLHRLWVTGEVYEPLRNNQAEPPVKETGKAAA

SEQ ID NO: 304046 - protein, 462 aa, unidentified
MRRAPNRPPRSPSSPGNRSPAPASPTGTSTPRVSSHAATSPKIDRRGASSGPGVADLSPIEKPSSTPTRSNGAIDPGAKERSAIRKVALDLGSRKISFCEVSDGLVLQRATVSDIESLRSVLGPEQTPARVAIEACREAWHVHDLLVSWDNEVLLVDTTRSKQLGIGQHGRKTDKIDAEALARAVERGTIPLAHVLSPHRRDLRRWLGIRRSLIEARANMVITLRGLGRELGSKFPSCPVETFAKNVRKGKYSEQLTRLIEPGLKTLESIEPELQSIDSELHRLCASEPMVQLLATVPGVALTVAASFISVIDQAQRFRSSHEVESYLGLVPSESTTGGRRRLGSISRQGNSYLRALLVQAAWSLWRTAPHDDPLRLWVDAVAKRRGKRIAVVALARRLAGVLWAMWRDGTVYDPRPLASQQASGTRRAAQTLEFHAAALERASRKRCFRRPSTNSRSVMTA

SEQ ID NO: 304047 - protein, 278 aa, unidentified
MNAIYYIGLDIHKKTIAYCVKKVDGTLVRQGTVNAERKALQHWQSELPGPWYGAMEATLFTGWVYDFLKPYAVDLKVAHPAMLKAITAAKKKNDRADAEKIADLLRVNLLPESHMMSEELRELRRILRYRNMIVRTSVKMKNKMSGLLMEVGAQYSKKRLYGKKYFNTLLERVEDVPNSVKELLKLSRSGFELYDGIQKKLVRALRENKRIQARVLRLMTIPGVGEVTALTWVLEIGELDRFSSSRHAISYCGLCSAQHESAGKEQRGPISKQRNKHL

SEQ ID NO: 304048 - protein, 311 aa, unidentified
MTKTVVGIDVGKGQLDVSLNGQKRVQEWANDEAGQVEVSDWVEAQRATLVVVEASGGYEAALVSELVARGQEVAVVNPTRVRAFARAEGILAKTDKIDARVIARFGLMMNPAARARRDEAQVVLNEQISRRRQLVLMQTAEKNRRDTASPATRDHIDRHINWLQAEIKVLEEQISQAIEANPTWAETAKRVDSVPGIGFITAATLVADLPELGQLNRQKIAALVGVAPFNHDSGKHRGKRRIFGGRTAVRSVLYMATLSAIRHNPVIKAFYKRLLAKGKVKKVALTACMRKLLVILNTMIKTGQDWNPSIS

SEQ ID NO: 304049 - protein, 341 aa, unidentified
MQIAVLGIDLGKNICSVVGLDGAGHVVLRRRMHRDSVVRLGRRLPLCVVAMEACCGAHHLGRLLSGIGHQVRLMSPEYVRPYVKAQKNDDRDAEAIAEAAMRPTMRFVELKSAEQLDMQSLHRVRDRLVGARTALMNQLRAVLLERGISVPQGRRKLEQHLTVILNDHTRLSPRIQSLIADMQAEWAALDRRIAAFDDEFASHAKTDDTAHRLASIPGIGVLNATALAAAVGNAATFARGRDLSAWLGLVPRQMTTGGRPRLLGISKRGNKYLRKLLVHGARAALPSLSVSPTRLGKWLQSLWQRAHKNTVIVARANKLARIVWAILRHGGTYSAHAVKVV

SEQ ID NO: 304050 - protein, 341 aa, unidentified
MVREKENFWVGFDVGKNSFVAALDYHSENIRPKIAVLPSHEFKRTPEGLEQFFRWVKKIVPNRDIRIVMETTGCYSQHLTDWINQLHPEVSVTIENARNIHAFIQSLNLPHKTDKLDAQAIARFGTERQPNPTNRPSKTILTIRELSRERTALIKARVDLQNRRDTLTSPIVRRINAQTLATLTTQIEKIDKEIKACVVQDEELLSEVHIMTTMPGVSFISAYSILAEIGSLKQYTAKELSSLSGLAPRILESGSSVHSSYLSRRSSGRLRQILYLDSVPGVPKIPALQEFHQRLISKGKKKMTARCACMRKMLLMLRSMVIHNTPFNENFQEIHQKGLDF

SEQ ID NO: 304051 - protein, 373 aa, unidentified
MESTSEQVYVGLDVHRKSVYATAFDAAGSRVSQERFGASDAELIAYLDRLPGRKHVVLEACTLWEHFFDAAKTTGASVVLSNPYKTRLIAEASLKTDKLDSEALATLLRLNSVPESYAPPPEVRALRNVVRERVFYRRKATSVKNHIYSFLLRRGIEYEDRILNLRRKREVLRDLQLDEVDRGLDTLTALETTCRQLDQKIHLAWASSEEAQLLSTIPGVGEIISVALAAFLCPIERFSSPDKVSSYVGLAPTTHQSGESENHGHLKRDSVTLVRWLLVEAAWVHRHRVPRGTVAKVARRVSRRRGKGKGSVAGAHALLKVIFAMLKNREPFRVDAPRPPTAETTLRHPRVTAGKRVQRTVLGPSTAKCLPAL

SEQ ID NO: 304052 - protein, 467 aa, unidentified
MQVRLGIDIACRAVHRAACADQTGTIVWSGHQFRTCAAELEALWARLPGDATEVLVVMEPTRNAWVPLAAWFRRRGATVVLVPAEQSADLRAYYAKHTKTDRLDAELLARLPLLHPDGLHPETTNGPGDPLKRAVKIRSGLVHRRTACMQRLDALLEILGPDWVAALGSDMTQTAFKFLAGWANPHQVKRLGRARLARWFQRQTRKAWGERRADAVVSAAEATLALWGPTGLDYEALAADIATEASLALELSRQIARLDERIFDLYCDADPDHILLSVPGVGKILASQIRGRLGDPRRFTSLAAARSFSGLIPHRHSSGLTDATGGPTKHGDACLREALFLAADHARKTDPTLAARYQRLMCQTGRHHTSALCTIATVLLTRIVACLRNGTPYQVRDVDGSPITPAQGRAIVAERYQVPPDVRAARRVISNARSRHRRRDERIEQGVAKRSTMTPVPPASLTPTGSP

SEQ ID NO: 304053 - protein, 365 aa, unidentified
MLIHVPPDVRVLAMDVHKNTISTGLLEPGSDSPVLERLGTDDESVRRLVGRFEDPTAVWACYEAGPTGYELARVLRTARMHCEVIAPSLIPVRQGDRVKTDKRDARRLALLFRGGQLSAVRVPTVAEEAVRDLCRARADMVIDRTRARHRLGKFLLRHGIVWRGGDNWTLKHYRWLDGLRFEDAALRATFAHYRATLTAREAAVDAIDTDLALWFDRAPFADAVHRLAAYRGVTELGGLMLASEVCDWRRFPTAGMFMAFTGLVPCEDSSGERTRRGGITHAGNGHLRAQLVEAAWAYKSRPAAGPVIRRRQEGLDPAVVARAWAAQLRLCGKFRRLDARKANRKTVVTAVARELAGFVWAEMTA

SEQ ID NO: 304054 - protein, 342 aa, unidentified
MDKVTIIGVDLAKRSFQVHGASADGSVLFRKKLSRAQVVPFFAQQPICIVAMEACATAHDWGRQIGALGHKVKLIPPIYVKPFVKRHKNDAADAEAIAEAASRPTMRTVAVKTHEQQSQAVLFRTRDLFLRQRTQLINALRAHLAEFGRVAPKAATNIKRLKKVLEDPENGLPQIVTDIGSVYFGQIATLTEQIGKLDKQVRTEAAKDDAARRLQTMPGIGPITAMAVSAFAPPMEIFRRGRDFAAWVGLVPKQHSTGGKQKFGRTSKMGQRDIRRLLVIGAMSVLKVAVHQGAPEGSWLQRMLARKPRMVVAIALANKMARRLWAMSVKNEDYRDPAIAAA

SEQ ID NO: 304055 - protein, 343 aa, unidentified
MSNVTLIGIDLAKSIFQVCGVDAQLKPVFNRQVRRAQLTRFVEQYPGVPICMEACSGSNYWGRQFIAQGHDVVLIPPQHVKPFVKGNKNDAKDALAICEASCRPNMRTVQPRSLEQTDCVMGHRVRERRMQQRIQVTSQIRGVLNEYGLVFRQGPSALRAGLEGALEDAHNELSPQARELLEDLLNEWLMLEAQIKRCDQRIRDHGKHNPVIQRLQTIHGVGELISSAAWAALGRGGTFHSGRCFAANLGLVPREHSSGGKQRLGAITKRGDRYLRKLLVQASQNVLRYAGNHPQDRLSVWAAQVAQRRGHHKAVVAVANKLARIIWAVVEHGQPYRPAGIPA

SEQ ID NO: 304056 - protein, 336 aa, unidentified
MGQYVGIDLHRRSTTIVRMAEDGEVLGTQRFVSQPFELAEAMAAAGPEPEVVLESTYGWYWAADLLQELGAHVHLAHALGNNWGNRRVKNDERDAQDLAAMLRLGRLAEGWIAPPEVRELRELVRYRYSLVRHRTSAKAQIHGVMAKNGILPVVGELWGPTGQAQLDRLELPEAYAMRLDSLRNLLEVYERAIAELDAHIHAGLKADAGYRALMTLPGVGKVIAAIFVAEIGDIGRFDSSKKLCSWAGLTPKHRESDEVVHRGAITKQGSSLVRWAAVEAVGNYRAKGNEKLRADYKRIAEHAGKYKARVAVARKLLTLVFYAMRDGEVRCLETAA

SEQ ID NO: 304057 - protein, 421 aa, unidentified
MSFKIFKFNCCGLDVHKTWIYACIGITDSNNRTEYKQARFSSFTKGLNELCDWLAKYNCKDVCMESTGKYWIPVFNILEQHSFWVTLSHPKYTKPMKGNKTDRKDAKWICDLYMCGMVKPSFIPPADIRELRDLVRYRFKLTCMITGEKNRAQNCLTVSNLKLDDVFSDVFGKSSRSITEHILQHPGEKFDIAPFVDSRCKTPITEIQAAVDGAISKEQVVKLRQCLDHIDELNKHISEVEQEILRLSDKYEAALNLIRTVPGFNKNPLTAIQVLSEIGGDMSVFPTAKHLVSWAGCCPRNDQSNQKIKSTRISRAGSYFKPVLVQVANALIKSKKHSEFTSRYKRIKARRGHKKAIIAICRMLLTAIWNILSKLVPYTPVGFLATPHAAAPSRTLTISQGLSLLRHRGYILVDDPALPVP

SEQ ID NO: 304058 - protein, 322 aa, unidentified
METVSFEQVVSRGCGLDVHKKTVVATIDGEGLERVTREFGTFTSSLTELKDWLVDNKITHVAMESTGVYWKPVYNILEPTGITVWIVNARHVKNVPGHKTDKKDSRWLCKLLLAGLLKPSYIPPREQRELRDLTRYRKKLIQEVASNKNRVTRILEDCNVKLSSVLSDTSGITATRLVDKLCEGKGVTMEDIDRVYHGRIKATRDELWEACNGNISDHHVYLLGTIRAHNRHVESLIEELDQKIRHLLSPYENVLELLREIPGLSHKTVEDLIAEIGLDMNVFPSEKHLASWVGVSPGNNESAGKKKAEEPPTGINKLKQPL

SEQ ID NO: 304059 - protein, 469 aa, unidentified
MKKKPPQRRHGKPPASRPSLLERINPNAAGIDCGAATHYVAVPPDRDPTPVRTFQTFTGELHRLADWLTACGVTSVAMESTGVYWIPLFEILEARGLDVALVNARHVKNVPGRKSDVMDCQWLQELHSVGLLRASFRPTAAIAALRAYLRHRETLVQSAATHIQRMQKALVQMNLQLSVVLSDITGVTGLRIVRDIIAGQTDPHALAQHRDKRCQASEADIIAALTGHYRPEHIFVLQQNLELFDPYHRQLAACDAAIEAHVAPLAAQAPPPAGPLPSPRTKAKPKARDNAPRFDIRTPLHQLTGVDLTQIDAIGPYSALRLLAEIGTDMTRWPTADHFTSWLTLAPHNKITGGRLLSSKTMPSANRAAGILRLSALSLGRTDTALGAFYRRMASRVGKAKAITATARKLAILVYRTLKEGLVYQDPGAAAYDAHHRERVLRRLRQRAAHLGYVLLNRETGELLEGAVS

SEQ ID NO: 304060 - protein, 317 aa, unidentified
MEKLTNELKTKRLFYKAFSNDAEGISSFYRWANQHKMADMILHYTMEATGVYYESLAYYLYARSERVHVLLPTKVKKFIESLDSKSKTDKIDSELIGKMGVERDLPAFQLGSLEVRKMRKLTRERMHLVAEKTVIKNQLHAERHSADRMLTSIKRMEERISYIEEQIKQIEQELNKLVKADAYLDKKIDVLTSIPGIGFIAATTVVSETQGFSNITSIKQLSSYAGYDVKLRESGKYIGKTRISKQGNSYIRQILYMPALSSISHAKDIRDFYDRVNKNKASRLIGITAVQRKLLGLMYTLWKKDTKYDANYMQETA

SEQ ID NO: 304061 - protein, 481 aa, unidentified
MAAGKKKDTGAAGSPAGVAAGDGGDGAEVSEDQVRVIERAAAIDVAKGSGMVCTRVPGSRPDRRRQRVWPVTATYREVIALMDHLRCEGIQRLVLESTSDYWRLWYYLAEAAGLEVWLVNARDVKHLPGRGKSDRADCVWLCKLNERGMLRRSFVPPQAVRDLRALTRTRARLAQDQARHQARVEKILEDALLKISVVISDLFGASGRRFLDALVAGERSPAALAALGDPRLKATRRELEEALTGKFRDIHAFEIKTHLRILDVINEEAARLDQAIGEQLALVPRTAPACTACGEAGGSHATGCAGEGTPLLGLAERIDEITGVGLCNAQVLIAELGTDPSQFPTPGHAAAWARLTARTLQSGQSARPGRTGKGNPYLRGALGQCAMAAAHTDTRLGVMYRRIARKRGKQKAIVAVARVICEIAWILICDPGARFEELGPDYYTPRSPARRTRDKIREIERLNPGKKVILAPNDAETDTAA

SEQ ID NO: 304062 - protein, 344 aa, unidentified
MTGIDYIGFDIHKKTISFCAKAQDGTILDQGTIPARRDVLLAWAKARPRPWAGAMEATLFTGWIYDLLKPLAQELKVAHPAMLKAITASKKKNDKVDARTIADLLRCNLLPECYMAPCAMRDLRRVLRYRNLVVRQATRMKNRIAGLLMETGTPYNKERLHGKAYFSELLGSLREVPGSVVELLKLSRGQLEFFASIQRRLLKGLGEHPDLSERVMRLQSIPGVGEIMALSWALEVGEVNRLSSIAQAASYCGLTSAQHNSAGKEQRGPISKQRNKHLQTILIEAAKLAPRHNPQLAVVHERELQRGNRNRATLAVARKLVAYLMAVDKSGKPFHVRASGEEAA

SEQ ID NO: 304063 - protein, 329 aa, unidentified
MKETAISIRREGERVWRGKCSSDPVRIAQIVRKRAAGVVRVVFETGPLSVWFYHALKEEGLPAICIDARHAKAALDMAANKTDANDADGLAQIGFYREVRVKGFDSLLARSLVAARTKLVRITVELSIQIRGLMKTFGLIVPSGKGHNFEANVRRLLMDQIELSNILLPILDAWRDMRMRAADLTKLLLVAARKSHTCRLLMTIPGVGAITATSFATAIEDPGNFKNSRAVGAWLGLTSRRYQSGEVDYSGRISRRGYRHLRGLLYEAALVILTRSKAQSDLRTWALKLKERVGTKRAAVALARKLAVTMHAMLKTNSVFNPIAHPISL

SEQ ID NO: 304064 - protein, 348 aa, unidentified
MIWIGVDAHKRLHEAVALSESGVMGSRRIRNDPPQWAALLDWARQWPERVWAVEGAGYLGRGLAQFLVEHGEEVHEVSGKWTARRRRGMRRPGKSDRLDAHSVATLLREERTTLPRVYAEDDELASVQLWSRLEQEFSEDRTRILNRLHNLLLLCDPGYTAGLPALTTKAGIAAARTYTAPGTRAVAREREQAVRASAEQVALLDAQIAALRRKLGRASRSSFRALGAIEGVGPQIACTIVAELGAPRPGFGDEQLAALAGVAPLEASSAGATRHRLNRGGNRRLNLALHRIVLTQARMYEPARVYLARRRAEGRTAREARRALKRLICRRIIQAWRACFDQPLAPAA

SEQ ID NO: 304065 - protein, 404 aa, unidentified
MNYTQNQKIEQVTESTLVLGVDIGSSEHYVRAFDYRGRELTRKVFRFSTDINGFNSFYDWVTQICIKHGKNEAMIGCEPTGHYWYTFYQFVKDHGMKLAFVNPASVKKAKELDDNSPKKTDLKDPKTIAKLVIDGRYSFPYVPEGIYAEIREVTSSRDRIMKELNAASNRIQRWLKIYFPEYLTVYKKFDTTTGMMILEEVPLPTMVTALGVDNIIKIWREHKVRGKGASFNRAKTLVDAAHDSVGKSGGQGAVMEIQMLLEDYKVKKQQLEMVTSVMEELIMQIPNAEKMLSVDGVGLVTVAGFISEVGDISRFKKPKQIQKYAGFELVENSSGKHKGRTTISKRGRKKLRKIIYQVVLPLIQSNKEFRSIYDYYRKRIKNPLKGRQAMICLLYTSPSPRDRG

SEQ ID NO: 304066 - protein, 424 aa, unidentified
MLGVGIDWAESFHDVALGVPGRGVTEQFRVDHGPAGVQRLVARCAELEPDPAEVRVVLETRHGLLVEALADAGFTVLPVNPDLVARRRGPAKKKDDSEDARICCLMALDAYLGLRQLIPHGEIGTELRAIARDDERAARDERRIGNRLRADLLAVFPAAIDIADGDLGAPAFLKLLERWPSAEALARAGRDEVEGFARSARHGWPGRLADRVGQAMAAPRLEPRPALARAKEGSIRLAAAQLLAIRAQRRAWERRMGELLLGAPRYGRSKTPKDPDPGKAFPGGEIYLSMPGLGDRLAARVAGEIGEHFEQFATPNALQCYAGRAPVTRRSGRSEFTIARRLAYNRPLGEAVQQWAFCSLTRSAWAREFYDEKTAAGDSHHGALRKLGNRWLEVLWHCLHKGACYDEAIHAANRKRNRPPPAAA

SEQ ID NO: 304067 - protein, 348 aa, unidentified
MLADQLDYIVGVDPHRDSHALAVVEVVSGAVVFEATIAASSGGYANALRLAEEHAMGRRAFAIEGTGSFGAGLTRFLTGRGEWVLEVGRLRRERRTGGKTDALDAIRAARSALASERPATPRAGGERQALQALVAAREGAVNAKRAGLCQLRDLLITAPEPLRSELRPLSRARLLQRLAASRPDGRRDPELRGSLLALRSIARRVLQLSVEERELAREIETLTRKLAPQLLEQPGVGPHAAAQLVLSWSHHGRITTEAAFARLAGAAPIPASSGQTIRYRLDRSGDRKLNRALHMILVTRKRTHPATIAYIERRLAEGKTRRDANRCLKRYLARGLYRLLEQGTPIVT

SEQ ID NO: 304068 - protein, 347 aa, unidentified
MNIPHYIGFDVHKKHINFCSKTANGEVVEEGRLVAERAALRSWAGTRAYTWHGAMEATLFSGWIFDTLKPYAMKLEMAHPAMVKAIAAAKKKNDRIDARTIADLVRCNLLPTCHVASPEIRELRRWLRYRQLVIRESVRMQNKMAGLLMECGTPFEKEKLHGKKYFSHLLDTLEEVPDSVKDLLRLSRGAFEMFQAVQKQMIQKLLAHRELRERVERLTTIEGIGEITALTWALEVGDPTRFSSCAKVMSYCGLTSALRSSADKSQRGPISKQRNHWLQTALIEAAKLAPRWNPQLAALHTRELERGHRNRATLAVARKLACYLLAVDKSGQPFQLRLPTNVVPESS

SEQ ID NO: 304069 - protein, 320 aa, unidentified
MRNTVGLDISKLTFDATAIVGNAEYSAKFDNDSKGLNQFSDRLKSLGCQNLHICMEATGNYYEEVADYFAQYYSVYVVNPLKISKYAESRFKRTKTDKQDAKLIAQYCRSAKESELVKRQKPTDEQYRLSRMTAAYAQIKSECAAMKNRHHAAKDEEAAKAYAQIIKAMNEQLEVLKEKIKEQTEKPNCKEGVKRLETIPAIGRMTAAVLFHHLTSSKFETSNKFAAFAGLSPQQKESGTSVRGKGKLTKFGNRKLRAVLFMLTMVAYRIRAFPGFIKRLEEKKKPKKVIIAALMRKLAVIAYHVHKKGGDYDPSRYKSA

SEQ ID NO: 304070 - protein, 422 aa, unidentified
MRGLRTKGVKAVKEETLIVTVDVGMASNTGYCTTVDGRDIKPFKFDNTREGLDKFWSMIVASQNRFRCSDVMVGYESTGPYAEPLIHYLMNKPVRIVQVNPMHTKRIKELNDNSPLKTDDKDPRVIADVLRLGHTLSVVVPEGDAAYLRRLNNARERHVGERTALLNQLQQLVFLLFPEFKTVFNDIKVKTAQRILTRYTTPEKIGSLNQGELGEEIRKQSMGKFGAQQAELLISLARNTIGIKEGVAGITLDIRHILVQLQAVNGFIHEIEAEMEKALERIPWSTKILSMKGLGVITVAGLVGEVGDFSKFRTQSEIMKLAGLDLYEISSGKRKGQRRISKRGRSLLRKILYNAAISTIRKNGIMYTEYTNLIGRRMKRTSALIVIAKKLLRIIHAMMRDGRDYIHNYASPKRVGVIEKAA

SEQ ID NO: 304071 - protein, 427 aa, unidentified
MRTALPEEAKEKPLEVWFQDEARVGQQGTLARLWARKGTRRRAPKDCRYAWAYIFGDGMVAALPRRHRNVPWSWCSTPRSEEDGEMKDTMIGVDLAKRVFQVHGASMTGQVKFRKKLTREQFRRFMFEQPACIVVFEACGSASYWAREMESLGHEAKLIAPQYVRPFVKRQKNDAADAEAIVIAARQPEMRFVAPKTAEQQAKAVMFRSRERLVHQRTELVNALRAVLYEYGHVFPTGLVHLKRIEALMDDPASDLPSLIIAECQDLLAQIAEKTERIDAKTKGLKALAAETDTARRLQTMPGVGPLTALAVEAFAPDMAQFKCGRDFAAWLELVPRQHSSGGKERLGRISKAGQSDIRRLLIIGAMTRIMGRARQKLPVENWLGRMLARKPKMLVAIALANKMARQLWAMLTKNENYRDPALAAAA

SEQ ID NO: 304072 - protein, 385 aa, unidentified
MSVYVGIDVHRKRSQVAVVDAAGAVLSNRNVVNGVEQILSVIGQYPTHTPVAFEAAFGWGWLAELLDDYGYEPHLVHPTRCKAIASARLKNDKVDAAILAQLLRADLLPEAWIAPPPVRRLRTLLRHRVQLVRLRTLLRTRIHAVLADHGLDRPAGLWSGPGRAWLAGLDLPEVSRRVIEDDLALIDAFAPTIDRLDDLVHEHAKADPRVKVLTVLPGVGELTALIILAETGDISRFPNARKLAAWAGLTPTVRGSDQVVRHGHISKQGSAWLRWILCEAAQTAKRHPDFAVTYAAITRRRGKKIATTAIARKLLTRAYHLLRDSPNQPARARPSTRPTTRSSTRSSTRSPTATSGASPRRTPPTRTATQTGRGSPSPGRARKSA

SEQ ID NO: 304073 - protein, 407 aa, unidentified
MLFVGDDWAEDHHDVELQDPGGRRLARARLPEGVVGIARLHELVAAQLGEDAGPEQVVVGIETDRGPWVQALLAAGYQVFPVNPRQVARYRERHGTSGAKSDAGDAHTLADMVRTDRHQLRAAAGDSDLAEAIKLLARAHQTLIWDRHRHLLRLRAALVEFFPAALKAFPDLAAADALELLQAAPDPTSAARLSRTRIAAALTRASRRGVPAKASQVQQLLRAEQLPQPKTVVAAYAATVGAAVAVIGTLNAQIQALAAQVEAHFGGHPEAEIYRSQPGLGGVLGARVLGEFGDDPGRYRDARARRNYAGTSPVTKQSGKKKVVVARFVRNDRLADPLHQQAFCALTASPGARAYYDQLRARGTGHHAALRQLSNRLVGILHGCLKTRTRYSEATAWSHRTANAAAA

SEQ ID NO: 304074 - protein, 343 aa, unidentified
MQVTTVGLDLAKRIFQVHGVDAAGKVVIRRRLQRSEIAAFFADLPACLVGIEACATAHHWARLIGASGHQVRLIPPSYVKPYVRRSKTDAADAEAICEAVGRSSMRFVPVKSAHQQAALLHHRARDLLVRQRTMLINAIRGHLGEFGIIAPAGRRRVADLVNLLQGADDAEVPALAREALQSLFAELSALEIRIKVVEAVIMREHRSNAVSRRLTTIPGIGPITASALAGTIADPLAFKSGRELAAWIGLVPRQHSSGGKQKMGRVSKQDDRYLRRLLTVGATAVMRRLPGKTDGLSLWVRALLDRRPFRLVSLALANKMARIAWAIMVRPETYKASAMTAAA

SEQ ID NO: 304075 - protein, 359 aa, unidentified
MQTLSNKLDFSGQNIYVGFDVHLKSWKVTIMTDKLTHKTFSQDPNPKLLFEYLKKNFPGGNFHSAYEAGFCGYWIHNHLKALGVNSIVVNAADIPTTNKEKVQKEDARDSRKIAKALRSGDLIPIHVPSLKTLEDRSLVRTRSTLTKDLARNKNRIKSFLYFHGIEIPEQFIKTNGCWTNRFVNWLESIEMLELSGKQALQTIVLSSTNLRASVLQTTKHIMELSKTTAYCEHMALLRSIPGIGLITAMTLITELESIDRFKNFDELCGFVGLVPSTSSSGENDVVGDITPRGHSALRNAIIESAWVAARHDPALLKSYHDYCKRMVPNKAIIRIARKLLSRISFVLKNKKYYVCSVVK

SEQ ID NO: 304076 - protein, 446 aa, unidentified
MAPAGDHVRPNVGEVVMEEDEDQSLFVERIAALDLGKAVLEACVRLPHPTKPGRRVQEVRTYSTRTVHLLELADWLRCNQVTTVVMESTSSYWKGVYYLLEAEGFDCQVANAREVKNVPGRPKTDKIDSVWLCKVAERGMFRPSLVHPEPIRRLRDFTRYRRSLVRDRSREKQRVEKLLEDAQIKLGSVISDIFGVSGRAMLDALAGGQRDPRVLADLARASMRGKTAVLVEALTGFFTDHHAVLLAMMLDNIDRLTGQITALEQSIEELVAPFCRQVEQLAEIPGIGRIGAAELIGEIGVDMTRFPTAAHLVSWAKFAPAVHESAGTKKQKRRPKGNPWLAATLGNAAGSLTRSRTFLGARYRRIARRRGKGKAMVAVGNSILTIAWHLLSDPEASFCDLGVDYYETRINAERRARNLAAALEAVTGQKIIIRNGKAIVIDPAAA

SEQ ID NO: 304077 - protein, 361 aa, unidentified
MNATTAAIDLAKNVFQVALADANARVLEQHRLTRAQFERFFDNRNVARVVMEACGSAHHWARVFTARGIEVMLLPAHYVRAYVRRSKTDAADALALLEAARCADIVAVKVKSVEQQSLQALQRTRSLWMGTRTSRINALRGFCRELGLHVPVGARTGLEAMARAVADDQSPIPALLRPIMQQLLEEIRVLEVRIAQLERQLAQLARESSACRLLMSIPGVGLLSATAILAATSGNVAHFKSARHFASWFGLTPKESSSGGTRRLGRISKMGDKYLRMLLTHGARSVMRAATVAKLRGQELLGVRHWALQLQGRSNHNKAACALANKMARICYAVLRDQTPFGQPATRLGKKMQRQSFELAH

SEQ ID NO: 304078 - protein, 338 aa, unidentified
MTIKTIGIDLAKNVFELCGLDANGEIVFRRRVRRETLLRAVGEIPACVIGIEACTGAFFWQRQFEGLGHDVRIIAPQHVKPFCRRQKNDRNDAEAIAIAVTQPRMRFVPKKSVAQQDIQSLHRARRRMVNHRTALVSQMRGILLDRGIAFGQSITRARRMIPEIIKDRYNDLTELCRETLSSLLELMMEIDKRVQDFDRRIDQVFRSSETCQRVGRIRGVGPKTATAVIAAVGDGHDFDNGRHMAAWLGLVPRQHSSGDRKILMGISKRGDQHLRTLLVHGARAVVRTAVGKTDRFSRWVNELRERRGTNRAIVAVANKNARIIWALLAKNEEYRPAA

SEQ ID NO: 304079 - protein, 379 aa, unidentified
MKDIRHVGFDVDSEKIAVAVAEPEGEVRSLGTIPNREDSVRRLVKKLGPAQRLRVCYEAGPHGYGLYWQLTKLGVHCDVIAPTLVPVKSGDRVKTNRRDAEKLARCYRSGDLTAVWVPDAAHEALRDLVRAREAAKKDQLRARHRLGKFLLRRGLRAAAGVKSWTTKHLLWVKTLHFEHAAQEATFLDYLHEVEHAAERVTRLEHAIDQAIEAAPAQMRALIAGLQALRGIRKVSAATIVAEVGPLSRFARPKQLMGYSGMVSAENSTGNSVRRGAITKTGNAHLRRVVGEAAWAYQYRPAMSPVLKKRQEGLSEEVKEIAWKAQHRLSSRYRRLMAKGKIRQKVATAIGRELLGFVWAIGMQVEREQQGCTKGRRPAA

SEQ ID NO: 304080 - protein, 344 aa, unidentified
MQHFAGLDVSLQETAICIVDEDGTVVSEGKTASEPAELARWIATTGLTITRVGLEAGPLSPWLHTELRAAGLPAICIETRRMKGATAAMAVKTDRNDARAIAHAMRVGWFTIVHVKTAESQELRLLLSNRRTLLEKRVAIDNEIRGTLKAFGLKLGPVTVANFEARVLELLASRSRLLGMVKPMLTARTALRQQCDVLHRMVLKTVRTNTVCRRLLSVPGVGPIVALTYATGVDDPARFAHARDLGPHFGLTPRKYASGEIDRNGSITKAGDGAVREALVQAALTLLTRVQRWSVLKAWGMAIAKRRGLRRAIVAVARKLAIVMHRIWVDGTTFTWSRETAASA

SEQ ID NO: 304081 - protein, 334 aa, unidentified
MYQHYIAVDWAQSNMAIAHLTGESNRASVRDVPTSVEDLKEYLKSLRGSKILTIEETTTSQWLYVELHGLVDKIVICDPYKNKLLSLGAKNDKADAIKLVTLLKSDSLKAVFHSLDEIVKLRKLVSSYDDLIKRGVRLKNQRSAIFRSVGITSEDAMPRENETEHFVLQRIDSAIDAYEIDRKFYEQEFERLFKKFTMLRWLRQIPGIGLIGSVKIAAAVVDGTRFPDDRKFHTYCGLAMHALESGGRDYGRRKPRYRRDLKAVFKIAALSAITHDNEFTEYYRYLIREKRYPDHQARHAVARKIATAVYGVMKNKKKYDPDNIGALRHLKKRS

SEQ ID NO: 304082 - protein, 378 aa, unidentified
MIEHTAEALDAWLTELHQKVKGRIAIALELKKGPVVYALQKYPFITVFPVHALSLARYRQAFSPSGAKDDPQDAELALELMLRYPQKIKAIEPDNADIRLLQQLVEQRRQLVEDKRRFVNRLINTLKQYYPQPLEWFSHRGSLLLCELIIRWPSLQQLKRARRDTIRNFLNARGGRAMALTEQRVASVDNGIPLTTDPSVIEANALMATALATQIKVVSEIIKTYDERIETLFDTLPDAGLFKSLPGMGPCMGPRMLAALGDNRDRFNNAEEIQNYAGIAPVTERSGQKSWVHWRWQCAKFVRQTFVEWAAKTVNSSYWARLYYQGLREKGKSHQSAIRALAFKWIRIIYRCWKTRTQYDEAKYLLALEARHSPLLKP

SEQ ID NO: 304083 - protein, 268 aa, unidentified
MTYVGIDVSKATFVVAYSSAKSSETKTFKNTTKGIREFIRTISPEENHCVLEATGNYSMLLVYLLSKAGFTVSMENPLKIKNFARVMLSVVKTDEIDARLIALYGERMQPAPFKLHSDSLLLLKQKRTVLRQLKKQLIANRNLEGSLKVLPFIDSKCKKVLEKTIKFLEKQIEEMEEELTSLAEIEYKKQMDLLTSIKGIGATLAAALIIATGGFTYFDNAKQLTRYLGLSPTYQQSGTSVNVKGHINRNGDAYLRSQLYIGAMASLR

SEQ ID NO: 304084 - protein, 391 aa, unidentified
MFYLGIDIGKLHHAAALIDPRGKTVAVLSRFAATAHGFNQLTAFVHQHLPDKAELQVAMEATGPYWVTLDKWLTARGFQPVVLNPLKLSALRDYGVRGSKTDRIDAVLIAQGLRWEGCRAANPAISTVAAELRCLTRLRFQLVKERTRATLRVGSLLSMVFPEFSALFPKLASPSALAVLQAATSPGEILALGVDRLAGILRAASRGKLGRDRARQLVTLATSSVGTASAALTQALRLILDQVRLLCEQITTLEEQIAQLYKTADVPLESLPGTGPVLAATCFSEIGSLNRFSRASQIVAFSGIDPKLRQSGAFVGQVRMSKRGSPHLRRAVYLACQSAVRTDPYFKAIYERQLQRGKPKRKALGAVMNRFIHVLYAVWRDNRAYSPLTPA

SEQ ID NO: 304085 - protein, 346 aa, unidentified
MMIIGCDFHPSWQQVSWLETETGECGERKLVHANGDAKKFYQALAAPVLIGMEATGNSQWFIELVEDLGHEIWIGDAAQIRASYVRQQKTDKRDAAHILKLVVEGRFPKLWTPDREQRDLRQLVLHRHKLVEIRSRVKNELQHLSLNKGMQKKRTLWSQAGQKMLRELPLKPWAACRREDLLGLLQMLNRQVGQLDAAVQKAAEENPQARLLMTQPGVGPNTALAYVLTIGDVSRFRRGKQIASYLGLIPREESSGGRQKLGAISKQGNRMLRSLLVEAAQIAVRFDPGYRKQYLHRCHQKPKGVAKVAAARKLAVRLYWMLRSQVGYPEIVRIESSPRVALVGAS

SEQ ID NO: 304086 - protein, 422 aa, unidentified
MKTPSEIAFTAFIGIDWADAKHDICIQAAGTERREFSQLSHKVEAIEDWAQSLYQRFGGPIAVALELSKGPLVYALQKYDFIVIFPVNPSTLAKYREAFTPSRAKDDPTDAELVLDLILRHADRFTPLNPQSVEMRTLVSLVEQRRRLVDDRVRTTNRLRNTLKQYYPQPLEWFDRIDTPLFCDFIERWPTLVQVKRARRTTLQSFFHQHNMRRTDLLEARLTSIKAASPLTLDAAVITPHRLQALVLVDLLRVTLAAIKRFDEEIAELAPQHPDYELFSPLPGAGPSLAPRLLVAFGEQRDRFKNAAELQKYAGIAPVTERSGNKHWVHWRWQCPTFLRQTFIEWAAQTINKSYWAGLYYRQQRDKGCNHQAAVRALAFKWIRILYRCWQTKTPYNEALYLKALKRRGSPLLNQVETAISA

SEQ ID NO: 304087 - protein, 341 aa, unidentified
MKKFIRIGVDLAKNYFQIHALESEGGSAVTRKLTRLKMREFFSRIEPCLVGMEACGSAHYWARELESMGHEVLLMPPSYTKPYVKRGKNDAVDAAACCEAMSRPGMRFVPIKSAEQQAILMLHKTRELLVKQRTMSVNALRAHLSEFGIIVAKGIGRVDQLLELAENDATLPDAARAVVKVLAQQFEGLDKSIDDMEGEIACAHEQSEMSQLLDAVPGIGKIIASVIAASVPDPNVFKSGRDFAAWLGLTPRQNSSGGKQTLGAITKQGNRYIRKLLVLAATSLLHIVGKRKGALCDWIVALRAKKPARLVTVALANKLARIIWAMMKTGEGFRTEMFAKA

SEQ ID NO: 304088 - protein, 355 aa, unidentified
MASITLLGIDLAKDVFQLHGLDELGRPQLKRTLRRRALVQFVAKLPACTIAMEACSSSHHFSRKFQQFGHEVKIISPQFVKPFVQGNKNDAADAEAICEAASRRNMRFVATKSVVQQDIQCLHRVRKRLVHNRTALTNEIRSIVGEFGIVFAKKRSALVEGIKGLLNGSCPREELSSEGLTLLQDLYSELLELDQRIENCELKLKKISSQPQCQRLFKVGGLGLLSVTALAVALADPGQFKNGRNFAAWLGLVPRHQGTGGKNRILGISKRGDMDLRTLLIHGARAKLRGINAKCRAERKLDPLEDWAYRLCQRQGYNKATVALANKNARIAWSISAHKTEFESHQAVASLKKGA

SEQ ID NO: 304089 - protein, 352 aa, unidentified
MIIIGVDFHPEFQQIASVDTDTGEFQEKRLGHGEDAEAFYRALAGQKVRVGMEASGHAGWFERLVAELQFELWIGDAAENRTKRVRKQKTDRQDAQLILRLLLEDRFPQIWVPSWENRDLRQLLWHRHRKVQARTRIMNQLQAVALNEGLRCKKRLWREHGRQQLESFRLAPWASRRRRDLLELLDRLNPTIAELSQAIEQEVEKCPEAERLSTHPGVGALTALAFVLIIGRTERFHCGKPVASYLGLVPLEESSGNRRRRGHITKQGSSMLRFLLVEAAQVTVRSVPEWRSKYLHLMMRRGRKTAKVAMARKLAVRLYWMWRKGWDYEQVKKFGSHAGQPGNRDGVPSNTE

SEQ ID NO: 304090 - protein, 321 aa, unidentified
MFVGIDMSKLSFDVAVLIDSRYHSRHFENNSTGFSAVLKWVKSFKETPYFCLEATGIYGLALAKYLHAQQHKVVVANPIQTHAFAKMEMSRNKTDKADAMSIARYCQYLQDNGVMTKSLFTPREEAFERVQFLVTRLDQLNKMRSQENNRLDVSLDKAAARSIASMLRFIDKQIIKIKNELTTIVKENKQLKAQVELLASIDGIGDKTAWAILAYIGDIDLFENAKQVSSYAGLNPIIEQSGTSINHSRLSKMGCARLRKSLYMPALVAVRFNPLMRVFYEKLLTKGKPKKVALVAVMRKLLVLAYGVLKSGKPFDVNYQN

SEQ ID NO: 304091 - protein, 408 aa, unidentified
MSDPATPRFVGLDWGAFRHAVCVIDASGQLLTRFELEHDGAGLTELTGRLARFGAPEELPIAVERPSGLLIDTLVAAGHPIVPIHPNVVRHTRPRYGAAGAKSDAGDAFMLADMLRTDGHRFAVLNPASDAIRALRALTRCRDDLVAERVRLTNQLGATLDAFWPGAKTLFAALHSPIALAFLKRYPSPAKAARLGEKRMAGFLAAEHYSGRRTAAELVERLRAAAIGHVGTLEAQAREQLVGDLAALLVVLTGRIRQLDRRIDEALGRVKLGAVMASFPRAGRINAAQIVAELGEDPNRFATEARLAAEAGVAPVTRASGRARAVVCRFACNKRLRRAITCWADNSRHASDWAQGIYQRARASGKKHPHAVRVLARAWLRVLWRCWQTDTAYDPQRHGAAAALSEPA

SEQ ID NO: 304092 - protein, 352 aa, unidentified
MVVAVQYRRPSLNKNVMVQIYGIDLGMSSFDVSFLSESGSVRHLSGVKNTVHGISKFLLSLPSSAVLCAEHTGVYGDLLLRLCTLNRICLCFVPGYQIKHSLGLQRGKSDPLDACRIREYAERFYDLLRPCFYPGEEMSELQELYRTRSLLVDSRKRLDTLNIGDNCKSSVSLAAGHARRAVLAELNTQISGLDHEIEALIQNSSEFSRNYQILTSIVGVGPVTSCELIIKTENFRKLDTAKKCAAYAGIAPYPKESGKMKCGHKISPMGDKQLKTLLFLCARSAKEHNKEIRLYFLKKHKVEKKHFFVAMNNIANKLLRLIYSLIQKQQTYDRDYIQRDPRCVVISDTNKC

SEQ ID NO: 304093 - protein, 457 aa, unidentified
MEKSKRKKVRSPRRSLVPMNPDAAGIDVGATFHTVAVPPGRAGQTVRSFRSFTGDLYALADWLKSVGVKTVAMESTGVYWIPAFEILDERGFEVLLVNARHVKNVPGRKTDVNDAQWLQQLHEHGLLRGSFRPRDEVVRLRALLRHRERVIEYAAAHIQHTQKALMQMNVQLQHVVTNITGVTGMKIIKDIIKGIRDPKLLAQHRDPRCKQSPETIQDALTGNYRPEHVFALRQALELYEFHHVKVTECDAEIETTLRALNQNREAPGEPIPAMRHDPSRNEPDFDVRLALYTFLGADLTQIHGLGAYSVLRLIAECGDDMRKWPTAKHFTSWLTLAPGNKISGGRLLSSKTRRSSNRAAVLLRTAAVNVGRTQTALGAFYRRLAARVGKAKAVTAAARKLAVLFYNALRHGLSYVDPGASYYEQRYRQRVLHNLQRRARQLGYTLIAARATPNGVS

SEQ ID NO: 304094 - protein, 349 aa, unidentified
MTEQRRSYAGECVYVGVDVHKETYTVTCVCHKQIVKTATVQAEPASLAASLRRWFPGATLASAYEAGFSAFVLHRALTQAGISNIVVNPASLAVAANDKVKTDRRDSKRLAVDLADGRLRGIYVPTEEEELARLLPRTRAQLVEHRATLARQIKAKLHQFGLIAPSSRRLLSHRYLREIESWTLPPELRASLQMLAEQWRFVTRQLIEMRRLLREQATAQAAIDKVYRSVPGIGEVVARTLATELGDMTRFANERALFSYTGLTPSEYSSGASVRRGHISRQGSSRVRHLLVETAWRALPYDAVLQTMFERIAATRGKKRAIVAIARRLIGRIRACFRQGTMYAVGTLA

SEQ ID NO: 304095 - protein, 317 aa, unidentified
MVSAPVFVGIDVAQAHLDLAVRPTTETWQVPNTDAAFPDLIARLRALAPTLLVLEATGGYEHAVLSAVAAAGLPIVAVNPRQVRDFAKAFGILAKTDQIDAAILALFAERVRPAVRALPDADTAELAALLARRRQLLDMLTAERHRLAQARPAVRRSLQQHIHWLEQRVHDFDDDLSRRIRRSPVWRAKEDLLRSAPGIGPVVARTLLAALPELGRLPRRPLAALVGLAPFNRDSGRHRGRRCIWGGRRTVRAALYMATLVATRHNPAIRACYQRLLTAGKPTKVALTVCMHKLLTILNAMVRTNQPWRDALAESHP

SEQ ID NO: 304096 - protein, 334 aa, unidentified
MKQVNQVGVDVDSEALVSMMRRGGQRLPLARFANSAGGHKKFIRWATKGARPVRVCLEATGIYSLEFALALHHAKNVEVMVVNPRAMKDFGRASMQRAKTDAVDAGVILDYLERMPFTEWQRPTPEILELQAINRRIDQLHTELTREKNRRHASEFAGASADAIAHDIEVNIHHLERRIARMQDSGLQLVRGVPALAAKLAHLVSAKGIGEASAMRILAELLVLPDDLAAPQWVAHAGLDPRPYESGTSVHPPRRISKVGNSHLRAALYMPALVAIRHEPNVKAFYDKLIAAGKKPLQAVVAVMRKLLHAIWGMLKHDQDFDGNKFFKLTAKTA

SEQ ID NO: 304097 - protein, 376 aa, unidentified
MSKVRFIGLDVHADTIAVAVAEPDGDVRSMGVIPNQAESIRKLVNTLAPVEALRVCYEAGPTGYVVYWQLTALGVKCEVVAPTLVPTKAGDRVKTDRRDAEKLARCYRAGDLTAVWVPDAAHEALRDLVRCREAAKKDQLRARHRLGKFLLRRGRRPPATMHAWTQTHLAWVKTVHFEHAAQETTLLDYLHEVEHVAERIERLERAIDEAVKTAPTRMRVVIEALQAMRGIALVSAVTIVAEVGELSRFAKPRQLMGYSGAVSSEDSSGPRIRRGAITKTGNAHLRRVVIEAAWAYRYRPAVGAALRKRQTPVSAEVTAIAWKAQHRLHARYRHLLAKGKCKQEVVTAVGRELLGFIWAIGVKVEAGERTGPSAAA

SEQ ID NO: 304098 - protein, 357 aa, unidentified
MSQKLNSAIAVIGIDIGKNSFQVVGHDRRGAIVLRQKWSRGQVETRLANLPPCLIGMEACVGAHHLSRKLQLLGHDARLMPAKYVRPYSKGQKNDLRDAEAIAEAVQRPTMKFVATKTAEQLDLQALHRVRERLVSQRTAIINQIRAFLLERGIAVRQGLRFLRAELPEILAKRSDVLSPRMLRVIEDLAGDWRRLDERIEGLSGEIEGLAQQDQACLRLMTVPGIGPIISSAMVAAIGTGDVFCKGRDFGAWLGLVPKQISTGDRTILGSISKRGNRYLRALFVQAAWVVLVKLGPKHWERYGLKSWIEAAKKRLHHNVLAVALANKLARIAWAVLNKGRAFACVKTTDATASQPA

SEQ ID NO: 304099 - protein, 371 aa, unidentified
MEESSKTLYVGLDVHKDSIAVAYAPEERGTEVVSLGSIGTRQCDIDKLIRKLQSKGAPLVFVYEAGPCGYWLYRYLTRKGLACQVVAPSLIPRKPGDRVKTDRRDAMALARLMRTGDLTAIYVPLVEDEAIRDLSRGREDAMGNLKAAKYRLKAFLLRQDLRYEGRASWSAAHLRWLAEVVCPTPAQQIVFQEYVRAVTEQHERLQRLETELHEQVKPWRLYPVVTAIQALRGVQFIAAVTVIAELGDLTRFHNPRQLMSYLGLIPSEYSSGERRRQGGITKAGNSHARRALVEGAWAYRYPAKISRHLQLRLEHLPPDVQAIAWKAQVRLCKRYRQLTARGKHVNQVVVAIAREMAAFAWAIARTVPITS

SEQ ID NO: 304100 - protein, 375 aa, unidentified
MKEKLRFLGMDVHAETIAAAIAEPDGEVRSLGTIPNRMESVRKLIKKLGPVEKLRVCYEAGPTGYVLYWQLAELGVQCEVIAPSLVPMKAGDRVKTDRRDAERLARSYRSGDLTAVWVPDEGSEALRDLVRAREAAKQDELRARHRLGKFLLRSGQRPPTGVRSWTHLHLIWVSQIRFAQMAQEATRLDYLHEVEHMRERVLRLEQAIAEAVKLASPALQEVITDLQALRGIAHISAVTIAAELGQVSRFAGARELMGYCGVVPSENSSGERTRRGSITKTGNAHLRRIVVEAAWSYHRPPAIWAGLRKRQQSASEEAKEIAWKAQHRLHKRYARLAAAGKDKRKIVTAVGRELLGFIWAIGTKAEATVSQRITA

SEQ ID NO: 304101 - protein, 349 aa, unidentified
MSHTLDTDIAVAGIDIGKNSFHVVGLDRRGAIVLRQRWSRSQVEARFANMPPCLIGMEACVGAHHLSRKLHGLGHDARLMPAKYVRPYSKGQKNDFRDAEAIAEAVQRPTMKFVATKTADQLDLQALHRVRERLVSQRTGIINQIRAFLLERGIAVRQGQRFLRTGLPAILATPSDVLSPRIVRVIEDLTGDWRRLDERIEALSGEIEAIARQDIGCERLMSVPGVGPIISSAMVAAIGAGDAFSKGRDFAAWLGLVPRQMSTGDRTILGKISKRGNRYLRVLFVQAAWVVLVKPKSWERYGLKPWLEAAKKRLHHNVLAIALANKLARIAWSVLARGRGFEASKLQVA

SEQ ID NO: 304102 - protein, 472 aa, unidentified
MFNPYKRLLYLQFGFQSYLSGEILIRRGCLSYIKQGCPLLFYFKEFQMNRCKKLFVGIDISLKKFDACAIDIDSNYLLKAKKSFSNNVQGLKKLCNSIHTIANENAFTTIIIGFEATGNYGFHLPFYLNENKLLKQFELKIFQINPKLIKNFRKSFSDLPKTDLHDSYIIAERLKIGKLYPFMKYDPHYFSLRFLTRRRFQIVENIVNEKSRFISLLLVKAPGFVQNKVLSNITGATSAALMTEYASLDEIVQTPIKELTDFVILHSKNKLKNPAVIAEKIKYVARESYRPHKILHDNLNLALLSSFRHIQFLKKELKQIDKEIAFQILTFPNEYKILTSIKGIGPVFAAGIISEIVDITLFNEQKKLAKYAGLTWRINESGLFKAEETSLTKSGNRYLRYYLVEAAQSVVFYNDDFRSYYLKKKNEVNKHQHKRAVVLCARKFIRVIFSLLKKNQLYSSPKENGGKLKKTA

SEQ ID NO: 304103 - protein, 345 aa, unidentified
MMIIGCDFHPSWQQVSWLDTETGETGEQKLVQASGDAERFYRQVAAPALIGMEATGNCHWLVDLLSELGHELWVGDAAQIRASYVRQQKTDQRDAAHILKLLIEGRFPRIWMPSSEVRDLRQLLLHRYKLVIIRARVKNELQHLCLNKGVQRKRKLWSAAGQQILRELPLKPWAGRRRDDLLKLMAMLDQQIEPLDQAVQEEAQRDKMALLLQTQPGVAITALAYVLTMGDVSRFPRGKQVASYLGLIPREHSSGGRQKLGAITKQGNRMMRMLLVEAAQIAVRYDPEFRKQYLHRCHSKPKAVAKVAAARKLAVRLYWMLRTQQPYPAVVRIESSPRVPLVGAS

SEQ ID NO: 304104 - protein, 270 aa, unidentified
MNNLPPLGLDIAKLKFNACLVREGGKLRHKVFPNTAAGFAQLADWLAGQGAVRVHACLEATGTYGDSLATYLHEQGHTVSVVNPAAIKAYAQSHLSRTKNDRVDAALIAGFCSERRPPAWQPPAPELRELQALVRRLESLVEMRTMEENRLSSGIAVEAVRNSVEEMLAHLSEQIKKTEALIRSHIDSHPGLRHQRELLDSIPGIGETTAAALLAEVPDIKRYRSARQVAAFAGLVPRERQSGSSVRGRVRLSLRDWLLVEGVERFARRL

SEQ ID NO: 304105 - protein, 420 aa, unidentified
MGKRKYRAIGVKKVDWEKLSDRVRGRRVAVGGDMAKEEHYAAMVDAETREVIVIWKWDQLRESAELVRRLQSLPSSSLEVAIEPSGTYGDPFCALAQGSGLRVYQVSPKRSHDYAEVYDGVPSQHDGKSAVVLARMHLEGYSQLWLERRPLERELLAAVRAMDLYQDQYQRLVGQLEAQLARYWPEVTSLLGLETATLQELLKAYGDPAEVARDAASAAALMRRVGRLASTKVSAILESAQTTIGVEMQAGECELLRTIAREARRSQRALQGAKRRVEEFAESDPMIQALADPLGKATAAVLVATVGDPRDYGAAASYRKGYGLNLKVRSSGKYKGQLRITKRGPGVARQWLYMAVLRWLKQDEIARAWYERKVARDGGEKMRAIVALMRKLVGAMWYVARGQALDSRKLFDVRRLSVSS

SEQ ID NO: 304106 - protein, 432 aa, unidentified
MEEVTDEPLYRDRVCGIDIGKAEMYATIRVPSEKNPARRASETRSFATTKRGVLALADWLRCWQVPAVVMEATSDYWKPVFYRLEAEGFECVLADAKQVRNLPGRPKRDPSDSAWLATCSERGAVTPCFVATPEFRLIRLHTRYRRDLTDERTREKNRTEKLLESAAIKLSSVVTDLHGVTGRDIMDRLIAGDRDPKALAQLARTRARRKISELEQALEGTEFFTPAHAALLKTMLERIDWINAEIARLSQVIEELLAPYEEQLQQAESMPGWQRRAAQDVIAEAGVDMTRFRTPGHLASWAGRTPLDKQSGARKGQRRHKRGNRYIGAVTGETAVAAGKTGTREGARHRRLARRRGKAKACVATGNTQMRVFHALLSNPGMRYEDLGADWYDNQQQAARRVSRLVGALDDMGYDVTLCRKPDPGTEAAPEA

SEQ ID NO: 304107 - protein, 400 aa, unidentified
MPMLSIGIDVSKGKSTVCGMKPGGEIVYTPFEVQHTREGMSELVSLLRGSGEEVRVVLESTGSYHCPVVAALLENGIFVSVVNSLRMKRFCSQSIRRVKTDQIDAMQIALYGLAYWPELQPTRLPENTYRELQLLARQYYQMTSILIKAKVDFNALCDQVLPGMQELMNDHAGRHKLSDFVLRYRHTTHILEMGETRFRKDYCKWAEKKGYRNRERMAALIFATAQNGIPVLPNAPSTQIVITEAIRVLHTVEASRDAILTQMQALAKTLPEYSLVREMPCIGDTLAPRLIAEIGDVRRFHSKRALIAYAGIDAPPYQSGKFSANNRHISKRGNRYLRKTGYEVMQSYVMHKPANDPIFTFIEKKRSEGKSGKLAMVAGLNKFLRVYYGKVTELYRSLPQ

SEQ ID NO: 304108 - protein, 316 aa, unidentified
MDGANQVWIGIDVAKATLDLHLLPSGQSHSLPNNTAGFQQLRKLLPDPAPCLIVLEATGGYERQLVADLLDAGCRVAVINPKRARDFARALGLVAKTDRIDARVLALFAEKVQPAPVEKTPEKQVEIQQLVARRRQLIDLRTQESNRLEVTAAKAARKSIQAVLKILERQIHGIEAAIQDLVQSDDDWRHKAQLVESVDGLGGVTATTMVANVPELGQLNRQQISSLVGLAPFNRDSGPHKGKRCISGGRKSVRSVLYMAALAAMRCNPVIKAFANRLAQHGKPFKVVITACMRKLLVILNAILKSGRPWNPQFAS

SEQ ID NO: 304109 - protein, 353 aa, unidentified
MKKNSKREGGWTAGLDVGDRWTQVVVLDRVSGEQAGQERIGSSEAALRAWSARWGPMQVVLETGAQSPWMSRLLSSLGHEVIVADSRQLPLIGKSRKKTDVLDAETLARLARVEPKLLHPVRHRSEAAQRELEVMRARDVLVRMRTMAVNHVRGAVKAIGGRLPKCSTEAFPTRAVSALPESLRPSLLRILETVMELTERIKGFDREVEELGRRHPETERLRQVPGVGVVTAVSYVLTIETPERFRRSREVGAYLGLVPGVRDSGESQPQLRITKQGDPFLRKLLVQAAQYILGPLAPDSDLRRFGEALSKRGGKAAKKRAIVAIARKLAVLLHRLWVSGEPYEALRTAAGTA

SEQ ID NO: 304110 - protein, 413 aa, unidentified
MDVVVARCAGLDVHRDTVVATVRIAGRGRARTRRETRTFSTMGADLLDLGDWLTAQKVTLVGMESTGVYWKAPYYLLEDQVERCWLLNPQHMRNVPGRKTDVGDSVWIADLLAHGLVRPSAVPTRPIRDLRDLTRYRRRLVEARTREVQRLDKVMQDAGIKLTSVASRLLSKSGLAMIEAMAAGVSDPDELAELAQGRLRAKIPELRLALAGRFRVGHHGLLARRILAHVRFLEASIDDLDTQIDRLIAPFAPMLELVMTIPGVARTAGICLIAEVGVDMTIFPSAGHLASWAGICPGNNASGGRQRSGRTRRGPVWLRTALTEAAHAAARTKGTYLAAHHAQIRGRRGTAKAVGATRHDILCAYWHILATGVPYQDLGPDWIRSPQSVDAHARRLVAQLEALGKKVTLHDAA

SEQ ID NO: 304111 - protein, 339 aa, unidentified
MRLYVGMDLHSSNCYTGIIDENSKKLFGRKITNDQRKIISALSPYKEDITGIAVESTYNWYWLVDALIKEGYKLHLANPSAMKQYEGIKYLDDRHDAFWLANMLRLGILPEGYIYPRETRGIRDLLRQRSRFVVQKTSLKHTLQQIYCNNTGVILSNNTIYGLEEEEIRNALSDEYLSYNGVSILATIRFIEGQIKTIETQILNKLQGEPPYTSLTTVPGIGVVLGLTIVLESGPIDRFASAGNYASYCRCVPTTYWSNSKQKGGGNKKNGNKYLSWAFAEAANFAIRYCKEAKTFYQRKCAKTNQPSAYRAVANKLSKACYYMMKDQTPFDAQRLFQK

SEQ ID NO: 304112 - protein, 336 aa, unidentified
MNIKRIGLDLAKQVFQLHAVDHQERVVLRKTLHRARMLTFFTRLEPCLIGIEACGSSHYWARELTRLGHTVRIIPPQFVKPYLKGNKNDANDAEAICEAVSRPGMRYVAIKSEAQQSMQAEHRVRARLIHDRTALSNEIRGMLGEFGFVLPAGLSALRKALPEILSQQEKWDNRFIRLLSELTEELQALDERLNRYDRRLKQLAQEDERIRRLQEISGIGPVTASALVAAVGDAKQFKSGREMAAWLGLVPRQHSSGGKTKMGHISKRGDSYLRTLLIHGARAVLNACDHKEDRRSRWLQSVAERRNRNIATVAMANKNARIAWSVLSRGEEYRVM

SEQ ID NO: 304113 - protein, 353 aa, unidentified
MDGEVLISVDPHKASSTLAVFDPVTRTAIDGARFANTKEGYRELARFAGRWAHRRWAVEGCHGAGRSLAQRLVADGERVVDVPAKLAARVRVFSQGHGKKTDRHDAVSIGLAALDANGLHDVALDDATVTLRLLSDRRQELVSLRTQAICRLHRLLAELTPGGVRRELNATKAAAVLGRLRPRDEPGRIRRQLAMDHLGDVRSLDRRIKAVGVQITDVVATTGTTLVGIFGVGPVLAARILAEVGDTARFPDKDHFASYNGTAPIDASSGEQQRHRLSRAGNRRINHALHMAAVTQLRNPTSAGRAYYERKLAVGKTRKEALRCLKRRLSDVVFRQLVIDLQPAATAPNTITP

SEQ ID NO: 304114 - protein, 422 aa, unidentified
MKAFNPADFAALIAIDWADRKHDVCELDQQNNKTTFSVISSKPEAINAWANALKQKYNGQKVAVACELKKGPLIYALSKFKHIILFTINPSTVAKYRKAFTISGAKDDPTDAAIQLEILQQHMSKLNVITPDTESIRSLAQLVEYRRKLVQDRVDLTNRLSTTLKNYYPQALDWFNEKDSMIFCDFLLRWPSLAQVKRARKQTLHDFFNLHNSRYPDVNEKRINDIKQAESLTSDNAIIGPNLLLVECLVGQLKQLMLSIERFDHEIKSIYKQHSDRFIFDSLPGAGPQMAPRLLAAMGSNRERYQSSEEIQKYAGIAPVTERSGKKEWIHWRYSCTTFLRQTFVEWAGQSVRYSFWAKAYYEQQKSKGKPHNTIIRALAFKWIRILFRCWKTKTAYDESTYLEALKSKGSPLLKYAVESKF

SEQ ID NO: 304115 - protein, 349 aa, unidentified
MNILALNLGKYKTVFCEYNADNGEHTFGTVKTRPQEIHDLIVGRDPDRVVLEVCSIAGWVVDIAEALGKETETACAMHDAWRWKNVKKKTDREDALKLAKLSAMGQLTTVHMPQKDVREKRALIKYRQRLVKYRTSIKNGIRAIFAREGIDMIRGKGTWSQEGLKWLKGQARDLEQISDVMELWRGQLHVELGLLEAVAKSVKAVERKLDKIGTSDERVKRLQTINGVGPRLAETVVAFLDDPKRFKNGKEVGSYAGLVPRQYQSGQMERQGRTGGRGNRMLRNLLVEVCWVSLKTNPWARDTYKRLLRGSSSRKKIAITALARRLVVRCWAMLRDEQNWKDNIQKRIA

SEQ ID NO: 304116 - protein, 402 aa, unidentified
MDIEDIEVFVGIDVGKTHHWATALTKGGKKVFDKALPNDEARLRALYEKLAAHGHLLVVVDQPATIGALAVAVARDMGITVGYLPGLSMRRIADLTPGSAKTDAKDAAVIAGAARTMPHTLRAISTSDEDAAALSMLTGFDLDLARQVNQTANRIRGLYTQIHPALETILGPRLKHDAVLEVIAAWPTPTALRKAGRARIDAKLKKHGARRHAAWAGKIVSALGRQTVTVTGTEAAGTVLPHLARQLIALHSQRADVAARVETLVRAHPLHEVLTSMPGVGVGTAAVFLAETLGKTFDTGAQLASYAGLAPVTRRSGSSIRGEHVSHGGNKRLKRAMFLSAFASLRSDPVSRAYYQRKRDQGKRHNQAVLALAHRRTPTLHAMIRNNTLYNPQPATKLPTTA

SEQ ID NO: 304117 - protein, 387 aa, unidentified
MNKSNQRVVGLDVHPDSFAGAILAGGEQGNGKVVSTSIRVELKGQERWTERHTTPEDVLDLEAGGNAFGVAARMRALSRKVAILDSHQAGKIGKAYCANDRLDAIKIARIYLSGLSAVVWQPDARTLERREVFSAYQGVVKETTRLQQQLKSMLNEHCVRLGSGFRLSHPTALSRLAKLKAWSPVQLMLLTQLHSGLRAARARRSQLRRHMAGEILQDKELLRLARLCGLSLVTIYGLSAAIGDIQRFAHSNKLVAYLGLNPSVCQSGNYEGGTALKRHGRGPLRALLIQSAKKLLQVHNPLQKWGLAVAARRGRNKAAVAVARKLCVAIWHVLSGHVIGALEPLARLQTKLGKLATDFGLAQIKALGYESKTAFIEEKLYLLKSYP

SEQ ID NO: 304118 - protein, 389 aa, unidentified
MIYAGIDVAKNKHDCFITNSDGEVLFRAFTIANNLDGFNELYHKIESVMEDLTKVKVGQATGHYSYNLRYPIDKGLAAYVINPLHTNLYRKSLSLRQTKTDKVDARTIASMLMSDVNLKSYSDTSYHNEELKSLTRYRFDKVKERAKLKTSVSRLICILFPKLEKLVPTLHMASVYALLSEFPSAKHVANAHLTRLSNLLIEASKGRYGKDTAITFREAARSSIGSNMPAKSLELKHTIKLIQELNSEIDEIENEIEIIMDEITSPILSIPEINYRMGATTIAEIGVFNRFGSPDKILAYAGFSPSTYQSGQLDGAYSHMEKRGSRYLRYALYNAAKYVCHWDPAFAEYLAKKRSKVKHYNVAIPHAVKKLVRVIYHLEKTKQHYIKAS

SEQ ID NO: 304119 - protein, 352 aa, unidentified
MSHKSAPSTAVGTIGIDLGKNSFHLVGLDQRGAIVLQLKCSRAQLERRLANIPSCLIGMEACSGAHYIGRQLAALGHDVRLIPAQYVKPFLKGHKNDYRDAEAIAEAVQRPTMHFVAIKTPEQMDLLALHRVRSRLVGQRTGVINQIRGFLIERGITVRQGVVPLRKALPDILSSYTDALSPRMVNLITELVQDWRRLDERITTVSAEIESLAEQDEGCQRVMTVPGVGPIISSAVVAAIGNGAGFTQGRDFGAWLGLVPKQESTGDRTILGKISKRGNKYLRTLFVQAAHVVLARRPRAAMRGLWPWIEQASKRLHRNMLAIALANKLARIAWAVLSRGREYQPRIAPHAV

SEQ ID NO: 304120 - protein, 467 aa, unidentified
MEELFEDCHDVEVVYQRCCGLDVHKKIIIACLIILGADGKRRKQIRTFGTTTQALLELLDWLKAAGCTHVGMEATGVYWKPIYNLLEGHFELIVANARHIKAVPGHKTDVKDAQWIASLLQHGLLKASFVPSSEQRELRELTRYRTTLVEERARIVNRLQKTLEDTNLKLGDVVSDITGKSAQAILRGLLAGQTDPAVLADLARGRLKAKRTELEAALVGTIKPHHHFLLTEHLDHIHRLDQSIERVGVEIEARMGPLLPPEPEKDSHKPSQAEQAPSEEQPQAEPTGSQEPMEPATKEPLSLAQAVVLLCSIPGISQRAAEGILAEIGTNMDRFASAKHLASWAGMCPGNHESAGKRSSGKTTKGSPWLRKLLVQAALAASRTKKTYLSAQYGRLAARRGKKRATIAVGHSILVIIFHVLRDQKPYEELGSNFFDQRERQAVEKRLVERLEKLGYDVSLQPAAHAA

SEQ ID NO: 304121 - protein, 369 aa, unidentified
MTFFIGVDLHKTQFTVHVRTEEESESLDQIRQYPTTADGYTEFLARISRYKETGSDVKIGVESTGNTRFFKNQVEKAGAEVTVINTLKFKVINESAKKTDKHDASTISEFLSKDMLPESYLCGKETENIRRLLKSRERLVRSTVGQKNEIHALLVSLGLSDELRSLQSKKGRQRILDTLESNNDYVLEAQSVKLMFEIIERIEESVKIIEKQLVELTKEDEMVNRLLTIRGCGKITAWTIRAYTEDISRFASAKKYAAFCGLVPWVQDSNETIHHGKITKRGPQELRTCFVQLVLGIRRCKDTSNWRMMQRYEYMKTNKGSGKSIVAAARKMAEIVWAMLSDKKDFDVQKMIGQYKPMSLAEEALTAMN

SEQ ID NO: 304122 - protein, 358 aa, unidentified
MNEITRVGVDLAKQVIQVFAVNAAGVRVTGRALPRAKFLAWCAQLPTGCLVAMEASSSAHHWARKLVALGLDARIIAASHVVPYRLQGRSGKNDANDAAAICEAASRPHMHFVPIKSVEQQSMLCIHRLREGVKADRTACINRIRGLLAEFGMVFAQSPEVLRQVLPDAMEDATNELGGLARMALQRAYAQWQELDAHLRWCDERIAAHGKASEQVRLAEQLLGVGPVTASAVVATVGDFKQFKNAAQFGAWLGLTPRQNSSGGKNNLGRITKRGDTYLRTLLIQGAKSIVLTAHRRDDPISRWVQALRERCGWQKAVVALANKNARILWAVFVRGRLFDAHHVSTKPPGAIAAVIAT

SEQ ID NO: 304123 - protein, 417 aa, unidentified
MKKHSNSLKQSEAPAKRRKLGVVVERKPQEVMAELIVKLAGQLDVEIVPAVEGKKDGRDAVHPNLDRLTVGVDLGDQWSNYCILGLGGETLVEGQFRTRKQEVAEFFQALAMSRVVVEVGTHSAWVREIIAGFGHEVLVANPRLMEGSKRRRRKSDRIDAEKLARLGRMDPKSLHPIEHRSTEVREDLVILRARDALVKSRTELINSVRGQVKSMRGRVTGCSSVAFSQKAIAEIPEEVHETLQPLLRLIATLSEEIKTFDQRIEKLAAEKYMQTQLLRQVSGVGPVTALAFVLTLETPLRFARSGDVGPYLGLVPKQEDSGDIQPQLGISKAGDRMLRKLLVGSAHYILGPFGPDTDLRRFGMRLCERGGKNAKKRAAVAVARKLAVLLHRLWASGEVYEPLGHGSVTRPAQAVAA

SEQ ID NO: 304124 - protein, 365 aa, unidentified
MTIVDAVRPVTGGVDARLDLNVAPCPVTGGVDTHLDVNVAAALDPVGGLLGVAEFPTTLAGHRELLGWLSGFGPVARVGVEGTGSYGAGVARFLRASGVEIVEVDRPNRQARRRSGKSDPLDAVEAARAALSGRASGAAKSRDGNVEAIRALVVAKRSARSAKIQALNQIRHLSFTAPEQLRQRLAGVSRHHLAARAAGLRPATGAGADPVIAATKTALRILGRRVLALDEEKARIDALLTGLVTQTAPQLLAVFGVGVDTAAALLVTAGDNPGRLRSEAAWAHLCGTAPIPASSGKVTRYRLNRGGDRQANCALWGIVITRLGNDPRTRAYMTRRLAEGRSKPEVIRVLKRYVAREVYHRLPRT

SEQ ID NO: 304125 - protein, 347 aa, unidentified
MHVTTIGFDLAKSVFQVHGVDAAGRAVVAKALRRGQVLAFFGKLRPCLIGMEACATAHHWAREVAKLGHTVRLIPPAYVRPYVRRGKNDAADAAAICEAVTRPSMRFVPVKTAEQQAALMTHRSRDLLMRQRTQLINALRGHLAELGLVSPKGREGVASLIGVVRAEVANALPHAALSPLIDQLEVTEQQIATLDKAIHAQHRSSQASQHLETIPGIGVIGATAIAATITDPAAFKSGRDLAAWIGLVPRQNSSGGKERLGGISKQGDRYLRKLLVIGAAAVLKRARQQPDRHPWLVALLSRRPAKVAIVALANKIARIAWSVLVRGETYRAPAFVGNAAKGLAMGT

SEQ ID NO: 304126 - protein, 477 aa, unidentified
MEVVPRRCCGIDVHKKKLAVYVLPTQGESQDKPLEREFRTFTRDLRGLRDWLKGCGVSDVVMEATGQYWRPIWNVLEGEIQGLMLVNPQHVKALAGRKTDRIDAKRLARYLERGELVGSFIPPRPIRELRDLTRGRVHLVEEINRVKNRMSTLCEAGNIKLSSVATDLFGVSGRHMLRALADGDCDVGAMADCARGRLRQKRQELSLALEGDFSHYQRWALRQQLTHLEFLEGQLAQLQAEIAKRMCPYEHQIRRLITIPGVDRLVAYTIIAELGPDMRVFPDARHAASWVGMCPGNRESAGKQMSGRTRKANPYLRRDLCQAAWAASHTKRTYLAALYRRLAVRRGHNRAIFAVAHQILIVAYQMLILDEDYREQGGNHFDLQNKPKVVNRLVDRLTSLGYKVMLCPASAPPPTSFRPPEPSAVVEPELMPALLEPPVKRRPGRPCKCALRGITCTHKSAAPTSIPADLRKPTPSG

SEQ ID NO: 304127 - protein, 510 aa, unidentified
MTASTTRRQPASATAPSGQQAQAQAQRQAYHRRQTRAKAKSEAVRHKEAAQVQALPVLRPHAAGIDIGSRSHWVCVGFTSEGNSGLIQEFPSHTDGLKALAAFLREHQVTTIAMESTGIYWVPLYELLQAEGFEVLLVDPSYSHQLRGRPKTDRRDCQWIYRLHSVGLLAAAFRPDEKTCPLRAYLRQRANVVRQASKHVQHMQKALEQMNLKLTEILSDITGVTGRSILRAILRGTRAPEKLAKYRDKQCKASEAQIAQALTGSYREEHLFELKLAYEAWQFSLRQVEQADAQIALQLGRMKCDRALPPLKRKARPKRRVISPGFDVRTALYYVAGLDLTEIEGISELTALTLISEIGPGVSRFATVKKFCSWLGLCPNWKKTGGRVQSSRTRRGVNRAAQALRLAARSLHHSQGALGGFLRRMKGRLGTQAALTATAHKLARIVYLALKHGMTYVRQSQEEYVAQMREKQIKALRRKARQLGLEIVEKPSGSITPAEAVAAEAASVQG

SEQ ID NO: 304128 - protein, 411 aa, unidentified
MHQKQKYIYVGIDTHKLTHTAVIINCWGDKLGEITIENKPSKFNDLLLEVKKHAKRKTAVYGLEDCGGVGRALAVFLLGEKKLVKEVDSSLANVERKALPIYHKDDSFDALCVARVLLSRLDELRNANPQDLYWTVNQLVQRREALVRSSSALKSQLHVQLAHNYPSYNKFFFEIDGKTALAFWEKYPSPSKLKTATLEELTELLVTNSHNYYTVKKAVQIIETAENDNVREVPEFQYIRDFLVESMVKEIKFKDDELTKIEVEIKLIVDKMGYKLHTMTGIDIVTAAKLIGEIGDIERFPTPAKLAKYAGVAPITYSSGQKDKQLKNQQGNRILYGIFHLLAVHQIILDRNTKNPRNPVFREYYEKKMSEGKTSGQAIICIARRLVNIIWGMMKNKSEYKIPNLLKQNTK

SEQ ID NO: 304129 - protein, 401 aa, unidentified
MASMTSEIALTQPVRAVFGGIDTHKDIHVAALLDSDGGLVGSASFPTTRAGYRQLQAWMHSAGVLGRVGVEGTGSYGAGICRQLSAAGTEVVEVNRPDRAERRRRGKSDVLDAAGAAEAARTGNRITIPKSRDGQVESVRVLRLDRASAVQARTKAIQLMDQLIVTAPEQLRDQIRRLSKMRLIRSCAAWRPDPAAAADPVVATRIALKKLACRYLQLNEEVTALDKLLGGLVAEAAPQLITTFGIGVDTAGQLLITVGDNPGRVHSEAAFAMLCGVAPLPASSGKTTRHRLNRGGDRQANRAIHVIATTRKRCDPRTRIYLKNKIANGHTKREATRSLKRLIAREVYYLLHPEGLTPGPVPPSRPNRRRAGAVKVEPPTRGTTLTAPSTGTSSKMEEPAA

SEQ ID NO: 304130 - protein, 411 aa, unidentified
MGFGDHTRLLRIVPSGSFQKGGPHLISVGIDVAKRAHEACFMDAEGQEIGRPLRFPNTAGGVATLSDRLRGLEQPVSIALEATGHYWLALHERLTREGFQVQVVNPIQTDAYRRTTVRKVKSDRRDSWIIADFHRIGRVRRGYVPDAMILQLRELTRFRFKLVDQVGDAKRKALTILDRVFPEYERLFSDVFIVSSREILRTAASAEEFASFDIEELTALLQRSSRGRFGKDKAQAIQMAARNSLGLSKLGSAATLELNCLLDQIEFLEGQIAQVEVAIEELITAQEQYLTTIKGLGPVLAASILAEIGDISRFSRLESLVAYAGIDPAVYSSGEFTGTQAKLSKRGSPYLRRALWLAATSARRFNPDLQEYFERKIRSGKPYGIAMSAVCRKLLARIYVVLKENRPYEVH

SEQ ID NO: 304131 - protein, 379 aa, unidentified
MDHANTGTPAETILRGALELSKNSWLLALHFPDRAQPSLYPIRGGDTVGLMEKLTAARDRWAKVSGKAPSIVLCYEAGYDAFWLARFLKARGIECLVVDAASMQVNRRARRAKTDRIDVGMLLRALIAWGQGDRHVWSVVRVPSVDEEDLRRSHRERDRLVRERTAHINRIKGLLFGQGIRGINVKSKYKTLQIDKLVTGDGCPLPPRLASEITREIARLALIQEQIATLERERDQAPTPCKATEKKRVQLMCLTGIGPAIAAVMTREVYYRQFDNRRQVAAFLGLATSPHDSGDVERSQGISRAGRGQVRGTMIQAAWLWLKHQPKSAITRWFVQRTAGQSGRIRRIMIVAVARKLAIALWRFLEQGLVPQGAMLANR

SEQ ID NO: 304132 - protein, 412 aa, unidentified
MQVVYARCAGLDVHKKTVSACVSVCEPEGGKQQQMRVFGTFTSDLLALADWLKEQGVTHVAMEATGIYWRPVWAVLEGQFQQMLVNPQHIKAVPGRKTDAKDCEWITDLLQHGLLKGSFVPPTPIQDLRDLTRYRAELRQSQNRVANRLQKFLEQANIKLSSVASNALGVSGRQMLKAIIAGQEEAGQLAKLARGKLKNKIPELERALEGRIRDHHRFLLAEYLDEWEAFGERIARLEAEIDKQIRPFEPAAALWQTIPGVDRVTACNLVAEIGVDLKQFPTAAHLASWAALCPGNHESAGKRKSGKTRDGNKWLRRSLCQAAWAVTRKKNCYLSAQFKRLAARRGVKRAVMAVAHTMLIIGYHMLKTGRSYHELGGNYLEQINKDQLQRYFVKRLQRLGLKVTVEPVLEAA

SEQ ID NO: 304133 - protein, 348 aa, unidentified
MESMTYIGLDLHKRSISYCVKTASGKIVDEGTLASSRMTLVEWAEELPGPWVGAMEATIFTGWVYDALLPYASGLSVGHPPMLKAICCSKKKGDKIDARKLADLLRCDLFPECTMLPKATRDLRRVLRFRNQVVRQLVRMKNTISGLLMESGQSYSKRKLHGKRYFAELLANLEDVPAAVLELLGLSHGAMEFFSSMQKELVAGLVAQPLLRERVALLMTIPGVGEITALTWALEVGDPGRFGSVREAISYCGLCSAHRESGGKEYRGPISKQRNKHLQTMLVEAAKIAPQWSEALRAIRDRERMRGHHNRATLVVARKLVSYLLAVDRRGTGFETSASRAGGEVRAA

SEQ ID NO: 304134 - protein, 395 aa, unidentified
MFIVGIDIAKRSHEAIIIAEDGQVVRKAFSFRNNCTGYNLLLEQVRRLTLVKSQIVFAMESTAHYWLALYARLLKDGYTVMVLNPIQSHSLRELYIRKAKTDARDSLIIADLVRFGRCKASNVPQDKILALRELCRSRAYLVDMAADLKRKLIALLDRIFPEYESLFESVFSKASIAVLRKYSTPQKVKNANLRKLTDLLMESSNGHFGERKAHQLKEAACSSFGIDDSGGVYSTLLGMFLEQILSLTAQADSLEKQISVFFQEFNNPLTSIPGVGTVLAATILSEIGDITRFSSADKLLAYAGLDPSVKQSGEFKSNQNRMSKRGSPYLRRAIWLASTVAVHRDPMFQTYYEKKISEGLHYMNVIGHVSRKMTAVIFAVLRDGQPYQPILQSAG

SEQ ID NO: 304135 - protein, 417 aa, unidentified
MTANSLMQRRSAIKPDTLIVGIDVAKFSHVACTLAPGGAIGRPVEFPNSREGFVALAAEIEARKPTPASAVIVGLESTGVYWINLARWLAEQGYQVVQVSGLYVHHAKELADNSRGTSDGKDALLIADLVAQGKYLGFVRPAGVLADLRQLVGLRQRLVRERAARYNLLHQSVDLLFPEFPTVFKDVTGSGARRVLRRFPTPAAALVNPPDEMRRLLSQDGRVQASVAKLARLQVVARQSIGAREGTAGIEYALNDTLLELDSLDTRVKQVEAEIDRLLAQVDETPILTSLVGPMTAAAILGETGGLRQYSCAAAVLKLAGFNLYQISSGQYCGDRHISQMGRPLLRQALYLAVLQHTHPGMPLYPYYAELVRRGKPKPVALIALCCRLVRLLYALVRDGRCYSPRPPDKNQQTQAA

SEQ ID NO: 304136 - protein, 365 aa, unidentified
MNATAALPVVGIDVANSVFQLAVADGAWRVTEQHRLTRTQMERWFANRSVGLVVMEACGSAHHWGRWLNALGIEVRLLPALYVRAYVKRNKTDAADACALLEAARCADIVPVKVKSVEQQALQGLHRTRSLWMGTRTSRINALRGFCREFGIVIAQGARLGVERIARVLADPHSAVPELIRGTMKLLVEEIRLLEARIAQLERELTVVARASGACTRLLTIPGVGLLTATAMVAATSGSVQHFRDARHFASWFGLTPKERSSGNVRHLGRISKRGDRYLRMLLTHGARSVLNAAGRAVQIGKTVDGLRHWALAVQARANHNKAVCALANKLARICYATLRDAQPYGAPVRRPNKKIERTSFEIAA

SEQ ID NO: 304137 - protein, 342 aa, unidentified
MNKVNTIGVDLAKNVIQVSILSPSNKELTNKELARTKFAEFLAKQPVSLVAFEACSTAHHWARLARNCGHQIKILPAKVVSTFRQGHKTDKNDALAVAEAANRPNVKEAPLKELEQQGMQSIQRSRELLVQNKTCLSNHIRGLLMEFGVFIPKGFASLFKNIPDILEDGENDVPVMFRATLNLMYQRLLDLRDDVALLDEQVKQLVKNNEACSNLTNMEGVGPISAILLFSTLGTGEAFKNGREFSAYIGLTPKQHSSGGKASLMGISKFVANKRLRSVLIQGARSYVHRMKSVTTKKDEWLVKLIERAGYGKAAVALANKNVRTAWALLTQGTEYRKELIA

SEQ ID NO: 304138 - protein, 355 aa, unidentified
MDSVKYIGLDVHRDTISVAVVDQSGRLVMQSVIPTQASAILDCVSGIQGSLHVTLEEGTHSAWLYDLLVQRVKKLVVCNPRKNALLKSGSKSDAIDARKLAELLRAGMLSPVYHGENSALEVQHLARAYAMLTDDTTRTMMRLKAVFRSQAVVCTGRKLYGKRHHDDYLKELDQDGPRRRAEYLYQELDGLQKLRRQVRHELIVACRKHPAAKWLQSVPFLGPLRTAVLIGRVKTPHRFRSKRQFWAYCGLALETRDSGEYCVVNGQVERRKRPVLVRGLNWNHNHELKNLFKGAATTASAGSGVFQQFYLGLLNKGMQPEMARLTLARKIAAITLKIWKKGEAFNPEHLKSQAA

SEQ ID NO: 304139 - protein, 339 aa, unidentified
MSIIGCDLHSRYQVVALVDTGTGEMVTRRLEHENGEARAFYATLPKPSLIGIEATGYTHWFERLVAELGHELWVGDPAEIRARAVRRQKTDTRDAEHLLDLLLSKRFPRLWVPTPEERDARQLLKHRNKLVRMQTSVRNQLHFLAMSQGVCRKQKLWSARGRAELEGLSLGTWASRRRKELLETLDQLGPRIAELDQAVKTEAERRPEAVELMKHKGVGPVTALAFVLTIGPVERFAHSRALVSYLGLNPSEDSSGGHQRLGHISKQGNAMLRWLLVEAGHSAAQFDPELRRKYRRLVFRRGRNVAKVALARHLAVRLYWTLRQASSATPPVRTPGSPK

SEQ ID NO: 304140 - protein, 451 aa, unidentified
MSSRSIKSAGLPVINDRAAGIDIGARFHVVGVPPELCDQPVQTFQAFTGDIERMADWLVSIGIKTVAMESTGVYWVPVYEVLQSRGIEAIVANAREARTVPGRKSDVNDAQWLQRLHACGLLRASFRPAPDIAALRSYLRLRERHLDYAAAHIQHMQKALTLMNLQLHHVVSDVTGTTGMKIIRAIIGGQRDPEILATMRDVRCKASTETVRAALVGNYQPEHLFCLGQALALYDFYQACVEECDVQIQRTLANLNADKSSPVAPLPKPRHKAKQPNAVSFDTRPAMYQLTGVDLTQIHGIGPYLALRLVAECGTDLSRWPTVKHFTSWLTLAPGCKISGGKVLSAHTRKTTNRVSAHLRLAAVTVGRTDTALGAFYRRLAARVGKAKAVTATARKIAVLFYNAMRFGMHYQDPGADHYERRYRERVVKQLHRRAAQFGFTLQESAPQSVS

SEQ ID NO: 304141 - protein, 352 aa, unidentified
MLIIGCDFHPGFQQVAIFDNRTGEIEEKRLQHRAEAEQFYRSLAGQEVLVGMEACGHYPWFERLLEELGMELWMGDAARVRAAEVRKQKTDRRDAEHLLQLLRENRFPRIWVPSLEVRDVRQLLVHRHKQVQARTRTKNQLQALALSNGVQKKYKLWTKAGRAELEQLPLLRYAAERRKRLLEALDGLEAEISELDRRVAEEARQRPEAVLLMTHPGVGSVTALAMVLTLGPAERFGSAKQVGSYFGLIPSEDSSGGKQRLGRISKQGSSFLRFLLVEAGQTAARLDPQLKRFYRRLAARKNRSVAKVAVARKLATRLYLMLREDWTYAQLNQAVMQVSPSHSVAGKQEPSA

SEQ ID NO: 304142 - protein, 382 aa, unidentified
MSQNIIFGIDVSSRSSTVCVVIDRVKQGNSFTITNDSFGYQDLLDHLNQYLITPLVVFEATGVYSLSLQAFLEDHHIKYLRLNPLQAKKLMDNNLRHNKTDKLDAYHLALIQFSAPQKLQAPQSREYHELQAASRYYEELTRALIVNKNQLHRNLQSTFPQIEHILSNPSGKIYWTIVSLFPHAQYVLDMNEDQVKQRLLSISGIGRQRAQYLTARLYAFARQAYPYDRKDGITVRAIQRTISNLLSLSNERDQVINYMEKLTKVVNARALTIYLSIPGIARTTALRLIAELGDLRRFNTSAQIDAFVGIDPGRSQSGDKDSRLGITKHGNHIARKILYRVITQMETVRATQPCHITDYYDKKSNLLIAQATRRLPSHPCIN

SEQ ID NO: 304143 - protein, 449 aa, unidentified
MPKRQGKPEGLPIVHARAAGIDIGSRFHVVAVGSDLSDEPVQTFEAFTADIQRMADWLIAVGVKTVAMESTGVYWVPVYEVLESRGIEAVLVNARQARAVPGRKSDVNDAQWLQRLHACGLLHASFRPGRDIAALRAYLRVRERHLDYAAAHIQHMQKALTFMNLQLHHVVSDIAGETGLKIIRAIVNGQRDPKVLATLRDVRCKASVETICASLVGNYQPEHVFALTQALTLYDFYQLRVAECDAQIEGVLTLLAAQKPHPPTSLPKARHSTKQRNAVGFDVRALLYQLTGIDATQIHGMGPYLTLRLVGECGTDLSRWPTAKHFTSWLTLAPGCKISGGKVLSAHTRKTANRAVALLRLAAVAVGRTNSALGAFYRRLSARIGKAKAVTATARKIAVLFYNAMRFGTQYQDPGADHYEQKYRERVIKQLRRRATEFGFTLQERASVS

SEQ ID NO: 304144 - protein, 412 aa, unidentified
MEVLYACCCGIDVHAKMLVACVLTQGKKAVRTFSTMTEDLLHLLDWLSQEGCTHVAIESTGVYWRPVFNILEGAMEVILTNARDAKGYKARKTDVIDAEWLADLLRHGLLKPSFIPPLPIRELRDLTRYRESLVREQTARANRIQKLIESANIKLGQVASDALGVSGKAMLRALAAGETDAEKMSHLARRTLKRKQPQLQQALEGRFTQAQRWILSQLLDQYDHVEAALQRAEERIRQEVENSADPFVPEAVPLLDTIPGVGETVAQILVAEIGVDMERFPTANHLASWAGMCPGNNESAGKRKSGKTTKGSRYLRAALVQAAWAASHQKGTYLAAQYKRLVKRMGKKKALVAVGHSILVIAYHVLQNRTRYQDLGGDYFERRNVDKQRKRLIRQLESLGVKVTVEEVKEAA

SEQ ID NO: 304145 - protein, 402 aa, unidentified
MNCVGIDISKGKSMIAVMRPFGEVVVSPFEVLHTDSELSKLARLLKSLDGETRVVMESTGNYHAPVAWLLHDAGLYVSVVNAMLVHDYGNNSLRRAKTDKKDAVKLANYGLDHWLTLPRYVPEEDTRLMLKSCYRQYQQYSKVRTMLKNNLISLMDTAFPDANRLFTSPPRADGSEKWVDFVAAFWHCECVCGLSEKAFTAKYQKWCKKHGYNFSEDKALDIYASACGHFGVMPKTDTAKLLVEQAISQLRATSAALAALKQEMQSLAASLPEYPVVMEMFGVGPALGPQLMAEIGDVRRFHSKKALVAFAGIDAPPYQSGQMDIRSRSISKRGSASLRRTLFLVMGVLLQCAPMDEPVYQFMNKKRSEGKPYRVYMMASANKFLRIYYASVKAYLDSLEHD

SEQ ID NO: 304146 - protein, 407 aa, unidentified
MELVALYKRVIGLDVHQAQITACALIEECDGTTRIEQRQFGAFKKDRRALAEWAAQLRPDEVVMESTGIYWKSPYAVLETVGIRAKVVNARHVKNVPGRKTDISDAQWLATLSRAGLLRASFIPPAKMRELRLIARQRQKLTGQLASEKNRLHKVLADSGIRLGVVVSDVHGQSARAMVKALIANKTPHEVLEFATRRLKAGREELFDALQGELTDSHRFVLDELMRHIEEIEQRIARFDQRLLAGLEGEHNWLALLQTLPGVDLVGAAMLLVEIGTDMDAFGSADRLASWVGICPGNNESAGKRKSGRARKGNSYVRRLLCEFAHAASRTTSAFKAKFQSLFVRRGYKRSIVALGHKMLRTIFFMFKRREYYRDCATDYEALSVQRNAARWIKALTRFGFIKPTEV

SEQ ID NO: 304147 - protein, 341 aa, unidentified
MQITTIGLDLAKNVFQVHGVSAVGDVVVRRRLRRAQVREFFAVLAPCLIGMEACGTAHFWARELVALGHEVKIMPPSYVKAYVRRGKNDAADAEAICEAVRRPNMRFVPIKTEDQQAALMLHKSRELVVRQQNMLVNALRGHTAELGIIAPQGRRKIEDIIAVIEDAEDESIPALAKLALRPLVEQLRASEEAVAALDAEIKAWHKGNEASQRLATIPGIGFLTASAIAAMVPDPSFFRSGREFAAWLGLVPRQNSSGGKERLGRISKRGNRYIRKLLVLGATSMLRHARAKSAPGTQWVNGLLERRPPRLVTVAMANKTARIAWALLARQEVYRAPSPAA

SEQ ID NO: 304148 - protein, 412 aa, unidentified
MQAIIERCCGLDVHQGTVVACLLIGAPGAQPTKEVRTFRTVTRDLEALRDWLRAVGVTHVGMESTGVYWRPVYAVLEGHFELIVGNARHIRNVPGRKTDVKDSEWIADLVRHGLIAKSFVPPRPLRELRELLRYRRKLVESQAAERNRLLKLLETANIKLASVASDVFGVSGRAMLRALIEGEASAEAMADLAKGQLRRKRADLILALDGRIEEHHRFLLAMQLRRLEAIEADIATLDLRIGERLEPYGPQHALLMQIPGVDWLVAAVLIAEIGVDMSVFLSVYHLAAWAGVCPGSHESAGRQKSGRARKGNIHLRTILVGAAISAARTKGAYLKDKFHRLKARRGALRAALAIAHKILVSAYHMLAKNLPYRELGEAYLDQIGQTRTVANLKRRLQRLGYRVTLEPTVQAA

SEQ ID NO: 304149 - protein, 373 aa, unidentified
MPKYSTAFGMDVHLRSTTVCALDADTGEAVTRRFPGNPWGEIAGWMDGFPGPSLAAYESGYLGFAPQRELAGLGVECVVAAVSKIPRSAADSASKNDRNDAARMAKAILAHDISPVWVPSPEVEGIRDLAGAYDGATARLATAKQRLLAFLAKRGFVYGGTTPAGNPRKYWTYDFLRWLDKVRPEDDGGVRTLAALRSEVEAAAEARADLLSEYRAAVDASPIAAEASALQSIKGCAFALAAAFASEVGDFTRFRSGRQVTAYFGLAPSQRSSGDSVRLGGISGAGNALVRKLAVEGSWCYAAARHQPKLMPRDTGVPLEIRMHGRKGSERLLRRREEMLARGMPAAKANAATAAELVRWLWALGTMCREGAE

SEQ ID NO: 304150 - protein, 358 aa, unidentified
MSKVKELNFDGQTIYCGLDVHKKSWRVNIRSDEFELEDYSQDASGTLLLEHLKKRYPGAKYEVAYEAGFCGFGIQRSLQKAGVVCMVVNPADVKSSHKEKMRKNDKIDARKISRELSKGELEPIYIPAIEMEHVRSLVRQRGRLVTDQTRCKNRIWQLLMFSGLKLEASIDKPDQHWSRKFIESLKQLSCETTWLRQTLDLAIEEYLLIRKLLSMATKQIRSLSTQPSFATTQKLLQSIPGIGIVNAMVIMSELQDIRRFKTLDSLCCYAGIVPDTASSGDNEKVKGITHRSNHYLRPAIVESSWVIIRKDPAMLMLYKKYCSTMIQNKAIIKIAKHLLSRIRHVWSKQEEYEIGIVG

SEQ ID NO: 304151 - protein, 314 aa, unidentified
MDDTATVPTRFIGCDVGKAEIIVFDSASGKTTSLPNRADALAAFAASLDPAALVVCEATGGYEAALLDAMVAAGRAAHRADARKVKAFIRSLGILGKSDAIDAKALAQYGRERHDRLTRWQPREQHRDQLQLLVSMRRDLVRQRVAHRNRLQAPGAAPVAARLQRIIATLDAEIAGIDADIRALIDACDTLAQTVHTLTDIAGIGQTTAAQLTALMPELGSLNRKQAAALAGLAPHPKQSGTNNAYRRTRGGRPEVKHTLFMAALAAARHNPTLNTFYKRLISNGKKPIVALVAVMRKLITIANARLRDNLASI

SEQ ID NO: 304152 - protein, 344 aa, unidentified
MDYYAGIDVALKDSSVCVVDATGRILREAKVASEPEALVAWFRGLGLEVTRIGLEAGPLSQWLHAGLSEAGFEAVLLETRHVKAALSAMVVKTDRKDARGMAQLLRMGWFRPVHRKTLDAQEVRALLVGRKLLQSKLRDVELSIRGILRGFGLKVGEVTKAKFAARVRELAAGQAMLETVTAAMLTARESLLAEFMALHRRMLALARADAVCRQLMSAPGVGALVAITFRTAVDEPGRFRSSKSVGAHFGLTPKRYQSGETDVPGGISKVGDAMVRTALYEAANAVLSRPLRFSGLKRWALAVAQRRGLKRAKVALARKLACILHRMWRDGSEFRWGQEAAAAA

SEQ ID NO: 304153 - protein, 335 aa, unidentified
MKHYAGLDLSMESTQVCIVDENGRKLVSEKVESSPEAIAMMLERYGAIERAVIETGRMSPAICLGLRELGVPVVCIDARQAHQSLKAMKANKTDPHDAAGLAQLARTGFYKEVHVKSPAAHGVRSAITARSHLVEARVRLDNMIRGLCATFGYRPGAGQGKASLERIMQAVHIPGLGDAITSLLSVRAELVEQIKEMDRRLRIIASQSQACEILMTIPGVGVQTSAAFAAAVDDAGRFRQSRNAGAYFGLVPRRHQSGELDWTGRITKQGDSMVRKLLYEAANSILTRSRETFALKTWAMKIAKRRGLKKARVALARRLAVIMHAMLRDGTLFQA

SEQ ID NO: 304154 - protein, 321 aa, unidentified
MTKNTTILGIDISKDSFDVYDQVHGHGQYSNDVKGFRLFMKSMKDTSWVVMEATGSYHHRLALFLYEQGIPVSVVNPLVVKRFIQMKLNRVKTDKSDARMICLYGAEQTLELWNPDPEYVEQCKLIQSTVQLYFKQRTALKNKLHSLKSKGQTKGKVITSLKRQLRGLDKEIVFLEAEMESLIKVNEPDLYTRIKSIPGLGKKTAILLIVATNGFKDFESSKQISSYFGLAPHERSSGSSIKGKTRIGKNGHPIIRNHLFLCSFTACMYNPQCKALYERIVAKGKSKKLALIAVSNKLIKQAYGIAKSGVPYDGNYRSKLA

SEQ ID NO: 304155 - protein, 361 aa, unidentified
MDDGSRSKPSMTVGIDLGDKYSHLCLLDNESGEVLEEGRLRTTPEALRRRFSSEQQPLRIAIEAGTHSPWVSRVLEQECGHKVLVANPRKTKLIYSDKRKTDEIDAENLARLARVDPKLLYPLKHRGESSQAHLAIIRSREALVGTRTQLVNHVRGAVKSFGARLPKCPARSFHNKVLEHVPEALWPAVEPILETIGLLTERIREYDRQLEMICQEHYPQTELLRQVEGVGALTALTFVLTLEDPYRFEKSRTVGAYLGLVPARDQSGDRDPQKHISKEGDEMLRKLLVGSAHYILGPFGSDSDLRRHGEKIASRGAKNAKKRAVVAVARKLSVLLHRLWVTGEIYEPLYNAHRRAEQQAA

SEQ ID NO: 304156 - protein, 355 aa, unidentified
MKRSSKYVGLDVHQATTVSTVRDDGGHVLARSVVPTEATALVEYFHCMRGEISVAFEEGTQAQWLHDLLVPIVHRVVVCNRRGQSQQGNKGDQPDADELSDLLRCGRLRAVYHAGAGRATLKELARTYLNLVEDSTRVMQRLKALFRARGIRTPGRQVYEVNERSEWLRQLPNDGVRFRARTLYAELAVLQALRPAAKQAMLREARQDPAWTTLRSIPFLGPIRVALLLATMQTPWRFRTKRRLWAYAGLAVVRRTTAEYELDAGRQIRRRPRAAMTRGLNRNHNRIVKDVFKGAATAAATRAGALQDWYEELIGRGMREELARVTLARKLAALTLRLWKQGARFDATLLSTQAR

SEQ ID NO: 304157 - protein, 342 aa, unidentified
MTIVTIGLDLAKQVFQVHGVDETGRAVVRRQLRRAEVVGYFEKLSPCLVGMEACGSAHHWARLISALGHDVRLIAPSRVKAYVQRGKKNDANDAAAIAEAVTRPHMTFVPVKSEGQQGVLMLHRSRDLLIRQRTMLINALRAHLAEFGIVAAKGLSKAKGLIAGLDAAEIPELARMALRQIAEQIDACDKHIDALEAQIVAWHKADEASRNLATIPGIGPITASAIAASVPDPTVFDNGRKLAAWLGLVPRQNSTGGKDRLGSITKAGNSYIRRLLVLGATSVIRYARTKAPGEADWLKRLLERKSARLASVALANKMARIAWSVLKRREVYRKDFPIPAVS

SEQ ID NO: 304158 - protein, 375 aa, unidentified
MAKSGILARSHDLQESFTATAGEIPIGIDLGDRFSHCCVLGADGTVLTEGRVVTTPDGMARHFQQLPPTRIAFEVGSHSRWMSELLANWGHEVILANPRNLRMISDSIRKSDRVDAHTLARLARIDPQLLSPIVHSNPQTYSHMTLLKSRDLLVRTRTRLTNAIRGVMKAVGLRLRSAGGTTFPSRTALLVPEELKQSLLPLLETISHLNKQIYQFDKAIDRVARERYPETARLRQISAVGPVTSLQYVLTIGNPNRFAHSRDVGAYLGLTPRRRQSGDVDQQLRISKAGNRRLRSLLVQCAQYLLGRFGPDTDLKRWGARMSERGGKNAKKRAIVAVARKLAVLLHRLWVTGDTYRPLHNAMGCSPGSTLPQNS

SEQ ID NO: 304159 - protein, 339 aa, unidentified
MNEVTLIGIDLGKHSFHLHAQDATGRMVFRKKLSRQQLLRTLANVPSCRVVMEACAGSHWLARQLAGMGHEPRLISPQFVRPFVAGNKNDFGDAQAICEAACRPSMRFVSPRNEAQQTVSALHRLRERLVRERTATVNQMHGFLLEFGISLPRGAALMSRLPTVLDHETLPPRLVALVVRLRAHVHYLEEQIRQVEQDLKAALREDDKSRRLLEIPGIGPITASALAVELGDARQFANARQFAASIGLVPRQYSTGGKPTLLGISKRGDRNLRRLLVQCARAVMQHTDSRTDALSLWVKTLSTRRHSNVVACALANKLARIAWAVLARGTHYEARALTT

SEQ ID NO: 304160 - protein, 484 aa, unidentified
MFSESQDDEQIIERVAALDIGKAEVVCCVRLPAPGPGKRRVQEVTTHTTMTRSLTELANRLVGLGVERVVMEATSDYWRPPFYLFEAHGLQPWLVNAKDVKHLPGRPKTDVLDAVWLCKVAERQMLRPSFVPPHEIRRLRDLTRYRVDLVGARNAEKNRVEKLLEDACIKLSVVASDIFGVSGRAMMAAMIAGERDPKVLADMARARMRTKIPLLEEAFTGYFDDHHRFLLARMLGRIDAIDADIDALDAEIEAYLVPFADAVDRLDEIPGIGPTAAAIIIAEIGLDMTRFPTPGHLASWAKFAPGIKSSAGKNKGNGSTGHGNRYLARVIGEAAVSAGRTNTFLGARYRRIARRRGKKKAIWPWAAPCSSRSGTSFPILRPASSTSAPTTTTAWSTPQPRNATTSDNSKPSATASPPNPPNPPPEPSTVRDHNLTNDSRLRRELSRANHRSIFGLDCPKLFTFHAPESFSSAAPSTTPNPEYR

SEQ ID NO: 304161 - protein, 401 aa, unidentified
MNAVGIDVSKGKSTVAVIQPFGVVIAEPFDVFHTDSGLKELVNFIKSLSGETKVVMEYTGTYYEPVANALHNAGIFVSVVNPLLIDDYDTNRVRKVKTDKLDALKIASYALDKWIKLRKYEPAETVRKTLQIMNRQCIKLNKILVMQKNSLIALLDCCFPNANTLFTSPRRVSDGHEKWVDYVVKFPHVDSVAKLSLSAFKAKYQSWCKKEHYNYSESKADQIHAYARTIVSTLPMTEAVRKMVSDAAKLLNSTLEALGTLHSEMDALASQLPEYETVMNLYGVGKVFCSQLIAEIGDVTRLKSNKSLTALAGIDPPPDQSGKDDPKSRRISKRGSPALRKTLFLIMTIYLQNQPVGEPVFQFLDKKRAEGKPYKVYMIAAAHKFLRIYYARVKEVMPVQY

SEQ ID NO: 304162 - protein, 341 aa, unidentified
MSKVSTYIGADLHKKTCYLTVMSKEGTIKKQTEISTKTDEIRKFFKGYKGVPVAVESTLNWMPFYENLESLGCKVSLSNPLQTKAIAAARIKNDKVDSKVLADLLRTNLLPTAYIQPREIRDLKELVRQRINYVELRTRIKNKIHSVLFKTNIQHDFSSLYGKAGMEFLRTVKLRNIYREELDRYLATLDLLNRQIKELEEIITSTAEVDYDCKLLMTIPGISFFTALVVKSEIGDISRFSNANKLCAYAGLIPSTYQSADKIRFGRITKRGSKWLRKALIDAITSGSRNTNKISVFYRKLKKNKGTGKAKVAAARKLCSIIFAMLTDKQPFREFTPVKQR

SEQ ID NO: 304163 - protein, 413 aa, unidentified
MEAIHQRVAGMDVHRMEHVVTILLAQEDGTVLRETRTFGGFKRDMRALIDWLRSHRIELVVMESTGIYWKSVFSHLERAEIPALVVNAFHVKKVPGRKTDVSDSEWLAQLARFGLLRGSFIPPKDLRELRLLSRYRRKLAQALAGEKNRLHKLLDDAGIKLGSVVSDIDGVCARQMVEGLLAGRTAAELAALGRGKLKSSEEVLTAAMDGDLSPRHRLVLTMALEHMRHLERQLARLDRYLLTAMKPYEWAWRLLQTIPGIDEISAAMILIEIGDTMARFGSASRLASWTALCPGNHESAGKRKSGKTRHGNPIVRYLLCEIANAARRTKTVFQAKYHSLVIRLGHKKTIIALAHKLIRTIYFVLARRQPYQDPIVDYEAAMVAKNAPRWIRALKKYGYWPKAPAAQPVTAAA

SEQ ID NO: 304164 - protein, 353 aa, unidentified
MKTYYVGMDVHRASIMIVVLNGAGKVVMQSVIETGAERVRGFLKQLRGKVSVTFEEGTQANWLHEVVRPLVTEVIVCDPRHNKLLQSGNKNDRVDAQKLAELLRNGSLKAVYHGDHGVRTLKELVRTYDCLVSDTTRVMNRLKANFRGRAIACGGHDIYRQDRREQWLEKLKEPGAKQRAGFLYEQLAALKPLRHKAKLAMVKEVGRQTAYLWLMSVPKLGAVSVAQLIAVVGTPHRFRSQHQFWTYVGLAVVTRSTADHEVVAGVLRRSKRPVSTRGLNRNHNHLLKRVFKNAATSACHSGPFKAGYEARVLQGMAPSLARLTIARQLAATTLALWKRGEQFDPERKKQQTV

SEQ ID NO: 304165 - protein, 415 aa, unidentified
MKKHNYRAKKVNDINWPQLRQQFTGQALVFAIDVAKEQQFALLSNTELSESVLIQWNQLEQTVGLINELKQLNALITVVMESTSTYGDAMRYQFRQAGFTIHQASAKRVHDAKEIYDGVPSLHDAKAAWLIAHLYQDGLTKPWHELGDKERELNAYRREYELHESQHKRNQNRFEAFLSRHWPEVLPLLALDSVTLESLLIDYGSPEQIAACAEQAAKDMHRWGKHCLSTEKIDAVIHSAASTLGQPCVEAERRYLQALAEELRHNRTQAKNAKLALEAVVKAEPELKEMGLTVGMVTTAILIGLHLDPRHFGCARSYLKALGLNLKEKSSGQDHGKLKLTKRGSALARKYLYFAALRLINSDPVISAWYQNKVDPRAKLKTVIALMRKLAKALWHVARGQRFDARKLVMTTVVN

SEQ ID NO: 304166 - protein, 400 aa, unidentified
MLSIGIDVSKGKSTVCGMKPGGEIVYTPFEVQHTREGMSELVSLLRGSGEEVRVVLESTGSYHCPVVAALLENGIFVSVVNSLRMKRFCSQSIRRVKTDQIDAMQIALYGLAYWQELQPTKLPEDTYRELQLLARQYYQMTSLLIKAKVDFNALCDQVLPGMQELMSDHAGRHKLSDFVLRYHHTAHILKMGETRFRKDYCKWAEKKGYRNHERMAALIFATAQNGIPVLPDAPSTQIVITEAIRVLHTVEASRDAILTQMQALAKTLPEYSLVREMPCIGDTLAPRLIAEIGDVRRFHSKRALIAYAGIDAPPYQSGKFCANNRHISKRGNRYLRKTGYEVMQSYVMHKPANDPIFTFIEKKRSEGKSGKLAMVAGLNKFLRVYYGKVTELYRSLPAIE

SEQ ID NO: 304167 - protein, 458 aa, unidentified
MNRNKSKSKIDHTMPMVHPNAAAIDIGATMHMAAVRADRTPEPVRSFGTFTTDLHRLVDWFKECGVETVVMESTSVYWIPIFELLDARGFTVFLVNARDAKHVPGRKTDVSDAQWLQRLHSFGLLRASFRPKGQIAELRAYVRQRERLLEYAASHIQHMQKALTEMNLQLHHVVADITGATGLRIIRAILAGERDPKVLTRLRDYRCHSSAETIEKALTGSYRAEHLFALEQALALYNVYHEKASACDTRIEAVLKELSIDRGRRSDSLPSSGRPRSDQANALAFDVRAALFALLGKDITQIDGLGPYLSLKLIAECGDDLSAWPSAKHFTSWLGLAPSNKISGGKILSSRTRRCGSRASALLRLAAVTIGRTDTALGAFYRRLSARIGKAKAVTATARKIAVLFYNAVRHGMEYVDPGASYYETRYRTRVVNNLHRRAKAFGFVLQPMEPAPGVVVS

SEQ ID NO: 304168 - protein, 347 aa, unidentified
MRKIAYLAMDVHARNTVMGDMNGDGKFLGNRCFPTSDDNIANALKMVKAKKKLLVMEAGPLANWVAQTATPFVTEAFISDPRENALIYNSSVKKDKIDTQKLCRLLRLNEFKAVYRPENDQRAIFKAAVQHYNDLRDQLKAIKQKTKAMYRQWGVIDVFTDSVYSISGRDKFLNRVKHQPIYLQLKRLYDLMDHTAAIKLSAEKSMTSLGRNYTEIKEFKKMSGMGPIGAHTFDAYIQTPHRFAKKSRLWRYCRLGVTDCTSDGKPLGYKRVDKSGVSELKALSYRAFLSAIKGDNEIKRFYLKSLQRTHNRKHARLNTQRKILSVMLSIWKKGEAYRSELFLDPSI

SEQ ID NO: 304169 - protein, 346 aa, unidentified
MEQYVGLDVSLKMAAICIVDRTGKIDREGMVASDPAAIAAFVRLHAPHVARIGLETGATSTWLWTELNKMGLPVICIDARHAKAALKMQINKSDRNDAVGIARIMQCGWYKEVRVKGLDSHAIKAVLVSRALLVKIKRDLENQIRGLLKNLGLVIGRAKMNMFVVRAAELIEDRPELAAAVEPLLKAREAVEKQIADLDRKVMRLARNDVQVRRFMTAPGIGPITALCYLATIDDPTRFKRSRSVGAYVGLTSRRYASGEVDWTGRISKCGDPMLRSYLYEAAGVLLTRVAKWSVLKAWGMRVAKRSGLRKAKVAVARKLAVILHRMWVDGTEFKWSSKEVATQPA

SEQ ID NO: 304170 - protein, 343 aa, unidentified
MKVMAIGVDLAKNLIQLHGVDAQGKVALKKQLKRNQVLSFFANLSPCVIGMEACAGAHHWARKLESFGHRVKLMAPQFVKPYVKTNKNDAADAEAICEAVTRPSMRFVPTKNIEQQAVLALHRARQGFVKARTAQANQIRGLLAEYGIVIPQGLSHISKRVPMVVEDGESELPGVFRQLLQRLVEHLKEIDRQVLELEARIQLWHRQNEASRKLAQIPGIGPITASALVASIGDAKSFANGRQLAAWLGLVPRQHSSGGKQVLLGISKRGDVYLRTLLILGARAVLRILEQRTDCTQAWLKRLLARRNSNVAAVALANKNARIVWALLVHGREYDAAYAAALG

SEQ ID NO: 304171 - protein, 283 aa, unidentified
MILGVDVSKAKVDVALFDEKQAIGSGTFTNSVAGFKKLNKWLKNKKADEVWVCLEATGRYGEKLAEYCYKAGHPVSVVNPARIRKYAESQLRRNKNDQIDAVVTADFCRTQEPPLWTPPTPQKRDLQEMSRRLDVLIEQRTRETNRLKAGQENDAVLESLHDSLAFLDQQIAKLEARIKAHIDQHPDLKEEFDLLKSVPGLGDKTASKLLAELPDVSRFDHVGQVVAYAATAHLWLIGSQKKQADQNRQTKPQNGHVLSGAIGHPTQSGRQSPGRTSCGAGQN

SEQ ID NO: 304172 - protein, 312 aa, unidentified
MKIICGVDVSKARLDACIEPGAIFASFDNDAAGIAELATFCRQHQAELVVMEATGGYERRAFLLLWEQGLPCGLTNPRSVRRYAESMGVLEKTDRLDASVIARFAHAKNLQPTPAPTPAQQRLKALVARLRQVTDDLTVQKQRRASLADNAEMLASINEVIALLKRQSRTLEGEIASMIDDDPLWGQLAEAWRSVKGVAGRTVARLMADLPEIGTYSNKAIAKLAGLAPIADDSGKRQGKRSIRGGRASVRSILFLVAGMAAKYDKTLAAFRDRLLAAGKPKMVVRIALAHKLLVRLNAKARDARAQYANAT

SEQ ID NO: 304173 - protein, 283 aa, unidentified
MIIIGADFHPEFQQIALLDTESGEFQERRLQHREEAERFYRELAAQGAQVRVGMEASGQAGWFERLIGELQFELWIGDAAEIQCRRPRKQKTDRQDAELILKLMVKDDFPRIWVPSWENRDLRQLLWHRHRMVQARTRIMNQLQAVALNEGLRCKKRLWRKHGREQLESIRLAPWACRRRRDLLELLDRLNPTIAELTQAIEREAEKRPEVQRLMTHPGVGALTALAFVLIIGTPERFGCGKQVTSYLGLVPLEKSSGNRRRLGHITKQGSSMLRFLLVERRR

SEQ ID NO: 304174 - protein, 406 aa, unidentified
MEGPIITVDVSKGSCHYQPFIENGHPMRKPKQLSATIDGFQKLGQTIKDLEAKTEREDIPVIFEATGVYHRPLQKYLADHKIRYYIISPLLSATYRKTDLHSNKTDALDCAHIAKAYYCEKELRQYQAQPQEYKRLYQLSRIYESELVHLRKRKVSLRSMLDIIYPRIDKTFKGNQNLYDPIPMEILKRYPHPSLLLSHREDTIVKAVGHRTGHLKGYTERIVHKIYEKAKECYSGCEINDIEVINLPRLIENVQEQKKKCDSLLKEMIEIARTCPYFASVVSIVGIGENLAARIIAELGDVNRFDNRAAIVAYAGLNPKIQQSGDIDGLHLKISKKGNKHLRCLLYLGAQCNYRLRKEDPLYEFTKKKRQQTQCPLSSKAAYTASAHKLLVIIYSLCKNGTLYHS

SEQ ID NO: 304175 - protein, 401 aa, unidentified
MVSDFRKGRYNLMKIYVGIDIAKLNHFAAAISSDGEIIIEPFKFTNDADGFQLLVSKLESFDKNSIIIGLESTAHYGDNLVRYLVTELYQVCVLNPIKTCQMRKNNVRKTKTDKVDTYVIAKTLMMQDNLRFVSFFDLDMMDLKALGRFRQKTIKQRTRLKIQLTTYVDQVFPEIQYFFKSGLHQHAVYALLKEAPSPKEIASMHMTHLANLLKVNSHGHFTKEQAKELRVLAQKSVGANDSAISIQITQTIQQIELLDSQLEKIEAEMTDIMKFNDSVIMTIPGIGYINGGMILGEIGDIHRFSNPNKLLAFAGLDPSVYQSGNFQAKTTRMSKRGSRVLRYALVNAAWNVVRNNATFKAYYDAKRAEGRSHYNALGHCAGKLVRVIWKMLTGEVEFNLE

SEQ ID NO: 304176 - protein, 415 aa, unidentified
MALKIVYKICCGIDVHKTFVVACIASTNDKGVTSYESHRFSTYTSGLKTLLQWLLKRNCKDVCMESTGKYWIPVYNILENDCSIVLAHPKYVKAIRGKKTDKKDAKWIADLFKHDLVAGSFMPPADIRQLRDLMRYRFKLTCFQSSEKNRLQNCLTVSNIQLGNVVSDTFGKSAQAILDKLLENPADTSFDLEPLVYKSLKKKLPELRDAIDGYITPEQAGKLKVIKAHYESLESRKAELEELILALAAPYQQELAILQTAPGIRSDFTAIGIISEIGTNMEAFPSAKHLCSWAGLTPTNNESAGKKKSVRVSKAGCYIKPLLVQCANAVVTSKKHPEIRNRYLRLKKRRGHKKAIIAIARMLLTALYHMLKNGETYNAELYRQSDLPPVDREITVEQAIIIARNQGYKIKSATA

SEQ ID NO: 304177 - protein, 370 aa, unidentified
MSVRRILAKTIDTDLEYEAIGIDLAKNCVSAALLTTDGEVVCIDRLDYSELEKSAQALSSTTFAMEPCTEMNYLVQKLEAWGHRCLVIGGKNVQNYVENHYSGQKTDLNDAQALAFLAQDTQLRTIKAKDVEQQKYASLTTLREQYIKQYRQTIVSLKGICQAWGLNISKGISGKARLKDLIENHAAFPEELKESLVDMVTHAQTAQKALNKITKTLEELAKSDKVCQLIQTIPGLGPICSCRLRATIGDIRRFKNPKDFPAYYGLVPRSIATGHNERKGKITHRGDRTMRSLMVQAAGSLVNMATKGKLKSKQLTKWILKKQKEKMPWGKLVCAVAAKLLRIVRAVLISNKPYNSKIAGVAKCSLPKGS

SEQ ID NO: 304178 - protein, 342 aa, unidentified
MITIGIDPHKGSHTAVAVDEHEEVLDQLRVKASRRQVHDLLAWAERWPERRWGVEGANGLGLLVAQRLVAAGQDVVDVPARLAARVRLLDEERTTKSDPNDARSTAIAALRHRRLRTVTAEDHTVVLRMLATRRAPLQAGRTQAVCRFHALVRDMHAGGARTRLSTKKAASMLAAMRPDGVVETERKERARELLEDMRRYDRLLIDNEAKTTAAVKASGTTLTEILGVGPITAGLIIGHTGDVTRFPGRGNYASYNGTAPIEASSGDVRRHRLSRRGNRQLNYAIHIIAVTQITHRGPGRDYYLRKLEQNKTEGEARRALKRQISNIVFHHLVADAAHQPQR

SEQ ID NO: 304179 - protein, 340 aa, unidentified
MTITTVGIDLAKNVFAVHGVDQNGRTVLVKPKVSRAALPELIASLPPCVIGMEACSGAHYWARLFRQYGHEPRLMAAKFVSPYRMAGKSGKNDAADAQAICEAVRRPHMRFVPVKDESQQAMQCLHRTRQGFIEEKTATYNRLRGLISEFGVIAPQSTDALRHIVFEQKNSLPLQVQQCVDDLLEHVARIEDNIAEYDRILSRMAKTDHRSQRLMELKGVGPTTACALVASIGNAHDFKNGRQLAAWLGLTPSQYSSGGKSKLGRITKAGDSYLRTLLVQGARSVLIGAEKRTDLFSRWVCSLVERRGYWRAVVAIAAKNARLCWASLHYGDDFRLYSAS

SEQ ID NO: 304180 - protein, 346 aa, unidentified
MDLHIGLDVSLASTAICAVSAHGKVIKETTAASEPEELVRVLHDLPGRVIGVGLEAGPLSQWLHRALVDAGFDAVLMETRQVKGALKAMPNKTDRRDAEGIARLLHMGWFRPVHCKSVSAQETRALLSSRKAVQQAMLNIELSMRGILRNFGLKIGKISKGRYEDRVRELVDGNPMLEAAVTSILTARRELRKELAKLEKLLRGYAKIDPVCRLLMTMPGVGALVVLTVKSSIDDPDRFRSSKEVGPWAGLTPKRDQSGERDILGQITKAGDVGLRTALYRAATVMLNRGRASWLTARAWNVAKSRGKKRATVALARRIGVVLHRMWRDGTQFCFKRADAMRAAVA

SEQ ID NO: 304181 - protein, 334 aa, unidentified
MQNITLIGIDLGKHSFHIHCQDKSGKALLRKKFTRTKLMQFLATCPPSVVVMEACAGAHFMARRISDFGHETKLISPQFVRPFVKSNKNDFVDAEAICEAASRPSMRFVQPRTEPLQAMRALHRVRESLIRDKVKTTNQIHGFLLEFGISLPTGDAVIKRLSLVLAEHEIPEYLSRLLVRLHTHYLYLVEQIAELESELSQSINADDTAQRIMTIPGVGPITASLLSSQPGDGKQFSCSRDFAASTGLVPRQYSTGGKSTLLGISKRGDKNLRRLLVQCARSFMMRLERQHGKLAEWVREQLNKKHSNVVACALANKLARIAWVITTQQKEYQA

SEQ ID NO: 304182 - protein, 461 aa, unidentified
MREKQNEEPFCSSRQLQGLPLIRQNVAGIDLGSEQHWVCAPMVDGNGREVAAFGATTPELIRMAEWLKARHVESVAMESTGVYWIAPHEILEAQGLEVLLVDTRQLARVPGRDKKTDPSDCEWIQRLHSCGLLHGSFRPKEAICMLRTLVRDKATLVAESGDWVRRMQKSLDQMNVRVHRAVSDIDGVTGMAILRAIVRGERDARKLAQLRDPHCRKSEKEIAEQLSGHWREDHLFSLQQALKMYDTIAERITAYEKEIQRKLDKMEPEQRRGTTAPPLNNANKARGIKRRGQEPMRQALYRMSGVDATQIDAIGVETMEVIFSEYGPDLSRFPTEKQFVSHITLAPHVPKSGGKPLKKKKRHSASTRVANVLRMAALSLRHSDTALGAYYRHLAQRLGADIAVFASARKLATLIYRLLRWGQPYIAEGAEAYEKRYQQQRIKSLGSKAQTLGYKLIPINA

SEQ ID NO: 304183 - protein, 408 aa, unidentified
MKRYYLGVDWADESHQVWVSDPEGKKIAEMKVMQSPAGLAELGRWLHERKAEEIELWAAIEKPHGRIVDFLLDHGVVVYPVNPKALDRARDRFRMSQSKSDLFDAYVLAEFVRTDHVHLRALEPNSEPAQELKMLTRDHDRLMRHKTRLLNQIEITLKEYYPRPLEVFSDLETNIARDFLKEYPTPQALSKLNRRRWNHFAKRDHHLSEARCNELWEKINQPQLTSPPYVVRAKAKLLLALVVQLEALLPAVESYSEEVERFFASMPAAELVKSLPGGKSGTTIPKLWAELGDAKNRWQSFRHLQAEGGGVPVTKSSGKSHVVHFRFACNKYLRHAIYWVSFNSLNRCEWANKYYRDQRAKGHSHPRALRALGAKWLKIIFVMWRDHKPYDENYHLANMARQRMRQAT

SEQ ID NO: 304184 - protein, 342 aa, unidentified
MKHYVGLDVAMKEVSICAIDAEGGVIGEGKTVADPDAIVAWIARHVDGCERIVHESGPLSIWLTRELAARGAPVVCIDARAAHKALSARMNKSDRADAEALAQLARTGWYREVHIKSEMSDQLRLLLGARDRMIRIRQDIEAQARGVLKTYGIRLGRVSQGRSRASFREQLRSAASGEPILEQVAASLIAVHDTVCAQAAAIEEDLMALARESALARRLMSVPGVGPIVSLNFIAAIDDASRFSRASDVGAYLGLTPRRYQSGEMDYSGRISKRGDSAMRRLLYEAGTVLITKVRRFSSLKAWAVRLAARKGHKKAAVAAARKIAVIMLRLWRDGTTFVAGV

SEQ ID NO: 304185 - protein, 413 aa, unidentified
MQVLFARCAGLDVHKKTVVACVMLTLPSAEMRKHVRTFATTTEGLLVLADWLTSQQVTHVAMESTGIYWRPVFNILEGAYSVILVNAQHMKAVPGRKTDVKDSEWLAELLRHGLLKASFIPPQPIRDLRDLVRYRQSLVQERTREINRLQKVLETANIKLSSVVSDVMGASGRAMIQGLIAGEHSPEVLAELAQGSLHKKIPQLREALWGRVDAHHQILLSHLLAHISFLDQAIFHLFFQIHSYLKPYDEAVELLVSIPGMAQETAACILAEIGVDMSCFPTAAHLASWAGVCPGNRESGGKRLSGKINQGNKRLKAALAEVVWVLSHMKDNYLSAQYHRLARRLGKQKAVMAVAHSLLVIIYHMLRDKQPYRDLGATFFEMRDKERAIKGALRRLESLGYTITLQPQEEVSA

SEQ ID NO: 304186 - protein, 339 aa, unidentified
MSSVFKNFVGIDISKTWFDAVLVKADNSTIISHEQFSQKPEGFLKMQAWLLKQDVLLDEQTLFCMEYTGIYNTGLVQYLVKAKASLWVEMPLRIKKAGGFERGTDDKAAAVKIAWYALRYQDQVRLWQPIDSNIESIKNLIAQRDRIVTAINLLTVPVNELAAVGCTADAKTLAQLQKVPVAAMEKSKLAIETLIAITIQKDEQLNTKVKLVASIKGIGQVTAVALMVYTKGFTAFENGKQLACYCGVVPFTKRSGTSVRYKSTVSPFANKKLKKLLHLCAMSAIQNDVEMKAYFDRKVAAGKNKMSVINAVRNKLIHRVFAVLRDGREYEDNYVRKCA

SEQ ID NO: 304187 - protein, 398 aa, unidentified
MKTEDIQIFLGLDVGKTDHWACAVVQDGTKIWNKTLPNDETKLTAVYQKLLAQGQVLVVVDQPATIGALAVAVAQNLGIPVAYLPGLSMRRIADMYPGTAKTDEKDAFIIADAARTMPHTLRSIQVSDEDEATLGMLTGFDLDLARQITQTSNRIRGLFTQIHPPLERILGPWLEHDAVLEILATWPTPAQLKHAGKARIDAKLKKSGARRHTAWAVAIMDALDEQTVVVVGTDAAGLVIPHLARQLISLHAQRVDVATHLETMVEAHPLYPVLTSMPGVAVRTAAIIIAETSGKTFPSAAALSSYAGLAPTTRQSGTSIKSERVSHSGNKRLKRALFLSAFASIRFDPASRDYYDRKRAQGKRHNQALIALAHRRLTVLFAMIRDGSLYDVPELKIA

SEQ ID NO: 304188 - protein, 375 aa, unidentified
MEHHTEAFVALDTAKLRNAVAIADAGRNGEIRYLGEIDNTEVETRKLVAKLASKHARLTFCYEAGPTGYGLYRLIKSIGHDCIVVAPSLIPSKPGDRVKTNRRDAVNLAKLLRAGELTAVWVPDERHEAMRDLVRARDAAVKDYRIKRQNVSSLLLRLGRHYPGKKTWGRAHINWLTSLKLEHREQRIAFEEMLLAVRQVRERIERLEQAMREAVADWTLAPVIEAVQAMRGIDTVGAIAFLAELGDLSRFENPHQLMAYLGLTPSERSTGESVKRGGITKAGNTRARRLLIEAAWSYRFPPRVSKDMQIRIGAAPRTAREIAWKAQMRLCGRFRTLTRKGKRPTIVVTAIARELSAFIWAINREIVGSHATANP

SEQ ID NO: 304189 - protein, 315 aa, unidentified
MQKLLNIGVDVAKDAVVVGCDEQGSTVRSIPNQRTALAAWLASLPGPSRIGMEATGCYHELLADLAYQRGHTVFVLNPKDTRHYAQAVGLRAKTDRVDALLIARLIAHEHARLHPYHPATCAQRQLGRLLRRRAQLVKLKGALKQSMKGMTGLVRDTSALVERMDALIAKLEQRMDALIASMPGTRDDRRNLETIDGVGAVVSVALIEPLARLPFRSADAFVAFAGLDPRPRDSGRKMGKRRLSKRGPAELRRLLFNAAMAATRTDVWKPIYEHYRARGLPTTAALVVIARKIARIAWSIHRYHTSFDPQRLKTS

SEQ ID NO: 304190 - protein, 361 aa, unidentified
MRIIGCDLHARQQAVAMLNTETGEVVNLTLMHEGDKLREFYSQLPRPVLVGIEATGSMHWFLNLMDELGIECRVGHPATIRAAAHRKQKNDRRDAELILQLVVENRFPAIWLPTKELLDLRALVLHRHQWVRMRTRIQNALQAIALANGLRRGPSLWSYDGQAKIALLPLLPHTAYRRSALQAMYKNMEAEIENLTQQVAEQAGRCSGAQRLMTHPGVGPVTALATDVFLGDPKRFADGKALASYVGLIPREYSSGERQRLGGVTKQGNPLLRFLWCEAGAHAVRRDPELKRFYRRKLVQKGLGKARVAVARKLGIRLWIMLRDEIDYQEFCRRGQKQHSGAACAGMPETAYGAKSHRAID

SEQ ID NO: 304191 - protein, 412 aa, unidentified
MNPVIGLDVSKGESEVQAFLDKGKPYGKSFSIKHDLNGLGKLLEFLEGVKDKTGIQPSVILESSTGHYHAPVVQYLEQHNYLLIIVNPLISHRAKSSSLRKVKTDAIDAYRLCELYYKEDLEPYERRGIQLLNLRNLTRQHENITGIYVQTKLQFQAVLDQIFPEYKGVFGDLHSVVSLLVLKEFPASEDILAVGEDMLADKIKEFCKSRSKRWAEEKARDLKQAAARNPFKKTLYQSHLLSLSMYIDMLLQYKEHLSKMESEIDALAKEVEEYKIIQSIPGIGEKIAATIISEIGEIDRFNHPKKLVAFAGVDPEVFESGKFKATLVRITKRGSSRLRHALYMAVRSGIRDCRKKKTTDEIIPRNKRLRAFYDKKREEGKLYKVAVIACVNKLLHWIYAILKNRTTFQDIA

SEQ ID NO: 304192 - protein, 417 aa, unidentified
MSLDVVGAVLFVGIDWAAAAHAVCVQDSTGRRVAAFTVEHTGDGLADLVRRLARLGAPEAMPVAIERPDGRLVDALLEAGHPVVPVKPNAIKTWRDGEVLSGAKSDPGDAEVIAEYLRLRHHRLQLATPYSAETKALRTVVRTRGDVVDTRVVVTNQLSALLDAHWPGAKAIFADVESPIALEFLTRYPTARHAAHLGAKRLEAFCAKHGYSGRRTGEQLLARLRAAPAGALDETLCEAVRDAVTALVGVLKALGAAEKDLGRSVTAHLGEHPDGQIFTSLPRSGQINAAQVLAEWGDCRQAYDGPDSIAALAGVTPVTNQSGKHRAVHFRWACNKRFRVAITTFADNSRHASPWAAQVYAAARARGHDHPHAVRVLARAWIRIIWRCWIDQTPYHPARHGNAQRLAETEQTEHVAA

SEQ ID NO: 304193 - protein, 335 aa, unidentified
MSKEYVGIDLHRRRSVVVRKDSSGQLLETVHITNSPVALAEAVTRAGENPEVVLEATYGWYWAADVLAELGATVHLAHPLGNNWGNRRVKNDERDAADLLDLLRLGRLAEAYVAPPGLRELRELVRHRAKLVTARSALKIQVSAVLAKEGVMLPVQNLFSVAGRSLLESIDLGDAYRLRVDSLLRLIEVFGPEIDEFDHLVAGILAEHAGYQAIEAIPGVGPVIGAVFVAEIGDVSRFPGPSQLCSWAGLTPRHRESDLKVRRGHISKQGSRLVRWAAVEAVGHQRGATPIRALHHRVADRRGKNIGRVAAARKLLTLVYYGLRDGHIRCLADAG

SEQ ID NO: 304194 - protein, 346 aa, unidentified
MMIIGCDFHPSWQQIAWFDSETGETGERKLVHASGEAKQFYQQLAAPALIGIEATGNSQWFIELVEDLGHEIWIGDAAQIRASYVRKQKTDKRDAAHILKLVMEGRFPRLWTPDREQRDLRQLVLHRHKLVEIRSRVKNELQHLSLNKGMQRKAKLWSQAGQKMLRELPLKPWASCRREDLLGLLAMLNQQVGELDGAVQQAAEQNPQAKLLMTQPGVGPNTALAYVLTIGDVSRFPRGKQVASSLGLIPQENSSGTRRRTGAISKQGNRMLRGLLVEAAQIAVRFDPEMKKQYLHRCHQKPKGVAKVAAARKLAVRLYWMLRTQVGYPEIVRIESSPRVPLVGAS

SEQ ID NO: 304195 - protein, 345 aa, unidentified
MIIGCDFHPSWQQVAWLDSESGETGETRVLHAGAEAREFYQRLAPPALIGMEATGNSQWFVELVQDLGHEIWIGDAAQIRASYVRKQKTDKRDAAHILKLVLEGRFPRLWTPDREQRDLRQLVLHRHKLVEIRSRVKNELQHLSLNKGMQKKGTLWSQAGMQMLRELPLRPWASCRREHLLGLLAMLDEQIGKLDGAVQQAAEEHPQAKLLMTQPGVGPNTALAFALTIGDASRFSRSKKVASYLGLIPREESSGGRQKLGAITKQGNRLVRSLLVEAAQVAVRYDPEFRKQYLHRCHRKPKGVAKVAAARKLAVRLYWMLRTQVGYPEIVRIESSPRVALVGAS

SEQ ID NO: 304196 - protein, 344 aa, unidentified
MPASIPSPARYRLFVGVDIAAQTFTTVWMAPGASPGRPVTLDQTPQGFSALQARLLAAGHVAADILVVMEATGSYWVSLATTLAHASFAVAVINPDQAHNVAKAVLQRAKTDAIDARMLARLAATLQPAPWTPPPAIYTELQQRLAERDTLIGLRQQVRNQRHALVQLPVVIPAVRARMEELIATFDAQIATIEREITQILPRDAGWAASAALLVSIAGIGVLTAAWLLVTTLNFTIGATPEAVTAYAGLAPVPKESGTSVRGRGASGHGGNKRLRTALYMATLSATRYNPPIKAFYERLRAAGKPTKVARCAAARKLLHVAWAVVRKGRAFDPLYAQQRQEAA

SEQ ID NO: 304197 - protein, 343 aa, unidentified
MQAVTTIGLDIAKSVFQAHGIGAEGTVIIRRQLKRRHVLAFFQKLSPCLVGIEACATSHHWSRELEALGHTVRLMPPAYVRPYVKRQKNDAADAEAICEAVTRANMRFVATKTPEQQSCLMLHRTRHLFIRQQTAVINAIRAHLAEFGIVARVGRNGVEDLLDVVADSNDRRLPEVARGCVAALGVQLRMLKAQILAFDRQIMAWHRSNETSKRLDEIPGVGPALATALVASVADPKAFRSGRNFSAWVGLVPKQHSSGGKDRLGSISKQGDRYLRSLFTAGALAVIRYAKIHGTKHRPWLTALLARRPTKVAAIALANKIARMAWAMMARGERYKEPAALAA

SEQ ID NO: 304198 - protein, 415 aa, unidentified
MEIIYPRVAGIDVGKREVAVAVRTPGEGPGQRRQQIRKYKTYYQVLREMVAWLVEQGVTHVTMEATGVYWKPVFHALCEAEQIEVLLVNARHVKNVPGRKTDVKDSAWLAQLLECGLLRGSFIPPKEIAAIRELTRYRKKLIEERTRELQRLSSVLEDGGIKIDSVASSVTTLSARDMIEALIAGERDPRVLAELARGRMRNKIPDLTMACAGRFGDHHALLARMHTDQIDHLATMIGVLDHRIEEVTDPFAEQLKLLQSIPGIGERAAQVIISEIGADMARFPTAAHLASWAGLCPGNNESAGKHKPGRTRKGNAEVRTILTECAWSAGRTGTYVGAQFRRLHRRFGKQGGGKAAIAVAHTLIVIIWHVLHDRASYLDMGSDYFTRYHNPEARKRRLVHDLQSMGYEVTITPAA

SEQ ID NO: 304199 - protein, 456 aa, unidentified
MGHARARKIPAQLVEDEDYQLRCERVAGIDIAKAKADVCTRLPPAREGGRRASRVEEVPATAREILALAARLVADRAELVVMESTSDYWRIWFYLLEAAGLSVQLVSSSQARQLAGRPKTDRLDAQWIARLAEMGLLRPSFAPPPEIRALRDLTRTRLQLVRDRTREWQRLEKLLEGIPVKLSSVVHSLARTETARVILAAIAGGETSPKALAALADYRVRGGRAAVEESLEGMTLAACHPVLIRVHLDHITLLGRQVSAIEDETGAALGAIPGAWGISAGGVPSPDPGPGAAVLPAAERLAEIPGVSRKLAMAIIAETGLDMTRFPAAAHLVSRAGLAPAARQSGPRNRKPAKGQGDSCLKGYCTQAATGAAGTGTFLGERLRRLSRRIGGTRARCAVGRSILVIIWHLLASPEARYADLGPDWHERKADHDRKTRAHLRGLQALGYDVTITPAA

SEQ ID NO: 304200 - protein, 342 aa, unidentified
MIVLGADMHKRSHTLAAVAAGTGELLGDETIAVGERGFAAALDWARGLGDDRVWALEDCRHVSGAFERFLLVHGERVVRVATRLMAGERRAGRDRGKSDRIDAIAVARAALREGVERLPVAELAGVELDIRLLVDHRERLVRMRPALYNDLLWHLHDLWPEQRFPKCALLSKKWSATVGRRLARAEQTARVRIARDELRHVRELSQTVDALEAQIAELVAQAAPQLLAETGVGPLTAGKLIGEIAGAQRFTSDAKLARAGGIAPIPVSSGNTNRHRLDRGGNRQINTAIHRVAITRARCHRRVSRILQSAAAAWWLSTAFGPAARTAAIQLPDRVTSGWPTA

SEQ ID NO: 304201 - protein, 418 aa, unidentified
MFKIFRKNCCGLDVHKTWIYACIGITDANSRTEYFQARFSAFSKGLQELSHWLDKYNCKEVCMESAGKFWIPVFNILEKTCLVTLAHPKYTKPQKGNKTDRKDAKWICDLFMCDMIKPSFIPPPAIRHLRDLVRYRGKLTNMLTGEKNRAQNCLTVSNLKLDDVFADVFGKSARSITEYILAHPGEPFDVAQFVDRRCKSPLSEIQAAVDGAVSPEQAVKLRQCLDHIDQLRLLRQRLEQEILRICEPFADILQLLRTVPGLGNDPMTAIAVLSEIGGDMSVFPTAKNLCSWAGCCPRNDQSGAKVKSSRISRAGSYLRPLLVQVANALIHSRKHPEFAERYRRIKARRGHKKAIIAVCKMLLTAIWNILSKLVPYSPAGFLSTSHDLPPSKSLTVAQGLSLLRRRGFILTDDPLSAP

SEQ ID NO: 304202 - protein, 341 aa, unidentified
MQAITVGLDIAKSVFQVHGVDADGQVVIRRQLKRRYVLAFFEKLAPCVIGIEACASSHHWSRQLQALGHTVRLMPPAYVKPYVKRQKNDATDAEAICEAVGRANMRFVPTKTPEQQSGLVLHRTRHLFIRQQTSVINAIRAHCAEFGIVAPVGRRGVEELLRGIANEKRVPELARACLLALGAQLRRIKEQILEFDRMITAWHRGCETSRRLDEIPGVGPALATAVVASIADPRAFRSGRDFSAWIGLVPKQSSSGGKPKLGSISKQGDRYLRGLFTAGALAVIRYAKIRGTGHRPWLTALLARRPIKVAAIALANKIARMVWAMMARGERYREPVALVAY

SEQ ID NO: 304203 - protein, 401 aa, unidentified
MGTQSVSHMGLDCHKNFSRVTARDEQGRVVWRGRLEHANRQELKEKLAGWPKVPVVLEGTFGWGWMSDELNAAGQQAHLANSRKTAAWRDARGMAKSNKIDADLLSELWAEKQRWWEIWLAPQQVRDQREWLRYRMTLVRLQTGIKNRVHATLHRHGILQPFSDLFGKKGLAFLEQLCGDPTQLRESARGTLFGYLRLLRQLRRQIADATRELRRQVRREATGELWRSLPGVSFILAYTILAEVGSVSRFKSGRHLSSYSLLAPVADDSGDEDGAPAIGRHVGHLGRVTLKWAFIQAARRAAAKSEYFKAIFNRRTDNGQRDRQRGYIAVARELCRVGYSCVKNQRRFIEQRPERPDRQVVEQQPPPATTQTQRPSRPDVRRARSPLDRRRRQDRRPRASL

SEQ ID NO: 304204 - protein, 309 aa, unidentified
MKEEVVYLGVDVAKAYLDAAMGNEKRRLANDGTGHRQLINWIKQMEAQVQVICEPSGGYERMLIQGLVGAQVKVSLVQANRVRQFARAAGILAKTDSIDAEVLCAFGEAMRPQTLSASKLAQEQLRELESQRRHLSRLLVMEQNRGARLGDSSVRRLNRSLNKQIQKQIERIDLLINEHIAGSQELSAKAHKLTAISGVGPRTAALLLAQMPELGQLNRREVAALVGVAPFNRDSGKWRGKRTIFGGRRHVRHGLYMAALVAARHNPILRAFYQRLRAAGKPAKLALTATMRKLLIVLNSALKTDPIYA

SEQ ID NO: 304205 - protein, 397 aa, unidentified
MYIVGIDIAKRKHEAAVIDGEGTVIIKPFSFTNNCSGYNRLLAMLAKAKLPLDEVSFAMEATGHYWLALFTRLQKEGFRVQVINPVQTNSIRSFYIRQAKTDPRDALLIAEVIRFGHFSESTLHPENIYELRELCRGRHAIVSMQADVKRKVVALLDQVFPEYETAFTNLFSDTSMAILQTCPTPKELSEMPLEELCHLIEVSSHKRFRMAKARELQELAHNSFGFAMAGDVFSTMIRLYAKHLDFLKQQVREMDRKIAEIMDTLDTPITTITGIGPTLGAYILSEIGDISRFSSAAKLAAYAGIDPTMRQSGEYNGVRNRMSKRGSPYLRHAIWLAASSAVLHDPALKLYFQKKRDEGKPYMASVGHACRKMVSIIYAVMRDNKAYTPYIPNEISA

SEQ ID NO: 304206 - protein, 371 aa, unidentified
MDEFTKTLYVGLDVHKESIAVAYAPEERGTDVVSLGAIGTRQCDIDKLIRKLQSKSATLVFVYEAGPCGYWLYRYLTRQGFSCRVVAPSLIPRRPGDRVKTDRRDAVTLARLMRSGDLSAIYVPTIEDEAIRDLSRGREDAMRDLKAAKYRLKAFLLRQDIRYEGRANWNAAHLRWLSELVCPTSAQQIVFQEYVRAVTEQHERVQRLDTELREHVTRWRLSPVVEAIQALRGVELTGAVILIAELGDLTRFDTPRQLMSYLGLTPSEYSSGDRRRQGGITKAGNSHARRALVEGAWAYRYPAKVSRHLQLRLERLPVEVQAIGWKAQVRLCKRYRQLIARGKHANQVVVAIAREMAAFAWAIARTVPLTP

SEQ ID NO: 304207 - protein, 355 aa, unidentified
MDNRKYIGMDVHKEAIAVAVLNAAGKLVMESIIETKANTILEFLKGLRGELHLTFEEGTWASWLYDLLKPHVKRIVVCNPRRNALLKEGSKSDRVDARKLAELLCTKMLRPVYHRDNGMRALKELARSYVTISKDQARVMTRVKALYRSWGIACSGKQIYTVRHRSSWLEKIEEPGVRRRAEFYYQQLDGLRSVRREVRRELLGESGKHKASKLLRQIPSIGPIRAALLLALVQTPHRFRTKRQLWTYSGFGIETHDSAEYRYVAGQLQRSKKPQQVRGLNRNYNHDLKNLFKSAATNAVAKSGPLQEFYLALVKRGIRPEMARLTLARKIAAITLAVWKKGVCFDAEHLKQQTA

SEQ ID NO: 304208 - protein, 319 aa, unidentified
MAQNDLIVVGIDVAKDKVDACIRRFALRQTFPSTPQGHRKLVAWLRKHKVGKAAMEASGGYERDWAKALRQAGIEVRIVDPKRVRSFALSAGRLAKNDTIDAEMIAWFAETFDEAPSQSHDAAREELAGLVKARKNLIDVKTRLQSQNEHAVPGPVQKAHAHVLKSVAGEIAKLEAAISARVKATPEFAERAEIIESVPGLADNTSAVLIAGASELGKVSDEIAAALIGIAPYDDDSGKRRGERHIKGGRRWVRNALFTPCLGAATQHNPVLKAHYERLIAKGKEPKVALVACMRKLIIILNTMIARGEKWDPSRYALR

SEQ ID NO: 304209 - protein, 417 aa, unidentified
MERLYETCCGIDIHKQTAVACLITTGAQGQRTRETRTFATTTEALGELRDWLRRAGCTHVAIESTGVYWKPAFNVLEEHCTVIVVNAAHIKQVPGRKTDVADAAWIADLLQHGLLRASFIPSRAQRELRDLTRTRTSLIDERSASVNRVQKVLEDANIKVAGTGVVTDIMGKSGRDILAALLEGTMNPAEMAALVRGKLKNKREALEKALRGRMSDHHRMLIALHLEHIDLLDEQIERLSAEIAARLRPYEAELLRLETIPGVGRHIAEILAAEMGLNMEQFPSAGHLASWAGMCPGNHESAGKRKKGPVRKGNQALRRALNEAAQAAARTKKKDRTYLRGQYRRLVVRCGKKKAAVAVGHTILRIAYHLLKEGETYHEGMLVQLDERRRARVQQRALDQLRALGYEVTITPKEPAA

SEQ ID NO: 304210 - protein, 352 aa, unidentified
MNKLKYIGMDVHKAMTVIAVLDSTGKVLAEAIIETKESTILDFFKSQRGTLHVGFEEGTQAAWFYDLLQPRVANVVVCNPRKIVRQGNKDDKVDAKLLAELLRTGALNPIYHGEKSTRAVKDLTRSYLSIVADGTRIKNRLKSLFRGRGIECRGAGVYSPDERKDWLAKLDSAAVCSRALRLWEQLDLVERLSEEAAKELVAEARKHAATKILRTVPGIGPIRAAVILGLASTPHRFRTKRQFWAYCGLAVVTETSAQYEMVNGRVRKSNKKPLLRGLNDNYNRALKGVFKSAAKTVAAGLWKSRFEAMVANGTPESLARVTLARKIAAITLAVWKKGERYDHRKLKTMHAA

SEQ ID NO: 304211 - protein, 339 aa, unidentified
MTEITRVGLDLAKNVFEVHAVNAQEQVVVRRSLRRSQVLTWFAKQPRCLIGIEACGTANHWARELTTLGHTVRLIPPAYAKQYVRRNKNDAADAAAICEAVSRPSMRFVPIKTVEQQADSVTHKARQILIKQRTMAMNSLRSLMAEFGIVVPQGPQHIGKLLAILADPEDTTVAAVARTALNTMSELLSTLEMQIGILDKDIRARARTDVTARRLDTIPGFGPILSSAIAAIVTDPRHFDSGRDFAASLGLVPRQDGTGGKVKLGPISKRGNGYLRRLLVNGATAVLNGKNARNDPWRAKMLDGKPRKLAAVALANKMARIAWAVMTRQQDFRPRAVPA

SEQ ID NO: 304212 - protein, 342 aa, unidentified
MEEVVTIGLDIAKSVFQVHGVNSNGDAVLRRQLKRARMLPFFAKLPPCLIGIEACNNSHYWARELSALGHDVKLMPAQYVKPYVKRQKNDAADAEAICEAVTRPTMRFVAVKSPEQQSLMMLHRVRLMLNRQRTQISNAIRAHMSEFGVVAPVGRLGVERLLEIIEDEDDDRIPEDARLCLKMLMAQLAVVKQQVLENDRRVLASARRTELGRRLMEIPGVGPLLASAFVASVADPTVFKTGRDLAAWVGLVPKQNSSGGKDKLGSITRAGNRYLRQMLVVGAMAVIRYAERHGTKRPWLVELLARRPAKVAAVALANKNARIIWAMMVSGERYREPLPKAA

SEQ ID NO: 304213 - protein, 389 aa, unidentified
MIYVGIDVAKDKHDCCILGSEADNLYPVFTIPNNKTGFDELYEKIFSVTDDRTEIKVGLEATGHYSLNLLGSLIDKGLPTCVINPLHTNLYRKGLSLRKTKTDKVDASSIAMMLMTDKTLKPYSDTSYHSEELKSLTRYRFDKVQERAKLKSSVARLINILFPELEKLVPNLHMASVYALLSEFPGASYIAESHLTHLRNVLETASKGRYGRDMAVTIRDAAKDSIGSVMPAKSMELKHTIHLIEVMTDEIDEIEASIKSIMDTCNSPIMTIPGISYRMGAMILAEVGDFSRFSNADQILAFAGLSPSTYQSGQLDSSYSHMEKRGSRYLRYALFNATKYVCHWDENFGAYLSKKISEGKHYNVAVGHATKKLIRTIYRMELTGEAYRK

SEQ ID NO: 304214 - protein, 410 aa, unidentified
MEAIVECCAGLDVHQATVVACLNSGPGNKRSRKQVRTFGTTRTELEAMRAWLSESGCTLVAMESTGIYWRPIYAELEGHFDLIVGNAQHIKNVPGRKTDVKDCEWISDLARHGLIARSFVPPRPIRDLRDLTRYRRKLSQAQAAERNRLIKMLESANIKLSGLISDVFGVSGEAMLRALIEGEETPVAMAQHARGRMKRKRAALAVALDGRLDEHHRFLMRAQFDRIKQAESQLEQIDGRLREKLAPYAEPMGRLMRIPGVEWITAATIIAEIGVDMSAFVSAEHLASWTGICPGNHRSAGKQKSGKVRKGNVHLKTALVTAAMGAAKTRGCYLREKHRRLRARCGELRGHVAIAHKILVAAYHILATGSDYQDLGASYLDQVNERRTAMQLTRRLRDMGYDVAIKPKAA

SEQ ID NO: 304215 - protein, 404 aa, unidentified
MQANDIGVWLGLDVGKESHHACALDRNGDKVHDKPLGQDETEIRDLLSRLSERGRVLLVVDQPNTIGSLPLAVARDMGVAVAYLPGGAMRKAAQLLPGDAKTDERDAYVIAFTALHMPSTLRDCGSDDETLAGLKVPSGYDEDLAWETTRHVNRPRSLLLQIHPAFERALKSDRITSGTVLALLERYGGPAGMRRTGIARVPEWARSRKPRNSAAIVASLFDAIGRQTVTVAGTEAAETVIPAIARQLMELKRQRREVAGRVERLLENHPLLTVLTSMPGIAAKTGSQILLAIDGDITRFENSARLAAYAGIAPVTRRSGTSIRGEHPSRGGNKRLKNALWQSAFIAAFHDPESNAYYRRKRAEGKRRNAAIICLARRRCDVLYSMLKNGTLYQPKQTDLAKAA

SEQ ID NO: 304216 - protein, 337 aa, unidentified
MKRYLGVDLHRTQFVVCTRWENGEQQIREWRIGELGQFVEQLQPEDQVAVEAMGTTAHFYDAVVGRVSRVVVVNPHQFKVISESVKKTDRRDAAALALYLEKDLLPEVRMKPKQNRELMHLAETRDMLVKQRSAMKNKINNLLAMQGIELKREALSSKIALERILILPVSGMVKLELRVLVEQIRSMSASIAELDEQLEEAGQQLPGYENLTSIKGIGSLSATVLLTVIGKISDFANEDKLAAYLGLVPRIANSNESERSGRITKQGNKLARTALVQCGLVAKRYSPYLSRFYERIKQRRGGGKAKIALARKLVKIVYDTLKNQWVFEDFPSFTLAA

SEQ ID NO: 304217 - protein, 404 aa, unidentified
MQHHIFSSEVFVMVISVGIDVSKDKHDCFIVSSEGEVLADVFTIPNTMDGFNLLLQRVRECTTPQDKIKVGLEATGHYSYNLLGFLLDNGLATYVLNPLCTNLYRKSLSLRKTKTDRVDARTIASMLLSDVGLKPYTDTAYHNEELKSLTRYRFDKVKERAKLKSSIARLICILFPELEKLVPSLHIASVYSLLEEFPGAQQIAATHLTRLKALLETASKGRYKRDMALEIRDAARNSIGSSMPAKSLELQHTIRLIRELDNEITEIEEQIQAIMDELNSPITTIPGIGFRMAAMIFAEVGDFTRFDSPDKLLAYAGMSPSTYQSGQLKNCYPHMEKRGSRYLRYALYNATKYVCHWNPTFADYLAKKRAEGKHYNVALSHATKKLVRLIFALEKSRETYRLAV

SEQ ID NO: 304218 - protein, 319 aa, unidentified
MDSTKYIGMDVHKETISIAVLNSSGKLVMETIIETKASTVLEFVQGLRGSLQVTFEEGTWAAWLYDLLKPHVRKIVVCDPRRNALLKEGNKSDRIDARKLAELLYLNKLKPVYHGEHGVRALKELVRSYLTITKDLGRVMTRVKAIYRSWGIPCTGKQVYAPRHRGEWLGKISEPGVRRRAEFYYQQLDALRALRQQVRRDLLAESKKHQAWKLLCQIPSIGPIRAAVLIGILQTPHRFRTKRPLWKYSGFAIETRSSADHRLVDGQLQRSQKQISVRGLNPDCNHDLKNLFKGAAIVASSKPGPFQEFYAALLEHFHK

SEQ ID NO: 304219 - protein, 311 aa, unidentified
MKRYVGIDIAKGHVDIYDTATERHRQFENSRVGIKKCVEYVSSLNPQLIVLESTGGYEMDLVVALDESSLPVVVVNPRQVRDFGRASGRLAKTDKIDAILLARYAVVMNPPRRVLRDRQGLRMKALIARRRQLVEMRTAEINRREHIHDQLIARSIDAIIRIINREQQKVETELSRLIAEIPELQQRVEALLSVPGIGQTTAVMLVTEIPELGQLNRRQIAALAGVAPINRDSGTFRGKRMTGGGRREVRSRLYMSTIVACHHNPVLKLFYERLLQKGKTKMTALIAVMRKLITIINTMLAKKLTWKPKIA

SEQ ID NO: 304220 - protein, 415 aa, unidentified
MEIIHTHCAGLDVHKKTVVASIIVPDGNEGLRKETRTFGTMMSDLLALSDWLMVFGVTYVAMESTGEYWKPVFNILENNFEVLLVNSQHVKAVPGHKTDVKDSEWLAELLRHGLLKASFVPPLGQRELRELTRFRSTFVRERATLVNRVQKVLESANIKLASVASDVMGVSGRAMLEAIIAGQASPTEMAELAQKRMRQKRDLLAKALEGRVKPHHRFVLTELLCQIDSLDETIERFNQQVEEYCHPFEEAVVWLDTIPGVGREVAEIIVSEIGTDMGRFPTEDHLASWAGVAPGNNESAGKRRSGKTTKGNKALSTALNQAAHAAAHTKDTYLSAQYRRLAARRGKKKAIVALEHTILVIAYHLIKRKETYRELGGDYFDKRRPEATVKRLVKRLEQLGYSVSLQQPATPYAAG

SEQ ID NO: 304221 - protein, 339 aa, unidentified
MIACGFDVHRAQITFDLVDHETGELRRGRIAPATRERLRVWLAGMDSVRLVVAVEGTTGWRFVAEELEAAGARAVLAEPGETRALRGRKRRAKTDRADARWLRELLERGELPISWIPPAHLLELRCRVRLRQTLAAERSAWLQRVHAQLFHHGVPVGGELAAPARRGWLDGSELSPAAEAVIDTALATVDFLDGQLAALDHELRSFARAHPATRALARLYGVGDLTAVAIYAAVGDARRFSSARKVIRLAGLDVTVHESDRKRQPGRISRQGPPMLRWAAYEAGLAACRPSSPDHADYLALRERLGHKTACLTVSRRVLRRAYHALVAVGDAALEPLPS

SEQ ID NO: 304222 - protein, 343 aa, unidentified
MTMASMYYVGLDVHKKTISFCVQDERGTIVEEGQIRARPTALSRWARQLPAPWMGAMEATLFTGWIYDHLTRQGAAVKVAHPAQVKAIIAAKKKSDRIDARTLANLLRCRLLPEVQLLPGELRQLRRILRYRTLLVSQTTRMKNKIAGLLMESGVDYQARRLHGKQYFHQLLQELEGVPDSVVELLQMSRQTVDYLSGLEQKLRRGLLTHPRLRERVELLQSIPGVGVIVALTWALEVGPIERFATVRQAVSYCGLCSAQRESAGKTRRGPISKQRNKHLQRVLVEAAKLAPRYSPHLAGIYQKERQRGNWNRATLAVARRLVAYLLAVDRRQTPFVSASSAQ

SEQ ID NO: 304223 - protein, 402 aa, unidentified
MNAVGIDVSKSKSVVAIMRPFGEIVSTPFEIKHTASDIHSLIELINSVEGESRIVMEHTGRYYEVLAHQLLEANLFVSAINPKLIKDFDNDSLRKVKSDKADAVKIARYTLDKWQNLKQYNVMDELRNQLKTMNRQFGFYMKHKTAMKNNLIGILDQTYPGVNTYFDSPARSDGSQKWVDFASTYWHVDCVRKMSLNAFIDHYQNWCKRKKYNFSQSKAEEIYGKAKELVPVLPKDAITKLIIKQAVDQLNSASTTVESLRTLMNETASKLPEYPVVMAMKGVGTSLGPQLIAEIGDVSRFTHKSAITAFAGVDPGVNESGSYEQKSVPTSKRGSSDLRKTLFQVMDVLIKTHPQDDPVYQFLDKKRAQGKPYYVYMTAGANKFLRIYYGRVKEYLSSLPES

SEQ ID NO: 304224 - protein, 346 aa, unidentified
MKKIFIGIDFSKEKFDATLIKAEGVKECGPSVHEVFDNKTSGYRRLVKWVRSQSEDAPADSLLYCGENTGGYSMGLSNYLYASGYDMWLECAYSIKQSSGIQRIKNDMYDSRIIAEYAMRNHDRMILYKPQSASLNSLREVFLYRHSLVRQRVALTNRRSEKRLVQEKSDIKTFMSFTSKHLITEINKAITKCDEKIRDIISSDEELREVFDIITSMPGIGAQNAACLMIYTDNFTKFDMNSRKIACYYGIAPFERRSGSSVYQKPQVSPFANRMIKSLLSQAALAAIKADVNICCYYQHLIERGKHPMLVHNNIKNKMLHTLVAMVRNKQKYNPEHLYKPVCGVA

SEQ ID NO: 304225 - protein, 354 aa, unidentified
MDREGLEKLVLHLKGSRSLLLGLESTASYHIALFSYLTAKGYRVIIINPLLIANFAKLSLRKTKTDKKAALTIAQFLMLRKEALESQTVSVDLMELRDLARRRERLTDQATKLKSNMKRILSVTFPEFEHLTGVFAKSILQLLIRFPSADALRKADADTVTALVVPRSWGRKSRAWVETLMTTAASSVGVSSPAKELVLKQDASLLLHVQEQIKETTKVLADLCKDKMNKDVEILSSIKGIGKTTALNFLIEMGGDITLYKNDKKLIASSGLDPSTHQSGKFEGASKLSKRGNRHLRRVIWLMAKGVVFSNDLFRTYFYKRKSEGLCYKMAMLATAHKLIRVMFAMLIHQTCFE

SEQ ID NO: 304226 - protein, 372 aa, unidentified
MEERTNVHVGLDVHKDSITVAAAEPGRDKARLIGKVVHDVPRLLKVLAKLGSVEELHIVYEAGPTGYGLQRALTARGYVCEVIAPSKTPRRSGNRVKTDARDSLELAEYSRAGKLAAVWIPDPADEAIRDLARAREDAVNSRRQARQQLKGFLLRHDRRYGGKTSWCGAHDHWLARQNFEAAAAQTAFTEYWQAVKSADERVERLTKALQGSIAGWRFESVVSALQALRGVAAVTAIGLLAEIGDLNRFEHPRKLMGYLGLVPSEHSSGERTSRGSITKTGNGHARRLLVEAAWNYRFKARVGKEINARQEGLSEAVRTMAWKGQLRLTGRYAALQKRGVQANKVCVAVARELAGFVWAIGMQAQREKAAAA

SEQ ID NO: 304227 - protein, 339 aa, unidentified
MKYTPVGVDIAKHLIQVHFVDEHTGEVVDKQVRSKDFLSFLSNREPCLIGMEACGGSQHWARELRKLGHKVRLLQARFVKAFVMGNKNDVMDARAIWMAVQQPGKEIAVKTEEQQSVLVMHRSRRQLVKFRTAQINALHGTLLEFGETLHKGRAALDKELPVALERMKTRLPPYLIKLLEDQYNRLKELDSLIDGIEKQLISVANQNETCKQLMKIPGVGPLIATAAVATMGEASAFKSGREFAAYVGLVPKQTGSGGKIRLLGISKRGDTYLRTLFIHGARAVSLVAKEPGPWIIELKKRRPTGVAIVAMANKLARTVWAITAHDRKYEKNHVSIRPY

SEQ ID NO: 304228 - protein, 435 aa, unidentified
MEKIRTNVAGIDIGAKKVFTAVEGQPVVSHFTFTEDLMLLRDYLLKHEVKTVAMEATGVYWVILYDILEEAGIDVWLVDGRQTKQVPGRKTDVKDCQWIQELHGFGLLNRCLVVDADIKELRGYLRLREDHINSSAMHINHMQKALTLMNIRLTEVLSQVHGASGLAIIEAILKGERDKNVLVGLCHQNVLKNKKELVVKALAGKYNEAGLFSLKQAYDGYQFYLRQIGECDKRISTVINRIGQSGKGHDVKKKRKAIRHHKPAVENLAPNLIHIFDGKDATVISGITDYTWMQLLSETGSDLTRWPSEKHFTSWLGLSPGQNNSGKMRRNAKKKGRPKAGQIFRLIAQGLINSKEIAIGSFGRRLRGRKGPRIAIKAMARKVAILYWRVMVKGLDYAEQGIKRYEEQLLLKKMKTFNKLAKELETKSLVIEQIA

SEQ ID NO: 304229 - protein, 430 aa, unidentified
MTKPFLSVGVDVGADFSYMSIALPSHELVGKPFKIVHSDPKSLSLAVSVIRKAEAANALNARVVFESTGIYHIPLFCYMETAGLEAIVINPLLSHSGRNFNIRKVHSDKMDSRKLALLGLNPRLKTSIMPVELVLNLRGLVREYFNLVDNRAAYTNRLLGVLREAFPQYLGVFSKVTTVASFAILEKYALPENILAANPDVLVEEIAKAARRKVSTIIPQRDKLVAAAKDAQSFGHALDCHASLIRLYISFIKRFDESAKDVLRQMKALARANENEPFIQQIHLLETYRGAGFLSAATLMAEIGDFSVFQKPKQLFAFFGLDPEVKQSGNFQGTRVKMSKRGSGLARRILYIMALQSVATHRDGSPKNPVLHAYYLEKCRSKAKNVALGAIMHKVCNIVFAMLRDSKPFEMISPEEHRRRYDEIRENAAA

SEQ ID NO: 304230 - protein, 379 aa, unidentified
MDHVITGTPTETVLYGALELSKNSWLLALQLPNRAQPSLYPIRGGDTEGLMAKVTAARDRWAKMSGKAPSIVLCYEAGYDAFWLARFLKARGIECLVVDAASMQVNRRARRAKTDRIDVGMLLRALIKWCQGDHHVWSVVRVPGVDEEDLRRSHRERDRLVRERTAHINRIKGLLFAQGIRGIKVKSKYKTLQIDKLVTGDGRPLPPRLASEITREIARLALIQEQLAALERERDQAPTPCKATEKKRVQLMSLSGIGPAIAAVMTREVYYRQFDNRRQVAGFLGLATSPHDSGDVERSQGISRAGRGQVRGTIIQAAWLWLKHQPKSAITRWFLRRTAGQSGRIRRIMIVAVARKLAIALWRFLEQGLVPQGACLVSR

SEQ ID NO: 304231 - protein, 358 aa, unidentified
MTPTTTSMNQPGGQRRVIVGVDTHKDAHVAVALDELGGLLGSGTFTADRAGYRALIGWAAVFGDQIVFGVEGTGSYGAGLASAIRRSGNGVLEVLRADRRDRRLRGKSDTIDAENAARAVLAGIVHAVPKTGDGIVEMIRVTKVAKDNAVKARSSAMISLKQVLVNAPDDLRQSLKGLPRMTLIRRCAGLQAGRIDSVTAATENALHSIATRWLALDAEIRGHDHLLATLTSSVVPSLVEAFGIGPDVAAEMLIVLGDNPERIHSEAAFARLCGTNPIPASSGKTSRHRLNRGGHRQANAALYRTVVVRMQYHEPTMAYVTRRTAEGKTKPEIIRCLKRLLAREVWSLTRDFRRPALT

SEQ ID NO: 304232 - protein, 340 aa, unidentified
MRALYAGCDLHGNNNLIGIIDGEGKRVFKKKLSNDLELVRDTLKPFQEELVGIVVESTYNWYWMVDGLMEKGYQVHLANPSAIQQYSGLKHSDDKHDAFWLAEMLRLGILPEGYIYPKEERPLRDLLRKRGHLVRLRTSLIISLQNILSRNLGRRVNVNDVKALKEDRISHLLERNEDLALAGRVSKEAIDHLTGQIRKIEGVVEKKIKLKEEYRYLLTLHGVGKILSLTIMLETGPISRFETVGDYVSYCRKVPSQWMSNGKRKGSGNSKNGNKYLAWAYSEASGFARQLYPEPRAYYNRKMQKTNAAVAHSALANKLSRAGYYVMRDQVPFEPEKLFG

SEQ ID NO: 304233 - protein, 448 aa, unidentified
MGKSKTKNENVKRISQLTVINPTAAGIDVSDTEMMVAYPINSEQLEIRAFGCFTRDLHLLANCLKGKGITTIAMESTGVYWVALFLLLQEYGFEVYLVNAKHVKNVTGRKDDESDAEWIQKLHSCGLLSASFQPDNMTRTLRSMVRHRKNLVHTSSTYINRMQKALELMNIKLHTIISDIDGKTGLLIIEAILVGERNPEVLADLRDKRIKASREDIIKSLEGYWTTEHLFELKQCYQLYCTHQQMINECDREIEKQLVEQIASTNEGVIPDIPKERRKVSSKHKVQFNLTAYLKKIMDVDVTEVCGISELSALTIMSEVGTDMTKWKTEHHFTSWLGLAPNTKISGGKVISSRIKKKKHHAGQAFRMAANSLYHSKSPLGDHYRRIRAKAGAAKAVVATARKLAIIYYKMVSNKEAFNPQVLEDYQKKYKEMKINQLKKKIALLEAA

SEQ ID NO: 304234 - protein, 364 aa, unidentified
MLYLGIDLHKLQITINLRNENGDVIQAGQVSTQRDTISEFFDKLVRHAGRCRGFMAIFEVCGFHDWLYEKLKSCRCKEIVVVQPDNSSRLKTDRRDANALCELLWNNRKRLQNGARPNGIRRVFLPEYVDARTRQLANLREFLVAQRTKVMNKVRGIMRKHNIDQDAPSQKRYGTQKNRRWIEQLELPLQDRMEVDIHLALWKEYDAKILSVESELVKCYEGSPDIVRLVSVPGISTMGAITLLSRVGDIMRFKTPGSLANYFGLTPGCRNSGESKQRIGGITKSGSRMARYVLNHAVNHAVRKCPDMKNWHKKIKTRRGNKTARVAVMRRLATIVWHILRWDKTYQFRYEQPIITNENKHCKS

SEQ ID NO: 304235 - protein, 323 aa, unidentified
MIKKDFNIVIGADIAKKKFDVACLLEGKFKHKVFTNDAAGFASFVAWFLSLCGDTSPLICMEATGAYSLPLADYLVNHGFPVSLVNPAKIHAFAKSELSRAKTDKADAKLIARYALKMQPPLWIPPPANIRELQALVRRVEHLLEMIQMEQNRLETADASTHLSITNVLNTLQTELKSTRKAINDHIDNNPDLKQRSDLLETIPGIGEACIAHLLLALSEHHGFTHAKQVAAFAGLAPVLRESGQWRGNTHISKTGDSALRKVLYMPALCAKRYNPVIQVFWDRLQSNGKNGKAITCAAMRKLIHIAFGVIKSGKPFDPNYAI

SEQ ID NO: 304236 - protein, 334 aa, unidentified
MSNVTTVGIDLAKNVFSLHGVDARGVVVLRKTVSRSRLASFVAQLPASVIGMEACSGAHEWARRFAQHGHTVKLMAPKFVVPYRKSGKNDGNDAAAICEAVSRPSMRFVPVKSVEQQTMLTLHRVRLGFVEERTATINRIRGLLAEFGVVLPQRAMEVRRGAAASLEQLPAAAARALSDLLAHVRVLDERVNEYECELEQHARRDERAQRIQSLSGVGPISASAIVASVADAHEFKNGRQFAAWLGLTPKQYSTGGKTRLGHITAHGDPYLRTLLIMGARSMLQTALRRTDRLARWALGVRARRGYHRACIAVAAKHARIIWAMLAKNEVLQLS

SEQ ID NO: 304237 - protein, 359 aa, unidentified
MTDGSRGEPTITAGIDLGDRYSYLCLLDTESGEVIEEGRLRTTPEAFERRFGSEPTMRIAIEAGTHSPWTSRLLEGCGHEVLVANARKVRLIYAEGRKTDRLDAEKLARLARLDPKLLAPIEHRGESSQAHLALIRSREALVRTRARLINHVRFTVKPFGHRLPKCSAQGFHKKVAGRIPEFLEPSLGPILQSIGELSARIREYDRKLEALAEGFYPETKLLRQVQGVGPLTALAFVLTLEDPERFANGRAVGAYAGLVPGKDQSGESDPQRRISRHGNELLRRLLVGCAHYVLGPFGQDSDLRRHGEKVAQRGGKNARKRAIVAVARKLAVLLHRLWVSGEVYDPLYDARRRVGERAA

SEQ ID NO: 304238 - protein, 416 aa, unidentified
MNAVGIDVSSRKSTVAVLRPLGEVVCLPFDVTHDIAGLASLVEKLKALDGETRVVMEHTGRYYEAVEKALHEAGLFVCAVNPLLIKEYGANSLRRVKTDKADAVKIARYALDNWADLRDFTPMDAIRYDLKTLNRQFQLASKQRTASANNLIALLEQSFPGIRKCFDSPVRSDGTQKWVDFAHSFWHVDCVRKQPFAAFCERYRKWCKRHAYLFKLSNAEEVYALAKRAVVLTPKAKVVKVLVQEAANQLSSISRSVEVYRAEMDRLAAMLPEYPVVMAMYGVGKSYGPQLMAEIGDVRRFERKQALVAFAGIDPMPNQSGDKNVRSNKSSKRGSPYLRKTLFNVIRTYLQCAPQDEPVFQFLNRKRAEGKPFYVYMLAAANKFLRRYYAKLRDFFASLDTLQPVAPIPATLKASL

SEQ ID NO: 304239 - protein, 343 aa, unidentified
MERALFVGLDAHKSSIVATVIDSNGKRVDQAHLSSRDSELTEYLATLPGQPEVVLEAGNVWQHVYDAASSTGARVVLAHPYKVRVISEASLKSDRVDSEALAQLLRLRAVPMAFAPTPEIRELRQVVRDRAFYHAQETSVKNHIYSILMRKGIPYGEGLLAIKSRREELRDLGLPEVDRGLDMLKRFDEATVELDRRIHEEFLRSGEAQLLESIPGIGEFTAVTLVAELCPIDRFPNVEKLCSYAGLIPTNHQSGETSYQGHLKKDSNQLVKSLLVEASWTHRRYAKQSDVSKMAKRVSRRRGKQKGNIAGAHKLLRIVYAVLKRGTPYTPERPSPELVFAKS

SEQ ID NO: 304240 - protein, 424 aa, unidentified
MAGVVIGIDPHKGSHTAVALDVHEKQLGRLRVRASSRQVDGLLEWASGWPRRRWAIEGARGLGQLLAQQLIASGERVLDVPPKLAARVRLLDSGQINKNDPNDARSVAVAALRAHELPELAAEDHAMVMRVWARRYHDLARLRTQVVCRLHAVVCELVPGGVRKYLRASQATDVLDRIVADSPVAQAKLELARELVADLERIDAQRREAKGRTARAVAATRTSINDVYRVGPIVAGTVLGYVRDIRRFPTRDRFASYNGTAPIEVSSGDRKIYRLSRRGNRQLNHAIHMAAISQIRHHDSEGRAYYEKKIAEGMTGTTALRALKRKISDALYARMIDDARRLAAKDPGGHTGNDSASSAAGSHPETPALRESHSRATANSRTGTGQRPLTLRPAPDRRRTSRRAAGVQVEPRLGPHRGRRQDRP

SEQ ID NO: 304241 - protein, 408 aa, unidentified
MKVFVGDDWAEAHHDVHVMNEAGERLAACRLPEGLEGIGRFHALIAAHVDSPGDVVVGIETERGMWVQALIAAGYVVFAINPLSVSRYRDRHNVAGTKSDPGDAKMLADLVRTDRHNHRRVAGDSGEVSGLKVLARAHQNLIWDRTRHTNRLRNDLREYFPAALTAFADLSHKDAIAVLGKAPHPEQARGLSISQIRSALRTGGRQRNLDARAAEIQTALRTPQLQAPPAIATAFAATTKRLIDVIEELNTAIAGLEADLASHFEQHPDADIYLSLPGLGVVLGARVLAEFGDDPERYDSAKSRRNYAGTSPRTIASGKKRAVLARHVRNRRLYDAIDQWAFCSITTSPGCRDFYDQRRAKGDLHHQALRALGNRLVAYLHGCLKNRIHYNEHTAWAHRQTLTSNIAA

SEQ ID NO: 304242 - protein, 355 aa, unidentified
MNVYTGVHAYYCGIDLHARTMYVCVLDKDGKTVYHKNIPCRPDRFLQAIEPFRGDIVVGVECIFCWYWLADLCEEEGIDFVLGHALYMKAIHGVKTKNDRIDSLKIARLIRGGNFPVAYVYPPEMRATRDLMRRRNHFVRKRAELLAHIQNTTMQYNLEPLGTLSRPHHRRDKDIVGHFPDPVVQLIVETDLQLIDHYDPIIKNLDKQILALAKGHDPTSLHLLRSIHGVGEVLSLTMLYEIHTIDRFPSRGEFCSYARLVKGQKSSAGKNYGTAGGRIGNAHLRWAFSEAAVLFLRKNKEAERYYNRLINRHGKSKALSIVAKRLGIAVYYMLKRQQPFNINMFLQSHMATEKA

SEQ ID NO: 304243 - protein, 402 aa, unidentified
MNAVGIDVSKGKSMVAIMRPFGEIVSAPFEIKHTASGINSLVELINSVEGESRIVMEHTGRYYEVLAHQLSEANLFVSAINPKLIKDFDNDSLRKVKSDKADAVKIARYTLDKWQNLKQYNVMDELRNQLKTMNRQFGFYIKHKTAMKNNLIGILDQTYPGVNTYFDSPARSDGSQKWVDFASTYWHVDCVRKMSLNSFIDHYQNWCKRKKYNFSQSKAEEIYGKAKELVPVLSKDAITKLIIKQAVDQLNSASTTVESLRTLMNETASKLPEYPVVMAMKGVGTSLGPQLMAEIGDVSRFTHKSAITAFAGVDPGVNESGTYEQKSVPTSKRGSADLRKTLFQVMDVLIKTHPQDDPVYQFLDKKRAQGKPYYVYMTAGANKFLRIYYGRVKEYLSSLPES

SEQ ID NO: 304244 - protein, 340 aa, unidentified
MDKVTTIAVDIAKRSFSMYWVDVQTGAIGARTMTRAKFEEFMRTREPSRVVLEAGGSAHYWGRWLQQQGHEVRLIAAQHVRPFVRTNKTDGADARAIWEAAKRPGVNWVALKSEASQAVLALHRMREQLKDMRRMQSNQLKALLYEFGVVAKAKVETAQLKQWVAEGRVPELLQRSLCEQVERIAQLKCEELQLTRAIERHNATDALAMRLLAIPGIGSLGASALSAELAAGAKSFANARQYAACKGMAPRLSGTGGKVRPGAISKRGDPYVRTLLIHGARSVIAHQRRAKRLSPWLSALLGRRPLNVAVVALANKMARTAWALAAHQRTYQEHYGAQAA

SEQ ID NO: 304245 - protein, 398 aa, unidentified
MLEETNQAEEIVARVAALDIGKAELVCCIRVPGQGRRSRRLQEVATYQTMTRSLLVLADRLAELGVTRVVMEATSDYWKAPLYLLEAQGFEVWLVNAKDVKHLPGRPKTDKLDAVWLAKLAERGMLRPSFVPPLPIRRLRDLTRYRADLVAVRTAEKQRAEKLLEDAQIKLSVVASDIFGVSGRAMLDALVAGERDPKRLAQLARTRLRAKLGQLQEAFTGQFTDHHAFLLATMLSRIDQASADIAELEAKIDEMVAPFQAAVDRLDEITGVGRTAAQTIVAEIGVDMGRFPTPSHLASWARFAPGVKQSAGKVKGKSTTGHGNPYLARVLGEAAVAAGRTNTFLGERYRRIARRRGTKKAIVAVGRSILVIVWHLLADPTVHYHDLGAGLLRHPRQR

SEQ ID NO: 304246 - protein, 351 aa, unidentified
MMIIGVDYHPSFQQIAFFIEETGECGEQELNHSDGQAEKFYRDLKQRGICVRVGMEATGYSRWFERLLAELGFELWIGDPAEIKAKRIKKQKTDRKDAQLLRRLMLENNFPQIWVPSPENRDLRQLLWHRHRLVQMRTRIMNQLQALAMNEGYRWKKKLFSEQGRAQLEKLTLALWASRRRQELLELLDRMNPTIEELTAAVEREARRRPEVLRLMTHPGVGPLTALAYVLIIGTPERFHCGKQIGTYVGMIPSEDSSARKQRLGHISKQGNSLLRFLLVEAAQAAARSNPEWRRRYIHLAMRRHKSIAKVAMGRKLGVRLYWMWRNGCAYSPSFEFGSYVGQLGTGYGVK

SEQ ID NO: 304247 - protein, 400 aa, unidentified
MISVGVDVSKGKSTVCILKPYGEVVSSPFEIHHVEKDMEDLDNLLSKLDGEVRIVMEATGIYHLPVVTFLHDKGYFVSVVNPFAMKKYAKDNSIRGAKTDRLDSIMIANYGIEKWFKLQRYEGTEETYAELKLLGRRYRYYMELHVKALQELTHVLDYVLPGIKKMFNSWNEANGKDKLSDFVERFWHFDLITSMSLEKFTEEYIAWAREKKYHRSRSKAEAVYELASSGIPTLSSSTPSTKMLVQEAVSVLRAVDSSLSLILTRMQELAKSLPEYSVVREMGGVGNVLAVKLIAEIGDVRKLHNAKALIAWAGIDPPPYESGQFIGSKRRITKRGSSTLRKVGYEVMRVLKSHSAPKDDAVYNYILKKESEGKSKKHAKIAGLNKFLRIYYARVMEVYQ

SEQ ID NO: 304248 - protein, 451 aa, unidentified
MNNEPEIVLDDEHELVIERVAAIDVAKASGKVCMRMPHPSRPDRRMSKVRDVDATTRAVTELADDLLGEGIERVTVESTSDYWRIWFYLLEAAGLRVQLVNARDVKNVPGRPKTDKLDAVWLAKLTEKGLLRPSFVPPAPIRQLRDYTRFRVDLTRERARYWQRMEKLLEDALIKVSAVVSRMDSMSVRDMLEALIAGERDPRRLAGLARGKMRPKYNALVEALSGRFDEHHAELARMLLDQIDALGAQINTLTTRIDELLAALIDTPGPAADGSVRDRDGEVELMVTGLDAAERLAEITGIGPVSAQVIIAEIGLDMARFPTAAHLVSWAKLSPRTIQSGAIQRSGKAGKGNPYLKGALGEAAAVAARTDTFLGERYRRIVKRRGKLKALVAVARSILVIVWNLLSDPTARFHDLGPDYYTRRIDTERRARNHLAQLAALGYRVTVEPAA

SEQ ID NO: 304249 - protein, 349 aa, unidentified
MDRVIIGVDPHKRSVTFEARDTREVLRVVGTLPTTKDGYRALRQVARQWPDRVWAIEGANGTGRPLAQRLLADGERVLDVPAKLAARARVFDTGQGRKTDATDAHAVVMVALRDAGLRELTMDDELVVLRMLCDRRDELSKARAQGLNRMHRLLTELVPGGVPTKRSVSQYRAMLAGVRPRDQLGRTRRRLAADLLAELAQIEARLTTLKAELKQAVLARGSDLMNIYGIGPAGAARILADVGDIARFPDRNHFASWTGTAPIDASSGEQIRHRLSRAGNRRLNHVLYMAAFVPMTARTGSTRRPEMYACPVVRISSQPRASTIGLQRSRLRPRLPRSPHRPMPMHRRG

SEQ ID NO: 304250 - protein, 412 aa, unidentified
MRHRKEQFIYVGVDLHKRTHTAVVINCWNELLEVIEFENKPSAFPAVVSKVKKHVQEDMTVVFGLEDVGGYGRSLAVYLVENHFLVKEVNAALSNWKRKSYAMTEKHDSWDAENIAKLLLDELDRLPNAHPQDDYWILKQLVMRRYSLRDTLVMLKNQLHTQLSYNYPSYSKFFSEVDGRTALAFWHEYPSPYLLEGVTLEDLTMFLRKNSNNVCSTKKATLILEGVQTDGNTKRNGQEHRDFLVRSHVNQIRDVHREMSDVENHIRDIKQKLNFKLNTFTGIDDVTASAIVAEIGDITRFKNADKLAKYAGLTPSQMSSGGRGKDRNQRQGNRALNKILWGLAVRQVQTARTSKKPLNPLFHAYYEKRLNEGKKKKQAIICIMRKLVNILYSMIKNKTEYRLTALPERAAS

SEQ ID NO: 304251 - protein, 358 aa, unidentified
MSKLTRNNVVVGLDLGDRFSWLCVLDEDEEVVEEGRVQTTEAALRRWFGARATARVALEVGTHSPWVSRLLKELGHDVIVANARHVRMIYAGDRKSDRLDAEALARLARLDPALLHGIEHRTVRAHEDLAVIRAREAPVRTRTRLINHVRGAVKSAGHRVPRCSSASFHKTAADSIPSGMRPALDPLLVMLEQITQEIRAYDRQVQKLASESYPETGALMQVAGVGNITALAFVLTLESPDRFAKSRAVGPYLGLCPGERQSGDRDAQCRMTKAGNEMLRRLLIQAANYQLGPFGSDSDLRRWGLERAARGGRIAKRKAVGGVARKLAVLLHQLWTSGEVYEPLRNSGGPDEPTAQAA

SEQ ID NO: 304252 - protein, 340 aa, unidentified
MEHVAGADLHKRVTQLALLRDGQPPSQARFANDRASVEGALTRLPAGTTIAVESTGSWWWFVDTARRLGHHVVLSHPKLTKAIAAARLKSDKVDAVMLARLLKADLLPMVWIPGERDRHIRELLAHRGRVVRTRTAVINELHAVYSKRNLEVPRYLWHRQAPEPWQPEALGGYGPRIVHENVALLRALHEQIRGLDQALKALAQEDPEARRLMTHPGVGAVTAVAVRVWVGDIHRFASAKHLVSYFGLAPRVRQSADTERHGHISKEGNRMVRTLLLQAALSAMRHTGGPVRRQYLGVLKRRGKQIARIAATAKLLGVLYQMMKQGLTYEQLHPRGGSAQ

SEQ ID NO: 304253 - protein, 443 aa, unidentified
MSRKEKSHIRGERGQAFADKIRGIDQERILCVSLDISKYFHVVMIHNKLGEIVTPTFEIGIFKTGFERLCQALDEAIERTQAQVVLLGMEPTGHYFENLARHLQQRPQPVTLINSYAVSQNRKQRMMRREKTDPIDAAAIGDLLGRGEGSPFQPLQGIYLELQQLDRVRQGKVKMRTMLKNQIIGHLDRIFPGLVIIGDAAKERYTPMFGTDFWECQTMQHLIRVCPDPRQLVIMPPNDLIAAFHAHNFKMGPKTAAKIIAYAQKILLPDPEVIAIRSELLHHDLILLDAVEERIAAMEDRLVDLVIQTPYQIWTKLKGLSDIQVARLAASIGAPDHYNHAKQVFRRSGLVSGRNDSGVRQKQGKDNKVVKTGDIHLRRALLDAIRTFVLHQPVLFSYYAKLKLTKPDLVALVATARRANGILWATLRDQRSTTLVYKRGAKM

SEQ ID NO: 304254 - protein, 420 aa, unidentified
MKVVYQTCCGVDVHKSFLVATIIKTTSGVQPSYQKKRFSTFNKSILEFKKWLLDNSCRDVCMESTGKYWIPVFNLLEDEINVTIANPKWVKAVQGNKDDSKDSKWIGDLFRLGLVPGSYIPCKEIRILREFTRYRYKLTSCKSSEKNRFQNALTVCNIALDSVVSDIFGKSATSVIDYLLEQSDNSINHEEISSRLLRSLKKKSESVIESIEGYQMTDSQKYRMRLIHAHMDYITSTISNIDSMIDSLVEPYDDAVKLLCTIPGINRNSAVTIISEIGTDMTHFSNSKRLCCWAGLTPGNNESAGKKKSVRITRAGVYLKPALVQVAHAAVKSEKSPYYKAKYERITKRRGKKRAIIAIARMILTAAYHMLSTGEVWNPTDLYKTDMPEPLKEKQKEKAIKQAKKLLIAEGILDESLLAS

SEQ ID NO: 304255 - protein, 408 aa, unidentified
MEQLYVGIDVSSTKHAAYLMKPDGDKFSSFPMQNDRSGAKMISEKIVSALTKLGLKDVVIGMEATSIYGDNLVYALREDGNLGRFHRKIHVLNPKQVKNFKKSYPELPKNDPVDAFVIADQLRFGRIGKEVYMDDYRYKALQTLTRARFYAVQNLTREKERFANYLFLKCSGIAQSKDIPNTSATTLALMEHFETVDELANADLNELTAFVNRAGHGRFADPEATAKLVQAAARGSYRLPKTVNDSINQVMSASIAAMRALESQIRTLEKAIEKQFEIIPNTLISIPGIGKVYSAGIIAEIGDICRFTGQASVAKYAGLVWTQHQSNEFEAEDTRLIKSGNRYLRYYLLEAANSVRRCDSEFRRYYDLKYKEVNKHQHKRALALTARKLVRLVFRLLKDNRLYKPPEG

SEQ ID NO: 304256 - protein, 340 aa, unidentified
MSLYGGIDLHANNSVIVLLNEQDEVIYRKRLPNTLPTILEQLAPYHTEIKGLVVESTYNWYWLVDGLMEAEYRVHLANPAAMQQYSGLKYTDDHSDARWLAHLLRLGVLPEGYIYPKAERAVRDLLRKRAHLVRQHTANVLSVQNIMARNTGARFSVKRIQELTKQELTTFLAEETQVLAVISSLTVLDCLRHQIKTLEQSVHKRLHHTPSYEQLLTVQGIGTILAQTITLETGAINRFPSVGHSAAYCRCVDSTKLSNGKRKGTGNVNNGHPYLAWAYMEAAQFALRFQPEAQRFYQRKLAKSRHNTVLARKAVAHKLSRACYYLMRDRVPFDVTKAFG

SEQ ID NO: 304257 - protein, 478 aa, unidentified
MAEGEDRQGPGSCEPVEESGQLSNEQEPVTKITNSRMHISVTFCQYLERRAEEKMNSRVQIACGLDVHRSKIVGSIVTSGGTQETRTFTTTIEDTLALKDWILTHECERVAMEATGIYWYPIYNLLEEHITVQVANPLFIKGIPGRKTDQLDAEWIATLCLNGLVKPSFVPGLQVRNRRDLVRTLQRLIQTRTRHKNRVHKVMVRAGIRIGAHLSDLFGPSGLRILHGLLDGQAIDTILKNLKNAKINKKRDELANSICGTLDENDVYLIRLELDAIGSINHLIDDLKQRISHLMTPVMDELTILMTIPGIGYDSAVNILAEIGDVRQFPSGKHLVSWAGLAPGLNESAGKQGPGHITKRGSKSLRTFLIEPAQSIAGMMRNNHLKRFFSRMRGKLGFKPAIIALARKLLMLVHHLLVNHEAYFEENFPPKKPAKIVLPSFLSMSPDQILDLLSKAVAELSDVDRAGFVRKLNRIGTV

SEQ ID NO: 304258 - protein, 412 aa, unidentified
MRVLHERCCGLDIHKRFVVACLLTTSADGTGHKEVRTFSAMTNDLLALADWLRGEDCGPVVMESTGSYWRPVFNLLEEQCDVLVVNAYHAKAVPGRKTDVKDAEWLADLLRHGLLRASFIPAPAQRQLRDLTRYRIHLVDERARLINRLQAVLEDANIKLASVVTDVRGLSAREILQRLLEGETDAEALTELARGKLRAKRDALAQAVVGRLQEHHIFLLREQLAHLDYLDAAIARLDAELEARLAAEQEAMALVQTIPGVARRTAEVLVAEIGTDLSRFPSAEHLASWAGMCPGNAQSGGRRLSGQTRRGNAWVRRTLAEVANVVSRMKGTYLAAQFRRIAARRGKGRAVLAVGHSVLVALYHMLTRHEPYHDLGADYFDDRQRDHVQRRLVHRLERLGYVVTLAALTTSS

SEQ ID NO: 304259 - protein, 386 aa, unidentified
MTQHSHVTTSNGLDYDRTLILAVEISNRSWVVAAQVPGLRQKGVKQQLVPRADALMAAVEGYKRRAAAAGMTVERVIVAYESGGSGFWLARWLQQRGVEVHVMQPSSVPVDRRMRRAKSDRIDADMLLRTLLAWLRGEPRVCSMVPVPDEAVEDARRPIREREELIRARVALVNRIEAVLTVLGAGEYNPLRRDCREQLGQLRTGLGQPLPPHARAQIERLLDRLDLIRKQVADLEAERDRVVEGEAAGQAERMIQHLARVRGIGVQTATVLVHEAFVRRFRNARALGSYAGLSGTPYSSGGTQREQGISKDGNRRLRAALVELAWLWLRYQPGCALSRWFHDRLGGSRGRLRKVMIVALARKLLVALWRYLQDGAVPQGMELKPA

SEQ ID NO: 304260 - protein, 400 aa, unidentified
MDKHSDYFKEVLFMNYVGIDIAKQTHYASIMNSEGEILVEPFPFSNNHAGFQKLLKHLSAFSQKDVLIGMESTAHYAENLTSFLFTRGFNICIINPIQISSLRKSNIRKTKTDSVDTYLIMKALSFNHYRLFTERDYDSLQLKNLCRFRQKLMKARTKVKIQLVTYVDLLFPELQYFFKSGIHGKACYELLKTQPNPDRIAKMHLTRLTNLLSKSSKGHFKQSHAVQLKELASHSVGIKNNTLSLQILQSIQQIEMYSKQLAEVDASIHEIMDKMDSVIKTIPGIGYLNGAMIIGEIGDIFRFEKPCQLLAYAGLDPSVYQSGNFNAARTRMSKRGSKLLRYSLINAAWQTTLVNKTFKDYYNLKISQGRRHYNALGHVAHKLVRVIHKMMTDNVEFNLT

SEQ ID NO: 304261 - protein, 335 aa, unidentified
MDRQYVGIDFHRRRSVIVRKNAAGDKLGSVRVANDPLALATAIAEAGPEPEVVIEATYGWYWIVDWLQEQGATVHLANPSGLNWGTRRVKNDERDAVDLVDMLRLGRLPRAWIAPPATRELRELVRYRAKLVALRSGLKAQVHAVLAKEGVLPATRDQFGQGGNSQLDALELSDAYALRVRSLRELIDVYDTQVAALEQKIHDWLRDDRGYRTIQQINGIGPTMAAILVAEIGDVSRFRNAAALCSWAGLTPKHHESDTTVRRGGVTKQGSRLVRWAVIEGTVRYHGGPKLAADWHQIAERRGKHKATVAIARKVLTLVYYGLRDGEIRCLAKTA

SEQ ID NO: 304262 - protein, 339 aa, unidentified
MKTYCGIDLHSNNNVIVVINEEDMILLERKLSNSLGAVLDALSSIREPISAIAVESTYNWYWLVDGLQEAGYKLHLVNTIAVKQYDGLKYSNDKHDAFHLAHLLRLGILPTGYIYPKKERAVRDLLRRRMQLVQQRTTHILSIKNQLTRNTGKQFKSNEVIKLTSSSVKQKIKDPNIQEAILSNVCVLNVLTSKITSLEKRVLKQVKLKPEFQKLLKVPGIGNILAMTIMLETGDISRFEKVGNYASYCRCVSSKRISNGKQKGRGNRKNGNKYLSWAYMEAANFAIRFNTKANKYYQKKMAKTMRIVALKALSHKMARACYYVIKNNEDFDNQRLFST

SEQ ID NO: 304263 - protein, 461 aa, unidentified
MSKQKPAGEQKRSVPKKVDWKALEIVHPNAAGIDVGGSEHWVAVSPDRDPEPVRRFGCFTADLREMGAWLVAKGVRCVAMQSTGVYWMPVFEVLEQQGLEVYLVNAHHTKNVPGRKSDIQECQWLLKLHAFGLLNNSFQPTDEIRIARTLWRHRSNLVAEAASVIQRMQKVLTEMNVQLSNVRSDLSGVSGRKIIGAILEGQRDPWTLAALVEPEVKATPEEMAKSLEGNWREELLFVLRQHVEFYRIYQKKITDCDLQLRKHLKSLGSKVNLQTQPIGQRPKGKKNSKNAPGFDLRTELYRITGIDWSQINGIDVLTAQTVMAEAGADLKAFPTEKQFASWLGLSPTNEQSGAKILNRRTRKVVNRATVAFRNAALTLLRSQSYLGAQYRRLRTRLGAPKAITAMARKLACLFYRLIKHGKPYVDKGVEYYETKHREQQIRSLAKRAQKLGLQLLIPKTA

SEQ ID NO: 304264 - protein, 350 aa, unidentified
MVVVGADVHKHTHTFVAVDDVGRKIGEKTTPATTAGHAEAVMWARERFGAEVLWAIEDCRHLSARLERDLLGFGHKVVRVPPKLMAQTRASARTRGKSDPIDALAVARGFLREPDLPVASHDEVSRELKLLVDRREVLVAQRTATINRLLWRVHELNPERAPKARSLDLAKHRRILGDWLAKVPGLVAELARDELADITRLTEAINALAKRIGERVRAVAPALLELPGCGELTAAKLVGETAGVTRFKTEAAFARHAGVAPVPVWSGNTNGRVRMTRSGNRQLNAALHRIAVTQIRLDGLGQAYYRRRLAAGDSTTEALRCLKRRLSRVVFGRMRTDKQTQQSPCQTAAA

SEQ ID NO: 304265 - protein, 423 aa, unidentified
MDIVHSRCAGLDVHKETVVACVRLASGDKVSREVRTFVTTTSGLLALLAWLTEMECTHVALEATGIYWRPVWNILSDGAFELVLANAAHIKNVPGRKTDVNDATWIADLLGYGLIRSSFVPEPAIQELRSLLRTRKQLVREQTSHIQRVQKTLEDANIKLDCVITDILGVSGRAMIEALVAGETDPGTLAELADRRLKASRDQLREALRGRVTDHHRFLLRLHLGPIDALTTAAERVDRQVDAVIARMDAAVEAGQAPVQAMIGLLITVPGIGPLAARMILAEIGCDMSRFPSAAHLLSWAGLCPRNDESAGKRRSARLRKGAPWLKTVLVQCAWAATRKKGSYLQAQFHRLRSRRGPKKALCAVAASMLTAIYHMLRDGTGYQDLGADHFDHRSTEARARRLVSQLAKLGFDVEIKPLAAVA

SEQ ID NO: 304266 - protein, 353 aa, unidentified
MTSLTDLREVVDVVIGVDTHVHTHSAAVVDTATGGVLAEITVEATTEGYAELVELANTYPMLRAWAIEGTGGHGAGLSRHLLQAGELVIELDRPKRAARRNGAKSDPLDAIRAAREAMARPQLGTPRSGAERQALSVLLAARRSAINASTEAQLQVFSLVIAAPETIRARLRGQKLAAMLTTAAGLRVHSSWDIETTSTVVALRTLARRAHAMLKEARELEKALVAIIRSWRPDLLEQFGVGPIVAATVLCAWSHPGRVHSEAAFAMLAGVAPIPANSGQVTTRYRLNRYGDRQLNRALHTVVRSRIQYQPATRDYVARRTAEGKTSREIKRCLARYVARDLYRLLENGAPGA

SEQ ID NO: 304267 - protein, 344 aa, unidentified
MKNYAGLDVSLEETALAIMDETGRTVREAKVASEIEAIDAWLGKTGIAIDRLGLEAGPLSSWLHAGLKERGWLVICIETRRLRAVTRAMPVKSDRKDAAAIAQVMRTGWYRQVHVKSLASQQLRVLLRHRKILQAKRQDLENELRGTLKAFGLKLGTVGRAKFAERVSGLVAGEPWLERLALPMLAARAALLKSFNELHALVLKIVKADAVCRRFMTIPGIGAVNALAYKTGVDDPTRFRHSADVGPHFGLTPRRYESGETEVVGSISKCGDAMVRSLLFEAALTLLHRVKAASILKRWARALAKKIGTRKAAVALARRLAVIMHRMGLDGTDFNPSLIRAAAT

SEQ ID NO: 304268 - protein, 419 aa, unidentified
MPKNMFCGCDVSLENNTVWLMLDDGSQPAKLSNVDNNQLGAEVLVERIYAIAKEHCVSDILIGTEATSMYDWHLLEYLSESKLAAEFTLKLYRFNAKWIKNFKKSLAPRGKTDPLDSFAIAERLRIGRLPKEYVPDIKYQPLRKLTRFRFHLQQQIAREKNFFLANLFLKASAYSSVKPFSSTFSATSLSVINEFFSVDELASASMEELTEFILEKGKAHFSCPSEVVDNLKRVSRESYRLKPELTPAVNLVLASTCNNIRCYKEQVKLVDSAISENLKALKHTLDSIPGIGPVYAAGIIAEIGDVHRFPNDSSLAQFTGLTWPKYQSGKFQAEETRMSHTGNQYLRYYLVEAANSVKRCDATYKAFYEKKYAEATKHHHKRALVLTARKLVRLVWTLLTRQTLYQPGYCSFEDLSKIG

SEQ ID NO: 304269 - protein, 332 aa, unidentified
MNMHPQGGVANRDHRPNVGVDVCKQHLDVCLGTLELRAVNDATGWDVLIAKFKEDDVDLVVLEATGGYERGLVCALQGAGITVARVNPRQARDFAKSMGVLAKTDQVDARTLRDFGDVLARHKDRAKFITPLVDEQRQVLAELMTRRRQLVDMRVAENNHLEHAGKHSVRSIKSVLKTLDRQLEAIDHEVDDHLDRHFKDQRTLLDSVKGVGPVTILTLTAALPELGSLGRRQIAKLVGVAPLADDSGPRKGKRRIWGGRADVRAVVYMAALAAIKHNPAIKVFHSRLIAAGKPKKVAIVACMRKLLTILNAMLRDQSMWNAAKHLQSTKTA

SEQ ID NO: 304270 - protein, 369 aa, unidentified
MGDRITYVGLDVHKEGIVVAVAEGGLRGEVREYGRIANTAAALDRLVRKLGGEGVRLRFCYEAGPCGYGIQRYLSAHGHECVVVAPSLIPKRAGDRVKTDRRDAASLARLHRAGELTAVWVPDAGHEAMRDLVRARLDAVHALRRARQQLSGFLLRQGCHYGRPAWTKLHRRWLAGLKFEQAVHHIVLEDYIAAVEAAEARRDRLTAQIAAMLPDWTLAPIVAALQTMRGMALVNAATLIAELGDLSRFGNPRQLMAYLGLVPSEHSSGASVKRGGLTKAGNSAARRLMIEAAWCYGFPARVSRELRLRQEAQPWAIREIAWKAQLRLCARYRKLARTGKPANVVTAAIARELAGFIWAIARRVPPATS

SEQ ID NO: 304271 - protein, 341 aa, unidentified
MTDKQTVIGVDIAKRVFQVHEVDWQTGEIISLQLRREKFLEHFVNRTPCLIGMETCGGAHHWARQLMAMGHAVKLLPAMQVKAFVYGNKNDAADARAIWTAVQQPGVKAVAVKSEAQQAVLAMHRMRQQLVKFRTAQINALRGLLTEYGEVMPQGFAAVAKAVPGVLARLVDKLPTVLIDTLREQFSRICDLNKQVTEIERRLQAWLKQNEACRRIAEIPGVGLLTATAAVATMGDPAAFKSGREFAAWLGLVPRQVGTGGKVKLLGISKRGDTYLRTLLIHGARSVLWNSKELPSWAASATRHRHVNVAAVAIANRTARTLWALLAHGRAYEPNYASRPA

SEQ ID NO: 304272 - protein, 415 aa, unidentified
MALKIVYKICCGIDVHKTFVVACIASTNDKGVTSYESHRFSTYTSGLKTLLQWLLDRNCKDVCMESTGKYWIPVYNILEKDCKIVLAHPKYVKAIRGKKTDKKDAKWIADLFKHDLVAGSFMPPADIRQLRDLMRYRFKLTCFKSSEKNRLQNCLTVSNIQLGNVVSDTFGKSAQAILDKILENPADTSFDLEPLVFKSLKKKLSELRDAIDGYITPEQAGKLKVIKAHYENLESRKAELEELILALAAPYQQELAILQTAPGISSDFTAIGIISEIGTNMEAFPSAKHLCSWAGLTPTNNESAGKKKSVRVSKAGCYIKPLLVQCANAVVTSKKHPEIRNRYLRIKKRRGHKKAIIAIARMLLTALYHMLKNGENYNAELYRKSDLPPVDREITVEQALMIARNQGYKIKSATA

SEQ ID NO: 304273 - protein, 343 aa, unidentified
MNEISTIGLDLAKNVFQVHGVDRSGAVVLRRQLRRAAVEKFFAQVSPCTVGVEACGTAHHWARVIGRYGHQVRLMPPAYVKPYLKRNKNDGRDAEAICEAVSRPTMRFVAVKSIEQQATLAVHTTRALLVRQRTMIANSLRAALSELGIVAPPGFEGLRQLMTRLEAPNEEVPEIMRGALLLLAKHWQALDADERVIERQITKAARADGEARRLMEVPCVGPIIASTVLAKVPDARVFRSGRNFAAWVGLTGRDHGTGGKHRPGRISKQGDRMLRALLINGASAYLRQQRMRGVSDPWLRDLLARRPYKVVMVALAAKTARIIWAMLAKGEPYRGRASALPAA

SEQ ID NO: 304274 - protein, 334 aa, unidentified
MEAKKWVGVNIHKKQMTVCFINETGQNEIKRYERNSAGIAKFLSEIDSETVIGIESTTWTWGLAKKAEKVAKDVLVLNTVELKNLMDKTKKTDRVDATKIAIIIRRFEKDELSICSIKSDKWALVKGLLNIREKLVRQKIETKNFIVASLDYWGVEIEKKLFMNHKRDKIVLDSLALCEDLKEEIIGQYELVELYDEKIKILDSKIQKLCETDQGYQSITENIKGIGKTSGAYLTSKIENADRFNDPKKLVSYLGLAPKVNSSDDKNKGGKISGNTDKALLRVLVQAAWASVRYDADMRKIYENLRTRMCVQKAIIAIARKLVVKVYYTMKSKA

SEQ ID NO: 304275 - protein, 410 aa, unidentified
MVKENFIYVGIDLHKETHTAVMIDCYNQKLGEITFPNRPADFPKLVTKVKKCNTDAKEVVYGLENAYGYGRPLAVWLIDKGYFVKDVNTAISHRQAKHRGAMYRKSDSDDAEAIALATLNMLDKLPDACPNDAYWSLGQLVHRRDNIMKQRTRLVSQLHEQLCIAYPSYKQFFNDISRPTALYFWEHYPSRKYLKGKSVEDLRTELVPVSHNRCSTKNCEKILDAVASDKVKNNAYQDARDMVTLSIVSDLQHYDSQLAEVDKMLEQMYKMLGCTLTTIPGVNVITAVKILAEIGDIKRFSNANKLAQFAGIAPLHLSSSGKGKDVATKQGNRRLQATIYFLAIQMVQISSKGTPRNPVVRAYYEKRKAEGKTSQQALICISRRLISVIYGMLKNGTEYRMPVVENAGEK

SEQ ID NO: 304276 - protein, 338 aa, unidentified
MVYGAIDLHMRYSQIRVIDSDGRVLSEQRIPTSPERLVSVFRGHGPMRILLETGTESEWVAQALETVGHEVIVADPNYAPMYGEIRRKVKTDRRDVAALAEANRRGWYRATHRVSGPQRALRQVLRSRRQLVPMRSGTIALIRSLLRQEGYRLAPSSSVRVPARLAALVLPRGLTETIAPLRRMVETLTTEIAAVDARLATHATADPLVARLQTVPGVGPVVALTFRAFVDDVGRFARAGQVSAAIGLVPREDSSAERRHRGHITKAGPRELRSLLVQAGWACWRSRASGTLRAWVERLAGRRGKRIAVVALARRLSRILYALWRDQSVFNAAMLAAA

SEQ ID NO: 304277 - protein, 351 aa, unidentified
MMIIGVDYHPSFQQIAFMDQATGEYGERRLNHSDGEAEKFYRELKQPGVSVRVGIEATGYSRWFERLLVGLSIEVWIGNAAEIKAKRVRKQKTDREDARLLLRLLLENRFPRIWVPSPENRDLRQLLWHRHRLVQMRTRIMNQLQAIAMNEGQRWKKKLFSEQGRAQLEKFPLAAWASRRRQDLLELLDRMDPTIEELTAAVEQEARKRPEVLRLMTHPGVGPLTALAYVLIIGTPERFPGGKQIGSYLGVIPSEDSSGGRQRLGHISKQGNALLRFLLVEAAQAAARCNPHWRRRYVHLAMRREKSIAKVAMGRRLGVRLYWMWRNGLEYSQSIEFGSYAGKLVIGHGVN

SEQ ID NO: 304278 - protein, 479 aa, unidentified
MRTKQQEGAQEAKKASNWHDMNRKQRREMMRKIQSEALSLTVIHPDAAGIDIGNESHYVAVPPSRDSQSVRRFGCTTAELKAMAAWLKQCSVHTVAMQSTSVYWIAVYDILEQAGLEVYLVNARDTKNLPGRKSDVQESQWLMKLHAYGLLRNSFRPSQEVRTMRTYWRQRNDLVRAAARHIHRIQKALTQMNIQLANVLSDVSGMTGQAIIKAILGGERDTRKLAAFRDPRVKASEEQIARSLEGNWQQDLLFVLKQEQDGYEFCQRQMTECDQQLSHYLQQREDRSQAGPLPDEKRKERLKKKKGNKPQFDLRERLFRMTGTDLTQIDCVDVMTATTILSEAGWDMSKWETEHHFVSWLRLCPDNRISGDKIIGKGRLPTNNRVTTALKMAASNLRVSDTYLGAQFRRLRTKLGAPIAIKAMAAKLARLVYRILRYGTKYVDRGAVFYEAQHRQLQIKHLKWKAAKLGFKVIEAPAA

SEQ ID NO: 304279 - protein, 395 aa, unidentified
MLQDNEGTISTQDQPTGSDVFVSVEMSRSKWVVGIHTPLADKIGLHTMACGDVDALLSLIDRTRAKLIASGSNSPATMVCYEAGYEGFWLYRHFVALGIRVVVINPASLLVDRRAKRAKTDRIDARAMVRALMAWARGERQVLSEVRVPTVEQDDARRGLRERQRLVKERTGHGNRIKGLLKTQGIMDFEPRAADAAERLDAIVTGDGRPLAPYLKREIVRELERLALVMRQIDRVEAERDAVVKACDAGAGTDALAEPEREAAMIGELNRLKGIGMNDATILVREAFWRDFRNRREVGGWSGLAPSPWASGSVLRDQGITKAGPPMLRAHMIQMSWRWLLWQPDSDLAQWFRKRTEGATGRMRRIMVVALARKLLIALWRYATTGMVPHGAIVT

SEQ ID NO: 304280 - protein, 406 aa, unidentified
MDKVYDKCCGIDVHKKLIVACFRKGSKQELRNFGATTRELLELANWLQNGGCEMVAMESTASYWKPLYNILESSELKAMVVNASHMKAVPGRKTDTKDAEWIAELLQHGLLKASYIPDKQQRELRELVRYRKSLVSERTRELNRLQKMLEGANIKLSGTVSDINCMSARNILEYLLTGEFFDEAKYDEMYKQKIIAHNLKASKEQLIDDLNGVMTPLQRRMMKELLSHLDELNVHINNLEDEIDNFMKPEEKKATQAIQDVTGIGKNSSQAIISVIGTDMSRFPTAGHLAAWAGLCPGNNESAQKRKTGKMRKGNALLRSTLVVCAHSATRNKNSYFYAQFMRISSHRGKKRAYVAVAHSMLIAIYHILKDGVVFKDLGADYYNQFNKERKINAYLKKLKRWWRFR

SEQ ID NO: 304281 - protein, 340 aa, unidentified
MNVRTIGMDLAKNVIQVHGADGKGNTVFRKQLKRAQVLPFFANLVPCQVGMEACGSAHFWARKLVAMGHTVQLIPPQYVKPFVKRNKNDAADAEAICEAVVRPNMPGVPIKTVEQQAILSVHRARQGFVKARTAQANQIRGLLAEYGLVIPVGIRHIPSCVALIIDDDENELPMSFRHLLQTLVEHFKALDEQVGKLELEIKCWHRDCAASTQLATVPGVGPITASALVASIGDAKNFKNGRQMAAWMGLVPRQHSTGGKTVLQGISKRGDSYLRTLLIHGARAVIRVSEHKIGADPWLKTLVARRNKNIAAVALANKNVRVIWSMLTHERDYVPNYVHA

SEQ ID NO: 304282 - protein, 351 aa, unidentified
MMIIGVDYHPSFQQIAFFVEESGECGERQLGHSDGEAERFYRELKQRGIRVRIGMEATGYSRWFERLLAELGFELWMGNPAEIQAKRIKKQKTDRNDARLLLRLMRENNFPQIWVPSPENRDLRQLLWHRHRLVQMRTRIMNQLQALAMNEGYRWKRKLFSEPGRAQLEKLPLAPWASRRRQELLELLDRLNPTIEELTAAAEQEAKKRPEALRLMTHPGVGPLTALAYVLIIGTPTRFQRGKQIGTYVGMIPSEDSSGGKQRLGHISKQGNSLLRFLLVEAAQAAARIHPDWRRRYIHLAMRRHKSIAKVAMGRRLGVRLYWMWRNGCEYSQSFEFGSYAGQLVTGQGVK

SEQ ID NO: 304283 - protein, 306 aa, unidentified
MKKISTVTAKKVEKVVSQKLTIGLDLGDRWSWYCVLDETGEVVLEQKVATTPKAMKEVFSGMPRSRLALETGTHSPWVSRVLSELGHEVIVAHARNVRLIGESRKKDDRLDARTLARLVRIDPQLLAPVKHRSAQAQADLMAIRARAGLVRTRTSLINTARGVTKSYGERLRGCNPRNMNPAKVQELSPELQAALGPLLGAIESLSERIVEYNERIEQIAKQSYPEVGRLKQVKGVGTLIALTYVLTLEDAHRFGKSRDVGCYVGLQPGRRNSGQSEPQLHISKEGDRYLRTLLVQGAHPSSLQCH

SEQ ID NO: 304284 - protein, 410 aa, unidentified
MDVFCGIDWAEDHHDIALVDRDGGLVARLRISDDAAGLARLLELLAEKGDSAGDPVPVAIETPRGLLVACLRATGRRVYPVNPMATARYRDRHSMAGRKSDHGDAVVLANILRTDLHAHRPLPADSELAQAVAVLARAQQDAVWDRVAAHNKLRSHLREYFPGFLAAFAAAKGGIMRPEARAILAAAPTPEAAAKLTLAQLRALLRKAGRSRSIDAEAQRLRGAFRQEQMRQLPLVEQAMGRQSLALLRQLDAACQSADDLEQAATESFSQHPDAGIITSFPGIGALTGARVLAEIGDDRSRFQDARGLKAYAGAAPVTRASGKSRSVTHRRVKNNRLAAAGYIWAFSAITASPGARDHYDRRRDAGDRHAAAQRNLFGRLLGCLHHCLTAGQHYDEATAFPAKAAPAAA

SEQ ID NO: 304285 - protein, 349 aa, unidentified
MWIIGCDFHPSWQQVAWCNTETGETGEQKLENGNGESERWYRQLPVPSRIGLEATGNSQWFVELLQKLGQEVWIGDAAQIRASYVRQQKTDKLDAAHILRLLVENRFPRLWVPTAEQRDVRQLLIHRHKLVEIRTRVKNGLQHLAMNRGMQKKRQLWSAAGQQAFRELPLPGWAGCRRQDLLELLAYLDQKIARLDRAAEETAQRDKMAQLLKTQPGVGPITALAFAVTIGEAARFPRSKQVASYVGLIPREHSSGGRQRLGGISKQGNRFLRQLLVEAAQSAVRYDESLRRPYQHRCHRKPKGVAKVAAARKLAVRLYWMLRTQTPYPEIVRIESSPRVPRVRSAAAD

SEQ ID NO: 304286 - protein, 378 aa, unidentified
MTTQLTASPKLYIGMDIHKKSWSVHMRSDISDHKTMTIPPKSEALFNYVHSNFPEHEIHITYESGCCGFEPARYFLNMGWNVTVVNPADVPTMHKQTHQKNDAIDCRNLSKQLQTGQLRGIYIPDQKQDYLKSLLRHRADLSGQLRSIKNSIKSLLLYHDIKIPEQYDNPNWSKEFITWISNIKWSEPTIRVCMESKLRQLQFIHTEYLQMANELRSYCRKHHKKDYYLLKSIPGIGGYLAAAVLAEIGDLRRFTKSSDFASYVGIIPSMRNSGSTEKITGVTPRCRALLRSYIIESAWVALRHDPHMQAYYRKHAGKNPKSIIVKIAHKMLNRMLAVIKTETPYQANYSFNNGKPIKETTKQTTKQRGAAKSATPSR

SEQ ID NO: 304287 - protein, 338 aa, unidentified
MKKFIGIDLHSNNSVVVVSDEEDRVIFQKRMANELKLIEVALAPHRDETVGVVVESTYNWYWLVDGLMDAGYRVHLANPSGIRKYEGLKFSGDVADAAYLGHLLRLGLLAEGYIYPREQRGARDLARKRLQLVRYRTAQILSIEGILMRQTGARMKSESVKGLTAEQVEEFGFAPDVALAVEANRAVSQTLGQQIEALEKRLRERVSLRGEFKLLKTAPGIGETLATTIMLETGTIARFAQVGNFSSYCRCVDSLRESNGKKKGEGNAKNGNKYLAWAFVEAANFAVRYCPQAKSFYERKKRKTNGIVAIKALAHKLARACYHMLREHKPFDVNRCFA

SEQ ID NO: 304288 - protein, 408 aa, unidentified
MNPLYVGIDVSSKSNVVYFMLPDGSRHSNFSVANSHTGSSQLVKRILSAMTSFSLDSVLIGLEATSVYGDNLVYFLREDAALARFNSKIHVLNPKQVSKFKEAYNDLPKNDLIDSFVIADCLRFGRINKEVYIGDYRYKALQNLTRARYFAVSNLIKEKQRFMNILFKKYSTMTQEKVFSDTFSTTALAVYDEFESAEALADMDLHELTAFIMEKGKNRFPNPNAVAKAIQKAARSSYRLPKTVNDSVNQVLSISITSIKALEAQIKEFDKAIATQMELLPNVLISIPGIGPVFSAGIMAEIGDINRFHNQAQLAKYAGLAWKQHQSGDFEAQTTRLINSGNRFLKYYLCEAAFSLVRCDKEYSDFYHLKYKEVNRYQHKRALALTARKFVRLVFRLLKDNRLYTSAE

SEQ ID NO: 304289 - protein, 356 aa, unidentified
MDEYIAFDSHKRYTWVEREEQSSGKVRQFRVEHARGAIRQALAGCQPGTAVAIEATGNWYWITDEIEQAQLVPQLVHPRKAKLMMGQINKTDKLDAHGMNRLQRTGTLPTVWIPPGRLRELRELTRTRLVLATQRTRWKNRITATLAKWGLEAGEYSDPYGKKGRAILEQRLEELPEQTRWATRQMLLQLDGLQAQISEFEERLEQLVEVTLEMQWLESMPGVGVILAATIWLEIGEIGRFLSAERLASYAGTVPRVHASGDRIRFGRTRPDVNRYLKWAFAEAANSVAVNARRLPERHVSKIYWKLRERKGHAKAVGAVARHLAESAFHVLSRRENYRDPAAGRSDQGGVSAKLS

SEQ ID NO: 304290 - protein, 361 aa, unidentified
MYGSMSLVGLDVHASQTHAAILDMSSGELRGVRLRMPPGEVVKFLAGLPGPVRAVYEAGPTGFGLARAAIDRGIDVRVVAAGKVPRASGDRVKTDKRDAERLARLLAAGELRFAYVPSVADEQFRDVIRAIEDCRGDLMRARHRLGKLLLRRDLRWTGPGSAWTQKHMSWLRGLRFEDLCSQATLIDYLAGVEMLVARRAALIAALEQVIPDSRHAPTIAALRCFRGIDTLSGAGLCAEVGDWQRFRPKQLSGFLGIVPTEHTSDTKRRQGSITKAGSTHARRLLVEAAHHYRHRPAVGDGLARRQHGQDPRVIEIAWRAQRRLHQRWNVLAGQRRKPSGVVAIACARELAAFCWEAATLT

SEQ ID NO: 304291 - protein, 358 aa, unidentified
MSKPTPMSRLDKVFERCTCRQAFVGLDVHKKAIHAAVWIEGRVALSWVMPAALERVVAKLAPHALTIARVVYEAGPTGFSLARALRQAGLAVDVVAPGRTPRAAAQQTKCDRLDAAALAKYAAKGLLVPVAVPSQTEEADRQVERLRDQLVQKRRRVKQQIKSFLLQHGLGEPRGLERWSLAARAALRQSALGPQLRACLDVLLELLEQIEAHVRCVERTLRQLAASERHAEAAAIARTHPGVGPVVAMSFIVEVYRGGRFKTAREVGSYVGLAPRVRQSGESRRDGPIARTGRPSVRALLVEAAWRWRTHDAAARTLYARLVHNTGNAKKAIVALARRLAINLWIMLTRREPYRAAA

SEQ ID NO: 304292 - protein, 428 aa, unidentified
MSNHELTRRKQYCQIVKEITGSDQYMVVGIDIGKDKHHAFMGTATGKSLFRKLIFENNKDGFSRLLKTADAIKVQNGLSKIVYGLEPTGNYHKPLARHLIRFGNNLVLVSGEAVKKNRVLLDGRWDKHDTKCAANIADLVSRGRCLYYDSPSPGIIELRSLLSLRRRLKKEEHSLRMRIRNNLLALYFPEIDRFYSACESESLAIVKWCLDPDQIAGMAFEPFFQMVTHTRRGSAQLFRLRKIHQLASESIGCPMGSAATFEAQLLVDKLKQVRQQVKDTEAALKEVALEFAEYDYLLTIPGFGPYISARVLASIGDPFRFKNRKQLIKMAGYDLGANRSGKTSDKAVPVISKKGNSELRYALYQAAKVATARVDLFRTYFTELLRGRERERGIKTKMCVKLAAKMLIIASTLMKNKEPFDPEYLTIE

SEQ ID NO: 304293 - protein, 407 aa, unidentified
MELLYARCAGLDVHAKTVVACARIASGGTVTYDHRTVATTTQGLLELAEWLTAQGCTHVGLESTGVYWKPVWHMLEGQFELTLANAMHVRNVPGRKSDMKDARWLADLLAMGLIRSSFVPPAPIQELRDLTRTRKQWVREIARHTQRIQKTLEDANVKLTAAISDIRGTSGRAILKALMAGETDPERLVDLTTGRLKASRAQLVEVLRGRVTVHHRFMITLHLTQIEALETAVTTIEERIEEALAPFRAAVNLLTTMPGLSNTTAAVILAEIGDNVAPFPTAGHLVSWAGLCPRLDESAGKRRSTRTRQGAPWLKTTLVQAAWAATRRKDGYFHAQFLRLKSRRGPKKAILAVANSMLTAAYHMLRDGVEYHDLGGQHFAHRDKDQITKRLIQRLRDLGVVVEVKAA

SEQ ID NO: 304294 - protein, 348 aa, unidentified
MQSKSQIRSIGIDLGKTTFHLVALGSRCQVVVRKKFSRSQLLVYTANLPSSLIGMEAGVGSHFLGRALREQGHEVRLMPAQFVRPFVKSNKNDYRDAEAIAEAVERENMRFVPIKTEDQLDLQALHRVRERLVSRRTSVINQIRAFLLERGISFAKGPARLRREIPEILENADEKLSTRMRRLLEFLWQEWKHLQLQIESLSEDLEKIANSDAACARLQQIPGVGPLVATAVVSAIGNGAAFHKGREFAAWLGLVPGQWSTGGKAKLLGISKRGNPYLRKMFIHGARAAVLRVKREGSYLGQWMGGLESRAARNVVIVATANKLARISWAVLSSGENYRPRPALAVAS

SEQ ID NO: 304295 - protein, 351 aa, unidentified
MLIIGCDFHTRFQQIAILDPTSGEILERRLEHETGEAEKFYASLPDPARVGVEATIRAQWFERALARYGHELWVGDAAEISAARVRKQKTDSRDALHILDLLLTNRFPRIWTPSPTERDLRQLLRHRHKLVRYRTSVMNQLHGLAMSQGLCRKRKLWSRVGRRELEALTLDPWADRRRQELLALLDRLNPWISDLDRAVEQEAELRPEAVRLMEQPGVGPVTALSFVLTIGPVSRFQRSKQVVSYLGLNPREESSGGKQRLGSISKQGNSMMRYLLVEAAQVASQSDPELRREYLRLKFRRGHSAVAKVALARKLAVRLYWKLREAAPPLPSARMQGSPSNPMVEGNPSPS

SEQ ID NO: 304296 - protein, 353 aa, unidentified
MRKQYSTVSFKGQVVYAGIDVHKRQWTVTLQHCGHPQKSFTMDPDPGKLVEHLKRNYPDAEYRSVYEAGFCGFEAHRALCLLGVKNIVINAADVPTSGKERENKNDGCDSRKLARELENGSLEPIYIPEPENLILRNLKRREDQVVQNLTRIKNRIKSHLYFIGVKFISWAGGSLKNMEEDAVKRHDYALLSDLRELRFLREEKLRVVRDERDCLKLLHREEIQEDIQSVPGIGFRTAVALQAELWEMERFQTKDHLNSYVGLAPRIFGSGEHVTVKCGNRKKKQLHYLMIEAAWRAVRYNLEYKARYGALVGRGMRSQRAIVVIAKKLMLTVRAVWIQNRKFVDLLPESKMN

SEQ ID NO: 304297 - protein, 381 aa, unidentified
MTTLASRNTQDNTTAGTLFVAFELSEKTWKLGFTTGHGQQPRERTVPARHQEHVLNEIAQAKRRLGLPETAPVVSCYEAGREGFWLHRFLQAQGLTNYVVDSSAIEVNRRRRRAKSDGLDVRKLLSMLIRYEQGERQVWQVVKVPAVEAEDQRHLHRDLETLKQERASTTTRIKGLLSSQGLRVTSLTKLPEQLEALRLWDGSPVPPGLRRRVLRVYAHHTFLSEQIAAVEAERRAQLQASTDASLDKVRQLMLLKGIGINGAWLLVMEFFGWRAFKNRREVGGLAGFTPTPYQSGASAREQGISKSGNRHVRWMTTELAWSWLRFQPDSTLSIWFRERFGGGGKRLRRIGIVAVARKLLIALWRFLETGLIPEGAVLKEA

SEQ ID NO: 304298 - protein, 419 aa, unidentified
MTECDITASAPVLAAIDISKVRHEVLIDAPDKKRRRRVSVLNNLDEFDRLISLLRSYQRPVRIAFEATGNYHRALAYRLGSAGFEIKLISSIALARTREALHNSWDKNDPKDAQVILHMMTIGAEQFYHDPLMHGTNDIQELSKTHDMISRSKTELWHRILTHYLPLYFPEADRFHRSSRSDWFFAFLELFPSPHFIAAMNKEAFVEAAWDVVGRKVGKARLLADIYATATRSIGLPVAPDSDAIGMFRMVLAEGRSLIAQRNQIEARAVEMLEHNPDYQLLCTIPGIGPINALTILAEAGDLRRFQHHRQFLKFCGMDLATIQSGMFRGQTKLSKYGNARLRRTLWMAAQVAILQRANSFRDKFERYITKDRHNTNLRRKASTAIAAKMARTVHAVVKSGEPYRPFFEGTIHSGRTLL

SEQ ID NO: 304299 - protein, 408 aa, unidentified
MNAVGIDVSKGKSMVAALRPMGEVALLPQEFLHTAPGLDQMAHAILALGEDTRVVMEATGRYHEPVAAALSAYGIYVCILNPLYIKQSGAGSIRKVKTDKADSLKIAKYGLDNWVDLREHTAMDTIRQQLKLCSRQYNIYMKTEVSLQNNLISLTDKTFPGVNELFSSPARADGHQKWIDFVMTFWHCDCVFRISEKAFTARYEKWCKRKGYHFRAEKAAEIYAQSCELFVTLPKDDNTKLLITTAAQQLLAGKMTLAALRAEMTRLAQQLPEYDTVRAMYGVGETTAAQLMAEIGDVRRFPRRSSIVAFAGVDPAITQSGKHEVQSTATTKRGSPHLRKTLYQIVCTYLRKSPEDEPVYQFLDKKRGEGKPYFVYMTAAQNKFLRIYYARVKECLEAFDTQQNTVQD

SEQ ID NO: 304300 - protein, 422 aa, unidentified
MLGIGIDWAEDFHDIALGTQQQGVIHQFRIDHGPAGVSTLIERALRLEPDPAEIRVVLETRHGLLVEALVDAGFTVVPVNPDVVARRRGPARKKDDAEDARICCLLALDRHAALKTLIPHGQIGGELRAIGRDDERAARDQRRLLNRLRADLQTTYPAALQLAGKDLGAPTVLRLLERWPTQPELAQASRAELVEFARLGRHGWPQRFADRVVAALAAPSLPTRDYLVRAKAAGIRLAAVQLLALHEARRGWQARMAELLLGGPRTGRDHTAKDPDPGKAFPGGEIYLSMPGLGDLLAARVAGEIGEHINQFDCPSGLQCYAGSAPVTRRSGKSDFVIARRLAHNHYLGAAVHQWAFCSLLHSVWAREFYDSKIAAGKSHHAALRALSNRWLEILWHCLTKGVLYDEATHVTNRNRALGHAA

SEQ ID NO: 304301 - protein, 340 aa, unidentified
MKDISRIGLDLAKNVFQVHGVDSREEITVRRSLRRNQLLDWFGKLPPCLVGMEACATAHYWARELARLGHTVRLIPPSYAKAYVRRNKNDAADAAAICEAVSRPSMRFVQAKTEAQQAAAGIHRVREALIKQQTATMNALRSLMGEFGIFAAKGHKGMDELLATVADADDTRIPEPLHSGLVVFAKMLETLEAQLGKVDKALADWGRTQKNTRRLCAIPGYGVVTASAIAARVTNPQAFDSGRHFAASLGLVPRQDGTGGKVKLGSISKRGDGYLRKLLVNGAMSVLRSKQAKQDPWLKKLLATKPMKVVAVALANKNARIGWAMLIRQEDFRPRQPAAA

SEQ ID NO: 304302 - protein, 359 aa, unidentified
MNKNSMFFVGLDLGDKFSYITIVDQDGELIEESRLPTTKASFQRKFSTLQPCRIAMEVGAHSRWASHLLTELGHDVLVANARKLRAIYHNPRKGDRADAETLARLGRLDPTLLSPIHHRSPQAQADLAVLRSRDAIVRCRTLLINHARDIVKASGSRLPSCSADSFAHKAAPHIPDPLRPALAPILDTIASLTKQIRAYDRQISTLCQENYPETRQLRSIDGVGPLTSLAFVLTLESPVRFTRSRDVGAALGLVPKRDQSGDRDPQLRITKTGDGYMRRLLVGSAQYILGPFGPDCDLRRWGLKLAERGGKNAKKRAVVAVARKLAILLHCLWKNGTTYDPFFQSKKNVIASAAVTATA

SEQ ID NO: 304303 - protein, 369 aa, unidentified
MGNSTSTSWVAMDTAAETIHVAIFRGEEAKASEEFEVSADARGIGRLKKKLEKEAGAVKCVYEAGPCGYGLYRTLKASGYDCQVIAPSLTPRKPGERVKTNRLDARRLGAYYRAGQLTPVRIPDEKQEALRDLLRARDDVRRNLQQSRQRLSGCLLRQGYHFKEANRWTLKHWSWIKAIKIADETVKMVIDEYVTAVEMQMEQMKRFDQKVHEIAQRQEYAAKVAAYSVLRGIQIVGAMTIIAEGGDLRQYGQAPQFMASIGIVPGEHSTGERQKRGAITKTGNVYLRRILIEAGWSYQRRAHAGPTIQKRRRGQPEALLSIARRADHRLHGKFSKLQFRYNKKPQVANVAVARELAGFVWAIGQLLES

SEQ ID NO: 304304 - protein, 317 aa, unidentified
MERRQSSTKAAGIDVGKRGLDIAVHGLEDELRVENGPAGFSELIAWLKAREVGRVGLEATGGYERGVRAALEKAGFEVVVHQPLEVRRFAQLKRWRAKNDRLDARLIAAATAQIEAVKAAQDPRLIELAERLTAYEQVTDQIVELKTFLESVTLKDLISLIRAQIRGLAKTKARLSLDLLRRIKAETDLLARFRLLTSLPGVGTIVAASLVIRMPELGQMRRGQAASLIGVAPFDRDSGQWKGQRFISGGRTRPRRMLYLAAVTAKRFDPTLKAFAQGLIARGKPAKLVTVAVMRKLIEAANLVLSRGQPWLKRPVT

SEQ ID NO: 304305 - protein, 426 aa, unidentified
MKDTNIDTDPEPPYAAHIGIDWADKRHAIALQVAGDGKIEESWLDSDPESVHAWARSLGERFGGAKIAIGVELSKGALIEELRGYGSIDIYPLNPATTCRYRGAFTPSGAKDDMPDARLHLELVRQHRDKLRLMRPKAGADRRVELLNSGRRKLVEMRTDLCNTLRSTLKGYYPLALEVGGELGTPISCKFLLKWPAFGELKRARRATLRAFYYANGSRRADTIDGRLEKIAAAEPVSEDPDLIGPMAAFATALARQIQTLAAEIGKLERQLKAAYAAHPDHEIWSSFPGAGPFLAPRLAAAWGSDREAYGTAGDMQLYSGIAPVTERSGNSTWVHRRYSRPHFIHQTFWEYAKQSCLHCGWAQLYVDAQIARGKKHSTAVRSLAFKWIRIMAACWKQGEPYDDAQYLRALQRKNSPLAANLPAAA

SEQ ID NO: 304306 - protein, 339 aa, unidentified
MYFTGIDLHKRTSFVTTIDEQGKIVQKANLPSSATEILAFLEKLGGASQIVIESCSSWYWLYDALTEAGYCPVISHPLKTKAIASAKIKNDKVDSHMLAQLLRAGLIPTVHVSSLETRKLKELLRHRSRLVRDVTRMKNRIHTILAKNNCPVPYSDLFGVQGLIHLQQVSLPDYHRRQVETYLFLYEQLVKQIEPLTQKIHALAKEDFMAQLLMTIPGIGPVIAMFIVAEVESIDRFPSYRKLASYAGLVPSLDDSGDKHRSGRITKQGSPWLRTAMIEAAHVVPRMKNRKMNLFFRKRIVRGGYRKAIVATARKMLQIVYCVLKNQTPYQEEFQQIRA

SEQ ID NO: 304307 - protein, 340 aa, unidentified
MSEITTIGLDLAKNVFQVHGIDEAGNVLVRKRLRRSQVLGFFSGLSRCLIGLEACATAHYWARELVGLGHEVRLMPPHYVKAYVKRNKNDAADAEAICEGVKRPTMRFVAVKTVEQQSALMMHRARDLLVRQRTMLVNALRGHMAEFGLVSAQGLHNVTGLVAIIRNGADERIPEGARQVLTVIADQIDEIGGNVSVLEVQILAWHKNNPVSQRLATIPGIGPIIATAIAATVPDPSAFRNGREFAAWLGLVPRQNSTGGKARLGGISKRGDSYLRRILVNGAHAVLFWSKTAKADPWLASLRARKHRLVVAVALANKTARIVWAVMSREEIYRRTPAAA

SEQ ID NO: 304308 - protein, 335 aa, unidentified
MQIATIGLDLAKHVFQLHGVGPDGCVILRRKLRRTHMMPFFASLPPCLIGMEACASAHYWARELSAFGHEVRLMPAHYVKAYVKRGKTDAADAEAICEAVTRPTMRFVAIKTKEQQAVLVMHRARDLLVRQRTQLINALRGLLAEFGICEPQGVRHVGRLRAHLDEDTVPEPGREVLRLLVAQLVELEKRVTAIDAKIRGWHRDNPMSQRLAKIPGVGPLIATAIVATVGDASLFRSGREFAAWLGLTPRQRSTGGKQRLGRITHQGGAYIRRLLIIGAQSALQCSKETKENVWIRGLLTRCARLKVAVALANKMARITWALMAKEDVYRRAPTA

SEQ ID NO: 304309 - protein, 401 aa, unidentified
MQQDQQHDSVDVFVGVDVGKGQHHAVALDRNGKRLYNKAMPNDEAKLRALISELRAHGRLLFVVDQPATIGALPVAIARDEGVMVAYLPGLAMRRIADLHAGEAKTDARDAAIIAEAARSMPHTLRSLRLADEPLAELTMLCGFDDDLAAQITQTSNRIRGLLTQIHPALERVLGPRLDHPAVLDLLERYPSPATLAAASEKTLANRLTKLAPRMGKNLAAEIVQALNEQAVIVPGTQAATIVMPRLAQQLAALRKQRDEVASEVERLVLAHPLWPVLTSMPGVGVRTAARLLTEVAHKAFASAAHLAAYAGLAPVTRRSGSSIRGEHPSRRGNKVLKRALFLSAFAALRDPISRAYYTRKVEQGKRHNQALIALARRRCDVLFAMLRDGTIYQPKAADNV

SEQ ID NO: 304310 - protein, 455 aa, unidentified
MSNRSRRGLSRGDRRRNEKLARLREIITRETAVLAFDLAADKQVCALTDPDSRVLARRTARVRAWQLAQTLDWGLAAAAEAGFTSVVVACEPTGHRWRVLDQLAAERGVVLVCVQPLLVARAREAEDFTRNKNDDTDAMIIARLVTELRCYLPERADPAWARLRHLGARRARLVVEVGAARQQVRDLLECAWPAVLDAAGKPLDSANWLTVVATGLDRIGATGELSELGQRGWEDFAAAVRAELAPTRWYSAIVRAVFDAATDPAAAAAGVVDQRAGALERVRFALADLAHLRARIAEVETRMTRVLDTLGVTELVTGIPGVSAVGAATILAEAGDPIRFSSARALVKHAGLCPRANESGKYTGTTSISGRGRPELRLAAWRAVFTALQHNPVLAARHAHLTGRAENPLTDTQARIAIAASLLRQLHAVIVTRTAWDPAIAAGLDRREDGAACAA

SEQ ID NO: 304311 - protein, 410 aa, unidentified
MVERFVGIDVALREHRIAVLDRDGEAVGPSFTIAASKDGVATLLRTLDARGATAAQTLIGLEASGHLWENLEAALIGAGYRVIVLNPLQTRRYRDVVRRKAKTDDIDAHVIAGLLRSGAAQASYVPDEPIQSLRELARLRARLMADRQDYLRQLVAQLDVVLPEHRTVLGDLLTARARGILAQFPTAPHLANANPRAIRRAAEEAGARGFSLDDATGVRDSARRSLYSGKAAAARAHVVRTLVSQLERLTSAIDEVDRAATALLPPSAPGTGPSDAELLQTIPGIGPQTAATLLGELGALTRFTDARALVAYVGFYPVINESGDRAAPPRLSPVGSRIARHSLYLAAVNAVRRSGEWRTIYLRKKAQGKTAKQALVVVAVKLLHALYAMLKHRQPYNPSRLLVAPATIGS

SEQ ID NO: 304312 - protein, 454 aa, unidentified
MPKKAKIEKTATGKILKVVNPNAAGIDIASSEMQVCVPEDRDSECNRTFGCFTQDLKQIADWLKSCRIDTIAMESTGVYWLPLYFLLKERGFDVILVNARDVKNYSGRKTDEADAEWLMMLHSYGLLKCSFQPENEARAIRNLTRHRSNLLQSSSREALHMQKAMEQMNLKLGNVISDLLGKSGMSIIRAIISGNHDPRELAALAEENCKASKEEIAKSLEGSWAEDHLFELEQAFDLYNFIQEQVNKCDRQIEMHLIRYRAKLDHPSDDNFQRCKKKIGKKNAVDFDVEKYAFDIWKVNIMAIPGMSAISLLQLIGELGHNFADKFETCHSFCSWLNLVPNNKVSGGKLLSSKVPKKTNICGQVFRLCANSLKRNKTTLGYYFRRIQSRCGYSQAIVATAHKIAKIFFTMIKNRTEYDESETGINERDLLERKITMTQRRLDKLNRQLEVALV

SEQ ID NO: 304313 - protein, 428 aa, unidentified
MNDSDLSRIKAFRQLKLEIRGSDRHLIVGVDIAKSRHHAFLGTSNGKTVLKGMIFDNSRQGLEKLLTRVQFYIDRDGFRSVVFGVEPTSVYHKPLAEQLIERGHMVVYVTNEAIKKNRSLLDGRWDKNDTKDAANVADLIGQGKCNYYDLPRMPIRELRSLLLLRKRLKRQLHGSRVRIRNNLVAQYFPELDKSWNQAEDENLAIVRWFLSPEKIRSLEFEDFFNRVTKRYNGIRQHRRLRTIWEMAGESIGCRPGVTAMQFEAKVLTENIKNTKAQIERVEKEIERICRSCKEYAYLLTIPGFGPYVSAVVVAAIGNPHRFENIQQLKRLAGLDLNASRSGKKSSSAVPVISKKGKGELRYALYQAALVASSLTVQFRAYYHSILKGREREKGIGTKMRVKLATKFLVIAWTLMKKKEPFSPSYLKT

SEQ ID NO: 304314 - protein, 430 aa, unidentified
MKSNTQNTKIEAITETTLVLGIDVGSETHYARAFDYRGIEYSKKPLKFSNDEAGFVTFKAWILDIKEKHGKDKVVPGMEPTGHYWFNLGKFLQDNEMKPVLVNPHHVKKSKELDDNNPTKNDRKDPKVIAGLVREGRYMIPYLPEGVYADLRTASNMRFQLQAELTRIQNRISRWFNIYFPEYKTVYGQPDAKSGMLILKVAPLPEDILTLGIDGVNQIWRDAKVRAVGKARAKTLIEAAEHSVGSKEGEISARMEIRMLLEDYESRNTRLQEVVALIEELVKKIPMAEKLLEIKGVGIKTVSGFLAEVGDISRFNNPKELQKLAGLALVENSSGKHKGETTISRRGRKRLRYLLFEVAMSLVSKNPEFRELHSYYTTRKLKPLKKMESLMAVAAKLLRVFFAMLTKGVDYDPQKLVGDIKRPAVYLQVA

SEQ ID NO: 304315 - protein, 343 aa, unidentified
MPNYVGLDVSQKTTSICVVDERGRRLWRGVCATDPDPIATRVIKYAGRPAKIGIETGSMTPWLVHGLRAAGLDVECLDARRVKAALQMRLNKTDENDAEGLAQVVRTGWYRPVHVKSLDAHRARALLGARAQLVGMTTRLSNMIRGVLKTFGLLPGAGRGLRFDRKVEALLKGTPELEQIVLPLLATWRQLREQTAVFDRAVRQQVRTDPVCRLLMTVPGIGALSSLAYATTVEEPGRFARSRAVGAHLGLTPRRYQSGEVDRSGHISRCGDGLARTLMYEAAVVILHRVKRPLHLKTWAQAIEDRSGPGKARVALARKLAVILHSIWRSGEPFRWPSQPMAE

SEQ ID NO: 304316 - protein, 408 aa, unidentified
MNAVGIDVSKGKSMVAALRPMGEVALLPQEFLHTEIGLEQMAYAIIALGEDTRVVMEATGRYHEPVAAALYEYGIYVCVLNPLFIKQSGGGSIRKVKTDKADAMKIAKYGLDNWVDLREYTPMDTVRQQLKLCSRQYNLYMKTVVSLQNNLISLADKTFPGVNELFSSPERADGHQKWVDFVMTFWHCDCVCRVSEKAFTERYQKWCKRKGYHFSAEKALDVYAGSCGHFTTLPKNDNTKLLITTAAQQLLAGKMTLAALCAEMTRLAKQLPEYDTVRAMYGVGETTAAQLMAEIGDVRRFPRRSSIVGFAGVDPAVDQSGKHEAKSTPTTKRGSPHLRKTLYQIVCTYLKRSPVDEPVYQFLDKKRSEGKPYFVYMTAAQNKFLRIYYARVKECLEAFDARQSLAQS

SEQ ID NO: 304317 - protein, 355 aa, unidentified
MVRAHWIGLDVHCSSTDMCVVNSSGERVRRDRCATTIVALRAAVESVKRPRHVTFEEGPLADWLYRHLKDCADEVVVCEPRRNALIAKDSDKDDAIDAEKLAQLLRGGFLKPVHHPESFERVVFKQHVALYHQRVRQRVREANLILAYLRRFGIFVKECDLVDAEERPKLAQRLPDAATLRQDLKCLWKSYDAVCDQVHELRERLVRQARREEPIRRFEELPGFGWIRAATFYAFIDTPWRFGGKSALWRYCGIGLERAHSGGGPVLLRVAQQANRRLRDVLLGAAKTAIHQKENPFADQYERWLEAGISPRNARRNVARSLAATLWGMWKNGSAYRPEWVGRSLAGNDVQVSLR

SEQ ID NO: 304318 - protein, 408 aa, unidentified
MNPLFVGIDVSSKNNVAYLMKPDGSKHSSFSVQNNLGGAKLLSERIVSALGSMQLERVVIGLEATSIYGDSLVYALREDGRLGRFQRKIHVLNPKQVRKFKEAYSDLPKNDWVDAFVIADHIRFGRINREVYMDDYRYKALQTLTRARFDVIQNLTREKQRFANYLFLKCSGMAQDKDIQNTSATTIALMEHFETVDDLANADLEELTAFITETGRGKFADPDATAKAVRAAAKGSYRLPKTVNDTVNQAMAVSIASMRALKGQVKVLDKAIEQQFEIIPNTLTSIPGIGKVYSAGIIAEIGDIHRFDSQASVAKYAGLVWNRSQSGDFEAEHSRMIKSGNRYLRYYLLEAANSVRRCDSEFRRYYDLKFKEVNKYQHKRALALTARKLVRLVFRLLKDNRLYIPPEG

SEQ ID NO: 304319 - protein, 388 aa, unidentified
MTHLPVPYPVPATPDYDRTLVLAIELSNASWVLAAQVPGLPRVKAKRTIEPTAEALLAAIQGYRERAQAAGRQVERVVATYEAGWSGFWLARWLATHGIETHVVQPSSVPVDRRARRAKSDGIDAELLLRTLLAWLRGEPRVCSMVPVPDEADEDARRCIRERTELVAERVALVNRIGAVLATLGVDEYNPLLRNRRECLDALRTAQGTPLPPRAHAKISRMLDRLDLVRAQITALEQERDAILDDEAPDRAGGMIQQLATLRGIGVQSATVLVREAFVREFANGKALGSYAGLCATPYSSGGTEREQGISKAGNRRLRTVMVELAWLWQRYQPGSAQVSWFRERVGGTGARMRKVMVVALARKLLIALWRFATQGVVPDGAVMKPAS

SEQ ID NO: 304320 - protein, 373 aa, unidentified
MTMIGNEERYSRASSDTVVEVVLGVDTHLDVHVAVALDQLGRRLDTFSVPTTKKGYEDLLAWAEGFGAVRCAGVEGTSSYGAGLARYLRVVGIEVMEVERPKRRHRRRNGKSDTRDAEAAARAVLAGGTAGEPKGGDGRVEMIRVLRSTRRSAVKARSQVANQLQGFLVTAPEELRERLRELTTKELVAVAARLRPSKDLDNVETATKFALRSVARRYQLLSKEIAELDTQLDRLVSETAPELISLPAIGTDHAATLLLTVGDNPERLRSEASFASLCGVSPVEASSGKVVRHRLNRGGNRDANRALHLICVVRMRVDERTRRYVARRSAEGKSKQEIMRCLKRYVAREVYRVVVSAASPSPSGSCRRDVPLT

SEQ ID NO: 304321 - protein, 340 aa, unidentified
MHPYFVGLDVHKQVIAYCVKTESGEIVKEGQIKATRTELDQWVQTLAGPWCGGMEATMFSHWIYRHLAPHAAKLLMGHAARMKAICAGKKKSDKIDARTIADLLRCNLFPACYVIAPELEALRQQMRFRRLVVEETVLFKNKTAGLLMAAGVEYERRRLHGKCYFGQLLRSSEWIGEQLRPLLEFNRSQIETLQQMDGRLLRMLERHPQLEARIAQLQGIEGVGPVTALTWALEVATPERFGSIKQAISYCGLASALRESAGQQKRGPLSKQRNRHLQSVLIEAAKIAPMYSEKLRQIHDQACQSGHKNRATLVVARKLVAYLLAADRMFLARQTAGIAA

SEQ ID NO: 304322 - protein, 340 aa, unidentified
MPRKRILVKSIDTSISYQVIGIDLAKHLVSACLITGAGEIFGIDRLTYDDLLKSAERMSPTLFCMEPCPEVHYLAEKLQGYGHHTKVIDGAAVKEYIKTHFGGQKTDLNDAQAIAFLSLDTNLPEITPKNTSNSVLSSIQAVREQFRKEYIQSFVSLKGICQRWGLPISKGVMNKNKVEELVSESKKIPQEVKDWLLELLQSCRELQKRLNKISKYLKEYADNDEICQKIMSVPGIGPITATRLKATIGDIQRFEKPKSIVAYYGLVPKSKATGHNEKKGGITRRGDRVARSLLIEGAGVVLNLAAKGFLRSKPLNKWIEKKRKLKMPWGKPGATHEFIC

SEQ ID NO: 304323 - protein, 355 aa, unidentified
MRVVESEALVVVGLDLGDRYSHYCMLTNRGEFMEEGRIQSSAASLEKHFGSEGRMRIALEAGSHSPWVSRLLKSYGHQVIVANPRKIPTLTRSESKNDRNDAEQLARLAAFDPKLLHPIEHRSLERQQDLNLIHTRSVLVRARTMLVNSVRGLVKSAGGRLAACSSESFPEKVSATVPRELKAACEPLLKQIVQMNRTLEAMDKQIEGLAKKYPEIVLLRTAPGVGPVVAACYVLTLDRPEAMETNRQAGAYLGLRPSQQQSGDSNPQCGITKTGNTYLRSLLVQSAQYILGRFGPDSELRGWGLKLAASGGRRGKKRAIVAVARKLAVLLLSMWRKGQKFEPFPHSATQPVAAV

SEQ ID NO: 304324 - protein, 398 aa, unidentified
MKSDFFIGVDVSKETFSIAGIDGGGTKLFNASYVMDSSGFAEFIKAIKAHVSDLQQAVVGMESTGCYHINLFSFLVSEGIDAVVINPLLIANFAKLSLRKTKTDRKDATTIARFLLAHRDSVCRMAVPMDIQEMRDLSRERESLCHMMAATKTEIKRVLRATFPELEGLCAVDTQVMLHFLQEFPSARLVKAAKPKAIQKALQRKGVGTRLTYTADDIIRAAHNSVAIISPAKELILSGKIATLEHFEQRYNELTKLLTDLCKAKMIEDFRIVTSIKGVNKKTAVPFLVEIGNIGNFNSCKQLVAYAGLDPAVHQSGKFVGTSKLSKRGNRHLRRVIYLMVRCAVQRRGVFRDYFLKRKKEGLEPQKALFATAHKLLRVLFAMLTQRTHYRERQAMCR

SEQ ID NO: 304325 - protein, 411 aa, unidentified
MSTTLLPHAPAGAARSASPSSPVDGGALPVGNIYLGLDVHKDSVTIAVLPAGSAAPSAITRLPNDERKLQRYFARLAAGGATLAACYEASGAGYVLQRAMTRWGYACTLVAPSLIPTRPGQQRKHDRADATALARLFRAGELVAIRVPSEAEERVRDLVRCRETFERDALRARHHVLKFLARRGHLYRAGTHWTRRHWAWLRTLERDGALAEADRVVLGEYLAMLEYTLGRRDALDRRIEAVALTPAYQTAVARLRCFRGIDTHSAMVLQSELGDWARFDSPRELMAYLGLVPRESSSGPTQRRGAITKAGNSRCRHVLIQAAWAARRRPGTGATLRARQADQPPHVIAHALKAQHRLHARYQRLVQTKGPAIAVVAVARELAGFLWAVMRELEQERAVTRTRSAQMRPSM

SEQ ID NO: 304326 - protein, 400 aa, unidentified
MRTVFGIDVSKARSDVAILVNGEKVHDYTILNDALGFSRLFHDLKQVVQPEIIFEATGIYSRRLEAFLKNNNFAYTRLNPLEAKKQLDSLRHRKTDKMDAENLARTQFVLNRKATYIQEEVHEQLRDLSRFYQNLTEDIVKSKNRLHRVLQVTFPGIEMALSSPTGEQYWNFVILFPHPLFILEKSRDKLEEDIRQSTSKRISQKRVEALANKLIHLAESSYPAVNENSSIVEQATYYAKELLRLSQVRKEVLDTMVEKAKILPEYEILLSIPGIAETTATSIIGELGDLRRFRTPNQINAFIGIDLRHYESGNYLAQEHITKRGNPYARKILFKTVHNIFSVSRFKPCHIADFYLKRKKQSPNASTKPYTIASMHRLIRTMHYLVVHNKSYDYTLAQSQ

SEQ ID NO: 304327 - protein, 347 aa, unidentified
MLHVGLDLSRTRVDVHAMDEAGTSVLVTRAAPDAGGLASLVDRLGGFGQPVTAVIESMNGARFVHDQLELRGWTVEIADAVKAKGFAPLACKTDKIDAWVLAELSRRDLVPAIWLPSPGVRGDRERARWRLHLVRHRTALKNRIHATLMAFGHPCPVSDLFGVAGRRQLDHLELPEPWAGDVVAALRLITVLDGEIDACEAALRKAGADHRYVPTLMTAPGIGWVLGYTIAAEIGDITRFPTPKKLVGYTGLCPSVDQSGGHDWRGSLAKNGPKYLRWAMVEGAVHAARHPVYAGRYQRTKTRLGRQRGPSVARVDIARKLTEAIWHMLTTNKPFAPAGATTTALAG

SEQ ID NO: 304328 - protein, 341 aa, unidentified
MSNNTTICIDLAKDVFQIAIFNKAGKVKSNKEVSVKKLCEIISQHPDTSIFMEACGSAHYWARRFSKNGHKVGLIPPHIAAKYRSGNKNDKNDAVAIYEASKSSRLNCVPIRTLEQQDIATLHKYREGYKKERNQIANRIRGFAREYGVNFPLGIKPLQKRIPEALEDAENELTPISRKILSDLSMQLGRVSECLAESTKEIEGLAKQIEPCRRLTSLPGFSWLCVSMLYAKFGTGESFKRGRDASASLGVVPAHSGSGGKVTIGRITKRGDVYLRSLLVNGARAAVSNIRDKTDGLSCWIRKLLITKSFNATVVALVNKLVRMALAMLKSGDEYRQPVAQ

SEQ ID NO: 304329 - protein, 361 aa, unidentified
MKVQRTSVGLDVHARSVVACGLDGDTGEVFERRLCPNHREVLEWIVGLPGPVAVAYEAGPTGFGLARALTSAGIDCMVAAPSKLQRPAGDRVKTDARDAAHLARLLHLGQIVEVAVPTVEQEAARDVVRAREDCRRDLLAARQRISKLLLRQGIIYSGGKTWTGKHQLWLQAQRFDATPLQWAYDTALDTLLATVDRRNRLDARIAELATGSVYEPVVRRLMCLRGVSTLTAFGLAVEIGDWYRFTGRSIGAYVGLVPTEFSSGASRSQGPITKTGNGHVRRLLIEAAWHHRKPYQPGSPTLRRRWDAASPAARARGQLANRRLYERWRRFDARSKRAAVANTAIARELAGWCWSLAVLDT

SEQ ID NO: 304330 - protein, 404 aa, unidentified
MIFVGVDWAEDHHDICVMDQDGAVLGKRRVPDSVAGIGELHELVAEHAEDDEAVAVGIEIDRGLVVTSLVAAGYQVFAINPMASSRYRDRHGTSGAKSDPGDAKVLADLVRTDRHNHRALAGDSELVEGVKLVARVHQSAIWGRQRQLNALRSALREYYLAALVAFGTDLSHGDATAVLALAPTPELGRTLSRSKIASALRRGGRIRNVERRTEEIQTALRAEYLQAPPTIAGAYGTITRSALRLIETYTAEIGSLEAALSEHFEKHPDAKIVHSLPGMGTVLGARVLGEFGDDRTRFASAKCRKNYAGTSPITKASGHSRVVLTRFARNRRLSDACDQWAFCSLTRSSGARRYYDELRARGKTHRQALRQLANRLVGILHACLEDNTLYDETVAWQAAEQSAA

SEQ ID NO: 304331 - protein, 318 aa, unidentified
MKRVYVGIDVAKDSFEMAVHSSSERWHFSNDERGVGKAVTCLRDMAPKLVVLEATGGYEFPLVTALAAAKLPVAVVNPRQVRDFAKSTGKLAKTDILDAQVLAHFGQGVNPEPRPIPDDKAKELNDILARRRQLVEMVAAEKNRLHTASEVVKGDVREHIAWLKQRLADLDKDLRCRIKESPIWREKDNLLRSVPGVGPVTSATILAELPELGTLNRRQIATLVGVAPLNRDSGTLRGKRTIWGGRAAVRAALYMATLAATRRNPVIRNFYNRLLAAGKLKKVALTACMRKLLTILSAIVKHRTHWSYAPSPLLGPCH

SEQ ID NO: 304332 - protein, 334 aa, unidentified
MYILAIDLAKRSFQVCATDRGGAVLFNRVLSRTRLQQFLNEQSPCIVAMEACATSHFWGRFAQSRGHDVRLIPPIYVKPFVKRQKNDAADAAAIAEAALRPNIHYVAVKSAEHQARAVAFRTHQCFVRQRTQLISALRGHLAEFGIVVAQGPANLGAVAGMLDDGGVDLPDGVRDIGRLYLDQIRLLSEKVDELSLKLREAATSNAEMRRLCTVPGVGPVTAGAILAFAPDLHAFKSGRNFAAWLGLVPRQYSTGGKTRLGGVSKMGQTDIRRLLVVGAMSIIRWIVRKGTFPDNWLGHMLGRKPRMVAAVALANKMARIIWAMMTREQNYRMA

SEQ ID NO: 304333 - protein, 387 aa, unidentified
MQKPHDNSKVCRAAFVQDSTLVVVIEMALTSWLVAGMIPGVDREPLKKIAPDPEELLQLLYRWRDEAIKAGREITRIAVAYETGRDSFWLARWLRARGIDAHVIHATSVAISREHRRAKTDRIDTAMLRRGFLGWLRGEPGHCSLAIVPTVAEEDAKRPHRERESLVQERTSTVNRMKSILIQFGVRNFNPVLRKASEKLDAVRTPEGIPLPPNAAAALRRHMERLRVIKEQITAIERTRLQRLQRDPADKMNAMVFLLVRIIGFGVETAEQLVHEILFRDLRDRKAVARYAGLTGSPDESGSKRREKGLSRSGNRRVRTILIQLSWRLLKLQPGSELVLWYQKRTADAKGSRKPMIVAFARKLIIALWRYVNTGLLPEGFELKPAA

SEQ ID NO: 304334 - protein, 336 aa, unidentified
MNEITILAIDLAKSVFQLHGIDGRNLTVLRRQVRRAQLLSLIAQLPPCVVAMEACASAHYWGRQIRALGHRVKLIPPQYVKPFVKGNKTDRNDAEAICEAALRPEMPTVAVKSEDQQALLSLHRMRQLLEKQRKQLANQLRGLLGEFGIAIPVGTAPLRAALPQAIEAVPVLLRPSLQQCAERLRELQSQCTQFTQQIEQLAQTSPLCRRFMRESGIGPLTASTFAATIGDPSYFRNGRQVSASLGIVPRQHSSGGKPLLLGISKRGDQYLRMLLIHGARSVLRRVPGKTDPLSRWLQQLAARRGVNKAAVALANKNARRLWAIWHAEGAALATAT

SEQ ID NO: 304335 - protein, 311 aa, unidentified
MTIICGVDVSATMLDARIGPAGAVARFARNPQGIAALAEFCRSHGATLVAMEATGGYERLPFTLLWTHGVPCAIVNPRAVRRFAEAMGVIEKTDRLDAGLIAWFAEVRRIVAQEPAREAQGRLAAWVTRLRQLTELRTAQINQRRLVSDAAVLASIDEVVALVTRQIRTLAGQISALIDSDPLWQRLDAAFRSIKGVADRTVARLMAEMPEIGTLSNKAVARLAGLAPIARDSGKITGKRPVRGGRRGIREILFVVAEVVRRHDPDFAACHARLSQAGKPKKLICVALARKLLVRLNAKARDVRAQCALAA

SEQ ID NO: 304336 - protein, 392 aa, unidentified
MYIVGIDIGKNHHEASIVSPEGKQIGRSLRFATTHKGADSLMSFIFKNIGNSPCVFGMEATGHYWYPIYSFLKAKGYTIYVINPIQSDSLRKMYIRQTKNDSIDSFLIAEVIRFGQFGTTSMADENILAMRQLCRYRDSVISSRTEIKLRIGTIMEQIFPEYEKQFSSLWVSTSIGILEKYLTPENIENAPIDELFEIIKDKSHNRLTKAKAISIKEAAADTFGIKIAQDAFSFQLKQLIDRMNFLDKQIEALDCQILEYYEKFDCYLHTIPGIGMIAAATILAEIGDINRFKSSSALVAFAGIDPTVRQSGEFSSTHNHMSKRGSPYLRHAIFLAATTCSFHNSPLNAYYKKKRDQGKHHLTATGAVARKLTSVIYAVLRDSKPYEPKSFC

SEQ ID NO: 304337 - protein, 397 aa, unidentified
MYIVGIDIAKRKHEAAVIDGEGTVIIKPFSFTNNCSGYNRLLAMLARAKLPLDEVSFAMEATGHYWLALFTRLQKEGFRVQVINPVQTNSIRSFYIRQAKTDPRDALLIAEVIRFGHFSESTLHPENIYELRELCRGRHAIVSMQADVKRKVVALLDQVFPEYETAFTNMFGDTSMAILQACPTPKELSEMPLEELCHLIEVSSHKRFRMAKAQELQALARNSFGFAMAGDVFSTMIRLYAKHLDFLKQQVREMDRKIAEIMDTLDTPITTITGIGPTLGAYILSEIGDISRFSSAAKLAAYAGIDPTMRQSGEYNGVRNRMSKRGSPYLRHAIWLAASSAVLHDPALKLYFQKKRDEGKPYMASVGHACRKMVSIIYAVMRDNKAYTPYIPNEISA

SEQ ID NO: 304338 - protein, 409 aa, unidentified
MLFVGDDWAEDHHDVELQDPAGRRLARARLPEGVVGIARLHELVAAQLGEDDGPEQVVVGIETDRGPWVQALLAAGYQVFPVNPRQVARYRERHGTSGAKSDAGDAHTLADMVRTDRHQLRAAAGDSDLAEAIKLLARAHQTLIWDRHRHLLRLRAALVEFFPAAVAAFPNLAAADALELLQAAPDPTSAARLSRARIAAALTRASRRGVPAKAAQIQQALRAEQLPQPETVVAAYAATVGAAVAVIGTLNAQIEALAGQVEAHFGEHRDAAIYRSQPGLGGVLGARVLGEFGDDPGRYRDARARKNYAGSSPVTKQSGKKKVVVARFVRNDRLADPLHQQAFCALTASPGARAYYDQLRARGTGHHAALRQLSNRLVGILHGCLKTRTRYSEATAWSHRTSDAATAAA

SEQ ID NO: 304339 - protein, 449 aa, unidentified
MSHFTNMSPTNEVGKPLNSHGPVRCLYHSAIGVDVHAQLLVCCFQKHLPETNQLLSEQAQFGTSNSQIKQFVDWVSSHKPEIILMESTGVYWMSPYEALESAGFTSQQLAVVNARDIKAAYGRKSDKADARRLTEFARMNSFKHSFVPSRDIRTARLIARRLHHATQDCTRESNRMQKLLSCSGTRISSVFSSFKGKAAQKIINSFLDDSYPEFIACVRSNCSRLRATFTDIVDAFRQLNTPTFKELLLEQRKSWRQAMERRDRLEALLRIQMKPYKKTVDQLCAIPGVKELAALKILSEIGTDLSSFRSSEAFCSWIGICCGNNESAGKAKKSGTPKGNNYLRAYLTEVGQAIALVKTYTTVLRKVFQAFKERRGHNRAVVAIAHKIARIIYTMIKNSIAYVEISSPTLEKIRLKKLRASINNAKEVGISLQKLSIVKDSTGEILSDT

SEQ ID NO: 304340 - protein, 345 aa, unidentified
MEPMYYIGLDVHKRKISYCVKDSSGKVFAEGSLPATRFDLDLWMKTLPQPWSAAMEATMFTGWIYDHLRPHAAALKVAHPLMLRAIAAAKKKNDRIDAGKICDCLRCDFLPECYMASTAIRERRRTLRYRNLLVRQMVQMKIKISALLMEAGVSYNKQRLHKAGYFRELLATNPDIDEGLCSLLRLCRETVVRLGKTESALVRSLERDSLLVERVERLMTIPAVGPITALTWALEVGDVQRFSSIKKAISYCGLCGAEKSSGNTVQRTPLSKQRNKHLQTTLIEAAKMAPRNSPELAMLYDKEKQKGNANRATLAVARKLVAYLMAVDRGQRNFQIAETSSNIAA

SEQ ID NO: 304341 - protein, 418 aa, unidentified
MKIVFPTCCGVDVHKSFLVATIIKTPQDSLQPSYQKKRFSTFNSDLNRFADWLHENDCLDVCMESTGKYWVPVFNILEKRGIRVTIANPKWVKAVKGNKDDTKDSKWIGDLFRIGLVKSSFIPAKDIRILRELTRYRYKLTSMKSSEKNRFQNAFTVCNVALDSVVSDMFGKSATAITDYLTSDEDFDPQHCVSLLHRSLKKKAEDVLSSIEGYEITLEQKCRIGIVRDHLHYIEKLIERVDICINTMVEKYDGAISLLRTIPGIDRSSAITVISEIGVDMAQFGSSKRLCCWAGLTPGNNESAGKKKSVRISRAGVYLKPVLVQAAHAAVKDKLNPYYALKYERIAKRRGKKRAIVAIARMILTAIYSMLSTGEIWNPVDLFKVDMPEHLKEQQLQKAMKQAVRFLKAQGLTVLDSA

SEQ ID NO: 304342 - protein, 356 aa, unidentified
MSHDVKYIGMDVHQEAMVIAVLNGSGKLIMETIVETKASSILQFLHGLRGELHVTWEEGTWAAWLYDLLQPQVEEVVVCNPRRNALLKEGSKCDKVDARKLADLLRTGMLRPVYHGENGLRTLRELARSYQTLSKDLTRVMNRLKALYRGWGIPCAGTQVYAPRYREQWLSKIVQAGVRRRAELLYQQLDGLQALRRNLRPELLAESRKHKAAKLLRQIPCIGPIRAARLIALMQTPHRFRSKRQLWTSSGLGIETHDSAQYRYVGGQVQRSKKPQQLRGLNQNHNHEMKEIFKSTATRASCGGGPFHDFYAALLAKGMKPEMARLTLARKIAAITLTLWKKGGRFDAEQLKTQAA

SEQ ID NO: 304343 - protein, 309 aa, unidentified
MAHIGIDVSKNKLDCMWVRDLEAGKVKPKVFPNRRDQYPGLLHWLERNTGEPPEALHVYLEATGIYHEPLAYWLHEHGVRVHLLNPAQVRFHAQGMGVRNKTDRKDSMMLARYGIERAPAPWQPEPPEVRELKRLLGRLEALAQESIGNVLEALREEHRRLQQQIDDHFNAHDHLKRDRALLESIPGIGRVLSASMTATLRSRAFRSARQAAAFHGLVPVQQESGTSIQRQPRLAKTGSSGLRRKLYMAAIAAAHHNADVRDQYQRLLRRGKAKMAAIGAAMRKLLHIAFGVLKSQQPYQPRCSTGCNQ

SEQ ID NO: 304344 - protein, 344 aa, unidentified
MEITTVGVDLAKNVFQIHGVNARGKVVVRKQLRRDQMAVFFANLPACLVGMEACASAHHWARKLQALGHTVKLMAPQFVKPYVKTNKNDAADAEAICEAVGRPSMRFVPIKNVEQQSVLALHRVRQGFVKARTAQANQIRGLLGEYGLVVPQGIGNVTRRVPELIEDATNELPGAFRVLIDRLLEHLRLLHREVDQIEAQIKAWHRANEASRRLEKVPGIGPLGASALVASIGDARNFENGRQLAAWLGLVPRQHSSGGKPRLLGMSKRGDAYLRTMLIHGARSVIRYAVPKADPHSWVYQVAIRRNKNVAAVALANKTARIVWALLAHEREFRPGYTPAAALA

SEQ ID NO: 304345 - protein, 391 aa, unidentified
MEEGLEEILECSCGLDVHKDKIEACILKTGAKAAYRETFGCISSELDRLCKWIKEHGCKDIAMESTGVYWLPIYERIEAKCPDRQSLLVVNAYEIKNMPGRKTDIKDAHWIAQLLKRGLLRQHNSFIPEHIVRSMREISRLRRKITGDRSKASNQLEKFLQTHGFKFSSVFSSITGMSSTALLKRLAQRGKLSLRDIYDCCYRNLKHVPEEILAAVNGELNEAERKLLCFHIKRIEALSDEISELTGMLADLFEEYKEQLKIAVSLPGINLDSAMEVLAEISPEPQASFDTQRKISKWAGLSPRNDDSADKITCRKTLHGNPYVKSILVQCAWAAVKTRNSEFQKWFWPRQCRLGRKKAIIAVARKLLCLLYTLLSKGVLYSPPSPEPIAV

SEQ ID NO: 304346 - protein, 348 aa, unidentified
MKNKSFVGIDISKNVIDVSIFREDTNIKMFPHEVFNNTRKGFGDMCSWLKKSRVVLSQALFGMEFTGCYSLDLEKFLTSKNYSFCMLSTRIVKHHPMGTIDKRDKNDSAKIADFLYRYDGTECAKPYKLPSKAMQQLKQLVNERKFLVEQRTNFMNRMQMFETKEDSAMYESYIKKLNHDIEKIDQEECELMSKEEDVFDTFQNLLTIPGIGFVNATNIIAITRNFTAFDTARQYARYVGVAPCSHTSGTSVKWRARPSAHCNGQVKAVLSMAALRAVEYDVEMQMFYNRKLGGRKDSDTKRKALNAVKFKLICRIFAIGKQKRKWEVLNTSDDRKNLHIEKSKASEL

SEQ ID NO: 304347 - protein, 416 aa, unidentified
MKRTQNTREYERYFAIDTHREYHLVGGQNADQKWVVNPRRVSIEKFAEWAQKNLREGDIVVLETTTNVWDTYDIVTPLVSRVLVANAAAVGEIAGARVKTDKEDIKRLLKLLVGGIVPEVWVPPAHVRELRGFISYRNRLVKMATMIRNHLQSLLHKHSLMLPKEGILNQAWWDAQTSISTLEKMQIRQELGLLEEIKKLQAAVNEELEKQSTGELWGKQALQLIQLPGVGVIVAMTVLSAIGDITRFEDAKHLVGYSGLGAGVHDSGKTHRDKHITKKGRKELRWIMVEAAWRAVRMSPYWKEQYEKHLKRMRKPNQAIVVIARKLLVAIWHVLSKEELDVQASEEDLAYKMLLLSWSLNENVRMGLSYKQFAKYALMKLGVEKDITRFVRKDIPRRLAAKEEVLARMEELGITQ

SEQ ID NO: 304348 - protein, 338 aa, unidentified
MGYFVGIDLHGDNNYIGILDEEDRRVFKRKNRNDIKEITRVLEPYQEEIEGIVVESTFNWYWIVDGLMEAGYRVHLANTAAMQQYEGLKYIDDTRDSFWLAHMLRLEILPEGYIYPKEKRAVRDLLRKRMMLVQQRTAHILSMQTMVNRNKGVPISSDTIKKMSDEEVEGLFSDEHLVMSAQCDHEVIGVLSEQIDKIEKAVFKEVKLKKPYKKLLTVPGIGEILAMTIMLETGDIGRFREVGKYSSYCRCVSAKKVSNGKNKGKGNRKNGNKYLAWAYVEAAHFHVRYCEEARKWHQRKASKSNAILATKALSNKLARACYYIIKEQVHYDKKRMFG

SEQ ID NO: 304349 - protein, 346 aa, unidentified
MENCTYVGLDLSKTSTMATAVDPLGHRIRQEKLGVSDEELLRFLGEIPGPKQVVMEACNVWEHTYDAAASTGAEVLFANPLKVKLVSKTTLKTDKVDSEKLALLARLNAIPESYAPSPEQRALRRLVRERVFYHAKWKAVASHTYALLLQKGIPYRPEILTRRRLRGELRVHNIVEVNRGLDTLEKIEEISVPLDREIHRAYLASREAQLLATIPGVGEFTSMTLVAFLCPIERFYSLDAVVKYCGLCPSVRQSGERAFHGRLVWDCNVILKWVLIEGQWNVRLRERKGDVSRVARRVARRGAANDGAVAAARKLVRICAAILRRGTPYQPESPGSSSRQVGHAAS

SEQ ID NO: 304350 - protein, 386 aa, unidentified
MRHASTIPVPDRTGIAGDCATLFVSLELSRSTWVATSLAPGSTKMSKHTLAGGNGRELLDLLTRLKTRAEQRIAAPVGVVTIHEVGLDGFWIHRLLEANGVESHVVDPASIAVPRRHRRAKTDAIDGETLLRTLMAWQRGEPRVCAMTVPPSPSEEDRRRISRERARLLRERIQHTNRVRGLLFGQGITNYNPLHKNRRESLEELRTGDGRSLPTHVKAEILREIDRLELVLRQISEVEAERDEMLRPAEASSPAALLMRLKGIGAEFATVLYLEGLFRHFENRRQLAAYAGLAPSPWKSGSIDQEQGISKAGNPRLRTTMVELAWMWVRYQPDSALSCWFRQRVGSERGRIRRISIVALARKLLIALARYINHGEIPEGAVVKPD

SEQ ID NO: 304351 - protein, 340 aa, unidentified
MNTNAPQLGIDVSKLKLDVALLLPTGAHAATFVNTPKGFLALARWLARFPVQPRVCLEATGTYALPVTHYLHGQGLIVSIVNPMGIHFFARTRMSRNKTDAHDATLIAHFAQQHQPRAWQPPTPAQAQLQPLVRVREQVLESRVVAQQHLESAPASTAKYFRAQIRLLDRQLRALAGQIQQVLQAHPTLKESAALLTTIPGVGTVTAATVLAIIPEIDQLDNARQLAAFAGVTPSQRQSGTLSGRTRMSKLGHRRLRKALYFPAITALRCNPRVQALAIRLAQKGKAKMVIVGAAMRLLAHLIFGVLKNRTAFDPTYQQRRAGTTSSRAAASLQLAPGCP

SEQ ID NO: 304352 - protein, 394 aa, unidentified
MCQHYQAEASMIKHNILFIGLDTHKTFTEVAYIEDQRGAKSTHLGKILSNKAAFKKLARQLQSKYPDATLHFVYEAGPCGYWIYRFLTSLNHCCYVIAPSLIPKKPGDKIKTDKRDALKLAKLLKSEDLTSIYVPEPEDEAVRDLSRARETGMKDLKDAKYQLKALLLRNNINSKIKDNWSLQHLRWLAELVLPHPCQQIVLQEAVLTINERLKRLKRLDNELTHQVKNWRFYPVVKAIQALRGVRLLVATGVIAELGDLSRFDHPRKLMSYLGLVPSEHSSGDKRHLGAITKCGNSRARRLLVEGAHSYKHNANISKEMQLRQEGLSKEIIDMAWQAQLRLCRRYQRLMHKGKHRNVVVTAIAREMIAYIWAISREVVLPKIDVKLRISRVPA

SEQ ID NO: 304353 - protein, 283 aa, unidentified
MQSMYYVGLDVHKKMISYCVKDVSGSIQAEGVVPATRIDLNRWMNTLPQPWTAAMEATVFTGWIYDHLKPHAAALKVAHPLMLRAIAAAKKKNDRIDANKICDCLRCDFLPECYMAPTAIRERRRTLRYRNLLVRQVVQLKNKTAVLLMEAGVSYNKQKLHKVGYFRELLATNPDINDGLRSLLRLCRETMVRLAKTESALVRSLERDSFLMERVERLMTIPAVGPITALTWALEVGDVERFCSIKKAISHCGLCGAERRSADTVQRTPPSKQRTQHICKIAG

SEQ ID NO: 304354 - protein, 370 aa, unidentified
MKKNSKVKQSPKRAAARKQEPITIGMDLGDKTSRYCVLGAQGEVVREGSVATTRKAMQEKFGPMQRCRIAIEVGTHSPWLSRMLSGLGFEVIVANARQVQLISASSRKNDRIDAQKLARLARVDPQLLRPIRHRSEQGQTDLLTIRMRAALVELRTSAVNSARGFVKAMGERLPACDADQIGVDKMDALPQPLREQLKPLLETVESLTEKIHQLDTTIEQIARTQYPETELLRQVSGVGTLIALTFVLTLEDGRRFQKSRDVGCYVGLRPRQSESGQSQPQLRISKEGDRYLRSLLVQAAQCILRRRGPDTDLKRWGLKLAERGGKNVKKRAIVAVARKLAVLLHRLWVGAEVYEPLRNSQAAALSRKAA

SEQ ID NO: 304355 - protein, 320 aa, unidentified
MMAQTDRVVVGIDVAKDKVDACIRSLSLKGTWPSTVQDRRKLIAWLRTHEVGKAVMEASGGYERDWAKALREADIEVRIVDPKRVRSFARSAGRLAKNDAIDAEMIAWFAETFGEAPGQAYDAAREKLSQIMNARQGLLELQTNLQNRGEHAGPEPVQKMQARLLKQLALEIDKLEAAIAVLIKATPHLAERAEIIESVPGVGRITSAGLIAAMPELGQVSNKVAAALLGTAPYDDDSGRRRGERHIKGGRRKVRNLFYMACLGAATRHNPVLKAFYRRLIAKGKEPKVALVACMRKLIVILNTMIARRQKWDPSLSVLG

SEQ ID NO: 304356 - protein, 415 aa, unidentified
MLSVLINKACGLDLHKRFLIATILSRSGEMAQKRFERNDQGILDLKSWIIGNQCEVVACESTSDFWVPIYDTLISHVTVIVGNARDMKAYSHKKTDKIDSEFIAQLALNNMVKPSRVFPKHHREFRSYVRLRHNLVRKRTDIKNQAHAILSSEMFHLSDVLTDIFGKNGKMVLSGICSGKKFDEIVDKLSPNVRKKSEQIKEILEREMSQSAAVRLRTCLNLIQDIDEQISIMETQMFNYVYKHHKHDMDILMSCPGIGELSAATLIAEIGDFNDFSSGDKLASWLGIVPNVYQSADKYYNGRITKRGSKVARWILTQIAQAASRKKASKLKEFFNRKKKTIGYQKAIIALARKIVTIIWHLITNNEMYEDETGYQKGEIQKRKIVETAEISIDERISILSEIFAIVNKKNTDVT

SEQ ID NO: 304357 - protein, 405 aa, unidentified
MVDIMVSDFKKGRYNLMKIFVGIDIAKLNHFAAAISSDGEILLEPFKFTNDADGFQLLVSKLESFDKNSIIIGLESTAHYGDNLVRYLVAEFYQVCVLNPIKTCQMRKNNVRKTKTDKVDTFVIVKTLMMQDDLRFITFFDLDMMDLKALGRFRQKTIKQRTRLKIQLTTYVDQVFPEIQYFFKSGLHQHAIYALLKEAPSPKEIASMHMTHLANLLKVNSHGHFTKELAKELRVLAQKSVGANDNSISIQITQTIQQIELLDSQLEKIEAEMTDIMRFNDSVIMTIPGIGYINVGMILGEIGDIHRFSNPNKLLAFAGLDPSVYQSGNFQAKTTRMSKRGSRVLRYALVNAAWNVVRNNATFKAYYDAKRAEGRSHYNALGHCAGKLVRVIWKMLTDKVEFNLE

SEQ ID NO: 304358 - protein, 446 aa, unidentified
MSEASSMAAASEPEWAAFAAIDWADQKNFWRLVPAGSQRYEHGELENTPEAVEVWAAALQERFGGRPIAVCLEQSRGALVYMLAKYAHLVLFPVHPTTAARYRETFCTSGAKSDPSDTASLLDLLLRHREQLRQLRPDTTETRLLQFLVEERRRTVNEKTRYSNRLTGCLKLYFPQIVHWFDDVAGPLVGDLLERWPSLQELQRAHPGTLGKFFHEHNCRGKERIQERIDAIYQAIPATTDTAVLEAGAMIARGLVALLATLRSQIAVFEQRIEELVASHPDGALFASLPGAGAALVPRLIVAFGTHRDRYQSAYQVQCYSGIAPVKEASGKSEWIHFRFTCPKFLRQTFHEFAVHSIGQSKWAKAYYNHLRNDEKKSHHAAVRALAYKWIRIIYRCWKDGKPYDEELYLKSLRRRGALLAGALGLATSAGWKTVAGFQKFSAENA

SEQ ID NO: 304359 - protein, 522 aa, unidentified
MAVRTTHKGKRSRCSDVLHRPRGLFHSRVQQVGPEHFGIVSVDCAKARSKWMLADFYGKVLIPPTVVAHNRVELDATIAQIRQALTTNGLHDMLVAIERTGRYHHVIRDAFVRAEFEARLVHPFATKRFRQPADPSTKTDDTDLAAIHRAAVNGFALLEPKLSEDWQSLQMLVRHRRNLVQKNAVLRCQIREHLEAAWPGYAACFDELWDSHIAQALIRRYATPLDLLTESAPAIDHWLRQQGVRFQRPTLDTILAWAQRATPGDPLTELHRRLALAYDDDRLQKTQEIQALERDLAHRLAQTPYVLLLSFPGINVVSAAEFAGEMGPIEHYANPRNITGRAGLFPSRYQSDQVDRPHGPLVRRGNRKLRAAILGVADNLLACNQHFKVLATRWKALGKHTRHTHVKIALRFCRIAFHMVAGRQVFHHPGLRERHYILDKLLAFHTEHQTPWEQTLRDLHHAIDQVPTKEHRGEAQPLADRLQRWRQRRRGPQALAEILAIVLARLGVGIVQSQESGEQDPS

SEQ ID NO: 304360 - protein, 367 aa, unidentified
MKDSITVVGVDSHKNSMEIVTADNFGAMEVRRFGTIGGTMDALDRAVRKLASRGTTLHFIYEAGPCGYEIYRHLTRKGFSCQVVAPSKTPRKSGDRIKNDRRDAEALARLGRAGELTAIHVPSEEDEAMRDLTRGREDVVRALRTARQQLSAFLLRYGKRYPGKKPWTPAHLRWLADLSLPHPSQQIVLQEYIATVREGTERTVRMTDQILQLLPGWRWNPVVEALQALRGVAPLVAVTTIAEIGDLSRFENPRRLMAYLGLVPSEDSSGETTHRGSITKTGNGHVRRVLMEAAHAYAFPARVSRHLLKRQEGLPEPVRAIAWKAQVRLCGKFRRLTARGKLPNKVVTAIARELSGFMWAIAREVKV

SEQ ID NO: 304361 - protein, 426 aa, unidentified
MSERDYSKQVARRQRIGSTTLVVGVDVGKVYNAVGFMNKEGKVLGSCAKGYNSREGFEQFRKMVEDLKARYGLKDVLIGMEPTGHYWRKLAYFAREQGYEVRFIRTTALKHHRELDESASAKSDQRDALTLTNITREGKYIDTVIEDGGMRHLRTWVKVREKIQKRNGSAENSLHAALDDYFPELKEIFWSMHSRGLWALLQRCPFPVDVVSLKVSVLQEIIGRASRRRAEASQKALAVSRAAKRSIGLKQIGSADRYRLKMCLDEVKRTELMIKDMEREIKRMLKDIPEAEYLLSIPGIGAISAAVFLGELGNPSYFQGARQIVKYAGYDPQESDSGNRVSRKFISKKGRWLLRKHLFLMSMRVVVLNRYFQEYYQRKLQTKNRFGQLPRKKEILCAVAIKLIKVIFALLRDKRNFEDTVACSVE

SEQ ID NO: 304362 - protein, 432 aa, unidentified
MKHNQSSKQNQRISRISETTLVIGIDIAKHNHVARAFNYRGIEFGKRCLFQNDENGLLNLLAWAESIQQEHGLTDVLLGVEPTGHYWFPLFHFLKQRGVEVVLVNPHHVRKSKELDDNSPTKNDIKDAKVVAKLVIDGRYTQPQLPEGVYADLRVLMNQRDRLCGDLNRVKGRIHNWLDRFFPEYRQVFKDWEGKASLITLQHFPLPQDVVGAGETTVMATWKKNGVQRAVGPKRAGLLYRKAQKSIGLTEGATAAKHELAMYLEQYAMLCRQIEQLMEHVAALVEQIPGASHMMSIPCIGLVTVAGFLAEVGDLSGYDHSQQIVRHAGLSLRENSSGLHKGETTISKRGRCRLRALLYRAALTMVAKNPEFRALHVYFTTRRDNPLKKKQSMIALCIKLIRVLFELGRKQKNYDSSKVLGPHREAQLQAAA

SEQ ID NO: 304363 - protein, 366 aa, unidentified
MIPRMAQHGRLKKPRKRRIAGGVDTHGDTHHAAVVLLNGARVADAEFPATARGYAQLLSWLRSFGRLWAVGVEGTGCYGAGLARHLTEQGLRVVEVDRPDRRQRRTKGKSDPLDAYAAADAVLSGRAQAIPKLGTGIVEAIRALHTTRAGAVKARTAAMNELRSLLVTAPAEVRDRLRGLAPVALVQACARLRPAGDSADPRVAVRAALRALARRHQALTDEIADLDTQLRPLVERACPELIAIKGVGYETAAQLLVTAGDNPDRIGSEAAFAALCGVAPIPASSGKTRRHRLSHGGDRQANRALHMVACTRLATCSKTRAYRDRRAREQLSPKDILRCLKRYLAREVYKALIRQNGDDPERPAAA

SEQ ID NO: 304364 - protein, 344 aa, unidentified
MERKFKLIFGIDISKLTLDVTYFFDGVTNYLQVPNDAKGISQLANIIKDFAIDEKQVLVCCENTGSYTEKLALVMKSLDVTFWVVHPVIMKGYRLDLQRAKNDKVDSNKIAEFALAHQHKATNFHHPGQKTKELKELYLLRKQLIGIRQRTLNFIASENDKAIPGILNTVIYDQLKLFLTDLIKEVEKSIQLLIKSEKTISGYYNILLSVPGVGPVIAQHILAVTDGFKKITDYKSFACYVGIAPFARSSGTSIKYRPRTSKKANQELKAEMHQGALSVIKQGQVFHNYYKTMIERGKHHLWIMNSIMNMIAKCMFNLVNKMIPFNKEIFVNNKKSWQNNLVLS

SEQ ID NO: 304365 - protein, 337 aa, unidentified
MKYSGIDLHSNNSVVVVMDDADRVMVEKRLPNDLAKILELLAPWRGELAGVVVESTFNWYWLVDGLQGAGFKVHLANTTAIKKYEGLKHSGDETDARYLAHLLRLGILPAGTILAPEQRAIRDLARKRMQLVRSRTTHILAVENITARQHGARISSNQVKRLTAEMIDQMALPEDVAFALKSNVAVLATLSAQIDLLERRLQERIGERPEYGLLTSVPGIGRVLATTILLETGPIDRFAAAGNFASYARCVDSVRTSNGKKKGEGNTKNGNKYLAWAFVEAANFALRYCAEAKRFYERKKARTNKVVAIKALAHKLARACFHILKERKPFDVTRCFA

SEQ ID NO: 304366 - protein, 507 aa, unidentified
MEPNYRRCCGIDIHKKSVTVCVLPPVDKPESGIRKRNFPTFTRDLKQLRTWLKNCKVTEIAMESTGQYWRSVWNLLEGHFEKLVLVNPQHIKGLNGYKTDPKDAEWIAGLLEGGKLKGSWVPPREIRELKDLTRQRVHVLEDMNRVKNRIEQLCQAGNIKVSSVATDLFGVSGRKMLKAIVEGKHDAGWMADYARGALRGRKRELELALDGSFTGNQRWLLDRELLQLEWLEAQARVLEQEIERRVVPFAEPMRRLMTIPGIDQKTAWTIMAEIGVDMNVFPDARHLASWAGLCPGNRESGGRRMSGRTRKANRYVKSALCQAAWAASHTKQTYLSAFYKRLQVRKGAQKAVMALAHHLITVVYNVLARSEEYVEMGADYHDQRNKPKVVSRLVKRLTRLGYYVVLDPIVREPGKSEVSRMQMPGTTSLAASEPSPLKTARRSAKRVPLTKRRAASQSSLYARVGTIAKRKRGRPCKCVERGIICKHGLRPHPNLLEAKKVGDGRFS

SEQ ID NO: 304367 - protein, 420 aa, unidentified
MSFKIFRFNCCGLDVHKTWIYACIGITDSNGRTDYKQARFSSFSKGLKELCDWLAKYNCSEVCMESTGKNWIPVFNVLEKANNSVILAHPKYTKPQKGNKTDRKDAKWICDLFMCEMIKPSFIPPADIRHLRDLVRYRFKLTCMITGEKNRAQNCLTVSNLKLDDVFSDVFGKSSRSITEYMLAHPGEIFDVAPFVDSRCKTPMEEIQAAVDGAISPEQAIKLRQCLNHIDELEKHLEEIEREILRLSDKYQAALDLIRTVPGFDKNPMTAIQILSEIGGDMSVFPSAKHLVSWAGCCPRNDQSNKRIKSTRISRAGNYIKPILVQVANGLLRSKKHPEITGRYKRIKSHRGHKKAIIAICRMLLTAIWHILSDLKPYTAEGFLESRPANKAKVLTTSQALNLLKQRGYTIKDDIVPAMN

SEQ ID NO: 304368 - protein, 349 aa, unidentified
MTMLAERIDAVIGVDTHKASHTAAVVTPTGGATAHLTVPSDAVGAKRVLAFARRRAPDRRVWAIEGTGSFGAGLTTYLLGQGEWVVEIDRPRRPARRNGAKSDELDAIRAAREALSREHLAQPRRRGGREALRVLLATREAAVVERTRAVSALQALVVNAPEALRGRLRHLDTHALVLRCARLRTGHAQSVEHRATVTALCSTARRALACEAEAADLEAALEVIVQQERPELLAESGVGVITAAAILNAWSHPGRIRSEAAFAMLAGVAPIPASSGQTVRHRLNRAGDRQLNRALHTIALSRLIHDPETRAYAARRRAEGRSDREIKRCLKRYVARRLFRLLEDCAQAA

SEQ ID NO: 304369 - protein, 394 aa, unidentified
MYIIGIDIAKKSHEVCFMNQEGDILDGNTFNIPNTLSGLEKFQKMLNKYGLNSNNVLVGMEATGHYWLVLYSWLIEQDFDVKVINPLVTDAYRKMYIRKTKNDRIDAEVVARVILLGDYHETPVSEETALSLRQLCRFRLSQVQTCGDLKRKCIAILDQVFPEYSQLFTHTFGISSKTLLKEYSTPEELASIHTTKLTNLLKKASKGHFGKEKALEIKAVAKKSIGISFATDAFAFQMKQILEQLEFIEVQIRLLDQQIEDYMQELDSPITTIPGVGPVYGAVILSELGNINRFPSGKQIVSYAGIDASVNESGSFKGNQASMSKRGSAYLRRAIFGAAFVASWADPELSEYYQRLRARGKHHYVAVGAVARKLCYIIYAVLSENRPFEQRTPM

SEQ ID NO: 304370 - protein, 422 aa, unidentified
MRHKRSKKQKRAGQGGAVPSLTCIEPNAAGIDVGAREIFVAVPQARDPSPVRSFETFTQDLHRLKDWLQQCHITTVAMESTGVYWIPLFQILEQAGLEVCLVNAQHVKHVAGRKRDVIDCQWLQYLHSVGLLRASFRPEDRVCIIRSLLRHRDSLVQMAAAHVQHMQKALTQMNLQIHHVLSDITGRSGLAILDTIVAGERNPAVLAQLRHPQVQASAEVVMKSLVGDYGREHLFTLGQSLEAYRYYQDLITRCDQEIEEQLQNFDRQLPPDAPDLPPEAYPHSRRKNEFHFDMRSELYRIFGVDLTAIPSINALTGYTLLAEVGTDWSKFPNLHAFASWACFCPHNKKSGGKLLSAKTRRSANRVNRALRLAAQTLERSNSLFGHLLSQDVRPLGKACRDHGYCPQTGTHHFSHGYDRTSV

SEQ ID NO: 304371 - protein, 350 aa, unidentified
MIIIGCDYHPGFQQIAFVDTETGEYGEQRLEHSEGAEKFYRDLAAQGKKIRVGMEASGHARWFERLLAELNFELWIGDASEIARKRERKQKTDRQDAQHILQLLMENRFPKIWIPSGENRDLRQLLWHRHRMVQMRTRIMNQLQAVALNEGLRCKKRLWRKHGREQLESFRLAPWASRRREDLLQLLDRLNPTIADLTQVIEQEVEKCPEARRLRTHPGVGALTALAFVLIIGRTERFQCGKQIAAYLGLVPLEDSSGNRRRLGHITKQGSSMLRFLLVEAAQVTARSNPEWRNKYFHLVMRRGRKIAKVAMARRLAIALYWMWRKGWDYEQLRKFGSHAGKLGTGDGVQ

SEQ ID NO: 304372 - protein, 436 aa, unidentified
MAQFSQIKANAAGIDLGSRLVFIALSDGTVRSFETFTAGLLSAVNFLGQNKIETVAMESTGVYGMVLFDMIEEAGIEVFLVNPAHLKYVPGRKTDVQDCQWIQQLHSYGLLKPSFIPQASIKVLRSYLRIREQHIKDAASCVQRMQKALTMMNLMLHNVISRLNSVSGMRVLNAILEGQRDPETLLSLCDKSIIKNKRDQVLAALQGNYKDEHLFGLKQALDCYEFYQVKMTECDQMIDQQMAEINKDKAEPEQMGKAKKIRNNQPQIEDYHKKMVTVMDGKDLTALPGITDYNLLQLIGEIGTDLSKWPTEKHFTSWLGLSPGKNSSGKLIKQSKKKAKPKAGGVFREAARSILQSKKIALGHFARRIRAKKGSYVAIKATARKLAELYYRTATKGIQYVEQGIEKYEQKIQETQLRILMKKAYELNMMVIPVNQ

SEQ ID NO: 304373 - protein, 343 aa, unidentified
MQTITTIGLDIAKSVFQVHGVDACGQVVVRRQLKRRSVLTFFQKLSPCLVGIEACGSAHHWSRELQAQGHTVRLIPPAYVKPYVKRQKNDAADAEAICEAVTRANMRFVPTKTPEQQSCLVLHRTRHLFIRQRTSVINAIRAHLAEFGIVAPVGRHGVEELLTVVADPNERRVPEIARACLLALGTQLRRMKEEILEFDRLIRALHRSNEMSMRLEEAPGVGPVLATALVAAVADPKSFRSGRNFSAWIGMVPKQHSSGGKNRLGNISKQGDRYLRGLFVAGARSVIRYAKIHGTKHRPWLTALLARRPTKVAAIALANKIARMVWAMMARGERYKEPVALAR

SEQ ID NO: 304374 - protein, 400 aa, unidentified
MRFYTRQHRFYCGVDLHARSMYVCILDAEGTVLVSKNIAAEPAPFLELIAPYRDDLAVAAECMFTWYWLADLCERERIVFVLGHALYMRAIHGGKAKNDRIDAHKIAALLRGGMLPQAYVYPREMRATRDLMRRRNYLMRKRAELLVHIQNTNSQYNLPAFGARIAKPHLRREAASHFPEVAVRKSIELDVSLIDHYDRELPALERYIESVAHGHDPVALALIRTVHGMGKVLGLSILYEIERIERFARVQQFLSYGRLVKPTRQSADKILGHSGGKIGNAHLKWAFSEAAVCFLRRNKRAQALRQKLAAKHGKGKSLSIIAARLARAVYFMLKRKEPFDEERFFASSGSAAAKRSSPNVLTGATVKGARPARGSTKVIVPASTTSEPGRNRMRPAAQPR

SEQ ID NO: 304375 - protein, 347 aa, unidentified
MSEAIKVGVDLSKQVNHVVGQDAHGREIWKRKLRRGQMLSWFANLAACTVVMEACSGAHYWARELQRLGHEVMLIPPRLVRAYVQGNKNDYNDARAVLEASRRAGLRPVAVKTPEQLSLQALHRMRQARIAERTKLCNQVRGLLGEHGIGVAKGVATLKRALADALEDGDNGLDPLARELLGHNREELQRLEESLRFYDERIRAQARTQPAQQQLQSIPGFGPILASAFHGHIGDGRAFARGRDVSAALGLVPAQHTSGDRPYLLGISKRGDRYVRSLLVHGARSVVRRAEAKDDPLSRWLQRLIATRGKNKATVALANKMARMGWAVLRHDTVYQPDLAQRAQPAA

SEQ ID NO: 304376 - protein, 313 aa, unidentified
MSVSYFAGIDVSKLYLDVHILPSQTAQRFANTPAGHRQMIKLLREFGVCLVVIEATGGYERQAVVAMVNAGLRVHVAQPQIVHAFAVSLKLRAQNDKIDAATCARYAKDRHQDLLVIDTIDKTQQALQALVVRRNQLVEMHTMEQNRVQQVHDKQARKSLERLLKALKKEIVRVEKQIDALIGADATLKAKSQKLQETKGVGPQTTRTLLAYLPELGKVSVKRLNSLVGVAPYAADSGDKQFARHIAGGRTIVRNGLYMACLSAITTNPVIQPYYQKLIERGLAHKTAMMACIRKLLAYLDKQVRLALQPATP

SEQ ID NO: 304377 - protein, 385 aa, unidentified
MNLDHTDTPTAAGEYATVYVAFELSKAKWKLGVVLPGAQKLSRYTMAGGDVVALAKRLAAIRTKAGRSGKPVRILACYEAGYDGHWLYRWLTAQGVVSYEIDPSSIEVNRRARRAKTDRIDLDRIMRAFLAHLRGEPRACSVVHVPSVEDEDRKRCERERDRLVKERTAHTNRIKSLLHAQGIRDATPLRCGFIASLAQMRTGDGRPLPPRLKEEIMREHERLVLANKQLAALEAASKAECRAAAPGSAQAKIVKLARLKSIAVTTGQVLVNEVFYRSFDNRRQVGGYFGLAGMPYDSGDSRRDQGISKAGNGRARMVAIELAWRWVYFQPGSELACWFRKRVGDLKGRIRRIAIVALARKLMVALWRYLETGVVPTGAVLHPSL

SEQ ID NO: 304378 - protein, 429 aa, unidentified
MSEEKSLELRISVDVGYRRHSVAMGLSSGEVLEEFEIDHRPEGFQEFFSRIEAQRKKRNCAVSVAMEGYNGHARPLDSLVRERGYRLYNLNNLKFARFKEIFPGAAKSDRIDARKGLELFQLSDHLPLAKEVLQEVSGTAPENEILKRLTRRRRRLVNERVRVVNNLQADLQAVCPGLLEITGEASNQWFLNFLLSADTLPQLARLKRSTLLKIPSVGVKSAAIIEHWQKRAHFSQEVEWVSEMIQEDAKRCPELDEKIKRLQAKIAEVAKNSKIAKTLRSIPGFGAVCTSELAGEIGTIERFASEGSLSLYLGMSMLDNSSGKYQGTKAPKHVNTRAKAAMMIGVDRHRKYVPESQRYYEKKRSEGKKHNQAIRALGRHLGRIIYKMLKQEREYEIRPEKGDTKAKVGPRSFVKTKIRRPKISSKETK

SEQ ID NO: 304379 - protein, 340 aa, unidentified
MSLVLQSLLPFPDSCQGMSPHQQGRGTKMTEHCYGGIDVSKDRLDVMVLPDRKSFSVDNNAAGYSELVKRLRGLSIAAIGIEPTGGYERAVIRALLAADLSVRRINPNKLRQFGRARGVLAKNDRLDARLIAEYVAIMPTRVVQRDPATEQLAEVVTMRRQLCDEHVAVENQTAHLEDAMLRRLNKRRLARLAADILLLDRRMAQIIASNANLTRRYELLTSMQGVGPTLAFTLVALLPELGQMSRKQIAALVGLAPYDFDSGRLKGHRCIYGGRLPVRNVLYMAALSACRYNPALKVFHHRLAATNKKPKVIIVAVMRKMITTLNAMLRDNVAWQPKSA

SEQ ID NO: 304380 - protein, 400 aa, unidentified
MNPVIGLDVSKGESHAQAFADRGTPYGKIFRFKHDLEGLASFLRFAQDLESFTGKRATVVLEATGHYHSSVVQFLEEHQYLHIVINPLLSHQAKKSNLRKVKTDAADAYQLGEMYYKEELEPYKKRGQYLMNLRYLTRQHESLTDMYVQAKLQFQAVLDQVFPEYHGVFGDLYSKVSLRFLALYPTSQAVLAMSEKDVMANIQRLAGHVNPSCWSQKSAQKLMAAAERNPFKETAFPSQLISLELLINLLLQYQDHLAKLDKSIEALAEELMEFDLIQSIPGIGTKIAATILAEIGEIDRFDHAKKLIAFAGIDPSVFSSGKFTASRNSITKRGSRRLRTALYQAVRCGLRSSRNKKLRAYYDKKRAEGKLFKVAVIACANKLIHWIYAILTKKEPFRLD

SEQ ID NO: 304381 - protein, 351 aa, unidentified
MAGKARTIIGGVDTHSATHHAAVIDGFGRLLADAQFPASPTGYAALLVWMRTKGRLDRVGIEGTGSYGAGLARHLHAQGVVVLEVPRPDRRLRRQRGKSDPIDAEAAARTVLAGRASGAPKLATGPIEAIRMLRVARNGALKAKTAATNTLIAVVVTAPEPLRGQLRDLSRLKLVGACMRLRPDTDRLADPVQAAKAALRSIATRAHALELEVRALKKQLDDLTTAAAPATSNVFGLGPDTASALLVTIGDNPDRLRSEAAFAHLCGTAPIPASSGKTNRHRLHRGGDRTSNSALHIAVVVRLRYDERTRAYAARRRTEGLSMPEIIRCLKRYLAREVFRALRSDYAQITT

SEQ ID NO: 304382 - protein, 315 aa, unidentified
MRDAVFVGIDVSKGTLDVALRPSGESFRVGNDQGGISALVERLSGVQPELVVLEASGGYETAAVAELAAASIAVTVVNPRQVRDFARAIGQLEKSDVLDARILALFAERVRPEVRPLADERTRDLQALVARRRQLVEMLVAEENRLKQAPRVLHRQLRSHIVFLRKELRALNSELDQQLRAMPLWHEKDELLKSVPGVGRVLSCTLLADLPELGLLSRREIAKLAGLAPLTRDSGMLRGKRTVWGGRAKIRSALYMSTLVAVRFNPVLRAFYQRLLAAGKPKKVALTAAMRKLLTMLNAMLRDRATWRPACQAAN

SEQ ID NO: 304383 - protein, 456 aa, unidentified
MSKNNQEKRVKQSRVDAMSQINRNAAGIDIGAEELYVAVPPDRDEENVRSFPTFTADLQSLADWLKACRIETVAMESTGVYWIPLYEILEERGFQVCLVNARHLKNVSGRKTDVLDCQWIQQLHTYGLLSPSFRPPEQIVAIRSLVRHREMLVQYRSAHIQHMQKALTQMNLRLTSVLSDITGVTGLKIIRAIVTGEHNPKVLARFREPGCKKSEIEITKSLEGHYKRELLFTLKQALELYDFYDRQLQQCDVELEALYQAFDTPKDPGTPPPASRHTKPRKNQAHFDLALALYRMTGVDLTQIDGLDAMTVQKVLSEIGTDMHKWPTEKHFASWLHLCPNNKITGGKIIHAGVQPTQNRVSTALRVAAASLTRSDSALGAYYRRMRARHGAPSAITATAHKLARIIYFMLKERKPYHDFGADYYEQLYRTRVLRNLNRQAVKLGFRLEPAFSVTI

SEQ ID NO: 304384 - protein, 406 aa, unidentified
MRVLYERCCGLDVHKKSITACVLTPEGKEIRTFGTMTDDLEELVEWLKQKQVTHVAMESTGVYWKPIYNLLEAEPIDVLVVNAQHIKAVPGRKTDVKDAEWIADLLRHGLLRGSYIPDRAQRELRELVRYRRSLIEERARELNRIQKVLEGANIKLASVVSDINGVSAQRILRALIEGTDDPAVLAQLAKGRLKQKIGELRRALKGIMGPHQRMMLSEQCRHIEYLDEAIARLSREIEERTRPFHEALELMETIPGVGRQSAEQIIAEIGTDMSRFPTAAHLASWAGMAPGNHESAGKRLSGRTRKGNKKLRACLVECARAAARTKNTYLSAKYHRIAKRRGANRASVAVGRTILEIIYSVLTRKEPYRELGADYWDQQREAAIVRQTVKRLEGLGYEVKLEKTSA

SEQ ID NO: 304385 - protein, 342 aa, unidentified
MDHFAGLDVSVKETSICIVDETGRIVREVKVASEPQALLKVLGNQAYRFKRVGLEAGPLSQWLFSALAEAGLPAVCVETRHMQAVLKAQINKTDRNDARGIAQMIRAGLYRPVHVKTLRSQKLRMLLTHRKLLQSKAIAIENDLRGTLRNFGLKVGMVGKARFEARIQELVENFPDLGVLVEPLLVVRRALREQIVLLHRRLLAIVREDEVCQRLMTTPGVGPVVALTYRATVDVPARFRKSKSVGAVFGLTCSKYQSGEIDWSGRISRCGDEMMRVMLYEAAQSMLHSKKWSWLKAWAMQIARRRGMQKAIVALARRLAVIMHRIWVDGTEFRWTREVAAA

SEQ ID NO: 304386 - protein, 369 aa, unidentified
MNQSSTVVGLDVHKEKITVAILPPRAPRPSEVLTIENHPKAIARLVKRVAARGHPFFVYEAGPCGYEVQRQIAQIGHTAVVIAPALVPRRPGDRVKTNRRDAEKLARLYRAGELTEIRVPTRSEEAARDLVRAREDALKDRLRARHRLSKFLLRQGRAHHETKGWGAVHRAWLRAQQFDSLVLQSTFEAYMHALDDAEVRLESLDQQVLALAQTEPYRVPVQYFRCLKGIDTLGAITLVVETQDFRRFPNPPAYMSYTGLVCSEHSTGANERRGPITKAGNAHLRRILVEAAWSYRHRNITGPELRKRRTGLPSEVIRIARRAQDRLHRKFWRLMSRSKLSQVAAVAVARELAGFVWALAQQCPQSTSA

SEQ ID NO: 304387 - protein, 409 aa, unidentified
MRYYLGVDWADQTHAVWVVDESGAKITARAVAHTAEGLGEWGRALDEWRAQGIDLWAAIERPDGRVVDFLLDHGVVVYPVNPKALDRARDRFRQSSAKSDPFDARVLADFLRTDHAHLRALLPSSEAAQELKLLTEDCQRHIRQQTRLVNQLTATLKAYYPRALEVAEVTSALAREFLPAYPTPAAVTALTERQWQRWARAHGLSAARAGDLWAVLRQPHLPVPAHVVRAKARLMQALMEQLMPVVAAVAQYRKAIDDFFASMPAARWARTLPIGKHGITAPTLWARLGDAPGRWESFRHLQAHAGAVPVTKRSGKQHVVHFRFACDKALRHVVDQVAFLSLLSSAWARTYYDQQRARGHSHRQALRALGAKWLKIIFVMWQRQVPYDEQYHVATMTRQQLQQGQKQFA

SEQ ID NO: 304388 - protein, 338 aa, unidentified
MAWTVAIGVDTHKQAHVAVACDRLGRQLDACEVPTGVGGYTRLLEWAQALGRPAFAIEGCGSYGAGLARFLDASGAAVFECERPRRRERRSGKSDLIDAALAARRLVAGERLARPRGAGRREELRLLLLERRGLVQARTAALNQLQAAVVSAPERLRLRLGSLKGAELAGAARAVRGGGEERVLVGVLRRLGRRVQQLEAELAELEAELEAIVEELVPELLEECGVGPVCAAQLVASSGDPARMRSEAAFAALAGTSPVDASSGRQRRHRLNRGGDRQLNRTLHVIALARVRHDRETAAYHERLLASGKTGREARRCVKRALARHFYRRLCANPALTT

SEQ ID NO: 304389 - protein, 329 aa, unidentified
MDGNGKFRGNRSFTTCENNIIKALKAVKAKRKYLVMEACSLSNWAAQVASDHVTEAIICDPRENALIYKSSKKRDKVDTKKLCRLLRLGEFKAVYRPENDQRAIFKAAVQHYADLRDQLVGLKNKIKAMYRQWGVIDVFTDSVYSTSGRDKFLNQVNHHPICFQLKRLYDLMDHTAAIKQDAQKSMTSLGRNYPEIKEFKKIPGMGPIGAHTFDAYIQTPHRFAKRSRLWRYCRLGVTDHSSDGKPLGYKRLDKSGVSELKALSYRAFLSAMKSDNEVKRFYLNSLQRTHDRKHARLNTQRKILSVMLSIWKKGQPYRPDLFLDPSIEG

SEQ ID NO: 304390 - protein, 409 aa, unidentified
MEKTEKRYIGLDVHKHYLIALGVDEELNIVLPARRVELSRLEAWMKKTLTRQDEVGLEMTTNTWQLYDELVVYAGSVLVVHPPHVALITRSQVMNDKIAASILARLLAKGLLVGIWVPPQEVREMRGLVAQRRKMTNLATQAKNRLHAVLQRHHLAPPEGNLFGASNQAWWQSLSIGKLEKLNLESDLDTLQFAEKQVNRMTEIMEGMAVEQEPIGRLLHLPGFGVVTAVTVWAAIGDIRRFAEPKYLVGYAGLGTRVHDSGMTMRSGKITKAGRRDLRTVLIEAAQAAASSHPHWQAELTRLEPRLGHNKAIVAIARKLLIAVWHVLAQKQTDRFVEPEKVSQKLLRFAYDVGKRNRAGLSAAQFVRQRLDALQIGQELTSIAWGSKKPIPLPPSTVKPEGSDVPNTK

SEQ ID NO: 304391 - protein, 383 aa, unidentified
MNDLIRIGVDTSKSVFQLHGVNAAEQPVLRKKLRRRQVIEFFQKLPATRVGIEACGASHHWGRELSALGHEVVLLPPQRVKPYVERNKNDAADAEAICEAMSRPRMSFVPVKTAEQQAALMLVGVRDQLVGRRTQLSNAIRGYAAEFGLVAAKGTDKIEPLLVRIASDENLPPLAKGLFATLGNEYVRLKPELRKIEARLMAWHRGNELSRRLAEIPSVGPIGATLSVMKVGNPHAFRSGRDFSAWLGMTPKDHSTAGKVRLGAITKAGDEALRSVLVAGATSVIQQVRKGRGRPSPWLVALVKRKPPKLAAVALANKTARIIWKLMVSGERYNPQRAPQRFVPPTDSLAPGRRRQGQAACGGDLRSALTAPALRAPSAPPSA

SEQ ID NO: 304392 - protein, 362 aa, unidentified
MNRNTGMSAGQIIGTMNGQQVVGLDIAKNVFQMHTVDMGTGEIINVQIKRGKVLEHFANKPQSLIVMEACGSAHHWARELAALGHSVRLLHAKAVRPFVAGNKTDATDARAIWLAVQQPGVKFVGVKTAQQQATLTLHRQREQMMKMRTMQTNALRGLLYEFGATFAKARKALLSEVEQALVALSAQLPQMVVDSLREQVARIKALSEDILALEKRLGQQLRQDPKMQRIGQIPGVGLLTATAAIATMGEASAFKSGREFCAWLGLVPKQNGTGGKVRLGSISKRGDTYLRTLLIHGARSVLAHAKEPGPWLEGLKGRRPANVVVVAQAAKMARTIWAVTAKETSYQRGYQSVRPSAEVQAV

SEQ ID NO: 304393 - protein, 427 aa, unidentified
METDLSRVERFRQFKQEIRGNERYLIVGIDVAKDRHHAFLGTANGRTVLRRLAVENNRSGFEHLSAHVQFQMKKHGLDEVVVGVEPTSVYHKPLAEYLIERDFLVVYVTNAAIKQNRQLLDGRWDKNDTKDAANVADLVTQGKCHYYDFPNEVLRDVRALLGVRRRLKRQLHSARMRIRNNLVAQYFPELDTFWNKAEQENLAIVRWSLDPETIRRLSFKEFFHRVTSRLKGARQHERLRGIWEAASSSIGCRVGKTLEVETRILVEEVKRTREQIAEVEKSIKARLTGLTHYELLLSIPGFGPYICAVVLAAVGNPHRFENRSQLLRLAGLDLSANRSGKRSPTAVPVISKRGKADLRYALYQAALVASSFNHHVMAYYRNLLTGREREPGIRTKMRVKLAAKLLIIAWTLMKNKEPFNPDRLKTD

SEQ ID NO: 304394 - protein, 342 aa, unidentified
MYYIGLDVHKKTISYCVKDASGQVHREGKVGATRWELDDWMKTLPQPWTVAMEATIFTGWIYDHLLPHAQQVKVAHPLMLRAIAAAKKKNDRIDAGKIADCLRCDFLPECHMASTAIRDRRRTLRYRHLLVRQMVQMKNRISGLLMETGVSHNKKRLHKVGYFRELLAANEEVQESIRPLLRVSRDTIVRLQKTEYALVSSLQRDPLLAERIKRLRTVPGVGPITALTWALEMGDVSRFSSIRQAISYCGLCGDEKSSADKVMRTPLSKQRNKHIQRVLVEAAKLAPRQDHNLALVYEREKQKGNANRATLAVARKMVAYLLAVDRGQRDFVPFADSQSAAA

SEQ ID NO: 304395 - protein, 342 aa, unidentified
MHNYVGLDVHKSSIYAVVMNKEGKKLFERKLKNHPHEVDKLLANLEPKNTSIALEACSVWQYLYDYLHESGYYDLSLTNPLQVRLIANSRKKTDKHDAKVLADLLRTNMLPKSYAAPKDVREQRQITRHRASLVRLRTEIKNKIHAILLRHGIEHEYSDVFGAKGTEYLRSLDLPMCDRFELDSYLDIIENINAQVKDTNERIEDYVDQHPHARLIMSMPGIDYYSALMICGEIGDVHRFPHVKKLVSFAGLNPSVYQSGNTLRQGHISRQGNRNLRWILVQCAHVAIMHDPYMAKFYRRLKKTKHHNVALVAVARKMLERVYTMMKLNLPYHVLQVNRKAS

SEQ ID NO: 304396 - protein, 342 aa, unidentified
MAQTITVLGIDIAKQVFHIVGMDDSGRVVLRKRLVRSALLTFIANVPPVRIGMEACGSAHYWARQFREHGHDVRLIAPQFVKAYVKSPKNDGRDAEAICEAVTRPTMRFVPIKRIEQQDLQALHRIRERLMKARTALVNEIRGLLSEYGIVLPQSIAKFRALIVEKLEDNQAKLTALSTEVFQHLYEEFLALEKRLEYYDEKLAAIGQAHPECQRLQTIPGIGPVTATALIAAIGDVTQFKNGRQLAAWLGLVPREHSTGGKLRLLGISKRGDRYLRKLLVHGARATLRWVDTKCDDRSQWLRALIARRGKNRAAVALANKNARIVWALLAHNQEYRVRTVI

SEQ ID NO: 304397 - protein, 342 aa, unidentified
MEHYAGIDVSLECSSVCVVDANGKIVREAKVASEPQALIAWFGSLGFGLERIGLEAGPLSQWLFAAMREAGLAVELLETRHVRKAFEAMPVKSDRNDARGIAQLMRLGWFRPVHCKSMSAQETRSLLTARKLVQSKLHDVENSLRGILRGFGLKVGKTTGQKFAGRIEELVTGHPHLQMIAKALLAVRAVLRTEFAAFEKQTRRMVRSDMQARLLTSIPAVGPIVALTYASAIDDPARFKSSKQAGAHFGLTPKKHQSGETDYTGRISKIGDASVRTALYEAANVMLTKPVKGCSQLKSWAMRIKRRAGMSKAKVALARRLAVIMHRMLADGTPFNAAAAAA

SEQ ID NO: 304398 - protein, 334 aa, unidentified
MEQITTVGIDLAKNVFSLHGVDGAGCVVLRRTVRRDQLVATVAALSPCLIGMEACSGAHEWGRRFQALGHTVRLMAPKFVAPYRKSGKNDGNDAEAICEAVTRPNMRFVPVKSAEQQALLAMHRVRHGFVVERTATINRLRGLLSEFGMVLPLRSVTVRRQAAEAAENLPELARRAIGDLLEQLRLLDERIGGYDQQLEAQARLCEPAQRLMKIRGIGPTTALAIIATVGNAREFKNGRQFAAWIGLTPSQYSTGGKPRLGYISKRGDAYLRNLLVQGARSVLNSAGAHQDRMSRWILQLQPRRGYYRTLVAIANKNARLAWALLAKNEPLRTA

SEQ ID NO: 304399 - protein, 324 aa, unidentified
MQDSALTWIGIDVAKDSLDVAWMSAEGPQCQSVANSRPAFRSLINKLPPSAEARIVVEATGGYERALVTALFEAGYRVAVVNPRQVRDFAKALGILAKTDRIDALVLARFGQQVQPRLLEEDPTQRAELMQLVARRRQLIDIRTMESNRSEQTTARAAQKSIRHVLKLLEKEVDQLEAEIARLLTSDDDWRTKIELLSTVPGVAKVTSATLVAEVPELGRLNRHAIAALVGLAPFNDDSGRHRGTRRITGGRAAVRRVLYMAALSARRCNPVIHAFAKRLAAQGKKPKVIIIACMRKLLVILNGMLKSNTPWKLPQIQSTPLEK

SEQ ID NO: 304400 - protein, 352 aa, unidentified
MAKVEFDDLMSVGIDIGKDTFHIVGFDHDGQRVLRKQIKRLALVTTFEKLPRCIVGMEACLSAHFVSRTLRKMGFEPRIIPAIYVKPFNKGQKNDYNDAEAIAEAALRPNLNAVSEKSQDQLDLQALHRVRSRLVSRRTATINQIRAFLIEQGITVRKGLRALKNSFETILEERKEEISPRMRKILIGLYGDWMWMDDRIDTVSKEIEEISRTEENCVNVMTVPGIGPMISTAMVAAIGEGEAFDRGRDFAAWVGLVPRQYSTGGRTILGRITKRGSRYLRMLFVQAAKVILMRPHRWPDFSFGAWLTRASERMHRNKLAIALANKLARMAWSILRHKTAFDAPRDEIMAGV

SEQ ID NO: 304401 - protein, 423 aa, unidentified
MKLVYPICCGADVHKKHVTATIARTDKKNITTYVTETFTTLSDGLRCFGNWLKIQDCMHVCLESTGKYWIPVFNVLEKAGVHVVLTHPKYVRAIKGQKTDKKDSRWIADLFKFDLVRASIIPTQDFRAMRELARYRSKLVHMRTSEKNRFQNAHTLSNIGLGSVLTDSLGKTSSNITEYLLETEEIDEEFVKSLIHKSARKKTELILDAIRSSEISPDQRFKLKATMSHIEYLDALIAKTELELFKHMRPHMALVQFLAEQLPGVTELSAALIIAEIGVDMKTYESSKRLVAWAGLAPTNNESAGKKKSTRISRAGHFLKPILVQCALAAIRDKREPYFAIKYERIKRRRGHNRAIIAIARMMLTCIYHMIDTGEVFNPSDYEELHHCESLPDRQSVPLSDEDAIAFLVAQGYDVSSLTKKLT

SEQ ID NO: 304402 - protein, 366 aa, unidentified
MDYGVYCGVDFHARQQTICCLTTEDGVITTHELKHDNKEVVRNFYAQLPGPVLVGVEAGGYSLWFEQLLEELGHEIWLGDATEIRRCARRRQKNDRRDAALILDLLVRGEFPRIHRQAPLSREILRMLRYRHRLVKIRTIIKNCLHALAIQSGLSLKSQLFTQAGLQQLTRLAMSPVMQCQREQWLQLLPTLEQRISACEKWLSEQAAADPRVRRLRTHPGLGLLTSLAVVHTLDPVSRFPNQRKVAAYGGFDPCEDSSAERKRYLGISKAGSKLLRFLLIEAGQTAVKEDPELKRFYRRLQQRRNKPKAKVAVARKLLIRSYILLRDEIDYAEFLRRAVAARLARENTRLNACPLIEQSASLAGD

SEQ ID NO: 304403 - protein, 321 aa, unidentified
MSEPYNVGIDVSMDRLDVVILPDERRFSVPNNAAGWAGLVERLRPLAIAAIGLEATGGYERGVARAPLAADLSVRRINPTKLRQFARAHGVLAKNDRLDARMIAAYVAIIPTRKMQADPATERLSETVAMRRQLCDEHVAVMNQASHLEDAMLRRITKRRLARLEADIALLDKRLGEIVAAEAGLTGHYRLLISMPGVGPTLAFTLLALLPELGSMSRKQIAALVGVAPYNFDSGKFKGLRRIYGGRMTVRNVLYMAALAAFRFNPALKVFHRRLVAAGKKPKVTIVAIMRKMIVTLNAMLRDGAEWTDGSNTGRHTVPTT

SEQ ID NO: 304404 - protein, 348 aa, unidentified
MEHYAGIDVSLECSSLCVVDAMGKIVREVKVASDPEALITWFGSLGLRMGRIGLEAGPLSQWLYAAMKQAGLAVELLETRHVRRAFEMMLVKSDRNDARGIAQLMRHGWFRPVHCKSLPAQEVRAILTARKLVQSKLQDTENSLRGILRGLGLKVGQTTPVRFAGRVKELVAGHPSLELIAQALLAVHAVLQREFKGLEKRVRLLARSDAATRLLMSTPGVGAIVALTYASAIDDPARFRSSKQVGAHFGLTPKRYQSGQTDYTGRISKIGDAAVRTALYEAAHVMLTKPLKGCTELKSWAMRIAKRAGMSKAKVALARRIGVIMHRMLVDGTPFNSAARTAPVAIAA

SEQ ID NO: 304405 - protein, 389 aa, unidentified
MQFVGIDIASETHVFAVIDADGTVLVKPKPIAEDATGHSTLLAALAPPGEALVVMEATGHYWKNLFAVLAAKGYGVALINPLRTHRFQGESLERTKTDAIDAIGLARFGREKRPAATRLGSQASEDLRELVRHRDRLRQDFDDRVRQLHRLVDLGFPEFRRYVRTLDSMLATAILAEYPTAEAVAKATPRRLAKLRYDGRHAVGAELADQLIAAAKRSVGQHHGTAYRVQVRDVCQDLDLWRRRLAERDGDIARLLDDHEVGSLLTSIDGIGPGTAARLIAELGDPARFDSAAALAAYVGVVPALRHSGKRRPNRAAITAIGNARLRTALWMPTLTAVRRNPWLKAFYDRLRAQGKPPKLALLAAMRKLLVAVYAVAKARKPFVPKLAG

SEQ ID NO: 304406 - protein, 381 aa, unidentified
MDKVYDKCCGIDVHKKLIVACFRKGSKQELRNFGATTRELLELANWLQNGGCEMVAMESTASYWKPLYNILESSELKAMVVNASHMKAVPGRKTDTKDAEWIAELLQHGLLKASYIPDKQQRELRELVRYRKSLVSERTRELNRLQKMLEGANIKLSGTVSDINCMSARNILEYLLTGEFFDEAKYDEMYKQKIIAHNLKASKEQLIDDLNGVMTPLQRRMMKELLSHLDELNVHINNLEDEIDNFMKPEEKKATQAIQDVTGIGKNSSQAIISVIGTDMSRFPTAGHLAAWAGLCPGNNESAQKRKTGKMRKGNALLRSTLVVCAHSATRNKNSYFYAQFMRISSHRGKKRAYVAVAHSMLIAIYHILKDGVVFKDLGAD

SEQ ID NO: 304407 - protein, 338 aa, unidentified
METYAGIDLHSSNNYIGIMDQDYKRLFGKRLPNNLDKILMVLEPFKPDLKGIVVESTYNWYWLVDGLQEHGHKVHLANPSAIKQYEGIKHTDDKWDSFWLAQMKHLNILPEGYIYPKEQRAVRDLLRRRLFFVRHRTANILSLQSTITRNLGIKMSGNEILKLGMDDACDLFDSPNLVFMAQNNISTIKHLGKIVKGIEKEVKSQVKLRKEFVMLTTTPGIGLILGLTIMLEVGDIGRFLKVGNYSSYCRCVGSKKLSNGKKKGENNKKNGNKYLAWAYIEAAHFAKRYIPNAQRFYQQKLAKRNGAVATKALANKLSRASYFIMRDQVSFEEDMLFR

SEQ ID NO: 304408 - protein, 347 aa, unidentified
MRFYTKPHKFYCGIDLHARTMYVCILNRDGEILVHRDLKAAPEPFLKAIAPYRENLVVCVECIFTWYWLADLCAREGIPFVLGHALYMKAIHGGKAKNDRIDARKIAVLLRGGMIPQAYVYPAEMRATRDLLRRRMHLMRHRAGLLAHIQNTNSQYNLPQIGKKLAYKANREGVAERFPDPAVQKSIEVDLTLIGSYDRLLTALELDIVNTAKAHDAQTFYRLRSIPGVGKILALVLLYEIHDIHRFPRVQEFVSYCRLVKCAKESAGKRYGTSGAKIGNAYLKWAFSEAAVLCLRNNPAGQKYLARLAKKHGKGKALTVLAHKLARAVYYMCKRDTAFDLDKFLNA

SEQ ID NO: 304409 - protein, 395 aa, unidentified
MFIVGIDIAKRSHEAIIIAEDGQVVRKAFSFRNNCTGYNLLLEQVRKLTLVKSQIVFAMESTAHYWLALYARLLKDGYAVMVLNPIQSHSLRELYIRKAKTDARDSLIIADLVRFGRCKASNVPQDKILALRELCRSRAYLVDMAADLKRKLIALLDRIFPEYESLFDSVFSKASIAVLRKYSTPQKVKNAHLGKLTDLLMESSNGHFGEWKAHQLKEAACSSFGIDDSGGVYSTLLGMFLEQILSLTAQADSLEKQISVFFQEFNNPLTSIPGVGTVLAATILSEIGDVTRFSSADKLLAYAGLDPSVKQSGEFKSNQNRMSKRGSPYLRRAIWLASTVAVHRDPMFQTYYEKKISEGLHYMNVIGHVSRKMTTVIFAVLRDGQPYQPILQSAG

SEQ ID NO: 304410 - protein, 371 aa, unidentified
MNHVTSIGLDVHARSVTAVALDSITGEVRSRKFGYSPAEIAGWILQLDSPKAVYESGVTGFHLVRELREMGVDCIVGAVSKMHKPASDRRKKNDRNDAEFLARQLMAHNIVEVFVPDVETEGARNLSRALEDVRDDLTRAKHRLTHLLIRWGYVWNEFNEDGKRRGSWTHAHWEWIRGIELPDAAARESLDYYISEVRHIESQKKAIEKRVAQCASRPRWRDRVEALRCMKGIETVTAFALTVEAGVFSRFDSARAFASWLGLVPSEHSSGERASRGGITKAGNSHLRKLLVEASWHYTRATKERKRSLYDESVPASISNHAAVGVKRLVERRRHLSCELRKRPVVANVATARELACWIWALGRMSEGALA

SEQ ID NO: 304411 - protein, 412 aa, unidentified
MEGETVIAGVDTHKDVHVLCLLDGLGRKIWSGSFGADPEGYDRLAEAIGDPGSCMVVGVEGTASYGAGLTRRLVELGYNVVEVLRPKRDKVRPGEGKSDPLDAERAARKAASGKGCSVPKSQDGWVEAVRQPYVARRLAVATSTSCVACAKSMLTTAPGALRERFRGRERPKDLMPLLARGRKAGDALEESVLASLRSVAAVWKEARSQVESLDERIRALLEANAPALLGVEGCGTTTAAALVVAAGDNPGRLKGEAAFSMMCGASPIPASSGKTDRHRLNRGGNRQANWALYEIAIKRMAYDERTRRYVARRTSEGKSRREAVRCLKRYIAREVYHVLMDPNPDGAAPEGPELAKMRKAMRVTQKKAAAELGLSAATLGHLERGKRRSTKLERRYYELLCELKGALPQTAS

SEQ ID NO: 304412 - protein, 383 aa, unidentified
MSSSQSTTTRPIIYLGLDVHKDSITIAVLPSTAKVPTRVERLPNELPKLKRWLDRVARDGELRACYEASGAGYVLHRALREWGYVCEVIAPSLIPKRPGVQRKHDKRDASELARLFRAGDLTPVRIPSEAEERVRDVVRCRETFQREILKSRHYILKFLARRGLVFREGTNWCTPHLRWLQHLTTEQSPLDAADRLVFREYHALLEYKLQRRDDLDREIARLAELPTLAPMVRRLQCFRGIALQGAMVLATEIVDWRRFARPTQLAAYLGLVSREDSSGDRERKGSITKAGNSHCRHVLIQAAWSYHHRPAISMDLKRRQVGQPPAVIAHAWKAQQRLHQRYNHLSYRKQRQIAVVAVARELVGFLWAVMQDCSSHVVTEVAA

SEQ ID NO: 304413 - protein, 347 aa, unidentified
MLYAGLDLSRQRLDVHLLDENGRTVEVTAVRPDVDALRTLVATIGRHGQAVTAAIESMNGARFVHDQLELAGWDVEIADALKVKGLAPLAAKTDKIDAWVLAELTRRELVPAIWLPDPTVRAERERARFRLHLVRHRTALKNRIHATLIAFGHPVPVTDLFGARGRALLAGLAIPEPWTTTLATSLGLVDELGTEIDACERDLRAMGAAHPYVSLLRTAPGIAWVLGYTIAAEIGDIGRFASSKKLTGYTGLCPFVRQSGRRDERGPLAKNGPKYLRWALMEAAIHAARHPVYRARYERTKERLGRQRGANVARVEIARELTTAIWHMLTKNEPFAPGRPPVHALVA

SEQ ID NO: 304414 - protein, 350 aa, unidentified
MKNISKKPSYQGKEVFVGIDVHKKTYSVVSIVEGAVVKKWRTTAKPEQLTKQLKDYFPKAKIYSAYEAGFSGFVLHRQLEKVGIENVVVNAASVEVTVNNRVKTDKRDALKLASLLESRRLKGIRIPSEQQEQQRLLTRTRQQLIEERTAVKNKIRMKCHQLGLIEADESRRMSHKLVEEMLSKSPSPEFSLVIEAYWQIWKTIETEVKKLEKQLEQQAEQDPNEKIYRSAPGIGPLGARILSNELGSMSQFDNERQLFSYTGMTPSEHSSGESTRKGHITRQGNSRVRWLLCQAAWRAIREDLDLKEYFERLHPRTGKKRAIVAVARKLIGRIRAAFRQNTLYCLTPIT

SEQ ID NO: 304415 - protein, 343 aa, unidentified
MQIHSVGIDLGKTTFHLVALGAAGKVLARKKFTRKQLLGYTANMQASLIGLEACSGAHFLGRALRKQGHDVRLIAAQFVKPFVKSNKNDFVDAEAIAEAVERKNMRFVPIKTDDQLDLQGIHRVRDRLISRRTAVINQLRAFLLERGMVFAQRPAKLKAAMADILENAETDLTPQMRSLIDMLWDEWMLVERQIEKLNLELERISAADAGCTRIRQIPGIGPVVATAIVAAIGNGAAFRKGRDFAAWLGIVPRQYSTGGKTKLLGISKRGNVYLRKILIHGARAAVLRIKRDRAPIGAWLDALDARAPKNVVVVAMANKLARIAWAVLSSGEDYRPTANAIPA

SEQ ID NO: 304416 - protein, 351 aa, unidentified
MKKVLKQVLGVDVAQKELVVTLGRLMDDLSVDLYAHKVFKNSETGMGLLVEWVKKLSEDSVVVQYVMEATGIYHQKFAYYLADHCYSVSIVLPNKISNYMRTLEVRTITDKTCSEAIARFGLCRKLDNWEKPKKTFRTLQQLTRERDQIVHERSAVKNQLHAEKSEAYPYEKSLERLNARIAFLNTQEKEIKKDISEIVNRDKGLKEDVKTICTIPGVGELTAVIVLSETNGFELIRSKKQLASYAGFDVKEKQSGTSVKGKPKISKKGNRHLRKAMYLPALSAVKWDERFKAVYARILAKNGIKMKGLVAVQRKMLEMIYTIFKNKTAYDKEYLKNENSVQTQGAYAITG

SEQ ID NO: 304417 - protein, 384 aa, unidentified
MSISSDAAVSTQLNAIFVSLELSRSTWLVTSLSPGRGERLSRHQVKGGDVPSLLNRFAQLQARAEERTGEEYPLVVIQEAGLDGFWIHRCLTREGIESHVVDAASIAASWRSRRAKTDKLDGEALVRTLLAYKRGEPRVCAMVAVPSVEDEDRRRICRERRSLVVERIRHINRVKGLLFAQGVGDYEPLRANRRSRLEELTTGDGRPLPSHIKREIERELDRLELVMRQIKEVERERDAMLEAATQDTAEPASARLLQLRGIGPEFAAVLHAEAFFRSFSNRRQVACYAGLAPSPWQSGAMDREQGVSKAGNKRLRTMMIQVAWLWLRHQPTSELTRWFEERVQTNGGRVRRVMIVALARKLLISLWQFSSAGVVPKGALLKPA

SEQ ID NO: 304418 - protein, 392 aa, unidentified
MLFVGIDVASKKHDVAITTFGQSILSKPFTISNDYQGFKKLRDEILSHTEYLDDVRIGIEETGIYSKNISEFLALCGFTVHMINPILTSHSRKSGSVRLTKTDKIDAISIARYVEFNFKRLNSYTTSLYIYNEIKSLSRARLDIQTKLIKAKTEWTRLLDISFPEFRTHYNQHSKWVYTLFNSYATPIEISKMHTSTLTKIIATQGNRLVQAENIKQLAKITIGNSSASTKILLKNTLSDILHFTNQMKIFEKAIDELIKEHFHNLLTIPGVGSITAGLIVGEIGSIARFKSPESLVAFAGVDPTVFESGQFKAKNVHISKRGSKYLRTALYTSTKVAIINPKVKDNKFRDKYHKKIAQGKHHNSAIFSAVKNMVNTIYKLLQTGENFDYSI

SEQ ID NO: 304419 - protein, 336 aa, unidentified
MKKFYVGIDVSKEKLDFCLYCESKVLKECVAPNNSKEVLKEFKSWEKEFKQPKETWILCAEYTSIYTYPLTCASEEFGIDLWLENPTQIKYRSGVQRGKNDKMDARKIAIYAERFISEMQLYSLPQKNMASLKLMVAERDLYVSDKKKYQGQLSDQQRFMSPKDFKVKSHRLKSVISELEKQIDEIDREIQQSIDNDETLSNQHKLLLSVDGVGERVAVKMIVETNGFKDFTDPRKFCCHAGVAPFKFTSGSSIRSRNKVSNRADKSIKALLHMAALVVTTTKKDGELREYYLKKVAEGKSKMSVLNAVRAKLVYRMFAVIRDNKFYEKNYLHQLA

SEQ ID NO: 304420 - protein, 346 aa, unidentified
MPIVGGLDIHRKQITLDYLDTVTGQVQRGQVSPADRAHLRGWLARFAGREDVAFALEACTGWRYIAEELAAAGIGVHLAEPADTAFARGRKRHAKTDRTDSRHLRQLLAEGRLPECWIPPWHILECRALLETYHDLRAEHTAWVQRIHAVLFHHGGPALGAGTLRTGQGVAALRAAAADCLSPAGQLQVATALEVLEALEARQHVVRHQLLAAARHLTGAKVLAARLYGVGPVTALALTCWLAGAGRFSSSRQAVRFAGLDVTVWSSDRKGPPGRLSRQGPPVLRWAVYEAGKAHARSSAPDHRYYAAVKDRKNSKRACLSEARKILRQAHHILAELGDDALAAAA

SEQ ID NO: 304421 - protein, 367 aa, unidentified
MKKISTVVAKQGRNNSQQELTIGLDLGDHNSWYCVLDEAGRIQLEQRVRTTAKALQEVFGTMPRSRVVLEIGTHSPWISRLLKQLGHEVIVANARKVRLIGESRKKDDRLDAQTLARLARIDPELLYPVKHRSAQAQADLMMIRARAGLVRARTSLVNTARGLAKSYGERLRGCNVRDMDPEKAENLSPELQRALEPLLATIEELSERIVEYNDRIEALAQTSYPQVDLLKQIKGVGTLIALTFLLTLEDPHRFGKSRDVGGYLGLQPGRRNSGESEPQLRISKEGDPYLRTLLVQGAQHILGPFGIDCDLRRWGLKLAERGGGNAKKRAIIATARKLAVLLHHLWVSGEVYEPLHNSRRLTVAAAA

SEQ ID NO: 304422 - protein, 409 aa, unidentified
MERQLERCCGLDVHKATIAACVRLGGRTGTAEQHVQTFGTTVGDLLVLHDWLAAHGVTHVAMESTGVYWKPVFYALESDFTCLLVNAAHIKQVPGRKTDVKDCVWIAQLLEHGLLRGSFVPPAPIRDLRDLTRYRKALIHDRTRVANRLHKALEEAGIKLASVASDILGVSGRAMLTALVQGTTDPAVLADLARGCLRRKLPALRQALVSRFRPHHAFVLGQLLAHLDYLDEAIATLSTEIARVMTPFAEPLRRLDTIPGINQRTAEVILAEVGTDMRVFPSARHLASWAALCPGQHESAGKHRSGKTRKGNRWLRTALIEAAAGASRAKNSALQARFRRVLRHRGPKKAVVAVAHALLRMVYHVLADGTVYREAGADYYDRHHSQRITRRALQTLERQGYRVTLEPAA

SEQ ID NO: 304423 - protein, 349 aa, unidentified
MQKHWVGLDVGEEFTNICVLDRSDSPVLECSTGSSPDAIAAGLGGLKKSEIQAMVMETGSVALPEKLRKIGFPVSVLHARTVHRFLSIRHHKTDANDARGLAEIARLGNLSTLAIHTRSSASQELRNQLIIRNRLVSARVAARATLRSTLRNYGSEIRQLSLGTALRPQIETELDLISRSVGSSAVMQIEPLLAVCVSLASYVSALDRQMQRTAASNPVTSRFLQIPGVGPICAVSFYSAIDEPSRFRRTADVGAYLGMIPKISQSGSTTYRSRVTKAGSAMTRSHLVMAAGVMMSRAKQRCAISDWGVTLAEKVGYPKARMAVARKLAMAMLSMWKADKTFEPYPQRF

SEQ ID NO: 304424 - protein, 438 aa, unidentified
MERFTLVNPHAAGIDVGDTEMVVAVSPEVCDQNVRTFGAFTCDYQQIVCWLRECKVTHVALESTGVYWVQLHLLLQQEEFEITLANAKHIKNVSGRKDDENDAMWIQRLHSCGLISGSFQPDLQTRGLRDLMRHRRTLVRDQSRCTNRIIKALELMNIKVQTVISDIDGKTGKDILAAILAGERDATVLASLANGRVKASKEMLIKSLQGNWDTRHLFLLKQQHETYNFISGQIKELDMQIEKQLQTLTASVHEGELLPINLDHPRKRSTRKNAIPFNATAHLKTLLGVDLTEIPGISEVSALEIISEIGTDISRWPTENHFTSWLGVVPNTKKSGGKIISNKIMKKKHRAGQALRIAASTMYHSKSALGDFFRRKQAKGGPSKAILATATKIAISIYMMIKNKTPYQPERMKEAQDKFKQAQIRKLETRLAMLKSAA

SEQ ID NO: 304425 - protein, 420 aa, unidentified
MSPPGASEPASELLLQYLLQHLLVQTQLSDQLLQPLILILQLPQTPQLRHAQPGKFFLPVNGMDYLLPLRLTVRNVLTRRITMNIVFLGIDLAKNVFQLCGLNQAGKPVYTKRTGRKELLQTLANIPACLIGIEASTGAFYWQREFEKLGHKVKVISPQYVKPFVRGQKNDGNDAQAIAVALMQPTMQFVPPKSPEQQDIQALHRARQRIVNHRTATVCQIRGLLLDRGIPIGSAVSRARRAIPLIPEDAENGLSSRMRRTIAELYDLFNDLERRIHFFDKEIETVFRQSEACQRIAKVKGIGPETATAVVAAIGKGTEFKNGRHFAAWLGLVPRQHSSGDRQVLMNMTKKGDRHLRTLFIHGARAVVRVATNNNDGHMNQWVNQLKERRGFNKTTVAVANKNARIIWSMLRNETEYQVV

SEQ ID NO: 304426 - protein, 330 aa, unidentified
MQYIGCDVSKMTLDLAWFDEDKQRWGGALKVTNNSSGWQDLMQWAEQCCRLDRSEICVVMEATGVYHLPVAGHLSTEGFKVLVCNPGRSADYARSQNQLNKSDKLDARALQRYGSRLEKVHWFQPNTPQINQLKSLLGLLDQLDKDVIRWQNRSEKITYQYPGSVACQGIKRQLKNLCREQVRTQTAIDHLIQGDEELRRNYQLMCSINGVGAKTSQRLLPLVQGGRFKSARQLAAFLGLTPCHKTSGTSLRSPGQLSGRGDANLRSKLYMPALSACSKNPELSVFYNKLLARGKTKKQAITAVMRKLVHLCYGVVKNQTPYVENYGALS

SEQ ID NO: 304427 - protein, 370 aa, unidentified
MTHPTAVCPPLSTSTIRLPTTMGLDISDQVSHYLVQRGDGAKLATGKVKMTREHLRALFKGYVGCRLVIEAGGHSPWVSRLAAECGMEVVVANSRKVELISKNERKNDRVDAQLLTELGRTHPALLSPITHRSERAQTDRSVLRARDELVRARTGLVNHVRGVLKSNGHRAPNSATSAFVRKSSMTIPDDLRPSLDPVLEVITSISKRIERMDEQIERLCSERYPTTQLLRQIKGVGPIVALSFVLTIDDPKRFRSARDVGAYLGLVPRKKSSGKCDPQMRITKAGDRDMRRLLVNAAAYVLGHFGPDCDLRRFGQRVVGASANKNARKRARVAVARKLAVLMHHLWRTGEVYDPLYLAKSRGELAGMAP

SEQ ID NO: 304428 - protein, 411 aa, unidentified
MQVIYERCCGLDVHKRTITACRLRWLGSEWQKEIRQFGTMTKDLLALSDWLVKEGCTQVAMESTGVYWKPVYNILEGQVELLVVNAQHLKAVPGRKTDVRDAEWIAELLAHGLLRGSFVPPPSVRELRELTRYRSSVVRDRARTVNRLQKVLEAANIKLASVVSDIDGVSARLMLEGLVAGQRDTEQLASLAKGRLKEKHGQLVEALSCRLQPHQSFLIAEHLAQIDYLEGAIERLSQQIEEKLRPFEQQIGWLDTIPGINRRTAEVLWAETGGDMGRFASARHLASWAGMCPGNNESAGKRRSGRTRKGSPWLRHCLVEAAHGAAHTKNKYLRSQYHRIAARRGKKKALLAVGHSILVIAYHLLTRKQAYADLGANYFDERDRQAVTKRCVNRLQKLGYEISLEKLQMAA

SEQ ID NO: 304429 - protein, 416 aa, unidentified
MTSSPKTIPFERYLAIDAHKRYVMVGGLNAQQEPILLARKINVDAYPQWAQANLKPGDAVVIEATTNTWTLYDATAPLVSKVVVAHPFAVKQIANARVKTDKLDVFRLARLLAADLVPEVWVPPIDVRELRTLIAHRRRLVKLRTMTKNRLHSLVHRNNLLPPEGGPFTAKNRTWWEGLSLSSVEKLRIRQDLALLDHLEPQISEVDQELARLSTQPAWVDYAPYLLQLPGFGLINVMTVLSAIGDITRFPHAKKLVGYAGLGSSVHDSGQTHHSGHITKQGRRELRWALVEAAWTAVDTHPHWKAQFQKLTRRMKSCKAIVAIARKLLVVIWHVMTERVADRKADPDMVAFKLMTWSWKLNDLQRGGLTSRQFVRYCLMQLQLGENLTHVRRAGQRPIASVEEVLALRPELRSSV

SEQ ID NO: 304430 - protein, 429 aa, unidentified
MQNESTPGARGPVFCGVDTHADSHWLCVLDWRGRKVLSRRFPADAAGYEALAGAIAAAGEPACVAMEGTSSYGAGLTRHLASLGMPVREALSPARTQRRRPGQGKCDEADAERAARAAMSGSKLGTPKSQDGWVDGVRCMLAARSGAVKARTSAINTARSLLTTAPEGLRSRFRGMGGPRLMEELPSVRAEGALGAALGALADLWAAARDAALDMERAIGASLEENCPALLAMYGCGPVSAAKLAVAAGDNPGRLRSEASFAAICGACPIPASSGKTVRHRLNRGGDRQANSALHEIARQRVMRDPETAEYAERARARGKSDREVMRCLKRYVAREAYRALMRPHEIRRPEDASELVAARRAARVSQVRAASILGTSEKYISMLERGQRELKPIRRAYEAWVEAGLPLDWDRQAFEAERKMDSKKHLAK

SEQ ID NO: 304431 - protein, 340 aa, unidentified
MAIVGGLDLHRKQITFDVLDTVSGEVRRGRISPADRQLFRGWLTELTGQQVELAVEGCTGWRFVIEECQAAGVVAHLAEPAEVAGLRGRRRHAKTDRIDARHLRDLLLQGRLPECWIPPQVVLETRAKVRLCKDLADQRTGWQQRLHATLYHLGAPAQRDLLSGDRDRLTRIAGLSPAARQAITVALSMIAALDAQIEPLRAELIGFARRQPGCRAIAAEYGIGALTSVVIWSEMGDARRFTHSRDAVGHAGLDITVYSSDSKRSPGRLSRHGSPLLRWALYEAARCSARTASPDHAYYRQVAERLGGQRAALSVARKLARRCHHRLRALGEHALAPPPS

SEQ ID NO: 304432 - protein, 340 aa, unidentified
MKRYLGVDLHRNCFTVCTLREDGKSELKKWSIHSLGEFAQEVQAADAVAVEATGNARHFCQALKERGCRLVVVNPHQFQVISRSVKKTDAHDAKTLAEFLAKDMLPEIRMKEQLPAEIASVLQTRDKLVKLRTMLKNKINNLLAARGILIRKESLASDKGLEQVLQMDVGELARLELEVLVEQIRHLNVSIAKLEAAIKQQGPKLPGYENLKSIKGIGDIGGSTLLSAIGDINDFANEGKLSAYFGIVPRVANSNETERSGRITKRGNKLGRTALVQCALIAMRYNPYLANYYARIKAARGTGKAIIALARKFLGIIYKTLKNGWVFEDFAKFVLAPAEA

SEQ ID NO: 304433 - protein, 365 aa, unidentified
MNAMITTTKTTATCILAIDLGKYKSVACNYDPATSEAHFTTVATTRDELERLLSRVQTAVVVIEACTLTGWVYDLCVRLGLTCKVANTASEAWKFKHAKRKTDKDDALRLAQLEALGQLPTVTVPSKEVREWRSLIATRAWLVGRRVAVQNRIRAILLSQGMPVPRGQRAWGELGLQGLDQYSRPLADCGPEELWRGLLALTLTEYRQVVDLIKATAAKLDARAKQDESVQILESIPGVGPRTAEAVTAYLGEPKRFATGKQVSAYGGLVPRQFQSGELDRRGRITRRGPALLRKVLVECAWGMLRHNAWARAVYQRLTHGGKTHKKQAIVALARKILVRCWAMLRDRTLWRPELALSDASATGS

SEQ ID NO: 304434 - protein, 418 aa, unidentified
MEVLHPRCAGLDVHKDTVVAAVRLTEGDGSVRREVETFATTTPGLVALSDWLERHDCPSVAMEATGIYWRPVWHVLAAEGHGGGRTLILANAAHVKNVPGRKTDVADAVWLSDLLAHGLIRPSFVPEAGTRAMRDLLRTRKQLVREQASHVQRIQKTLEDANLKLASVLTDIMGTSGRAVLDALAAGETDPERLQALVGPRVKARPEAIRAALTGRVSRHHRFLLGLHLRQIDALAAAIAEIDAQVERDLGPFRAAVGLLATIPGVGDLTAQVVLSEIGPDMSRFPSAEHLISWAGLCPRQDESAGKRRSTRLKKGAPWLKTALVQAAWAAVRKKHGYLQAQFQRLRARRGPRKAICAIAASILTAVYHMLKDGTVYVDPGPDHFRKTQPATRAKALARQIERLGFTCSISPVVPVSI

SEQ ID NO: 304435 - protein, 369 aa, unidentified
MNERITYIGLDVHKKTISVALADGCGRGAALDHGQIPNTPAAMTRLARKLSETGSALRFCYEAGPCGYGIQRQLAAAGHDCAVVAPSLIPRKPGDRIKTDRRDAVHLAGLHRAGALTPVWIPDPAHEAMRDLVRARLAAVRSVRQARQQLSGFLLRHGHHYSRPAWTKMHRRWLAGLQFEQPAHLIVLEDGIATIEAATARRDRLTAQIEALLADWTLAPVVQALQALRGLALVSAATVIAELGDITRFDNPRQLMAYLGLVPSEHSSGGTRRQGGVTKAGNSTARRMLIEAAWSYRFPARISREQLLRQETLPKPIRDIAWKAQLRLCGRYRKLNRAGKPATTVTTAIARELAGFVWAIACQLPRPTN

SEQ ID NO: 304436 - protein, 398 aa, unidentified
MISVGIDVSKEKSTVCILKPYGEIVRKPFDIYHTQTDLTRLSTIIRDLDEEVRVVMEATGVYHLPILTFLKDEGFFVATTNPLEMKRYRCQGIRNAKTDKIDSKIIANYGLDFWFHLKDFQSDGDCYYELRLLGRQYRQYMKFRVENVLALTHILDLTMPGLKTMLPDWNKYSGKDKLADFAYEYWHFDNITKKSEKQFINSYVNWAKKKGYRQNEEKAKQLYALAKDGIPTLPSSTPSTKMLVQESVKIVREVDSTLTQILSRMQELAKTLPEYPVVRAMSGVGDTLAPRLIGEIGDVRRFKNGKALIAYAGIDAPPYQSGKFTGTERHISKRGSSNLRKVGFETMTCVRRLKPKNDAVYQFIQKKIDEGKPSKVAKIAGFNKFLRIYYARVMEVYQ

SEQ ID NO: 304437 - protein, 368 aa, unidentified
MEKGTTYVGLDDSKRRIVAGILRPGDTEPELREIPNDPPHVRRLFARLIRDGEVTACYEAGVSGYDLYRRLTALGVDCKVVAPALTPRRPGQRVKTDRRDAAKLVRLFRAGELTAIHVPDETEEAGRDLLRCRDDVRRDVLRWRHRVLKLLARHGRAYLAGKNWSQAHGRWIRSQQFDQPPLQRAFEASLFALEQALARQAELDKEVAGLATLEPYREPVGWLRCFRGLDTLSAMVLLAEVVDFARFRRPRELMAYLGLVPSEYSSGESHRRGALTKAGNSHARRVLVEAAWHYRHRPTVGRALAHRSVGQPPAVVAQAWRAQQRLHRRYRHLVGHGKRPPVAVAAVARELVGFIWAAMTGRESRTAA

SEQ ID NO: 304438 - protein, 406 aa, unidentified
MFVGWDWAKDTHDISVLDEEGVLIDRWSLRHDEEGLDAALARLRAHGAPSTLAVAIETRSGLVVDRLLEAGHPVVPIHPNAFNAARPRWGASRAKSDPGDSFKLADYLRTDGHRLRRLEPLDAATAELQALCRLRGDHLEAKIAATNQLRATLGRHWPGAAVIFGRLDSEIALAFLEDYPTPHAGARLAEGRLAMFCRRHSYSGRRSPAELLERLRGAPSPSEAIGSETLTEIVRAQVRLLRALLSTIADLDRALGAALLEHAKAPLLAPMPRIGEVNLAQIVAEVGPVLARAKDVEEACALVGAAPVTKESGKGRAVNFRWAVNTQARRALSIFADNSRHSSLWAAQLYSDARRRGKRHPHAIRILMRAWVRVMWACWHTDTAYNPTIHGAERRLAQREIQESAA

SEQ ID NO: 304439 - protein, 361 aa, unidentified
MTSVPPTTGAARGSVTGGVDTHGQTHHAAVLDGLGRQLGDREFPTTPAGYRSLHRWLAGHGDLEGVGVEGTGSYGAALARHLADEGVHIVEVDRPDRKARRAQGKSDPLDAYSAARAVLSGTATGEPKTRDGRVESIRALRVARSGAMKARTQAMNQLRSLLTTAPADLREQLRALKATALVSTAVRLRPSADLDDPLQATKTALRRIARRHEHLSLEIAEADDELRELTADAAPRLLQLHGVGPEVAAQLLITAGDNPGRLRSESAFAHLCGVAPVPASSGRITRHRLNRAGDRQANKALYTVVVVRLRWDERTREYARRRTAQGLSKPEIIRCLKRYVAREVFAALQPQHGEEAAPQRP

SEQ ID NO: 304440 - protein, 423 aa, unidentified
MSYRIAGIDVHKKMLAVVVADVEVQGEYQFERIRYGSNPEPLRLLATWLIEHEVEEVVMESTAQYWKPVWGALERYGKPNCQKREGAGPMSGTLHLAQARSNRGRRGRKKDFPDAERLVKRLVADELILSFVPDAEQRLWRTVTRRKYQLTRNKVRLQNQLEALLEEAHIKLSSLVSDLLGVSARRMLKAIADGGTDPAALAALADKKLRATQAQLCDALGACTELQPVYRRLLKMFLEELHLIEQQIGQLDQEMAALLSQHAESVQRLSEIPGLGVDSAQQIIAEVGATAATFPSAKHLSSWVGACPGDQESAEVSQSHRCPKGNRHMRRILNQAANAAVKAKGTIFEIVYRRLVSRRGHNQTIGAIAHRLCRLIWIILHQGVRYEERGPSGNTKSKRQRTSRMIRELRNLGYRVEPLGTPA

SEQ ID NO: 304441 - protein, 427 aa, unidentified
MSYRIAAVDVHKKMLAVVVTDVAEEGEYRFERRKFGATPGELHLLAQWLVQQEVEEVVMESTAQYWKPVWGALERYWKPARQQREGASKFCGTLHLCQAKSNHGPRGRKNDFADGERMIKRLVAQELVLSFVPDSGQRLWRTVTRRKHQLTRSKVGFKNQLESLLEQAHIKLSSFVSDLLGVSARRMLTALAEGETDPAALAALADYRLQATPKELSDALGACAQLNGVYRRLLKMTLEELQMIETHIEQLERQALDLLQEHQDVVRRVAEVPGFGVDSSLQMIAEVGPKAAAFRSEKALSSWVGVCPGNEESAGESHSTRSPKGNRQMRRLLNQAAQSAVKVKGSIFEVTFKRLLPRLGYKQAIWAIAHRLCRLLWLMLHEGVSYEERGPAVSAKSKRTRAARMVKELRKLGYRVEGGPLAAATPA

SEQ ID NO: 304442 - protein, 343 aa, unidentified
MEHYAGIDVSLEESSVCVVDATGKLVREAKVASEPEALVRYFDELELPVSRIGLEAGPLSQWLHAGLVVTGRDAVLLETRHVKAALSAMTVKTDRKDARGIAQLLRMGWYRLVHAKSVPCKDSRALLVGRKLLQGKLLDVELSIRGILRGYGLKVGEVSRGRFEVRIRELIAGHVTLETVIGAMLGARMALWNEFTKLHREMLKIARADKICRRLMSTPGVGALVALTYRSAVDDPARFGKSSTVGAYFGLTPKKYQSGETDRDGGVSKVGDTMVRTALFEAAHIMLTRAIRFSSLKRWALDVAQRRGMKRAKVALARKLGVVLHRMWVDATEFRWSKAATAA

SEQ ID NO: 304443 - protein, 370 aa, unidentified
MSPSGPRERHGGTHEEVRMSVIIGVDAHKRTHTLVAVDEAGRGLAEKTVAATPDGHLKAIEWAAQWQQRLFAIEDCRHLTRRLEVDLLRVGEAAVRVPPQLMARARQSGRERGKSDPIDALAVARAALREPDLPVTRLDGEARDLRLLVDHREDLVRERTRNQSRLRWHLHELFPGLEIAPKALRRQHVLDELERRLAGVAGTVADIARELVVRCRESTRRANELELEITAIVRRLAPSLLALPGCGVLSAAKLVGESAGVSRFRSKAAFARWNGTAPIPVWSGNSPKYRLSRGGNRQVNAALHRIAVTQLRGVGDDGRAYIEGRIAGGATKTEALRLLRRRLSDVVYRRLGTDERSAQALLEVSDALAA

SEQ ID NO: 304444 - protein, 313 aa, unidentified
MESTKPEITYVGLDVSKDRLDYTLDGHHVAQVPNTPAGHARLVAQLRHRLAVRVVCEASGGYERAVVAHLLTVGLEVCVVQPGRVRAFAHAEGLLAKTDRIDAGLLRRYGEKMQPRLAVPTDPAAIVLRELLEHRRQLSDILVATGNRLSLAGATLRPRLERQQAFLREELAAVDQLIEQHIASDDDLRGKAARLRELQGVGPVLAATLLAYVPELGQIDAAQLSALVGVAPFARDSGPTQRARHVRGGRGIVRRVLYMAAVAATRCNPILGAFYARLRAAGKPAPVCLVAVMRKMLGVLNRLIAEPHFVLVR

SEQ ID NO: 304445 - protein, 329 aa, unidentified
MEQEYIGIDLHKAFFQVCVVNGIGERQWEQRWPTTDEGIAGLVARCGATSRVAVEASSPTWAFVDRIVDHVGAVHVVDSRKTRLKAGYAAKTDRLDAQRLADALRRDSVVGIYYPPPPIRDLRELCRYRCHLARTQASLKQRVHALLLRQGIREPRVSKLFGKRGTQWLDTLRVEGWAGASLTGLRQLLGDVRTQLVPVLATIRATAAADPIARAVDARPGFGPVFSVTLRAEIGIITRFPDGPHLASYAGLVPRVERSGGRQWSGRITKAGSPWLRWVLIEAAIHQLRRQDDFGRWARRLAVRKGLLKARVAIARALCDELFDAWPRA

SEQ ID NO: 304446 - protein, 383 aa, unidentified
MQTIDPVNPTILLAIELSTSTWLVAARVPGLDKPRLSRIDGGDTAALLALISSLQARADACGLGATMGIVCCFEAGRDGFWLHRLLTAHGVVSYVLEPTSILVNRRARRAKTDRLDAEGMLRVLAAYLRGDHQACSMVRVPTPDQEDAKRTHREREHLVQERLRIENRIEALLFTQGIRKRPSLRSWERDLTVLRTGDGRKIPHHLRAELDRLRRRLVLTLELIREVEAERDQVTKTKSQDQAHHKITALCRIRGIGENFAAVLTREVFYRSFDNRRQIASYVGITPMPYQSGGMDRDRRISRAGNPRARTTMIQLAWLWLRYQPDSELAEWFRERVGTLAGRTRRIAIVAMARKLLIALWRYVETGVIPTGAEIRAETTVAA

SEQ ID NO: 304447 - protein, 402 aa, unidentified
MNAVGIDVSKGKSMVAIMRPFGEIVSAPFEIKHTASGINSLVELINSVEGESRIVMEHTGRYYEVLAHQLSEANLFVSAINPKLIKDFDNDSLRKVKSDKADAVKIARYTLDKWQNLKQYNVMDELRNQLKTMNRQFGFYIKHKTAMKNNLIGILDQTYPGVNTYFDSPARSDGSQKWVDFASTYWHVDCVRKMSLNAFIDHYQNWCKRKKYNFSQSKAEEIYGKAKELVPVLSKDAITKLIIKQAVDQLNSASTTVESLRTLMNETASKLPEYPVVMAMKGVGTSLGPQLMAEIGDVSRFTHKSAITAFAGVDPGVNESGSYEQKSVPTSKRGSSDLRKTLFQVMDVLIKTHPQDDPVYQFLDKKRAQGKPYYVYMTAGANKFLRIYYGRVKEYLSSLPES

SEQ ID NO: 304448 - protein, 345 aa, unidentified
MVVMKQYVGLDVSQKETSVCVVDESGKVVFQGRARSDPGALAELLSKRAPGAERIGFETGAMSSWLWHELNRIGLPVVCIDARHAKAVLSVRMNKSDENDAQGLAELVRVGWYREVKVKSPESQATRSLLVARSRLVAIRRDLENQVRSMLKEHGLQFSRSIGSQFRRKVLELLAEDHPLRSVIGTLLRVHEQTCEEQEKLDRQVRRLAHGDCTTRRLMTVPGVGVVTALTYRHTIDDPSRFSSASDVGAYLGLTPRRKQSGETDVSGRVSHWGDRLLRTYLYEAASVLMHRTKKWSALKAWGIRLSKRIGMKKAKVAVARKMAVLLHCIWVDGTSFQWGSEKTA

SEQ ID NO: 304449 - protein, 314 aa, unidentified
MDKITVGIDVSKDRLDVAVRPSGEVFVVARNAAGLEELVERLCSLGPHLVALEATGGFETVAAAALAAAGLPVVIVNPAQVRAFAKAIGQRAKTDPIDARVIAHFAEATQPEPRPLPDEATRLLADLVARRRQIIDMIGAERQREKRAPARLKKSIVRLVKALEKELTSVDGDIDDAVRGSPAWRETEDLLASVPGVGSTIARTLIAELPELGRLDRKQIAALAGLAPHTRQSGQWKGRSFIGGGRANVRTALFMGAMVAKKHNPVLKAFFDRLVAAGKPKMLALIAVARKLLTILNAIVRDHRPWQGTVVAAS

SEQ ID NO: 304450 - protein, 355 aa, unidentified
MSQEKYIGMDIHQATISVAIMEGRGKLIMESILETKAGTILEFIQGLRGSLSVTFEEGTSAAWLHDLLKPHVAHLVVCDPRKNALLKDGSKSDRIDARKLADLLRLNKLHPVYHGEHGVRTLKELGRSYLTISQDLTRVMNRIKALYRSWAIPCSGSTVYAPRHRAEWLAKIQEPGVRRRAERLYQQLDLLQPVRQQARQELLRESHKHPAVKLLRQIPAIGPIRAALLVALLQTPHRFRSKRQLWAYSGFALETHDSGEYRMVRGKVRRNRERLTVRGLNDNHNHHLKNLFKGAAISASTHPGPLYDFYVALLEKGMRPTMARLTLARKIATITLTMWKKGVDFDAQQLNRQAA

SEQ ID NO: 304451 - protein, 360 aa, unidentified
MEKAHIISHSVETVEGGSVMKENLYYVGIDIAADNFVASIYQSPKQPIITKEGFKNTFDGFTMLSSWLEKQKINPTNCVTCMEATGVYSEGLAHYLVTQGFKVSVEPPLKVKRAFDPIGHKTDPVDSRQIAEYAYRYSDELRFWQPRDEIIEKIKHLLTAREQFTKQSVALQNSMSTYKKHVVQVTLITSAHGQILKELKKQIAEIDKELEKLIRKNPGISNMKNLLVSLPGYGLLLSSSLIAMTDAFREITSYRTLAAYIGICPYQHQSGSSVYRPPHIRPFGPAYARKLLMLAARSVVTHNTEFRMYYLRKLAEGKAKKLVLNNVANKLIKIACAMIKNNVRYVSTYRSVHPRYLISA

SEQ ID NO: 304452 - protein, 421 aa, unidentified
MEEGRRRFVGIDLGKREYTMAIIGKNGKVSIHHGKTSVEGRMAMYRLLQKDDRIAIEAGNLTFIIAYEIQKIVGSEVRVLNSAKLPFIWDAPTKTDKEDAIKLAKIVKERKDEQLPLVPLPSKKEMERRETISNYGREMQNRTRLINNLHSLFVKQGITTIVKKDLATAERREEAIKLLTGQELEDAQWQLKYLQMFEDRIKILKDKILKEAKTDELMRLLQTIAGVGPIVAYAFVAYVGDGSRFSKGAQVSNYIGFVPQLYISGTIYRNGHITKRGNGYLRGLLVQAAWAAVFSNSGGALRDRYIDRTQQGHSKKKTIVAIARRLVELMYSIMKSKEEYEVRPYKGPAVKTVADLAAQALSVESESAGTVEEALKEGDKKAPALKKEEESGSVKIVTLPVTVEKKRRKNLTMSGKKEKAG

SEQ ID NO: 304453 - protein, 469 aa, unidentified
MSVGKTESDKKTKRKRKRMSIDGYPVLEPNAGGIDVGAREIYVSVPPDRDEESVRIFATFTEDLERMADWLIRVGVTTVAMESTGVYWIPVFEILEQRGIRPCLVDARHLKNVPGRRTDWHECQWLRFLHSVGLLRAAFRPESEICAVRALMRHRSELVQMAAQHVQHMQKALTQMNLQIHHVISDLTGVTGLAIVDAIIAGERDSKKLAKLRDFRIQADEETIRKSVVGNWRAEHLFTLKQSRQLYQTYQQQIVDCDEEIQRLTTAFSSRVDPSEKPLPPDRKHNRVGRKRNKDIDPKSCFDMRTETYRLFGIDVTQIPGIGNMALSLFTELGRDLSKWPTSSHFASWLALCTDNDISGGRVLWQATRKLKNRAGQLFRMAANSLHHSPTYLGNYLRRMKAKLGAPAGITATAHKIAVVFYTLVTKQIEYDESVWAEREAERQKRFEAKIKRQAKKLGFQLVPIQQNV

SEQ ID NO: 304454 - protein, 312 aa, unidentified
MNAEIFVGIDIAKEHLDVAFGPDQAPQRFPYTQEGLNRLLTRLQALQPTLIILEATGGLEAELMDALARAGLPFSRVNPRRVRDFARASGVLAKTDALDARILADFGQKMRPPETILPDEQTRHLEILVARRRQLVEMRAIEEHHWRTAPEAARPYIRKHLEWLDAEIATLEREIADWVNQTPLAETVEILDSAPGVAMVGAATLVAEVPEIGRLNRKQIAALVGIAPYNRDSGTQKRQRHVTGGRRAAREVLYMLTIAGIRWNPILRTFYQRLRAAGKPPKVAIVACMRKLLTILNAMVRERRKWCSELAG

SEQ ID NO: 304455 - protein, 350 aa, unidentified
MIPSPDSPAAAARSRGTAGGKRIPAKPLSSERAAHDPAPVKPRFVGVDVSKSWIDIADASGGKERVANQARAIAAAFRGRWSDCTSIVCEATGGYERALMDVASAQGLPLRRAHPNRVHAFARASCGLAKTDALDAKMLAKFAAFTADEPAQPLPSAKTRELAAMVARIVQLTDLHQSETCRSKMEPVAAVKASLAAVLQILGGQIKAMQKAIDAFVAADPILKENAAILRSCKGVGPKSAQAILAMLPEIGTLDRRKIAALVGVAPITRSSGSSINAASITGGRKALRDILFMAALSASSHNPTFKAFYDRLRADGKPHKLALVAVIRKLIVTLNAMVKTRQTFKNALT

SEQ ID NO: 304456 - protein, 385 aa, unidentified
MRNVALDLGATKICMSEVKNGEIVRRVTVSKVDALMPHLGPSKGRARVAIEACREAWHIYDKLTSWGHDVVIVDTTRVREIGIGRHGKKNDRIDADILALALEQDRIPKAHVLSPERRMLRRELNMRRMLVEQRAQAVTTMRGIVREAGYRVRRCGTEAFRQALEAAKLSLELREQLAPGVEVIKTLEKQIEHVEAKIWQLCDREPVMQRLCSTPGTSLIVAAAFVSVIDEAGRFNNAHQVASYLGLVPKEDSTGGKQRLGRITKAGNRYVRALLIQAAWCVLRRRNSDDPLTLWGQAVAQRRGKRIAVVAIARRLAGVLWAIWRKDTVYDPALVGRASAKGLTQEAQTAKARALGMERAARKLARRRLPSSRTADRKEASALTR

SEQ ID NO: 304457 - protein, 386 aa, unidentified
MTQVSDLSRSLVALKQDSTLVAVVELSASSWLVAGLVPGVDGKPLKKLEPEPEALVGLLDRWRAAGLKAGRVVERVVLAYEAGRDGFWLARWLRARGIEVYVIHPTSVAVSREHKRAKTDRLDAAMLLRVFVGWLRGERGHCGMVAIPTADEEDAKRPSRERESLVGESTRIINRMKSSLARLGIRGFKPQLRKAAQRVAALRTPDGLAIPPNTLDELRRDLARLALLREQIAAIEAARVERLTQAPERGPHAMVLLLARIVGVGVETADMLVQEILSRKLRDERAVARYAGLTGSPDESGAKRREKGLARSGNARVRRGLIQLAWRFLVFQKDSALVQWYRARTAAPGVRKTTMIVALARKLLVALWRMVTTGQAPQGFVLRPAA

SEQ ID NO: 304458 - protein, 402 aa, unidentified
MNAVGIDVSKGKSMVAIMRPFGEIVSAPFEIKHTASDINSLVELINSVEGESRIVMEHTGRYYEVLAHQLSKANLFVSAINPKLIKDFDNDSLRKVKSDKADAVKIARYALDKWQNLKQYNVMDELRNQLKTMNRQFGFYMKHKTAMKNNLIGILDQTYPGVNTYFDSPARSDGSQKWVDFASTYWHVDCVRKMSLNAFIDHYQNWCKRKKYNFSQSKAEEIYGKAKELVPVLPKDDITKLIIKQAVNQLNSASTTVESLRTLMNETASKLPEYPIVMAMKGVGASLGPQLMAEIGDVSRFTHKGAITAFAGVDPGVNESGSYEQKSVPTSKRGSSDLRKTLFQVMDVLIKTHPQDDPVYQFLDKKRAQGKPYYVYMTAGANKFLRIYYGRVKEYLSSLPES

SEQ ID NO: 304459 - protein, 350 aa, unidentified
MSVFMNNILKQIFGIDVSMDTFVVRYGTTNTKQDQQISNSISFKNTTAGFKKFIQWTKKHIISNDIPLFFVMEATGVYYENLAHFLYLNNYNVSVVLPGKIRNYAKSLQTKSKTDPIDAASITRFGLERKLNLWKPANTTIKLIKELCREYHSTKIIITEIKNQLHAKNHSYQPGKQTLLRKKHLIKLLEKQTKEIENQIKAVIKQDKELFEKIDRAVKIKGLGFISVVTAVAETNGFELVSNQKQLASYAGLDVVYNDSGIKKCKTSISKKGNKFLRKAVFMPALSASKHNQKMKELYIRLVSKGKNKKLALIAVARKLLLLIYTIWKNNTDYIPNYNPNQKNVTCLCN

SEQ ID NO: 304460 - protein, 472 aa, unidentified
MIRSVGIDLHQGRHRARCLDDRAQPCDSFSFQTTPEGLATLEERVFRDGANPIIVLEPAGLPWLMVAVYLRSRHPDCRLVKAKTQKVAALRRYLRGPVKTDRLDALTLAKMPFIDPEQLDEIYLPPAEIHALQRLGRQRKRIEQDITGRKVRISAIVDGYLPGVRKAFNDVWSSPVRAFLRFRLNPFTVVRDGEEALHAFLSKASARSKWSRAETQLVFLACQSVASVCELSRPAGTVNEEFFLDLQDEIARELRLIEVEEAESESLARRIAELYQKLHPSDNLRTIPGVGEHTAPIFLATVGDPARFHNQSAFANWEGVVPGARQSSDVQAKGLRMTKAGPSIMRMALYQAGDVGRRWDPQLAAVYHREMVYHGKNHKQAMGAVMSHLGARVLRVLKEDSPYELRDIEGNPISKDAARKLVLSKYHVSEDIRRERRRRNPKVGKDRETATASTNEAANAPQAEQVKAVSRK

SEQ ID NO: 304461 - protein, 452 aa, unidentified
MEQKTTWYVGFDLGSREHEVSVCDAEGKTAHGFRMPQGRAGHRVLREEIGTCVPRTARVVYLVEAAGNLWQEVVHPLDAAGEVVSLLSPVKCSDLRKFYRRHTKTDVIDAEATARVGISDHALRRAWVGTPEQESLRRLCRLCWKLSMESRDKKRRVSALLELVLPGIGKVWKNRYCNSARLFYRRYLDPARARRLGRKRLGEVLRRRAWGKFSEKKLAQLWSVIENAPELRYRYDDLMLEVQCELDGLEAIEQRREMLLERIEELYSEVDPAHRLESVPGLGGFLGAAITSAIGDVARWGGADQLVASSGLVPRKRASSGREKANQRLTKYGDPMLRSWLYVAAQLVRHYDPELQAFYTRLRRRGKHHNTAVCAVATKLLRRIYAVLRDESRYRVVAEERTHNGEKPVRESVYEVAQALLKDKPDAASPESDYIALSPDATRALAVPAAGR

SEQ ID NO: 304462 - protein, 379 aa, unidentified
MRKDIRYVGLDVDSEKMAVAVAEPTGEVRSLGSIPYREESVRRLVKRLGPASRLRACYEAGPHGYGLYWQLAKLGVHCDVVAPTLVPVKSGDRVKTNRRDAEKLARCYRAGDLTAVWVPDAAHEALRDLVRAREAAKKDQLRARHRLGKFLLRRGLRAAAGMRSWTAKHLLWVKTLRFEHVAQEITFLDYLHQVEHAVERVARLERAIDQAIESAPAEMRALIAGLQALRGIKSVSAATIVAEVGPLSRFSRPKQLMGYSGMVSSEDSTGDSVRRGAITKTGNAHLRRIVGEAAWAYQHRPAMSPELKKRQEGLSEEVKEIAWKAQHRLSSRYRKLTAKGKTRQKVVTAVGRELLGFIWAVGVQVEKEQLSGSQRRRAA

SEQ ID NO: 304463 - protein, 412 aa, unidentified
MEHTAITAVGIDVSKGKSMVAIRRPGGEIVCMPFPVQHTASSLKGLIATLKQVGGNIRIVMEHTGMYWRPIALTLQQAGFFVSIVNAILIHNFSDNSLRKVKTDKVDALKIANYTLAFWAELREYTPDEETRQMLKMQTRLYERTHSISVSLKNGLISLLDQTFPGINTLYTSNARTTRGHFKWVDLARKFWHKDCVAKLSVKAFTESYQAWCRKEHYNFYAADAERIYAAARDAVATFPKNESTKLLIIQSVDCLNAVYDSMQLLRQEMLRLSALLPEYDVVMSMYGTGAITGPLLMAEIGDVRRFTSKGALVAFAGLDAPPYQSGAFEAKSRHVSKRGSPHLRRTLFQITSVILQHSEPSDPVYQFMDRKRTEGKHFYVYMVAGAAKFLRIYYARVKEYLNSIDTVTQAA

SEQ ID NO: 304464 - protein, 400 aa, unidentified
MKLKELSGGIDIGSEFHHVVVIGESGKVLYDKQVLHRFSEFHEAVRELKDTERRTGGKIAFGLEGKNGYGAPFDRILGENGFSLYNIDNLKLKQFRNTFGAEWKTDRRDARMLAKLMSLKAQLNGERDKVFIPIEKTSLTNEKLKILSRHQQTLIDEKKRICNRLRKKLLEICPGILDIFGEVEAKSLLRILIRYPNFSRYKKLTEGKLLRMKRIGKVIAGKIINQLQGLEYVRELALVYATIIQSQAKRILELKEEIELLDKELDKLGEGSKEVQRLRSIPGVATKLSSRLAGEIGDIRRFKDSNKLAVYFGVGCINNDSGKRKMAKAVFKANKICKSTMIELAGCTIRSINESQRYYKKKRNEGKKHNHALRCLARQMTKVIFKLLIEDRDYYVKDES

SEQ ID NO: 304465 - protein, 354 aa, unidentified
MSQTPNTAIAVIGIDIGKNSFHVVGHDARGAVVLRQKWSRGQVEARLANIPPCLIGMEACVGAHHLSRKLASLGHDARLMPAKYVRPYSRGQKNDFNDAEAIAEAVQRPTMKFVATKTAEQLDLQALHRVRERLVSQRTGIINQIRAFMLERGIAVRQGIGFLRTELPTILATRTDALSPRMLRVIAELAGDWRRLDQRIDGLSGEIEALARQDQACSRLMTVPGIGPIISSAMVAAIGTGDVFSKGRDFGAWLGLVPKQISTGDRTILGKISRRGNRYLRVLFVQAAWVVLVRIKNWERYGLKSWIEAAKRRLHHNVLAIALANKLARIAWAVLAKGSAFELTRTYDASVRPG

SEQ ID NO: 304466 - protein, 368 aa, unidentified
MNAVGIDVSKGKSMVTILRPFGEIVSSPFEIKHTSSDILSLIKLIHSIEGESRIVMEHTGHYYEVLAQQFSAAGLFVSAVNPKLVKNFNNDSLRKVKSDKADSIKIARYALDKWQNLKPYSIVDELRTQLKAMNRQFHFYVKQKTAMKNNLINLIDQTYPNANTYFNSPPRSDGSQKWVDFVYTYWHVDCVRKMSLNSFVKHYQNWCKQKKYIFNKSKAEEIYTKATELVPVFPKNEITKRIIRQAIAQLNSTSATVETIRILMNETASKLPEYPIVMQFKGIGPSLGPQLMAEIGDITRFTHKGALTAFAGVDPGVNESGSYAQKSVPTSKRGSSNLRKTLFQVMDVLIKTMPQDDPVYQFMDRKRA

SEQ ID NO: 304467 - protein, 371 aa, unidentified
MKKNSTVKQSPKRAAAREEGPLVMGMDLGDKTSRYCVLGGNGEVVGEGSVATTKKGMLQQFGRMRRCRIAIEVGTHSAWVSRLLKSLGYEVIVANPRQVQLISASSRKNDRMDAEILARLVRVDAKLLRPIQHRSEQGQIALMKIRVRAGLVEARTKLVNMARGFTKAQGDRLPTCDTDSMGVEKLEGLTAELQEGLRPLLETVEALTAQIQAMDTVIEQIARTQYPETELLRQVSGVGILIALTFVLTVEDHRRFQKSRDVGCYVGLRPKQSESGQSQPQLRITKEGDRYLRKLLVQGAHCIVSRRGPDTDLKRWGLKLGGRGGKNAKKRAIVAVARKLGILLHRLWVTGEVYEPLRNSQARHLRRPVAA

SEQ ID NO: 304468 - protein, 340 aa, unidentified
MNRQYAAVDLHLARSLIVREDQAGTELAVERIDNSPMNLAAALADAGPNPEVAIEATYGWYWAVDVLEELGATVHLVNPSGLGQSWEGRRVKNDYKDCRELIDRMRLHKLPEAWIAPPELRELRELVRYRAKLVNIRTGLKAQVKAVLAKHCLRPPVKDLWVGHRGASFLDELALPDAYITRIESLRDLVGVVNREVAMLERTIHGRLRDDRGYRAIQHLEGVGPVLAAVFCAEIGDAGRFAGPQTLCSWSGLTPKHRESDGKAHRGRTTKQGSRLVRWAAIEAISKMRGGPKLKIDYHRIAERRGINVARVAVARKLLTLVYYGLRDGEIRCLARAEAA

SEQ ID NO: 304469 - protein, 339 aa, unidentified
MQIHSVGIDLGKTTFHLVALGAAGKVLVKKKFTQKQLLAFTANMQASLIGLEACSGAHFLGRALRKQGHEVRLIAAQFVKPFVKSNKNDFVDAEAIAESVERKNMRFVPIKTDDQLDLQAIHRVRDRLISRRTAVINQLRAFLLERGMVFAQKPAKLKAAMADILENNEADLTPLMRNLIDTLWSEWKLVEQQIEELNDELERISASDAGCTRIRKIPGIGPVVATAIVAAIGNGDAFRKGREFAAWLGIVPRQYSTGGKAKLLGISKRGNVYLRKILIHGARAAVLRIKRDRAPIGAWLDALDQRAPKNVVVVAMANKLARIAWAVLSSGNDYRPVAA

SEQ ID NO: 304470 - protein, 328 aa, unidentified
MQAITTIGLDIAKSVFQVHGIDAAGQVVMRRQLKRRYVLAFFQKLPACVVGIEACASSHYWSRELQALGHTARLMPPAYVKPYVKRQKNDMADAEAICEAVTRANMRFVPTKTPEQQSGLMLHRTRHLLIRQQTSVINAIRAHLAEFGITAPVGRRGVEELLRVIADPSDKRVPEIVRSCLAALGSQLLSLKKQILEFDRMILAWHRNNQTSKRLNCIPGVGPLLATALVASVGDPKSFRSGRSFSAWIGLVPKQHSSGGRERLGSISKQGDRYLRSLFVAGALAVIRYAKLHGTDHRPWLTALLARRNRSAFPCAKRYTKRWVFPST

SEQ ID NO: 304471 - protein, 337 aa, unidentified
MRIVRVGLDLAKYVFEVHGVDGRGKVVLRRTLRRDAVSSFFANLPSCLIGMEASNGAHYWARALSGLGHEVRLISPQFVTPYVKSNKNDRNDAEAICEAVGRPTMRFVPAKSVDQLAVQAVHRIRSRLVSGRTRLANQIRGVLAEHGIIVARNIAKLRQNLADIVGNHGNGLSDLVRALVGELQQELADLDQRIRTYDRRIRELYRGSELCRRLGQIEGIGPLSATALVAAVGDRQGFKNGRQFAAWLALVPKQRSSGGRDRLFGISKRGDRYLRTLLIHGARAALGEPEASRIPEAAGSVSCGNGGIPISQPSRSPTRMHASPGPCCQTAKPTIPA

SEQ ID NO: 304472 - protein, 353 aa, unidentified
MKRDKYMGMDVHQATTVVAVIDVEGKTVLETIVPTAAGSIRRLIEGISGPLHVTLEETTQAEWLHDLLQGFVAEVVVCDPRRNKLLAEGSKGDKADARKLAELLRTGMVRSVWHGRKTTRGLKEVVRAYETFAVDTRRTMMRIKALYRSRGIATTGSAVYQKKEREGWLKQLTEAGMQQRAAWLYEQLDHVRELRKRAKAAVLSEGQEHQSVQLLRTIPQVGPIRAAQIVATAGTPHRFRTKRQFWSYSGLAVVTHTSAEYEMREGRVVRRNKPVATRGLNANCNRRLKSVFISAATAGGSSHPWQPYLDHLKEKGMRPDMARLTLARKIAALVLAIWKKGESFDPKKLNWTN

SEQ ID NO: 304473 - protein, 425 aa, unidentified
MHSISNKKINQVTDQTLVVGMDIAKKKHYACFVDERGRVLKKPFPVLQSKEGLEWLYQCIVEAMKEFGKTEVIVGIEPTGHYWLNLAYFLDEKGIPLVMTNPMHVKRSKELDDNLPTKHDAKDALVIARLVKDGRFSYPRILKGVEAELRVGATFRSKLVEEQGAVRNQMIRWIDRWFPEFTQVFPSFGKMALAVLEYTPFPSDLAGKELEEVLALYRQSEGLQSPQRPKAKKLIELAQHSIGVTEGQQMARIEIATLVRRYRQLEKEIEALTEQLIELVQTSVEYEWLKTVPGLGDATIVELLSEIGSFSHYQDPRQLIKLAGLTLREHSSGQHKGQKRISKRGRRRLRALLFRVMMPMIRHNEAFRQLHEYYTTRPDNPLRKKQSIVVLCGKLLKVLHAVCTKRQAFDAKRMMQDIFGLETAA

SEQ ID NO: 304474 - protein, 334 aa, unidentified
MEKITTVGIDLAKSVFSLHGVDGAGRTVLRRTVRRDQLERAVAGLSPCLIGMEACSGAHEWARRFERHGHTVRLMAPKFVIPYRKSGKNDGNDAEAICEAVSRPSMRFVPVKSVEQQALLALHRVRQGFVVERTATINRLRGLMAEFGVVLPLRSVTVRRQAALAAEALPELARRMVAELLEQLRLLDERIGAHDRELGAQARLSEPAQRLMKIRGIGPTTALAIVATVGNAREFDNGRQFAAWLGLVPGQYSTGGRARLGRITKRGDAYLRNLLVYGARSVLHTAAGHRDRISRWALELQARCGYHRTLVAIANKNARIAWALLARGEALRPE

SEQ ID NO: 304475 - protein, 349 aa, unidentified
MVILGIDAHKRTHTVVAIDEAGRQLGTKTTMATTTEAHLELVRWADRFGTGRRWAVEDCRHLSRRLEADLLAAGEQIARVPPKMMAHARDSARTYGKSDPIDALAVARAALREPGLPTARLDGPSRELRLLVDHRDDLVRDRTAHINRLRWHLHELDPSWDPAPRTLVRYKHLDALTARLEGQDGMVARIARDLVARIRALTVEESSLRREIEARVRVLAPRLLETIGVAALTAAKIVGETADVRRFRSKDAFARHNGTAPLPVWSGNRTRHRLSRTGNRQLNASIHRIAVTQKRCHEDANAYLERRMANGNTKTEALRALKRRLSDVVYRALLADATSSTDVAVGEAA

SEQ ID NO: 304476 - protein, 468 aa, unidentified
MAASGFGGRINQLYCMKNSKTESKSKPGYAPVASVSTINTHAAGIDVGSRKMFVSVAGGPPAVFGCCTGDLRQLVDYLRGQQVTTVAMEATGVYWLCLYEQLEEAKVETLVVNGAHVKALPGRKSDMQDCQWLATLHAHGLLRSGFVPPAEIRRLRDYKRIREDLIRMASAHVLHMHQAMERLNLKIHTVISSVIGWSGQRMVRSIVEGERNPAKLAALCDEQILTKKRIPLLKALEGNWKAEHLFALKIALENWDFCQRQIKACEEQMEPLLKELAGSKPVPEMGKAKELRNNAAQIPQLRQTMGRIYGADLTKIPGLNEYTVMLLVSEIGVDLQKWRSVKAFTAWLGLAPATRQSGKRRRPEKRHGGTAGRIFCLAAQSMARAKKSWLGSFYRRLSATRSKAVALKATARKIAMLFYLVLTKGWAYVEAGLEQYDLRYRQMQMRRLEALARELKVQLSFPDHSIPA

SEQ ID NO: 304477 - protein, 372 aa, unidentified
MTQSNILFIGMDVHKESIVISLADDDRTEVRRYGSIGGTMPDFKKALRKLVSTGKSLFFCYEAGPCGYELYRFIVSQGHQCIVVAPSLIPKKAGDKIKTDKRDADNLVRLLRSGDLTSVFVPNEEDEAMRDLSRAREDVVLALKSAKQRLKSFLLRHNKRFDGSANWSEKHLRWLTEDINMPYPEQKIVFQEYLSSVTEANERVKRMDKEILFYTQQWRLFPVVKSLMAMRGVRMVVAVTIMAELGDLTRFENPKQLMCFLGLTPSEYSSGDKQKKGAITKTGNQHARRVLVEAGWSYRFPAKVSKEMQKRHEKVPLNVRDIAWKAQLRLTKRFRVMANKGKPNNLIVVAMAREIAAFMWSIANEVPILPRD

SEQ ID NO: 304478 - protein, 345 aa, unidentified
MAMGSAIDRLYVGVDVAAETFVAAWLAPGGQPGAPFTGEQTPTGFAALLRRLQSTGSPPAATLVVLEATGNYWVALAAALHEAGYRVAVVNPRQAHHFAKAQLRRAKTDALDARDLARLAEALRPAPWTPPPAVYHEVRQRLVARDGFLAMRTQARNQRHALLQWPVAVAAVRQHFDELIADLDRRIAALEAEIAAVLKGSVWAEPLLCLTSAPGIGLVTAAWLLVSTLNFALCAGPESLTAYAGLAPVPRESGRSLRGRARIGHDGNGRLRTAFYMATLSAARYNPAIKAFYHRLRAAGKPLKVARCAAARKLLHQAWALGSTLQRFDPDHDQPHHDAVPHLAA

SEQ ID NO: 304479 - protein, 347 aa, unidentified
MKEVSIVGLDLAKRVFQVHAAGSDGGVVLRRKLSRGQVVTFFTELPKCTVAMEACATAHYWAREISKLGHDVRLIPPAYVKPFVKRQKNDAADAEAIVEAATRPSMRFVVPKTESQQACSMLFRTRDLFVRQRTQLINALRAHLAEHGVIAPQGIASLALLAEIIEDHEAGLELIVVETGRLYLDQIEALSSRVASLEKALRSEAKRSQSTARLMSMPGMGPITAMAVEAFAPTMVTFRRGRDFAAWLGLVPKQHSSGGKQVLGRTSKMGQRDIRRLLIIGAMTVIRWACRKAPPENSWLARMLARKPRMLVAIALANKMARSIWAMMGVCGDVSATFSTSQQELQI

SEQ ID NO: 304480 - protein, 492 aa, unidentified
MKVLHAQCAGLDVHKETVVACARLQDGGEVKRELRRFATTTQGLLELLEWLLERGCSHVAMEATGVYWKPVWHVLEGHVELVLANAAHVRNVPGRKTDTNDATWLADLLAHGLVAASFVPPTPIQELRDLTRTRRQLVREISQHTQRIQRVLEDANVKLASVLSNVLGLSGRRMLEAIVSGEDDPETLAALGHERLKCSREQLREALRGRVTDHHRFLLRQHLATLDHLQRVVGEFDAQIARGLEPFRAELERLVTIPGVAETAAAVLIAEIGVEMSQFPSAGHLISWASLCPRLDESAGKRRSTRLRKGAPWLKPVLIQCAWAAARSRGTYPQAQFLRLFEVGLGVPPCPLYSGIYRGGRKAVMEELTRFYNYFGLSIEKGAGELPDHLATELEFMHFLAFKELWALHQGQDPSPYRRAQVDFLDRQLLSWLPQLQLRLRRQETPPFYLALVAAAAAFVADDAAYLRAALKDDDGRLAVQSVTSRAAGGAP

SEQ ID NO: 304481 - protein, 377 aa, unidentified
MHSENIAAYIGLDVHKETLAVAIAAPERLGEVRYYGTINNEAQAVRRLFQKLQGLYGNILSCYEAGPCGFGLCHQLTAMNIKCQVIAPSRIPKSPTDRIKNDHRDAISLARLLRAGELTPVWIPDLTHEAMRDLIRARAAAKRDSRVARQRILSMLLRTDKRYAGKHWTGKHRTWLANQSFSQPSQQIAFQHYCQSLEQIEDRILQLDQEISRLLPEWSLCNLVCQLQALKGVGQLIAITLVAELGDFSRFSNPKQLMAFLGLVPGEYSSGNSIRPRGITKVGNSELRHLLYEAAWSYRTPAKVGAWLIYYRPDSVTQYSKDIAWKAQQRLCSRYRTLTAKGKKSQVAITAVARELTGFMWDIALAAQSSFSQQKQN

SEQ ID NO: 304482 - protein, 416 aa, unidentified
MSLALPEALFFTGIDWAAETHAVCVMDAGGTIVAGFTIEHSADGIALLTGRLARYGTPGSMPVAIERPNGRLVDLLLEAGHPVVPVSPDAIKTWREGEVLSGAKSDAGDAAVIAEYLRLRQHRLRTAVPYSDETLALRTVVRSRGDLVEMRVAATNQLSALLEAHWPGARAIFADVESPISLKFLTRYPTPAAAAHLGEKRMAAFLVKHGYSGRRTAAELLARLRAAPAGTSRESLTEALRDAVLAAVGVLAALNAAVKNLDRSVAAHLGEHPDGAIFTSLPRSGQVNAAQVLAEWGDCRQAYDGPDSVAALAGCTPVTSQSGKHRSVQFRWACNKRFRVAMTTFADNSRHASPWAAKTYSDARASGKDHPHAIRILARAWIRVIWPCWLEGIPYDPARHGAAAALARQTAQPIAA

SEQ ID NO: 304483 - protein, 346 aa, unidentified
MLYAGLDLSRQRLDVHVLDEGGRTVEVTAARPDADALRTLVGFIARHGDQVTATIESMNGARFVHDTLELAGWDVQIADAVKVKGLAPLAAKTDRIDAWVLAELGRRDLVPAIWLPDPDTRAERERARFRLHLVRHRTALKNRIHATLIAFGHPVPVSDLFGVAGREHLASLAVPEPWATTLARSLRFVDELEVQVDECEAELRALGADHPDIELLRTVPGIGWVLGYTIASEIGDITRFSSAKKLTGYTGLCPFVRQSGGRDDRGPLAKNGPKYLRWALIEAATHASQHPMYKERYERNKKRLGKQRGSKVARVDIARELATAIWHMLTRREPFRPAGPSRSLVA

SEQ ID NO: 304484 - protein, 334 aa, unidentified
METYILGIDISKKTFQSALTLNGANFFEQEVENSPKAIAAYFQELKKKFSFSSSQLIVCLEHTGIYSYPLLDFLVQHRITACVEPALQIKQSQGMTRGKSDKVDAKRIAQYAYKNRQGLRFWKPQRPVIQKLKALFTLRERLVKTRVQIEMPINESAEFIEKPIQKTLIKNCQRTLKALSLDILKIENEMEKLIEQDAALKQQVQLAVSVPGIGNLTALNVIIASGEFERISEAKKFACYAGVAPFEHSSGSSVRGKTRVSKMANMTVKKLLHLAAMSAIQHCQEMKAFYQRKVDEGKNKMSVINAVCNKLISRIFACIKNRRMYQKNFKHALA

SEQ ID NO: 304485 - protein, 334 aa, unidentified
MNYSHFIGFDISKLTLDVSVLDQKGTQVFYAQIKNTRSDLAKLDKELTKKSIRIQTSLLCGEHTGVYGNHLRNWSEQRGFTLWLEQPLQIKRSQGIQRGKNDKIDAYRIAMYGFKNKTSYKPTIKQRDNVLLLKELLSHRRRLMKAKMQISQLLTERSFYEKEVLKAVKANMTHSLKGINLDLKETEKAIRKLLQEDAEFKRLYTIMNSVDGIGLISAAMILVASNEFKSIKDGKQFSCYAGFVPFEYNSGTSVRSKPRVSQMANKKVKTVLHMAAMSVIKIPGDLREYYLRKVGEGKNKMSVINAVRNKLNLRVFACVKENRLFEKKFEYSLV

SEQ ID NO: 304486 - protein, 386 aa, unidentified
MMIIGVDPHKSTHTATAVDPQTNRTVASVRIDASLAEYRWLLRWARQFDSRRWAVENAEGLGRHLSSWLLARGEEVVDVSSAATARVRQLSRGGGRKNDQIDAAAAACAAALQGDGRPLQPEDITDALALLDESRMNLAQSRVRLVNQLHALLRDLLAGGAPTDLTATTAAALLRQVRPAGDAERVRKQIAIGLVSQIRSVDSLLKANAKQISELLATSGSTLTSTVGIGAITAGRLIGRTGRARRFPTAAAFANYAGAAPVEVASADKARHRLSRSGDRQLNAALHTVAITQIRTPGSRGHTYYTAKLAEGKTPREARRCLKRRLANHIWRTMITDEQRQAANPGGHLGTTLKSSAAGSTPTTSSSDKSLPGLANHDSTTAQPAA

SEQ ID NO: 304487 - protein, 345 aa, unidentified
MSMIHQTPTSGIYVGVDTHARTHHAAVIDQHGRELGDRQFTADQRGYESLMAWAESFGPVQITAVEGTHSYGAGLTRVLLAAKWQVRETAPGDKVDRRRRGKSDAADAFTAARAALSGRASALPKTGDGTAEMIRILRTNRSLLVRQQTQLMNQIKALLITGPDTLRTTYAKLTRLQLARRLAATPATTDPTTSVLLDVLCDNAQRWLDLRDRAKTLERQIHQLVRQHRPELLTRPGVGPDTAARLIASVSDHPDRIGNEAQMAHLFGLAPIQASSGNTHRHRLDRGGDRSANTAIHRIALTRARTDPTTRDYLARCQARGKTHREAIRLLKRHLVRELYPLLTT

SEQ ID NO: 304488 - protein, 346 aa, unidentified
MEDNLLLAIDLAKNSFQVCYMRHNGEVLLNKAISRNSLIKLLTGKKRFSLVAMEACGGAHYWARLAKRNGHEVKIIQPRAVKGLQLKQKTDKNDAYAVGVAALLPHIFSCNLMSEDEQGLQCLDRARALQLAQRTALSNQMRGFLNEYGIVLPKGIAPLVKRIPEILEDAENGLPDSLRQVLASQADILAMQTDQIEYYDCLITEHIKQNKICQKLSKLEGVGPIIALGLMIRLGDGKEFTHSRDASACIGLTPKQHSTGGKERIGHISKSCADKRLRSLLYQGAMSIVYKVTLRAPTTEKERWLKSIVERRGKKIAAIAMANKTVRTAVALIKSDSDYQPLPIQA

SEQ ID NO: 304489 - protein, 447 aa, unidentified
MQNRNVKMEVVNPNAAGIDVGSRSHFAAIGQDSGDIKEFGVYNEDLKQLTKWFSDNEIKTVAMESTGTYWQHLYITLQAAGFQVILCNGKFTKNIKGKKTDVKDAQWIQKLHTIGLLTGSFLPDEATEQLRTYCRHRTNLLQQAADTTRKMQKYLRLLNLRLDVVVKDIAGLTGLAIIDAICKGEKSPEKLAALRHSNCKKSEEEIAKALQSNGRKDYLFGLKQEYQLYVNFQEKMKECDMEIEKLLNEQINSDDEKRQHFIDKKVYKKINKNTPKNLDINLLSYQYFGGVDLLAIEGVSHATALALMSEVGNGIHKFETAKQFASWLRLAPNNKISGGKMLSSRIPKGSNRLKIALRNAANAIGNLKDTALSNFFKRIAFRKGRPAAISATARKLAVIIWNMIVKGIPYKSENDYEFLDQKRKRKVQEMKKLIHKFDIKINDLESV

SEQ ID NO: 304490 - protein, 321 aa, unidentified
MNKYKEIYGIDISKSVFDVYGSETGHDQFKNDEQGFKSFLRHIPKGALVVMEATGYYHYRLAQFLYKSGKLVSVVNPLSVKRFIQMKLAKVKTDKSDAKAICEYGQMNEVPLYTALDEVQSECLQLFRLLDSYLKQRTASKNKLHGEETLGIPSKYVYRSLNRNVKHLQKEIAAIEERLLELVKQDQQHQLTLLKSIPGMGVKTALFLIVVTDGFKKFETASQLCSYVGITPTIRESGSSVRGRSRISKVGNKKLRNLLFLCAFSACKHNKACREIYERLVAKGKSKKLALIAVSNKLLKQAFAIAKSRRSYDENFVSKLA

SEQ ID NO: 304491 - protein, 323 aa, unidentified
MYGIHSLSASLHLAECHYNEGSNMLTKNVIAIDLAKNVPQACHISVHGEMLSNKPLSRQKMKEFLAKAKPSIVAMEGCCGCHYWGQLAQKFGHEVRIINPKKVKGYLEGHKTDHNDALAIANAAIQIGIKYSRPKSLEQQSMHSLETSRRFLSRSVVSLGLHIRGTILGYGIANPRGEKGLKASVQTVLDGETSIPANVVSVLSMLWEQYKELKAKLIAFEKEKNALTRQIEPCQRLMEIEGVGETTAAMLYTTLGDGKQFKNGRQASAFVGLTPKQHSSGGKVFMIGIDKCGGVKELRSLLYLGAMSYVGRLPEKLKTQKDA

SEQ ID NO: 304492 - protein, 402 aa, unidentified
MFYLGIDVAKKSSRYLVLDQEGKRVVSFTLENLKERFQNLLSRLQETKIESKDILAGLEATGWFWENLYQFLQEKGFKVILLNPYYVNKFREALAKKAKTDDIDALVIANLLKTGEYMNSIVPEEKIQVLREYTNLRYEFLRAKQDYQRKVISLLDVVFPEYERTALRNPFGVAPLQILKEFPTAKDLALAKPRQIEKIVRSIQGNNFDVKEIQSIIDWAKNSIYSGRAREARGVSLKMLLGQVQGLDSNIQEIDKKIEDILSPGPDDSFPGENLLSIPGVGKKTLAAVLSYLGIDGSSFATAKKVAGYVGFFPKLYQSGETRSENRISHRGPKVLRWALYMSAVACLKHNKEMRTIYHRKISQGKTAKQALIVVAKKLLQIMLAMLKSGKSYNPIQVFANT

SEQ ID NO: 304493 - protein, 424 aa, unidentified
MHFTADINLVAIDIAKEWNVVLVQEACGQKRSFKVANNAADQDQLLLYLASLPGRTRIAFEPTGDFHRPLAFRLLKAGLEVFLISSVAQARFREASYGTWDKNDPKDARVILAMLAHGLVQIYHDPLFHGNHDLQELSNTYYQVTLARTRLQHGLLLHYIPLYFPEFGRYWYSTRSEWFIRFLIRFPLPSAVRAMSRDAFIAEAWDIVGKKWDKRAKLEEIYELAACSIGLPVALDSPAVETFRLQLERYAEINERRAWLDRRAQEVLAPNPDFQRLIKLPGVAAITALTILAEAGDMRRFRHHRQFLKYCGLDLAKSQSGQNRGKESLSKRGNKRLRMIFWMAGLRAVHLRENEFRVKYQRYLSSNPLDANRKRKALTAIAAKMARVAYGVVKNESEYQPFFEQRLPSGSIPLTRAVEATATS

SEQ ID NO: 304494 - protein, 368 aa, unidentified
MKNLITSFVGLDVHKDSIAVGVAPAGREAPHFVGTVAPQWSALSKALGRLGRAKELQIAYEAGPCGYTLARELRSHGYACEVVAPAKIARRPGDRIKTDRRDALLLARAARAGELVNVMIRDERDEALRDLSRAREDAVRARLKARQQLKALLLRHGHRYTGKSSWTAAHERYLADLTFAQPAQQIAFAEYRSAVREAHERVERFTEELRRQLEHWRMRPVVDALMTLRGIELIAAVTLVAEVGDFQRFARPSELMGFLGLVPSEHSSGSTRRQGAITKTGNAHARRVLVEAAWNYRFPARVSRTLQVRQEGQPKNVRTIAWKAQLRLAQRYRHLAARKLALNKICVAIARELSAFVWDIARQVKPNA

SEQ ID NO: 304495 - protein, 410 aa, unidentified
MAERFVGIDVALREHRVAVLDRDGEAVGPSFTIAASQDGVVTLLQTLAARGATAAQSLLGLEASGHLWENLEAALVGAGYRVLVLNPLQTRRYRDVVRRKAKTDDIDAHVIAGLLRSGAAQASYVPDEQIQSLRELARLRARLLADRQDYLRQLIAQLDVVLPEHRAVLGDLLTARARGILAQFPTAQHLAQANPRAIRRAAEDAGARGFSLDDATGIRDRARRSLYSGKAAAARAHVVRTLVSQLERLTSAMDEVDHAATTLLPPSEPGTGPSDAELLQTIPGIGPQTAATLLGEFGTLTRFTDARALVAYVGFYPVIHESGDRAARPRLSPVGPRIARHSLYLAAVNAVRHSREWRTIYLRKKAQGKTAKQALVVVAVKLLHAVYAMLKHRQPYNPSRLLVAPATIGT

SEQ ID NO: 304496 - protein, 377 aa, unidentified
MGDYSEAFVGIDTSKLRNAVAIAEAGRGGEVRFLGEIENTAAVTAKLVRKLATKYERLTFCYEAGPTGYGLHRQIKALGFGCAVVAPSLIPKRRGDKVKTNRRDALSLAKLLRADELTPVWVPDGRHEAMRDLTRARETAMLDLRTKRQHVSAFLLRLGRPYPESNKTWTRAHVSWIASQKLDHPQQRLVLEEMMLAIRQAQDRLVRLEQAIAAAVPEWSLAPLVTALMAMRGIDTISATTLLSEIGDLSRFQTPTELMAYLGLVPSEASTGDTVKRGPITKAGNRRARRMLVECSWSYQHPPRVGQAKQPKVDAAPLAVREIAWKAQCRLHRRYRMLIRKGKLKTVAIVAIARELAGFIWAVARAVSTMPIAAATT

SEQ ID NO: 304497 - protein, 595 aa, unidentified
MLPQSPSASQAPRRFGVGIDTSRYGHYAAFLNEQLQPAAAELQFPESAAGYALLRGRLDSLTRRHGPAHFVVRLDAAGQYADNLRHFLHGLASPAAGAVGAARFSLTLSCGDPQRNKNYRAALFGSKKSDPVEARAAARFALAERPSTDIPLSQELRILRQVAGRLQAVVRQRTRLLNQFHHLLALTFPELALLTKELAAGWVLELVHRYPTAPLLAAAPPTDLGHIAYLPDRHIAPLLEHARASVASLAGATVAELVREQVRQLRDSGARQKRLENLLVTAYRALPEANHLDSIPGFGAVTAAVLTACTVAIERFATPAKYVAFFGVLPVEVASGVERDGQARAPRRWAMSRRGNDLVRRYLWMAALSAAQCNPAVKALYARVVAKHPQHKAVAVGHAMRKLLHLAFAVWKTGRPFDRAHSPWQTPTHVESSDNGMSPAPETSDNTRSQEGQAAGHKPVRMPAQPVVTAARTDTLADAAAVGEGTYLDFAHLKRQLPLARVLDQLGLTARLRGSGPQRRCACPLHRGDARGRTFSVNLDANVWQCFAQECGRKGDVIDLWAAVQGLSLRAAALELVQTFGLEPAPCGGTEKRHG

SEQ ID NO: 304498 - protein, 346 aa, unidentified
MDQIIRIGMDTSKHFFQLHGVDAAEQPVLRRKLRRKEVLSFFDKMPPTAIGIEACGAGHYWARMLGELGHEVKLIAPQHVKPYIKRNKNDGRDAEGLCEAMSRPTMQFVRTKSAEQQAALMLAGMRERLVTQRTKLSNAIRGHAAEFGLIAAKGLDKIEPLLADISADGVLPVMARELFAIHGKEYEQLQDELKVIEAKLMAWHRANPDSRRLAQVQGIGPIGATALVMKVSDPRQFPSGRHFAAWIGLTPKDHSTAGKTRLGKITRAGDERLRSVLVAGATAVIQQAMRGRGRPSPWLIALLRRKPPKLAAVALANKTARIAWKLMVTGESYDGARMSGVSAPAA

SEQ ID NO: 304499 - protein, 347 aa, unidentified
MVAVMIGIDPHKGSHTAVAISPAEEGLGELRVRASASQAERLLAWAAGWPQRTWAIEGAAGLGHLLAQQLLAAGERVVDVQPKLGARVRLLATGAVNKNDPNDARSVAVAALRSPSPRQIQPDDHAAVLKVWAKRHRDLGRTRTQVVCRLHAVLCELVPGGVSKAITANHAARLLGSITPAGAVEAARCELAAALLDDLRRIDAQLGDAKAKLTTAVRASGTSLTEVFGVGPVVAATVIGAVRNVSRFPDRDHFAAYNGTAPIEVSSGPRKIYRLSRRGNRRLNHAIHMAAVTQIRYHHSPGRAYYDRKLAEGKTGKEALRSLKRQISDAIFARLQADARRAAAQPR

SEQ ID NO: 304500 - protein, 381 aa, unidentified
MGKKRKQAMSPAEAQIGNVVGIDPHKRSLSAAVLDHRGGLLGCRHFPVSAKGHQALETWVLSLGPVLRWGIEGASGLGRHTALYLLTRDQDVRDVCPNRTAERARNRRQGKSDTLDAERIAREVLAHPNLPLAFKRSQQSAGPDQMGELLGLWHQARCSLQKSRQHLLNEAENLLHALPEAIRDRLPAGKHVEPRLRACATLTDEMSGEAWDAPTRLRLRLLDEHAHAISELSRREAKVCREMALLLRQSGSTLDQVCGISTRSAAELLVEVGDPRRFTEGGFARFNGSAPLPASSAEGDDEPVRHRLNRGGNRRVNAILHRMAVTQLRCEPRAQAIFSEARQRGHTKKEALRVLKRHLSNVVHRRMIRDVQCQSGLVAAA

SEQ ID NO: 304501 - protein, 306 aa, unidentified
MGEVSTIGLDIAKAVFQVHGVDGVGAVVIRKRISRAKLLEFFAALPPCLVGIEACPSAHHWGRELREFGHTVKLMPPSYVKAYLKRSKNDANDAAAICEAVTRPSMRFVPIKTKEQQTALMLHRTRQLLVRQRTMLSNAIRGHLAELGIVSAKGRHGTAELLKIIADDADQRVPSSARGILDVLARQYSAIGAEIGLIDKSILAWHRSCEASRRLEEIPGIGPIVATALVAEIGDWKSFSSGRNLAAWIGLVPKQHTTGGKDRLGSITKQGNRYLRWLLVAGATSRHPLCQAGAFSLCSRSRPISQ

SEQ ID NO: 304502 - protein, 400 aa, unidentified
MLSIGIDVSKGKSTVCGMKPGGEIVYTPFEVQHTREGMSELVSLLRSSGEEVRAVLESTGSYHCPVVTALLENGIFVSVVNSLRMKRFCSQSIRKVKTDRIDAMQIALYGLAYWQELQLTKLPEDTYRELQLLARQYYQMTSMLIKAKVDFNAICDQVLPGMQELMSDHAGLHKLSDFVLRYRHTTHILEMGETRFQKDYCKWAEKKGYRNCERMAALIFATAQNGIPVLPNAPSTQIVITEAIRVLHTVEASRDAILTQMQALAKTLPEYSLVREMPCIGDTLAPRLIAEIGDVRRFHSKRALIAYAGIDAPPYQSGKFCANNRHISKRGNRYLRKTGYEVMQSYVMHKPANDPIFTFIEKKRSEGKCGKLAMVAGLNKFLRIYYGKVTELYRSLPAIE

SEQ ID NO: 304503 - protein, 340 aa, unidentified
MFRFDPFPFQGFYVVVEQVDGSNPKPPQRFQKQAFLHWAAKLKQQSGGQVYAVYEACGFGFSLQRQLSALGIHCYVVCPQKLDERNRRVKTDGLDAKALCLKLDRFVQGNCDALALVRVPSEAEEQLRAIHRQREQLVKARKQLEAQGRSLMVNHGIEPVQRWWKRRAFAALPVPEWMKELLGNSQPILVGLEQKIGALTLQLQAAAAPNQPRGLGKMTSVVIDREIGDWTRFNNRRQIGSYTGLCPSEQSSGNTRVQSCVTKHGNPRLRAALVELAWRLVRFQPNYKPVVKWRAILAKGALATGAARKKAIVAVARQLAVDLWRVRTGRLRAEQLGLEI

SEQ ID NO: 304504 - protein, 343 aa, unidentified
MYYIGLDVHKKTISYCVKDAAGCVHQEGKIGSTRHELDAWIRTLPQPRMIAMEATIFTGWIYDHLLPHAEQVKVAHPLMLRAITAAKRKNDRIDAGKIADCLRCDFLPECHMASTEIRNRRRILRYRGLVLRQAVQMKNRISGLLMETGVSYNKLRLHRMGYFAELLATNAEVSESIRPLLKLCREHIDRSIRLDTTLLRSLEQDPLLADRLRRLRTIPGVGPITALTWALEVGDTSRFRSIKQAISYCGLCSAEKSSADKVMRTPISKQRNKHIQQVLVEAARLAPRYSDELALLHEKERQRGNGNRATLAVARKMVALMLAVERRNTDYVPAAEFRRTAAA

SEQ ID NO: 304505 - protein, 412 aa, unidentified
MSSEYGIVAGIDVHKKWLYVVIGPEDTPEGQFRRMRVGTTTRELQQLADDLYLAGVCTVVMESTAKYWRPVWAVLEGAFRLFLAQARSNAAPHGRKTDFGDAIRLIKRLRAGDLRLSFVPDMEQREWRLLTRTRVKYQNDISQLRSELEGLLEECRIKLSGCLSDVFGLSGRRILRKLAEGEADPERLAALADSKVRATPQQLADALNGKLTAAHRLLLNQTLDRLETLKNQSEEINEQLTVAMKPHLGVIRRLCAIPGISVSAAYQVIAELGPSAEKFVSAAHAASWAGVCPGRQQSAGESYSDACAKGNRFLRRLLCQCAWAAVRNKSSYAHSLFKRLVTRLGPQKAIWAVAHYLLRLIWMVLHNGIEYQERAQVANLTERLKRKLDSTARALRRFGLNVQITIPELETA

SEQ ID NO: 304506 - protein, 370 aa, unidentified
MLDTTTFIGLDVHARSIKAVSLDVMTGEVRAATFGYDAGAVAEWVRSVDPRARCVYESGVTGFDLQKRLSGLGVDCVVGAVSKMIKPSADRRRKNDRNDAEFLARMLSVGNVVEVWVPDDECEAARDLTRALEDARDDLSRSKQRLSKFLLRHGLVFDERTPTGRRKGNWTRAHWSWIESIRFAERADNDVLAYYVDAVRRAAEEKARLEGLVEAEARKPRWRKRVDSLRCLKGVDTASAADLVFEAGEFSRFRNARSFAAWVGLTPSEHSSGESDRRGAITKAGNKHLRKTLVEAAWHYLTCSGRPKDLARGQAPDPGARRHAAKGVRRLVERRGALLARGVHGNKANVATARELACWVWAVGLMAEEA

SEQ ID NO: 304507 - protein, 371 aa, unidentified
MNFIGIDLHTNKFTCCYRDELSSVDDPTIGRKIKTFDLNADGLTSFYQTLTNDTYVLVEATITTFSFVRLFNDRVKKVIIANTYELKSVSLNRCNTDKIDADKLCRILKAQILSGEQLVAPVVIPPVQIQELRGLFTTYRLYQKQNTQDKNRIHSLLKEQLHGFTQEEIFSNKAREHIRNISPGTPMHFQVNQLLSRLDRNKADIEELKKQILIHAEPFMAQIEILTSMKGISVFIAIAIIADIIEVNRFKNSKKFTSYLRSAPKVSNSNTSVKIGGINKKGRKLSATLVTQSLNHVLSASPKLRSWYDRLCEYKKPGMVRTGLRRRVFAEIFQMLKKGEYHYGRDVKNHGAKMSQYRIFLKKRKILLEIA

SEQ ID NO: 304508 - protein, 391 aa, unidentified
MYIVGIDIAKRKHEAAVIDGEGTVIIKPFSFTNNCSGYNRLLAMLAKAKLPLDEVSFAMEATGHYWLALFTRLQKEGFRVQVINPVQTNSIRSFYIRQAKTDPRDALLIAEVIRFGHFSESTLHPENIYELRELCRGRHAIVSMQADVKRKVVALLDQVFPEYETAFTNMFSDTSMAILQTCPTPKELSEMPLEELCHLIEVSSHKRFRMAKARELQELARNSFGFAMAGDVFSTMIRLYAKHLVFLKQQVQEMDRKIAEIMDTLDTPITTITGIGLTLGAYILSEIGDISRFSSAAKLAAYAGIDPTMRQSGEYNGVRNRMSKRGSPYLRHAIWLAASSAVLHDPALKLYFQKKRDEGKPYMASVGHACRKMVSIIYAVMRDNKAYCLCA

SEQ ID NO: 304509 - protein, 523 aa, unidentified
MAATATSKRRRARRPRGVHKPRGVLHGRVQKAGPEHFGIVCVDCAKARSKWMICDFYGRMLLPPEDPVHGRAYFELAVCRLREAIDKHRLRDVVVAIERTGTCHLPVKRAFSAAGFECRIVHPFATKQFRQPADPGNKTDETDLSAIFRAATCGFGLIEPPLDPLSEHLRLLARHRRDLVQKRSAVCCQLREHWEATLPGFASCFDEFWDSAVGLYVARHFHHPEAVREAGVEGLASRLKEAGHRCSKPTLQRCVSWAANAASPAEAAAVHHRIALALDDDRRAKTEQIQALERDIAGLFVQTPYVLLLSIPGINVVTAAEFAGEMGPISHYAHAKAITGRAGIFPSRYQSDQVDCQSGPLIRCANRRLRASVMMIADNLVKCNYYFNGLVGLWKASGKDPRDNRVKVACRFSRIAFHMVAGGEVFHHPLCRDRSYILDKLLTFHREHDTPPARIVTDLQAAVAQLPKTEYAAEATPLAKRITQRAARRRRGPQPLGDILPVVLARLGVSEVQSNLSGDQGPG

SEQ ID NO: 304510 - protein, 344 aa, unidentified
MENLLKHFVGIDISKKTFDVSVLKPVSGKEGKIAHKQFTQKAEGFSEMEQWLKAQDIFLNNQTLFCMEHTGIYNQPIVSWLTAKKALVWVEMAIRIKKASGFSRGNDDKTDSAMIATYAFRFRDKMQIWNQTDETLVQVKNLMAQRDRVINAISALTVPVEELLSMGCKSEAKQLENLQKGAISKLEESKNKIEATILILIKKDTNLFDKVKKVVSIKGIGMVTAVSFLVYTNGFSSFKTAKELACYCGVVPFVSKESGTSVKAKARVSHFANKKLKCLLHLCSLIAIRCDEEIKGYYERKVKEGKNKMCVINAVRNKLVARIFAVVRDNREFVDNYVNKVGLS

SEQ ID NO: 304511 - protein, 376 aa, unidentified
MGNQTFTPRDYDVFAGLDVDKRSISVTFTDHQGLLKSLRMPYSVEHLVNHVRKHFPDQKVAFAYEAGPTGYGLYDGLVAQDFRCLIASASMIPKAPGQRVKTNRLDSQGLSENLRGGQLKSIHVPTAVYRDLRHLTQLRDTVVSEMVGMKQRIKSLLLMEGMEFPPAPAGSQWSFMVKNKLRKLPCSSTVRFKLDQLLDSLEFNEKQVLKTTREIRRFCQNDPELSQCIKYMMSVSGIGWIVASQLLARIGDWRQLTNIRQLGGFLGLVPTEHSTGERTDRGSITHTGDGRLRSKMIQASWSAIRKDEELREFFRSVCHRHPRRQGPRVAIVAVARKLSVRISVVLMKQRPYVVRGKVHSAPLTQEETSPQGTTRR

SEQ ID NO: 304512 - protein, 367 aa, unidentified
MSKHTSKKNSPSATDLSACTTVAVDLAKNVFQVAGEDHLGKVIYEKRLTSREAFSTFLCQLPPGIPVLMETGPGAQSWARLLLKQGNQPRILPAQHVATHRSGPKNDRNDVLAILRAGRDEKIHAVPVKTVAGLEMQALHRVRRRYVREHTAMGNQMRGLLLEHGFSIPQGKAAIDRNVTQLLEDSGELIPGMLHELIAELLAEWKHMAERVEVMTGRLERAVREDEDAKRLMTIRGVGPILSSAVIAKQTEPERFDSARDFAAYFGTVPEQHSSGPKVQLGKMAKRGDAYIRSLAIQGSHAVLRQLNPNSEHPDDRRLQRWLSRHGQKGAAVRLANRNLRIIWVLLQNKDTYHRQPTERQAAVMDQ

SEQ ID NO: 304513 - protein, 337 aa, unidentified
MIIIGCDFHPSFQQVAMLDTETGATTERKLMHASGEAERFYRELSSAALVGIEAVGNDQWFVQLLQKLDHEVWVGDAAQIRASYIRKQKTDKRDAKHILQLLVQGRFPRIWIPCAEMRDHRQLLVHRHKLVQIRTRVKNELQHLMLNQGMQKKQKLWSAEGRATLASLPLEPWTNRRREDLLNLLSMLDGQLEKLNDAVAQVASQYPDVQLLMSQPGVGAVTALAFVLTIGEVSRFQRGKQVASYLGLIPREYSSGGKQRMGGISKQGNRLLRFLLVEAANIAVRFDPVFRKEYLHRCHQKHFTVAKVAAARKLAIRMYWILRTQTPYPNVLSSRVA

SEQ ID NO: 304514 - protein, 240 aa, unidentified
MRILAIDVSKSSLDFFSNFIGSGSVNNSPQGIFDLFSKALSVSKDFILVLESTGVYSFDVASYFYDNSIKVFWVKTDNMKLYRKILNRSKTDKLDARLIFDIALNFQNSLVPFVSDEETISELRYLTRLYLKFNGDINCFNNASALASYTGLTWSIHQSEKFKAQDSHLEKKGNKYLRTYLVLAANSLKTHNPIFKDYYWKKYRESNKYHHMRALVMSARKLVNLVFYLLKNNTPYVILK

SEQ ID NO: 304515 - protein, 349 aa, unidentified
MKIIRIGLDLAKDVFQVHGVDVQGKMGLRRQLRRNQMREFFQKQPPCLIGMEACASAHYWARTLMAMGHEVKLIAPQFVKPYVKGNKNDANDAEAICEAVDRPNMRFVPVKTVEQQDIQALHRIRAELVRQRTAKGNQIRGLLGEYGITVAQRVAALRKKLPEILEDAENCLTAYFRQLLDGLREDLVALDQRIDAMDQAIQRLAQEHAGAKRLQQLRGIGPITATALIAAIGDGHMFRRGRDAAAWCGLVPGQHSSGGKDKLLGISKRGDAYLRTLLIHGARAVIQAAKDKEDRLSRWLQNLCSRRNKNIAAVALANKTMRMAWALLVSGEDYDPHYGEMVQACTKPV

SEQ ID NO: 304516 - protein, 339 aa, unidentified
MMKVMAGIDLHSNNVVIGVTEMDGKRVGHRKVPCELKEVVKFLAPFRERLEKVAVESTYNWYWLVDGLRALNYPVVLANPAAMEQYSGIKHADDTNDAFFLAELLRLNILPTGHIYDPQLRPVRDLLRRRMMLVRQRTALMLSFKSLHTRTTGQEMGLSQLKELKIKEAQQLYEHPANQLIAGMQIKHIEQLTESIAKIEKGVLGAARELPYYAKLTSLPGVGKILGMTITLEVGDIKRFVDAGHFASYCRTVEAKCTSNSKKKGANNSKCGNKYLSWAFVEAANFARRSDEQCRRWYERKAAKTSRVLATKALACKLAKAAWYLLNNPYAASFLSMSS

SEQ ID NO: 304517 - protein, 360 aa, unidentified
MSTQRTSVGLDVHARSVVACGLDGETGELFERRLTPDHHEILGWIRSLPGRAAVTYEAGPTGFGLARFLLAAGIECLVAAPSKLQRPAGDRVKTDARDARHLARLLHLGQIIPVTIPDVEQEAARDLVRAREDVRGDLMSARHRVSKLLLRQGIVYYEGRTWTKVHDTWLRRQRFEVPGLQLAYDTAYDTMTAAVDRRDRLDAAIAEMAATSAYTAVVTRLGCLRGVSTLTAFGLAVEIGDWQRLTGRSIGAYLGLVPTESSSGATRSQGAITKTGNGHARRLLIEAAWQHRRPYRPGVALRRRWDKAGPAARARGQQGNRRLHARWNGFEQRRKRPVVANTAIARELAGWCWSLAVLDE

SEQ ID NO: 304518 - protein, 366 aa, unidentified
MGWMAPLRHLSAKLLCDRISTEWEPSMGEVTTIGLDLAKQVFQVHGVDAEGATVLRKQLRRAQVLAFFSRLPRCMVGMEACGTAHYWARELRALGHEVRLMPAQYVKAYVKRNKNDAADAAAICEAVVRPTMRFVAVKTVEQQAAVLLHRGRERLVRQRTGLVNALRAHLAEFGIIAPQGLRHVGRLTAIVRDEGDARLPDLARQVLQVLAAQIEQLEAAVAAIEKQLMAWHKSNPVSQRLATIPGIGPIIATAIAATVTEPSGFRSGREFAAWLGLVPRQNSTGGKVRLGGISKRGNRYLRRLLINGASANLLRSKATKADPWVIGLRRRRPSLVVAVALANKTARMAWAVMQRKENYQRMAAAA

SEQ ID NO: 304519 - protein, 346 aa, unidentified
MENIALDVHKHYTWARVESSEGNRLYESRLAHARGTIKNFIGRWTPGSPVAVETVGNWYWVVDEIEAGGGKPQLVNARLAKLMMGSVNKSDKLDAKGMNRLQRTGTLPTVWIPSSAVRDARELPRTRMVFSEQRTKLKNRVHATLGKYGYVVDEVSDAFGKRGREIINERITKLPPHTQYGLQRLLDQLDHVGENLKAIEAAMIKAFAPCPETTWLKTLPGVGEILAVVIWTEIGTIERFARAEQLASYCGLVARENSSGGKFRFGAVRRDVNVYLKWAFVEAANSSILNCERCGYGHISRLYQRIKARRGHGKAKVAVARHLSEASFWMLKKGEPYRQPTSSTQR

SEQ ID NO: 304520 - protein, 342 aa, unidentified
MEQYVALDVSLKEISVCIIDGNGDIVFEGNTAAEPATLVQLIRSKAPQVMRVGLETGSTSPWLFHALASAGLPVVCMDARHAHAVLSMRPTKSDRSDARGLADMLRMGWYREVHAKSVTSHEHRTILGARHQLVTMRSELDAQIRGILKTFGLILGTGNRDTLIQRAEKLAAGHPVMSGLVAKLAEVRRHVASQIAAIDRDIRHLVHTEPTLKRLMSVPGVGPITALAFLSSVDDPSRFKHARDVGPYLGLTPTRYQSGETDRQGRISKCGDTFTRTCLYEAAHVLLTRVQRFSPLKAWGMRLVKRIGGRKARIAVARKIAVILHCIWTDGTEFWWTREKTA

SEQ ID NO: 304521 - protein, 367 aa, unidentified
MKKVSTAAAKASKRISSQKLTVGLDLGDRSSWYCVLDEAGSVLLEQRLSTTPNALREVFGGMPRSRMALETGMHSPWVSRLLSELGHEVIVAHARNVRLIGESRKKDDRLDAQTLARLARIDPQLLSPVKHRSAKAQADLTLIRARAGLVRARTALVNTARGLAKSYGERLRGCNVRNMNPEKADELSPELQAALQPLLAGIESLSERIREYNERIEKLAQGGYPQVALLKQVKGVGTLIALTFLLTLEDPHRFRKSRDVGCYLGLQPGRRNSGQSEPQMHISKEGDPYLRTLLVQGAQHILGPFGVDCDLRRWGLKLAERGGKSGKKRAIIATARKLAVLLHRLWVSGEVYQPLHNSNQRAMPAAA

SEQ ID NO: 304522 - protein, 376 aa, unidentified
MNKCHSNTELSSHEGTRSQFNGGECAIKSAVGRMRPVCALGIDVHQDFYVVVEQVDGTNPKPPQRFPKQAFLRWAARLKENTGAEVHAVYEACGFGFSLQRQLSLLGVQCHVVCPQKLDEQNRRVKTDGLDAKALVLKLDRFVQGNRSALALVRVPTEEEEQKRAIHRQREQLVKARKQLEAQGRSLMVNHGLEPVQSWWKPRAFAALPVPQWMKELLANSQPILVALQQKIASLTIQLQSSATPKQPRGLGLMTSVIIDREIGDWRRFSNRRQIGSYTGLCPGEYSSGNTRLQSCVTKHGNPRLRAALVELAWRLVRFQPNYKPIVKWRQILAKGALATGAARKKAIVAVARQLAVDLWRIKTGRLRAEELGLIN

SEQ ID NO: 304523 - protein, 417 aa, unidentified
MSVVLPATQFFAGLDWAAEVHAVCVMDHAGKIVDRFTIAHTADGIAMLIRRLGNLAEPGDVQVGIERPNGRLVDLLLEAGHPVVPVSPNAIKTWRDGEVLSGAKSDAGDAAVIAEYLRLRQHRLRVAVPYSDDTRAVRTLVRTRTDLVELRVAATNQLAALLDDHWPGAKVIFADVESPISLDFLTRYPTPASATHVGEKRMQAFMTKHKYCGRRSAAALTERLRSAPAGATGEALTEALRDAVLALVTVLKALNTAMRNLNRSTTAHLGEHPDGEIFTSLPRSGQINAAQILAEWGDARQAYESPDSIAALAGCTPVTKASGKHRAVHFRWACNKRLRVALTTFADNSRHASPWAAHIYNQARTAGKDHPHAVRILARAWIRVIWRCWLDQTPYDPARHGNAALLSEQRQNDHVAT

SEQ ID NO: 304524 - protein, 355 aa, unidentified
MDSKKYIGMDVHKESISIAVRNGTGKIVMECVIETKASMILQFIEGLRGDLQVTFEEGTSAAWLYDLLKPHVTKLVVCDPRKNAAMREGSQNDKIDARRLAELLRLNHLSPVYHGEHGLRSLKELVRSYLTITKDLGRVMSRVKAIYRSWAIPCSGKQVYAPRHRAEWLGKITEPGVRRRAEFYYQQLDALRILRREVRRELLAEAKKHQAWERLCQIPSIGPIRSAVLLGILQTPHRFRTKRQLWSYSGFGIETQSSADHRRVAGQLERAKKQISIRGLNRNCNHDLKNLFKGAAIVASSKPGPLQEFYTTLLTKGIRPEMARLTLARKIATIVLIVWKRGACFDAQHLKPQTA

SEQ ID NO: 304525 - protein, 387 aa, unidentified
MRDMSCAWMRWPSPPAPCMSHAKLTVTALARPPRELREQARGRARSGAAIVESLSKPERLEGSESRIERKEGSNNMEQQFVGIDVSKAWLDTEAIPQSQSMRYGNDAAGIVALVEAMQAATPALIVVEATGGYETAVASALSAAGLPVVVVNPKQVRDFAKAMGILAKNDRIDARVLALFGQRIRPQLRPLPGVEQRELAELLDRRSQLVVMRAQERARLATALPVAKASLVEHIHWLDERLRQLDIELTARLRTSAAWKVKVDLLKGVPGIGKVTIFTLLARLPELGQLNRGTIAALAGVAPFDDDSGKRRGQRFIRGGRAEVRNVLYMATLSASQHNAVIKAFFARLTAAGKPFKVAITACMRKLLTILNAMLKNNESWHCPATT

SEQ ID NO: 304526 - protein, 341 aa, unidentified
MPIVTIGLDLAKSVFQLHAIDEHGAVIMRKRLTRGQVLPVLEKIPPCLVGMEACGSAYHWAREIQALGHEVRLMPAQYVKPYVKQNKTDAADAEAICEAVQRPTMRFVATKSIEQQAVMLNHRGRELLVKQRTMLANAIRAHFAEFGIITAQGTQNLFKLKQAAEQGSLTKTAMDVLELLFDQLDALNKNIKALELRIHTWHKSNETSQRLTSIPGVGPLTASAIVASVGTACSFGTARSFAAWLGLTPREHSSGGKQMLGGISKRGDGYIRKLLVHGARAVVRMRGRKNAEPLPWLDGLLERKHRNVATVALAHKNARVVWALLNTGEVFEKGTRQVKMA

SEQ ID NO: 304527 - protein, 383 aa, unidentified
MKRRFRSVGLDLAVQKIAYCEVEGGEVVQRRTVSRLTALEDLLGPDSPPARVAIEACREAWHVHDRLSERGHDVLVVDTTRVRQLGIGQHKRKNDRIDAEALARAVERGQIPLAHVLSPQRRQMRHELSIRRALVETRAQYVTTIRGVLRAQGIRLPKCQVEQFPDKLADAKLDESQRELVAPLARLLEGLNVEIAHADRRLDELCSGEPVIERLCTAPGIGAIVAASFVAVIDEANRFHRAHQVESYLGLVPSESTSVKRRLGAITKQGNAYARAMLVQASWQIFRLRSDDPLKTWAQAVAKRRGKRIAVVALARRLAGVLWAMWRDGTVYDAALVGEMSARGLKRQAQDTQVVADALKRAAKKRQSHLRTANKILNQEATN

SEQ ID NO: 304528 - protein, 315 aa, unidentified
MTTEAETYVGIDVSKDRLDLAVLEENRIEQYSNTAGGVKELVKEMVALRPSLVVVEVTGGYERAVVQSLFMAGVPVARVSGYRARQYARAKGLLAKTDSLDALNLADYGKHVRPRLFEAKSEQGQRLSGKLARRRQLGEMLKAEKNRLRLAYGDIGPSIERVIEFLQGELKQLDQEIRAYLDSDPEWLEQEQLLRSAKAVGPVTAATLLAELPELGKLNRKEIASLVGLAPINRDSGKRSRYRKTGKGRPAVRSVLYMAALTGIRYNPVLRKHYHDLVSRGKVKKVALTACMRKLLTILNAMVRDQEPFRYPAMS

SEQ ID NO: 304529 - protein, 352 aa, unidentified
MSIVGGLDIHRKQLTFDYLEVETGQLWRGQIAPADRAHLAGWLRERFDPTRDGPVDLAMEACTGWRYVAEELAAAGAIAHLGEPAETAALRGPKRRPKTDKADARHLRELVATGRLPECWIPPAHILECRALLELYHALRVEHTAWTQRVHAVCFHQGAEALGGGALMTAEGLDRLAQVAEQQLSAAGRLQVSTALAMLGGLDQQLDLVRRQLLGASRRLDGARVLHQRLYGVGPITALALVCWLGGAGRFSSARKAVRCVGLDVNGYSSARKRSPGRLSRQGPGVLRWLCYEAGKTAARRVAPDHGYYTSVKDRIDGKRAALSQARRIVRRAVHLLDQLGDQALAWTPTPN

SEQ ID NO: 304530 - protein, 373 aa, unidentified
MREFNKFIGLDVHKSTIAISIAPEDGGEVRYFGEIPNTHEALTKFANKFSQGSLKLSFCYEAGGCGYEVYRHLRNIGHDCMVVAPSLIPKKAGQRVKTDRRDSLNLARLHRAGELTGVWVPDARNEALRDLTRAREDMKHLQRQAKQRLLAFLLRHGWTYSGKSNWTNAHFNWLETVKFKHAAQQIVFQEYVDTVKYCGKRVESVTQQIEICSRESACWPVIESLMALKGIDLITAATIMAEIGDLTRFDSAPKLMSYLGLVPSEHSSGSSVRRGGITKTGNSHVRRVLVEAAWTYRFPARKTAHTQKRAKLTSDAVQEISWNAQKRLCQRYKELNAKGKIKVQTCTAVARELAGFVWAIGQTVPLKQSANFQ

SEQ ID NO: 304531 - protein, 375 aa, unidentified
MENTITYVAMDTHKKEHKVALHYPGNEQIVQFVAKNTARDIKKMVNKVKKQAPADVEFCYEAGVCGFTLKRRIEALDCKCTVIAPSLTPIKPGDHIKTDRRDARKLLAMFKAGLLTEVHAPDTKQEAARELTRCRQTAHENLKRIRHQILKFLTRHGYVYRDGNHWTLKHLHWIRGLEFELPSLRDVFDNYFTEMQHCLQRLDSLDKDVKKLAESKPYKKIVGLVRCFHGIDTLTAITVITEIFEFGRFSTPGQLMSYLGLTCCEDSSGQKERKGSITKAGNKRVRRLLIEASWHYRHPYITRSKTLGERRKDQPQWAIDIADKAGQRLRKRYWYLINHGKAPCVATVAIARELAGFIWSLFNEYQIRNQGKAVC

SEQ ID NO: 304532 - protein, 420 aa, unidentified
MKRERNTRVPEEGKRYIGLDVHKHYITVGGLNAQQEIVLRPRDVEMERFKTWAGSNFRKSDEVVLEASTNTWDVYDTVAPLVKRVVVAHAAEVKQIANSRVKTDNQDVIRLVRLLIADIVPEVWVPPVEVRELRAMISYRWRLVKMSTAIQNRMHSLLHRHNIQAPQGKIDTGENREWWEQVKLSELENLRLKQEIKTLRLIRENIVEVEKELGRLSNSERWGNEAVYLMQLPGVGIIVTMTILSAIGDIQRFESPKKLVGYAGLGAGVHDSGQKHQDKGITKFGRKELRWALVEASWQAVRSNPSWRAEYDRLCKRKHQNQAIVAIAHKLLVTIWYLLNRQEPYKKSNEEDLAYKMLTWAWHIDKSALSGMTNQQFAKYGLLRLGKGAELTRIVRSGKPRRIATKEEVLALKPELHLKQ

SEQ ID NO: 304533 - protein, 344 aa, unidentified
MDYFAGLDVSVKDTNVCIVDDTGKIIREVKVASEPDALLQVLRNATYRFKRIGLEAGPLSQWLFSALGEANLPVICVETRHMRAVLQAQINKTDRNDARGIAQMMRVGLYRPVHVKTLRSQKLRMLLTHRKLLQSKAIAIENDLRGTLRNFGLKVGMAGATKFEGRIKELIENLPDLAVLVEPLLVVRRVLREQIGVLHRRLLAVVRDDDVCRRLMTTPGVGPVVALTYRATVDVPARFRKSKSVGAVFGLTCSKYQSGEIDRSGRISRCGDEMMRVMLYEAAQSMLRSKKWSWLKAWAMQIARRRGMKKAIVALARRLAVILHRIWVDGTEFRWTRDQAAVAA

SEQ ID NO: 304534 - protein, 366 aa, unidentified
MRSKKLYYIGLDVHKDSIWMAVMVDEQDLPIESKQLPNNYLKVVKAIAPYQEKGKVQVAYEAGCLGYGLQRHLSEFGFDCRVIPPTKVVRPGKDKRVKNDKRDAALIANMLKRREGESINIPTRADEAGRDLLRCRSDFKDDLKRAKQRVLSFLLRHEKKYESNRHWTLKHRKWMAGLQFDLAVDKMTYEYYLHYIENMEERIARVDEEIRKEAENERNAEKTRVLRAFRGIDYITALSFICEVGDFRRFATAESFMSYLGLVPSEYSSGKKIKRGPITKTGNNQLRKLLVESAWHYTKPVKESKRLAARRVGTSEQVITYADKAMSRLHKKYYKMLARGKEKNIAVTGVARELAGFIWGVMKMAA

SEQ ID NO: 304535 - protein, 456 aa, unidentified
MQHFYLGGDVSKGYADFVILDSQKRRIEENFQLDDTCSGHSSLYGRLFNFFKGNPDAELCAAVESTGGYENNWYSALIKFQSSLNIKTARLNPEGVFNNSKADLKRIITDKISAQSVAEYLIAHPEKVIYQQQDYWASLRKQWSFVRMLTKQSTQLLNQLESLVYSANPEILKYCQEGTPGWVLQLLKQYPTAAQLAKAKVSVVARIPYISKIRANDLIVNAKSSVASASDAVTGQLISATVGQILQLKGTIKSQTEIMAKDCMLPEVELLKTFSGIGNYSAIGLMLEIQTVERFATVKKLASFFGLHPVFKISGDGASGFRMSKKGRKEPRAILYMVTMSAITTNPLIRDLYQKHVANGMNKMAAIGLCMHKILRIIYGMLKSNTPFNPEIDLQNRQKNIEKPLKEKKDKSRRYQKFDTNAPISRRQKKKREERKLSQNAVSVECGISASVPVSS

SEQ ID NO: 304536 - protein, 421 aa, unidentified
MCRRGVHGPSSVAWTNGRRSVGTQLDKAWVGVDVGKTHHWVCVVDAEGKTLLSAKVANDEAEIVALLASTGSLAGQLIWAVDIIGAPSALLLALLAQAGQSVRYASGRVVAAMSAAYAGEGKTDAKDAYVIAETARLRRDLSVIDTGTDLVRHLAVLTGHRADLVADRVRMINRLRDLMTIVFPNLERAFEYSSHKGALVLLTGYATPDRIRHLGQTRLTAWLRSRNVRGSANVAARAVAAAKAQTVVLPGQDLTAGIITELANGILTLDERLKSLDTQIAATFAEHPQAAIIESMPGFGPFLGASLLVGANDLRAFPSAGHLAAAAGLVPVPNDSGRRIGNLHRPSRYNRQLRHVFYLSAQTSMMRAGPNRDYYLKKRAQGATHSQAVIALARRRIDVLWALLRENRTWTAAPPPLPQAA

SEQ ID NO: 304537 - protein, 346 aa, unidentified
MNSMNYIGLDIHKKSISCCVRQADGTIIQESTITATRHALDEWMRQLPDPWIAGMEATLFTGWIYDHLVLGGAVVKVAHPAMLQAIAVGKKKNDRVDARKIADLLRCDYFPECHMAPREIRDRRRVLRYRNLLVRQAVQMKNKVSGLLMEAGVPYSQQKVHQKKYFAELLQTQKKEMPPSMPELLRLSRSTVEALTGMQRQLIRALESDALLAARVERLASIPGVGRVVALTWALEMGDISRFASVKKAVSYCGLCGAEKSSGGKTERTPISKQRNKHLQTMLIEAAKLAPRWNAELALVYDREKQRGNRNRATLAVARKLVAYLMAVDREERLFDTQVRVAGNAA

SEQ ID NO: 304538 - protein, 337 aa, unidentified
MKKYETFIGIDVSKNKLDVCVKHSSNVEASAHETFDNSLKGIKQMMEFVKQRSKIDTTKWFFCFEHTGIYTMPLCCYLSDHKMNYALVPALQIQRSIGIRRGKTDKADSKTIARYACLHAQELRCFDLPEKCLLKLKLLLAHRERLVRAKKMFKIATVETKLFLEESLITEVNKDTRSLVRTLERKIKLFDKQIMSLIKTDERLNQTYQLATSVPGVGLQTVCYLMVFTRCFTTFENARQLACYSGVAPFEYQSGTSIKGRSRVSHLANKKLKTLLSMGALSAVKYDQELKQYYERKLRDGKNPMSVLIAVRNKMISRVFATIKRQTPYVPLMKFAA

SEQ ID NO: 304539 - protein, 442 aa, unidentified
MKVLYERVAGIDVHKDMIKVAIRSPGEKPWTRTTEIFEYRTFYGVLQQMAADLRKRGVTHVVTEASGVYTEPVYYALCEQDFEQVAVINPAHAKALKGHKTDAKDCARLAELFECGLLRGSYIPPAELKEVRDLTRYRMKTVQARTSEIQRLGKALESAGIKLGSVASSITGASATAMIEALIDGERRGGVLADLAKGRMRAAGKLADLSMALSGRFTGHHALLCRLHQDRIAGFDAAVAGLDERIAGKVTRWQREADLLTSVPGFGDVVAQAWLGEIGPAPHLHFATCEKLASWVTLCPGNNISARKRKHGRTGDAGTYIKPMLVQAAWSAIRVRGRLQARYSRLVRRFGGDKNPAAKKKAITAIAHTLLKIAYQVLKSGTPYQDLGADFYTRRESPEHKHAWLERQLQRLHPGCTVTITISPPEAALTPSYVGVSLQFRV

SEQ ID NO: 304540 - protein, 451 aa, unidentified
MSKRSERPTGLPVIHERAAGIDVGSRFHVVAVAPDLCEEPVQTFQAFTGDLERMAKWLTSVGIATVAMESTGVYWMPVYEVLESHGIDVIVANARDARSVPGRKSDVNDAQWLQRLHACGLLRASFRPGQDIAALRVYLRLRERLTDFAASHIMHMQKAMTLMNLQLQHVVSDVTGATGMKIIRAIVGGERDPAILAAMRDIRCKADNEKVCAALVGNYRSEHVFALTQALKLYDFYQARIAECDSEVERVLAMLSADKSAPAEPLKKPRHRTIQPNAMSFDTRPVLYQITGVDLTQIHGVGPYLALRMVAECGTDLSRWPTAKHFTSWLTLSPGCKISGGKVLSSRTRKTSNRLSAHLRLAAVTIGRTSTALGAFYRRLSARVGKAKAVTATARKIAVLLYNAMRFGMNYQDPGADSYERKYRERVVKQLHRRAAEFGFTLQQAPAMGVS

SEQ ID NO: 304541 - protein, 339 aa, unidentified
MMKLTADQLNTATFVGIDSHPDSHTALAMNRFKEPKGNVTFPNTHAGISQFQTWLQTLGTQKDRVVIGVEGGGNARNALLASILPIYDLLFEVNPLYTKHKRSFGTRGDKTDLDDAKLIAGVLTTELEELPRIRPGQLTSGMLRLKKAVWFYEEVTVQGARLQNQLHKLNREHKLTQDKEEKQLLITIIKARKKEHSIAEKTKANMERELKTLLCGNGLNLTRIRGIGVITVARIIAHTGGIERFSNRDAYVRYTGIAPLARSSGKSSFFVKANRGNRKLNSVFYFATLCRIMHDPCVKELYRKKIASGKTKKEAITYLMRKTAILAYGMLKSGEEYRQ

SEQ ID NO: 304542 - protein, 409 aa, unidentified
MQYFVGLDWAAREHAVCVVDGRGAVVAQFTVAHTVTGMTDLAARLAKVAPAAELRIAIERPTGLVVDTLVEGKFAVVPIHPNVVKAARPRYSAAQGKTDLGDAYLLADLLRTDGHRFRTLAPLSDETKALRGLVRVRDDLVGQRVATANQLRCLLEQFWPGAAEIFADVDSPIALEFLDRYPTPQSAASLGEKRMAAFMARHSYSGRRTAAELVQRLRSAVTSVAGELEAEAKGECVRALVAVLRPLVAQLATLSAAIEHAVDAHPDGKIVTPLFRSGRICAAQLLAEIGDDRGRFVSADHLAAEGGAAPVTRESGKHRAVTFRWACNMHLRNALNTLADTTRHTNPWARNVYQRARDRGHEHPHAIRILARAWCRVIWTCWQQRTPYDPTKHRAARPFTLRLVDQEAA

SEQ ID NO: 304543 - protein, 382 aa, unidentified
MQASRKSTPTADHCGTIFVAIELSQKTWLITVHSPDRDQFSRHRLEGGDHAGLLALIEKVRARATQQLGSTPRVVSCYEAGYDGFWLHRLLEAAGISSLVFDAASIAVEQRSRRAKTDRIDGELLLRTLMAHLRGEPRVVRIVRVPSVEEEDARRASRERDRLITEQTAHTNRIKSLLRLLGMAVGNPRRRDWLAWLKRQRDWQGRPLPPHLLAEAQREHARLMLVREQLAALEQVQAAQASAVPAPMAERRDLLQRLKALGPAFSATLVNELFYKDFRNRREVASYCGLAPSPWQSGGIDREQGISKAGNRRARHKAIELAWLWLRHQPNSALSHWFRTRTANAGRRAKRIAIVALARKLIVALWRYLTAGLVPEGATMKA

SEQ ID NO: 304544 - protein, 304 aa, unidentified
MIVAEEGCSLVPNDGAGGGDLVGRLSGSSLGAVGIEASGGYERGVVRVLLAAGMPVRQVNPFKLRQFARASGVLAKNDPLDARMIASFVTIMPTRPAQRQTPAAERLAEMLAIRRQLSAEKVAAENASRLLEDAMLQRLSCRRIVRLAADIDLLDKRMVEIVATDDALVHRYRLLTSMPGVGAVLACTLIALLPELGRMSRKQVAALVGVAPYAFESGTLKGRRCIWGGRAHIRQVLYMAAMSASNWNPVLKAFHDRLTAAGKLPKVVIVAVMRKMITMLNAMVRDDVVWADRPSGRNSVTTAR

SEQ ID NO: 304545 - protein, 348 aa, unidentified
MLIIGCDYHPGFQQIAFADTETGECGERRLTHREEAEQFYGGLQQRSVRVGMEASGHARWFERLLRDLKFELWIGDAAEIRTKRVRKQKTDRQDAQLLLRLMVEDRFPRIWVADAENRDLRQLLWHRHRLVQMRTRVMNQLHVVALNEGLRRKKALWRPAGRSELESLVLARWASRRRQDLLDVLDQLTPKIQELTRALEEEVEKRPVTRRLATHPGVGPLTALAFELVIGTPERFQCGKQIASYVGLVPSEESSGDRRRLGHISKQGNSLLRFLLVEAAQVTVRSHPQWRSKFFHLALRRGRKIAKVAMARKLAVHLYWMWRQGKDYGQLEKLGSHAGEPGNRHGVQ

SEQ ID NO: 304546 - protein, 427 aa, unidentified
MSERDYSRQVAKRQRISKATLIVGVDIGKAFNALGFMDKDGNVLGSCAKLYNSREGFEKFSEMIEGLKAKHHLRDVIIGMEPTGHYWRKLAYFAKDHGYDVRFVRTTALKHHREIDESSSAKSDRRDALTICNITREGKYIDTVIEDGPFRQLRTLSKARERLLRYSVSAKNSLHAALDDYFPELHEIFWAMGSRSLWTILEQCPFPRDVVLTKVSTLGELIARSSRKKAGSAEKAKALYEAAQNSIGVKQIGSADRYRIRMCLEEVKRTVLTLKDMDHQLKCMVKEIPSATYLMSIPGIGPLSAAVFLGELGDPANFHNARQIVKYTGYDPQESDSGSRTGRRFISKKGRWLLRKYLFFMSMRAVVLSKYFQEYYLRKLEANNRVGQKPRRKEMLCAVAIKLIKVIFALLRDKREFRDLEPAAAAA

SEQ ID NO: 304547 - protein, 322 aa, unidentified
MSAPILGIDIAKQRVEVALLVEGKVKNKSFKNAPDGFEALALWLRKLGIQQVSACLEATGNYGEDLAIYLHEAGHTVSIVNPARIKGFAQSELTRTKTDKVDAGIIARFCLAMKPESWIPPSPEIRSLRALVRRADSLIDMRSQEKNRLGTAHESVTPLIKEHIDYLDKEIGKVRDQIADLIDRDPNLRQKKDLLASIPGIGMATIAALLADLDNLGKFTHVRQLVAFIGLAPRETLSGSSIKGKPRLCKTGNARLRKALYMPALVSIRYNPIMIAFYNRLKEKGKNGKVIVCAIMRKLVHVIFGILKSGKKYDPNYKPIYT

SEQ ID NO: 304548 - protein, 368 aa, unidentified
MEQVITSFVGLDVHKDSIAVAVAHTGREAPRFVGTTVAVSAKLLKVLAGVGRPEALQIVYEAGPSGYALARELRSRGYRCEVIAACKILRPATDRVKTDRRDALTLARLARSGDLVPVLIPDERDEAIRDLSRAREDALSARQKARQQLKALLLRHGHRYTGRTFWTARHERTLADIRFVHSAQNITFAEYRQAVRESQDRLDRITQTLRDECEHWRMRSVVAALSTLRGIDFIAAVTLVAEIGDFRRFAHPRDLMGFLGLVPSEFSTGDSRHRGAITKTGNGHARRVLVEAAWNYRFAARISRRIQVRQEGQPKSVREIAWRAQLRLAQRYRRLRSRNLHLNKICVAIARELAGFVWAIAGQITVSV

SEQ ID NO: 304549 - protein, 345 aa, unidentified
MPIVGGLDIHRKQITFDYLDTVTGQVQRGQISPADRAHLRAWLARFADCEDVMFAVEGCTGWRYVAEELAAAGVTAHLAEPADTAATRGRKRHAKTDKTDCRHLRMLLAEGRLPECWIPPGHILEGRALLETYHDLRAEHTAWVQRIHAVLFHHGAPALGEGTLRTEQGLAALRAAAADCLSPAGQLQVATALEVIEALEARMHAVRHQLLDAARQLTGAKVLAARLYGVGPVTALALTCWLAGAGRFSSSRQAVRFAGLDVTVSSSDRKGPPGRLSRQGPPVLRWAVYEAGKTHARASAPDHGYYAQVKDRKNSKRAALSEARKILRQACHILAELGDDALATA

SEQ ID NO: 304550 - protein, 326 aa, unidentified
MTASLSNYQPTRGVNVGIDVAKDTLEIAVRPDNEEWSTNNRIEDFPALIEKLQQIAPERIILEATGGWEAPLANHLAAAGLPVIVINPRQARDFAKATGKLTKTDKVDARGLAHFGEAVKPQVRPLPDEQTQALAALLTRRRQLVEMLAAEKNRLVTVQHRPALKRDVEDHIKWLEKRIGQLDDDLRGQLEKSTVWRANDQLLQSVPGVGEVTSRTLLSQLPELGALSDKEIAALVGVAPHACDSGKRRGQAHISGGRANVRSVLYMAALTAARCNPIIKAFYQRLLARGKLKKVALTACMRKLLTILNAILRTRRPWQDRWAPEA

SEQ ID NO: 304551 - protein, 458 aa, unidentified
MTESSDYESVQVFIGVDVGKDTHHAVAINRSGKRLFDKALPNDENKLRSLISDLKQHGQILLVVDQPATIGALPVAVARSEGVLVGYLPGLAMRRIADLHAGKAKTDARDAAIIAEAARTLPHALRTLKLADEQIAELSMLCGFDDDLAAQTTQASNRIRGLLPQIHPALERVLGPRLEHPAVLDLLQRYPSPEKLASLGEKKLAAQLCKLAPRLGKRLAADIAQALAEQTVVVPGTNAAAVVLPRLALQLITLRKQRDEVALEVEQRVLAHPLYPVLTSMPGVGVRTAARLLTEVACRAFASAAHLAAYAGLAPVTRRSGSSIRGEHPSRRGNKALKRALFLSAFAALRDPLSRACYTRKMSQGKRHNQALIALARRRCDVLFAMMRDGTFYTRRGHNMLDNLIGAPPSIYTYLFALFSHWRSHAVDPVHPLLPAGRTCPRGIHTRRYNHNDNGLND

SEQ ID NO: 304552 - protein, 408 aa, unidentified
MNAVGIDVSKGKSMVAALRPMGEVALLPQEFLHTEVGLEQMAYTIIALGEDTRVVMEATGRYHEPVAAALHEYGIYVCVLNPLFIKQSGGGSIRKVKTDKADAMKIAKYGLDNWVDLREYTPMDTVRQQLKLCSRQYNLYMKTVVSLQNNLISLTDKTFPGVNELFSSPERADGHQKWVDFVMTFWHCDCICRTSEKAFTERYQKWCKRKGYHFSPEKALDIYAGSCGHFTTLPKNDNTKLLITTAAQQLLAGKMTLAALRTEMTHLAMQLPEYDTVCAMYGVGKTTAAQLMAEIGDVRRFPRRSSIVGFAGVDPAVDQSGKHEAQSTPTTKRGSPHLRKTLYQIVCTYLRKAPADEPVYQFLDKKRAEGKPYFVYMTAAQNKFLRIYYARVKECLEAFDAQQDTAQN

SEQ ID NO: 304553 - protein, 422 aa, unidentified
MLGVGIDWAESFHDVALGRPGEGVIDQFRIRHGPAGVDRLVARCLELEPDPAEVRVVLETRHGLLVEALVDAGFTVLPVNPDLVARRRGPAKKKDDAEDARICCLLALDQYTELRKLIPHGEIGTELRAIARDDERAARDERRIGNRLRADLLAVFPAAIDIAAGDLGSVVFLKLLERWPTAAELAAASRQDVESFARSARHGWPGQLADRVAAAMAAPRLPVRPELARAKAGTIRLAAAQLLLLRTQRKAWERRMGELLLGAPRYGRAKTPKDPDPGKALPGGEIYLSMPGLGDRLAARVAGEIGEHPEQFTTPNALQCYAGRAPVTRRSGRSEFTIARRLAYNRHLGEAVQQWAFCSLQTSAWAREFYDTKIAAGHNHHAALRALANRWLEVLWHCLRLNTPYNETIHAANRARALKPAA

SEQ ID NO: 304554 - protein, 399 aa, unidentified
MRIIGMDIHRSFAQVAIFAEGQIQQELRVELTNERFLTFARTLEKADVVVIEATGNSAAVEKLLRPFVTKVAIANPRLVRAIAFARVKTDKIDAGILARLYASGFLPEVWAPDDDTLHRRRLISERMAVLDQMVRLKSRVHAILHGNLLPKYDGDLFGKSGREWLAELPVPPDERRILERLLIDLERVVGQLRELDINLARQALDDPRARRLMTIPGISTIVATTVLASIGDIARFPTAEKLACYFGLTPTTRQSGDHPPRHGRISKQGNASARKMLVEAAWSAKKAPGPLRAFFTRVQKKAGAPAAAVATARKLAILIWHLLSEGTEYLFARPAFTAMKLRRAALKAGAPREYGHAGTAHDYWIKEIRQREAEYVEQAERVYERMVEAWKTAGPVGTG

SEQ ID NO: 304555 - protein, 336 aa, unidentified
MVLIAVDPHKASYTARAVDGRGGVLGGTRVTAKEREALLRWAEQWPQRRWAIEGARGLGQPLAQWLVGRGEAVMDVPARLVRRVRELGGSDKSDAKDARAIAEAALRAEELQRVEAEDESTVLRLLTDRRDDLAGERTRTANRLHRLLRELAPGGAPRRLSARRAAALLCEVQARSAADRERLRQAEELLAELRRLDGQLRESLQRITVAVRARGTRLQGIPGVGPVVAAKLLGRTGRVERFASEAHFASYSGTAPLEASSGEVVRHRLSRRGDRQLNAALHIVAVTQLRMRASRGYVYYWRRRAEGKSAREALRCLKRQLARVVYRCLQADAAMR

SEQ ID NO: 304556 - protein, 343 aa, unidentified
MDHFAGLDVSVKETSVCIVDDTGRIVREVKVASEPEALLRVLGNSIYHFKRIGLEAGPLSQWLYSALAEAGLPVICVETRHMRAVLQAQINKTDRNDARGIAKMMRAGLYRPVHVKTLRSQKLRMLLTHRKLLQSKAIAIDNDLRGTLRNFGLKVGVVGTVKFEARIKELVENLPDLTELVEPLLVVRRVLREQIAILHRRLLAIVRDDEVCRRLMTVPGVGPVVALTYRATVDVPARFRNSKAVGAVFGLTPSKYQSGEINRTGGISRCGDEMMRVMLYEAAQIMLTRTNKWSWLKAWAMKIARHRGVKKAIVALARRLAVIMHRIWVDGTEFQWTRDVAAA

SEQ ID NO: 304557 - protein, 420 aa, unidentified
MKVVYQTCCGVDVHKSFLVATIIKTTSGVEPSYQKKRFSTFNNSILQFKEWLVKNKCRDVCMESTGKYWIPVFNLLEDEMNVTIANPKWVKAVKGNKDDTKDSKWIGDLFRLGLVPGSYIPCKPIRILREFTRYRYKLTSCRTSEKNRYQNALTVCNVALDSVVSDIFGKSATSVIDYLIEQPDNSINHEEIASRLLRSLKKKSDSVIESIEGYQMTDSQKYRMRLIRAHLDYITSTINDIDTMLDSLIAPYENAVQLLCTIPGVDRNSAITVISEIGTDMTPFSNSKRLCCWAGLTPGNNESAGKKKSVRITRAGVYLKPALVQVAHAAVKSDKSPYYKQKYERIMKRRGKKRAIIAIARMILIAIYQMLSTGEAWNPTDLFKIDMPEPMKEKQKEKAIKQAMKLLIREGKISESQLAS

SEQ ID NO: 304558 - protein, 346 aa, unidentified
MTMLEATRAVVGGIDTHGEAHVAAALDEVGGLLGTESFGANGPGYEDLVRWLEGFGTVSKVGVEGTGSYGAGISRFLTRSGIEVVEVDRPNRQTRRRAGKSDPLDALAAARAALSGEASGRAKSRDGWVEALRVLLVAKRSARTARVKALTQMRQVVYSAPEELRAKLRGLPISTFVPKCQGLRPSRSVDPVGAATKASLSSLAHRVSDLEAELEELDALITPLVKTNATTLLAIRGVGIDTAASLLVAAGDNPERLRSEAAWAHMCGVSPLEASSGKVTRHRFNPGGNRQANSALWHIVITRLACDPTTQAYMERRMKEGRSKREVIRVLKRYVAREVFHALPRT

SEQ ID NO: 304559 - protein, 350 aa, unidentified
MEKIYIGVDFHARQQTICYLTTDSGEILLHQLKHQDKAAVRAFYAQFTGHVIVGLEASGYSPWFERMLEELGCEVWLGHATEIRRRARWRHKNDRRDAELILELMLHNEFPRLYLPPLQSREVLRMLRYRQKLIKMRTMGKNSLQALALQSGLAKGPHLFTKAGLQELRSATMSPAMQWQREQWLQLLEPLNERLLETMLWLKQQSQADQRISRLRTHPGVGLLTALCLVHSLAPVSRFANTRKVTAYVGLDPLERSSAERQRFLGISKGGSRVLRFLLVEAAHTAIRKDAALSGFYQRLAERHGHPKAKVAVSRKLLIRAYIMLRDEIDYAEFQRRAVAARPAPPAHGH

SEQ ID NO: 304560 - protein, 411 aa, unidentified
MDDTYNVAGIDVHKRMVAVVITNARAPELQFDCRRFGTTVGELQQVAAWLREHGVQELAMESTAQYWKPVWVALERQCRLHLAQARSNRGPRGRKTDFRDAKRVVSRLLSGDLVLSYVPDAEQRTWRMLTRTKYQLTRDRVRLQGQLESLLEESQIKLSSLISDLLGASGRRILRALADGETDPTRVAALGDKRLRASQAELTDALSGQVSPRHRQVLALYLARLELIEAQVAELEQLIAEAMTVHHAAIARLAEVPGLGVDSAQQIIAEIGPEAAAFPSAAQLASWVGVCPGRHESAGESNSNRSAKGNRAMRRLLDQLAHAAVRKEGSHLQLVFRRLSTRMGYNKAIWAIAHRLCRLIWKVLHERARYVEYGLAPTPLMVKRRRQRLVTQLKRMGYQVQLTPLPCTPTG

SEQ ID NO: 304561 - protein, 421 aa, unidentified
MKGVDTIRRKQFCQIKSEIRGSDQYLVVGIDVAKDKHHAFMGSATGKSLLRKLVFENNLEGFRKLQERSEAIRIQNALSKVVLGMEPTGNYHKPLGAYLIGSGHHLVMVTGKAVKNNRELLDGRWDKNDIKDPANVADLICQGKCLYYDYPSASIDQLRQLLSLRRRLKKEEHSLRMRIRNNLLAQYFPELDRFYKACETESLAIVRWFLDPDMIAAMPFDEFFSLVTRTKRGIAQKQRLEKIHRIAAESVGCPTGPAVEFEAQLLVVKLEEVRQQLKKVADLMEDFCLEFSEHSYLLTIPGFGPYIAARVLASISNPWRFDSSNQLLKIAGYDLGAQRSGKRSDDAVPVISKRGNSELRYALYQAAHVASTRNSDFIRYFTRMLRGRERERGIKTKMKVKLVRRRRTENSLDFNEETRGV

SEQ ID NO: 304562 - protein, 278 aa, unidentified
MQYAEVKLGIDISKASFDGYLINEGQGKHKVFSNDPNGFEALKSWLNKVGVEQVHACMEATGRYGEALAEYLVCHGHQVSIVNAYLIKQYREGHLHLNKTDRGDAQLIAEYCLREEANLRLWAPLDEKQKHLRALVRRLDELKEERTREANRLEAIIDDAFVDQNIKAHLDYLNVQIRLIQDEMDAFIDQDPDLRAKQKLLKSIPGVGEQSAQRFMAEIGDTSQYEESGQVVAHFGLNPRIFQSGTSVRKQSRISKQGQSQMRASLYMPAVMAPVTIQ

SEQ ID NO: 304563 - protein, 396 aa, unidentified
MRHYVGLDVGKGAHWACVLGTEGRVLLSRRVEATEEALEAFCSEIAQLGNADERVFGIDLTGGPAALLEAVLIGRNEEVRYVPGTVVNKAREAYAGGEQKSDKRDAFVIADHLRLRWEPFSEVRSREEDVAELRALVAHRRDLLVQDQTRRVTRLRELLVSVFPGLEATLDLTKKGPLCAVSRVARPAAVRRLGEARLARWLEARGVYGAKKLASRVVAAAKAQRHELPAAEAKAVLVAEIASEVLRTKERIDALEARLAELVEAHPEGKLVMSLPGMGAIMTAEFLAEAGDLSRFGSADRFAAAAGIAPVLRASGSVSYRRRAKRGNRVLKRVFYQSAHCAVLCHERSRTYYRRKRAEGKGHTQAVIALARRRVNVLWAMLRDGTFYEDRASLAA

SEQ ID NO: 304564 - protein, 425 aa, unidentified
MNCTQNHKINQVTEKTLVVGMDIAKRKHYACFVDDRGRILQKAFPVAQSNQGFEEFYQRILSAMKEFRKTEVIIGIEPTGHYWLNLAYFLDERGIPLVMTNPMHVKRSKELDDNLPTKHDAKDALVIARLVKDGRFSYPRILKGMEAELRTGATFRSKLVEEQGAVRNQMIRWLDRYFPEFTQVFPSFGKMALAALEQTPFPSDLAGKEIEEVLTLYRQSEGLQSPQKPKAKKLMELAQHSIGVTEGQQMARIEIATLVRRYRQLEEEIEALTHQLTELVQTSVEYEWLQTVPGLGDATIVELLSEIGSFSHYQDPRQLLKLAGLTLRENSSGQHKGQKRISKRGRRRLRALLFRVMMPMIRHNEAFRQLHEYYTNRPNNPLRKKQSIVVLCGKLLKVLHAISTKHVAFDAKRMIEDIPKLEKAA

SEQ ID NO: 304565 - protein, 430 aa, unidentified
MKSNTQNAKIEAITEKTLVLGIDVGSETHYARAFDYRGIEYSKKPFKFSNTEAGFVTFKEWILDIKERHEKDKVVLGMEPTGHYWFNLGRFLQDNEMKPVLVNPHHVKKSKELDDNNPTKNDRKDPKVIAGLVREGRYMIPYLPDGVYADLRTASNIRFQLQAELTRIQNRISRWFNIYFPEYKTVYGKPDAKSGILILKEAPLPEDILTLGIDGVNQIWRDAKLRAVGKARAKTLIEAAEHSVGSKEGAVSARMEIRMLLEDYESRNIRLQEVMGLIEGLVNQIPMAEKLLEIKGVGIKTVSGFLAEVGDIRRFNDPKELQKLAGLALVENSSGKHKGKTTISRRGRKRLRYLLFEVAMSLVAKNPEFRELHNYYTTRRLNPLKKMQSLMAIAAKLLRVFYAILTKGVGYDPKKMVNDIRRPAAYAQAA

SEQ ID NO: 304566 - protein, 369 aa, unidentified
MPHVTSIGLDVHARSVAAAAFNPFTGEVVHRDFGTDAAEIAEWALGFEEPRACYESGPTGFHMARELRALGLDCAVAAVSKMQRPAADARRKNDRRDAEFIARMLATHNIVEVPLPDAAVEAARDLDRALDDATAEYRRARQRLNMFLIRLGHVWDERNADGTRKGSWTRAHWRWISGIRLEGPQRDVLEYYVTAARCAESDRRQLEKKALALARTDRWRPAVEALSCIKGIDTLTAFRLAAEAGSFTRFRTAPAFASWCGLVPSERSSGETERRGGITKTGNRLARTALVESAWHYLTCTPRPKPPAPGADVPAAIRARADACTARLCRRREALAAAGKSSCKANAAVARELACWVWEIGRRAEGTLS

SEQ ID NO: 304567 - protein, 424 aa, unidentified
MKNSVARRMKQVPEGYLIVGVDPHKKRHAAVAITQDFTLRDRFKFDNTREGLETMINRARLKMTDVSCRGIMFAIETGGHYWRNIAYFLDERGIPFRFINQYTLKRRREGKDLNRRKNDYRDSEVAAQLLCTGEYTESRIPQGVYAELRTAYNTYRRLVKERTRVTNLIKSLLDGLFPEFVKVCKDPCGLTAATVLSTCAIPGVIAAMSEEEFVALIKATNRPQLKRNKLKAIHNVAKTSIGIKAGAKSLAFEISFLIEKIELIKRQVAVVERRLIGLVDEAEEGKYLLSIRGLNYISVGGLLAELGCFKAYRSAKQMIKMAGSNPTESESGGKKKSRTPMSKQGRPVLRYCAWTAVVPMMRFNDDFRTWAKRLRERPVHANPLGGREILGAALNRLLRLAFALVKNGAYYSLPVAVPVIRKEY

SEQ ID NO: 304568 - protein, 410 aa, unidentified
MDAIRECCAGLDVHNKTVVACILNGPLDHTPQKQISTFGTTTRELLRLQDWLIANRCQEVAMESTGVLWKPVWNVLESTCDIVLANARTIKNIPGRKTDMNDAFWIAKLHRCGLVQASVVLPEQLRDLRDWTRYRVKMVQAITAEKNRIHKLLQDGNIKLSSFITDVFGVSGRLLLEQLMDGEVLDEEQLRGLVKTKLKKKVPELMEALNGRVRRHHREMMRLHWDHLLYLEKQIEQVEARIECKLAPYAEELEWLDSIPGIERNTAAAIFAELGPEVHKRFETEEQLTSWAGVSPGNKESAGRKSKTKCLPGNKFLKRALTQAAWANEKSSNRIGQHFRRVRKRRGDKKACVATAHLLVKIIYSLMKNRSGYEEKDVPESTSKEKALAYYLKQIEKLGLTVQVTSPETS

SEQ ID NO: 304569 - protein, 341 aa, unidentified
MKPEMSVLGIDIAQRVFHAVGMDERGRIVWRKRLSRHDLMPLLAKLPPVRIGMEACGGAHDGARRFREHGHEVKRMAPQFVKPYGKANKNDSRDAEASAEAVTRPTRRFVPIKDVDQQDIQALHRVRERLMGERTALVHAVHGLLHEDGMVMPKGGSKCRQAVVGKRESEKAKLTPLSQEMLWQVVEEVAALEAQLASYQEKLATLAQTHPACQRLMTIPGIGPCTATALVAAVSDASAFKNGRQCAAWLGLVPRQHATGGKERWLGISTRGDSSLRQLLIPGARATLRWVGRKTDRRSHWMRQLVERRGTNRTAVAVANKNARIVWARLTSHQDYQPATS

SEQ ID NO: 304570 - protein, 352 aa, unidentified
MKPPEYIGMDVHKATTVVAVLNSVGKVVSEAIVETKGSTILDFLKSRRGTLHVTFEEGTQAAWLYDLILPCVASVTVCDPRKIARQGNKADKVDARLLAELLRTGGLKPVYHGEKSTRAVKELALSYLSVVQDGTRIKNRLKALFRGRGIECSGGGVYSPDERKDWLAKLDSPAVRARAARQWEELDLVERLSEEAARDLVAEARKHADTRILKSVPGFGPIRAAVTLGVAGTPHRFRTRKQFWGYCGLAVVTSTSAEYEIVNGRVCKLKKRPLVRGLNYNYNRAMKAVFKGAAKTVADGVWKSRFEAMVAGGKSESLARLTLARKVASITLAVWKKGERYDHRKLKMMHAA

SEQ ID NO: 304571 - protein, 417 aa, unidentified
MHYVGIDWADQAHQVCFMTKDGRILSESTITHDGRGFDRLRTSLDELGPVEINLERSDGLLVDWLITQGWAIFVTPPRIFASHRPRRSKDDRGDARLLADLRRRNDPDSRPLVVHSETVEELRGLLRAHNQLHRHQVKIGNQLHQTLKDYYLGAVRAFSRINGPVTLAFLTAYPTPEAAQAASYEELADFLRRHGYTCMQHFDRLYQRLQAPAPQARVAAGHSAHMLVLVELLKTLHQQLSQLTRQIQHTFAAHPDAKWWQSFPGAGPLTAPRLLAAIGDNPAAFPSYQMLQATAGTVPITRQSGQKRVVKFRWACSHPLRKAVTDLARNSIRESGWARSYFYNQRALGHSRARAYRALANRWLRIIWTVRQRGEVYDEARHIANRSRQGRSPTQSPALIPANDEPALVDTCQVSIR

SEQ ID NO: 304572 - protein, 268 aa, unidentified
MSNHLPQTIGIDISKAALDCHVHPVGIDRQFPNTANGHKALMAWARQWEIERIAYEATGIYHRALEVALADLPCIKLNPERARRFAQATGTLAKTDRIDAKLLARMAVTLQPPVRPARSTQQNQLAELVNARDGLVRDRTALKNREKNLTVALLKRQCSQRLEQIARHIAALDAEIAAVIAADEKLARRHNIITSMAGLGTLTANQIIATMPELGSLDNKQAASLAGLAPVARQSGQWKGKSFIRGGRQTSARPSTCRLWSLPASILT

SEQ ID NO: 304573 - protein, 407 aa, unidentified
MISVGIDVSKEKFTVCALEQGSKIIWKPIDVYLNKKEVEELIEKLEKLKEEIKITMEATGKYHLPILYELKERGYFVSVINPLKMKQYCRALNFRKAKNDKIDAKQIAEYGLMYWKELEDYKVDEENYRVLKELNRNYQHYMDLRINQMNFIDQTIHQTFPGIKNLIPHGSGDFSKDKLLDFLEKWWHKDLVLEKTEEEFVEEYKTWAKEKRYHPNVDKAKAIYSLAEDSISTQPSHNSKIETNIREGINLIKQIHQILNSILSQMVEISEPLEEYKEAKKFSGISDKLAVQIVAEFGDLLKFKNKKCLISFIGIDAPPYESGNFKADQRKISKRGNAILRKVGYQAMKCMMSTKNPENEIYNYMIKKEKEGKAKKVCKFAGLNKFLRIYYARVMISKAEKKELKAA

SEQ ID NO: 304574 - protein, 347 aa, unidentified
MDQIIIGVDTHKSKHIAVAISHQGACLGSMTISTNSQGYRDLEAWASGFGTIKAFGIEGTGSYGAGLSRDLLAMGHMVLDVMRPNRQLRYHHGKSDSLDAESAARSVLNGQATALAETQIGACEMIRHFKIARDSAVKSRSQAMITLKTLIINAPAELRDTLDLIKGPITLIRHIAALRPGKITSPTASAKTAMRAIARRWLVLHEEIQAHGQELERMVREKAPDLMNSHGISTMTAAEMLILVGDNPERIKSEAALAKICGVCPIPASSGKTKRMRLNRGGNRHANAAIYIIAITRMRDHEATKSYVAKRTAQGKSKREIIRCLKRYIVREIYRELCVPNDTKRTH

SEQ ID NO: 304575 - protein, 460 aa, unidentified
MESIIMESKTRTVFTEIRPNVAGIDLACRANHYVCGPRLESGEYEISSFGTTTPELYRMLKWLQDRNVESVAVESTSVYWIPMVDLFESKGLEVVLVDAREVRMVPGRKSDVQDCQWLQKLHSCGLLRGAFRPPEAVAAVRSILREKETQVAMRVQALQQMQKSLDQMNIRVHHAVSDIDGKTGTMIISAIVKGERDPMTLASLRDPRCKKSVKEIAEHLTGTWRDEHLFNLKQAFKTMQFLDERIEEYDSQAALMFKSLAESTDQSDGTPPLPPESNKNLSAKERTDYAEKAHRKQIMKFDLTHISGIGYDTAAIIVSELGVNFDCFPTEDHFASYIGLAPSLGKSAGKNVRQKRYKNTSRAGMALRMAASTLYRSSSELGAFFRNVARRSDRKTAVKATARRMAHMIYRGVKYGKEYIDQGAEAYEARMREKTVNNVKKLIKKFNINMLEIEHALLQS

SEQ ID NO: 304576 - protein, 451 aa, unidentified
MAKKTQRRKSLPTVYPHAAGVDIGSRFHVVAVPGDLAEAPVQTFNSFTGDLHRLADWLIAVGVTTVAMESTGIYWIPLFEILQARDLEVLLVNARQVKQVPGRKTDVNDAQWLQQLHQFGLLRGSFQPAQEVAALRSYLRHRARLLEYAAAHIQHMQKALMQMNLQLHHVLSDITGATGMAILRAIVAGTHDPTELARLRDFRCKASVETVQAALTGNYQPEHLFTLRQALELYDTYQAKMAECDEAIETTLAGIAPAEASSDTLPEARHRTRQSNEPKFDVRTALFRVLGIDLTQVHGFGPNTALRLVGECGTDMSRWPTAKHFTSWLTLCPGNKISGGKVLSSKSRRSSNRAAVVLRLAALNVGKTQTALGAFYRRLAARAGKAKAVTATARKLAVLFYNTLRYGMVYQDQGVAYYEEQHRKRVLKRLRQRAKEMGFQLTMVEAASGVS

SEQ ID NO: 304577 - protein, 464 aa, unidentified
MTASKKLWRNRKERKEWARRLQSEDPGLEVVHPHAAGIDVGNSTHYVAVRPDRDPEPVRRFECFTADLHRLADWLQSCGVKTVAMQSTGVYWIPLYEILEEHGLEVYLVNARHTKNLPGRKSDVQESQWLLKLHTYGLLNNSFQPVSEIRVLRTYWRQRGEHVRGAATCIQRMQKALTQMNLQLANVISDISGLTGQAILRAIVAGERNPLKLAMLSDPRVHASQEEIAKSLEGNWRPELLFVLQQEVDMYDTYQKRIAECDQRLQKHLASLTHPLPLQPPTQKPKTKKPAAKNAPRFDLSSELQRVTGVDLTRIDGIDVMVAQTLLSEVGLDMSRWITESHFASWLGLCPDNRISGDKVLSRGTRRVVNRAATALRQAANTLMRSRSYLGAQYRRLRTKLGAPKAITAMAHRLARLVYRMLKYGQTYVDKGTEYYEERFRQQQIQLLRKRAAKLGLQVAEIHA

SEQ ID NO: 304578 - protein, 435 aa, unidentified
MEEVTDEPLYRDRVCGIDIGKAGMVATIRVPSDKDPSRRAAETRSFGTTKREVLALADWLRSWQVPAVVMEATGDYWKGPSCRLEAEGLECVLADAKQVKNLPGRPKRDPSDSRWLAACFERGAVTSCFVATPEFRIIRLHTRYRRELTEERTREKQRAEKLLESAAIKLSSVVSDLHGVTGRDIMDHLIAGVRDPKALAQLARARARRKISQLEEALEGAEFFTAEHAALLKVMLERIDRVAEEIARLTAVIERLLAPYEEQLAQAESMPGWGRRAAQDAVAETGVGMTRFRTGGHLSSWAGKTPLDNQSGTRKGRSKSKKGNRYLAAITGQTAAAVSKTQTREGARYRRLARRRGKAKAMVAVGNTQLKVYHKLLSNPGMRYQDLGADYYERQRDVRRQISHHIGKLGALGFEVTLARIPEPDPDETGTTQAA

SEQ ID NO: 304579 - protein, 387 aa, unidentified
MSKNKGRVVGLDVHPDNFAGAVVEGTDPASAQVLSTSTRVELEQLEQWALRHTRREDTLVLEASGNAFAVAARLRAIGREVEILESHRAGKVGKVYCANDRVDAVKIARIYLSALSPIVWQPDQKTIERREIFSAYQAVVKESTRAKQQLRSMLNEHCVRLEKGFRLCHPNAIRRLLALREWTPARTMLLQQLHGSLLAARARRTLLRRHMAQEIAAEEALLRLTRLCGINLVTLYGVAAAVGDVRRFSHSKKLVAYLGLNPSVSQSGNFEGSGALKRHGRGALRALLIQSGKKLLEVNNPLQKWGLAIAARRGRNKAAVAVARKLCVALWHVLMGHVIGALERLDTLETKLSKFATEIGPAALRAFGYNNKAEFVERKLYVLRSYP

SEQ ID NO: 304580 - protein, 331 aa, unidentified
MADAKRFVGIDVAKAQLDVAIGPNGESFSVANDETGISELLRRLEPADLVIIEATGGLEVPVASALATAGIAVAVVNPRQVRDFARATGQLAKTDALDAQVLARFGEAVKPQVRALRDAQAQALEALVNRRRQLVEMLTAEKNRRANSPKVIHKGIDEHIRWLEKRLSGLDDELAGLVRETPIWRERDELLRSVPGVGKVLSTTLLAHLPELGALNRKQIAALVGLAPFNRDSGSLRGSRCIWGGRAQVRRVLYMAVVAAVRSNPVIKNFYAQLRARGKYPKSALTACMRKLLVILNAMLHNKTHWHAVALTSSTSTLSPLVGAVSEHGCC

SEQ ID NO: 304581 - protein, 415 aa, unidentified
MDAVYTHCAGLDVHKKTVVACVITPGGSSGWQRETHTFGTMTADLLALSDWLSGHGCTHVAMESTGEYWRPVFNILEGNFEVLLVNAQHIKAVPGRKTDVKDAEWIAQLLQHGLLRASFIPPVAQRDLRDLTRHRSNFIRERATLVNRVQKVLEGANIKLGSVASNVMGVSGRAMLDAIVAGEANPEVLADLAQGRLREKREQLSQALTGRVKPHHRFVLTELLCQIDSLDETIARFDLEIEAYCAPFEMAVVLLDTIPGVGRETAEVMVAEMGADMTHFPSADHLASWAGLVPGNHESAGKRLSVKTRKGNRTLCTALVQAAHGAAHTKNTYLAAQYHRLAARRGNKKAIIAVAHSILVIAYHLIQRQEPYRELGADYFDKRRPEATAKRLVKRLEHLGFDVQLSRPTSIAATA

SEQ ID NO: 304582 - protein, 390 aa, unidentified
MPKPKQRKPNDLSRSLAALDVDHTLIAVVEMSLSSWLVAGIVPGVERQPLKKLKTDACALLELLHRWRAEALRVGHKITRVAVAFEAGRDGFWLARWLKAHGIEAHVIHASSIAVSREHRRAKTDRLDTDLLKRSFLGWLRGERDHCKTVAIPTLEEEDAKRPNRERESLVGEQSRLVNRMKATLVRLGIRGFNPKLKRAARDLEALRTPEGAPIPPNTLAELKRDMERRRFICDQIRKIEQARIERLQRAPNTGPNAMVRLLARVVGIGVETAELLVHEVLLRNMRDRRAVARYAGLTGSPDKSGTLSREKGIARSGNARVRRGMVQLAWRFLLFQKDSALAQWYRHRTENAPRSRKTMIVALARKLLIALWRLVREGVIPEGIIMRSA

SEQ ID NO: 304583 - protein, 365 aa, unidentified
MVRRRSLEVVECGGKEAFHELHVVGIDLGKAVFHLVGLDSTGKVVIRKRCSRAPLLVFTSNLQVQLIGMEACSGAHFLGRALREQGHEVRLMPAQYVKPYVQTNKSDYLDAEAIAEAVQRPRMRFVPIKTEEQLDLQALHRVRERWVMRRTAVVNQIRSLLLERGLTLPKGRSHLDEQLPRILEDAELNLSDSFRVLLAQLKLELEQLAVRIEEMDRVIQKTARENEACQRLTEIPGVGPVTATALIAAVGNGSAFGKGRKLSAWMGIVPGEHSTGGKQKLLGISKRGNKYLRRLFVQGARSVLQQRHRQAPGLSEWLAQLLARMTKMWSSSRWLTSWCACPGRSCARTNAIAHPFLRWQLKIPV

SEQ ID NO: 304584 - protein, 403 aa, unidentified
MNAVGIDVAKGKSVVSILRPFGEVISSPFELCHTSSALDDFIHSLSNLEGEVRIVLEYTGRYHEPIARWLSDADFYVSVVNPKLIKDFGNNSLRKVKSDKKDALKIARYALDNWNDLRQYCFMDKTRDQLKTMNRQFDFYMKHKTALKNNLIALLDQTFPGANTFFTSPVRKDGSQKWVDFVASFWHVDCVRKVSLSVFTERYRKFCVRKGYDFHPDKPAQIFEASKELIALLPKDKMTKNLIMQAIEQLNTLSRTIEQLRLQMDQTAAQLPEYPVVMAMKGVGPSLGPQIMAEIGDVRRFSRRGALTAFAGVDPGVNQSSTYNQKSVRTSKRGSAQLRKSLFQVMDVLVKTSPENDPVYAFLSKKRAEGKPYYVYMTAGANKFLRIYYGRVKEYLASLSEEE

SEQ ID NO: 304585 - protein, 339 aa, unidentified
MTIVMGLDQHRAQITAGWLDTATGEVSRTRVAPAHRQAVRRFLGRFAGQELEVALEATTGWRFVVEELQRVGARVHLAAPAETSALRGNKKRAKSDRADSRHLRELLMVGRLPECWIPPEYLLDLRARVRLRHTLVDQRGEWQQRIHAVLYHHGLPPHRGGLLTAGGRQWLQKAALPAVAREQITVALSMIDALDIQLAPIDKELRAYALRQAGCKALMRHYGIGELTAVTILAELGDASRFSSSREAVRYGGMDITVYQSDQRRAPGHLSRQGPPALRWALYEAAQAASRTSSPDRDYYLQAAQRLGHNRACLAIARKLLKRSYHTLRELGEEALAPA

SEQ ID NO: 304586 - protein, 345 aa, unidentified
MQLHTIGIDLGKTVFHLVGLNLRGEVVVRKKFSRKQLLHFTANLQVGLIGMEACGGAHFLGRALREQGHEIRLMPAQYVKPYVKTNKSDYIDAEAIAEAVGRPKMRFVPIKSDDQLDLQSLHRVRERWVMRRTAVINQIRGLLLERGITLRKGRCHVDEALPGILEDASAKLSGALRVLLAQLKLELDHLQMRIDEADAVIKKTAGENEACRRLVAIPGIGPITATAIIAAIGNGAAFKKGREFSAWLGIVPGEYTTGGKQKLLGISKRGNSYLRRLFVHGARAVLQQSAKQSSGLSSWLAQLTARTHRNVAAVALANKLARMAWAVLAKNEPYRPPMLADVATA

SEQ ID NO: 304587 - protein, 354 aa, unidentified
MNEAKYVGLDVHQSSTVAAVHNERGKRVMESILETQSETIQSFLKGLKGTVHVTFEEGTHAAWLYDVIKPLVSELIVCNPRANKLLAAGNKNDRVDADKLAQLLRGGHLKGVYHGGLSVRALKELVHNYDALVEDTTRVMNRIKAIFRGRAIRCAGRDVYHQQHREEWLEKLMEAAVRRRAEFLYEELESLKVLRREAKKEMLREARRHSAYQLLKQIPVMGPIRVAAVMARIGSPHRFRTKRQLWTYIGLAVTTRSSADYEVERGRVRRRVKSVVTRGLNTNYNHRLKYVFKSAALDGIRREPFANFYQNLIKQGMRPEMARLTLARKIAALTLRIWKKGEQFNELRLKRETA

SEQ ID NO: 304588 - protein, 341 aa, unidentified
MKIRSIGIDLGKTTFHLVALGERGKTVIKKKLSRKQLLSFTANLQPSLIGLEACSGSHFLGRALSQQGHEVRLIPAQFVKPFLKSNKNDYLDAEAIAEAVERENMRFVPIKTEDQLDLQALHRVRERLVSRRTAVINQVRAFLLERGTSFRKGPASLRRQMPEILEDGEAQLSPRMRALLATLWQEWKHLEEQIELLSTEIGSICDGDPACRRLRQIPGVGPLVATAVVAAIGNGAAFRKGREFAAWLGLIPKQYSTGGRTKLLGISKRGNTYLRKMFIHGARAAVLRLKREGSLIGAWMNALEARAPRNVLIVAMANKLARITWAVLSSGEPYRAATVAA

SEQ ID NO: 304589 - protein, 444 aa, unidentified
MKALPVLDPKAAAIDVGSERLHVSIAGEEPKVFGTFTGDLEALRDWFKQEEVRTVAMEATGVYWLYLYEVLEAAALKTVVVNGRHVQNVPGRKTDMADCQWLATLHAHGLLRGGFVPPADIRQLQDYQRLRADHIIGAASQVQKMQQALERMNIKFHDVISDLTGVSGLKVVRAILKGERRPGELLALCDEQIQKKKSAAVKESLRGCWKKEQLFALRQALELWETYQQKIADCDREIESLLQQLAGPQGPQGGNAIVGPVKLAPAKMLGKNAPVIERCQELLARICGGRDATQIPGLGEYLVAQLISEVGVDMTRWQTEKHFTSWLGLAGGRKQSGKRKGAVKAHRNRAGRMFCAAARSLAQTVDKALGGFYRRLRGRVGGLAANVALARKLAQLFYRLLRYGADYVEKGLKVYEAKVLETEARLLRKLAKKQGFTLVPSSLN

SEQ ID NO: 304590 - protein, 449 aa, unidentified
MSKGNGLTRGDVRRNARKSALRALVPGSNAVMGLDLGDQKQALVVTGGDGQVLARRSLRVGVHGLGGYLDWGLDRARAAGYAGVTVACEPTGSRWMVVAELCRARDMPLVCVQPLVSHIAREQQDLTGDKADEPDSELIARLARELHCYAPEELEPEWAELRAAGRDRAVLITRATSAKQLIRDQLGLAAPALLEVHNDPLDSATWLACLEVVMEHAAAGDLAAVRAAGYEAFAAAARSKLPGWGGRRLGPTAAKMFAALAGPAGVPRMVRAVRRRVLGALEDLRYARARRERTEAAMIALLGELGIDYQRICQIPGLTPPTLAAILAETGDLRRYDSSSSVVKHGGMSPARNESAAFRGKTAISHRGRPGLRLAAWRATWAVLRHCDVLAARFTALTSRDQNRLTDAQARVACAASLLRWIYSLTVHGTRWDPQIAAGQLDHHHAMAA

SEQ ID NO: 304591 - protein, 337 aa, unidentified
MKLYAAADLHSNNHFLAVIDENDTRILERRLPNDLAVTLKTLDPYRADIRGIAVESTFNWYWLVDGLMDAGYPVMLVNTAKARQYEGLKHTDDRHDAFWLAHQMRLGILPTGYIYPKVQRALRDLLRERRRLVRQRTTHVLSTQSTFWRHTAVRLPSKAILGVIQKPWPELPDANLELGVHAHRATIKVLTSHVERIERKVLQSLKPRPEYQMLLTVPGIGPVIAWTIVLETGDLSRFASAGHFASYCRCVDSKRTSNEKKKGENNVKNGNAYLAWAFFEAAHFAIQYLPAAKRFYQRKSAQRNPILAIKALAHKIARACYYIMRDRVPFDAARLFA

SEQ ID NO: 304592 - protein, 499 aa, unidentified
MQRDIFPDRSQVAAELLRSQPSSSVLIVPVDFAKREHVAQICSGTGEFLFQRPIIARNDVPGAAYLIERIEACCRRLGVPRSHVLVGGEDAPSYARNFLTALAAAGLHLLRVQPADAKRYRTNTRATTDKLALNGIAQAILCRRSYDLERLGGLYSTMKGAERTRRRLVWQETAAKNRIHRQVEWLFPGFLSQAQSGLLPFGSASLELMGEDFSVVHIRRLRTETLMRRLKQASVQHPAEAAEKLKALAGKTLAPPVEAIAYGSRSLALQVGLLRGLQGAIKAEENEMARCLAQTPGFLLTSIPGIGVVLAGGVVAEYGDPDHWPDPDRMASYGGIVARHYQTGGPNAQGITGSLPLDCNHHLKDWLLQAAFHAGTTPHEAWDRMALPGDQHRLYEHYQRVELQEGHSRLSTAKLLLRIGRAMVRDRRAYLPANALDPQAQDALSPEALVQYLGLTAATVARRWRGYDLSGLPEELNLLQQWHKEIEALTQFHARGTTL

SEQ ID NO: 304593 - protein, 341 aa, unidentified
MQITTIGLDLAKNVFQVHGIDAAENVLVRKQLRRRQMLEFFKALPPCLIGMEACATSHYWARELTKLGHEVRLMPAKDVKAYIKRNKNDAADAEAICEAVRRPTMRFVPIKSAEQQGQLMQHRARDLLMRQRTQVINAMRAHLAELGIPARQGREGLKELVAIVANDDDTRVPVNARASLMVLAAQLQALQTLIGSIEKRIIKQHRVNEASQRLESIPGIGVIGATAIAATVADPKVFRSGRDFAAWIGLVPREASTGGKHKLGPISKQGDRYLRRILVVGACAVLKLARQKPEKYPWLTQLLARRPFKVVAVALANKMARMAWALLANGGTYRAPRIAAA

SEQ ID NO: 304594 - protein, 315 aa, unidentified
MATSSEKFVGIDVSKDKLDVAVLGERKASQVGNDEKGIASLVKKMKSLKPELIVVEATGGYQRAVVDGLFRSGLSVAVVNPSRVRQFARAYGLLAKTDKLDAQVLAVFGERVKPRRYEGKDEKERELSGLLVRRRQLEEMLKAEKNRLRTIRVSLQGSVERMIACLQGEKKVVDEKIRQYMAEQKEWQAEREILESAPGVGPVTTATLLADLPELGKMDRKKIAALVGVAPMNYDSGKKRGYRKTKGGRADVRSVLYMSTLVATRYNPVIQKQYQSLLKRGKLKKVALTACMRKFLTILNAMVRDQVPFRDTAAV

SEQ ID NO: 304595 - protein, 315 aa, unidentified
MNYKKWIGIDVSKDKLDISIFDGVNHLMNQIKNERNSILSFFKKLKSKSTIHAIMEATGIYHKRLSICLFQLQIDFSVVNPFIIKRFSEMKMFRAKTDVVDARLIAVYGFEQKPNLYKFPPKDQDHIFRMIKAMNRLQEDTTRYKNRLHAEKESSVELPIIVKELKRMVASCKRAIDRLEKEMQNLVIKNYEDVYKKLIKIPGVGDKTASIIIGYFGKFDNFETAKQVVSFIGLNPNPRFSGSSVKGGSNISKKGNPLLRKKLYMSAVSAAQHNPNCVSLYQRLLAKGRSKILAQVAVAHKLLRQIFAIVKFDRE

SEQ ID NO: 304596 - protein, 319 aa, unidentified
MNKVGIDISENWFDCCLRTVQSFKRAQFKNDGTGFNDLHKWLKRNEITTPQLFMEATGRYWNDLANWAFKHGWRVTVVNPRCIRKFAESRLQYNKTDRLDAECILRFAEGAQPDELREWTPPEKAQQELKELQMEIAGLQKTIGQERNRLKSGLKNPLVKETIRRTLKFLETQKKALEKRALLVIKQDEKLRKDYKTLTQVKGLGDTTIRVLLARIDFDRFKKGRQLVAFAGLAPQKWQSGKSRKNEHISRVGHADLRSALYLPAVVAMTHDSEMAKLKQRLESQGKTGKQVICAVMATLLRKAFALVRDSHASIPLAA

SEQ ID NO: 304597 - protein, 349 aa, unidentified
MTVYVAVDFHAREQTVSYCDLADGEIHRRKLRHQHDDVRAFYQQFTGEVIVAFEASGYSAWFEQMLAELGHTVWLGNPAEIRRKAPRRQKNDRRDADLMLDLLLKGDFPRVHGFSEESRTVLRQLRYRHKLVKVRTIAKNSLHAIGINAGLPLKRRLLTEPGIAQLQALSLSPVLTQQRDEWLQLIALMNQRIATVEAQLQQRAKDDAAIALLQTHPGIGLLTSLALRYTLLPTSRFSSTRQVTAYVGLDCMEDQSAERRRMGSISKAGSKLLRFLLNEAGHTAARHDPELKKFYRRLLHRRDKPKAKVAVARKLLVRSFIMLRDQIDYAEFVRRGVAARVAREAHSLP

SEQ ID NO: 304598 - protein, 455 aa, unidentified
MSNRSRRGLSRGDRRRNEKLARLREIIARETAVLAFDLAADKQVCALTDPDSRVLARRTARVRAWQLAQTLDWGLAAAAEAGFTSVVVACEPTGHRWRVLDQLAAERGVVLVCVQPLLVARAREAEDFTRNKNDDTDAMIIARLVTELRCYLPERADPAWARLRHLGARRARLVVEVGAARQQVRDLLECAWPAVLDAAGKPLDSANWLTAVATGLDRIGATGELSELGQRGWEDFAAAVRAELAPTRWYSAIVRAVFDAATDPAAAAVGVVDQRAGALERVRFALADLAHLRARIAEVETRMTRVLDTLGVTELVTGIPGVSAVGAATILAEAGDPIRFSSARALVKHAGLCPRANESGKYTGTTSISGRGRPELRLAAWRAVFTALQHNPVLAARHAHLTGRAENPLTDTQARIAIAASLLRQLHAVIVTRTAWDPAIAAGLDRREDGAACAA

SEQ ID NO: 304599 - protein, 312 aa, unidentified
MAHIICGVDIGAETLDARIGRDGAWQQFVRTNDSIDRLAAFCRTHQAGLVVMEATGGYERLPFHRLWAADIPVAIVNPRSVRQFAEAMGTLEKTDKIDAGMIAWYGETKRIVPTPPPSDDQRALTALVRRLRQLIGLRTAQNNQRRLVDQAVALDSFTTILAMINREIRSLQARIIALIDADPLWLALDQAFREVKGVADRTIACLMANLPEIGTLSGKAIAKLAGLAPIARDSGKKNGNRPVRGGREAVRSMLYLVAEIVRRHDPDFKAFHQTLRAAGKTAKVVRIALARKLLVRLNAKARDVRKELAQSA

SEQ ID NO: 304600 - protein, 340 aa, unidentified
MSGAQPIYQLWCGIDVAAKTFTVSWTLDRSTYAQPISLPQTPEGITALQQHLSELKLPPQQTLIVLEATGSYWIRLAVALHAAGYVLSVVNPMQVHHWAKSLPRRGKTDPRDARMLTQYAVERQPRRWSPPPEVYHELRQRLTAREGLMAMRHQARNQLHALDQWPVQIIAARQAIEQVVAELDKQIATLDAAIVQVLRDGAWAASAELMQTITGIGPLTTAWVLVLTVNLELCPTAEAATNYAGLSPLERESGTSVRGRAQLGRGGNARLRTAFYRATINAARFNPIIKAFYERLRAAGKPRKVARCAAARKLLHLTYAVVRKGQPFDPAYAAQRTVAG

SEQ ID NO: 304601 - protein, 386 aa, unidentified
MNVGIDAHKRTCTVCVIDDGAVRESFAFPTTREGVSEFMERIPSQATVVIEASTTGKVISRMLTDKKYEIHMVAPPERKRSIKTDRRDAERIVREDMLQYLRRCYIPSAAIEEMRFLVFQQIQVGRKIGRVKNQVHALLERNMVHDLDEFSDIFGVQGLRRMVMVHLPTQDKAALARYLEELKLHAAHHRQLETELARLAESDADALLLMSIPGIDFFTALAIKSRIGDILRFPTKKHLCSYGAVVPGASNSGDYVSRHNRVKHGDMILKSALTCAVRGAVSAEKSSAVKRFYLKRLKRMGAQKAEVAAARKMACIVWKVLTIQQPYREEDKRLTARKRRILSWKAKRQDSDPSDIRQLAEDLVGDITVLERYPVDFNGKFEGRLT

SEQ ID NO: 304602 - protein, 402 aa, unidentified
MNAVGIDVSKSKSVVAIMRPFGEIVSTPFEIKHTASDIPSLIELINSVEGESRIVMEHTGRYYEVLAHQLLEANLFVSAINPKLIKDFDNDSLRKVKSDKADAVKIARYALDKWQNLKQYSVMDELRNQLKTMNRQFGFYMKHKTAMKNNLIGILDQTYPGVNTYFDSPARSDGSQKWVDFASTYWHVDCVRKMSLNAFIDHYQNWCKRKKYNFSQSKAEEIYGKAKELVPVLPKDAITKLIIKQAVDQLNSASTTVESLRTLMNETASKLPEYPVVMAMKGVGTSLGPQLMAEIGNVSRFTHKSAITAFAGVDPGVNESGTYEQKSVPTSKRGSADLRKTLFQVMDVLIKTHPQDDPVYQFLDKKRAQGKPYYVYMTAGANKFLRIYYGRVKEYLASLPES

SEQ ID NO: 304603 - protein, 415 aa, unidentified
MALKIVYKICCGIDVHKTFVVACIASTNDKGITSYESHRFSTYTSGLKTLLQWLLDRNCKDVCMESTGKYWIPVYNILESDCSIVLAHPKYVKAIRGKKTDKKDAKWIADLFKHDLVAGSFMPPADIRQLRDLMRYRFKLTCFKSSEKNRLQNCLTVSNIQLGNVVSDTFGKSAQAILDKLLENPADTSFDLEPLVYKSLKKKLPELRDAIDGYITPEQAGKLKVIKAHYENLESRKAELEELILALAAPYQQELAILQTAPGISSPFTAIGIISEIGTNMEAFPSAKHLCSWAGLTPTNNESAGKKKSVRVSKAGCYIKPLLVQCANAVVKSTKHPEMRNRYLRLKKRRGHKKAIIAIARMLLTALYHMLKNGENYNAELYQKSDLLPVDREITVEQALMIARNQGYKIKSATA

SEQ ID NO: 304604 - protein, 386 aa, unidentified
MKPTSQMTLDVYFRQCVGIDISKDKFTACLYMYDRASDVGCCTKSIDFANTKSGFNQMVRWSRKEAVKSHPLTYLMEPTGVYYEHLAYHLHKIGQIVYVVLPNKARKFCESEGIRTKTDAMDARSLALMGCASRKLKPWSPPAAIYRELRQMTRFHADLCEVRTSVANRMEALDHMEGTAKSVHKNCEKLLQEIDTLMEKNGKAIMKKVAEDKELQMKVKRIATAKGLGVTTIVCVIAETEGFHLIENRKQLTSYAGLDVKARQSGKEDPKHRISKEGNAHIRAALYMPALVAIRHNRQIREAYGRICQKHPKEKMIGVAAAMRRLLMLIYTLWKNGEEYDETRDTTHTPKKKEPELEYGPDDCIGRIDNEPVDRDAADENGEPPF

SEQ ID NO: 304605 - protein, 343 aa, unidentified
MEVYVGLDVSLKETSICVVDSSGKIVAEGTVLSEPLALAEFLRAKAGSAKRIGLETGPTTTWLWHELRALGLPVICIDARHAKAALSLQINKSDRNDAVGLARIMQCGWYKEVQVKSLPCHEVRAVLNSRAQLVKITRDLENQIRGLLKNHGLVIGKAGGNIFRRCAEELVGEHHLLREAVRPLLAVHEAVRREIAGLTRKLLGLARNNDASRRLMTVPGIGPINALAFCAAIDEPSRFRRSRSVGAYFGLTPRRYASGEVDWTGRISKYGDAMVRTYLFEAAGVLLTRVPQWCKLKAWGHRLWKRIGFKKAKIAVARKLAVILHRMWRDGTDFIWSTKEAVA

SEQ ID NO: 304606 - protein, 393 aa, unidentified
MRISVGTDVAKETHWVVALTETGEVLVDHAVDNDPAAIEALIAELGALPGECTIGLDVLGGIATLLSAMLLAAGQRVVHVPGLAVNRARQGTTGGETKSDPRDARVIAEQVRSRRDLRSIAVEEEPLAELQLLVGRRRDLVAEQTRRLARLHDLLSRIHPGLERALDLTNKSGLCLLTRYVTPAEIRHAGRARLVRHLRASGARHVEAIATAALEAAQRQQIALSGERVAAGLARELAREALAVRERLVEIDAELAQVLAVHPDSTLIRSLPGMGVILTAEFIAEVGIRDRFADADALAAAAGLAPVLRQSGKVRFLRRPLGGDKRLKRVFYQAAFCSLSCPASRAFYARKRREGKRHHQALLALARRRVNVLWAMLRDRRPYELQEPRCGAA

SEQ ID NO: 304607 - protein, 341 aa, unidentified
MSVIIGIDPHKATHTAVAIDRDEQPIATLEVVADRCQTERLLAWAASLGFERTWAIESANGLGKLVAQQLVGVGEHVVDVPPTLSARVRLLGSTKAGKNDSNDALSTAIAGLRHCELRTVRVEDHNAVIRLLIDRYDGLVSLRTQATCRLHVVLRELIAGGAPRRLSANRAAKLLRGVHPAGVVAIERKRLAVDLLADVRRLDQQIAAARSRITDAVEDSKSTLLELHGVGPIVAAYILGHVANPARFATPERFASYNGTAPIEASSGPRKRHRLNPRGNRKLNHAMHLIAVTQIRNDTPGRVYFQHKLADGKSKKEALRALKRRISDAVWRQLQVDLKLR

SEQ ID NO: 304608 - protein, 408 aa, unidentified
MKTLYCLGLDVAKHKLRAALCGSAGAILFEADLPVSAGGRAELLALLRARVPQPEQLLVVLEATGVLHLNWSAALAQAGYAVVVINPLIARRFYPIENALRDSKSDPIDARGLCALGLLHGEKLLCKYRFQLEPERLALQRLQTVRKALRTSLTNLKKTYTSLLDLSFPELGQLLEVDGTGIRALLQKAPTPGAIAQKRLSTLEKDWKLRPKAAPLKALAADSLADPELAAAGAPALQAILQSIAALEAQLRALDKQIEARASQGPLAQSKALLETIPGFGPTLATKVLAYLPHEILHSGSRRQAAARLQAFMGNEPRLQESGQWKGQTKMSKRGVEPLRTAFFQAAFSASQSDPELRSYYLRKRAQAKCHHLALTHLMRILTRRMVAVLRSQQPYQPKEVAPLRVAA

SEQ ID NO: 304609 - protein, 339 aa, unidentified
MQVTTIGLDLAKNVFQVHGIDEHGEVAFNRALRRAQVLAFFERLEPCLVGIEACGTSHHWARELIKLGHNVKLIPPAYVKPYVKRGKSDAVDAAAICEAVTRPTMRFVEVKTPEQQAILSVHRTRDLIVRQRTQTINMLRAQLAEFGVVLPQGVYHALKFAKNSEDGEPLNLPQDAQEVVFDLCEQLLFLHAKILRHSRHMTQIAKSEKRVALLRTIPGVGPITASAIVATVGSGKQFNNGREFAAWLGLTPLNRSSGGKERLGHISKMGDQYIRRLLVLGMTSRIRSIRLEPEKFDPWFADILSRKPSRVAAVAMANKTARMIWAVLTQNEPYKVRTI

SEQ ID NO: 304610 - protein, 345 aa, unidentified
MKHYAGLDVSVKETAICIVDETGTVCREVKAPTHPEDIARVLKDPAWRLQRVGLEAGPLSQWLFEGLAKAGLPVVCIETRHVNAFLKAQPNKTDRNDARGIAQMMRVNLFRPVHVKTLTSQKRRALLTARKLLKDKAIAIENDIRGLLRNFGLKVGKVGAVKFEERIRELTEGMPDLAEIVEPLLDARRKLRQNYAALHRKLLAIVRDDEVCRRLMSIPGVGPVVSLAYTATIDIPARFRNSKAVGPILGLTPVLHESGESRRVGGISLCGDGMMRTLLYEAAQTLLTRVTKWSWLKTWAMDVAKRRGQQKAIVALARRLAVIMHRIWSDGTQFRWTRAEIMPVG

SEQ ID NO: 304611 - protein, 356 aa, unidentified
MKQFIGCDAHRKYSVFVGMDERGKTTPPVRVEHERKDLRMFLRRLAAGTEVAVEATGSWYWLVDEIEAAGLVPHLAQPFAAKRMTGTGGKKTDSVDARCLATLLRNGTLPETWIPDTANRDLRNLMRTRLAMREYQSGIKNRIVAAINCYGLRDQEDDGDLFRGKGRVKLSVYKSSLPEHTREAVLCQWSLVDELEKQIEELERQLKRELQAHPQANRLKTMPGVGTVLGATIYLEVGDVSRFASPQRLASYAGLVPVVHASGGRVFYGPTSNRSNSYLRWAFVEAANLTAARRKMHPGRHVSRLYDRLRPGKGHQKAAVAVARHLAESAWWILTKQQDYREPQPAAAAVSSSQNG

SEQ ID NO: 304612 - protein, 319 aa, unidentified
MTLTSVGVDIAKLKFDVAVLLPGQKYKTKKFANTPAGCREFIHWLTRFGDCHVCMEATGSYSTELATALSDGGYRVSLENPARIHAFSNTELTRNKTDKSDAALIARYCALYQPAQWHPAPLSQRQLTALVRHLKNLEEMRQMEENRLEAADKVITGSLKEHIATLDELIKETKKKIRQHIDDDPDLRKDKALLESIPGVGDVLSTSLLAFAGNLRRFRSSKALVAYAGLNPRRCESGMWKGKSRLSKVGSRELRSVLYMPTVVAGRCNEVVKDLMTRMASRGKTGKERVCAGMRKLLQLAYGVVKSGREFNAEIPLAG

SEQ ID NO: 304613 - protein, 402 aa, unidentified
MNAVGIDVSKGKSMVAIMRPFGETVSPPFEIKHTASDIHSLVELINSVEGESRIVMEHTGRYYEVLARQLSEANLFVSAINPKLIKDFDNDSLRKVKSDKADAVKIARYALDKWHNLKQYSVMDELRNQLKTMNRQFSFYMKHKTAMKNNLIGILDQTYPGVNAYFDSPARSDGSQKWVDFASTYWHVDCVRKMSLNAFTCHYQNWCKRKKYNFSQSKAEEIYGKAKELVPVLPKDDLTKLIIRQAVDQLNSASTTVESLRTLMNETASKLPEYPIVMDMKGVGPSLGPQLMAEIGDVSRFTHKGAITAFAGVDPGVNESGIYEQKSVPTSKRGSSELRKTLFQVMDALIKTKPQDDPVYRFLDKKRAQGKPYYVYMTAGANKFLRIYYGRVKEYLATLPES

SEQ ID NO: 304614 - protein, 451 aa, unidentified
MKKEKQKTGVVKMGSGLPVFNPYAAGIDIGDTLHCVAINDGNGSHEVKTTSAFTCDLHEIVDYCKTNGVTTAALESTGVYWLALYLLLEEAGIEPYLVNAKHAKNVTGRKKDDTDSIWLQKLHTCGLLQKSFQPDNEIRMLRDYTRQRKNLILLGADSIRRMQKALELMNIKIHTVISDILGKTGMKMVKSIIAGERDPQILCTLCDPRIKASHEEIIKSLQGIWKEEYLFMLEQAVENYEFLQKQIKRCEERIQQQLLKQVAIIKEGDITCLEVTLKKKLKAKKNQFDFAVSPYLIAITGVDLCKIPGISDVTALEFISEVGVDMSKWQSAKHFAAWLNLTPNTKISGGKIISSKMMKKNNKAGQYLRQAASCLSTNKTPIGDYYRRMRARLGGRGAALTTAHKLSRVIYTMLLKKTEYNPGLLIENQEKLKEEKIKNLEKQLARLKLAA

SEQ ID NO: 304615 - protein, 343 aa, unidentified
MQDVATVGLDIAKQVFQAHGADASGETLFNTKIKRENVLEFFSKLKPCLIGMESCATSYYWARQLLEFGHDVRLIHTSYVKPFVKRGKTDANDAEAINVALTQKTMRFVPVKTLNQQAAITIFRTRSLFVSQRTQLVNALRGHLAEAGLVAAKGIQNYSKLVNLMETAADTVLPTVMKQALTDICDQIHRLNDLVTKLDKEIERRVRHDENACRLLTIPGVGPKTAMCVIATIPDIHRFPSGRHFSSWLGLTPRTHSSGGRSVLRRITKMGNSELRTMLYLGGTVIMMRDKKTPIGRWAARLRAGRPYKVVVIAVANRIARIIWALLTKGGVYDPTYGREASA

SEQ ID NO: 304616 - protein, 354 aa, unidentified
MTSTKYIGMDVHKESISIAVMNAAGKIVMECVIETKANMILQCIDGLRGDLHVTFEEGTSAAWLYDLLKPHVTELIVCDPRKNASMREDNQNDKIDACRLAELLRIDHLTPVYHGEHGLRTLKELVRSYLTVTKDLARVKTRVKAIYRSWAIPCDGKEVYAACHRAEWLEKINELGVRRRAEFYYQELDGLRVLRQGVRRELLAESKKQKAWKRLCQIPAIGPIRAAVLLGILQTPHRFRTKRPLWKYSGLAIETCSSADHRSINGQLQRSKKNSVRGLNRNCNHDLKNLFKGAAVIASSKAGPFQEFYAALLAKGMRPEMARLTLARKIATIVLIVWKKGVCFDAQHLKPQTA

SEQ ID NO: 304617 - protein, 346 aa, unidentified
MAHYAAFDVSDKETAIHGLDEHGKLVWKGKRPSEPEALAAALRQHAPELVRVGLETGRLTPWLFHALKGLGVPVVCLDARHARAATALQRNKTDARDAETLAQLVRTGWFREARVKSWAAHAVRHLVGARAQLVGMATDLSNQIRSLLRTFGLRITGRAGGTFERKVREQITGSPEVAAVAEPLLAAWRAMRDQIAALDRKLIEAARSNATCRLLMTCPGVGVVVATSFAAAVAAPDHFRCSRAVGAYLGLTPRRHQSGESDHSAGVSKRGDKLLRSYLFEAAACLLIRVQRPSALKAWGVGLVQRLGFKRAAVAVARKLSVVLHAMWRENRPFQAWPTLVVAAAA

SEQ ID NO: 304618 - protein, 423 aa, unidentified
MAYRIAGIDVHKKVLAVVVADVEVHSEYEFERRRYGSNPEHLRSLAEWLMEQQVEEVVMESTAQYGAPVWGALERYWKPTCQEREGAGPMSGTLHLAQAQSNRGRRGRKKDFPDAERLIKRLVANELILSFVPDAEQRLWRTITRRKYQLTRDKVRLQNQLEALLEEIHIKLSSLVSDLLGVSARRMVKALSEGETSPEALAAMADKQLRATQAQLCDALGACAELKPIYRRLLKMCLEQLQMIEQQISQLDQEMANLLSPHQDAVKRLAEVPGLGVDSAQQIIAEVGAQAATFPSAKQLASWVGACPGDEESAGVSKGHRSPKGNRQMRRILNQAANAAARSKGTIFEIVYRRLVSRLGHNQTIGAIAHRLCQLIWIILHRNVRYEERAPSVNARSRQRRTNKMIRELRNLGYRIEPVPIPA

SEQ ID NO: 304619 - protein, 344 aa, unidentified
MTYYAGLDVSLRSVNICVIDDQGELIAETKLASDVQDIVAYLDALELHIESVGFEAGTLTQYLSYGLQSAGFDVVCMEARQVKGALSAMRNKTDKHDARGIAQILRSGWYSRVHVKSMESHHIRMMLSSRRAVLSKCVDLENEVRGLFKIFGLKLPAKLGHGPFDGTVRDIIEADEALSLALLPLLEARLALYRSFRELDNRTRKMAHADPVCQRLMTVPGVGSITALTFKAGVDDPSRFKHSRTVGAHFGLTPRRSQSGEMDNSGHISRAGDADVRSALYTAANAMLTRSGRWSSLKAWGMKIAKTRGHRRAVIAVARKLAVILHRVWIDDTQFRWGTEGARS

SEQ ID NO: 304620 - protein, 363 aa, unidentified
MIIIGVDYHPSFQQIAFLDQETGECDERSLNHSDGEAERFYRELKQRGVSVRVGLEATGYSRWFERLLAELGFEVWIGDAAEIKRLRVRKQKTDREDARLLRRLLLENRFPRIWVPSPENRDLRQLLWHRHRLVEMRTRIMNQLQAVAMNEGYRWKKKLFSEKGRAQLEKLSLAPWASRRRKELLELLDQLDLKIAELTRAVEQEAHQRPEVLRLMTHPGVGPITGLVYVLVIGTPDRFPSGKKIGSYVGLIPSEDSSAGRQRLGHISKQGNALLRYLLGEASQAAVRKDVYWRRRYMHLAMRRQKSIAKVAMARKLAVRLYWMWRNGWDYSRLVEFGSHAGKLGTGHGVNSSVVHLIGHPAP

SEQ ID NO: 304621 - protein, 404 aa, unidentified
MIFVGLDWAEDHHDVCVMDEAGEVLGKRRIADGVEGVAELHALVGTHAQEPNEVVVGIEIDRGLIVAALLSAGYEVYAINPLAASRYRDRHATSGAKSDPGDAKVLADLVRTDRHNHRQIAGDTELVEGVKIIARAHQNAVWGRQRQVNALRSSLREYYPGALAAFGTDLSSSDAISVLSIAPTPLLGRQLSRSKIISALRRGGRTRNVEKRAAEIQIALRAEYLEAPPGIGEAHGEVARSSLSLIEAYTKQIATLEVSLDERFEQHPDAKVVLSLPGLGTVLGARVLGEFGDDRTRYAGSKSRKNYGGTSPVTKASGRSRVVLARYARNRRLATALDRWAFCSLTHSDGARRYYDDLRARGKTHGQANRQLANRWVGILHHCLERDELYREDIAWPRGPELAA

SEQ ID NO: 304622 - protein, 453 aa, unidentified
MTQRNRSISLKPAKSRAALTITHPNAAGIDIGSAAHFVAVPPDRDDESVREFASFTVDLNAIADWLLACRVDTVAMESTGVYWIPLYELLESRGFTVLLVNARHVKNVSGRKSDVLDCQWLQQLMTYGLLRGAFRPAEQVCVLRSLWRQRAMLLRSQGRHVQHMQKALTQMNIQLTNVISDVVGETGQKILRAVVAGERDGQVLGAMKNVRVRASVEDIAKSLQGNWRAEHLFSLKQALDAFDFIGTQLTECDGEIERQLQTLQAHDGEPVKGKKRGRARNAPKFDLRTQLFKMCGVDLTRIDGIDVTTALAVISETGADMSRFPTVAHFASWLGLCPGTKITGGKVMSGKTRRVANRAAQALRLAAAALRTSQSALGAYFRRMCSRMDKPKAVTAAAHKLARLIYTMLTKGEEYTDQGQAYYEERYRERVLRQLSQRASKLGMQLVAVPQPA

SEQ ID NO: 304623 - protein, 343 aa, unidentified
MQAVTTIGLDIAKSVFQIHGVDAAGNVIVRRQLKRRYVLPFFQRLPPCLIGIEACASSHHWSRELKALGHTVRLMPAAYVKPYVKRQKNDAADAEAICEAVTRANMRFVATKTLEQQSCLMLHRTRHLFIRQQTAVINAIRAHLAEYGIVAAVGRNGVEELLGVVADPSDKRVPEIARACLAALGAQLRMLKAQILEFDRMITVWHRSNETSKRLDAIPGVGPALATALVASVPDPKAFRSGRNFSAWIGLVPKQHSSGGKDKLGSISKQGDRYLRSLFTAGALAVIRYAKIHGTKHRPWLTALLARRPTKVAAIALANKIARMAWAMMARGDRYKEPVALAA

SEQ ID NO: 304624 - protein, 395 aa, unidentified
MKTVCGLDVHKSIVLMCILKTNGEIIIKEFSTLTCDIEAMRSVMEEHGVEEVGMESTGIYWIPIWRILQSRFDLMLINPYFIKQLPGRKTDVKDAQWIATVVQKGLVRGSYVPGKHIQELRMYERRYVRLCEQSTRIEQAIERQLHRCNIQITNYASKIGSVSVINVVKGIIAGETTSEQLEKHVHGRIKGKHKEKIAASLTGVISKADKFIFKQNIEEYELILKQQDECLTEMSKLCEQYFKHEVELLCTIPGIQKLSAMIIIAELGVDLKAFATAAALTGWAGLRPRNDESAKKIKSNKITKGNKYLRRILVQCAWAASRKKNCWLKLKYEQLCVRKSTKKALIAISRKLLVIIWNVLTKKQEYFEYIPKINQEKKQKKVEYHKKRLLELETV

SEQ ID NO: 304625 - protein, 428 aa, unidentified
MDDVDRNRLEEFRQLRQEIRHSEQHLIVGIDVAKERHHAFFGTATGKTLLRSLVFNNDYEGFRKLLDQTEALRVRHDLKKVVYGMEPTANYHRPLAEFLIHLERCVVLVSGVTAKRNRESLDGRWDKHDVKDSANVADLISQGKCLYYDFPTASLRGLRNLLSFKRRLKKQEQSYQGRIRNHLIAQYYPEMDREYARLRTEGVGIMRWCFPPSEMTMLEVDPFIERVTSGRVRLEKRERLARIWDQAAETVGCDTVPGAAHEARLMAEGLGQIREMIEETEEQIEELCEGFPEYAYLLTIPGFGPDVSSKVLGAIGEADRFQNGKQVVKLAGYDLSADRSGKGSERAIPQISKRGKADLRYALYQAALIASTRNREFIRYFTNKIRGREKEKGIQRKLLVKLSAKMLLIAWTLMKKKEAFNSAYLNLE

SEQ ID NO: 304626 - protein, 326 aa, unidentified
MEHELHYIGIDTAKEKLDVDVLRPDGRHRTKKFANTTKGHDELVSWLKGHKIDHAHICIEATGTYMEPVAECLYDAGYIVSVINPALGKAFAQSEGLRNKTDTVDARMLAEFCRQKRPAAWEAPHPLERALRALVVRHQALTDMHTQELNRTETAREVQRPSIDAHLLWLEAELKRLEKQIKDLTDDDPDMKHRRKLLESIQGIGEKTSAVLLAYIGLKDRFAHARQFAAFAGLTPRRYESGSSVRETSRLSKAGHVSLRRALYMPAMVATSKTEWGRVFRDRLAANGKKGKVILGAMMRKLAQVAYGVLKSGVPFDAARHNPVAA

SEQ ID NO: 304627 - protein, 346 aa, unidentified
MLHVGLDLSRKRIDVCLISDQGELIDRFAATPDRDGLHGLAARVAVYGEPVRGVVESMNGARFVHDELVSHGWDVLVADAQKVKGLAPLACKTDRIDSRVLAELSFRDLVPAIWLPTVELRREREISRWRLHLVKHRSTAKNRVHSTLITFGHQRHMSDLFGVAGRRLLGELEIPEPWRSHVDASLVLIDDLETRITQIAKDLRRSGADHRYIPILMTAPGFGWITSFTVACEIGDINRFSSPVKLTGYTGLCPRVKQSGETDSRGPLSKHGPKYLRWGLMEAAIAASSHPLYRERYQRTRRRLGRQRGPKVAQIDLARQLAEAVWYMLTRNQPFAPAGAIFRLAA

SEQ ID NO: 304628 - protein, 355 aa, unidentified
MMRTVYCGVDFHARMQTIAYCDSANGEIQLAQLDHRKDDVREFYSKLTGQVIVGIEAGGYSSWFEAMLEELGHTVWTGHATEIRRRANWRQKNDRRDAELILEIMLKGDFPRVHRHSRESVEALRMLRYRARLVKMRTMISNNLQAIAISSGLLERSRMLSRAGQQRLKNARLTPAIKHQSDDLITLLVPLNERIARVEKWLNEQASIDDRVKLLMTHPGVGVLTALGVVHTLEPFNRFSRQRAVVAYVGLEPMERSSAERKRYIGISKAGSRLLRFLLGEAAHTAVRFDPELKQFYERVGKRRGKAKATVAVARKLLIRCWIMLRNNIDYAEFRSRGVEARLARHISRPSVPAE

SEQ ID NO: 304629 - protein, 365 aa, unidentified
MNNAHNAAIGLDVSDRKTQVCVMAKDGKSPKIVMEMAIPTTKEGLAKFLSTQDRSTPVAFETGTHCRWMNEVAQELGFKTYVANPCRLRMITESKTKNDVNDARMLARLALLDPGLLHPVKLRGPEHQKMLNLHGARNLAVKQRTEAIVQLRAMAKSMGFRIAKCQAASFHNLDRRAWPEAFRCIAWPMLKNLEQLAITIKTYEKQIRELAETPTFKAQVERLREIHYVGLYVATGFIAATGGDMDRFEKPRDVGPWLGITPKQDQSGDVDRQCHITKAGSPFMRRLLVESAQMILRDGAVDTDLKAKGLRICARGAKIAKRKAVTAVARALAVLMVAMLKKPDAPYVPLSERCEKELLAMRAST

SEQ ID NO: 304630 - protein, 439 aa, unidentified
MNCTQNEKISQVTEKTLVIGIDIASEVHYARAFDWRGIELSSDTSELIRGNRVKTALRFTNDEDGFERFIDWITRIMNRHQKEKVIVGLEPTGHYWFNLAERLKKEGMTLALVNPYHVKCSKELDDNLQTKTDQKDPKTIAGLVRDGRYLEPYIPESIYAELRELCSYRERLLKDENSAKNQIHKWIAIHFPEYKKVFSNITAISSLAVLKQTPLPSDVKEIGAEGINKIWRDMKLRAVGIKKAKSLCEAAERSVGVTEGNDSARITIRMMLETYESVRANLDAIEERMKALCRKIPAVEKAEKIKGVGIITIACFLAEIGDISRFDSPKQIQKLAGLALRESSSGKSKGRTIISKRGRPLLRKLLFQAALPLVAKNEEFAELHHYYTTREKNPLKKKQSIIAVCCKLIRILFVVLKNNVDYSPSKMKNDIKRNNTKIA

SEQ ID NO: 304631 - protein, 422 aa, unidentified
MQNSAAEKRKQVPEGYLIIGVDPHKKRHAAVAITQDFTVHAKFKFDNTLEGLEYMIERARAEMMKTGCRGVIFAIETGGHYWRNIAYFLDGKGIPFRFINQFTLKRRREGKDINRRKNDYRDSEVAAQLLCTGEFTESKVPQGVYAELRAAHNAYHRLVKERTRITNLIKGLLDGLFPEFVSVFKDPCAITALSVLSTCPVPGIIAGMTEEEFVATIKAHFQGRRFMRRKLVKLHQTAKTSIGITAGARQVASEITFLIEKYELIKGHICTIEQTLVELVDETEEGKYLLSITGLNYIAVAGLIAELGCFNLYRSSKQMIKMAGSNPTESESAGKKGFHTPMSKQGRPVLRYCAWTSVIPMLRFNAEFRAWAKQRRERPVHANPLGGREVVGAALNKLLRLAFALVKNKTFYRSPLLAPAIS

SEQ ID NO: 304632 - protein, 324 aa, unidentified
MAHFQDVVGIDVSKETLDVFVLSHQQQRAVANAAAGHCDLVNWLKSLGVRIAVMEASGGYERTIAWVLRRAGFDVRIVDPRRVRHFAKAAGRLAKNDQIDARMIAEFGAVFAVAERCEIAADPARERLAGLLGARQALIEHQTALRNQISAAPRGAARLALAAALKPIAGAIKKLDRLIAAAIAAHPPFAALAARLDTVPGLGLVTIAAIIAWLPELGRLDRRALAALVGVAPFDDDSGKRVGQRYIQGGRCKLRNVFYMAAMGGATRHNPVLNAYYTALINRGKLPKVAIIACLRKLLTILNTMVAQNKDWDPSHAATSAIAA

SEQ ID NO: 304633 - protein, 355 aa, unidentified
MPNKNKKSARPEHLSCTKQCLGLDVSKDKLEACVSRMCSDQSVKIQGTREFSNTPQGWKAVALWANRFRKDAAIPFVVVLEATGVYHEGVAHHLKEGGFAVIVTLPNKSKNYARSLNVKTKTDSVDAQVLARMGLERKMDIWHGPSGTLRTLKRLVRERDALLEHKTAVANQLHATCHEHQANRHTIQRRGQLIAFVNKQIAAVEAQIAQVLNEDANLKERIDNVCTIKGVGVLTAVCVVAEANGFDLIENKSQLTSYAGYDVTERTSGSSLRGKARISKKGNSHIRKALHFPALTASRHEPKLKNLYDRVLERNPKVRMIGAVAVQRKLLVLIYTLYKTNKPFDNMYEEKKAAA

SEQ ID NO: 304634 - protein, 416 aa, unidentified
MKIVRPICCGMDVHKNIIVATIGITNKKTRITEYIQETFSTLNPDLLNLKQWLINHKCFDACMESTGKYWIPIFNILEDEINIYLAHPKYVKAIKGKKTDKKDSKWICDLFKHDLIKFSFIPPKEIRALREISRYRYKLVGMRSSERNRYQNCMTVSNIGIGSVFSDPFGKSAQAIMKEVLESDIIEDEKILKCVHGSCKNKDKILDSIKHCNIETDQRFKMNESMTHMEELQVHIDNCEIEMMKRAAPMFDQFMHITQLPGISTLSAILIISEIGVDMKQFESDKQLTCWAGLAPANNESANKKKSVRISKAGQYLKPLLVQCALGAIKDKEGYFGIKYSRIKKRRGHKKAIIAIARMMLVSIYHMILTGETFNPSDYESFRNPKPPIKQQDLTEESAIEFLKKSGFDVSKLTKP

SEQ ID NO: 304635 - protein, 339 aa, unidentified
MDHVAIDLGAKKSQICVRGADGRILEEKRWPTGDLERFLAGRPTSRVIVETCAEAFCVADAARKLGHETRVVPATLVKTLGVGARRLKTDQRDARALSEVSCRIDLPSVHIPKTESRDRKTMCGMREALVGARTKIINNVRGWLRSRGRRIERGGRASFKQRVEAAWQGPLPSYVERQLLVLDVLTTQISEANAELESWAEADETCARMMTVPGVGPLTALRFVAAIDDVTRFESAHQVESYLGLVPGESSSSERQQRLSITKAGPRALRWVLVQAAWALRTRSRKPEAIPLQLWAERIEQRRGKRTAIVALARKLAGILFAIWRNGSVYDGSRGAKMI

SEQ ID NO: 304636 - protein, 452 aa, unidentified
MSKQNKQQATQPLSFGIIYPGAAGLDVGSMNMFVSYPGADNAQTVKEYNAYTEDLHLLAKEMQQAGVTHIAMEATGVYWMSVYEVLEQYGLNVRLVNARHYKNTDGQKTDVKDCQWLQQLHAHGLLRPSHIAEEQYRELRTYIHERGVLQHQKSDTLNRIHKVLTQMNIKWQHVISDIEGVAGMKVVRRIANGITGAENLLAGVSTDKLKSTREVLVKSLEGIFKLQYQTVLQNHLAAYDFYKKQMLVYEQLIEGLLKKMLCTNEGKEQKAIKNKTTVVRKNQYHFNLKEYLHQIVGVDLTEIDGLDEASVLMIIAVVGLNMHKWPTAEHFVSWLNLAARPQKSGGRVLGHQKRFTNNPATQAFRMAAQTMWQNKGILGGLYRRLAHTKGSKKAIKAVARRLAVIFYNMLKKQTKYDPKIVVMDEEKLKAKKIARLQKEAEKLGCRVERVAA

SEQ ID NO: 304637 - protein, 410 aa, unidentified
MEVMFDRVAGLDVGKETVTVCLRRPGPRGGRRSETRTFRTMTGSLQVMRDWLVEAGVTIAAMESTSAYWKPPFYCLEEQMTVWLLNAAHMKAVPGRKSDVRDAEWIAQLLEHGLLRPSFVPPPEIRRLRMLTRYRVQLMGDRLRDTVRLELMLEDASIKLSTVASSLTTVSARAMLTAMIEGETDPLRLADMAKGKMRRKIPDLAQALTGNFDANHARLAHSMLRRLDLVEHAMAELDQVIVDACRPWQHQIELLQTIPGVGPKVAEVIIAETGGDMSRFPTAAHLAAWAGLAPAMNESAGKQSPAGKRHGNKWLAAMLVEAAGSVGRMHNKNYLAAQHARLLKRRGMGRAQVAVARTILVSAYWMLKRDEPYHDLGADWHTRRNDQAHTRRLVAQLERLGHTVIIDPAA

SEQ ID NO: 304638 - protein, 397 aa, unidentified
MIAVGIDVSKSKSTVAILNGDGSIRAKPFDVHHVANELHALVDYIERTSEPPTILMEPTSHYHYPLLKAFQEATLPVCLINPYQMKKYGDTALRKAKTDKRDALRIAKYALEKSYSLVPYTPQDQKYEDLRFLSRQYSQRISTLTVAKVQLLSLLDETMPGITTILPLKSRDPDNCVLLRFIKRFKSFDVIRKMGKTRFLDSYQILVKKTKDRFAGSKGLAIYELVLNSVTTRGENPLSSMSQDQCVDLVSTSQKAADEINLQMRIIAETIPEYKVLRSMAGVGDRLGPIILGEIGDVRRFHSGKALNAYAGNDAPPYQSGQFESRNRHISKRGNPALRKACFEVMQALKLTKPQDDPVYLFLLKKEQEGKPYNVAKMAAINKFLRIYYARAMELYK

SEQ ID NO: 304639 - protein, 350 aa, unidentified
MDIVGGFDVHRKQITFDYVETDTGESHRGEIRPADRENLREWLEEFTERFAEQQAAFAVEATTGWRYVVEELQRAGIEANLAEPADSRALQGRKKRAKTDRIDAKHLRDLLVIDRLPESWVPPEHVQEIRTLMRMRHSMVEERSAHLQRIHAQLFHNGCPKQERDLLSVEGRQCLRNLNLPGAARRVVEVCLKMIEHINEELEPIEAELRAYARAQSGCRALREHYGVGELTSVALFSELGDTRRFSSSRKAVRFAGLDVTVHSSDEKRAAGKLSRQGSPVLRWAAYEAAKGAYRKSSPDHEYYLQNRERIGTNRAALSIARKLIRRAHHTLRELGEEAMSEPVVVSSSA

SEQ ID NO: 304640 - protein, 493 aa, unidentified
MKKNQKARKKEVLNLLQKQKIRSIEQIDAYKLSVCHPHSAGIDLGSAENYVALSPQIAAEMDLPIVHTFGTTTPQHEACRDLLLRCGVKDVCMESTGIYWINLHYILTQAGINVCLVNPKMFRMVPGRKTDVLDCQWLQTLHFYGLVRGSLIPGEHIRQLRTYMRLREKLIQDRSRYVQRMQKAMVEMNLMLVNVIDDVTGKTGMAIIEAILAGERDPKRLAAKRDGRCKHTEQEIEEAMTGIYKPDQLFALQINHSVWQDLQKQIDKLDVEIGRLLKTFEDAPQRGAAHAQEEAPEPASQQQAGQKEKPKTEKKKKTRPSKNDIKAGIDLEKELLRICGADLTSLTGFQANAILQVVSEVGTDLSKFPTREDFTSYLGFAPHNKITGGHVISSRTDRNKSHAAQAFKKVIPSIIKGKSSFSAFYHRIAGQRGKAIAITATCRKLAERYYDVCTKGVDYVEYGENIYKKKVEERELKYLLKLAKKHNMELKTA

SEQ ID NO: 304641 - protein, 357 aa, unidentified
MKSKIKQLDFTGETIFTALDVHKKNWCVTIGGREFELEHYTQNPNAKELARHLKKNYPGAKYMVAYEAGFCGFGIQRSLKEEGIDCIVVNAADIPTSNKEKRRKQDKIDSRKIYKRLAAGDLEGIYIPQTEMEHARSLVRERSRIVDDQTRCKNRIWSLLMFSGLSVDTEKPKQYWSRKFVESLKQLDCESKPLREALDLAVEEYILVRQLLTKATKKVRELSGDKLFAEIQELLRSIPGIGLINAMVVHTEMQFICRFKTLDHLCSYAGIVPDSDSSGEKEKITGITHRSNNYLREAIIESSWVIVRKDPAMLMLYKHYCARMDENKAIIKIARHLLNRIRYVWMNRTTYEIGIAA

SEQ ID NO: 304642 - protein, 359 aa, unidentified
MDIQGTSVGLVVHGLSVVAHAVDEETGKVSKARLCPDHGEVLGWLHQLRAPVRMTYEAGPTGFGLARAINEAGMECVVAAPSTLQRPAGDRVKTDARDAAHLARLLRLGEITAVTVPEREIEAVRDLVRAREDARADLMRVRHRLSKLLLRQGIVYFGGTPWTCAHEEWLRRQRFDDAHLKAAFDHGFDAVLAATAARDRLDEQITEVAASPRFADPVNRLGCLRGISALTGLALTVEIGDWSRFTGSSIGAYVGLVPCEYSTGTSWVQGSITKVGNTHVRRLLIEAAWHHRKSYRTSGPTLRARWAVAEPALRARGHAGNRRLYKRWRHFTERGKNPLVANLAIARELAGWCWSLATM

SEQ ID NO: 304643 - protein, 350 aa, unidentified
MSSNSAAATTATIGIDLGKNTFHLVGLDRRGAIVLQLKLSRGQLERRLANVPRCLIGMEACSGAHHIGRRLTELGHDVRLIPAQYVKPFLKGHKNDYRDAEAIAEAVQRPTMRFVAIKTPEQMDLLALHRVRSRLVGQRTGLINQIRGFLIERGITVRQGVLPLRKALPDILSSNADVLSPRIVGLIADLAQDWRRLDERIATVSAEIEALARQDDGCQRLMTVPGVGPIISSAVVAAIGNGAGFKQGRDFGAWLGLVPKQESTGDRTILGKISKRGNKYLRTLFVQAAHVVLARRPGTAKRGLWPWIEQASRRLHRNMLAIALANKLARIAWAVLARGRAYEPKLPAHA

SEQ ID NO: 304644 - protein, 446 aa, unidentified
MNDRNDLSRGDRNRNDKLAQLRELLPVTNAIVGIDLADNKQAAVVTDHDSRVLARRTLSCRPWELSELLDWALRRARAAGFRSATVACEPTGHRWRVLDQLAAQRGLPLVCVQPLLVWRAREGEDMTWDKSDPKDAVIIARLAAGLRCYVPERTDATWARLRHLGARRVQLTTDATAGVQQLRDLLECVWPAALSVSAAPFRSRSWCASMAVVLDRAGGDLARVRRLGRARFTAAVRRELPRWGATRPCLRIVAAVFDALADPVGVTAHRPGGLERAQLVLEDWQHTRRRLADVERRMVDVLDELGLTRLVTSIDGLTAVGAATLLAETADLTRFRSPRAVVKHAGLCPRDNASGAHQGKTSLSGRGRPQLRLAAWRAVWAALPNNPVLAARFHHLTTREDNRLARQQARATCAASLLRWLHVVVTGGVRWDPAVAAGDKPQSAAA

SEQ ID NO: 304645 - protein, 334 aa, unidentified
MENIALIGIDLGKNSFHIHCQDRRGKAVYRKKFTRPKLIEFLATCPATTIAMEACGGSHFMARKLAELGHFPKLISPQFVRPFVKSNKNDFVDAEAICEAASRPSMRFVQPRTESQQAMRALHRVRESLVQDKVKTTNQMHAFLLEFGISVPRGAAVISRLSTLLEDSSLPLYLSQLLLKLQQHYHYLVEQIKDLESQLKRKLDEDEVGQRLLSIPCVGTLTASTISTEIGDGKQYASSRDFAAATGLVPRQYSTGGRTTLLGISKRGNKKIRTLLVQCARVFIQKLEHQSGKLADWVRELLCRKSNFVVTCALANKLARIAWALTARQQTYVA

SEQ ID NO: 304646 - protein, 530 aa, unidentified
MTGRTRTNRRKSRKSTKSTQRKTLNLQKPSGVIAPRVKRVGGEKFAIVCVDPAKHRSEWMMADYFGNLLIERQTLEHQAAFFKMAVMQIREAQQQHDIQDMIVVVERTGNYYLAPKRAFAKAGFDTRVVHPFATKQYRVPADPGIKTDGTDLNAQHRAAVAGFGLCEFELESPYRELQLRARHRRNLVGKSSALACQIREHLHLAMPGFSTLFDHLFDNKSVMAMARRCASPAVALELGQVGLSQHLREQKVRHQSRTIDKVLAWASQAASSDTIQDGALHHAIWTDLEELYQRFRRRIRVHERELAGDLARTPYIRLLAIPGINVVSAAELAGEMGPITRYANANAITGRCGLYPSRHQSDQTDNDRGPIIRQANRRIRCALMRIADSLVCHCAYYRGLADVDRARRINERAIRVKIAKKFSRLAYACVAGDEPMKHPAMRQADSIMEKLREFHRVHETPMDQVLADLKATVEQLPYHTRHREAEVVAEVLRQHAARRRGPVAVGALFPAVLARLEIRTTEETETRGRS

SEQ ID NO: 304647 - protein, 442 aa, unidentified
MGTQSTSEALTDYRGGTAPAGSRLYVGIDAGRRQHVVAAIVLERMENGSWERAAVHRIQTTGQGFRELIVWLQAFGHTPDQVRIGCEPTGLWCAETVVAWLERHGYEVQWLQTWALHERRRLAIGKQTKTDALDARLIARLLYEREFHAQNRGFLKTGPRSTDGLRLLVRSRVRLIEQRTRLRLQLTNVEDALFPELKEFFKTSITSPAVRRLLEAFPTPKSIAVGPAEDVYRVLVVQGRSRIHAARVNELCQLAAESAGLVEVEPILHAQGWLLRQLNAVDEQIEDLELSIVAALESWPAEQRAVLASFPYMSHMRQAVLLAAIGDVNTFRNDGQLRKFLGWYPEARESGTTISTHRLGNSGNRLGRREVWFWAMQLITPRQPATPFAAYYQRLRTRGVPGHAAVGHLAGKLISVLFFCLRSGRLYDPAQHARALGLGDAR

SEQ ID NO: 304648 - protein, 341 aa, unidentified
MDTVSLVGIDLGKHCFHLHAQDASGRMVFRKKLTRSQMFALLGNFPSCTVVMEACAGAHWIARRLQALGHEAKLISPHFVKPFRQGNKNDFADAQAICEAASRPSMRFVSPRNETQQVVSALHRVREALVRERTGTINQIHAFLLEFGISLPRGMAVIRRLPAVLETQALPPRLVAVLERLQAHFKYLDEQIGQLEHELLTQLHEDERSERLLEIPGIGPITASVLMSELGDAHQYGSARQFAASIGLVPRQYSTGGKPTLLGISKRGDKELRRLLVQCARVIMLGIERRTDSLGTWVRSLLARRHSNVVACALANKLARIAWAILAKGTHYRSAPAALAA

SEQ ID NO: 304649 - protein, 466 aa, unidentified
MAKQDERKLHVLREDSAGIDVGSREHWVAVPADRDADCVQKFGTTTSELNRLAAWLGACGVTTVAMESTGVYWVPLYEVLEARGIDVMLVNATHVRNVPGRKSDVKDCQWIQRLHSYGLLRASFRPSADIVELRTYARHRQTLVEGAAREVQHMQKALMLMNVQIHHAVNDITGVTGMRILRDIAGGQASPAELAKHRDPRCHVTPEELEKALTGTYKVDQLFVLQQALRLYDMYQAQIIECTGRIEAKLAALTSSSLPEAEHAAPPRPESASPKTARKSAPRPRRAQKHKPLDHVLPTIIQVAGVDLTKIPGIAPLTALNLIAEIGLDMTPWRTEKHFSSWLNLAPGTTKTGGHLKTGRRPMAKNRAGELLRQSAVSVGRTRTALGAFFRRIAATGSKAKAVVATARKLGILVYRLISRGASYVEVGLERYERHYTERRLGALKKQAKSLGYALSPITETAPAIT

SEQ ID NO: 304650 - protein, 424 aa, unidentified
MATITPVTATVKSEDLMQVCCDVSKEKIDVYSRVGHEGALFEMMDTIRNCGSVLQRQLKAWQELAQAHGHAGVLVVCEPTGGHERKLLALARQAGSRTAYVSGEAVGKARVIESNDTGKTDRKDARIIATLAGMGKTLKVRQLPDEYERLRELNTTYELECTTVATIRNHVHDQVRQLFPDLDGEDGFVFSATGRAIRQLFGLNPARIRECSWREFVAKVKTFVKAARLERLEKVWAAAASSLLHQCPATVRAMREERLGELFEDLDRHLGRKLQLRTRILDAYGKTEESRKLADIPDASSFQLARVIAESGPLADFRHASQLLRYFGMNIRERQSGKWTGKNRISKKGRALGRKVLYQLVFSSLIGEGKLFADPYRRKKADCACGMKAIVCLMRKALKMILGVFRSREEFSRDRVFASLPAAA

SEQ ID NO: 304651 - protein, 358 aa, unidentified
MIEEDGIRHVVGGVDTHKDLHVAAVVDERDLVLGTRCFATTRQGYRQMLGWMRSFGELRRVGIESTGSYGAGLLRFAQQAGIEVLEVTTPDNQDRRRRGKNDDLDAQNAAHAAFAGKRTVTPRSRDGMVESLRVLAACRKTAVAARRVALQMIQNTIVCAPDGLRDTLRAMTRMQLIRTLAAWRPDLSAYRDVEAAYRISLRSLARRYLELHDEIADLDAMIGAIVDELAPDLIARNSIGHTGAAQLLLTAGDNPERLRSEASFAALCGVSPIPASSGKTVRHRLNRGGDRHANSALHIIAIGRLRTDPKTKAYVAKRVAEGHSKLDAIRALKRYIAREVFGLIARRQKEINQTRIAA

SEQ ID NO: 304652 - protein, 406 aa, unidentified
MAAVMIGVDPHKGSHTAVVTGLAEEPLGELRVRACAAQAEKLLAWAAAWPERTWAVEGAGGLGRLLAQQLVAAGERVLDVQPKLACRVRLLQAGDANKNDPNDALSVAVAALRSRACRQVTADDYPAVLKVWSKRHRDLGRTRNQVACRLHAVLCDLVPGGHPKEISAAQAARILEQAAPSGAVARARAELAAEFLADLRRLDVQLRDTRKKLAAAVKASGTTLTQVFGVGPVVAGTIIGDVSDVARFPGRDHFAAYNGTAPVEVSSGNRKIYRLSLRGNRRINHAIHMAAITQIRHRHSNGRAYYEKKLAEGKTHKEALRSLKRKISDAIFARLQADARQAAAAAPKGPGGHPGNDSASSAASSHPARQLFGQATPGPGTTIRPGTTAGTPSPSRPTSKKTQTTT

SEQ ID NO: 304653 - protein, 444 aa, unidentified
MSDALPSETTEREWAAFAAIDWADQKHFWRLVPADSPHAEQGELENTPEAVEVWAAALERRFGGRPIAICLELSRGPLVYMLAKYAHLILFPVHPTTAARYRETFCPSGAKDDPSDTASLLDLLLRHRERLSPLQPDTTETRLLQFLVERRRQVVDEKTRQSNRLTDCLKSYFPQILRWFDDVAGPLVGAFLKRWPSVQDLHRALPGTLREFFHEHNCRGEERIDERIAAIYQAIPATRDEAVLEAGAITARGLVAVLATLRDNIAELDRRIAQLVACHPEAALFDSLPGAGAALVPRLIVAFGTRRERYDNACQVQCYSGIAPVKVASGKTQTIRFRRACPKFLRQTFHEFALHSLQKSEWARAYYQLQRARHKSHHAAVRSLAYKWIRIVFRCWKDRKPYDEEIYLKSQRRRSATLGATVALATAAGWKKVAGFNKFSAIPS

SEQ ID NO: 304654 - protein, 425 aa, unidentified
MNYKQNEKINQVKESTLVVGIDIGSTTQYARAFDWRGIELGKVFTFSNSREGFESFKAWMQHLQDKYRKSDVIVGIEPTGHYWFDLGAYLEDEGILLVMVNPYAVKQTKELDDNSQSKNDRKDPKVIAKLVTEGRYSAPYTPDGVYADLRIMVANRKRLIREMTQIKNRFARWFAIYFPEYTDVFGDYEAQSSMLLLKKVCTPEAIVELGAEKINQIWRDARLRAVGMKRATTLCETAKRSIGLKKGSSAARYEMKLLLEDYEYKKAQLDAVMEEIEKLCRKIPESEQMLAIKGIGVITVAGFLAEVGDVRRFESPRQIQKLAGLSLRENSSGKHKGQTTISKRGRSKLRAVLFNAAIPLIAKNPEFKSLHEYYTTRANNPLKKKQSVIAISCKLIRVFYAILANGVTYDPQKMLSDIHRQPQAA

SEQ ID NO: 304655 - protein, 316 aa, unidentified
MVVGIDVAKAELVVSILPAAERFTVANDERGVRTLVERLRALAPTLIVLEATGGYELLGVAALAAAALPVVVVNPRQVRDFAKATGQLAKTDRIDADILARFADVVRPAVRPLVDEEAQELEALLTRRRQLLEMLQAERNRTGQVFGKGKRGVKKSLKNHISYLERELRMTDTDLGDMIKASPVWRERDELLQSVPGVGPVLSRTLLADLPELGRLSRREIAKLVGVAPLSRDSGTMRGRRFVQGGRASVRAVLYMAALVATKRNAVIRAFYQRLVAAGKPKKLALVACMRKLLTILNVMVRTAQPWTTDAALIPA

SEQ ID NO: 304656 - protein, 477 aa, unidentified
MFGGCSVIRTHHKPKPMSKRKRENNKTNRAAAAQTPLSCFINPDAAGIDVGAQEFVAAVPRGRDGEGRDVRTFSSFTEGIHALRDWLLECKIKTVAMESTGNYWLCACAALEDAGIEVCLVNARHVKGVPGKKTDVCDAAWLQQLHAAGLLRASFRPRQDILPLRYLMRHRADLITQAAQQVQLMQKVMTEMNLHIHHVFSDVDGVSAQAIITAILSGQRDPAALAKLRDHRSRTPLAKIKAALVGDYREEYLFVLRQCQARWQEISASITQADEEIARRTAAIGSENAAPLPEAPAGQRRVQKNMTTAMPVYAEAHRILGVDLSAIPGVSGGVLCTLISELGTAGQIREKFRSANAFASWLGLCSDNRISGGRILKAKTRKVANRVANILRMAAQAVSRADGKMGDYVRRFKGRLGKAEGIVAGAHKLARIIWAAIVTGQPYDETKAFNLTPATAARRLKNLQNQAQALNMKLVPA

SEQ ID NO: 304657 - protein, 400 aa, unidentified
MGVIIGVDPHKGSHTAVAIGRDEMRLATVKVRATRRQVDQLLEWAARFEERTWAIESAGGLGYLLAQQLLGAGETVLDVPATLAARVRVLGTGRSNKNDPNDAYSVAVAALRAPRLAPVARSDHRGVLRLLAKRNNELGRARNKTACRLHALMAELVPGGIPNEINAASAERTLAGVKPQSPVERARHALALEHLDDLRRLDGQMRVSKARIAEAIAASGTTLTELFGVGPVVAAMLIGYTGDVARFRNRDHFAAYTGAAPIEVSSGGRITHRLSRRGNRQLNHGLHIAAITQIRFPHSPGRAFFERKVAEGKTKKEAVRALKRRIADAVYRQLLIDARTVKGPGGQPGTALQSSVADSTPRRPALRISHSRARTNARTRRATTGTPTSSRTRTSTTEAH

SEQ ID NO: 304658 - protein, 342 aa, unidentified
MDYYAGIDVSLEASSICIVDASGKIVKEAKVLSEREELIAWFKALPFTLARIGLEAGPLSQWLYAGLKGAGFAVELLETRHVRDAFKAMPVKTDRNDARGIAQLMRLGWFRPVHCKSMSAQETRALLTARKLVQAKLHDVAMSLRGILRGFGLKVGPITPAGFARRIKDLTEHHPALSAIAKALLAVHEVLLRELNGFERQVRQQARSDARVKLVMTAPGVGAIVGLTYVAAIDDPARFTSSKTVGAHFGMTPKKYQSGETDITGRISKTGDNGVRTVLYEAAHVILTMPVKGGALKSWAAKLAKRAGMQRAKVALARKLAVILHRMLADGAPFDAAKAAAA

SEQ ID NO: 304659 - protein, 446 aa, unidentified
MKQKSFLGIDVSKGYADFLLLDEHKKVLEEGFQLEDNQKGRQQLKILIQEWFSKGITELYCGVESTGGYENNWYSHLKYLSAQMNIQVSRLNAKAVKAVSDASLKRTITDLVSAHNIACYLISFSEKVDYSRGTETESRFKEGRQHYSYIRMLGKQKVQLSNQLEKLLYQHFGEMLVYCRHGIPSWLLRMVSQYPSAESVVKAGMKKLTAIKGISADKARALVEKSGVSVQLISRESRHIIAATSKEILHKMELIENEKQYLAKMYEQEEAVKLITSIQCIGVDSAIALMLEIEDVNRFAVTKKITAYYGVNPTFKQSGDGTWGSHMSKKGRSEIRTILYMASLSGMRCNSILKPLYARYRAKGMKHYQAMGVVMHKLLRIIYGVLKSKRPFDPAIDEHNTTKAKEKQKQKDEIKKEQKKHRYQAVSTDAPLSNRTVQKRKKQIAS

SEQ ID NO: 304660 - protein, 426 aa, unidentified
MNGSNFTYKLKAVNKNCAGIDVHKEFVCVTTLCGPEDNILMEYHKFRTTKAELHKLKEMLLSMDIKVVGIESTGKYWFPVYNALHEVIVLNVYNARHIKNIPGKKTDKADSEWIARTTRFSELMPSFIPCERIRKSRTLSRSRKDFLHKRSGIRQLIHGYLEQASIKIGSELSDVFGVSGRKLLELLVRCKNIHPKAVAECLHGHLHNKLDEVLLAMDGYMDDDYRYSLKLLLGMEQKISEAIKDTEAKLQSMLITNEAEQKTLARLLTIPGVSNLSALLILAEVGFDLSSFPDEDHFSSWAGLAPGKHESAGKNKTGKIQVRKSHFRTLLVELALSASRTKRTYCSVKYRILRARSGPQKAIIAIAHHLAKAIYMIIEHKQEYKELGDDHFSKVNANSTKKRIQKLIDQVGADVLKEYLTENHLT

SEQ ID NO: 304661 - protein, 394 aa, unidentified
MKLVGIDVGKNSHHFCVMDKETGEFNVTPSSFPNNKEGFDFLINSLKPYSKKSILLGMEDTGHYHVALLKFLLSNGYTVALINPKTTDLTRKMEGGITKNDKLDTITICDVLDTPERKKQYRITKVDRFDLYEQRQLTRHHHNLKEELNVYCNRLQKSIDLVFPEFNTLFSSKYGIVYMNLLKTFGSAEAIASTDIRTIRKFFEIKGKGNRISLTPEKLKECAKNSIGISSEVETIQIKHLVSQITLIKEQIAEIDKKIEEFSIPNNSPILSIPGISHFSGTSILAELGDIGNYSKPSQIIKFAGVAPYHYESSQYNAQHTGITKKGSKYLRKTLYQIILTVINNNPVFKKYYRLKISQGKGHRCAQGHCIRKLLRIIYHLLETGQSFDPALLR

SEQ ID NO: 304662 - protein, 346 aa, unidentified
MLYAGLDLSRKRLDFHLLDSQGATVEVGAAPPDADGLCGLSERLARHGEPVRAAIESMNGARFVHDRLELAGWEVEIADAQKVKGLAPLACKTDRIDAWVLAELARRDLVPAIWLPDPLVRAERERARWRLHLVRHRSSLKQRVHAVLLTHGKPCPVSDLFGVRGRQLLARLSLPEPWQATLEASLRLIDELDREIGDCERELRRLGADHRYVPLLCTVPGISWVLAYTIAAELGDINRFPTPRKLAGYTGLCPRVYQSGERDLRGPLAKRGPRYLRWALVEAATHACTAPAYRDRYQQTKARIGKQRGAKVAQIDLARRLTEAIWHMLTRNQPFAPKGATDPLAA

SEQ ID NO: 304663 - protein, 335 aa, unidentified
MTVSNQAERVIGVDVSMSRLDIADSQGKIRKTISNTAAAIKKAIVQKLKDGDSVFVVCEATGGYEKELVKTLQEAGISVAIANPRQVRQFASAMGRLEKSDPIDAEVICQFGQTAELPAAPAKTAEQEARDAVVRRREQVLEMIGQENNRLQQESDPKMKKTIERVLKTLKSLQKKLDAEISRFLAEEAKTNASVEVLMSVPGVGAVTTATLLSELPELGQLNRSEVAKLAGVAPIVHESGQSRGRRSVSGGRGPVRRVLYMASLVGIRSNPVLVEFHRRLVSRGKPQKVAIVACMRKLLTILNSMVRTKTKWRTKGEEKVMADQGPATTRAHGD

SEQ ID NO: 304664 - protein, 317 aa, unidentified
MATSSYVGIDVSKARLDVAKLGGHVWQADNTPDGIAQLVQQLADIQPELIVVEATGGYQRNVVDALFHAGLCVAVVNPARVRQFARACGLLAKTDKLDAFVLAEFGQRVQPKRYEGKDEAEKQLSALLVRRKQVEEMLKAEQNRLRTVSPALRGSVERMIAVLKEEKKRLDEQIRELMNEHKAWQEQTEILGSAPGVGPVTTATLLADLPELGKMDRKKIAALVGVAPMNYDSGKKRGYRKTKGGRGDVRSILYMSTLAATRHNPLIRTQYQHMLKRGKLKKVALTACTPALAGGARVRKFLTILNAMVRDQQPFRG

SEQ ID NO: 304665 - protein, 345 aa, unidentified
MENMYYIGLDVHKKTISYCVKDGSGRIYAEAEIPATRLDLDMWMKTLPQPWTAAMEATIFTAWIYDHLKPHAAAVKVAHPLMLRAIATAKKKNDRIDANKIADCLRCDFLPECYMASTEIRERRRTLRYRNLLVRQAVQMKNKIAVLLMEAGVSYNKQKLHKVGYFRELLATNQDIDAGLKPLLRLCRETVVRLGKTESALVRSLQRDSLLMERVERLMTIPAVGPITALTWALEVGDVQRFSSIKKAISYCGLCGAENSSANIIKRTPLSKQRNKHLQTMLIEAAKMAPRNSVDLAVIYDREKQKGNANRATLAVARKLVAYLVAVDRRQKDFLIVERENRTAA

SEQ ID NO: 304666 - protein, 372 aa, unidentified
MKQNIIHIGLDVDDTQYHGSAFNKETGEVIDFKSRPTLKGLLQQLDRMAQHFSGCTIKLCYEASYIGYSLQRDLMSNGIHCDIIAPGSIPSPRGKVIKTDRIDAGYMAQFYANDLLTIVQPPDEEQEQDRDLLRSRQKVMQQRNHLRKHLQAVLRRSGLHYKADTGHKSHWTKIHYFWLVRTIDGLSGSLKVNLELLLRQLKALNEVLTDYGQQIEVLASSPRYQPAVHSLTCYKGIKNIFALTMITEIGDIKRFSHPRKLVSWIGMDIREYSSGGKHNRFGITKHGNRYLRTAFVEANQRGYRTARIGKDVKARRKDIAPELINIADRCLRRLNKKGNRLLLAGKHPNKVKVACAREMVGFVWESLNKAAA

SEQ ID NO: 304667 - protein, 323 aa, unidentified
MKKTQIQKQKVVVGVDVSKQTLDLFLLPINQVRQFANSPEGIDQCIEFLKDFDVEIVLCEATGGYEWPFLFGMDHAGVSVARSNPRQIRDYARSCGVLAKTDKIDANIIARFANERKPEPLKLPSQTQQELQSLLTWRRQLLEHRDRLTQQGSRSSSRMVTDQLEELMRSLKEKIVTLDKTITALIESDPDLKKLDEILQSTPGIGPVVSHTLIVECSMLGHCSDREIAAYSGTAPFNCDSGQMRGRRRIWGGNGRIRRVLYMAVMVGAVQGRNTILSRFYHRLRSAGKAFKVAVTACMRKLLVILNRLVKRGEKWRDLASTS

SEQ ID NO: 304668 - protein, 383 aa, unidentified
MTGTEPHAWETGLMDTITYVGLDVHKATVAVAVAQGGRGGEVRQLGVFENRSEILTKLAARLSKPGRRLSFCYEAGPCGYGLHRLLTGSGHDCVVVAPSLIPVKAGDRVKTDRRDALMLAKLHRAGELTPIWIPDAAHEAMRDLVRARATAGRVLSKARQHLQSFLLRHDQIYRGARAWTLAYRRWLTTVRFAHPAQQIVLQDYIHAVQDAEARLDRLTRQIEELLPSWAMAPVVAALQAMRGVALVVAVTVVAEVGDFRRFANARQLMAYLGLVPSEHSSGASVRRGGITKAGNVLARRVLIEGAWTYRMPARVSRKLHDRNEKLSPAIRDIAWKGQIRLCSRYRRLAAAGKPKVVVTTAIAREMVGFIWAIARIAQPALEG

SEQ ID NO: 304669 - protein, 354 aa, unidentified
MSNKSIATIATMGIDIGKNSFHVVGLDRRGAIVLRQKWSRSQIEVRLAAMPPCLIGMEACVGAHHLSRKLQAHGHDARLMPAKYVRGYSKGQKNDFRDAEAIAEAVQRPTMKFVATKAVDQLDLQALHRVRERLVRQRTGIINQIRAFLLERGIAVRQGFRCLRTELPGILAKRSDALSPRMMRLIEDLASDWRRLDERIEGLSADITSLVEQDPACARLMTVPGIGPIISSATVAAIGTGDVFSKGRDFAAWLGLVPRQISTGDRTILGKISKRGNRYLRVLFVQAAWVVLIRPQSWERHGLKPWIEAAKKRLHHNVLAIALANKLARIAWAVLNKERNFEVTRTTAPSSQPA

SEQ ID NO: 304670 - protein, 414 aa, unidentified
MARKKRRKRKANKKTLLVTADIGKKSHHIFFTTPDGEEVKPFPVPNSREGFEKLWEKILNFRDRNGLESVLFGFESSGPYAEPLTHFMDARGAKLTQVNPKHTKKYKEVLDNSPEKSDWKDPRVIADIIKMGRGLSVIIPRGHAADLRRLVHCREHLMKHRTMLYNRIHGCLSIVFPEYNKFLDITTKSATWLFREHGTPKKILALGEEELRKKLKEKSRGKLSSAKIEGLFQAAMESIGIQEGHVGSEIEIKHLYKQVESTDGSIKEIEGKMAEILEQIPASRHLLSIPGVGKNTAATLIGEIGDFRNFRSAREVIKLAGLNLYTVSSGKHIGKIRITKRGRGLLRKALYFAVLGMIRRNGYFGKLYKNYIKEGKKPKVAMIILARKLLVIAFALIRDEKDFDSSLNHDEKAA

SEQ ID NO: 304671 - protein, 407 aa, unidentified
MSTTKKICCGLDVHKETIFAAINANGKAGEVKEYSTLTCQVSALSEWLKVNGVNDVAIESTGIYWIPVWNILEAAGFRLILVNPYFIKQMPGRKSDVKDSQWVAQLLAKDMLKSSLIPCHQIRTLRAYSREYVKRQQSITRIVVGMERVLETANIRITSMVSKIESKTVLNIIELIIKGDTDIDKLLEKVHGRTKNRKGELVRQSLEGFVLPEHRFLLSQQMEEYRLYYKQADELQKQMLAICKEHYAKEMELLKTMPGTDDQSVMQLIAETGADMGAFETSNRLSNWAGLCPRNDESAGKIKSKATTKGNKYLRRIIVQIAWAASRTKNSSYYNKYNQLAIRKGRKKALVAMARKQLTVVWNILKYGQPYDINKQPVITPEQLLAKRKYHEKELGKLSILAIAANQ

SEQ ID NO: 304672 - protein, 339 aa, unidentified
MNEVTVIGIDLGKHSFHLHAQDAAGRMVFRKKLSRQQLLRTLANVPCCRVVMEACAGSHWLARQLAGMGHEPRLISPQFVRPFVVGNKNDFGDAQAICEAACRPSMRFVSPRNEAQQTVSAMHRLRERLVRERTATVNQIHGFLLEFGISLPRGAALMSRLPTVLDHETLPPRLVGLVVRLHAQVHYLEEQIRQVVQDLKASLREDDKSRRLLEIPGIGPITASALAVELGDARQFANARQFAASIGLVPRQYSTGGKPTLLGISKRGDRNLRRLLVQCARAVMQHTASRTDALSLWVKTLSTRRHSNVVACALANKLARIAWAVLARGTHYQARALTT

SEQ ID NO: 304673 - protein, 398 aa, unidentified
MSAWRPLAGLIRSLSAFLARDPSQLCRPRFASPDRHRFVSPNAWLEVGFRMLADQLDYIVGVDPHRDTHALAIVHVVSGAIVGEATVDADSGGYAEALRLVEEQAPGRRAFAIEGTGSYGLGFTRFLTGRAESVLEVGRLRRERRSGGKTDALDAVRAARSVLAAERPSTPRAGGERQALQALVAAREGAVNAKRAGLCQLRDLLVTTPEPLRSELRPLTRARLLQRLAATRPHGRHDAELRGSLVALRSIARRVLQLTAEERELAREIERLTRRLAPHLLDQPGVGPHAAAQLVLSWSHQGRIVSEAAFARLAGAAPIPASSGQTIRYRLDRSGDRKLNRALHQILVTRKRTHPATIAYIQRRLQEGKTRREANRCLKRYLARNLYRLLEHGPPIAT

SEQ ID NO: 304674 - protein, 342 aa, unidentified
MQVTTIGLDIAKNVFQVHGIDAAEKVVVRKQLRRRQVLEFFKALPACLVGMEACATAHYWARELTKLGHRVRLMPARDVKAYVKRNKNDAADAEAICEAARRPTVRFVQIKSTEQQGRLMLHRARDLLMRQRTQVINAMRAHLAELGIVAAQGRDGIKELLKIIASEADARLPVDAHTSLVVLAAELQAMQTLIGSIEKRIMVQHRLSEASKRLESIPGIGLIGATAIAATVPDPKVFGSGRAFAAWIGLVPREDSTGGKQKLGPISKRGDRYLRRILVVGACAVLRYARHKPEKYPWLTKLLERKPFKVVAVALANKMARIAWALLAKGDTYRVPALAAAA

SEQ ID NO: 304675 - protein, 334 aa, unidentified
MEKITTAGIDLAKRVFALHGVDGAGRVGLRKTVRREQLMPTVAALPPCLIGMEACSGAHEWARRFQELGHTVRLMAPVFVAPYRKSGKNDGNDAEAICEAVSRPNMRFVPVKSAEQQAILALHRVRQGWIEERTATINRIRALLTEFGVVLPNRAQYVRRGAMVAAEGLPALARRALEDLRSHLGTLDERIAAYDRELQAQARQSEAAQRLMQIRGIGPITAVAIVATVGNARDFRSGRQFAAWLGLTPRQHSSGGKQRLGHISRRGDAYLRCLLVQGARSVLLTATRHSDRLSRWVLSVQARRGYHKALVATAAKNARIAWALLSKNQTLRAA

SEQ ID NO: 304676 - protein, 352 aa, unidentified
MTVTNLPRCITGGVDTHLDVHVAAALDDRGALLGVESFDTTIEGYKKLLAWLSDFGSVELVGVEGTGSYGAGLTRHLQAEGIRVVEVDRPNRQRRRRKGKSDPEDAISAARAALSGDASGEAKTRDGNVESMRILRVARVSARKGRTQALNQMRSLVSTAPEPIRDELRGLNVFHLLERASAYRPGTKRDIASLTKLSLRMLARRAMTLEEEVAEIDAILKTLVKETAPELVGTLGIGTDAASALLVAAGDNPERLRSEAAFAHLCGTSPIDASSGKQHRHRLNRSGDRQANSALWHIVITRMVYDPRTTEYIDRRIKEGLSKKEAVRCLKRYVAREVYGLLPHDKLGVDSP

SEQ ID NO: 304677 - protein, 349 aa, unidentified
MDKESSSQQKLYLGFDVSEKSIEVFGVCGTQSTEKAIRIENSRSSIQSLLTHFKDKEQVCIVMETGTHSTWMSRYIREIGFEVIVAHARDLALIYGASKKNDRIDAEKLARLAQADRKLLHPIEHMSEERQQDLMIIKCRALLIKQRTQLINTIRGMLRTFGIKDHSTSVRNVKNFELSNLPSQVITALSPLLQQIRFTEMQIRYYDREITKLYKKYQVTEILRQIRGVGPAISLTFVLLVGDISRFPDPKRLAAYFGVVPKQDQSGETDKQTNITKAGNSLMRVLLIQGAQYILGPFGTECDLRDYGKRIEARGGAIAKKKARVAVARKLIILMHRLWSNPEKEYIPC

SEQ ID NO: 304678 - protein, 478 aa, unidentified
MPTVTKSRANLKTQGAAPVTALASRDRVGVPTGKRRAGRRLGPTGEPPAVDGAQKGAENRAILPPSGRMSDGAPTRLETQLDGAQGRMAMRIIALDLGAKKVSYCELRQGEVVQRATVSEVGSLEHLLGVEQPSAKVAIEACREAWFVHDLLVKWGNEVVLIDTTRSKQLGIGQHGRKTDRIDAETLARALEAGRIPKAHVLSPKRRELRRVLSVRRALVESRAQLVTTVRGLVREQGGKIPSCHTASFVNKVREQHLAKDVVQLIEPLLSLVQGIDTQLSNTEGQLAALCEKEPVVAALTTIPGVGTVVAACFVAVLDDAKRFARAHQVESYVGLVPCEDSSGGKRRLGAISKRGNSYLRALLVQAAWSIVRSGDKSNPLVLWVKQLTERRGKRIAVIALARRLVGVLWAMWRDGTVYDPEFLAKQNARGVRRAIQTLEQQTQSLTQAAKKGSVLRSKNLPTANTNKKPKTLAASAA

SEQ ID NO: 304679 - protein, 331 aa, unidentified
MKSATSQAGSVPQAGYARVIGVDIASDKIDVHDTHGKLGGEIPNTCAAINKRVSANLRDVDGVLVICEATGGYEHVLVDSMHQAGIAVAVVNPRQVRDFAKGHGYLEKNDTIDAALIAKFGRDVPVHLTEQRSDADRAFQALVRRRGQVLSMIMAEQNRLSRIDDAESKKLIAETISHLKTQLKTIDTRISKSLAERAEGDPTVDILQSVPGVATVTTATLIAELPELGSLNRGQIAKLVGVAPMVNQSGKSDKKRRAKGGRGQVRNVLYMATLSATQHNPVIKRFYQRLIGKGKLPKVALVASMRKLLTILNDMVRNGEPWRQADLSLSK

SEQ ID NO: 304680 - protein, 484 aa, unidentified
MAKVKLSAFDRLRLGARLNRKERRAVEQRLSAADPGLEIVNRDAAGIDVGNESHYVAVPRGRDAQPVREFGSWTAALVEMAQWLVRCGIRTVVMQSTGVYWIAVHDVLQKHGLEVNLVDARGTKNVPGRKSDVQECQWLMRLHTYGLLRACFLPAPEIHGIRTVWRLRDQHVRDSGRCIQHMQKSLIEMNVQLHNALSDIGGTSGQAIIRALLAGQRDPKTLAALRDRRCMASEEEIVHSLQGVWKPDVLFELQQAVDAYDFYRQQMAKCDEQLKQYMALLPAQSVKTIVSSIEPSPTDMSKKSRPRKPRKPQGNEPTFDVEAELERILSVNATTIDGINVMTVQTVLAEVGPDLSAWKTEAHWSSWLNLAPKRDVSGGRVIRHVREHRTNRVGNAFRMAAQALIRSHSYLGARCRYLRAKLGGHKAVKAMARVLACLYYRLVTKGQRWVDQGIEEFNRRSEQRELALLQRKAQKHGMQLVPTA

SEQ ID NO: 304681 - protein, 349 aa, unidentified
MRYLGMDVHAKSTVWCLVDAHGEVLREGKVATSAAALTALVQELGNGEEVLAGQEVGTLTYLVHDALTAIGTRILSFNAHQLRMIAASRKKTDRRDAYWIAKALQSGMYPHPVYIPTGEIRDLRAMLSRRRALHADHKRWRYRARAYLRAAGCPAGAGIAALRAALARPSAALNGSCADAIALCRRQEAALRAELQRMDAALRARAAAIDAVQRLMTIPGVGLLVATAIYAWVGDISRFPSAKKLAAYAGVVPTVRQSGGAVHVGGITKQGAPTLRVALVQASHVLLARCQRAEAAPLQTIGDRIRGSRGRRKIAVVALARHLLRIAYYILRDGTTYDAVRLGPTTDVA

SEQ ID NO: 304682 - protein, 441 aa, unidentified
MSVIRARIPDCPHCATLPITVKPRRGEGALYSRVDISCGLDVHKSSISGAILKSDGTFATHQFSTNIDGLLSLKEWIIVNHCERVLMEATGVFWIPVYSVLEPHVEVHVVNPLFIKYVPGRKTDTLDSVWIAEIALNGMFKASYIPSRNIRELRELTRTYRKLIEERTNHKNRIHKILVRNGIRLSDVLSDIFGKSGMIIINGLIEGKPIDQTLKMIHNSRILKKKDEIKQAICGELSGNDLFVIRQSIDSIRQHDCQIAQYEDKILKNMLPDNGNIEILVSIPGIGFTIGSSILAEIGNISQFDSPKQLVSWAGLSPAVYESAGKTAHGHITKRGSKYLRTMLIEAAQSIARGKPNRLKHFFSRIQSRKGYKKAIVALARKLLSIIHHLLSNHEKYVESPGNEKKIKLPDICPDPVMDHDEMIHILTQAGYLVHKSNRDM

SEQ ID NO: 304683 - protein, 411 aa, unidentified
MIEAIYRCCAGADVHSKTVAVCVRRVDEAGKVHKEIRTFGTMTRDLLGLSDWLLAEGVTHLAMESTGVFWKPIYNILEGQFEIVLVNARHVKNVPGRKTDVKDCEWLAQLLQCGLLRGSFIPALPQRELRDLTRMRKQLTHEMSAVANRIHKELEDANIKLGLVATDILGVSGRRMIAALIDGETDVDKMADLACRRLRDKIPLLRLALHGKVTEHHRFMLKRLMDHLCYLEREIEQFSKQIEVASRPFTKAITALIPIPGIDLASAQNVIAEIGPNMKQYPTDAHLASWAKICPGNNESAGKRKSGTTGSGNRWLNSTLVQISWAAVHTKDSYFQAQFRRLAGRRGKKRALIAVAHSILTVIYYVLKRDLQYKELGGDYFDRLQRHKIVKYHVKRLEALGYKVEVVDQVA

SEQ ID NO: 304684 - protein, 291 aa, unidentified
MTQHKIIGIDLAKNIFFLFEINHKGKNLCRKKLQRSKLLSYIANKETCTIAMEACSGAHYWAREFSQFGHEVILYAPQHVKTQRRKQKNDYNDAEAIDEVALYKRPHPVPHKSVEQQDIQSLIRMRRLLVTERTRIVNQVRGLISEYGIIMPKGAAAFRKAIPEILENDENKLSCILRELLFHQYERYLYTDEQVKWFDDKLNQTIKQFENAKRLMSIPGFGPLTSQAVAVWLGSGQQFKTGRDASAAMGLVPKQDTSGDKVILLGITKRGNVYPLPSRSWCKSSAEARQI

SEQ ID NO: 304685 - protein, 369 aa, unidentified
MDEHNEVFVGLDVAKSRHAVAVADEGRLGEVRYLGEIEADAASVRRMVDRLGKRHTRVHFCYEAGPTGYGLYRQLVAMGHQCTVVAPSLIPRRPGDRVKTNRRDATQLARLLRAGELTAVWVPDEAHEAVRELVRAREAAVDDLRRKRQSISSMMLRYGRSYPGKKTWGARHRQWLQAQKFDHPAQQLVLLEMTHAAQHAAERLERVDAALVEFLPTWSLAPVVEALQALRGVQLVTAATIMVEIGDLRRFDNPRQLMGYLGLVPGERSTGDTVRRLGITKAGNGRVRRALVESAWSYRHVPRISKVKHYVHERVPAAVREIALKAQVRLCARYRALAGRGKKLNVAVTAIARELAGFVWAIGRVMQPG

SEQ ID NO: 304686 - protein, 368 aa, unidentified
MKKVLYIGLDVHKETITIATAAEGRQPAREFKTIPSDYTRLLKAVRLLTPKGGSVVVCYEAGPTGYGLYRRFHEAGIDCRVVAPSLVPTKAGNRVKTDRRDAVRLAHFLRSGDLTDVYVPDEADEALRDLERARDAAKRAERTARHQLSKFLLRHDRRFSETKNWTVRHMAWVRRQKFEHAAQQRVLADHLKTVEDAGERVEHLTKSIEELVETSALAPLIKALQAFRGIALVSSVTIACEVGDLRRFATARQFMAYVGLVPSESSSGERRQQGSITRAGNGHLRRILVEAAWHYRRAPAMSKELRRRNQPVSDGVRRIAWEAQKRLHRRMYHLILKGKNNKTAVIAVARELAGFIWAVAQEPELLAA

SEQ ID NO: 304687 - protein, 356 aa, unidentified
MSIVADNHPFVVGVDTHARKHVYTILTAATGVVVDTNDFPTTTAGINRAINWVARRSEGDADTLWVIEGAASYGAILTGTVASHGYPVAEAPRMDAKQRYGVGKSDPLDAHRIAAAALPLPVEKLRRPRLNDGVRQAIQILVTARQSMTKDRTRSVNALTALIRSNELGLDARGGVSRAQIVEISKWRTRNEELSLSIARAEAVRLSKQVLELDQQLADNEQQLQELVKVSEAAPLLQEKGFAAISAAKCLTAWSHHGRVSTEAEFASLAGVNPIPASSGNTVRHRLNRGGDRALNSALHMVAVSKMEHDAETRAYIEKRQAEHKTNREIRRCLKRFIARRVFKTLNASAIAMHDG

SEQ ID NO: 304688 - protein, 372 aa, unidentified
MGHHTEAFIGIDTSKLRNAVAIAEGGRGSEVRYVGEFPATEAGTHKLVAKLAAKYDKLTFCYEAGPTGYGLYRRIKSLDHECIVVAPSLTPKKPGERVKTNRRDAVSLARLSRAGELTAVWVPDERHEAMRDLSRARQAAKKDLQGKRQQISSLMLRLGRCYPGKKTWGPAHMTWLRSQKLQQLEQRIALEELLEGVRQEGERMERLEQAIREAVPEWSLAERVTAVQAMRGFDLIAAVGVVAETGDLSRFQKPREFMGYLGLVPSESSTGDRVNRGGITKAGNGRARRLLVEAAWAYRHPARVGREKQAKVAAAPRRVREIAWKAQTRLCRRFRLLERKGKRRPVVATAVARALAAFIWAINREVMQGRQA

SEQ ID NO: 304689 - protein, 347 aa, unidentified
MKFYTQQHRYYCGIDLHARTMYLCVLNQQGEILLHRNMPCSPDFFLKAIAPYREDMAVAVECIFTWYWLADLCAQENIVFVLGHALYMKAIHGGKAKNDKIDAHKIAALLRGGMLPMAYVYPALMRSTRDLLRRRMHLMHKRSELLTHIQNTNSQYCLPQFGKKIAYKKNRQGVAEHFADSSVRKSIEMALSLIDHYDKLLTEVELYITQNAKIHDVNAFNQLRSVHGIGKILALVILYEIHEIDRFPTVQDFVSYARLVKCSKESAGKRHGSSGTKIGNVHLKWAFSEASVLFLRANPAGQRYADKLTSKHGKAKALSILAHKLGRAVYYMLKRDKAFDMNKFLNS

SEQ ID NO: 304690 - protein, 403 aa, unidentified
MAAICGIDWADDWHDVRVSDADGGLLAQQRFDHDERGIIALLALLAAHDVELAAIERPDGLIVGRLLAAGVTVLAMHPNQVKAARERFRAAAGKTDTFDSYVLCELARTDRHRFPTLAPSSDETAALRALVRTREDLVAARIRLANQLRAQLDCFWPGARRIFSDIDSPIALAFCERYPSPADARGLGHHRLQAFLDRHAYCGRRPASELLTRLRSAPTAVLGELEIDARRATVLGLVAALRPIVEQISQLTSHIRGAVRAHPDGPIFLSLFRDPKSSLCAAGLLAEIGDNRHRYPTRDSLAADAGMAPVAIESGKRRTAVFRWACDKRLRNHLATLADSTRHWHPWARDVYHRARHRGADHPHAIRILGRAWTRILWRCWQDRTPYDPTQHQALARHLAHQG

SEQ ID NO: 304691 - protein, 340 aa, unidentified
MAREVSVIGLDIAKSVFQVHGTDRQGRAVLHKRLRRGQMQGYFAQLKPCVVGIEATQGAHYWARVLTAHGHSVRLISPHFVKPFLKSQKNDANDAEAICEAVSRPSMRFVPGKSIEQQDLQALHRVRSRMIGCRTQLSNQIRGLLAEFGIVIQIHLSQLRRALPAVIENDSSLLTGFGRQLFASLYEELCALEERIAALEKHLEQIFRESDTCRRLAAVEGVGPVVATAVVAAIADGRSFHNGRQFAAWVGLVPRQHSSGEKQRLLGITKRGDPYLRMLLIHGARSVVYRSPHKTDSRSQWVAEKQRRLGTSKACVALANKNARIIWALLAHDEPYRRAA

SEQ ID NO: 304692 - protein, 324 aa, unidentified
MSKINLSEPSNGFLGIDVSKAKLDCALLTGERCRNKSFPNTEAGIAALIAWAGRPEQACLEATNVYWEAVAEALSRAGLTLSVVNPALIKAHAQSLGLRIKTDAVDARTIAHFAREKRPPAWVAPAASQQALRALVLRHHNLSQMHTEELLRSQTAREAVRSSLQAHLTWLEAELKRVEREIATLIDGDDDLKRRRDLLRSIPGVGERTSAVVLSFLTQISGIAQARQFAAFAGLTAAIRQSGSSLNAKARMSKTGHTLLRRALYMPAMTTLYRTDWGKLFFTRLQANHKAPKLIIGAMMRKLAQVIFGVLKSGKPFDPSLHCA

SEQ ID NO: 304693 - protein, 417 aa, unidentified
MKVVYSTCCGVDVHKTFLVATIIKTTKGVQPSYQKKRFSTFNSDIRRFKQWLLDNSCFDVCMESTGKYWIPVFNLLEDQINVTIANPKWVKAVKGNKDDAKDSKWIGDLFRLGLVPGSFIPCKEIRILREYTRYRFKLTCCKRSEKNRFQNAFTVCNVALDAVVTDMFGKSASSITDYLITSDEFDPETCKSFLQKSLKKKADAVIESIEGYQMTSSQKERMLMVRSHLEFMQQSIDSLDSKLDELTAPYENAVSLLCTIPGVDRASAITIISEIGTDMTQFNSSKRLCCWAGLTPGNNESAGKKKSVRITRAGVYLKPALVQCAHAAVKSTATPYYKNKCERLAKRRGKKRAIIAIARMILTAVYHMLSTRETWNPCDLYKIDMPKEMQKAKAVKQALKLLISQGVISPESAPTAV

SEQ ID NO: 304694 - protein, 373 aa, unidentified
MAMKVKPEEVIRHEEVYSVGLDVSQRSTSICVLDASGALVLEGQAKTNPFEIGRYLQKRLEGPLKLGMETGSLAAWLYHGLRKMGFDIAVMDAVHAHRALSLKRHKTDRNDAHGLAEMVRLGAEWMKIVHVKEQAAQELRVQLAARARLVKQRVDLENELCGLLKPFGFVVARGNVAPETFRDRVVDVLAEAQDIGLHLKIVLMPLLDVHRLVAKHIAEADQRMEAVAHAEPVCRRLMSVPGVGPVTALSFRAAIDEPTRFKRAADVGVYLGLTPRRFQSGEQDHHGRISKRGDSVTRLHLVQAATVLLVSVKRWSTLKAWGVRLANRIGFNKAKVAVARKLATVMYRIWRDQSEFRWGKAPMGPAALAAATS

SEQ ID NO: 304695 - protein, 400 aa, unidentified
MSGLKGNFDCIVGIDISKDKFDACGITGEEAKLFQISAAMDRKGFEKLKRHFSALSVSSVLIGMESTASYHVNLFSYLVAEGYKVILINPLLISNYVKMQLRKTKTDKKDAVVIAQFLLANGDGLMQKATPSLISDLRDLSRQRESLVDEMTSLKIEIKQLLNITFPELEHMVGIFTKSILKLLQQYPSAVALRDADIGQLSQTLIADSYGHKREAFAKTLIKAARSSVGTSSPAKEMIIKQKIGLLLHLEEALQEITDMLIEMARKLMEEDINIMTSIKGIGDKTAANFLVEMGGDINQFERSGKIIAMAGLDPAVYQSGQHEGRGRITKRGNRHLRRIIWMMTTSVIQYTDIFHAYYLKRRKEGLPCKKAVLATAHKLIRVIYAMLTQRKTFCPQVNS

SEQ ID NO: 304696 - protein, 356 aa, unidentified
MKTLAHVGVDYHAKTVTISVYLNEQQKFLETTRLPNDDARITTFMKKLSKKYELKICYEASGSGYVFQRKMRELGLHCDVIAPSLAPKKAGDRRKNDYRDAQRLAQHYANNLLTIVHPPTQEEESVRTLIRCRFAFKEDVKRVKKQLNSLLLSHGHFWKRSKWTHHHRVWLRSIELSSKHLQLVLHEHLAHLDYLESRLTSLDSEIVQLAEIETYAPSVQKLRCLRGIGTLTAMVLIAEITDFRRFASPRALMAFLGLIPSENSSGERHKGGAITKAGNHRCRTLLVEAAQHYSRKPCVSYQMKHKLSQADAHTNTVAINCMHRLHKRYWHLQLKGKIRQQAIVAVARELVGFFGT

SEQ ID NO: 304697 - protein, 380 aa, unidentified
MTTATHNAHDTTTERVLFVAFALSEKTWKLGFTTGHGQQPRERSIAACHQARLLQEVAQAKKRFGLPDTAPVVSCYEAGREGFWLHRFLQAQGITNYVVDSSSIEVNRRQRRAKSDGLDVRKLVSMLIRYAQGERAVWHVVHVPSVAAEDQRHLPRDLETLKQERASTTTRIKGLLSSQGVRLTSLSQLPEQLEALRLWDGSPLPSGLRRRVLRVYAHHQFLSQQIAELEAERRALLQTSQEAAREKVRQLMHLSSIGINGAWLLVMEFFGWRAFKNRREVGGLAGVTPTPYHSGESTREQGITKSGNRHVRWMTMELAWSWVRYQPGSALSCWCRERFGGGGKRLRRIGIVAVARKLLIALWRFLETGVLPEGAVLKEA

SEQ ID NO: 304698 - protein, 345 aa, unidentified
MTTMNYIGLDVHKKTISYCVKDVSGRIQQEGKIGSTRRELDCWMKTLPQPWTVAMEATIFSGWIYDHLLSHATQIKVAHPLMLRAIAAAKKKNDQIDASKLADCLRCDFLPECHMMPRAIRDRRRTLRYRHLLVRQMVQMKNRVSGLLMETGVEYNKQRLHKVSYFRELLSANGEVPPSIRPLLKLSRETIERCQKTEYALVSSLQRDPVLADRIKRLRTVPGVGPITALTWALEIGDVSRFGSIKKAISYCGLCGDERSSADKAMRMPLSKQRNKHIQRALVEAAKLAPRQNHEMAVIYDQERQKGNSNRATLAVARKMVAYLLAVDRQQRNFVPAEERRTTAA

SEQ ID NO: 304699 - protein, 346 aa, unidentified
MKDDNAKGNITVLGIDLAKNSFQLHGVDEKGHRVLKKKLTRSKLVAFIANLPPCLIGLEACGGAHHWVRVFSELGHTVKMIASQFVKPYVKSNKNDAVDAEAICEAVQRPNMRFVPSKSIEQQDIQSVHRIRSLLVGRRTAQANQIRGLLMEYGIIIPLGINQLRKAIPEILEDAENTLSPYFRELLRELYEEIVHFDERIQTIELRLKVISEQNEDCQRLLTIPGVGLLTATALIAAIGDIKAFKNGRELAAWLGLVPRQHSTGGKQTLLGISKRGDSYLRTLLIHGGRSVVRVAHKHQDKRNQWIGDIKQRRGENISNVAVANKNARIAWALLTHKQDYCAIGA

SEQ ID NO: 304700 - protein, 451 aa, unidentified
MNEPCEVADEEHEQIVARVAAVDVAKASGMVCTRVPHDTKAGRRLSKVWNVPATTNAVTELADHLVCQGIERVVLESTSDYWRPWFYLFEARGLTVWLVNANQVKQVPGRPKTDKLDAVWLAKLAERGMLRPSFVPPPEIRALRDYTRLSVDLTNDRSRVRLRMEKLLEDALIKLSSVATDIFGVSGRAMIEALIGGERSPRRLAALAKGRMRVKQAALIEALTGRFDAHHAYLARMLLDQHDALTAQLDQLTTRIEQAITAIPAAGPPATAGPDPGPGPETGEPLPAGLTALERLDEIPGIAVRGAQIVIAEVGLDMSRFPTAAHLVSWAKLSPRTIQSGTKDRKGKTGKGNPYLKGVLGEIATAAAKTDTFLGERYRRLVKRCGKKKALVAVARSILTIVWHLLSDPHARYHDLGADYHTTRIDKGRRTRSLVHQLQALGHTVTLTPAA

SEQ ID NO: 304701 - protein, 473 aa, unidentified
MASYYLGIDVSKGYADFVILDSSKQPVEESFQLDDTFEGHCLLYKHLCQFLEERPGAVIHAAVESTGGYENNWLNALKKFQSSLNLKSTRLNPLGVNANSRADLKRITTDRISAFSIAEYLIAHSEKVSYAETNTLVSLRKQWSYIKLLTKQNSQLLSHLESLIYSANPELLVYCKHHVRGWTLEVLKRYPTAVRLSRARVSALTRIPYVSEARAQELIDTAGKSVASATDKVTGQLITSIVTQIIHLRQTIATESEKLAAEYTIPEVELLKSFTGINDYSAIGLMLEIQTVNRFPRSKNLASFFGIHPAYRSSGDGMMGFHMSKKGRREPRRILFMVALTAIRSNPLIKEIYLKHTEEGMEKMAAIGLCMHKILRIIYGMLKNNTPFDPEIDRRNRERTTPKRNSVRPDKNRRYHEYDPKAPISGRQNKKRRERNESQNGHLPHKNGIIVSVPTVNLPYDSISVQEVPLEIA

SEQ ID NO: 304702 - protein, 353 aa, unidentified
MPIVAEQYTFVIGVDTHAATHSFALINATNGGIIDQAVFPTSPAGLDRACTWITRGIDEKAALVVIEGAGSFGAGLATRVTNIGLPIAESAAMPAAARRGVGKTDALDAVRIARSVLAVDITRLRTPRADGQRVALRVLTVAREEMVAERTRAINALTALLRTVDLGIDARKPLPHSQFKTIAAWRERKEDSVLATCRQEAVRLAKRIVALDGELVDNRRSLDSLVEDVAPELCKLPGVGSVVAACVLTAWSHPGRVRSEAAFAALAGTCPVPASSGNTVRHRLNRGGDRRLNRALTTVVIVRMRTHAPTRAYVARRRAEGRTTKEIMRSLKRYITRQLYRTLAAAHPVPETP

SEQ ID NO: 304703 - protein, 359 aa, unidentified
MQTQNYKLDFSGKKIYVGIDAHLRSWTVSVMAAGILTKTFSQNSDAGDLRKYLEKNYPNGIYYSAYEAGFCGFSVHHDLIKNGIENIVVNPADIPTTDKEKKQKDDVRDSKKIVRSLYNNNLEAIYVPSLKIEALRELVRQRKTIVKEISRNKYRTKSFLYRNGIRIPLELLGGSKHWSKRYSTWLNSLSFDIEYKRETLNSIISTVEHLRKELLEIERLLRKLEKESDYSHTIGLLRTVPGIGLIMAVTIITELENIQRFGNIDKLCSYVGLVPTTHSSGDKEKVGGITKRSNGQLRNMLIESSWVAIRNDPALMMKYSELRQRMIANKAIVRIAKKLLIRIKHVLVNNEAYEKGIVK

SEQ ID NO: 304704 - protein, 336 aa, unidentified
MKNYVLFTGIDVSKDKLDICYVDKNGNVLGSKVIDYKPKNIKSIVKDLERLGYNLTQTLICFENTGVYSIKLGEVLSELNAYYSEVSALEINKSKGITRGKDDKTDAKMIALYALRNIDKIVLSKVTDKAIQELKLLFAEREKIQKSITSLKMTQENEGRVNSKAYESVHKINQQTRVALKNSLKAIENEIERVFKEHPELKKNRNLLKSIKGIGTIISAYLVMITHNFTKFKNSRKFACYSGIAPFEHSSGKSVRGKTQVNHFANKKVKALLSMAVQSAKKYNSQIKAYFEKKKEQGKHILLISNNIKFKLVNIAFAVIKRGTPYVDIYKYATVA

SEQ ID NO: 304705 - protein, 358 aa, unidentified
MAGKVTEAAVVGGVDTHKDLHVAAVVDQNNKVLGTQFFSTTRQGYWQMLAWMTSFGALKRIGVECTGTYGSGLLRYLQNAGLEVLEVTAPDRMERRKRDKSDTIDAECAAHAAFSGIRTVTPKTRNGMIESLWVLKTCRKTAISARRVALQIIHSNIISAPDELREQLRNMTRMQLIRTLGSWRPDASEYRNVTNVYRISLKSLARRYLELHDEIADLDVMIAAIVDELAPELIKRNAIGYESASQLLITAGDNPQRLRSESGFEALCGVSPVLVSSGKTNRYRLNRGGDRAANSALHIIAIGRLRTDDKTKEYVARQVAEGHTKMEAIRCLKRYISREVYTLLRNQNRQINSIPITA

SEQ ID NO: 304706 - protein, 511 aa, unidentified
MLVLLVGDDWAEDHHDVELMDAGGATLARARLPEGAAGMARLHALIGAQLGEDTDAEVRIGIETDRGLWVMALVAAGYQVFGINPRSVARYRERHGVSGAKSDTADAHVLADMVRTDAHQLRTVAADSPGAQAVKVVARAHKTLIWERARQADRLRHQLRDFFPAALAAYGKLGLDSADVLELLAKAPGPASAARLSTAQISAALKRAHRHDITVKTAAIRAALRSPQLAQPAPVADAGAAVVRALAAVITTLSQQITALERQVQAHFRAHPDAEIILSQPGLGPILGARVLAEFGDDPHRYATAKARKNYASTSPITRQSGKTSYVLARHVHNDRLRDALARQAFCALTASPGARAYYDQLRARKTGHDAALRQLANRLVGILHGCLKTRTPYDETIAWPTPGQQSPAANWNNHRIEVRHLGNDFETYGSLPGNYCGIIVTIDVGHFFLIADFVRARFGFGKIFTVQNDPSTEFLTSSHFDERSVLRHYHSRRNAEQLALISERLGMIPG

SEQ ID NO: 304707 - protein, 350 aa, unidentified
MTQNSTTSFKGQIIFIGIDVHKSNWVVTERHAHLDLKTYSGLKTPKELVERLHRLYPDAVYKSVYEAGFCGFWIHEELKLLGVDNIVINASDVPTSEKERIHKNDVRDSRKLARELENGSLSPLYIPCKDHLELRDLVRRETQLVRNLTRADHRLRSYFARYGLSIPSGKISGFMLKMLRQKSREIPDYTLQSLVEEIVSLRQNKLEVINGERQLLTRQQRRDLQGNLMSLPGVGFRTAIVIQSELWDIHRFPDPAHLLGYCGFSPRLIGSGDGEKMRGNGKRKNGLLHSMMIESAWVAIGKDMELRIKYGQLSARLGASRAISVIAKKLLLRAQSVWLRGSRYQRKEIA

SEQ ID NO: 304708 - protein, 342 aa, unidentified
MQISTIGIDIGKNSVHFVGFDARGGIVVRRQCSRTQLIRALANLPPCLVGMEACCGAHHLGRILVAQGHDVRLIPPQYVKPFVKSQKNDLLDAEAIGEAVQRPTMRFVPLKTMEQLDLQAIHRLRTRLITRRTAVINQMRGFLLERGVAVPIGRCALGERFPDLVHNPTLGLSVRFCRLLQQLRDEWRLLDDDIDEADQEIRTLAREDAACERLMQVPGIGPLTATALVAAVGNAAAFTKGRDLAAWLGLVPRQHSTGGKTTLRGISKRGNAYLRCLFIHGARSVCRHHRQRPHRLGRWLASLEARAHPNVVVVALANKLVRTAWAVLQRDVRYDGRLLANA

SEQ ID NO: 304709 - protein, 341 aa, unidentified
MSLIKAVGIDLAKLVFSIHGVDVNDKCKLRKTVKRNNLLAEVANLPPCIIAMEACSGAHYWAREFTKLGHDVRIMASKFVIPYRQNEKNDANDAEAICEAATRPKTRFVSIKSEEQQAVLCLHRIRQGAIKDRTARINRLRGLLSEFGIIIPKGRYPLQNAMSGVLEDAENGLPFLARELLNDLWQTIKSLNEEILKYDRKLYALANQMKDAKRLMSIPGIGEITATAVVATVNDAKHFETSRSFAAWVGLVPRQHSTGGVVRLGRISKRGEKHICTSLIHGARAVIANCKNKTDRTSLWVKDLVERRGFKRATVALSAKNARLIWALLHSEKEYQVDYVK

SEQ ID NO: 304710 - protein, 402 aa, unidentified
MNAVGIDVSKGKSMVAIMRPFGEIVSAPFEIKHTTSDIHSLVELINSVEGESRIVMEHTGRYYEVLAHQLSEANLFVSTINPKLIKDFDNDSLRKVKSDKADAVKIARYALDKWQNLKQYSVMDELRNQLKTMNRQFSFYMKHKTAMKNNLISILDQTYPGVNTYFDSPARNDGSQKWVDFASTYWHVDCVRKMSLNAFIDHYQNWCKRKKYNFSQSKAEEIYGKAKELVPVLPKDALTKLIIKQAVDQLNSASTTVESLRTLMNETASKLPEYPVVMAMKGVGTSLGPQLMAEIGDVSRFTHKSAITAFAGVDPGVNESGTYERKSVPTSKRGSADLRKALFQVMDVLIKTHPQDDPVYQFLDKKRTQGKPYYVYMTAGANKFLRIYYGRVKEYLSSLPES

SEQ ID NO: 304711 - protein, 342 aa, unidentified
MSVIIGIDPHKASHLAVAIDGEERALGELEVVADRRQTSRLLAWAELLDTERTWAIESAGGLGKLLSQELVAAGERVVDVPPTLSARVRLLGSSKTTKNDSNDALSTAIAGLRHCGLRTVRRDGPTTVLRLLVGRYDDLVAARTQAACRLHAVLRELVAGGAPRRLSADRATKLLRTVRPVEAVEIERKRLAVELLGDVRRLDRDLVAIKTRIADAVAESNTTLLEVHGVGPIVAGLILAQVGDPARFTTRARFAAYNGTAPIEASSGPRVRHRLNPRGNRKLNHAMHLVAVTQIAHDTPGRAYYDRKLAEGKTKKEALRALKRRISDAVWRQLQLDLAADT

SEQ ID NO: 304712 - protein, 391 aa, unidentified
MKIQRTSVGLDVHARSVVACALDGDTGELLERRLTPDHGEIVAWLADLPGPVAATYEAGPTGFVLARSINAAGIRCSVAAPSKLQRPVGDRVKTDVRDARHLARLLHLGEIVEIEIPSVEQEAARDLFRAREDCRCDLMTARNRLSKLLLRQGIVYYGGTAWSRNHERWLQAQRFDHPALAMTYDTAFDTVLAITARRDRLDTAICEMAADSPFTAVVTRLGCLRGISTLTAFGLAVEIGDWHRLTGRTIGAYLGLVPCEYSSGATRAQGGLTRTGNTHARRLLVEAAWHHRKPYRPGEVMRRRWNAAAPAPRARGQAANRRLHERWLRFDERRKRPVVANAAIARELARLVLVAGRHGRLTPPKRPGDPMGIGKHLGVTREIAMSNFIAQ

SEQ ID NO: 304713 - protein, 362 aa, unidentified
MRIIGCDLHARQQTLAVLDTATGEVMEKTLAHSGSDVKEFYSRLPGLVRVGIEATGTMQWFLSLMEELGIECQIGHPAKIRAAEPRKQKHDRRDADLILQLLVENRFPSIWRPSKDLVDLRALLLHRHQWVRMRTRIQNALQAIALANGLRRGPSLWSHDGQSTIASLPLAPHTAHRRSELQAMYAKFEADIEKLNQRVQEQAGERTGATLLMTHPGVGPITALATDVFLGDPKRFADGKALASYVGIIPSEYSSAGRQRLGGLSKQGNPLLRFLWCEAAAHAVRRDPELQRFYRRKLVQKGLGKAKVAAARKLGIRLWIMLRDQIDYHEFCRRGQMQQNSGDACAGMPGTRYGATSHRPID

SEQ ID NO: 304714 - protein, 328 aa, unidentified
MTMSPTHSAFNHVVAFDVAKDTLAVHTLPDGRQLTLANKPKPIRKLLLGEMRCNRAAGLGSLLVICEATGGYEAHVLGIAVELGLAVHKAHGGRVRHFAQYRSRLAKTDRIDARVLALYGRHTPDLRLYTPPNPEIVALQDLKVRRDQVQQMLIAESNRLEHARHAAVTRGLKAHIASLRKALATLEAEIAAHIAASEALARKVRLMRSLKGVGPATATTLLACMPQLGTLRKGEAACLAGVAPIANDSGKSHGPRHIKAGRAAVRTALYMAALVAMQHNPVMRNFAASLRQNGKPFKVAITAVMRKLIVTLNAILRSGQPWRHAQQT

SEQ ID NO: 304715 - protein, 345 aa, unidentified
MDEAYDGRQVVGMDLHRRRSVLVRMSMDGRKLETVRITNSPGALRAVLARCGRRPLVVLEATYGWYWAADVLAGAGAEVRLAHPLGVRAFSYRRVKNDERDAADLADLLRAGLLPEAWIAPPEVRALREVVRYRHKLVGQRTSCKDQVHAVLAKLGVPVTHSDVFGTGGGLWLDQLVLPEPYAAKVASLRALIGVLDGEIARLGQRAAGVLGADPGYAALRELPGIGPVLAAVIIAEIGDVTRFRRAGQLCSWAGLTPRHYESDTKVIRGHVSKQGSKMLRWALVEAIQHQPAGTRPRQARDAIIARRGKEARNIAKTAAARVLLTQVFYALRDGHVRSAGRPAA

SEQ ID NO: 304716 - protein, 412 aa, unidentified
MTVMIGVDPHKGSHTAVAVDETEQALSEFKVRSGPDQLERLLAWAGRFPVRSWAVENATGLGYLLAQQLVGAGERVVDVQPKLAARVRLLDSQSVNKNDPHDARSVAIAALRSRAPVEVRAEDHSAVAKLWSKRQRDLARARNKVACRLHSLLCELVAGGVPDEIYATKVAKLLASVQPDGAVAAARLELAGELLEDMRRLDEQIKESRRRLAAVVKASRTSTTKIFGVGPVVAATAIGLTGDVTRFPNRDHFASFNGTAPIDVSSGGKKVYRLSRRGSRHLNHAIHMAAVTQIRHRHSEGRAYYERKVAEGMGHKEALRCLKRRISDALYACLVEDAKRDGRLLERGPGGQSGNDSVSSAAGSHPETPALRTSHSRACRQATTARRTSSPAKTRARAKSGAATRKATRKVS

SEQ ID NO: 304717 - protein, 452 aa, unidentified
MEEKEIAMEVVNPQAAGVDIGSRLHWAAIGQKDEDVQEFGVFNEDLKRMALWFKEKNIKTVAMESTGTYWQSLYAVLLSEGFEVILCNGKFTKNIKGKKTDIKDCQWIQKLHSLGLLSGSFLPDKQTEKLRTYCRQRALLLDSSASASKKMQKYLRLLNLRLDVVVNDICGQTGLAIIKAICEGEKDAQKLASLRHYNCRKSEAEIAKALESNGREDYLFALRQELEMYEMFQSKIEQCDQEIGKLLEQIVDSDDHKRQHHIESKPYKKVNKNTPKNIDLNLRAYQYFEGVDLMAIEGMSYSTVLAIMSEVGLEGIKRFKSAKHFASWLRLAPNNKISGGKILSSKVPKGSNRLKIALRNAANAIGNLKESTPLRDFFQRINFRKGRVSAISATARKLAVIIYNMVVQNKPYHNPKEYLFLDQKRKLGSVKRIQKQITKFELSQHNFNFVTT

SEQ ID NO: 304718 - protein, 341 aa, unidentified
MDKELYFGVDVSKKTLDLAYYDGETIDWKNAHIQVSNDDAGFKKIGSWVAKVGKDFDTFLFCLEYTGLYNQNFRLWLESKEYIYSMVEPRKMHRFEPDLDDDQRSLDRIKTDELDAFRIAIYCEQNHKKILRNPSKLPSPVYFKLKRLLAERKQNTKQSVLYKQQLHDICAYDTDLSVERKRLLLKNMKENQKAIDKEIDSYIQEDASISKNYNLLTSIPGIGLIIALETIVLTENFTAISNPRKYACYIGIAPFKKESGTSVRKKTGVSKKGFSEAKADLSIAVLSAITYNPAIRGYWIRKKKEKCGGIVLNAIKFKLVLRMFAVIKRGTPYVETDAYKN

SEQ ID NO: 304719 - protein, 354 aa, unidentified
MSQTANTAIAVIGIDIGKNSFHVVGHDARGAIVLRQKWSRGQVEARLANITPCLIGMEACVGAHHLSRKLASLGHDARLMPAKYVRPYSKGQKNDFNDADAIAEAVQRPTMKFVATKTAEQLDLQALHRVRERLVSQRTGIINQIRAFMLERGIAVRQGIGFLRTELPTILATRTDALSPRMLRVIEELAGDWRRLDQRIDGLSGEIEALARQDQACSRLMTVPGIGPIISSAMVAAIGTGDVFSKGRDFGAWLGLVPKQISTGDRTILGKISRRGNRYLRVLFVQAAWVVLVRIKNWERYGLKSWIEAAKRRLHHNVLAIALANKLARIAWAVLAKGRAFELRTDDAGVVRPA

SEQ ID NO: 304720 - protein, 403 aa, unidentified
MFCGWDWGSTAHGVCLIDDHGAVVRKWMVQHTEDQLRNVFDELAQLVEGGDVGQVPIAIERGEGLVVGLIAGAGHPVWMVEPAAFKAARPRWGSAGAKSDLGDAFMLADYARTDGHRLRRIEPVQRATRELAALVRARSALVVARTAASNQLWAILAEHWPGAAVVFQKLTSQIALAFLTDYPTPQAAALLGERRMGQFCRRHSYRGGKTPAELIRRLRAAPASANPIAPTILTAIVRGSTAQIRLLNTEITRLEADIAGALAAHPKTPLLQTLPRVATVSLAALIAEIGPLLERCDNPEQVAAMCGAAPVTRASGKSRTVGFRYTANKPARVAITGFADNSRHSSAWAADAYRRARARGARHPHAVRILARSWIRVIWACWNTDTTYDPLRHRSEQLITAAT

SEQ ID NO: 304721 - protein, 344 aa, unidentified
MSEVSIIGLDISKHVFHAHGVDGRGRAMFSKRISRGKLLAFFTTQPSCTVALEACGGAHYWARQLAQLGHEVRLIPPAYVKPFVRRQKNDAIDAEAICEAAQRPSMRFVAVKSQEQQAAGLVFRTRDLLVRQRTQLINAIRGHLTEYGWVAPKGPSHVAMLADLIDEEEMANSLPGAARAMFRVMLDLLTGLSSKIAALDKEIARRAREDEVSRRLMTVPGIGPISATAIAALAPPAQTFAKARDFAAWLGLTPLQRSTGGKQKLGATSKMGERTLRRLLIIGSSAVVKQASKRGAPRGSWLEQMLARKPRMLVTVALANKMARIVWALLVKQETYRAPVAVRA

SEQ ID NO: 304722 - protein, 343 aa, unidentified
MQTITTIGLDIAKSVFQVHGVDAGGQVIVRRQLKRRYVLTFFQKLPPCLVGIEACASSHHWSRELQALGHAVRLIPPAYVKPYVKRQKNDATDAEAICEAVTRANMRFVPTKTSEQQSGLVLHRSRHLFIRQQTAVINAIRAHLAEFGIVAPVGRHGVEELLNVVADPNDRRVPEMARICLLAFGAQLRRIKEQILEFDRLIRTWHRSNEMSMRLEEAPGVGPVLATALVAAVADPKSFRSGRNFSAWIGMVPKQRSSGGKQRLGNISKQGDRYLRGLFVAGALSVIRYAKIHGTKHRPWLTALLARRPTKVAAIALANKIARMVWAMMARGERYKEPVALAR

SEQ ID NO: 304723 - protein, 355 aa, unidentified
MNDAKYIGLDVHQATISAAVLDSTGKLVFECIMETKAATILQFIHGLRGSLHVTFEEGTCAAWLHDLLKPHVTQVLVCDPRKNALLKAGNKSDRIDARKLADLLYLNKLHPVYHGETGIRALQEVARSYLALTRDTTRVMNRLKALYRSWAIPCAGQRVYAPRYRSQWLAKISAAGVRRRAEIYYQQLDALRSLREQVRRDLLAEGRKHSAMKLLRQIPSIGPIRAVLLIALMQTPHRFRTKRQLWAYCGLALKTSTSGEYRIVEGQLKRSKKFLAIRGLHQNHNHDLKNIFKGAATRAAAVPGPCQEFHAGLLVRGMKPTMARLTLARKIAAITLIVWKKGVRFDAEYLKPQAA

SEQ ID NO: 304724 - protein, 466 aa, unidentified
MSKDSGTTRGDRRRNERRAVLRGLLPRHGAVIGIDLGEDKQAVAVIDHDVRVLWRATVRVKAFQLGQVLDRAVAQARAAGFAHVAVVCEPTGSRWLQVQRLCAERGVQLVCIQPLVSHLAREQQEFTRHKTDESDCVMIARLAVELYCYVPEELDERWAELRHLGRRRAALITAATASVLRIRDFLSCAWPLVTGACAGPFESLTWLAAMQVVTSRCGGDPGSLAVMGQDAFTALVRAAVAGWGGQRVWGPICGRVFALLASTEGVIVSHRRGLLRRIGDELGDLQRCRAQLRRAEADMAALVGELGLSRLGDIPGLTVTGAASILAETGDPRQYQTSSSLVKHAGMSPADNASGSFAGQSRISRRGRPGLRLAVWRAIVPLLSHNPVMAAKFAALAREDGEAAAGVSGTRARPAATAAGRARRAKAAVACAASLLRWIWSLVVHGTCWHAGIAAGRVSPRHAIAA

SEQ ID NO: 304725 - protein, 363 aa, unidentified
MNKSTKKISKKNRGVAYVSVGMDVSDRSSCWVGLDDGGAVAGRGKVLTRGPELEPWARSMAPTVIAIEAGPHSPWMSRLLTRCGHEVIVGNPAKIPSISRSRAKTDWRDAEQLARLARFDRSMLHEIRHRSEESQRDLQVIRSRDATVRARSKLISHVRTTVKAYGQLVPRCSTDAFVNRARAVVSEELVAIVAPVLEAIDRLSAAIHDYDRRIQKLATRYPQTQWLMQIKGVGALTAVSYVLVLEDASRFSSSRMVGPYLGLTPAKDQSGESDPQKGISKEGDRLMRRLLVQSAHYILGPFGIDSDLRRHGESIANRGGKNAKKRAAVAVARKLAVLLHHLWVSHQEYIPLFNQRRTNNIAA

SEQ ID NO: 304726 - protein, 358 aa, unidentified
MNHVKSSRLDFRGQPIYVGLDVHKKSWSVSIFSSRGEYKTFNQPPEVDKLVQYLRHHFPGGEYRSVYEAGYCGFWIHDQLREKGVQCLVANPGDIPTKNKERRTKRDGVDCRKLGRTLRNGEIKGIYVPSRTTLEDRTLTRTRQSMVRKQTRCKNQIKGMLLFYGVVIPEEREMSHWSRRFIQWIEGIRMERASGDIALKAHLEELNHLRQLIASLNRAILRLARTEQYRPLVRLLKTVPGISTLTAMILLTELGEITRFPSLDELSCYVGLIPDTKASGEKEYIGSLTQRRHSQLRWLLIEASWVAIRKDPALLMAFEEYCKRMRKTKAIVKIARKLLNRIRYVLKNQAEYVPCVIQ

SEQ ID NO: 304727 - protein, 343 aa, unidentified
MDHFAGLDVSVKETSVCIVDDTGRIVREVKVASEPEALLQVLTTPAYHFKRIGLEAGPLSQWLFSALAEMGLPVICVETRHMRAVLKAQINKTDRNDARGIAQMMRAGLYRPVHVKTLRSQKLRMLLTHRKLLQSKAIAIENDLRATLRNFGLKVGVVGATKFEVRIKELVENLPDLAVLVEPLLIVRRVLHEQLDILHRRLLAVVRNDDVCRRLMTIPGVGPVVALTYRVTVDVPARFKNSKAVGAAFGLTPARYQSGESDRTGGISRCGDEMMRMMLYEAAQTMLVVSTKWSWLKAWAMKIAKNRGMKKAIVALARRLAVIMHRIWVDGTKFRWTKEVAAA

SEQ ID NO: 304728 - protein, 352 aa, unidentified
MEADLMILVGCDLHTRKQQVAVLDTETGEVVEQELAHAGDAVERFYAALSRPVTVGIESTGYSLWFHTLLQRLGHTLLVGEAAKIRAMVVRKTKTDRRDARHLLDLLQHERFPTVWIPDPAARDLRVLIKHRLRLVRIRTMIKNGLHAIALNQRLALGPSLWSQRGLAQLRTLALLPHTSRRRDDSLELLDWLTHHIAALDLQVAAAATANADVERLMTHPGVGPLTALATVLVLGPVRRFPGSKHVVSYIGLAPTVHASADKYRLGRISKQGSALLRWVLGQAAPLAARADVDLKRVYFGVLRRRGRPKAKVALARRLLVRLYVMLRDQIDYDEFRARGQARRRTAASSPV

SEQ ID NO: 304729 - protein, 429 aa, unidentified
MSYRIAAIDVHKKMLAVVVSDVEVESEYTFDRRKFSSNPEQLRSLAAWLLEQKAEEVVMESTAQYWKPVWESLERYWKPFCKMREAARRKSGTLHLAQALSNRGRQGRKRDFPDAERLVKRLVAQELTLSFVSDAEQRLWRTVTRKKNQLRRDRIRLQNQLESLLEEAHIKLSSLVSDLLGLSAQRMLKAIAEGETNPAALATLADERLRATTEQLCDALGACTELNPVYRRLVNMALEELRLIDEQINRLDREMASLLKAHQDAVERLAEVPGLGVDSAQQIIAEVGPTAAAFPSAKCLSSWVGVCPGTDETAGVNYSHRSPKGNRHMRRLLNQAANAGARTKGSIFEIVYRRTVARLGHNQTIGAIAHRQCRLISLILHEGVRYEERGSGLSKRSKQLRTWKMIRQLRNLGYRVEPSISEPSHPPVQ

SEQ ID NO: 304730 - protein, 398 aa, unidentified
MTESSDYESVQVFIGVDVGKDTHHAVAINRSGKRLFDKALPNDENKLRSLISDLKQHGQILLVVDQPATIGALPVAVARSEGVLVGYLPGLAMRRIADLHAGEAKTDARDAAIIAEAARTLPHALRTLKLADEQIAELSMLCGFDDDLAAQTTQASNRIRGLLTQIHPALERVLGPRLEHPAVLDLLQRYPSPEKLASLGEKKLAAQLCKLAPRLGKRLAADIAQALAEQTVVVPGTNAAAVVLPRLALQLITLRKQRDEVALEVEQRVLAHPLYPVLTSMPGVGVRTAARLLTEVACRAFASAAHLAAYAGLAPVTRRAGSSIRGEHPSRRGNKALKRALFLSAFAALRDPLSRAYYTRKMSQGKRHNQVLIALARRRCDVLFAMMRDGTFYTPQGS

SEQ ID NO: 304731 - protein, 358 aa, unidentified
MGQGTTVGLDVHARSVAAFVIDEASGEVTARRAPHGTKELVEWIGALPAPVRSAYEAGPTGYGLARTLVEAGVECLVAAPSRIPRAPGDRIKNDRRDAERLARLLRAGELVGVDVPSPAGEAARDLVRAREDARADLMRSRHRLSKMLLRHGRVYDRKAWTQAHDAWLRRQRLPEAAGQAALVDYYDAALQATLRRDRLDAAIGELARRPDLAPVVGRLVCLRGVSVLSAVGLAAEIGDWHRLRGATIGAYLGLTPSESQSGARHTRGPITRAGNGHARRLLVEAAWHQRRPRARSLALERRREGARPEVRARAEAAGARLHRRWVHLERRGLRPTIIAVAVARELAGWCWSLAVMDD

SEQ ID NO: 304732 - protein, 387 aa, unidentified
MNKSNRVIGLDVHPDSFAGAVLLKGKDAASARVVSTSRRVELPELEKWAARHTGEQDVLVLEASGNAFAVAERLRVLQRQVVILDSHRAGKVGKAYCANDRVDAIKIARIYLTALSPVVWQPDAKTRERREVFSAYQAVVKEATRLKQQLRSMLNEHCVRLESGFRLSHPSAINRLLKLREWTPVRAMLLEQLHRGLVSAQARRTRLRRYMAQEVLDEPELLRLTRLCGISLITLYGLSASIGDIKRFSNSRKLSAYFGLNPSVEQTGNWEGEGALKRHGRGALRALLVQSAKKLLRVNNPLQKWGLAVATRRGRNKAAVAVARKLCVAVWHVTQGHVIGAIERMTTLHTKLHKLATELGLNTIKSQGYETKEAFVQKKLFVLRSYA

SEQ ID NO: 304733 - protein, 323 aa, unidentified
MSQPNLQCMGIDVAKLSLDIATTDTIEPFTVGNDEDGFAVITDKLKHAKINLILMEATGGLEAAIACKLQSEGYDVVVINPRQARDFARSMGYLAKTDKLDAAMLAQLALVIDRHPDRSRYIRHLPDEARAVLATMVVRRRQLNHMLVAERNRLYPSHPQSRKSIDNIIDALQNELDRINEQMKQHMTAFFQEQARLIGSVKGVGDITVASLIAELPEQGKLNRREISALTGVAPLNRDSGKMRGKRTTFGGRAGVRATLNMAALVATQFNPAIKLFYQRLLAAGKPKKLALVACMRKLITILNTMLRKGEEWNASFQSQVIS

SEQ ID NO: 304734 - protein, 346 aa, unidentified
MLYAGLDLSRKRLDFHLLDEEGATVDIGASPPDADGLRGLSDRLAPHGEPIRAAIESMNGARFVHDRLELAGWQVEIADAQKVKGLAPLACKTDRIDAWVLAELARRDLVPAIWLPDPRVRAERERARWRLHLVRHRSSLKQRVHAVLLTHGKPCPVSDLFGVRGRQLLGRLDLPEPWQGTIEASLRLIDELDREIAGCERELRRLGSDHRYVPLLMTVPGIGWVLAYTIAAELGDIRRFPTPRKLAGYTGLCPRVYQSGQRDLRGPLSKQGPRYLRWALVEAATHACTSAAYRDRYQQTKARIGKQRGAKVAQIDLARRLSEAIWHMLSRGEPFAPKGATDPLAA

SEQ ID NO: 304735 - protein, 450 aa, unidentified
MVRACAWSTRPSRRMKSCSRNIQWSRRPDRRMEHINRTGPLSTPPQMEETMVNVGVDLHKTQFTVCVRYAGGEKFAQYPTTEEGYADFLSQMAKWQAKGEEVRVGVESTGNTRYFKSRMEDAGIGVTVINPMKFKVINESVKKTDKRDASTIAEFLEANMLPESKLCSRTSEQLRRLLKVRTTLVRSEVVIKNQIHALCTAEGKEDIKGGLLQSKKGRKQVLDALNQWGNGLVVQPLLETIDRLEENVKAIEKQLRTLVVGDRMVELLMTIPGCGEIGAWTIRAYTDDIKRFSSPKKYVSFAGLAPWVQNSNETIRHGKITKRGPKELRTALVQVVMGLRRMKNKTCTWRLMHRYEAMRKTKIPGKAIIATARKMAVIIWNMLNEDVEFDLSKMIDRKLAKKSEAMRSSAELAKVALFEEEEKEKPVVLKRGNKKEKKTGVAGGKIRKVG

SEQ ID NO: 304736 - protein, 418 aa, unidentified
MQQSQEAQLWGFVDWATEKHSACVVNGQGKALAEFEVDNTPEGLAKLAVRLTELCDGHPEAMHVGIEVPNGPVVDALLDAGFAMFTLNPKQIDRFRDRYSPAGAKDDRRDSFVGSNALRTDPAAFHRIEPASAAYVELREWSRIDRAVGQELVAVANRLREQVLRVAPHWLILCLAADEPWFWSLLELAATPKAGAGLTLRQVRAVLRSHRIRRHPAERILAAWQTPCLGTPQGVLIAVGAHISVLLSQLRLLREQRRNAQAALERCVSACQTEAGNSGEHPDDLTIALSLPGIGLRVAASLFGEAGQSLRERNLRAFRAQSGIAPVTTQSGKSRRVQMRRACQGHVRDACFYWARGAIMRDPRSKEHYLELKKRGHGHARALRGVADRLAGRLFVMLDRGTTYSPSYRRRSDGNKIA

SEQ ID NO: 304737 - protein, 429 aa, unidentified
MQNESTPGARGPVFCGVDTHADSHWLCVLDWRGRKVLSRRFPADAAGYEALAGAIAAAGEPACVAMEGTSSYGAGLTRHLASLGMPVREALSPARTQRRRPGQGKCDEADAERAARAAMSGSRLGTPKSQDGWVDGVRCMLAARSGAVKARTSAINTARSLLTTAPEGLRSRFRGMGGPRLMEELPSVRAEGALGAALGALADLWAAARDAALDMERAIGASLEENCPALLAMYGCGPVSAAKLAVAAGDNPGRLRSEASFAAICGACPIPASSGKTVRHRLNRGGDRQANSALHEIARQRVMRDPETAEYAERARARGKSDREVMRCLKRYVAREAYRALMRPHEIRRPEDASELVAARRAARVSQVRAASILGTSEKYISMLERGQRELKPIRRAYEAWVEAGLPLDWDRQAFEAERKMDSKKHLAK

SEQ ID NO: 304738 - protein, 342 aa, unidentified
MEHKQKFMQVYGIDLSKEKFDVNFLDSDGKEKNKTVRNGLTGISGFLSVVPEGTVLCAENTGTYGDLLVFLCNQYAVPIALVPGYTVKHSLGLVKGKSDPVDAARLREYGERFVDKLSFKEYQSENMSELRQLYTLRSQLVKSRKELITGAHAREQMPFQSVRANLILKASLSSLDGQIGEVEKEISLIIMNDAEMAENYTLSVSVFGVGPVIATNVIIKTGNFKAIDTARKAASYAGVCPFPNTSGNMVGKSKTSPFADKELKSLLYMGAKAAVKHNKEYRLYYQKKQQEGKPHYLIMNNVMNKLLRTIYSVVKNKTPYSRDYVCLDPREKNINGSEKNVA

SEQ ID NO: 304739 - protein, 345 aa, unidentified
MESKLEQLLERPSRSFTPRARPAWPARILEAGVIYHVKEQLVYLGVDIAKSYLDAAIGSEKRRFPNDAVGYRQLIRWINQIAGAVQVICEPSGGYERALVRALVGAQLKVSLVPANRVRQFARAAGILAKTDCIDAKVLCAFAEAMQPAVVSASQLEQEHLRELESQRRHLTHLLVMEQNRGTRVSDVCVRKLNRGLINQIKKQIEQLDLLIRNHIEQSAELAAKAAKLTAISGVGARTAALLLAQMPELGKLNRRQVAALVGVAPFNRDSGRMRGKRAIYGGRRPVRHGLYMAALVAARHNPILRAFYLRLRAAGKPAKLALTATMRKLLIVLNSALKPDLNYA

SEQ ID NO: 304740 - protein, 339 aa, unidentified
MEITTIGLDLAKSVFQLHAVDTDGAIVWRKKVRRGALLETLAQVPACLVGMEACATAHHWAREISALGHEVRLMPPVYVKAYLRRQKNDAADAEAICEAVRRPTMRFVPIKGAERQAVLVLHRSRELLVRQRTMLINAVRGHCAEFGLVAAQGVIGSRDLVERIRQADNTVLPDMAKDAMMLLIEQLHALVRQIQALNRRLLVWHRQDQASQRLATIPGVGVISATALAASVTDPSQFRSGREFSASLGLVPRQNSSGGKDRLGHISKMGDRYLRKLLVVGATSVVRRARTAGTAANWVRSLLERKPARLVTVAMANKTARIVWAVLARGETYRSPAAI

SEQ ID NO: 304741 - protein, 423 aa, unidentified
MPQPYRWFVGIDWATEFHQVCVLDQERRVIDRRKVEHSGKGIGEFVEYLLKLSGNQPEQVAIAIEVPRGAVVETLVERNLAVYSLNPKQMDRFRDRHSVAGAKDDSRDAFVMADSLRTDMHLFRRVELDDELVIRIRELSRTEEDVKQAAVRAGHQLRELLIRYYPQMTKLCPGMDEPWFWELIEMAPLPDKAHELSSTKVGKLLKKFHIRRVTAEEVLKELRAEPLRLAPGAAEAASEHSLLLLPLLRVLKQQREDIAKRIESVLTKMGESPENAEGQSKEHRDVTIILSLPGVGRVVTATMLAEASQAIAERNYDALRSYAGSAPITIQSGKKKVVVMRRSCNERLRNALYHWCRVSVQCDERSKAHYAELRTKGHTHGRALRGVGDRLMAVLISMLRTRTLYDPAFPSQANKKSIIGETA

SEQ ID NO: 304742 - protein, 396 aa, unidentified
MITEGIDIGGKQHVVARCRAGQDKADREVLRVSQDRAGFDRLDAWLARQPEPVERITMESSGHYWMGLTSHLRRGPVPVKVVNPLGAKYFAKSRMSRTKSDPADARTLALMAQQDHTVPRDPIEGVELRQAARFAMTLVTEQARVCQRLIRLVELGFPELGELFDDPACRTAREVLRVAPTAAVARRKRTGTLADANAGPGHRRLGLTKAERLKDAAARSIAVTELDDEVAFEVGMLLDQYDLLERQIDEAEAHVASLLDGELARRLQTIPGVGPATCAALIAEIGDIWRFDDADQLLAYAGVHPAERSSGRKGADPETSWHMSKAGNAHLRAAAYRMALVGVTHNPVIAAHYARKRDAGKSKMNALGHCMSKALNLVWGVWRNGADWDPDWGSRA

SEQ ID NO: 304743 - protein, 345 aa, unidentified
MNYYAAIDVSLELSSVCIVEATGKVVKEVKVETRPEALVKFFKNFDLPMTRIGLEAGPLSQWLHAGLTEAGFETVLMETRHVKAALSAMTVKTDRRDARGMAQLIRMGWFRPVHVKSPESQEVRALLVARKQLQHKLTDIELSIRGILRGFGLKVGKVTDKGFEARIRKLASGHAMLEQIAEAMLAARATLLEQFNKLHKAVLDIVRHDEVCRRFMTTPSVGAIVAITYKSALDDPNRIKKSRNAGPLFGLTPKRYQSGETDVTGGISRVGDAMVRTALYEAANVLLSRVTRFSALKRWGLQVAKRRGLKRAKVAVARKLAVILHRMWLDGTTFRWTKTKVVAHA

SEQ ID NO: 304744 - protein, 367 aa, unidentified
MSSVTPAAGPIHLGMDTSKNTIVVGVLMPGEEVPVIDRIWNEEGSVRHLVSRLGDPAALRACYEAGPCGFELHRLLASMGVACDVVAPSLIPRRPGDRVKTDKRDASRLARLHRAGELTPVRVPSPAEEAVRDLVRVRAALLADRKRAQQRLTAMLLRHGRVWRSGSYWTQAHERWIAGQRFEEPALAVALAHYRAGLDTRRAELDAIEAELAPWAAREPLAATVARLRCYRGIAELHSLALAAEVVDWRRFPSARAFMGFTGLVPAEYSSGDKTPRRGSITKAGSEPVRTALVEAAWAYRFKPAIGVTLRRRQRDAEPDTLARSWTAQRRLHARYKAMTARGKPPAVAVTAVARELAGFVWAEMTS

SEQ ID NO: 304745 - protein, 392 aa, unidentified
MYIVGIDIGKNHHEASIVSPEGKQIGRSLRFATTHKGADSLMSFIFKNIGNSPCVFGMEATGHYWYPIYSFLKAKGYTIYVINPIQSDSLRKMYIRQTKNDSIDSFLIAEVIRFGQFGTTSMADENILAMRQLCRYRDSVISSRTEIKLRIGTIMEQIFPEYEKQFSSLWVSTSMGILEKYLTPENIENAPIDELFEIIKDKSHNRLTKAKAISIKEAAADTFGIKIAQDAFSFQLKQLIDRMNFLDKQIEALDCQILEYYEKFDCYLHTIPGIGIIGAATILAEIGDISRFKNSSALVAFAGIDPTVRQSGEFNSTHNHMSKRGSPYLRHAIFLAATTCSFHNSPLNAYYKKKRDQGKHHLTATGAVARKLTTVIYAVLRDSKPYEPKKFC

SEQ ID NO: 304746 - protein, 347 aa, unidentified
MNDQNIHIIGIDLGKNWFHLVGMDEHGKPVYRKKLNRAQLGEWIVTLKPCIVAMEACPGSQFWGRRFQHAGHVVRVIPAQFVKPYLKSNKNDFNDAEAIAEAGSRGTMRCVALKSADQLELQALHRVRQRFIVERTAVVNQMRALLLEHGWVVPMGRELFARRLPTILGDLENGLTVRMVQLIEGLRRRWRALDDGMGSISNQVVEIAAASELCRRVRTVPGVGPLVSTALIAAVGNGAAFRRARDMSARLGLVPIQNSTGGKSTFGGISKLGNAYLRMMVIQGARALLIHMKRDQSRIGLWLRELEQRSHPHVALIALANKIVRICWKVLTSGQNYRPFLEVSKLA

SEQ ID NO: 304747 - protein, 279 aa, unidentified
MEPIFVGIDVSKDRLDVHVRPGGEAFVVTRDGKGLEELVGRLQELGPTLVAVEATGGFETIVAAAVAGAALPLAVVNPAQIRHFAQAVGKRAKTDPIDAGVIAHFVEAVRPVPRALPDEASRLLAELVGRRRQIIEMMVAERQREKRAANVRVRKSLARHIAMLERELAAIDQDINTLVRGSPVWRVKEDLLASVPSIGKTLARTLLAELPELGSLDRRNIASLAGLAPYARQSGRWRGRSMIGGGARRCSVRHLHGSPRRQSMQSAFERLLPASGLRR

SEQ ID NO: 304748 - protein, 426 aa, unidentified
MNEQNDNEFAALIGLDWADQSHDICLQVCGNNDVEFETFKHRPEKINEWIHQLSERFPEAKIAVCLEQSRGPLIHSLMEHDNLVLFPINPKSLACFRGALYPSGAKNDPADAHLLLLLLRSHRDKLNRFNPDEESVRKLALAVESRRKLVNLRTDLTNRLKSNLKGYYPQALELTGANLHDPLSTAFLTKWPTFQDLIKARPQSVRSFYYAHNSRGESVIKRRLEIIHASTALTHDQPVLQVGSMMTRALVGQLIVLQKDILKHDQLIAQTFQALPDAKIFSSFPGAGAALAPRLLAAFGSDRSRYKNAGQIQEYSGIAPVIERSGKKIWVHFRWACPKFMRQSFHEFAGQSILFCNWAKAYYENARYRGKDHHSAVRALAFKWQRILWRCWQDRVPYDNDKYVNNLKKQGLEIYKNLNEKTVETV

SEQ ID NO: 304749 - protein, 436 aa, unidentified
MRGCRCSMIMGFTKPIEHFNLQRKKVITMNTLYVGIDVSSKSNVIYLMLPNGDKHSNFSVANSHEGSTQLVKRILSALTSHSLDTVLIGLEATSVYGDNLVYFLREDATLAPFNRKIHVLNPKQVKKFHDAYNDLPKNDYVDSFVIADCLRFGRINKEVYMGDYRYKALQNLTRARFFAVQNLVKEKQRFMNVLFKKYSTMTQEKVFSDTFSTTALAVYDEFESAEALANMDLHELTDFIIEKGKNRFPDPDAVAKAIQKAARSSYRLPKTVNDSVNQVLSISITSMKALESQIKEFDKAIKAQMELLPNVLISIPGIGPVYSAGIMAEIGDINRFNSQAALAKYAGLAWKQHQSGGFESEVTRLIPSGNRFLKYYLCEAAFSLVRCDKEYSNFYRLKYKEVNRCQHKRALALTARKFVRLVFRLLKDNRLYCPAK

SEQ ID NO: 304750 - protein, 324 aa, unidentified
MLTEAGEIVERRIVTSRERFTAVLGSHAPARILVEASTESEWVARHLESLGHEVIVADPNFAPMYATRRRGVKTDRRDARTLAEACRLGAYRPVHRASAPQRHVRAQLAVRDALIRTRTRYVSVVKALVRRDGLRLPPGNPVHTEAKLAALPLPVPLARELAPLRALFEPLNNEITAADERLAAVAAADPVVERLRTAPGIGPVTAVAFVATLDAVTRFASAHHVAAYLGLTPREYSSGEQQHRGRISKTGNARMRYLLVEAAWRVLRSPDPGAAPLRAWAERIALRRGRSIAAVALARRLAGILYAMWRDGKDYCAPPAAAGA

SEQ ID NO: 304751 - protein, 420 aa, unidentified
MFATDDLLIGVDIHRRTNVVQAMNGVGDLLTGPQRAANSRSGTAAFVQQLATLARAGDFSRIHIAAEATSNYWLPFFCELEQAPELAAWPVVLYPFNPKVIHNFRKSLGDWNKTDALDTLVIAERLRFGRELPYPFHMEERYLPLRTLTRYRYHLVGELIRVKSHALSLVYLQASEYTVDPAFSDIFGKTSQAVLKEFPSLETVATMPFAELVEWLDVRGKRRFADPEDNARRLQRIAQDSYQLPDEWLTAVNTALSLSLRHLTTLQQLLARLDTAIADQMEQYPNSLTTIPGIGPVFAAGIVAEIGDLARFNYRHEKVASFAGLKWSKHQSADFTADETHLKRTGSSYLRYYLCEAAQLVRMQDAEYGAFYQKKYDEVRHHQHKRAVVLTARKLVRLVVRLLTTNEPFRARQVPSDKSN

SEQ ID NO: 304752 - protein, 431 aa, unidentified
MTNRNPIPDDAVLVAIDVAKNRNEILIELPGSKRRRNLVVPNTRDDHDRLIAELASHGRPVICALEATGNYHRPIAWRLAEAGFDVRLISSLAMARTREALHNGWDKNDPKDAQVILHMMRIGHALRFHDPLRAGINDVQELSKTHEAISRAKTEIQHRILTHYLPLYFPEVERFRGNTRSDWFFAFLDAFPTPGAIMAHSKVQFIDAAWEVVGRKVSKERLLSDIYDTASTSIGLPLPLDSPAITMFRIVIAEARGLIRQRDEIEKMADALLRESSDYQALRTIPGIGPIIALTIIAEAGDLRRFRHHRQFLKFCGLDLSTQQSGQYRGQTRLSKFGNARLRRSFWQAAQVAVKQRENGFRDKFERYMSKDHDNADLRRKAMTAITAKMARVAHAVIKGGSDYRPFFEGRVPGGRTSSARAVRASPMMTL

SEQ ID NO: 304753 - protein, 319 aa, unidentified
MAQNEVIVVGIDVAKDKVDACIRSLSLRQTCPSTAQGHRKLMAWLRKHKVTKAVMEASGGYERAWAKVLREAGIEVRIVDPRRVRSFAQSAGRLAKNDAIDAEMIAWFAETFSEAPSQVHDAAREELQTLVKARLGLIDYRMRLVSQSEHAAPGLVQKAHAHILKSLASEIAKLAAAICAKVRSTPDFAERAEIIESVPGLAGTSAANLVAGMPELGQVSDGIAAALIGAAPYDDDSGKRRGERHIKGGRRWVRNALYMPCVGAATQNNPVLKAYYQHLLAKGKEPKVALVACMRKLIVILNTMIARRQKWDSSRDAVS

SEQ ID NO: 304754 - protein, 309 aa, unidentified
MSTNTSNLYVGLDIAKSSLQVNLQNLNFSLPNSTPGHRRLIAQLKTLSEPLLVVCEATGGYEQGVVAALHQANLPVAIVEPARVRHFAKACAQRAKTDRIDAQLLAEFGRQTSPRPQAPLDPSTAALRELSRHRAQLQEMLQTTLQQSRHLTLPVLRKQNALFLRQLRSHLQKLEKQIDGLVQADPALQNKARALQQVAGVGPKTVVSLLAEMPELGGLNRGQAAALAGVAPHARESGRWQGKRFIGGGRPLARKALYMAALVGSRHNSFLKARYQNLLSRGKAPKVALVALMRHLIILLNSILKPLAT

SEQ ID NO: 304755 - protein, 355 aa, unidentified
MDSTKYIGMDVHKESISVAVRNAAGKVVMECVIETKANMILQFVDGLRGDVHVTFEEGTWAAWLNDLLRPHVTRLVVCDPRRNALLQEGNQNDRIDARKLAELLQNNQLRPVYHGDHGLRTLKELVRSYLAITSDLSRVMSRTKAIYRSWGIPCTGKQVYSSRHRGEWLGKIQEPGVRRRAEFYYQQLDALRTLRREVRRDLLVESKKHKVWKRLCQIPSIGPIRAAVLLGILQTPHRFRTNRQLWTYSGLGIEVHSSADHQVVKGQLQRKKKPVEVRGLNENCNHDLKNLFKGAAVIASSKPGPFQEFYAALLTKGMRPEMARLTLARKIATIVLIVWKKGVCFDANHLKPQTA

SEQ ID NO: 304756 - protein, 352 aa, unidentified
MKVYAGIDLHSSNNYVGIIDEQDRRLYQKRLPNQIDHILCALEPFKETLEGVVVESTYNWYWIVDGLQEHGYRVHLANPSAIKQYEGLKHTDDKWDSFWLAHMKRLNILPEGYIYPKEERSVRDALRRRLFFVRQRTSHILSIQSTITRNLGYKVSARDIKRLDESDADKIFDDPYLRLVVRNGISAIRFLKESIKEIEGAVTSHVQVKPEFEYLQTMPGIGKILGLTIMLEVGDINRFPSAGNYSSYCRCVKSEKLSNNKKKGEGNRKNGNKYLGWAYVEAANFAVRFYPEFQRFYQRKKAKKNGVVAIKALSNKLARASYHVMRDRVPYDIDRHFYNYSACGRESEKGLV

SEQ ID NO: 304757 - protein, 347 aa, unidentified
MRFYTETHQHYCGIDLHARTMYVCILDREGQVLLHRNLPCDPERFLRTVAPYRQDLVVAVECIFTWYWLADLCAREGIAFVLGHALYMRAIHGAKAKNDKIDSKKTAALLKGGLLPQAYVYPPAMRATRDLLRRRLHFVRHRGQLLAHIQNTHHQYNLAAPGKRIAYRANREGIGEGFEDASVTKSLEADVALIDHYDTVIRGLELTVLRRARGHDLDSFERLKTVRGIGKVLALTILYEIGDITRFARVQEFASYSRLVKCQASSAGKIKGTSGAKMGNAHLKWAFSEAAVLFLAKCPEGKKLLARLERKHGKGKALSILAHRIGRAVYFMLQRKRAFDLDRFLRM

SEQ ID NO: 304758 - protein, 423 aa, unidentified
MSETVSGAEPRFAAFVAIDWADQKHVWSLQPADSEKRQHGQIEHTPEAVESWVATLCGRFGNHAIAVAVEQSRGALVFMLSKYEQLHIYPIHPRAAAQFRAALFPSGAKDDPVDAELLLDLLVHHRARLRPLRPDTEQTRLVQHLVEGRRRLVDEKTRQSNRLTAKLKLYFPQVLNWFDEVDSALVSALLERWPTLEDLQKARPATVRSFLTGHGCRGNERIEQHLEQIRQAVPAIRDLAVIQSSVTTTKILVDMITTLREGIATFDQQIDRAVTAHPDFAIWDSFPGAGPALAPRLLAAFGSRRDRYETAADMQKFSGIAPVVERSGKMEWVHFRWACPKFLRQSFHEWAGHSIGFCGWARAYYQQQRQSGHDHHAAVRALAFKWIRIAFRCWKDGVPYDDSRYVASLRRRGSPLAQAISQP

SEQ ID NO: 304759 - protein, 349 aa, unidentified
MNSMHYVGLDVHKKTISYCVRQADGTIIHEGVMEANRPAVDAWRKQLPDAWTAGMEATMFTGWIYDHLVSNGAAVKVGHAAMLKAIAAGKKKNDRVDARKLADLLRCDYFPECHMAPRELRDRRRVLRYRNLLVRQTVRMKNRVSSLLMETGISYNKEKLHQKKYFGQLLREQEAEMPESLPQLLKLSRSTIETLSSMDRQLLRMLQHDAVLAARVERLMTIPGVGPVVALTWALEMGEIHRFPSVKHVVSYCGLCGAEVSSAGKQQRTPISKQRNRHLQTVLIEAAKLAPRYHPELALVYEREKQRGNRNQATLAVARKLVAYLLAVDRQERVFEKAGPPHPAAFVAA

SEQ ID NO: 304760 - protein, 336 aa, unidentified
MLIIGCDFHSRFQQIAMLDPQTGEVIERRLEHENGEARKFYAGLPTPARVGMEATGYAQWFERMLAEQGHQLWVGDATEIRAAMVRKQKTDSRDACHILDLLLRDKFPRIWIPSSDERDVRQLLRHRFKLVCLRTSLKNQLHAMAMGHGICRKKKLWTPVGRKELQGLSLGPWASRRRRELLDMLDQLEPVMDELDGAVIQEAEKRPAAMRLMTQPGVGPVTALAFVLTIGPVERFQKSKKLVSYLGLNPSENSSAGKQRLSGISKQGNSMLRYLLVEAAQTASIYDPELRRDYQRLKFRRGSGVAKVAIARKLAVRLYWKLREQPSQVPPTPMQG

SEQ ID NO: 304761 - protein, 395 aa, unidentified
MFIVGIDVAKRSHEVCMITSDGQTVQRPFSIRNNCTGYNLMLEKIRKHTNIKSQIVFAMESTAHYWLALFTRLRKDGYHVILLNPIQTSAMRDMFIRKIKTDAKDSFIIAELIRFGRYAESNVAQDRLLALKELCRNRFYLVDMAGDLKRKLIALVDRVFPEYEAQFDTIFCKSSVAVLKKYPTPQKLSNAHLDKLTELLWNSSNGHFGEWKARELRELARNSFGVEDCDGAYSTLILLMLDQIQSLSGKADALEKEISRLFQSFDTTVTTIPGVGPIIGAVILSEVGDISRFSSADKLAAYIGVDPSVNQSGEFQAAHAHMSKRGSPYLRRCIWMASQVAVQRDPMFRAYYEKKAAEGLKYMTIIGHVTRKMTAVLFAILRDHKVYEPVLPTAA

SEQ ID NO: 304762 - protein, 416 aa, unidentified
MEVIVSRCAGLDVHKNTVMACVRAPGPNRGRTSTVRQFRTFTAGLRQLRDWLVAEQVSQVVMEATGVYWKPVWHVLDATPGLELMLVNAHAVKNMPGRKTDVADAVWLAELGECGLLRPSFVPPPVIAQLRDLTRYRKKLIEERARETQRIQKLLEDAGIKLDSVVSDILGVSARQMLEALIAGVRDVAALAELARTRMRPKIPQLRQALEGRFGAHHALMLRMHLEHVDQLSVSIDRLDSEVDRVIRPFSSALQRLITIPGVGRRTAEVIIAETGADMRRFRTAGHLASWAGMCPGNHESGGKRRSGRARKGNAALRAALCEAAWAASHARSGYLPAQYRHLLRTFGKKGQTRAVFAVGHSILVIAWHLMAHDRDYADLGGDHFTRATDAEARERYLVRQLEALGHKVTLEPAAA

SEQ ID NO: 304763 - protein, 339 aa, unidentified
MQVTTVGLDLAKDVFQVHGVTADGTVAFNRCVRRAQLLRFFEKLPPCLVGMEACGSSHHWAREIRKLGHEVRLMPAFYVKPYVKRGKTDAVDAAAICEAVSRPTMRFVEVKEPEQQALLGLHRVRDLVVRQRTQVINMIRGLLREFGHILPKGPGAAIRFAKSCLAGDLPDIPDLAKGLITTLCDQLMALCDRISMYAKLIERHSRLDKRAWRLRSIPGVGPMTASAVVATIGDGKQFQNGRELAAWLGLTPLNRSSGGKERLGRITKKGDRYIRKLLVIGMTSRVQHARRYPEQVDPWTAKMLERKPVRLATVAMANKTARIIWAVLTRDTDYRRSAA

SEQ ID NO: 304764 - protein, 422 aa, unidentified
MLEEDPQVEEIVARVAALDIGKAELVCCVRVPHEGKPGRRLQEVATYSTMTRSLLAMSDHLRCLGVSRVVMEATSDYWKPVFYLLEAQGLDPWLVNAKDVKHLPGRPKTDKLDAVWLCKVAERQMIRPSFVPPPAVRQLRDVTRYRIDLVGARTAEKQRVEKLLEDAQIKLSVVASDIFGISGRQMMAALIGGQTNPKALAQLARGRLRAKLEALEEAFTGHFTDHHAFLLATMLARIDALDADIAALEAKIQEMIAPFAAAVDKLDEIPGVGATGAHIILAEIGLDMSRFPTAAHLSSWARFAPGVKESAGRKKGSGTTGHGNRYLARVLGEAAVAASKTNTFLGERYRRIAKRRGKKRAIVAVGRSILVIIWHLLSNPAARFIDLGSDFYENRTGPDRKKRNHIRQLEALGYKVTLEPAA

SEQ ID NO: 304765 - protein, 323 aa, unidentified
MNERTDMNTIPAILTPVHIGVDVAKCELVADLAGSIRRFANHSKGIAALLRAAVKCAPHVRLVCEATAGYEQALATASFKAGVPVCIVPPQRPRHFAKALGLHAKSDPVDAALLSRFGNQTGPEPVRPKDRSRQELEALMRARSELIDALAREKSRHEHHSHPLALKLAKARIARLVKDIATIDKAAAAVIAADPLLAKADALLRAVTGVSHQSSRVLLAFMPELGTLNRREIASLAGLAPFDRDSGNKQGKRFIQGGRKRVRSTLHMAGLSAAQFNKVLAPVYRTLIKAGKPFKVAVTAITRKLLVHLNSIMAEFLKNQIAT

SEQ ID NO: 304766 - protein, 322 aa, unidentified
MQGKVLPERSATQVYVGIDVCKAKLDVYIHPLGLRYAFANDAQGIKRLKRCLEAYEVARVVMEATGKFHRAAHRSLDAGGFAVAVVNPLRSRLFAEAVGALAKTDGVDCRMLAILGESLEPDASAPPSELMEGLQELLRCRDAALAARTALLNQLGAMTAPPAVTEIKRQLRAAETATANLGAEIERLIAADPLLARRMAILTSIPGVGIATAIALIVGLSEIGSLSAKEAAMIAGLAPIACDSGDHNGARHIRGGRPHLRRALYMAALCASRRNPALKIFYDRLIASGKKAKVALTAVMRKLLVLANTLVAQNRPWEPLHA

SEQ ID NO: 304767 - protein, 344 aa, unidentified
MDVMIGIDPHKGSHTATMLDRGERELRRIKVRAGSGQVVELLEWADGIGPRTWAVESAGGMGYLLAQQLVAAGEVVVDVPATLASRVRVLASGQSTKSDPNDARSVAVAALHAPSLAPVRAADHTMVCRLLVKHHTDLARWRNKLCCRLHALVAELTPGGISKEVVVNQARSLLDGIAPVGVAAFERHRLALELVAEIDHLDTVLRDSRARIARAVAASGTTLQEIFGVGPIVAAMLIGYSGDPTRFTTPSRYAAYTGTAPVEFSSGGRITHRLSRRGNRRLNHALHIAAITQIRHPDSVGRGFYDRKLAEGKTPREAIRSLKRRLSDIAWRHLIADTQRGAQQ

SEQ ID NO: 304768 - protein, 312 aa, unidentified
MLTAEADKCKTKVVVNTAAGVQALLAWCAKHGAQPAQLHAILEPTGLYHEQAATALPQVRVSLVNPAQARDFAKALALRSKNDALDSYVLARYGQTLSPALWHPAPLHARQLRALLTRREALSKDLLRELNRKEKSQFSPSAPLVDGSIDKAIAFLREQIKQIERAIDQHIDNHPDLKQDCELLNSIPAIGPQAGNAILAVMHNRHIDSAQSLAAYLGVVPVQRQSGSSLNSCARLSKAGPSQVRATLYMAALVGTRHNPHIRALYQRLLKAGKSKKAALGAAMRKLVHLCFGVLKNRPPRQGSSPTSPITP

SEQ ID NO: 304769 - protein, 343 aa, unidentified
MEYYVGLDVSLKQTSICVVNQTGLVVREGMVDSDPEAISVYVRSKAPDAVRIGLETGPTSTWLWTELKRLGLPVICIDARHAKAVLKMQINKSDRNDAIGIARIMQTGWFKEVHVKDIDSHSVRALLASRALLVKIKRDLENHVRGLLKNLGLVIGRAKFNVFAVRAEELIEGRPELVVAIRPLLEARSAVEQQVSELDRRVMKLARHDAQVRRFMTVPGVGPITALAFKATIDDPARFARSRSVGAYVGLTSRRHASGEVDWTGRISKCGDAMLRSYLFEAAGVLLTRVPKWSAVKAWGVKLAKRNGLRKAKVAVARKLAVILHRMWIDGTEFNWSNKEIAA

SEQ ID NO: 304770 - protein, 317 aa, unidentified
MNTPENQTLINIGVDVGKANLDIALHPSGQSFTIPNSTTHIRELVKILKGYAIERIVVEATGRYEHALVRAISQAGLPIIVVNPISVRRYAQAIGVLAKTDRIDAQVIAKYAATLKPEFKPIPDKTSQKIKDLLARRRQLMEMSTMEKNRLQILPKTLHSSINSLLKTLQTQIKTITKQIEQEVAKVDHWQSKTDILTSVPGVGKVMAFTLLSELPELGELNRREIAALVGVAPINRDSGKLTGKRRIRGGRHRVRTVMFMSMMSAIQCNPVFKQFYERLKAQGKLPKVALIACMRKMIVMLNTMIKNQEPWRKKTA

SEQ ID NO: 304771 - protein, 436 aa, unidentified
MEEVTDEPRYRDRVCGIDIGKAGLVATIRVPSETNPARRAAETRSFGTTRREVLTLADWLRSWQVPAVVMEATGDYWKGPFYRLEAEGLECVLADARQVKHLPGRPKRDPSDSRWLAACFERGAVTACFVATPEFRVIRLHTRYRRDLTEERTREKQRAEKLLESAAVKLSSVVTDLHGVTGRDIMDHLIAGETSPKVLAQLARARARRKIAELEAALEGAEFFTAEHAALLATMLGRIDHLNAGIARLTEVIERLLAPYEEQLAQAESMPGWGRRSAQDALAETGPDMSRFPTGAHLASWAGRTPLDNSSGKRQGKAKSKKGNRYLAAVTGETAVAAGKTHTREGARYRRLSRRRGKAKAQVALGNTQLKVYHALLSHPGTRHEDLGPDYYERQASTRRQIAHHVGKLAALGYEVTLARLPSPNPDPAGADSQAA

SEQ ID NO: 304772 - protein, 362 aa, unidentified
MQKHIFVGIDLGDKNSVARIGVDLEKSERFGFVNTKAGRARLILEVKRRSEEAGAAVVVMAYEASSCGFVLRDQAQAAGIDCRVLAPTKMEKSVEQKRNKNDDRDADDVLEKLRGHVLAGNRLPTVWVPDLETRDDREVLRTRLALSERQTQVKTQIQMLLKRHGLEKPSELGTTRSKQYRQWLQGLSQWESLGWGTRQSLASLLRQLSGIEAEMENLEKLIRQLGSQPRHKPIVEALMQEKGVGLLAALVYRTEIGQARRFHRGRHVGKFVGLTPTSHESGQQSDRKGHISRQGPPRLRKVLCQASWVHVRYDPHSREAYQRLVAKNPKKKKIALVAVMRRLAVRLWHRMREVELKLETSS

SEQ ID NO: 304773 - protein, 330 aa, unidentified
MTYVGIDVSKDTFTVAYSSDKNSKTKTFKNTVKGIHEFIQTISKEDTHCVLEATGNYSALLVYLFSEAGITTSLENPLKIKNFARVMLSVTKTDDVDARLIAMYGEKMNPSPYKLKEESILVLKQKRTVLRQLKKQLVATRNLKESMEILPLVDSTCKRTIEKTIIFLEKQIRNMEENITSLATQEYKKQMELLTSIKGIGVTLAAALIIATGGFTYFDNAKQFTRYIGLSPTYQQSGTSVNVKGHINRNGDSTLRSQLYVAAFASLRCNSECKECYDRLRSNGKPGKVAVIAVANKLVRQAFAVATKEKEYVDGFVSEKPQKLQKHISA

SEQ ID NO: 304774 - protein, 393 aa, unidentified
MICVGIDVAKDKHDCFILSSEGEVLADVFTIPNNAEGFDTLLQTIRRCARPEGKIKVGLEATGHYSYNILGFLLNEGLDTYVINPLHTNLYRKSLSLRKTKTDRVDARTIAAMLMSDVDLKSYTDTAYHNEELKSLTRYRFDKVRERAKLKQSVSRLVTILFPELEKLVSTLHMASVYALLSEFPGAKQVSEAHLTHLKAVLYDASKGRYGSDMATTLRDAARCSVGSVMSAKSLELRHTIRLIHELDAEIEDIEAAIQSMMGEIQSPITTIPGMGVRVGAMILAEIGDFSRFDSPDKILAYAGMSPSTYQSGQLSLSGAYSHMEKRGSRYLRYALYNATKYVCLWNPTFAAYLAKKRAEGKHYNVALSHATKKLVRLIYALEKSKRPYSTAA

SEQ ID NO: 304775 - protein, 338 aa, unidentified
MIGVDLAKSVFHLHGASMAGQPKFRKKLSRQGFADFMSRQPPAVVVMEACGSAHYWAREMSRLGHEVKLVAPHYVKPFVKRQKNDAADAEAIVIAAQRPEMRFVEPKSTEQQGRATLFRGRERLVHQRTELVNALRACLYEFGHVVPQGIHQLGRIKDILDEPNSDLPELMREECADLMKQIAEKTIRIDARTAKIKALAAEADTTRRLQTIPGVGPLTALAVEAFAPPMESFRNGRDFGAWLGLVPRQFSSGGRERLGRVSKAGQSDIRRLLIIGAMSRLNWLGRKSIPEGSWLARIAARKPRMLVAIALANKMARMIWALLTKNEDYRDSAQVAAA

SEQ ID NO: 304776 - protein, 319 aa, unidentified
MFAGIDVAKAELVVTVLPAAERFTAPNDAGGVRALTERLRAIGPTLVVLEATGGYELLCVAALAAAALPVVVVNPRQVRDFARATGQLAKTDRIDADVLARFADVVRPAVRPLADAEAHELDALLVRRRQLLEMLQAERNRAGQVFGAANRLVKKSLAAHIAYLERELRITDTDLSAMVRQSPVWRERDDLLRSVPGVGPVTALTLLAELPELGRLTRREIAKLAGVAPLSRDSGTQRGRRVVQGGRAGVRAVLYMAALVATKRNPSIRAFYQRLLAGGKPKKLALVACMRKLLTILNTMARTQQPWSANHGRTAAQPA

SEQ ID NO: 304777 - protein, 414 aa, unidentified
MLDTCFIGIDVSSKSNVVHVMDKNGDKLWTDTFFNSLEGTNKLLNRLRNDENCKDSFLVFGLEATGIYGKGLAMTLGETSLIPKSQKTVKVLNPKQVKRFHSSYSDLPKDDFTDAFVIADSLRFGRIAAKETLMQDKYLALQHLTRWRYQTAHEITREKNRYLQNLFLKFSAMSQQHATSEALFSNTFGATAMDLVNDFYDIDQIAYMPLNELVDYLVVHGKNHFTDPEAIAKEVQKAARASYRLPKTVQDSVNQVLAMQTQTIKFYQDQLKAVDKMIEKQMAVIPNTLTSIPGIGPVYASGLIAEIGDVNRFENEASLAKYAGLTWKRHQSGDYESSNKKLIPGGNKFLRYYFCQAANKVRLHDPDYASYYNSKLKEVRKTPHKRALVLTARKLVRLVYVLLRDGKLYQLQHK

SEQ ID NO: 304778 - protein, 463 aa, unidentified
MGGPEALLFNLKNSSEMKKTKKEMVEMAMMNPNAAGIDIGSTEHWVAVPDDRDAERVRRFTAFTCDLHQIARWLKKCGITTIAMESTGIYWLNLFLLLEDYGFEVFLVNARNVKNVSGRKTDMSDAEWIQKLHSCGLLSNSFQPDNYTRELRTYTRHRQNLIRQASRYLQHMQKSMEQMNIKLHKVIRDLAGKTGMSIVSAILDGERDTEILAELRDRCIRASKETIMKSLEGTWREEYLFTLQQAYDSFHFVHAQMRQCDEKIEKSLKKRETIEVPGEDKDPVKKRRKTKNKNTPKFDVEGYLKMQLGVDITQIDGIDSLSGLNILGEMGSDFSKWPTRKQFLSWLNLVPNNKQSGGKMISSHLMNKKNTAGHIFRKCGSCLWKSKGPLGDYYRIQRAKNGGKAAAIATGNKLASIVYTMVTQQVEYDESILVKMKRHSQQKRLDNLQKKVAHIQQELEEAA

SEQ ID NO: 304779 - protein, 343 aa, unidentified
MDHFAGLDVSVKETCLCIVDDAGRIVREVRVASEPEALLAVLTNPACHFKRIGLEAGPLSQWLFNALAEAGLPVICVETRHMRGVLKAQINKTDRNDARGIAQMMRAGLYRPVHVKTLRSQKLRMLLTHRKLLQSKAIAIENDLRATLRNFGLKVGVVGTVKFEARIKELVENLPDLAVLVEPLLLVRRVVREQIDVLHRRLLAIVRDDEVCKRLMTIPGVGPVVALTYRVTVDVPSRFRNARAVGAAFGLTPSKHQSGESNRTGGISRCGDEMMRAMLYEAAQILLVRSTRWSWLKAWAMKIARRRGVKKAIVALARRLAVIMHRIWMDGTEFRWTREAVAA

SEQ ID NO: 304780 - protein, 387 aa, unidentified
MSQVDDLSRSLAAFDQNTTLTVVVELSEASWLVAGLVPAIDRQPLKKQEPDPRALLRLLERWRAEAAKTGRMIERIVLAFEAGRDGFWLARWLRARGIEVYVIHSTSVAVSREHRRAKTDRLDTGMLMRVFLGWLRGERGHCRMVAIPTLEEEDAKRPSRERESLVGERTRIINRMKSALARLGIRGFKPALRKAPQRLEALRTPEDTPIPPNMLDEVRRDMIRLAVVREQIDAIERARLVRLEQAPARGSHPMVRLLARVIGVGIETADMLVQEVLSRKLRDRRAVARYVGLTGSPDESGKRRREKGLAKAGNARVRRGLIQLAWRFLRFQKDSALAQWYRARTEGPKGVRKTTMIVALARKLLIALWRLVMTGEIPVGVVLRAAT

SEQ ID NO: 304781 - protein, 349 aa, unidentified
MNISRVGVDIAKSVFHVHGVDRHHQVQWRGQYSRGKWLEALVRRAPAGAEIGMEACASSHYWARVLQARGYRVRLIAAQFVKPYVKSQKNDRADAEAICEAMSRPHMRFVAVKTVAQQDTQAAHRIREALVGQRTAKANQIRGLVGEYGLVAPRGIAPLRRALPCWLEDAENGLSDDFRVLLAGLAEDLRYLDARITQLTQTIERHARQDPVAKRLLALHGVGPITASALAGALGDGQAFARGREFAASLGLTPRQHSTGGRPRLLGISKRGDRYLRTLLVQGSRAVLRHVTAREDGLSRWLQALTARRPDNVAVIALANKTARLAWAITRHKVAYDPALAARPQACAG

SEQ ID NO: 304782 - protein, 416 aa, unidentified
MTDDARWFVGIDWASETHQVCLVDAGGKIVGERGFPHGGAGLAEMCIWLLVTTRAKPTVIAVAIEVPHGPIVETLLERGFLVYAINPKQLDRFRDRFTVAGAKDDRRDAHVLGDSLRTDRHCFRHLAAEDAVIVELREWSRMAEDLQQEHNRLANRVREQLWRYYPQALKISDDLGADWFLELWAAVPTPTKAARVRESSIDRVLKTHRIRRIAAAEVAQVLRQQPLTVAGGTVAAASAHIRAVAARLKLINRQIKEAHRRLDALCGKLAAGEEKAASGQEPEPRDVTILRSLPGVGRIVLATLLAEAAEPVRRRDYHALRTLSGVAPVTKRSGKRCIVIMRQACHMRLRSAVYHWARVAIQHDPLSRCRYAELRKRGHSHGRALRSVADRLLAVACAMLDQQTMFDPGRAEKQAA

SEQ ID NO: 304783 - protein, 453 aa, unidentified
MSKRGWRQAKKGKSELRRINPRAAGIDIGSTSHWVAIDPSLSDQPVREFMSYTSDLQALADWLVEHKVQTVAMEATGVYWVALFEVLRERGLEVCLVDARATKQVAGRKSDISDCQWIQELHSYGLLKQAFVPEAQIATLRSYVRQRDRWVTEAGRSIQHMQQALELMNVKLTEVVSDITGTTGMAIIDSIIAGERDAARLSELRNPRCSRSQEEIARALLGSWREEHLFALAQARHYYTYLGERITDCDERIAAAMAACASPEGPSSEPPKAGKRDASPHPFDFDAHSHCFRMAGVDLTAIAGVGVNTVLTVLAEIGTDMSAWRSERAFGAWLGLAPNPRKSGGRVLRSATRPNAQRAATAFRLASRSLSNSKSALGAFYRRLRARIGAPKAITATAYKIAKLFYLMLKSKQPYQDVGQAAYDERFRARRLRSLQRMATDLGFNLVAADSAA

SEQ ID NO: 304784 - protein, 346 aa, unidentified
MLYAGLDLSRQKVNVHVLDEAGGTVTATWVPATRDGLLGLAGRVALYGQPVTAVVEAMTGARFVHDQLELAGWDVELADAAKARALAPLAAKTDRIDAWALAELVRRDLVPAIWLPDPTVCAEREQARFRLHLVKHRTALKNRIHATLATFGEPVGVADLFGTAGRELLVRLDLPAPWATTLGRSLEIVDDLDRRIAGCETELRALGAQHPYVPLLVTLPGIGPILGYTIASEIGDIGRFPSPKHLAGYTGLCPRVYQSGATDRRGSLTKAGPKYLRWALIEATLHASRHEPFATRYDRTKRRLGKQRGGRIARIELARELATVIWHMLTRQEPFRAAGPSNPLVA

SEQ ID NO: 304785 - protein, 414 aa, unidentified
MRIIHDKVAGLDVHKKLVVAAIIVKQEDGSWLEEKRNFGTMTADLLVLSDWLILHGVTDVAMESTGEYWKPVFNILENNFEVLVVNAQHISKVPGRKTDQSDAQWIAELLQYGLLKASFIPPLGQRELRELTRYRSSFVRERATLVNRLQKVLESANIKLASVATNVMGISGRAMLEAVISGNATPDQMAELAKGRMREKRGQLAKALEGRVKAHHRFVLTELLCQIDSIDETIARFDQEIESYCRPFEEAVKLLDTIPGVGRDAAEIIISEIGDDMSRFPTADHLASWAGVAPGNNESAGKRRSGKTTKGNRALRAALNQAAHAAARTKNTFLSAQYHRLAGRRGARKAVVAVAHSILVIAYHLIVRKEPYKELGGDYFDKRNVEATTKRLTKRLEKLGYQVSLQQQLIGTVA

SEQ ID NO: 304786 - protein, 440 aa, unidentified
MTTPTLSVLDPTAAAIDVGSEQLHVSIAGGPPKVFGTTTGQLQALRDWLKENGVRSVAMEATGIYWLCPYEVLEQAGLEVVVVNGKYVKNLPGRKTDMKDCQWQATLHAHGLLKPGFVPPEHIRRLQDYLRLRADHITLAASHEQHMQKALERMNLKVHDVISDLTGVSGLKMVQAILQGERDPAVLLRLCDRQIQQRKAQRLRAALEGTWKAEHLFALRQAYELWQFYQQKIAECDLALEGVLRELAGPDDPASPAPPRPSKRGGVNTPQIAGLHGLLWRLCGQKDPTTLPGVADHVLLQLLGEVGTDLGQHWPTEKHFTAWLGLAPGSKQSGKRRGSQRRSRNRAGRLFCVVARSVGRSVDKALGGFYRRLKGRRGGLVANLALARKLAELFWRLMVHGRAYVEQGLKKYQERVAQTEQRLLQKLARKYNLVLQPKPA

SEQ ID NO: 304787 - protein, 426 aa, unidentified
MAVVMIGVDPHKASHTAVAISAAEEPLGQLRVRASAVQAEHLLGWAQAWPERAWAVEGAGGLGHLLAQQLLSAGERVLDVPPQLAARVRLLATGNVNKNDPNDARSVAVAALRSAQVREARRDDHATVLKVWSKRYRDLGRARTQVACRLHQVLCELIPGGVPGEITAGQAGQVLASITPAGAVQAARCELAAELTEDLRGVDIRIRETRKKLTEAVRAAGTCLTRLFGVGPVIAAAVIGDVRTVSRCASRDNFASYNGTAPIEVSSAGRKVYRLSRRGNRRLNHAIHMAAVTQIRYRHTKGRAYYDKKLAEGKTPKEALRALKRQISDAIFACLQEDARRAAAAAAKSPGGQPGNHSATRAAGSHPDHRLFGPATPGPAAHPTTTAPFPAPLPSRASEQPGPGPGAARPRSGARRASSTRPPASR

SEQ ID NO: 304788 - protein, 436 aa, unidentified
MIGADPHKRSVTIEVIDTGERVLYKGRYGTDPDGYRQMLTAARRFAHRRWAVEGCNGIGRHVAQRLVADGEPVIDVPAKLAARARVFDTGNGRKTDPADAHSVAVVALRTPHLAVVHPDDELVALRLLVDRRDELARTRTQTINRLHRLLLELVPGGGKRFLSAAQAQALLDSVAPADAAGRVRHQLATELLDEIIMLDRKIKDSDKTLRRAVAATGTGLLDLNGIGPVSAARILGDVADVARFATRARFASWNGTAPLEASSGEQRRHRLSRAGNRRINRALHIMAIVQIRHDTPGRAYFHRRVAAGKTKMEALRALKRRLSDVVYRQLVADTKAASPGGQLEATTTSRAADPTPTVDSSDKSQPGLTIEPTAAPAHPDGAAAQAAAQVLPRRTTRPRRSSRTTPAAPGPDPQPPAPADTRDAPTPQRRPAPDHT

SEQ ID NO: 304789 - protein, 343 aa, unidentified
MEQYAGIDVSLELSSVCVVDAKGRVVREAKVASEPGALVTFLRSLCPVPVRVGLEAGPLSQWLHAGLVAAGFDAVLLETRHVKAALSAMVVKTDRKDARGIAQLLRMGWYRPVHRKSPGAQELRALLVGRKLLQAKLRDVEFSIRGLLRGFGLKVGEVSKGRFERRVRELVAGHEMLEAVTGSMLTARAGLQTEFMALHRRVLAAVRADAICRRLMTVPGVGAVVALTFTATIDDPGRFARSRAVGAHVGLTPKRYQSGETDIVGGVSKAGDAMVRTALYEAANVLLSRTTRFSALKHWAAEVARRRGVKRAKVALARKLATVLHRIWVDGSEFRWGKEAVAA

SEQ ID NO: 304790 - protein, 338 aa, unidentified
MSIVMGLDQHRGQITAEWIDTETGEVQRTRVAPADRAHVRKWLERFRGQELEVALEGTTGWRFVVEELRRVGAVVHLAEPAETAGLRGPKKRAKGDRADARHLRELLMVKRLPESWIPPAHILDLRARVRLRHTLSEQRGEWQQRIQATLYHHGCPQRRSLMTGDGREWLAAQPLPATAREQVTVALAMIDGIETQIAPIDKELRAYAHRQAGCKALMAHYGIGPLVAVTILAELGDCTRFSSSRLAVRYAGMDITVYQSDQRRAPGHLSRQGPPALRWALFEAAQSACRQGSPDREYYREAAERLGHNRACLSIARKLLKRSYHTLRELGEEALAPA

SEQ ID NO: 304791 - protein, 344 aa, unidentified
MNNSNVIGIDLAKNVIQICKVSINGEIIFNKPVSPKKLKEILINERAAVVAMEGCGSCHYWARFSKEQGHDTRIISPKKVKAFLQGHKTDANDALAIAMASVQFGMIFSQIKSIEQQSLQTLEKSRQFLSKEITALGNHIRAYLYEYGITMKTGRKSLAANIVLILDRADERLPVSLKPSLRILWERYKASVEQLKALELSKADYVKQLEPCKRLLKLEGVGQVCASMLYASLGNGKGFKNGRHASVYIGLTPKQYSSGGKTCMMGINKQGGNKTLRAALFQGAFSVIHKLPDEAKTVKQVWLKQLVARVGVKRACIALANKTVRTAWALLASGKAYKPAPLVL

SEQ ID NO: 304792 - protein, 318 aa, unidentified
MNETSTKTAGIDTSKKSLDVATYPTSERLRVANARDGHQVLVAWLSARKIKRVGIEASGGYERAVVEYLREHGFEVALLQPRQVHAFAIYKLRRAKNDRIDAALIAECAANLGDLHEPPDTRLAAFAEHLLFIEQLEYDIAHLKTRREHFTTKRILNQLERDVQRLQRRREAELLLLQVAVCKHDDLARRLELIASVDGIGIRTALTLVILLPELGKVSREQISALVGVAPYDDDSGERTGERHIAGGRSRVRRALFNAALPASQRWNTALVALYGRLTNNGKAHRKAIIACVRKLLIFANAVVERGTPWSKPANHAA

SEQ ID NO: 304793 - protein, 403 aa, unidentified
MNSVGIDISKGRSTVAVMRPFGEVVISPFEVRHTDSELSELARQLKILDGETRVVMEATGNYHTPVAKLLHDAGLYVSVVNAKLVHGYGNNDLRRVKTDKKDAVKLANYGLDRWLTLPRYITEEDTRLLLKNCYRQYRQYSKVQTVLKNNLISLLDTVFPNANRLFSSPIRGDGSEKWVDFVAEFWHCRCVSEKSEKAFANKYQRWCRKYGYNFNEAKAHTIHAEASGHIGVMPMSETTKLLVEQAVAQLRATSTALAALKHKMQALASQLPEYPAVMDLFGVGPTLGPQLIAEIGDVRRFYSKKALVAYAGLDAPPNDSGDVTGRHKSMSKIGASSLRRTLFLVMSVYLQTAPLDEPVYQFMDRKRAEGKPYRVYMMASANKFLRIYYATVKAYLESLEHTA

SEQ ID NO: 304794 - protein, 367 aa, unidentified
MPSMPQPSPPDRPDASEEVILGIDTHKDVHAAVVISLLGVVLGRRCFPTTASGYETLLDWARGFGALRRAGVECTGSYGKALTRYLRAATGGIAVIEVNKPDRATRRRRGKTDTVDAEAAARAVLSGQASATAKTSDGNVEMLRLFKLAKSSAIKSRTQTINQLKSVLIGADPGLRDELAALSTKALVRHCASLTVPAPTDLDGATRYTLRLLAQRVQALSAEITELDGKLAHTVHRHAPQLLQPVGIGPDCAAELLIAAGDNPDRMAHEASFAALCGTSPVEASSGKTSRRRLNRGGNRHANSALYMIVVTRLRWCPRTRAYVQRRTAEGRSKREIIRCLKRYVAREVYQIMIGAQTGPRSLHDAA

SEQ ID NO: 304795 - protein, 432 aa, unidentified
MKFNRSNKQNQRISRISETTLVIGTDIAKHNHVARAFNYRGIEFGKHCLFQNDENGLLNLLAWAESIKQEHGLKDVLLGVEPTGHYWFPLFHFLKQRGVEVVLVNPHHVRKSKELDDNSPTKNDIKDAKVVAKLVIDGRYTQPQLPEGVYADLRVLMNQRDRLCGDLNRVKGRIHNWLDRFFPEYRQVFKDWEGKASLITLHHFPLPQDVVGAGETTIVATWKNNGVQRAVGPKRASLLYQKALKSIGLTEGATAARHELAMYLEQYAMLCRQIEQLMEHVAALVEQIPGATHMMSIPCIGLVTVAGFLAEVGDLNGYDHSQQIVRHAGLSLRENSSGQHKGETTISKRGRCRLRALLYRAALTMVAKNPEFRALHRYFTTRRDNPLKKKQSMIALCIKLIRVLFELGRKQKNYDSSKVLGPHREAQLQAAA

SEQ ID NO: 304796 - protein, 436 aa, unidentified
MGAGVEEVTDEPLYRDRACGIDIGKAGMAATIRVPSDGDRRRRAQETRVFGTTKREVLALADWLRCWQVPAVVMEATGDYWKPVFYRLEAEGFECVLADARQVKNLPGRPKRDPSDSRWLAGCFERGAVTSCFVAAPEFRVIRLHTRYRRALTEERTRELQRVEKLLESAAIKLSSVLSEVHGVTGRDIMDHLIAGQRDPRVLAQLARTRARAKISQLQAALEGAEFFTADHAALLKVMLGRIDRITAEITALTGVIERLLAPFEEQLQQAESMPGWGRRTAQDALAETGPDMSRFPDGGHLASWAGRTPLDNQSGSRNGKAKAKKGNRYLAAALGETAVAAGRTQTREGARYRRIARRRGKLKAIVAVGNTQLNVYHKLLSNPGMRYQDLGPDYYDRQRDTRRQIAHHVGKLGALGYEVTLARIPDPEPHTTQAA

SEQ ID NO: 304797 - protein, 355 aa, unidentified
MNVIKYIGMDVHSATISIAVLDVHGKLMMEVTIATQAGALLDFIRGLSGTLNVTFEEGTSAHWLYTLLEPQVAQVVVCDPRQNPRRLGEKKSDRLDARKLAELLRLGSLKPVYHGNALGPALKELARSYRTLVSDTARVMNRLKALYRARGIRCAGTRVYSPRFRDPWLEQWHEPGVRGRADLLYKQLDLLLPLRQEARAARLAESRKHPAHKILCSIPALGPVRVALLIALLQTPLRFRGKGQLWTYAGLALVTRTSADYQMVDGQVTRSRKPALVLGLNVNHNHTLKGIFKDAAASALAHPGPFKDFYTTRVAQGMKPELARLTLARKIAAMALTLWKKGECFNAEHVKAQAA

SEQ ID NO: 304798 - protein, 387 aa, unidentified
MSQTIAAPIPAAVDYERTLVLAIEVSNKSWVLAAQVPGLPHTKAKRTIDPEAEALLAAITGYRTRAAATGRSIERVIAVYEAGWSGFWLARWLMRRGVEVYVVQPSSVPVDRRMRRAKSDGIDSELLLRTLLAWLRGEPRVCSMVPVPDEADEDARRCVRERTELISERIGLTNRIGAVLATLGVSDYNPLLRNRCRRLAELRTGLGEPLPANAHAKIKRLLARLELVLTQIAELERERDAVVETEAPDKASKMIQQLTGLRGIGVQSATVLVREAFVRRFANGKALGSYAGLASSPYNSGRIDREQGIGKAGNRRVRTVMVELAWLWTRYQPDAAQVCWFRERVGSTGPRVRKIMVVALARKLLIALWRFVIDGVVPEGAVLKPAA

SEQ ID NO: 304799 - protein, 320 aa, unidentified
MKCIGVDVSKQELVTYDGEKERVFPNTGALSEFEAFVDCGGDVLIAFEPTSTYSRRLEAFCRDKNIPALKLNPRLISHLREVHGKRSKTDKTDAELLYIYGVTWEKTDFENPQSGDRLAQALSAHLAVYRVTQKARVAHQGVFEALSQDPSTPKALLDELAVTIESLKEKEKACVVRMQALISEEKSASSALQALLSIPGVGSITAITLLTLFLRYPGTNRRQIVALAGLDPVEYRSGSSVYKKARISKRGNQEVRKRLYEATLSAARFNPAVKDVYSRLKERGKPEKVARIAAARKLLLIAHAIYKSGDKYREPGGLRG

SEQ ID NO: 304800 - protein, 330 aa, unidentified
MKFKWFVGVDISKKTLDATLYDKVCLKKSKHIKLSNNLKGFKELIKWIKKQGSLLDDLLICMEHTGVYGIDLAVFLDKNNIAYSMVSPLHIKRSLGMTRGKNDKVDSFHISRFCYLHREELKLSKVPSVTIQKLRGLFNERERIVKMQTVEKQVLKELKTQNSGSSIKRVKARLSHFSKDINSIECEIEQIIKADAGIQKNYNLTRSVTGVGLVNAVLFIIYTNNFYGFPNARKYACYSGIAPFENSSGTSVRGKTRVSHLANKRIKANLSNGARSAVQNDPELRLYYKRKAKEGKEHGVIMNAIKFKLVTRVFAVVNRGTPYVKMRQAG

SEQ ID NO: 304801 - protein, 365 aa, unidentified
MVSPIPASGKLSGDFSFLEAITMNAVKLVGIDLGKHCFHLHGQDASGRMVFRKKLSRSQMLTTLANTPACRIVMEACAGAHWIARRLTAMGHEAKLISPQFVKPFVQGNKNDFADAQAICEAASRPSMRFVSPRNESQQTISATHRVREGLVRDRTATINQIHAFLLEFGISLPKGPAIIKHLPALLAEREAELPPRLITLIERLRAHVKYLDEQIKSVERELTQQLAEDERSQRLLEIPGVGPITASVLAVELGDAHQFADARQFAASIGLVPRQYSTGGKPTLLGISKRGDKNLRRLLVQGARAIMQRIQDRTDALGEWTRNMLCRRHSNVVACALAKKMARIAWAILAKGTHYQSRPARAAA

SEQ ID NO: 304802 - protein, 340 aa, unidentified
MVTSTKFYLGIDISKSWFDASVLKVLDHQKQPMLTEQFANTKNGFIAFKKWLDEQGVPFNENTFVVIENTGIYHRPFWEFCTNHNLPLHIGNAARIKWSLGITRGKNDQIDSRRLCTYCYKQCDELKATSALDPVFMQLKDLMTSRTRLVTQLQSTKSYIKELLCTNDKALMKTLEKAHKAAIQGIEKSIVEIEKAINGLIVSDEKINNNFELIKSIPGIGAMTAIYLICCTNNFANKPSGKQLASYAGVAPFEYSSGSSVKGRSRVNKMANKELKRLLHMCAVSSIRYSSEMKDYFERKKAEGKAGLSIVNAIKNKLILRVVAVINKQEKYVDNYQKAA

SEQ ID NO: 304803 - protein, 399 aa, unidentified
MMKLKYSICCGLDVHKNVIVATIVTTNKDGISEYLQKSFSTINSDIQRFHNWLIENNCYHVCMESTGKYWIPIFNYLENDIDVCLTHPKYVKAIKGKKTDKKDSKWIADLYKFDLVRCSFIPPKDFRQLRELSRYRFKLVCMKSSEKNRIQNCMTISNVGIASVLSDPFGKTATEIISYLLEHTADSMDEKAVRKLIKKGAKSKSDEIIEAIKGYTIETDQAKKLELARGHLEYLDDMITQTEVELYVRIKPYYEFVEFVSTMPGMTELSSTIVLAETGVDMDIFDDAKHLCSWCGLSPANNESAGKKKSVRIAKAGDYLKPMMVQCALAAIKSKKQPYFAIKYGRIKKRRGHKKAIIAIARMMMVCIYHMVSEKKPFTPTDYEELMDPQNHVESCRLE

SEQ ID NO: 304804 - protein, 356 aa, unidentified
MQTQVTKKIDFKGKEFFIGLDVHKKSWSVTIVVDGIEHRTFTQPPDPLALNNYLQRMFPGGSYNSAYEAGFCGYGIHRGLNSLGIRNIVINAADIPTSQKDKLQKRDPIDSRKIARSLEKGSLRGIHIFDRELEELRSLNRTRFYLMRDLRRSKNRIKSFLQYYGEPLPEEFDNNQWTLKFISWLKEVQMKTESGQDAFTHLIKSYKNNRQQMLILSRIIRLRISQYDNELYSLLKTISGIGPLTSSALITELGNINRFPHIKSLGSFVGLIPRVRESGESVHTGGITFRCNTFLRTLLIESSWQAIRMDTASVQYYQHHVINSKGHKVIIKVARKLLNRIRYVMKNRLPYVTGVA

SEQ ID NO: 304805 - protein, 351 aa, unidentified
MHAFPKQPEDPVVNCTTVGVDIAKNVFQVHYVEQETGEIVNKPLKRAKFLEHFANRAPCLIGMEACGGAHHWARQLMKMGHEVKLMPAQFVKAFNIRNKNDATDARAIWLAVQQAGKSVAVKTEMQQAMLALHRMREQLVKFRTMQSNGLRGLLTEYGEVMSKGRAALDKEVPAAFERLAERLPAVLIDTLREQWNGLAKLDEQIAGIERRMREWKKEDKAVKAISGIPGVGLLTATAAVAMMGDPKAFSSGREFAAWAGLVPKQTGSGGKVNLHGISKRGDTYLRTLLIHGARSVLTHAKEPGPWIEQIKKRRPSNVVIVALANKMARTIWAVLAHDRSYRKDYVSVKPA

SEQ ID NO: 304806 - protein, 345 aa, unidentified
MNFYHSTHRHYCGIDLHARGLYVCIIDQQGEVLLHKEIKARPEPLLVLLEPFRDDLVVGVECMHCWYWISDLCEEHGIHFILGHALYMKAIHGGKTKNDRIDSFKIAMLMKGGNFPLAYTYPKEMRATRDLLRRRTRIVQHGAMLKAHVVNTTSQYNLPPNKANLKNIGAREQVRATFSNRDVQHNIDLAIIECYHRELSKLEEHLERQAKQHDPASLSVLRTIPGVCRILALTMLYEIGDIQRFETVQKSASYARLIKCKAESAGKVYGTQGNKIGNAHLKWAFSEAAVLHLRGNDKAQRYLQKLQKRMNKPKALSALAHKLVRATYSMLKHQRAFDEQRFLKG

SEQ ID NO: 304807 - protein, 316 aa, unidentified
MPENRETFVNVGIDVGKDQLDVCIHERGIHFVGMNDAAGIRLVIRRLQRYRVERIVVEATGRREYDFVVAAAERGLPVIICQPLLVRRYAAASGVLAKTDKIDAGILASYAAVMQPEVRPLAIGNIRKIRDLIARRRQLMEMSTMEKNRLDVMPKALSADIRRHVRHIRAQIDKIDRLVADLVDSIEEWRDKRDIMTSVPGIGPQVINTLLADLPELGTLSNKQIAALVGVAPFNRDSGKFRGKRRIRGGRASVRTVLFMAMLSAIQHNPIIKATYRRLVASGKHKKVALTACMRKMICILNAILRDQVPWREKYV

SEQ ID NO: 304808 - protein, 414 aa, unidentified
MAKEETISWFAGVDWGSERHQVCLLDARGTTAGEREFPHSGEGLAELGDWLLSMAGAASTVAVAIEVPHGPVVDALIDRGFVVFAINPKQLDRLRDRFSVAGAKDDRRDAYVQADGLRTDRRLFRRLQVADPRLIELRAWSRLAEELRRERVRLSNRVRHQLWRYYPQMLKVTDDLASPWFLELWAIASTPAKAGRLRKSTVERLLKQHRIRRMDAETVLRILQEPAIKVAEGVAEAASIHMRSLVARLRIVNRDLHEAERKLDELCTAISEIEQTSGQSLQRRDVAILRSMPGIGRINLGTLLSEASGPLSRRDYEGLRTLSGAAPVTKRSGKSLIVVRRYAAHVRLRNTVYHWARVATQRDSKCRARYTALRKRGHSHGRALRGVADRLLALACVLLQRQTLFDPHFGRPTA

SEQ ID NO: 304809 - protein, 337 aa, unidentified
MIIVGCDFHPSFQQIAMLDTETGATEEHKLMHTSGEAEGFYRKLASPAIVGIETVGNDQWFVELLQKLGHEVCVGDAAQIRASYVRRQKTDRRDAKHILQLLVEGRFPRIWIPDAEMRDHRQLLMHRHKLVQIRTRVKNELQHLMLNQGMQKKQKLWSTEGRAALASLPLQPWTDRRRKDLLNLLTMLDAQLESLNDAVTRVAKEYPGVRLLMSQPGVGAVTALAFVLTLGDVHRFPCGKQVASYLGLIPREHSSGGKQRMSGISKQGNRLLRFLLVEAANIAVRFDPELRKEYLHRCHQKHFTVAKVATARKLAIRMYWMLRTQTPYPQVLSSRVA

SEQ ID NO: 304810 - protein, 405 aa, unidentified
MNAVGIDVSKGKSTVTIRKSGDVVLMSPCDIPHTQSAINDLIKQIKSLEGETKVCMEHTGRYYEPVATWLSDAGIFVSAVNPILIRDFGDDSLRTPKTDKADSKKIARYTLDRWAKLKQYGIMDKTRNQLKTMNRQFGFYMAQKTAMKNNLIALIDQTYPGANDFFDSPARNDGSQKWVDFIHTYWHVDCVRSKSLNAFTEHYQNWCKRKNYNFSAEKAAKIYQISSDLIAVFPKNDITKMLIWQAVALLNTASKTVESLRSKMNELASTLPEYPVVMDMNGVGATLGPQLIAEIGDVSRFTHREALTAFAGVDPGKNDSGKHIQNSVRTSKKGSPYLRKTLFQIMDSLIKRSPVDDPVYAFMDKKRSEGKPYYVYMTAGANKFLRIYYGRVREYLSNLSNNETI

SEQ ID NO: 304811 - protein, 356 aa, unidentified
MAQVSKLDFTGQRIYTSLDTHKKSWKVSIFTEHFEHKTFTQPPDTEVLVRYLQRNFPGADYQVVYEAGFCGFWIHDRLKEKGINCIVVNPADVPTTDKEKKTKSDPVDSRKMARSLRNGELKGIYVPQREKVEDRSLVRTRQAMVKKQTRCKNQIKSILYFYGIVIPEELAEGHWSRKFINWLTEIKMTRASGNIALKTLLSELLYLRQTVSDLTKEIRHLAHSQEYAENHRLLKSVIGISTLTAMTFLTELVDINRFKNLNTLASYVGLIPDVQGSGEKETTTGITTRRNPQLRGILIEAAWIAVRKDPAIMMAYDQLLTKVSKNIAIVKIARKMLNRIRYVLKNKQEYVPAVVQ

SEQ ID NO: 304812 - protein, 460 aa, unidentified
MSRAQKGSQGAPSVKPVAEVDTLTTIHPNAAGVDIGMDETWVSVRADRDAVPLRRFGMNTPDLIAMAEWLQGCGVETVAMESTGVYWIPLYEILEARGFEVYLVNARHAKNLPGRKKDEADAQWLRRLHTFGLLNNSFRPESEICALRAYMRHRADLIEHRAAHIQHMQKALQQMNVRLSPTVKDITGVTGMAIIRAILAGVRDPLQLAQLRQPTCAKPEAEFVKALTGNYREEHLFTLKQALALYEAYTQQIRECDQELERKFSTLKPVHDHDLPPLDPSDKPNTHSKNAPAYDGRTLLYQLLGVDLVAVHGLNQVTAQIIVTEVGTDMSRWKDEKHFCSWLGLAPHNDISGGKVLRSRTLKTHNRAAQAFRLAAQAVSKTETAYGAFFRRMRAMHGPKKAIVATAHKIARAVYFMLRDHKPFHSPNAEEYTRREREREIVRLSKKATKLGFTLAPISP

SEQ ID NO: 304813 - protein, 354 aa, unidentified
MLYAGVDYHKRYSQVHVIDEHGRTRARARLTNEFSALRRFFANLGEPARAVVEAGWNWGVMYDWLDAIENVTEVELAHPYRVRAIAAAQVKTDAIDSHTLAQLLRVNLIPKAYVPGAATRGLRELVRQRIFLVRMRTMVKNRIQALLARHHVPLPAVSDIFGKRGRDYLSKVRLEGGAQQLLRQDLGLLTALNEEIRASEKWLHQALEGDHRVELLRTIPGLGALLATVVALEIDRVERFPTAAKLAAYAGLVPTTHSSGGHTFHGKLMAHSNKWLRWALVEAAWVAVRLDPYFRAHFAKRRAHKPAQSAIIATARRLLEVVWHVLKENRPYQDRPPSHCNRGLRTSSAAFAAA

SEQ ID NO: 304814 - protein, 446 aa, unidentified
MICAAVERCAGIDVGKKWLSVCVMIGPLDGEARAEKRRFGTTVAELQQLQGWLKQERITHVVMESTGSYWKPVFNVLEDAVKVYLANPREVKIRKGHKTDDKDGWWLAHLLRHAMIHPSFIPPRSIRELRDLTRRRERLNGNGTSEKNRVQKILEDANVKLGNVLSDVFGVSGQLMLDALLKGKAKPEEIAQFAQRRAKKKIPQIIAALEGHQMSDHHRKMIGYSLAHMRFLEEQLEELDNDIAEKIRSAGLDQQWQLLQTIPGIQERSAAKILAETGPDMTQFPSEKQISSWAGVCPGNNRSAGKNRSSHTTGGNPWLRGALTECAWAAAAKKDCFLKEKFWRLTTKSGGKKPPALVAVAHTVLCLVYQVLGTGQPYRERQASALPDTQKERLIRHHIRRLGKLGVRVHSNRQATETIASQQPNTAVQEPPIVGGKNINTRPATY

SEQ ID NO: 304815 - protein, 395 aa, unidentified
MRKDVTIYVGIDFSKEKFNACLLMEAGIMGESEFPNTKAGYLKLLRWVRKTSELGRLFDVTSVLFCGEHTGTCSIGLCEYLYSAKMKVWLETPLKIKYGSGLNRVKDDKADAEMIAYYAKRFYEPDSCELFKPDSEDLKSLRSLYQFRNRIVSDRVAMGNRILSGAFDCSPLVKARMKKHHKAALEDEKEIEREMVKIMESSPELASNYRILVSFKGIGPITAAALIIYTSNFKKFNSPRKFACYCGIAPFGKQSGTSINTKPHVSRFAHIGIKAALVQACKSAIQHNPVIKEYARKLYGKGKHEGVVMNNVKNKVIHIIFKMIQTQTCWNPNYQEAHMNKKEENLKEHEKGATKVTPFIDDYSNILPPNQAECAFMEENIFFQEKSPLFICIKT

SEQ ID NO: 304816 - protein, 330 aa, unidentified
MRAREARIREREWLCKGEFTMGVCIGVDVAKKHLDWVLGPDGEVERIENTPAAVRRLVRMLRKLDFDRVILESTGQYERLLFETLEDEGIPVCRINPYRVRRFGEGMGVLAKNDSIDAKLLALFGDKVEPEERPKKTDRGRVLGDLSARRRQLIANMTAEKNRLEHASGYVASEIKSLIKTLERHIEKMESKIDEIIAEDEKKSADFKRLIAVPGVGPKVARTLLVDLPELGRLDRRRISSLVGLAPYANDSGQKVGKRSIHGGRAAPRTMLYLAAMVGSRCNPELISMKQRLQEKGKPPKVILIACARKLLTILNAILRDQSEWKSIRA

SEQ ID NO: 304817 - protein, 369 aa, unidentified
MGKYSEVFVAFDVAKKKHAVAIAEGGRTGEVRFLGDVENSPLPIERTIKRLADRYDRLHVCFEAGPTGYGLYRQIQALGHECMVVAPALIPKRSGERIKTNRRDAVTLARLHRAGELTGVWAPDAAHEAVRDLVRAREAAADDLRRKRQQLLSFLLRHSRIYSGGGHWTLAHRRWLASQKFEHAAQQIVFQEAIDAIEDALQRLRRLEKQLALIVPEWPMAPVVEAYQAMRGASFLVAVTFAAEIGDVRRFDTPRQLMAFLGLVPAERSTGDTIRRKGLTLAGNRRARRALIEAAWTYRYPARVSETLRARLEGLPKPVRDIAWKAQVRLCARYRRLSATGKKLPVVVAAIAREMAAFLWAIGREVAPA

SEQ ID NO: 304818 - protein, 332 aa, unidentified
MKTKRNFVGIDIAKKDFYACFADQEKAIKFNNDNTGIHAFVRQLNKHGCNKNNTIIGLESTASYHFPLCFKCTALGFSVKVINPLSVKKQNQTSLRRLKTDQKDASLIRYCVGQGMGYEFNETAKSLETKSLVRQRNSLANWILKLNRQLDDMEYKQACLGENLPECYTEIKGYLERKSKELEKSLQKQQPKLQKLLRTIPGVGPLTAIAFISEVGDVKRFESAKQLCAYAGIDPRVHESGTSVRGKGYISKRGSKILRTRLYNACSVAVLRPNMFQSFFQKKISEGKPYRVALVATMNKMTHVIYSVWRNNKPFVDYTLKLKEAETASLNG

SEQ ID NO: 304819 - protein, 337 aa, unidentified
MNIVFLGIDLAKNVFQLCGLNQAGKPVYTKRTGRKELLQTLANIPACLIGIEASTGAFYWQREFEKLGHKVKVISPQYVKPFVRGQKNDGNDAQAIAVALMQPTMQFVPPKSPEQQDIQALHRARQRIVNHRTATVCQIRGLLLDRGIPIGSAVSRARRAIPLIPEDAENGLSSRMRRTIAELYDLFNDLGRRIHFFDKEIETVFRQSEACQRIAKVKGIGPKTATAVVAIGKGTEFKNGRHFAAWLGLVPRQHSSGDRQVLMNMTKKGDKHLRTLFIHGARAVVRVATNNNDGHMNQWVNRLKERRGFNKTTVAVANKNARIIWSMLRNDTGYQVV

SEQ ID NO: 304820 - protein, 310 aa, unidentified
MIERIPEFQKENARLFFGLDLGKKQSQLAVITETGAELANFAFPSVRENFRALAGHLRETDSIALEVSTSANAAMSIFRTGSEARSVLSNPLFTRAISKARVKSDREDARKLADLNRTNYLETVWYPDEDTLRLRHFISDRASLVKYKTMLKNQVHSVLDRSLIKHSHSDLFGGEGREWLALLIERKDTDCYERDRLRFLLAEVGRQELLAEDLDKTIAAFISSRPAMRRNLDLLLSIPGVSLAVGATVLAATGDITRFPTKRKFACYFGITQRIKQTGGHAPRIHPFWISDFGFRIGSESKIQNMMARG

SEQ ID NO: 304821 - protein, 348 aa, unidentified
MVEKTVLVVGADISKDEFHVCAKVRTADGKVKIVGTRSFSNNTSGFVEFVLWVSKRSKENWSIRYVMEATGSYYEDFAYYLYETGSRVSVVLPNKIKHFAKSLNLKTKTDKVDAVMIAEIGIERELDAWQPMLPQYKMMRDLSRELLSIKKEKSRAMCQLHAMKHSHEKTDSVIEIKQKQIEFYEQSILLIESEIEKIVEADTDLKQRVEKIKKVKGLGLITIIIVLCETNGFLLFNNIRQVVSYAGMDIEMKESGNFKGKTKISKRGNARIRQCLFMPALAATVHNEKIKELYERINERNPKIKKKGVVAAMRKLLILIFVLWKKNEEYNPDHQWQRKDIKIVGEGC

SEQ ID NO: 304822 - protein, 424 aa, unidentified
MAAVMIGVDPHKASHTAVVISAAEEPLGEVRVRACGAQAERLLAWAAPWPARAWAIEGADGTGHLLAQQLLAAGERVLDVQPKLSARVRLLAAGATGKNDPNDARSVAVAALRSPAARVVAADDHAAVLRVWSKRHRDLGRLRTQLVCRLHAVLCELLPGGFSKEITAGQAAQLLASIPPGGAVAAARHELAAQFVADLRGIDAQMRDTKKKLAVAVRAAGTSLTGLFGAGPVIAAIVIGDVREVSRFPGPDHFAAWNGTAPIEVSSGKRKIYRLSRRGNRRVNHAIHMAAVTQIRYRHSPGRAYYDKKRAEGKTGKEALRALKRQISDAIFARLQADARRAAASANGPGGQPGNDSGSSAAGSHPARRLFGQATPGPATQPMTPQADSPLQPGFPAWLPSRRAGKRVQNPGAARPRSGARRRP

SEQ ID NO: 304823 - protein, 460 aa, unidentified
MKNKVAKERKKRKSKIQLSDQWEKVNHDAAGIDIGARDHYVCIPADRDPEPVRRFGTTTPELEQMAEWMQQRRIKTVAMEATGVYWIATFQILEKKGLKVVLVNPRQVKNVSGRKTDVLDCQWIQKLHTFGLLGASFRPADPYCVARSYVRLRDDLVGSRSTQIQLMQKALHQMNVQLNHVLSDITGESGMAILKAILEGQRDPVALAALANRRVRSSREQIARALVGDYRPEHLFALQTAYDMYHAYQEKIQACDDRLVAELEKLPDKVDLKAKPLPPASEKKQIDEGLRKGLYLKLGVDITAIEGIGARVGLAMLTEVGPDLSAFGSEKQFCSWLGLCPDNRISGGKVLNSRTRRVVNRLTDALRIAATTLERSQSALGAFYRRMKAKLGAAEAVTATGHKLARLIYRLIKHGEAYVQEGLEKYEMKNQQRKLRAVRKMAESLGLQILEPRGVTLSVS

SEQ ID NO: 304824 - protein, 345 aa, unidentified
MSPYKRIGIDTSKAVFTLHGIDQQERPVLRINLRRAQLTPFFAKLPPTEIAMEACGGAHHWARELTALGHEVRLIPPQYVKPYVKRSKNDRNDAEAICEAAGRPGMHFVPVKSITQQAQGMVLKVRESLVGQRTQLVNTLRGHAAEFGVIAGKGLGKVGPLLAAIEQETTIPSDAKDMATLLGQQIADLDAKIKELEVKLTAAHKANPVSQRLATIPGVGPVIALTLAIEIDPAAFESGRHLAAWIGLTPKEHSTGGKQRMGGISRAGNERLRVLLVVGATSVINAAMKPGSKQMTDWLRALLMRKPRKVVAVALANKMARIAWVLMTRGQVYRRPAAPTAAAVA

SEQ ID NO: 304825 - protein, 440 aa, unidentified
MGDTNHKQETEFAAFVGIDWADQKHAWALQIPGHLDVERGDLDHTPEAVEFWATELARRFAGRLIAVALEQSRGSLLFMLTKYAHLVLFPVNPATLANYRKGFRPSGAKSDPSDAGLLVDLLVHHREKLRRLNPDTEQTRTLQFLVEARRKFVNDKTRYSNRLTAYLKMYFPQVLDWFSEVTSPIAGDFLERWPTLQKVQKARPETLRRFFVQHSSCTSESIDRRLEEIRRAVSATHDAAVTCSCSAAVLALVRIVRAIRDAIVCYDQQIEILAREHPDFAIIDSLPGVGPALAPRLIAALGTQRDRYQSAGELQSYSGIAPVLASSGKQCWVHWRWACPKFLRQTFHEWATHTIGSSAWAKAYYEQQRAKGKPRNTVVRALAFKWIRILFRCWKDHKPYSEEVYRQALARRHQLAVKSSPVQLQWKTCAGFSKITAITS

SEQ ID NO: 304826 - protein, 423 aa, unidentified
MYYVGLDVHAKRSSLCILDDHGKLVKRLEVKGDWSRLLEVVDAQVPRPFAVCYEASCGYGHLHDQFARRAERVRVAHPGQLRLIFRSKRKNDRVDSAKLSKLLYLDEVPVVHVPSVDVRAWRGLINYRRNLVGRRAAVKTQVRALLRGLGVAVTAVRGLWTAKGIAWLKGLAMSAADGVRRDVLLDELEHQDGQVRKVERELDRIAAKHPGVALLRTIPGVGPRTAEAFVAHVDDVGRFGRVKDVGSYFGLVPCQDASADRNRLGHITKEGPAQARWLLAEAAWQGRRRSATIRAFFDRVMRGDADRKKVALVATAHYLTRVMAAMLRSGEVWREDPRCPALPAKAKADAKTDANAGATKTAAGAAGVPSDLVAASYAPPGGVKVPSREYTGPCPPGGSTLTPPGSAGNASGHEVGGDAMRRG

SEQ ID NO: 304827 - protein, 345 aa, unidentified
MEHFVGLDVSQEMTHFCVIDGQGKTVWQGRCLSTPEEIAGTIKSKAPDVVRIGLESGPLSTWHWHALKAMGLPVVCLDARHAQATMSGQVNKTDKNDAYGLAQIVKVGWYREVGVKSLDSHAIRSMLGARAQLVGMRVEVTNQIRGILKTFGIVLSRRTGEPFERLVNEACGDGESMLNHTVRSLLCVYGGLKEQIRHMDRELMDCARKSVICQQLMTIPGVGVLTALAFVTAIDDPAKFAKSRSVGAYFGLTPRCYQSGEIDQNRGISKCGDSLVRTYLFEAAGTLLTRVEKWSALKAWGLRLAKRNGLKKAKIAVARKLAVIMHRMWVDGAVFRWSADTAEAA

SEQ ID NO: 304828 - protein, 413 aa, unidentified
MDVLHPRCCGLDVHKSSISACILIQGAGRVEKHQRRFSAMTQDLQELANWLGQFEVTHVAMESSGVYWKPVWNILEGKVAVILVNAQHIKNVPGRKTDQKDAEWIAQLLQHGLMRPSYIPCEIIRDLRDLTRMRASLSQEASRISSRVQKVLEDANVKLASVATNALGKSGRAMLEEIIAGQDDPEYLASLALGHLRAKVPQLRLALEGKIRPHHRFLLRRLLDQLHFVEHEIELLDERLEEIGRERPELSQAVLRWDTIPGIDRVAGWTLLAEVGQSMAQFPTPEQLASWACLCPGNHESAGKRLGGKTRKGSPWLRRMACQCAWAAARTKNTYLSVQFRRLAARRGSKRAIIAVAHSILIIGYYLQKNQRNYEDLGGDYFDRINSDGLKRYFVRRLERLGHKVTLLPIQAA

SEQ ID NO: 304829 - protein, 343 aa, unidentified
MQVSTIGVDLAKNVFQVHGVDSEGKVVITRQLRRKQVIEFFSKIPACLVGMEACGTAHHWAREISKLGHTVRLMPPSYVKGYVKRSKNDAADAAAICEAVTRPSMRFVPIKAADQQALLMLHRTRDLLIRQRTQLINALRAHLAEFGLVAETGREGLAQLAEIVTDESNRDALPPAMKQALQAIIDQLAALELQIGALDRAIHAHHRVNDMSCRLETVPGIGVIGATAIASTVTDPSNFKSGRDFAAWVGLVPRQHSTGGKERLGGISKQGDRYLRRLLVSGATAVVRNARQHPQKHPWIMRLLAKKPAKLVAVAVANKMARIAWAIMAKGGYYRAPELAAAA

SEQ ID NO: 304830 - protein, 342 aa, unidentified
MDKQIGTIGLDIAKRVFQVHGADSRGAVLFRKRLRRGQVLSFFAGLPSCTVAMEACASAHYWGRQIGKLGHSVKLIARAYVKPYVKRQKNDAADAEAICEATQRPTMRFVAVKTEEAQAAAILFRARDLLVRQRTQVINALRGHLAEFGMIVAQGPQHVPKLIAVVDDRTSELPTMARQILALLVDNLRGLDSRVTELDREIGRRAKEDVVACRLMTIPGIGAVTATALTALAPPAQTFRRGRDFAAWLGLTPLQRSTGGKQRLGRTSRMGERTLRRLLIIGASAVARWATRKGVPAGSWLERMLRRKPPMLVRVALANKMARTVWALLAHGGIYRAPVATA

SEQ ID NO: 304831 - protein, 310 aa, unidentified
MDITTVGIDVSKDRLDVAVWPSGEAFVEERNAAGLERLATRLKALSPAIVALEATGGFETVAAATLAAAELPVVVVNPAQIRAFAKALGQRAKTDLIDAVVIARFAEATKPEPRPLPDEATRLLADLMARRRQIVEMMAAERQRERRVMVPRLRKSIVRLLKALEKELASLDADIDDTVRGSPVWRDKENLLASVPGVGPVIARTLLAELPELGQLGRRQIAALAGVAPFTRQSGQWRGRSFIGGGRTPVRTALFLGALVAARHNPVLKAFFAHLRAAGKPKMVALIAVARKLLTILNAILRDNRPWQNA

SEQ ID NO: 304832 - protein, 277 aa, unidentified
MEAVLKGPYVGIDVAKHHWDVAIAGRRGVRRFMADAAGLAELMAWLEKLKAQLVCLEATGGYERSLRASLQKRNVRVSVVNPRQIRDFARSAGELAKTDAIDAGMIARFAATFHPEPDEPPTPAQERLRTLRARRQQVVHSLTQEKNRLATAPDAEARESIQEAIDFYDRQLRELDRRLTELTSADPVLRQRLALLVTVPGVGVVTAAALLAELPELGAMNRGQAAKLVGLAPINRDSGSLRGKRMIGGGRSQVRRSLYMATLTATKHNKAIHRYYQ

SEQ ID NO: 304833 - protein, 370 aa, unidentified
MGKSVLYVGLDVHKMSIDVAIAEAGPGAEVRFYGQIGGDLDSLDRVIRKLLATGAQLQFAYEAGPCGYVVYRHLTAQGWPCLVAAPSLIPRRPGDRIKCDRRDALSLARLFRAGELTSVKVPDADDEAMRDLTRAREDAVSVERRAKQRTAAFLLRHGRRFPGKTTWGRGHWRWLLQQVMEHPAQQIVLQEYLDAVREAGARVQRLTGQIQELLPQWRRAPFVAAYQALRGVSLIVAATMVAELGDLSRFNNPKELMAYLGLVPSEHSSGATVRRGRITKTGNGHARRVLVEAAWAYRLRARVSRPLLQRQEGLPESIRQISWQAQLRLCARYRRFLARGKHKNTIVTAIARELAAYIWAIGQAVKPLTV

SEQ ID NO: 304834 - protein, 342 aa, unidentified
MGSVLRVGRSRHVMSALVCGLDVHKDSTYATILNPEGKIVNQTRMDNERVLSYLSRFKVERVAMESSNQVASLYRELKSKGYSVMISHPKKTRYIAEAKIKSDRVDSEAIAELARLDALPLAYMPDKETAILREQVRRRAFLVRERVKLRVKIKSVLTYEGIRWPSDQGLFTRKGVEWLHGLNFEPVESYLRVLKPLDDEIRLVSRKLRGVAEDNEDVKLLMTIPGIGYYSALLVKSEIGDVNRFPFGDRLCSYAGLVPSTHASGNTVRHGGITKEGSKWLRWVMVEAAQTHVHKYDTSVTRLYNRIAERRGKRSAVVAAAHKLLLVCYSVLRNKRPYYDQA

SEQ ID NO: 304835 - protein, 420 aa, unidentified
MVDVLIERCAGIDIGKDEVVACVRTPAPSGRGRRKQTRTFSSFTGSLEAMADWFTAEGVTDIAMEATGSYWKPVWYVLEERSFALKLVNAHHVKILPGRKSDVLDAEWLAELLEHGLLRGSFVPPPAVRELRDLTRYRKRLIQAHTSECQRIQKALEDAGIKLDSVASDVLGVSGRAMLAALVAGERDPKVLAELAKGILRRKIPALRQALRGRFTDHHALLIGLSLDHTAHLEAAIARLDERIDTVFTTHTSEASVPFARARDRLDTITGVGKRAAETIIAEIGVDMSRFPTAAHLASWAGVAPGNNITGGKRGSGKTTKGDVWLIDILTQCAWAAARSHDTYLSAQFWRLAHRIGKKKAAIAVAHSILVICWHLLTHDCDYDDLGGDWFTRRNTDRQRDRLVKQLTGLGYYVTLDKIA

SEQ ID NO: 304836 - protein, 348 aa, unidentified
MSTMTETARCVTAGVDTHRDVHVVAVLDERGAQLGCEPFAADPAGYRKALTWVRSFGPVERVGVEGTGSYGAGLTRYLHNQRVKVVEVSCPDRQRRRSHGKSDPVDAVAAARAAQSGEASAQPKSRTGNVEALRALRVVRRSAAHSRIDSVNQMRALLVTGPEKLRESFRDTTVWRMVTAAVRLRPGDPTTPAGAVKFALRELARRVQALEDELDRLDAIIGPLVKATAPTLVARHGLGPDTAGALLVSAGDNPERLHKESAFAHMCGSAPIDASSGVVVHKRLNRGGDRLANEALWRIVMVRMVSDPRTRHYVERRTKEGKSKREIIRCLRRYVARELYPYLVEERS

SEQ ID NO: 304837 - protein, 360 aa, unidentified
MVIDVRTSVGLDVHARSVVACGLDGQTGQLFEQRLVPDPATVIDWVRALPGPAAVTYEAGPTGFGLARALTEVGIRCLVAAPSKLQRPTGDRVKTDVRDARHLARLLHLSEIVEVAVPSRELEACRDLTRSREAARRELMAARNRMMKLLLRHGIVCSGGTAWTARHEEWLRRQRLPMLHSQMAFESAYGAVVSARGRRDRLDEAIEAMVADCDLTPVVRRLGCLRGISTLTGFALAVEIGDWHRLSGRTIGSFLGLVPSEFSSGATKSRGAITKTGNGHARRLLIEAAWHHRRPYRTSAALARRWELASPAARGRAEQGNRRLHARWAGFDARRKRAVVANTAIARELAGWCWSLAVLE

SEQ ID NO: 304838 - protein, 406 aa, unidentified
MLFVGDDWAEDHHDVEIQDESGRRLAKARLPEGISGIARLHALVGRFLPEDGDAAEVKIGIETDRGPWVAALVASGYQVYAINPLQSARARQGNGVSGAKSDAGDAHVLADLVRTHCHQLRTVAGDSEQAGAVKVLSRMHQTLIWDRTRQVLRLRSSLREFFPAALEAYEDLAFSDVLELLTKAPEPNSAAALTRAQITAALKRARRRDREAKTTAIMVALAAEHLTQPPLIAAAYGATVRALAALITTSNEQITALEGPVEACFGQHPDAEIYLSQPGLGSVLGARVLAEFGDDPTRYDGARARKNYAGTSPITRASGKKKVVLARYVRNNRLADALHQQAFSALSGSPGARAYYDALRDRDISYNAALRQLGNRLVGILHGCLKTHTPYDEATAWNQHTQQAAA

SEQ ID NO: 304839 - protein, 297 aa, unidentified
MQKSCLGIDVSKPTFDVSLIVVVTGQKQPIVISKFDNDATGLKSFKVWLDDHHVTFDKNSLLVIENTGIYHRLIWDFCTTHLLPIFIGNAADLKWSFGIARGKNDKVDSMRLCDYAYKNYDEIKPTTGLNKVLITLKDLLSNRSKLIKLKNAIKQTLNELKGSNDKTTQSLMEKLNKAALDGLKKSIAQMDAELLKIVRQDEAILVNYKRMLSVPGIGKITATFIICCTNNFVIKVTGKQLANYAGVVPFENTSGTSVRGKSRYILWQIKNSNHCLLWEHYQPFSHTRSLKIIMSAK

SEQ ID NO: 304840 - protein, 408 aa, unidentified
MKRYYIGVDWGDRLHQVYVGDEEGKKVREVKVPKTIEGLAEIGRWLDEQRAEGFELWAAIEKPAGRIVDFLLDHGVEVYPVNPKAVDRVRDRYRMSDSKSDAFDAYVLAEFVRTDQAHLKVLRPSSEKAQELKMLSRDQRRVGRHKSRLLHQLTTTLKEYYARPLEVFEDIETELALDFLTRYPTPAHLGALKRKEFNRFATKQHHLSKQRCEELWEKLQKPQLAVPEHVVRAKAQLVEVLIDQLRASIKAVKTYNHKVESFFASSPAAAVAKTLPGGKSGTLVAAIWAELGDALGRWQSSGHLQAEAGVVPVTKASGKSHVVHFRFACNKHLRYSMYWFSFVSLNNSEWAKLYYRSQRDKGHSHPQALRALGAKWLKIIFVMWRDHKPYDEKFHLANIALQKMRQAA

SEQ ID NO: 304841 - protein, 357 aa, unidentified
MKINEKKFIGKAFVGIDVHKSNWKVCVLGELNFKKEFSCDPYPKALETSLKNLLPDFEFECAYEAGFCGFWIHDALNEMEGISCIVVNPADIPTSDKERAQKEDKRDARKIAIHLKAGVLNGIYVPDKDFVALREIQRIHFTVTKDLAKSKNRVKSFLFRQGIEICKEQFKKPSNHWSNKFINWINSLELCPKLKFVLEELMANVIRLRNQKLRILKQIREEIKSKQELEIRYNKLIKINGVGLISCITIITEVGDIKRFKTYEKFHSFTGLIPSTNSSADIEKIRGITNRANTRLRSVLVEVAWVSISKEHELLHYYNELKQRMNSNKAIIRVAKKIASKIRYELLKDEQELKVAA

SEQ ID NO: 304842 - protein, 360 aa, unidentified
MFSERTSVGLDVHARSVVAAAIDGVTGEVFRARLTPANEDVIGWVRGLPGPSAVAYEAGPTGFGPSRALSAAGFRCEVAASSKLQRPAGDRVKTDARDALHLARLLRLDEVVSVRVPTQAQEAARDLVRAREAARADLMRARHRVSKLLLRHGIVYSGGKAWTQVHDAWLLGQHFDRVGTQAAFEDAYEAVVLATGRRGRLDEKITAMATASEFTPVVGRLGCLRGISTLTGFALAVEIGQWDRFTGGSIGAYLGLVPSEHSSGSSRRQGAITKTGNAHVRRLLVEAAWHHRKPYRPTAVLRRRWDAATPAARARGHAGNQRLHARWVGYAERKKRPVAANVAVARELAGWCWSLAMLPD

SEQ ID NO: 304843 - protein, 372 aa, unidentified
MKYVGMDVSSKSFVVHALDEKRQVLKREEIEPTRAALRKLCAELGEEAKLIAFEAGNQMKWIADTLKKQEGVKIHVVHPNEVKWIAQSGGKKTDQVDAKKLAELARSDMLPRAVHVVEGPTRQMRELVSARTTLMQERVSLINTVRSYLKQEGVQLSEKFFGQENWKEQLGQKKLSATLKVIIEAFRPVIEALEKSESELIDELKKLKDKRTELLETIPGIGVIASRTVVSALDDAKRFDNRKCVANYSALAPTVYQSGSELQMGRINRDGRQEVRRVMLQCAHSLVRAKSPASQPLRDFYHRVEQRRGKKKALVALARKLLTICYGVLKSGKGFDPSKVEAKKAKAKQQGLQQEKKADGARTRRYVLRTVA

SEQ ID NO: 304844 - protein, 340 aa, unidentified
MTITTIGIDLAKNVFVVHGVDQNGKTVLVKSRVTRAALPGLIAGLPPCVIGMEACSGAHYWARLFRQYGHEPRLMAAKFVSPYRMAGKSGKNDAADAQAICEAVRRPHMRFVPVKDESQQAMQCLHRTRQGFIEEKTATYNRLRGLISEFGVIAPQSIDALRRMVSVQKSSLPLQVQQCVDDLLEHVDRIEANITEYDQILSRIAKTDHRSQRLMKLKGVGPTTACALVACIGNAHDFKNGRQLAAWLGLTPSQYSSGGKSKLGRITKAGDSYLRTLLVQGARSVLIGAEKKTDSFSRWVCSLVERRGYWRAVVAIAAKNARLCWASLHYGDDFRLYSAS

SEQ ID NO: 304845 - protein, 403 aa, unidentified
MNMNAVGIDVSKGKSMVAILRPYGEIVSTPFEVNHTVSGIRSLIEHIQSIDGESRIVMEHTGRYYEPLVRELSQADLFVSAVNPKLIKDFGDNSLRKVKSDKADALKIARYTLDSWTELRQYSLMDEIRNQLKIMNRQFDFYMKHKTAMKNNLIGILDQTYPGVNTYFDSPAREDGSQKWVDFANTYWHVDCVRKLSLNAFIDHYQKWCKRRKYNFSQSKAVEIYEASKEIVSVLPKDDLTKLIIKQAVEQLNTASQTVEQLRSMMNEAASKLPEYPVVMAMKGVGKSLGPQLMAEIGDVSRFTHKGAITAFAGVDPGVNESGSYEQKSVPSSKRGSGTLRKTLFQVMDVLIKTKPQDDPVYLFMDKKRSQGKPYYVYMTAGANKFLRIYYGRVKEYLSSLPK

SEQ ID NO: 304846 - protein, 347 aa, unidentified
MEKVIRIGMDTSKHVFQLHGVNAAEEPVLRKKLRRREMVGFFERLPATTIALEACGGAHHWARLLSTFGHEVKLIPPQYAKPYVKRGKNDAADAEALCEAMSRPTMRFVPMKTADEQAALMLVGMRERLVRNRTQLANSIRGYAAEFGLVAAKGMSNIAPLLERATTDETLPALARELFAQQAKEYAQLQERVAEIEAKLMGWHRSDTRSRRLAKVPGIGPIGAALLVMKTPAPELFRSGRDFAAWIGLTPKDHSTAGKTRLGVITRAGDEALRSVLIVGATAVIQHVRCGRSVASPWLAGLLKRKSPKQAAVALANKIARIAWKLMVSGEHYKAMHASQPAAAQAV

SEQ ID NO: 304847 - protein, 351 aa, unidentified
MTEITRLAIDTSKSVFTLHGVDVADRPVLRRNLRRRELLAFFERLPPVEVALEACGGSHHWGRALLALGHRVRLIPPQYVKPFVKRSKNDRNDAEAISVAAAQPSIGSVAVKSAEQQAAAMLLSVRELLVRQRTQLVNAMRGHAAEMGVVAPLGEKGVSALQAEIATADDAAVPAAAKQAIALLGREAERLETRLRAIEATLMQQHKANPVSRRLAAIPGIGPIGALSLAVRVDPKQFASARHFAAWLGLVPRECSTAGKQRLGGISRAGDERLRQSLVLGATAVIQHANPRVKPAGQGPTGRPATSPWLLNLLGRKPRKLAAVALANKMARIVWAMMTSGEAYRPRPTAV

SEQ ID NO: 304848 - protein, 360 aa, unidentified
MSHRTWKLGNVKSASASEGDRMTVGLDVHKATAYAAVRKNGQEIATWVMPMDNQTIVASLKRFGPALKKVVYEAGPTGYGLARALKKAGLPVEVIAPGKVPQAPNADSKTDRLDARKLAEEAEKGSLQKAVIAIPTEQEEADRQLARLRDQLIGKQRRVKQQIKSLLLQHGLPEPAGLAHWSAEGLAALKAMRLRHQLQLSLEVLVGELEHLVVLRKRVERHEVWLMKQRRHRKGARLLQTHPGVGVVTATAFRLEVYQPERFATPEQLAKYVGLAPRVRQTGPKRRGGPLIPAGRGSLRSLLIEASWRWIRDDAAAAKTYRRLVRNTGSGQKAVVAMARRMAVHLWCMLCRGQEYRPAA

SEQ ID NO: 304849 - protein, 265 aa, unidentified
MEYGAIDRHKQESQVRIITEGGEVIDRRIPTTRDHLTTLFWGRPHARILIEASTESEWVAQHLETLGHEVVVADPNYALMYGHRSRRVKTDRRDVAALVEACRHGIYRPAHRRSAQQRNIQWQINVRRELVAARTRGISLTRAITRQAGYRIAGGATETFLQRVAALQLPPALDESLSPVRNVMEVIGEELSRVDTHFESVIADDPVVKRLTTCPSIGAITAAAFVAALDDVGRFVGRRGAAQVTSYLGLVPRSTAPANNSNAAG

SEQ ID NO: 304850 - protein, 343 aa, unidentified
MTKLYGGIDLHANNSVIVLIDEQEQVVFQTRTPNDVSQILLHLHPFQPRIHGLVVESTYNWYWLVDGVMEAGYSVHLANTAAIRQYDGLKHTNDHSDARWLAQLLRLGILPTGYIYPKEDRAIRDLLRKRSQLVRQKTSNLLSIQNLVTRNTGTSLSGNRIKTLSAEAIRDVLPTPDLALAVTSTLTVMHCVADQIAAIEHTIKARVALRPAFRQLLTVAGIGQILALTIMLEAGDMRRFPTVGQWASYCRCVNSTKLSNGKRKGQGNTKNGNKYLGWAFVEAANFAVRYYPEVQRFYQRKKSKTQGVVALKAVAHKLARACYYVLRDEVPFDITKAFVPQPA

SEQ ID NO: 304851 - protein, 415 aa, unidentified
MALKIVYKICCGIDVHKTFVVACIASTDKHGVTSYERHRFSTYTKGLKNLLQWLLEHNCKDVCMESTGKYWIPVYNILEKDCSIVLAHPKYVKAIRGKKTDKKDAKWIADLFKHDLVAGSFMPPAGIRQLRDLMRYRFKLTCFKSSEKNRLQNCLTVSNIQLGNVVSDTFGKSAQAILDKILENPADTSFDLEPLVFKSLKKKLPELRDAIDGYITPEQAGKLKVIKSHYENLEARKAELEELILALATPYQQELAILQTAPGISSDFTAIGIISEIGTNMEAFPSAKHLCSWAGLTPTNNESAGKKKSVRVSKAGCYIKPLLVQCANAVVKSSKHPEMRNRYLRLKKRRGHKKAIIAIARMLLTALYNMLKNKEPYNAELYRKSDVLPVNREITIEQAILMAQFQGYKIKSAAE

SEQ ID NO: 304852 - protein, 378 aa, unidentified
MNASGTALRGKHTVEASALYMAFELSEKDWKLALGDGARGPSRYTVSAGDTVALLECIAKAKARCALAPAAGVHSCYEAGRDGFWLHRWLLAQGIDNIVVDSASIEVNRRARRAKTDRLDADKLLSMLIRYHADEPRVWSVVRVPTPEQEDARRVHRELGRLGHERTAHINRIRALLVLNNLRVKYVGGRLWQRWWTSHAGELRPGVRAEIERESERLLLVKKQMDMIEAAQRQAVAAGSEPQVAGLAQLRGIGVGSGWVLAKELFGWRRFRNRREVAGCLGLTPSPYASGESETEQGISKAGNRRVRTLLVELAWSWLRYQPQSELSQWFNRRFAGGGKRLRRIGIVALARRLAIALWRYLEDGLIPQGTQLKPIAG

SEQ ID NO: 304853 - protein, 310 aa, unidentified
MAKEIIEFEQHIERGCGMDVHKETVVATVSGQGIKTETRTFSTITSSLKSMAQWLQKNGITHVAMESTGVYWKPVYNVLEKDFEILLVNARHIKNVPGRKTDKADSKWICKLLRSGLLKGSFIPPQDIRELRDLTRYRRKLTEQIAAEKNRIQRILEDANIKLSSVVSDIEGVVATRLIEGLLQGENVGELVKEHYHGKLSASREELKEAITGFFTNHHRFMITTIKSHIGYLEQQIDQIDNEIDKKVEPCRELLELLRTIPGVGKEGAVGIIAEIGTKMDVFPDEHHLSSWVGMSPGNNESAGKKKVQE

SEQ ID NO: 304854 - protein, 443 aa, unidentified
MTATDTTASTLLVAIDISKHRHEVLIGVPGKKRRRRMTILNTLADFQRLSATLASYDLPVRIGFEATGNYHRTLAHHLGQAGFELKLISSVGLARTREALHNSWDKNDPKDAQVILHMLEIGAVQFFHDPMVVGTADIQELSKTHEIVSRSKTELWHRILTHYLPLYFPEAERFHRSSRTDWFLAFLEKYPSPHMISAMSREAFIADAWHVVGRKVSKEQLLSDIYATAVNSVGLPVHAGSDAVRMFRLVLAEGRSLVRQRDLIEARAVELLSDLPDYQLLTTIPGIGPVNAMTILAEAGDLRRFRYHRQFLKFCGMDLSTVQSGMFRGQSRISKYGNARLRRTLWMAGQTAVLKRTNSFRDKFERCISKDRHNAHLRRKAYTAIAAKMARTVHAVVNHGEPYRPFFEGVSPGGRTSLWHEPWRQLVRHRSRTHGDAMAHPRR

SEQ ID NO: 304855 - protein, 480 aa, unidentified
MIKSVGIDLAGNGEHKVRCLDEKAEVCDSFGFETTPVGLEKLEERIFRDGSNPVVVFEPTGLAWVAVAVYLRARHPGCCLVRTQSRNVAALRKYLRHSSKSDKIDAITLAKMPFVNAERLNEVYLPPAKIYAIQRLARQRKRLENDMASRKKRIISIIDGYLPGVHAAFSSRWSLQAKAFLRCRLNPLAIVRDGEKTLDRFLTNVRYRRQKDAVESHSVYMACQAAATIYQRSQEAGMIDDDFFAALQEEIGHELRLMETEEAESQSITQRLTELYQELHPSDNLSTIPGVGPNTAPIFLAVVGDPSRFPSQSAFANYNGVVPNSKQSSATEAKGLNMTKAGPSVMKWALYQSGQIGRRYDPQLAHLYYREMVHNGKNHKQAMGAVMSHLGARILAVLRDDKPYELRDIKGDPITWRDARELVLSNYQVPEEIKRDRRRRGTLKNSSRKPLKKRREMVARRVHEAAETPQSAAATSSPGN

SEQ ID NO: 304856 - protein, 389 aa, unidentified
MPSVSERSEAPTAIQTHLAASFVSLELSRSIWLITSLSPGSGEKMSKHSVRAGDVAALLARFSELKRKASERTGKSFPIVVIQEAGLDGFWLHRVLQSEGVESHVVDPSSIATSRRRRRAKTDRIDGEALLRALLAYKRGEPRVCAMVKAPTPEEEDRRRLCRERKVLIAERVKHVNRVKGLLFSQGISGYEPLRRDRRQRLDELTTGDGRPLPVHLKTQIRRELDRLELLLDQIKEAEAERDALLAAPQPAAPAPAGRMLLEFKGIGAELAAVLWLEALFRHFDNRRQLASYAGLAPTPWQSGSVDHEQGVSKAGNPRLRTSLIQLAWLWLRHQPQSALTLWFKERVSGNGGHFKKSTIVALARKLLVALWKYVTAGVVIDGAVMKDA

SEQ ID NO: 304857 - protein, 426 aa, unidentified
MNTQNSDTLPIAKFAAYVGLDWGDQKHAFAWCLGTDKTPAHTGDLINSPEVLHTWLQELAQRFEGRPVALAVETSRGPLIHLFGAYPWLTVYPIHPATSARYRTAFKPSGAKDDLPDALLLLELVRDLRHKLRPLQMPDTATRQLAALVELRRDLVDRRTQVLLQLMALLKSYFPQALELVGQDLTSRLALAFLRRWPDLLALKAARPGTLKSFYYQHSIRAEDLVTQRLALVQQARALTTDEAVLMPARLHLAALLEQMRTLAKHIELVEQQSQALFKEHGEAYLFRELPGAGKALQPRLLVAFGEDRSLYPDPTSLQKYGGLAPVIVKSGRQSWVHWRWHAPRFLRQTFVEWAGQTVVYSAWAKAYYQHRKAKGVSHHVILRALAFKWIRILWKCWQTRTAYDEARYLKQLLARKSPHAIKINA

SEQ ID NO: 304858 - protein, 473 aa, unidentified
MSRFVGGSLQAEFMARVRDLDPGRCLVVPVDIGKWSAMALVADHYGEVIVEPFEFALTETGVQCLLVAIARAEAARQALICRVGIEATGHYHRTLVARLAAAGAEVIQLNPAAVKEARSQQLMRTLKSDARDLGAMAELMVRGGGRPAPARSDALAAQLAWVVHRQRKLGAHQALANQIQSQLDLVFPGLAGCFASLLGAKAGRVILAHICDPDRICRLGAERLRAFMARRGVRLSRPKAAQILDAARAALRLPAAERAVLGEVLSADVALLAALEGELARAETALAEILPATPAAILTSLPGVGVIRASTYGAGIGDPWRFPNAGAAYRASGLVPTEYDSAGKHRRRGQRISREGSVLLRQAIIELGKGLTGHHDDFAAYRRRLIDQEKKPAGVAAVAAGRRAHRLAFAMLRSQQPYDPARWRDSITANQPATTTPHRKSTTPNQQSDRSTKPQRSRPTTRPRRKGSGPTSL

SEQ ID NO: 304859 - protein, 350 aa, unidentified
MVVVGADVHKRTHTFVAVDQAGRKLGEKVVAATTVGHHKALVWARAEFGNELVWGIEDCRHLSARLERDLLSAGQQVVRVPPKLMAQTRASARTRGKSDPIDALAVARAVLREPDLPVASHDAVSRELKLLIDRREDLVAQRTSAINRLLWRVHELDPERAPKPRSLDLAKHRELLRAWLATQPGLVAELARDELADISRLTEAINALAKRITERVRVVSPALLALPGCAELTAAKLIGETAGVSRFKSESAFARHAGVAPIPVWSGNTTGRVRMTRSGNRQLNAALHRIAVTQVRLDGIGRAYYRKRRDAGASKTEALRCLKRRLARVVFHHLHTDHQTRNQPCQTAAA

SEQ ID NO: 304860 - protein, 407 aa, unidentified
MEVVYPRCAGLDVHLRTVVACVRIAEGKTHQQEVRTFPTTVMELGKLSDWLESHGVTHVVMESTGVYWQPVWQVLNGQFELTLANARHVKNVPGRKTDVNDAMWLADLMAHGLVRGSFVPPAEVQEARELTRTRTQLMREVAQHTQRIQKMLEKGNIKLSTVLTHVLGVTGRRIIRALIDGETDPEKLVSLRRGKIKASVDEMREALRGRLTEGQRVLLLVHLHQVEQLEKSVEVIERRLDEVLRPFRAQRELILTHPGVSGTIASIVQAEVGNDVGRFASAAHLVSWAGLCPGSDESAGRTRSSRIRQGNQWLKTALVQGAWAASRKKGSAVREQYQRLKAKRGAKKAIVAVAASMLTSLYYMLSRGVPYAAPVRTLDARTKQHATHRLVSRLKSLGFQVHLKPAA

SEQ ID NO: 304861 - protein, 349 aa, unidentified
MRFYTKQHRHYCGIDLHARTMYVCILDATGQVLVHQNLPANPEAFLETIAPYREDLVVAAECIFTWYWLADLCAAEGIAFVLGHALYMKAIHGGKAKNDRIDALKIATLLRGGMLPQAYVYPAGMRATRDLLRRRLHIVRKRGQLLAHIQMTSHQYNLPPLGKRIAYPSNREGVAEHFEDRVVRKSIAVDLALLERYDALVTDLESYLVRQAKQHDPQAFALLRSIPGIGKVLALTILYEIHDVRRFDRVQEFASYARLVKCAKESAGKKHGTSGAKMGNVHLKWAFSEAAVLFVRHSAQGKVLLTRLEKRFGKGKALSILAHKLGRAAYYILLRGKAFEIDRFAATVS

SEQ ID NO: 304862 - protein, 413 aa, unidentified
MLKIVYPICCGMDVHKSFVVACIASTNDHGVTTYKSKRFSTFTGDLRRCADWLSENNCKDVCMESTGKYWIPIYNVLEPTCNIVLAHPKYVKAIRGKKTDKRDAKWIADIFKHDLVAGSFIPPADIRQLRDLVRYRWKLTNFTTGEKNRAQNCLTVSNFKLDDVFSDVFGKAASAITTKILENPTEKITDVSGFRTKGMKATNEQVLAAVDGEMCAEQAEKLRIIRSHMGSLELCKANLESLILTTAEKYLPQLNLVMTVPGIQSFAAIGIISEIGVDMSVFPTSKHLCSWAGLTPQNNESAGKKKTTRISRAGAYIKPLLVQCALCAVRAKRFPEVRNRYLALKKRRGHKKAIIAIARMLLTAIYNILKKNEPYNAELYRCCNTPPEHRAVSVEEAIFILQRQGYLVTPSAT

SEQ ID NO: 304863 - protein, 488 aa, unidentified
MTREPEVIDADDNVEVVQRVAAVDIAKASGKVCTRIPHPSVAGRRLTKIWDVGATTRAVMDLADELARQHIERVVVEATSDYWRPFVYLLEARGLLVWLVNAHDIKQVPGRPKTDKLDAVWLAKLNERGMLRPSFIPPMEIRQLRDYTRLRVDLVEDRTRFKQRIEKLLEDSLIKLSTVASDIFGKPGRTMLDALIAGQHDPEVLAEYALGKMRPKRAALKEALTGRFDAHHAELIAMLLDEVDALTAKIDTLTVRVDQLLADIPAACAPPPGPGGVDEGAAPLGAVARLDEITGIGIAAAQTAIAEVGLDMTQFPTAGHLVSWAKLSPRTIQSGTRRRSAKIGQDRQGQSLSQAGARRCRCVGGQDRHLPRRALPAAGQTPRQTQSDRRGGPLDPGHRLAPAGRPHRPFPRPGRRLLPASGQHPATHPQPHPPTRNPGSPRDSHPCGGLTATAVHPTVRHVGRPHTPSPNTACISHFRISHVKCVDK

SEQ ID NO: 304864 - protein, 412 aa, unidentified
MEVLYPHCAGLDVHKDTVVACVRHMATGSVEREVRTFKTTTKDLLALSDWLAEHGCTHVAMEATGVYWKPVWHILSDGDFVLVLANAAHVKNVPGRKTDVNDATWLADLLAHGLIRGSFVPDEQTQEMRNLLRTRKQLVRECSRHIQRLQKTLEDANIKLDSVISDIMGLSGRAMIEALIAGESDPERLAQLAHRRIKAPPEALCEALRGRVTRHHRFLLRLHLKQIDAVNVAIDDIDQEVDAQIEPFRTAIQLLITIPGVSELSACVILAEIGHDMNRFPTAAHLISWAGLCPKNDESAGKRRSTRMRKGAPWLKTTLVQCARAAARKKASYFQAQYHRLRARRGDKKAIGAVAASILTTAYHMLKYGTLYEDLGPDYFDKRGKGKHVHRLINRLQNLGFAVQITPAEAAA

SEQ ID NO: 304865 - protein, 312 aa, unidentified
MIASPDYVSVDVSKQHLDLAMVETAVLRIPNTQAGVRRLIVRLGTLRRPHVVCEATGSYTRLMARELAEHGIALSKVNPRRVRDLARADGQMAKTDAIDAQAILRFARLMQPQPDPHDPYALELTDLVRRRRQMVDMLAMEKQRSEHPEGQTIKASIKAHIDFLSTQIAAIDKQITEHIAQHAGLHRRAELLASIPGIGRVTAAVLIAEMPELGSIGNKQAAALAGVAPFVHDSGQMRGQAHIAGGRLSVRCALYMATISAIRANPPIKTFYQRLRSQGKPAKLAIVAAMRKLLTTANAILANDAPWIPSPA

SEQ ID NO: 304866 - protein, 369 aa, unidentified
MTDLTLFVGLDVHKKTISIAVVEATAGAAVHFYGTIANTPDTVRTLCRKLTRDGQQLHFAYEAGPCGYGVQRLLTRLGHRCEVVAPALIPRKAGDRVKTDRRDAMMLAQTLRAGQLTAVWVPDEAHEAMRDLVRLRMQAMRDLRKSRQQLLSFLLRHGRNSPYRHWTKMHRRWLGELVFAHPAQHLALEEMLQRIERAEALCDRLKAAILELVPQWSLAPVVQAIQALRGVSLLVAAVIVAEVGCFGRFASPHPLMAYLGLNPSEHSSGATVRRGAITKTGNTLARTCLVEAAWTYRFPARVTQIIRDRLAGLPEPIRVIAWKAQVRLSARYRRLIAAGKPAPKVAVAIARELVGFIWAIARLVEPQFV

SEQ ID NO: 304867 - protein, 343 aa, unidentified
MAIFVGLDVSLKMTSICIIDADGTLVWQGKVLSEPPALIMALWPYRDRIKLVGIEACPLSEWLYAALVESGIPTVCIETRHAQRFLSSRPNKTDKSDAHGIGEMMRLGHFRPVHVKSKASLMLRTILGARQNFVGHMIAVEQTIRGLLKVHGLKVGAVLRCAFAARIECLLADAPELRIAIAPLLETRNMMRKQQALLDRQMSQLARKDDVCKRLMTISGVGPIVSLAFKAAIDDPARFRSSKAVAAHLGLTPRIYQSGEIDRSGNISKCGDTAMRHALYEAANSHLRVSKKWSPLRAWGVKLAKRIGAKKACVAVARKLAIIMHRMWVDGTEFHFSKAPTTA

SEQ ID NO: 304868 - protein, 313 aa, unidentified
MPTVAGIDVSKAFLDVAVFPSRERWRTANTPEAAAQLVQELQRRGVAYAVVEASGGYEATFILAAHAHDLRVARANPRRVRHFAHAIGRLAKTDAIDALVLAQFGATQELVFLPKPDPARERLRALLLRRVELQKLLQAERNRAQQAPAWLAESFQRVVATLEAELAWVKGEVERLLAESAHLRERAALLETVPGVGPVVARTLVALLPELGELTAKQAAALVGVAPFNRESGSQRWRQVTYGGRSEVRRVLYLAVRVAIRHNPVVRAFWLRLEERGKPGKVAMVACIRKLVGMLNAMMRKGRPWSPPLPAAA

SEQ ID NO: 304869 - protein, 328 aa, unidentified
MQKSKEYVGVDVSKESLDMVMYSTGEMCCVGNDEAGIAKATGWLKQVDPAIIVMEATGGMEVSLYVALQEANLPVAVINPRQIRDFARSMGILAKTDKVDAKVLARYAATIQPEVRPLPDEDAHKLRALVTRRRQLGEMIIAETNRARATRDKAMKERIHAHIEWLKRELANIDKDISQRIKENPVWRAKNKLLQSTPGVGPVLSATLIAELPELGVLNRKKIAALVGIAPLNRDSGKHRGERSIWGGRCKVRQSLYMAALSAARFNPAIQAFYQRLIASGKDKKVALTACMHKLITILNAMLKHNSYWSCNHATFPDASLPSAKTVA

SEQ ID NO: 304870 - protein, 296 aa, unidentified
MNKFSGIDLHSNNSVVVVSDEADRIVYQRRLPNDPVQIRAALAPHREDLVGVVIEATFNWYWLVDDLMKDGYCVHLANPAAIRQYDGLKYSGDFADAAYLAQLLRLGLLPEGYIYPAQGRQVRDLSRKRMQLVQCRTAQILAIENLFSRQTGGQMQGERVKRLDEAQVSGFGFAPDVLLAMQANLAVMQTLQEQIGIVEKRLMERVKQHPDYALLNSVPGIGPVLATTIMLETGTISRFAKVGNFSSYCRCVDSRRESNSRKKGEGNTKNGNRYLARAFVEAANFAIRTCPEARRF

SEQ ID NO: 304871 - protein, 1025 aa, unidentified
MRVAIYGRVSTSHQVDHQTIEQQLERLRAHVHANTAEGWVLDPAHVFRDDGYSGATLARPGLDRLRDAVKSRECDRVLVTAPDRLARNYVHQMVLLEEWARLGCAAEFLDRPMSDDPHDHLLLQIRGAVAEYERTLIAERMRRGRLAKLRAGLLLPWTYAPYGYRMDPDRPRDPHGVTTDPAEVAVVAELFAMYREPGTSLMQLALHLNARGVPTPSGKPRWSCPTIRGILRNPTYTGQVYAQRTHYRSPTHRRSATHPLGRPHGTAVPQPADTWLLVGQVPAVVSQTHFDEVQAKLATNRAFSRRNNTVHQYLLRALVSCGHCGLACTARAANGRNFYYLCNGKAHSVYSHRATGCPARHIPAGQLDELVWTDLCALMGEPEPLAAAVARAHGGAWLPQELLARRETLRRAQGHLGQQVERLTDAYLRAVIPLDEYERRRRDLEQRMHALAGQEELLRNDAERQQHLAGVATSLEAFRMRVQHGLAGATFEQRRQLVMLLIDRVVVTDADIEIRYVLPTSPDSEHVRFCLLRKDYFDDPTVSAQALAVLDAAAGDARNDGPPSQRPPAEGEIIALVGVQLGWASSWATRALPDCRHGIDDFLQQLAVMPVGWRNPHGQRDAVGINEDVALGTRLATVRRVRPGRFAPLVSCEAVRMEPGRHAGYGRPGWSTPMPPRRKGRQKACGRPAFLEVRTVAWARQPVPQGRKTRMTQIHAFGGVDVGKACLDAAVFPGGARWHGGNHPEGRQELIAWFGAHDVRIVGLEATGGYERPLRNELRAAGASVHVLDPARVRHFAKAVGQRAKTDAIDAAMIAEFTAQLHSLPPQPVEPEREAVADLVRTRRLLVDKRADIEKALVRLPDEARALVYPAVEALRVAIADLDAQIAQRVQAHSGLAQSVQVLASAPGVGPITAVAVATLLPELGRISGRQAAALLGVAPYPDDSGQRHGKRRIAGGRSDVRRVLYMAALQATTGRSKGVLARFYSQMVARGKPPKVALTACMRKLIVRLNAMLAHNQPWKEAPT

SEQ ID NO: 304872 - protein, 346 aa, unidentified
MKKIFIGIDFSKEKFDATVIKAVGVEESAERKHEVFDNKESGFRRLLRWVKSVADEQDTGLWLFCGENTGGYSKALCNHLYGRGYDMWLENALSIKRSSALQRSKSDKADSGIIAEYAMRNYDQMRLYKPLNKNLERLRELFLFRHSLVKQKASIAVREGEKKLTQEKSDVSRFMAQCSRHLITELNKKIAECDMRIEKIISEDEDLRRNFEIITSVPGVGAQNAVCLMVYTDNFYRFDYNSRKIACYYGVAPFGRQSGTSVNTPPHVSPFANKLIKALLTQAALASINSCPQMAIYYHRLVETGKKKPVALNNVKNKLLHIITAMVRKGEKYNPDHDYYTTLKAA

SEQ ID NO: 304873 - protein, 272 aa, unidentified
MEQVITIGLDLAKNVFQVHGIDAAGKVLVRRQLRRGDVLRFFGGLPRCLVGMEACATAHYWARELTKLGHTVRLMPPAYVKPYVKRGKTDVADAEAIAEAVTRPTMRFVAVKTADQQAALMLHKVRDLLVRQRTMLINALRGHLAEFGIIAARGPGGVTAAIISLHEAQDSLPELARVALHGLIDQLRMVRGEIARVEKRIVAWHRASNPSRRLATIPGIGPITASAIAAAVPDATLFQSGRQFAAWLGLTPRAHSSGGRNRRDPACTPRQC

SEQ ID NO: 304874 - protein, 476 aa, unidentified
MAHPKKARPDLALIPMLPHETLYIGIDVGKFRHVAGFLSRTLLQRHERFEGCPTLTFEQSREGFRALVDRIGEYTPLEQATILLEHTGHYHKNLEQYLLDLDITVYRIHVQERSNGMMKTDKRDALGLANRLYTQLELGAQVADKMQLVRRTEPPTPAAAHLRGFIQHRYELSRQCTQLRNKLTAICDEVFPEFTQIFHDPNREVALAFREKFPTPHEIVTASLSALREVRVRYFPSEANLLRLQQLARETIGITNVDRLRGLKLEQELLIKELRLLQEHVERLDTEIADIVKNCREGQILLSIPSIGPVQAATIIATMGNIANFEKASELKSYFGWAPRQDQTGVSFDRTKLARRGVRPMKHMLYLMAARSTTFECEWARIYQRLLPRMGTYDERTKGYRGKKRVLGRIAGQMASMIYALLKTDQETLNKVPPGQEPPAPMLYDPEVHRKHQEGHYRSLKPGTQPRKILQLPKKT

SEQ ID NO: 304875 - protein, 462 aa, unidentified
MKRTSNKKKSQERPHSSNSLPVLFPDTAGIDIGSKSHYVAVPSERDSNPVREFATFTADLHHMAHWLKKCGIKNVIMESTGVYWIPVFELLESNGFNVKLVNARHVKNVSAHKTDVLDCQWLQQLGTFGLVKGAFRPADEILPLRAYLRQRDMLIKIAAVHVQHMQKALTQMNLLLHNVISDITGKTGMAIIRSIVAGITDPKVLAGLRDERCHNPEKVIEASLVGNYRREHLFSLEQALELYDFYTTKIAACESEIEKEARKQESKCDHEKLKQLKGNSRIPTTKRKLKKHEYAFDLTSELIRLTGVNLTKIPAIGASTALLIISEIGLDMSRWRSAKSFSSWLGLCPGNKVSGGRKLSGKTKPCANRVAVALRLAASTLHSSECAFGAFLRRMKARLGSPKAITALAHKLAKLIYRMLKYGGEYVEKGVEFYEEMYRKRREASLRRKAKEMGYDIIPTVA

SEQ ID NO: 304876 - protein, 351 aa, unidentified
MNSQITAVPKLYIGIDIHKRSWKVHCATDLFAGRSFNMPPDPAQLRAYAGKHFPDHEVSTAYDAGCCGYHAHRCFEGYGWRSLVVNPADIHRKGKEKHTKTDKIDAQLIARELKDGRLDGITVPDIEREELRSLFRRRNDLVKDFRRIKSYIKMQLLYFGIREPEEFDNDHWSHRYRKWLDDMVFKHPAAKATLDSRMRFFRFVDQDLRDVSTQLRRYCKTHYKKDYMLLRSIPGIGGIVACGILCELGDLRRFNNIKHLAGYVGLAPGVYQSGGSSRAMGITPRAHRLIRSYFVEASWQAIRADPVMQAYYRKHLGKNSKSIIIKVARKLLSRTLAVIKTGIPYTIGVME

SEQ ID NO: 304877 - protein, 394 aa, unidentified
MFYLGIDIGKRTHAASIMDEAGKVLLKGFSFSNSSAGAEALFGALHKFSGSSADFIVGMEATGHYWLALFSYLDEKGFLIHVLNPIQTDGWRNATEIRKRKTDTIDSVLIADLIRYGDFTHTTLTDENVMSLKNLSRYRTYLVGTTSDFKRKVIAVLDQLFPEYETLFNRQGLFGAASKELLLTYSSPESLEEVTADEIAQALKTASRGRLGIDKAEAIKQAASSSFGVRFAQEAYVFQLRSMIEQIKFLENQINEVEKEIKNIMDQLDSVILTVPGIGPVNGAAILGEIGDITRFSTASKLVAYAGIDASVTKSGEYESTHNVMSKRGSPYLRKALFSAAFIASFNDPVFSTYYQKKRAAGKHHLTAVGAVARKLTYTIHAILTKNEPYKIQI

SEQ ID NO: 304878 - protein, 418 aa, unidentified
MEKHNNSGKKSEPTSKPTKTRGPMRRDTKEVLAELVGKLKEQLDPKKAAATSAGEKRPSGELRPNLDRLTVGVDLGDQWSHYCILGLEGETLVEGQLRTTQQHIAEFFQALNAARVVFEVGTHSPWVQEVICGCGHEVLVANPRLMEGSKRRKRKNDRIDANKLARLGRVDPQSLHPMRHRSKEVRQDLVVLRARDALVAARTELINATRGLVKSMGTRLPKCSSESFAQKVEEAVPVEIREALLPLVRMAAALSDCIQRYDEKIEKLGREKYGHTALLRQVKGVGPITAPAYVLTLENPERFVKSRDVGPYLGLVPKQEDSGESQPQLGISKTGDTMVRKLLVGSAHYILGPFGPDTDLRRYGLRLCERGGKNAKKRAAVAVARKLAVLLHCLWVSGEVYEPLRQGISATIAPPVAA

SEQ ID NO: 304879 - protein, 333 aa, unidentified
MPCHFSYIGVDASNAYLDFDGLPGQSRRRLANTPETHTALAALLSGRRGEDRDVLVVLEASGGCERGLHRALVEAGVPAAIVNPKRVRDFANSQGLRAKTDRVDARAIRRFGEVRQPRPTPVPEPARAELIELLGYRDQIVAEITARTLQRAHLRSAFLIKRADAALERLRRESEMLERLIEATVAGDPELSRRAAVLTSFPGVGPLVAAELVAGMPELGTLTERQAASLAGVAPFARDSGQRRGAREIAGGRPKVRRALFHAARVGLRHNPALRALYERLTARGKPGKVALVACMRKAVVILNAMLKSGRHWDPDYETNKKAAEKAAGDALS

SEQ ID NO: 304880 - protein, 342 aa, unidentified
MDHFAGLDVSVKETSVCIVDDTGKIVREVKVASEPKALLAVLKNPAYRFKRIGLEAGPLSQWLFSALAEAELAVVCVETRHMQAVLKAQINKTDRNDARGIAQMMRVGLYRPVHVKTLRSQKLRMLLTHRKLLQSKAIAIENDLRGTLRNFGLKVGMIGKVKFEARINELVESLPDLAGLVEPLLVVRRALREQIVVLHRRLLAIVRDDEVCRRLMTTPGVGPVVALTYRATVDVPARFHKSKAVGAVFGLTCSKYQSGEIDRSGRISRCGDQMMRVMLYEAAQSMLRSKKWCWLKAWAMQIARRRGMKKAIVALARRLAVIMHRIWVDGTEFRWTREAVAA

SEQ ID NO: 304881 - protein, 416 aa, unidentified
MDAIVERCAGLDVHLDTVVACVLYGKLDIKPKKEVKTFSTTTKGLLELLDFINQKECTHVAMESTGIYWKPVWNILESGAFDLIVANAKKIKNVPGRKTDVKDAEWIASLLRCGLIEKSFVPPERIRDLRDLTRLRKELLGEVNRNKNRIHKVLQDANIKISSVLSDVFGETGKSILNQIIDNQCITEEFIYSLYEGRGKSKLKSTPMEMYEALNGKIRGHHVILLGMHNSNIVFLEKQINELEKEIDILLQKERDSLELLETIPGISKISASSIIAEIGTSMDVFKTEKHISSWAGLCPKNNESAGKKKRSGIKSWNNWLRSMLCECAWSATKKKDSRFKNKYWSMVPRMGRKKALIAIANMMLRLIYHLLKTKSTYKELEIQYFIDKDKRREDRIIKELKSKGYLVEKDSLQMA

SEQ ID NO: 304882 - protein, 415 aa, unidentified
MSDPFRFFVGIDLGSASHQVCVVDASGQTLGERGVAHSGADMAALFQWLATLTQGADPQSIAAASEMPHGAMVEAFLERGYAVFAINPKQLDRFRDRFSVAGAKDDRRDAFVAAHALRTDRYAFRPLALGDPRLLRLRELGRAEESLQQDLRRAANQLWQLLQRYFPGLLTLVPAADEAWLWDLLENAPLPEKAARLRPSTLQRILKKHRIRRVSAQQLAELLAQPALPLAPGASAAIAEQVLLLLPRLRLLRKQHTQLGRNIETLLEQLAGDESFKQHRDVQILRSVPGVGRIFTATVLAEAAEPLAQRDYRVFRTVSGVAPVTQQSGKTKLVSLRRACHPRLRHAVYHSAARYAQDDPRGQQHYARLRARGCSHARAVRGVADRFLALIFALLTHNQLYDPRRRALLDPAPTC

SEQ ID NO: 304883 - protein, 348 aa, unidentified
MCIRDSVSAALLTTDGEVVCIDRLDYSELEKSAQALSSTTFAMEPCTEMNYLVQKLEAWGHRCLVIGGKNVQNYVENHFSGQKTDLNDAQALAFLAQDTQLRTIKAKDVEQQKYASLTTLREQYIKQYRQTIVSLKGICQAWGLNISKGISGKARLKDLIENHAAFPEELKESLVDMVTHAQTAQKALNKITKTLEELAKNDKLCQLIRTIPGLGSICSCRLRATVGDIKRFKSPKDFPAYYGLVPRSIATGHNERKGKITHRGDRTMRSLMVQAAGSLVNMATKGKLKSKQLTKWILKKQKEKMPWGKLVCAVAAKLLRIVRAVLISNKPYNSKIAGVAKCSLPKGS

SEQ ID NO: 304884 - protein, 361 aa, unidentified
MISIGVDVHKRQCTVAMQAEDGKVRFFEPMANTREGWGELLDQLPPEAEIALEVSTSGYFAMSVLEETGWLDRAHWVHTAGIDSLRKQKYDRLDAERLARKLSVAHQERLPEAWFPPPPIRELRLRARQRCWLAVLRTQVKNRLQSLLQMHGVRPTVSDVFGVAGRAWLAAQVPLLPAATRDSVEQLLRVLDFLLQELEKAEGYLRAVDEQFPELARLRTIPGIGEILSPVMWSEIGRLERFQSARALVNYTGLVPSLYQSGEVSIRGGITHQGSAWLRWALVQAANAVMLGVNPFSRKYRRLRRRKISNVAKTAIARSLARCVYGVLKSGRDYEATRWGRRPAWIGRSSGAGKPEVAIGH

SEQ ID NO: 304885 - protein, 452 aa, unidentified
MKRKKKMEMDIINSNAAGIDIGSKSHYVAVGQALEDVKEFGVYAEELTDICLWLKSYDITSVAMESTGDYWQNLYTELVKHDFEVALVNGKFTKNAKGKKTDVKDCRWIQKLHALGLLTSSFLPDETTEILRTYCRQRSNWIDAASSTSRKMQKYLKFLNFRLDVVVKDICGLTGLTIIEDICKGNLDPKELAKHRHYNCKKSEKEIEKALHGNNRVDFLFGLKQEYDSYKFFQKKITACDKEIEKYIKIELEKDPNKKKLKTIAKPYKRLNKNAPQIKNLNQVAFKYFNGVDLFAIEGMSHATILSIMSEIGPDGFKKFKTSKQFASWLRLAPNNKISGGKILSNRIPKGSNRLKIALRQAANAIGNLKDTHLSDFFKRVAYRKGRQSAVSATARKLAVIIWTMITKKTSYAPPTQYLFLDQKRKLRIVRNIKKNITKFDINPHELGIVTD

SEQ ID NO: 304886 - protein, 350 aa, unidentified
MIIIGADYHPGFQQIAWVDTETGEVQERRLLHREEAEKFYRDLGAQGAKVRVGMEASGHARWFERLLAELQFELWVGDAAEIRTKRVRKQKTDRQDAQLILRLLIENRFPQIWVPGWENRDLRQLLWHRHRMVQARTRIMNQLQAVALNEGLRCKKKLWREAGRKQLESFGLAPWAERRRQDLLELLDRLSPRIAELSQAIEQEVEKCPAAKRLMTHPGVGPLTALAFVLIIGKTERFQCGKQIACYLGLVPVEESSGDRRRLGHITKQGNSLLRFLLVEAAQVTVRSIPEWRNKYFHLAMRRGRKIAKIAMARRLAISLYRMWRKGRDYEPLQKFGSHAGDPVNRNGVQ

SEQ ID NO: 304887 - protein, 422 aa, unidentified
MLEETHDAEEIIARVAALDIGKAELVCCVRVPSPDRPGKRLQEVGTYSTMTRSLLRLADRLRELGVSRVVMEATSDYWKPPFYLLEAAGLETWLVNAKDVKHLPGRPKTDRLDAVWLCKVAERQMLRASFVPPLQIRQLRDLTRYRVDLVNACTAEKNRVEKLLEDACIKLSVVASDIFGVSGRDMLGALAAGERDPKVLAQFARTRLRGKVSDLEEAFTGYFTDHHAWLLTKMLARIDQIEADIGELEDKIAEQITPFAQAVDRLDEIPGVGRVAAHVIIAEIGLDMTRFATPNHLASWARFAPGIKESAGKKKGAGSTGHGNPYLARVLGEAAVCAGKTDTFLGERYRRIARRRGRKKAVVAVGRSILVIVWHLLSDPETHFHDLGPDFYDNRTGPDRKRRNHVRQLEALGYKVTLEPAA

SEQ ID NO: 304888 - protein, 364 aa, unidentified
MKMYTTKTKFHCGIDLHKSMSYICVMDKEGKIYVHTEIKNNDFQYMKKILSPYWDDLTIACETTYNWYKLSDFCETEPVQFALGHALYMGAIHGGKAKNDKIDSKKITDLLRTNLLPKAYACPRRFRSHRDLLRRRIKLVSIRSGISIYLNLFEDQNNLKHSSAELRRNAKSSLQFMDLQTFLPEDHAMARNYQLNADLLKMFTDQLKQIDKDLVKFTLDSQFKEDFEIVKSMKGIGDILGMTLVYETHDIQRFKTPGDYASYCRVVKCKKESAGKSYGYSGTKMGNPNLKWAFGEIAMLAKSDPVMKFFADELDQRHGKRKGRSIFIHKICRAIYFMLLRKKPFDPIDFFGREKYERLTKKVH

SEQ ID NO: 304889 - protein, 352 aa, unidentified
MRQHYVGMDVHQASTSIAVMNDRGKLISESLVETKAQTIVDFLKGLSGEVLVTFEESNQAAWLYDLIQPHVTRLTVCNPHHNHLLKSGNKSDRVDARKLAQLLRAGMLRPVYHGEHGTRTLKELVRSYECLVEDTSRVENRIKAIYRGRGVGTRGRAVYQTSQRELWLRKIESAGLRNRAELLFRQLDQLQVLRREAKRAMIIESRRQVATQLLQQIPELGPVRIAQIVATVGTPHRFRSKRQFWSYIGLAVITRSSADYRLVDNRMQKHRQAAQNRGLNRNYNHRLKSVFKAAALGAAHSEAYREYYERLVTAGSRAEQARLTLARKLAATVLAVWKSGERFAAEKVMSTA

SEQ ID NO: 304890 - protein, 346 aa, unidentified
MEHYVGLDVSLKLTSICIVDRTGKVEREGVVASDPEAIATFIKLHAPHVVRIGLETGATSTWLWTELNKMGLPVICIDARHAKAALKMQINKSDRNDAVGIARIMQCGWYKEVCVKDLDSHATKALLVSRALLVKIKRDIENQIRGLLKNLGLVIGRAKMNMFAVRAAQLAKDRSELLAAVDPLLKAREAVEQQILDLDRKVLRLARNNAQVRRFMTAPGIGPVTALCFLATIDDPARFKRSRSVGAYAGLTTRRYASGEIDWTGRISKCGDKMLRSYLYEAANVLLTRVAKWSALKAWGVKLAKRSGLRKAKVAVARKLAVILHRMWIEGTEFKWSSKEAADQPA

SEQ ID NO: 304891 - protein, 350 aa, unidentified
MTQRNKPRDAAVFGIDIGKNTFHVVGLDGTGAPIQRATFRRDTLLQFFERAARTVIGMEACPGSQWLARKLKAFGHTVRIVPAKFVKPYVKSNKNDIIDAEAIAEAVTRPTMRFVEIRSPEQVDLQALHRVRDRLVAQRTRVICQMRAFCLEYGIAMHQGAGKFKADLPRVVADKENDLSPAMRRLLTELFDDVKNLEGRIKEVTGEIEDVAAADDTARRLMTVPGIGPLAATALLAAAGRGLQFRKARDMAAWIGLVPREYSTGGKTTLLGISKRGSSYLRRLLIHGARSCLLHLDRSRDRLGSWIDGLQSRMHNNKATVALAAKMARVAWVVITKPGATYERRGPVAA

SEQ ID NO: 304892 - protein, 380 aa, unidentified
MKQTIRSFVGMDVHKAAISISVAEDGRSGPVRFIGVIPNTPEAVHKMAKQLARHGELDFCYEASGCGYGIHRQLTRLGHKCTVAAPSMIPRKPGERIKTDRRDSQKLAILHRSGDLTPVWVPDTTHEALRDLVRARVDASMHLMRARQQLLAFLLRHGRSYPTGKHWTQRHRSWLAGQTFQEHAHGIVFQDYLETVWTAQQRRDALIERISAMVGSWSLGPLVEALRGLRGIDMISAATFIASTGDLSRFESPRLLMGYLGLVPSEHSSGGTIRRGGITKTGNREARRMLIEAAWSYQYPARIAKEKAEILIRLPKKIRDIAWKAQTRLCTRYRSMIARGKKPTVVVAAIARELAGFIWAIGQEMRISMTSCQLVEAAAS

SEQ ID NO: 304893 - protein, 359 aa, unidentified
MTTTTPSPTAAGVILAIDLGRYKSVACAYDRATTAARFHTLDSTRADVARLLARHPGAVVVVEACANAGWVHDLARAAGHPVKVANTAAESWKFTHLKRKTGRDDALRLAELEAIGQLPTVCLPDPPTRQRRMLIAFRQELVGRRVACQNRIRALFAGAGLATPSGARAWAAAGLAGIERHARPLADCGADELWRGVLGLVLAEYGALEERIAEVERRLDALAESDGATALLETIPGVGRRTAEAVAAHLGDARRFASAKQVGAYAGLVPRQYQSGVTDRKGKITRRGPRLLRKLLVECAWCTLRYNPWARSVYARLTGGGQARKKPAVVALARKLLVRCWAILRTGQAWREPEPAAAT

SEQ ID NO: 304894 - protein, 404 aa, unidentified
MWYAGIDWADTHHDALVIDEQGHQVGSLRIAHTPAGMNQLNTFLERIIGAAAKEEMACIIETTHGLLIASLLEAGWPVYPVNPRTVDRKRAASGAKTDLIDAYLLAKTGRADLADLHRLTPDSAKVAELKQLTRDQQTLIQMQTRLVNQLTACLKAYYPVALDLFSKLQQRSTLVFLQTYPTPSAAMAASREQIMHTLKSTRHPHASETAQLIVDRVHQPQLVADAVLTRTKSRLMLVLVNQLLPLLEQIAQYDKEIETLFLTHEDHEIFQSLPRAGKQLAPRLLAEIGDDRTRYQDAGSLQKLGGTAPVMYESGKYSKAHRRLGCIKPLRNTLHQFAWQTTQSEAWAMAYYQRKRAEGKSHTVAVRALANVWVRIIFAMWFTRTSYDAATFERAQQQHAPRAA

SEQ ID NO: 304895 - protein, 412 aa, unidentified
MLFVGDDWAEDHHDVEIVDDTGQVLARRRLPEGLDGVTRLHALIGENTPAEWADLEPDRAAAMVKVRIETDRGPWVAALAASGYEVFAINPMSVARYRERHSTSGAKSDAADAHLLAEIVRVDRAHHRPLAGDTAEGEAIKLTARAHQSLVWDRTRHVLRLRSTLRDFFPAALKAFSDLDAPDTLELLARAPGPDQAARLTKSRIIAALSRAHRRHVETKATELAAILGEDQLRQPPAIQSAYAAVVTSQVAIIAALNTQIDQLGTVVAAHFGQHPDAEIYTSQPGLGTILAARVLGEFGDDPHRYRDAKARKNYAGTSPITRASGTRRVVLARYARNRRLADALQQWAFCAMRGSPGARTYYQQLRARNIGHQGALRQLANRLVGILHGCLKTHTRYDEHTAWAHLRTAAA

SEQ ID NO: 304896 - protein, 328 aa, unidentified
MRDQYIGIDLHKAFFQACAVTPAGERMWEGRFPRTPAGLEALASRCTPQTALAVEASTPTWHFADAMAGVVGDLRIVDPLKTKLKAGYAAKTDRLDARRLADALRRDSVVGIYHPPLAIRELRELCRMRCALVHVRTALINRLRAVLLRQGVADARRLAKTTDDGWVETLELPPRAAASVAGLRHVLAIVRSETARVETDVRQVADADAIAISLQQMTGIGPVLALTIRAEIGDIDRFPTGAQLASYAGLVPRVDMSAGRYRHGRITRRGSPWLRWALVEAALHGTKRADRVGRWGRGLAVRKGALIARVALARVLCEEIHRRWSRIA

SEQ ID NO: 304897 - protein, 321 aa, unidentified
MYKYSEIFGVDISKDVFDVVNSKGDYYQFSNDLKGFKAFTKKLTKETLVVMEATGYYHYCLAQYLYEQGYLVSVVNPLSVKRFIQMKLSKIKTDKSDAKAICEYGSFNEVPLYTAKDESQAECLQLIRLMDIYLKQRTMMKNKIHGEKTLGIPSKSVYRSLNRSLKSIKKEISLLEDRLNLLVKDHQQKQLTLLKSIPGMGVKTALMLIIMTDGFNRFENSKQLCSYAGITPTIRHSGSSVRGRSRISKMGNQKMRNLLFLCSFSACKYNKGCKAIYERIVSKGKSKKLALIAVSNKLLKQAFAIAKSGLPYDENFVSLLK

SEQ ID NO: 304898 - protein, 371 aa, unidentified
MMNATTFAGLDVHARSIKAVALDVVTGEVRSATFGYDACAVAEWIRSIDPGARCVYESGVTGFDLQKKLSSLGVDCVIGAVSKMIKPAADRRRKNDRNDAEFLARMLSVGNVVEVWVPDDECEAARDLVRALDDAREDLKRQKQRLSKFLLRHGLVFDERTPSGQRKGNWTGAYWSWISSISFAEKADNDAFAFYVDAVRQAEEDKRRLEKLVADEASRPRWKKRVDSLRCLKGIDVMTAADIVFEAGEFARFRNARSFAAWLGLTPSEHSSGEKVAQGGITKAGNKHLRRVMVEAAWHYLNASPHSKGPAPGQAPDPAARRHASKGVRRLVGRRAALLERGVHKNKANVATARELACWCWAVGSMAEGAR

SEQ ID NO: 304899 - protein, 449 aa, unidentified
MREPQEIEDEEHEQTWERVAAIDVAKASGMVCTRVAHPSRPGRRLTKVWEVPATTGAISELAGQLAGLGIQKVTVESTSDYWRPFVYLLQAGGLSVQLVNAREVKNVPGRPKTDRLDAVWLAKLTERGMLRPSFVPPAEIRRLRDYTRLRADLTQERARHYQRLEKLLEDALIKVSSVASKLDGLSVRDMLEALIAGERDPAVLAGLARGKLKAKHGALAEALAGRFDDHHAELARMLLDQIDALGGQIGTLTTRIEELLQAIPAAHGVDADGTTGPGAGSGPDAVVLPAVARLDEVSGIGPGTAQVIIAEIGLDMGVFPTPGHLVSWAKLSPRTLQSGATRRAGKTGKGNPYLKGVLGEAAAAAAKTDTFLGERYRRLVKRRGKLKALVAIARSILVIVWHLLADPTARYHDLGAGYYASRIDKDKKARNHIRQLQALGFAVTLTPAA

SEQ ID NO: 304900 - protein, 408 aa, unidentified
MLFVGDDWAEDHHDVEVQDEHGRAVRAARLPEGVDGMARFHELVAGFLPDDGKPSDVLVCIETDRGPWVRALIAAGYQVYGVNPKQAARHRELMSLSGAKSDKADAHTLADMVRTRRHQLRQVAADSDLAEAVKVVARAHQTLIWERTRHTLRLRAALRDYFPAALSAYQPLTLTGSDTLELLAKAPTPAAAAKLTLAQISAALKRARRRDIPAKATAIQQALRAEHLGQAEVVATAYAATVRATIAVLQTLNAEIRTLDSEVEAHFGQHPDAEVYLSQPGIGVILGARVLAEFGDATGRYADAKSRKNYAGTAPITRQSGKTKTVHARFVHNDRLVDALHMQAGAAILHDPAVRTYYDELRTREIGHNAALRQIGNRLVGILHGCLKTHTHYDQTTAWAHRAQPLAA

SEQ ID NO: 304901 - protein, 370 aa, unidentified
MAKSTPLFVGLDVHKDSIAVAHATGDRSEAPVFVGAIGTRQADLDRLIRRLQGKAPELRFVYEAGPSGYGLYRYLTGKGLACDVVAPSLIPRRPGDKVKTDRRDAVELARLSRSGDLTAVYVPTVEDEAIRDLCRARDAARVTLKDAKLRLKAFLLRLGLHYVGRADWNAAHKRYLAKVVCPTPAQQIVFQEGVRAVDEQVDRLARIEAELQELAPHWRRYPVVQALQALRGVQWVVALTVVAELGDLTRFDNPRQLAAFVGLVPSEYSSGTARRQGGITKAGNGRARRVLVEAAWASRHPAKVSLHIQQRIDQLPKALQDLGWKAQVRLCKRYRRLAARGKHPNVVVTAIARELIAFMWAIARAMPTRA

SEQ ID NO: 304902 - protein, 390 aa, unidentified
MAATHKIQSTSAVEPVLYLALELGWNSWTLAFTVGMGQKPRLCTVAGRDTEALLSEVKKAKRRFGLPVQTRVLSCYEAGRDGFWLHRFLLADGIENHVTDSASIEVNRRKRRAKSDGLDVTKLLEMLIRWHNGESKVWRLVNVPSAENEDLRQLHRELLELKGERTEHVNRIKGLLASIGLNIPVNAQLPVHLENLRQWNGEPVPPRMRERILREFERWQLIERQIDELELERTQQLRDDQTPGVQKMRQLLKLQGIGANSTWILVREFFGWREIHNGRELGSLSGLAPTPYDSGGSRREQGISKAGNRRVRSVLIELGWGWLRHQPGSELSKWYQRRFGLGNRRLRKVGIVALARKLLIALWRYLETSEPPPGTRLKGQKLTVHLKRAS

SEQ ID NO: 304903 - protein, 312 aa, unidentified
MNWVGVDTHKETLALYKDGKFKEFKTNEKGFQSAIQWAGTNSKWAIEGAYCYGKPFTAHLIRNNCEVYEVNPLLTKTWRKVLSISNPKNDYGDAKVISLNANSARLQKISLETIELKEKITARDHFVKDRTRVINAIKMLFSTRGSYLPFKDLTTIKAGKWISKQEDLIIKNYGKLLNDLNQAINEFDKEIEKNLPPKAQKLKQLKGVGDLTAAIIYTETKGKILSEESLASYAAIAPVESSSGKSKRHRNNKTGNRKLNSAFYRISLHQSIWDEKGKIYFEKKLKEGKTKRHARKCLARQLVRIVFNLLKD

SEQ ID NO: 304904 - protein, 420 aa, unidentified
MRSGDKEKERIHIYNKRNICFVGVDMHKEKHCAVVIDCWMEKNGEVNFENRPSKFPAFVEDIRKICGTKDFVFGLEDTRGFGRNLASYLTGRKFEVKHVNPVYTSAVRLSNPIVYKDDSYDAYCVARVLRDMLDTLQDAKHEDIYWAIRQLVKRRDMIVKNNVMNKNQLHSQLSYSYPSYKKFFALVDGKSALCFWENYPSPEHIWSTTPEKIYETIKPVHQALKIERIHAIIAMIKKDGNTHKGYQEERDSIVRNIVKDIKNNQELLKDIEEQLRKLLPQTGYKLQTMPGIDIITEAKLISEIGDINRFPDSNKLARFMGLAPVHFSSAGKGRDERCRNGNRELNAIFHFMAIQMVVISPSGKARHPVFREYFEQKVKEGKNKPQALICIARRLVRIIYGMMKTKTEYRPYEKQEEKRQ

SEQ ID NO: 304905 - protein, 391 aa, unidentified
MFLLGIDIAKLNHVASCIDSSTNEIVFSNFKFKNDFIGFSTLLDKIKTFDTKNLIIGLESTSHYGENLINFLFKQHFKVALINPLQTSHLRKANIRDAKNDNLDSLNIAKSLIFAKLNFISEKNINCFSLKKLTRFRSSLIKQRSKAKIQLISLLDLLFPELQYLFKSKIHSKAIYSLLKKYPSAEEIAALKDDEISNLLYASSKGHFKKEKSIELKSLAKTTVGIKDTSISLHVIQLIELIELYDKQIKDIVTKIADTVDKLDTKLLSVPGISIIACAIILGETNNFNNFSDSTKLLAFAGLDPKIRQSGNFNASSCRMSKKGSPYLRYALIFTAWNIVRHSEKFNKYYCLKRSQGKSHYNSLGHVAHKLVRVIFTLIKKNIVYPEENLE

SEQ ID NO: 304906 - protein, 343 aa, unidentified
MKHIGLDTHSTRTVATVVNDRGKKILRREIPTRELELIDFMQSIPGPKRVALEESQVADFVARMIMPYATEVIRCQPQHNRLISESEDKCDNQDSYSIAELLYLNKLKSVHHPPWEYRQLREAVRAYWTSSRDLARAKSRLKACFLFNGIHCAGEKVYSQRYRKKYRERFHGRSGNLNLLDLHYEALDSCRHTKAGHVRVLRNLAKPLHEELERLQSIPGIGPIGAYTLLAYLENGWRIPNKRKLWQYCGIGVRRHESNGKGYKGASRKGNRYLKNTLMTAAAAVAARRTGDNALAQRWHAGLAGGVAADRLRRNLARKIAVLAQYVLRFKEEYNDERVVTTP

SEQ ID NO: 304907 - protein, 317 aa, unidentified
MNTLNNQNEINVGVDTGKTQLDIYIRPLDIYFTVENNDGGIKHAIKTLKKHPISRVTIEATGRLEHPFIMACAQANIPFVVANPVNIKRFAGAIGQKAKTDKLDAQLIAHFGDAIKPPLSSLKPEQMRLMSDLLSRRRQLMDMQTMEKNRSQIMPKTISSLIKPILTALKNQIEKVDLKLQKLIKECDEYKVKNDIIQSVPGVGNVVAFNLLSDMPELGCVNNKEAASLVGVAPFNRESGAYQGKRMIRGGRPKIRTAMYMAMMSAIQCNPKFKAIYHRLVAAGKPKKVAIIACIRKLIVIINSMVRDGVMWDPKMV

SEQ ID NO: 304908 - protein, 364 aa, unidentified
MQELTHIGLDVHKETIAVAVLRPGSGECEERTIANTPEALRRLFSRYPDRAGLRTCYEAGPTGYDTWRLLAELGVPCEVVAPSLIPRRSGAHVKTDRTDARNLARLHRAGELTAVRVPSPAEESLRDLVRAREDLKDDRRVARQRVKSFLLRYGKRPPTGSGRWGVRYELWLQALRFEEPAAQAAFDHLMGAASVRGAQLEAIDRQIEEAALSGPLAGDVARLRAFRGIDTLTALTIITETCDFARFPAAAGYMAFTGLVPREHSSGAVRRQGSITKAGNAHVRRVLIEAAWGYRHRPAVRGGLAARQEGLPPELLAYSWKAQQRLHGTYRKLAARRGANVAAVAVARELSGFVWGAMTGRTGA

SEQ ID NO: 304909 - protein, 341 aa, unidentified
MKYVGVDLHKQTISVCVMVKAEEKRVVEQRRSLRCGDTESIRRFFERLGSFRMVVEATSSYEWLFLLIEDLADRCVLAHPKKLRVIAESTQKSDKIDAKVLAEFLLLDMIPEAHRPSPRLRQYRVLVRHRHAVQRGITRIKCKLRHKLAFYNADIASLFTARGQEHLAKLAMSHADRFECDALWEQLSLLHKQLAAADKELKAFAQTAPAAEREAREVLDTMPEVGPVTIDVVLSETGDVRRFRSAKRVVAYAGMDPCFRESAGKGKQLHISKEGSRLLRWALIETAWRLVGKSARWRRLFDRLRVTTGHKKKAIVGVARRVLCVMYAMLRDGAAYRAAAV

SEQ ID NO: 304910 - protein, 437 aa, unidentified
MVTRVIGIDLAVKGKHTAAIYDPATRTFIAKRLHFRTRPDEMENILQRARQGAPSDVQIAVMLEATGMSWFPVGLFFHRHGAKVYRLNGRATKAQRKVNWPNGRSDRLDSMTLASMYAALPSRRLIRWKPPSADLMALQRMVRELQRLVEHQTAIILRLQALDQWAWGGWHGLIPKPYQQWVRSNFYDPWEVLAHGTEALVALLRKDYPDAQVDWIPKWVARAQIMQALYANPETVGYKYLSDLSKRELEHLQWLSEQRTKLVEEEFLPLYRRLFPDDVLLSFQGIGERSAAIYHAFIGDVSRFPNGQAFAGWTGMVPRSNQSGESQSPHMPLSKRGPNLIKNTLYQNAEVARQWDVQLAKVYYTQMVKYGKHHTQAVCAVASHLARRIYAVLRDRKPYELRDLKGRPISKKDSRALILKEFQVPESLRKQRRKHRR

SEQ ID NO: 304911 - protein, 337 aa, unidentified
MIVMGLDQHRGQITAEWIETDTGEVSRARVSPAHREPVRRFFGRFRGAELEVALEATTGWRFVVEELRRIGAGVHLAEPAETAARRGNKKRAKSDRADARHLRELVMIARLPESWIPPDHILDLRARVRLRHTLSDQRGEWQQRIQAVLYHHGCPQRRDLMTREGRAWLEGQALPETAREQVTVAVAMIDALEIQIAPITKQLRAYARRQVGCRALIAHYGIGELTAVTILAELGDCRRFSSSRHAVRYSGLDITVHQSDQRRAPGHLSRQGPPALRWALFEAAQTARRTGSPDRDYYTQAAERLGANRACLAIARKLLKRSYHTLRELGEQALQPA

SEQ ID NO: 304912 - protein, 344 aa, unidentified
MQIVGCDFHPSFQQVAILDISTGEVRELKLVHAGGEAERFYRELEGPVLIGMESTGNSLWFERLMERLGHELWIGDAAQIRASYVRRQKTDKRDAGHILTLLLEKRFPRIWVPSNVERDQRQLLLHRHRLVEMRTRVKTELQHLAMNQGMQKQRGLWSVRGRADFEKLPLQGWTARRRADLLKVLAMLEAQVVDLDQAVDTVAYANSHARLLMTQPGVGPITALAFVVTIGDVARFKRGKQVASYLGLIPSERSSGSKRRLGAISKQGNVFLRTMLVEAAQSAVRHDEEFKKEYAHRCHSKPKGVAKVAAARKLAVRLYWMLRNQTPHCRVVHNEGSPSHSLVG

SEQ ID NO: 304913 - protein, 465 aa, unidentified
MKHNHRRHAAQTRRTSPSILERLQVDVAGIDCGAAEHFVSVPPDRDPAPVQAFPTFTADLQRLADWLLACGITSVAMEATGVYWIPVYDILEARGLTVLLVNARHVKHVPGRKSDVQDCEWLRELHSVGLLRGSFRPTAAILALRALLRHRDTLVKSAGTYVQRMQKALIEMNLLLPRVVSDITGRTGLLILRALVAGERDPHVLAQHRDPRCKATATEIAAALTGHYRDEHVFVLTQNLELFDMCQTQLAACDTAIEAQLATLTATTAPPPTPLPRPRVTRRHGNEPAFDLRTPLHHLTGADLTQIDGIAPYTALKLLSEIGTDMSRWPTEKQFTAWLTLAPQNKISGGRRLSSRTQPSANRAAAMLRMAALSVVRGQTALGAFYRRLAVRIGKPKAITATARKIAILVYRTLRGTLTYQDPGAPTYNARQRHRLLRRLRTQAETLGFTLLNRETGEVLEGTVS

SEQ ID NO: 304914 - protein, 382 aa, unidentified
MLDFWNQKLGEITFENKPSEFSKLTRKVSRFVTEGKEPVYGLENAYGYGRALAVWLIEKGFAVKDVNTALSYAQRKSVPMYQKSDSYDTEAVALVLINMLDKLPDAIPNDKYWTLGQLVNRRDNICTHLHRLKNQLHEQLCMAYPSYKRFFSDISRATALYFFTEYPSPEHLQGKTAEELAEELRPVSYNNCSVKRAERILSLVRADGDTKRDHQVSRDTITRSLVSDLEHYRVQLEEVNQAIEMLMPEFDCILMTMPGIDLITAANMLSEIGNISRFSSAAKLAKFAGIAPVNFSSAGKGKDMCPKQGNRRLQAIFYFLAIQMIQVSINGTPRNPVFREYYLRKLEDGKNKQQALICIARRLVNIVYGMLKNHTEYREPGQ

SEQ ID NO: 304915 - protein, 341 aa, unidentified
MKIIGCDFHPSYQQIAMVDTETGELWEGRLEHEQGEARRFYQALAGQMVRVGIEAVGNSQWFEQMLAEMGHELWIGDAAQMRRLVVRQQKTDRRDAKHILDLMVDGRFPKLWVPSQQIRDVRQLLRHRQKLVEIRTQVKNQLQHLALNQGVRRKRRLWSVQGRAVLEQLPLQGWTARRRSDLLAMLDRLQEQVGELDGAVRAEAEQRPEVRLLMTHPGVGPVVGLAYVLTIGPHTRFERGKKVASYLGLIPGEHSSGDRQNFGPISKQGNTMMRTLLVEAAQTAARFDEELRRAYGRLKAKKHSAPAKVMVARKLAVRMYWMLRENKSYTELYTRRPVARM

SEQ ID NO: 304916 - protein, 332 aa, unidentified
MHGPVQHCSLDLKGGVMPETFIGLDIAKDHIDVGIRPGDETWQVTNTPEGIAHLATRLEEVAPVCIVLEASGGYEHEAAAVLGAASLPVAVVNARQVRDFAKATGQLAKTDRLDALILARFADVVRPEIRPVLEGEAEELRTLLVRRTQVMHMLTAEKNRLKQAGHAVRPHIEAHIAYLEGQKADLDRELGGRIKTSPLWREKDDLLQSIKGIGEVCSRTLLGALPELGTLSHKQIAALVGVAPFARDSGTLRGKRTIWGGRKKVRHALYMAAVCAATHNPVIAAFYQRLLARGKPKKVALTACMHKLLLICNALLRSRTRWNPSHQTPVAA

SEQ ID NO: 304917 - protein, 412 aa, unidentified
MDTIVERCAGLDVHKDTVAACVRFPGASGERVQEIHTFGTTAAELLALRDWLAAHRVSLVGMESTGIYWRPVYYVLEDALECWLLNAGHLRNVPGRKTDIKDAEWICQLVEHGLVRPSFVPPKPIRELRNLTRYRKAQIEERTREAQRLEKILQDAGMKLSSVATDILGVSGRAMLSALVEGTRDPEILSELARGQLRKKLPQLKEALAGRFGAHHALLVGTILSHLEFLDEAIEHLSAEIEQVIAPFEAEAELLRTIPGVARRTAESLIAEIGVDMGRFGSSARLASWAGMCPGNNESGGKHRSGKTRKGSKWLRTALIESARAASRSKGTYLSAQYHRLRGRRGSSRATVAVGHSILVAAYHILDRRQPYTDLGADYFVHRHDPQRHANRLMRQLLALGYDVTLEPVEAA

SEQ ID NO: 304918 - protein, 349 aa, unidentified
MSQTLNTAIAVIGIDIGKNSFHVVGLDARGAIVLRQRWSRNQVEARFANMPPCLIGMEACVGAHHLSRKLHGFGHDARLMPAKYVRPYSKGQKNDFRDAEAIAEAVQRPTMKFVATKTADQLDLQALHRVRERLVSQRTGIINQIRAFLLERGIAVRQGQRFLRAELPRILAAPPNVLSPRMVRVIEDLAGDWRRLDERIEGLTGEIEAVARQEAGCERLMSVPGVGPIISSAMVAAIGSGDAFSKGRDFAAWLGLVPRQMSTGDRTILGRISKRGNRYLRVLFVQAAWVVLIKPKSWERHGLKPWLEAAKKRLHHNVLAIALANKLARIAWSVLARGRVFEASKLQVA

SEQ ID NO: 304919 - protein, 339 aa, unidentified
MNEVTVIGIDLGKHSFHLHAQDAAGRMVFRKKLSRQQLLRTLANVPSCRVVMEACAGSHWLARQLAGMGHEPRLISPQFVRPFVAGNKNDFGDAQAICEAACRPSMRFVSPRNEEQQTVSALHRLRERLVRERTATVNQIHGFLLEFGISLPRGAALMSRLPTVLDHETLPPRLVAVVGRLRAQVHYLEEQLRQVEQDLKASLREDDKSRRLLEIPGIGPITASALAVELGDARQFANARQFAASIGLVPRQYSTGGKPTLLGISKRGDRNLRRLLVQCARAVMQHTASRTDALSLWVKTLSTRRHSNVVACALANKLARIAWAVLARGTHYQARALTT

SEQ ID NO: 304920 - protein, 348 aa, unidentified
MSVTMIGLDTAKSVFQVHGIDEAGKMVLKRKLRRSEVIPFFEKQEPCIVFMEACGAGHHWGRVLTGLGHEVKLIAPEAVRPFVKKGKKNDPADAAALCIVGPRPDTKFVPIKTLEQQGILALHSARSMLVKHRTATANAMRGTATEFGLTVPKGIEKLDELMELVDADEGIPERARQAIEELRGHCVEIEGRVEKLEQQIVEHARKDENARRLATVPGIGPITASLISATVGDNIGAFKSARHFAAWLGLVPRQYSTGGKAKLGHITKAGDKEIRKSLVMGATSMAWRAPQWNSAAGVWTKRLLERRAFRLVTVALANKMARIAWALMTRKEVYHAKGRVAAAAEAVA

SEQ ID NO: 304921 - protein, 367 aa, unidentified
MKKISTAAAKQTRNLQDQKLTIGLDLGDRTSWYCVLNGAGEVVLEQKLSTTPKAMKEVFGGMPRSRIALETGMHSPWVSRLLSELGHEVIVAHARNVRLIGESRKKDDRLDARTLARLVRIDPQLLAPVQHRSAQAQAHLMVIRARAGLVRARTSLINTARGLTKSYGERLRGCHPRNMNPEKAQGLSPELRAALEPLLGEIESLSERISEYNERIEHLAQTSYPEVARLKQGKGVGTLIALTYVLTLEDAHRFGKSRDVGCYVGLQPGRRNSGQSEPQLHISKEGDPYLRTLLVQGAHHILGPFGADSDLRRWGLKLAERGGKNGKKRAVIAVARKLAVLLHRLWVSGEAYEPLRNQREVALPAAA

SEQ ID NO: 304922 - protein, 359 aa, unidentified
MKIVGCDFHPAWQQVAFFDPESGEIAELKLLNGDGEAERFYRELEAPALIGIEACGNSQWFIELAERLGHVVWVGDAAQIRASYVRRQKTDRRDAGHILKLLMESRFPRLWTPTAEQRDLRQLLIHRHKLVEIRTRIKNGLQHLALNRGVQKGSRLWSVRGRAYMEKLPLAGWTARRREDLLRLLAELDRHVDELDAAVKRTADEHPQARLLMTQPGVGPITSLAFVLTIGDVSRFRHSNQVASYLGLIPREHSSGGRQRLGAITKQGNGLMRQLLVESVQSVNRLDEGFRRQYQARCHHKARGVAKVAAARKLAVRLYWMLRQNVGYPEIALIESSPAVPLAGKRHAEKLSGRSRTQQ

SEQ ID NO: 304923 - protein, 390 aa, unidentified
MHRAAEQPQAPAAVRTDLGAIFVSLELSRSAWLVTSLSPGSGEKMSKHQVRGGDIAALLARFAELKAKALVRTGKSFPLVVIQEAGLDGFWIHRALVGEGIESHVVDPASIATSRRRRRAKTDRIDGEALVRALLAHKRGEPRVCAMVRVPTPEEEDRRRLCRELKSLIGERVRHVNRLKGLFFAQGIGDYEPRRSDRRERLDGLRTGDGRPLPEHLKALARRELDVIELLNAQIEEVKAGRDALLAAARATASPPAPVAMLLGLKGVGPGFAGALWSEGLFRHFDNRRQVAAYAGLAPTPWQSGRVNHEQGVSKAGNPRLRAVIVEMAWLWLRHQPDSALARWYRDRVRRDGGRMKKVAVVALARKLLVALWRYVTAGVAIEGAAMKSA

SEQ ID NO: 304924 - protein, 441 aa, unidentified
MEVVHPHAAGIDIGDTIHAVAIPLGRDAQSVRTFGAMSCDLEQIVAWLEKCGVDTVAMESTGVYWKPLAILLIRHDFEVYLVNARHVRNVSGRKTDQGDAEWLQQLHSCGLLKSSYLPDDIQESLRTLVRLRRTLTEESSRFVLRMQKALELMNIKLHTEISDLTGKTGMAIVEAIISGERNAVNFLQFVDPRIKADREDLVKSLQGNWRDEQLFALEENYTCYKFFLERIAKCDRAIEAKLQEFAAAENEGELPATGGEKKDDKKTLKKKNKNAPKFNVGAYLKSILGVDVLAIYGLNDVSAMEILAETGTDMSKWETAKNFIGWLNLCPNNKITGGKLVSSKLMKKKANPASQAFRKAANACQRSDHWLGDYFRRMKAKGGNKYAIVATANKIATIYYKMVSEKIEFNPPDLNEYQEKRKNAKIAYLERALRSLKKDSA

SEQ ID NO: 304925 - protein, 384 aa, unidentified
MIYVGIDIAKTNHYASIVNYSTGEVLESPFLVTNNKQGFDLLYSKIKDFNKEKVLIGLESTAHYGNNLIFYFHEKQFKLGIINPIQTATLRKTRIRKVKNDKVDSTLICEALSLGYYNLLSDYDIKLLEIKSLCRFHKDLKDKASEAKIQLKTYVDQLFPELNSFFKDNLDIKTAHELLKLYQSPEDISKVNLTKLSNLLIKSSRGKYDKSRAIELKTLASNSVGINNYALSIQIKMTIELIELLESQIKDIEKQVSNFIKKSDNVITSIPGIGDMTAAIIISEIGDINRFNNPSQVLAFAGLDPSVKQSGNFNASSTRMSKRGSSILRYALILAANNVQLNTKTFNDYYNSKRLQGKLHYNALGHCAGKLVRNIFYMLKLNLD

SEQ ID NO: 304926 - protein, 323 aa, unidentified
MQGKVSFQEDAMPVVYAGVDVSKEWLDVHLHPLGESRRFCNDKTGIRQLKRLLARHQPKSIVMEATGKFHRPAHRSLWLDGFAVAVVDPLRARMFARACGYLAKTDRLDARFLALLAESLRPPADTPPSPHVEALQELVNARSAAKCDITALQNRSKTATTAFLRGELNRLVRRLEQHVERLDKEIERRVGEDPQLSRRAEILTSIPGIGRVTALALMAGMDELGSCSGKQAAMLAGLAPIANDSGARTGRRSIRAGRPAPRRALYMAALSACRYNPALARFADTLKAAGKPAKVILVAIMRKLLVLANCLLAHDRIWTPNPP

SEQ ID NO: 304927 - protein, 423 aa, unidentified
MKFKQHDAQNQRIERITSNHLVVGIDIAKETQVARAVTYRGIELGRPCSFKNDDVGYQKLLSWVKSLQKQHNKTGVIIGMEPTGHYWLNLAWWLLEQRFEVVTVNPYHVKSNKENRDNSPTKSDLKDALVIADMVKNGYYSPLRLPTGNYQALRVLMSDREFVIKQFISIKNQIHRWLDIWFPEYHRVFKDWSCKTSLVTLRLFPLPSELKILSPEEIYAGWKPHMKRRASISFAKALVEQAQQSIAQNVAPEQVKRSLLFLLDQYERLSSQLEQLEQEAISLMKDIPQAQSLLTIPGIGKITIAGILAETGDLSMYRHGQQVLRLAGLHLGEDSSGKHKGQVRITKRGRSGLRKFLYLAVLHLVVNNEEFRTLHHYYTRTKKMKKVHSIIKLCGKLARILVGIVRQEQTYIPEKVVTATTAA

SEQ ID NO: 304928 - protein, 367 aa, unidentified
MSVQGMSVGLDVHARSVVACALDGWTGELTEARLTPDYAELLAWLGRLPGPVAVTYEAGPTGFGLARFLSGAGVECLVATPSKLQRPSGDRVKIDARDARHLARLLHLGEVVAVTVLSADTEAARDLVRAREDVRGDLMSARHRVSKLLLRQGIVYSGGKAWTGVHDRWLRAQKFASPALALTYETTCEAMLAAVDRRDRLDAAIAVMAAQSQFTPVASRLGCLRGVSTLTAFGLAVEIGDWHRLDGSRIGAYLGLVPTESSSGSSRSQGGITKTGNGHPDGCWSRRPGTTASPTGIRGSTCADGGTWRARPHEPGARRPTGGCTPAGTRSTSARIGPSWPTPRSPASSPAGAGRWQCSRTADPPAR

SEQ ID NO: 304929 - protein, 363 aa, unidentified
MDVHTTNYTLCCYTLEDDRMCHLQQIAPDYRLILKYMDQVRRLYNNDVEFLCGYEAGCLGYSLYHQLTAHQVRCVILAPTTMGAVLGIRKVKTDKRDAMLIAKCLAFHTYHPVHIPTPEEEQVKEFIRMRDDHKLALKRIKQQISAFCLRHGFHYTATKSKWTQAHWKWLKSLKPDGLHQETLNEYLLTCSSLSDKLERLDRRIEELAAQEPFQERVRQLTCLVGVKTHTALSIIVEVGDFNRFPTAGKFASFLGLTPGEASSSDKQNRFGITKAGNTHVRRLLVEAAQSYARGQTGRKSKDLKARQAGNKEQVIAYADKGSERLRRRFRQLLYKGKQHNVIKTAIARELSCFIWGMMTDRIA

SEQ ID NO: 304930 - protein, 350 aa, unidentified
MKIIGCDFHTRYQQIAMLDEATGELIERRLDHQSGEAQAFYRDLQGAVRVGIEATGPIRWFERLLSELGHELWIGDSAKIRASEVRKQKTDERNARLILDLMLANRFPKIWVPTPAERDLRQLLWHRHKLVCLRTMLGNQLHALAMSEGLCRKKQLFTKKGRVELLHLGLGPWASRRREELLKLLAQLEPNIEELDRAVLEEANRREDAVLLMTHPGIGPVTSLAFVLAIGPIARFARSKKIASYLGLNPSEESSGGRRRLGAISKQGNTMVRWLLIEAVYPAVRKDPALRQDYQRLKFRRGHAVAKVAIARKLAVRMYWMLRSGAEYAQLVRRQGSPGATLVDASSSLD

SEQ ID NO: 304931 - protein, 343 aa, unidentified
MELYVGMDVSLKETSICVVDGKGEIVSEGPVISEPAAIAAFIKAKARNAVRIGLETGPTTTWLWHELRALGLPVICIDARHAKAALSLQINKSDRNDAVGLARIMQCGWYKEVQVKSVACHEVRALLNSRALLVKIKRDLENQIRGLLKNLGLIIGKAGGKVFRHRAEELVVEHPLLQEAVRPLLGVREIVRREIAGLTRKLLAMARDNDESRRLMTVPGIGAINALAFCAAIDDPSRFRRSRSVGAYFGLTPRRHASGEVDWTGRISKCGDGLVRTYLFEAAGVLLTRVAQWCKLKAWGHRLWKRIGFKKAKIAVARKLAVILHRMWRDGTNFIWSSKEAAA

SEQ ID NO: 304932 - protein, 348 aa, unidentified
MTLTTIGLDVAKLVFQVHGVDENSRAVLKRKLHRHEVVTFFEELPRCTVFLEACGASHYWARLLTALGHEVKLIAPEAVKPFAKKGKKNDAVDAAALCVAGSRPEIQFVPIKSVAQQAVLALHTARSLLVKQQTMLANAIRGLASEFGLVVPQGLHRLEELMVQVTAEASFPAVGRQALIVLHAQLQAAAERIVMLEEQIVVHARQNASARRLATIPGIGPITASLIAATMGDNITAFTSARHFAAWLGLVPRQHSTGGKPRLGRITKAGNTEIRRLLVLGATSMVRRAETWNSAAGIWLRGVLARRPVRLTTVALANKMARIAWALLTRNDVYRAQGRSKVAAGAAA

SEQ ID NO: 304933 - protein, 386 aa, unidentified
MSRPSNILLPAINYDHTLVLSVELSNKSWVLAAQVPGLPRTKAQRTIEPNKNALLAAIDGYRARAAAVGYTVDRVITTYEAGWSGFWLARWLVAQGVEVHVVQPSSVPVDRRLRRAKSDGIDAELLLRTLLAWLRGEPRVCSMVPIPDEADEDARRCVRERTELLSDRVGLTNRIGAVLATLGVNDYNPLLQSRRRRLAELRTGLDEPIPPNALAKIERLLARLELVLAQIAELERERDEVAAADAPDRAGKMIQQLASLRGIGVQSATVLVREAFVRHFSNGKALGSYAGLTSTPYSSGGIDREQGIGKAGNRRLRTVMVELAWLWQRYQPGAAQVAWFRDRVGSIGRRIRKVMVVALARKLLIALWRFVIDGVMPEGAVMKPSI

SEQ ID NO: 304934 - protein, 299 aa, unidentified
MQVSIIGLDIAKSVFQVHGADDAGNQLIRRQLRRRDVLRFFVNLEPCLIGIEACHSSHYWARELIALGHDVRLIPTQYVRPFRRGGKNDANDAEAICDALSRPSINTVAVKNAEQQAVQSLHRARERLIHQRTSTANQIRSLVAEEGIVCAQGIAQLKRCLHDIVSDHDSVTPLLRCLIGQFLEQLAALDQWIGELDQKIHELAKHSTVCRQLTRLRGVGPVIATAILGTVGNAHAFKNGRQFAASLGLVPGQRSSGGRTHLLGITKRGDAYLRKLLVQGARNHARGWTSRRPPKSMGT

SEQ ID NO: 304935 - protein, 370 aa, unidentified
MKSIIYVGMDVHKASFTLSCFSVTTQETFATVKISPDAKAIKKYLDGVSLSRSEECEFVCGYEAGCLGYTLYHQLTAMNIRCVIMAPTTILRNSKRVKTDRIDAENLARCLAYGGYKSVYIPTAQDEAVRDYLRMRDDHKLMLKKIKQQINAFCLKHNKIYPGNKSKWTQAHVKWLNALEFDGYLQDAFNEYMITYRELADKVERLESQIEQLAELEEYRDKVKKLICIKGIKTHTALSLIVETGDFSRFQSAERYASYIGLVPGEHSSSEDQKRLGITKAGNRHMRMLLIEAAQCYSRGVPAKKSKDLKSRQKGASPEVIAYADKASIRLRRKYIRMELVNKKKANVAKTAVARELACFIWGMMTDNIA

SEQ ID NO: 304936 - protein, 434 aa, unidentified
MNYYLGGDVSKGYCDFIILDKSKKVIEQGFQLDDTKESHTILYNILASLLKKESSSVIYAAIESTGSYENNWVKSIQKFQLTLNIHIARLNPYGVSHSSKANMERIITDQISARTVAEYLINYQPKIRFIEEDNFSTLRRQWKYISLLKKQKVQFYGQLESLVYNSFPEILTFCKNGFPNWVLELLLNYPTAERVSRARVKTLSKMPYITNEKAEILISKAQRSVASENNSTIEGIIKSIIEQIIGLDKTIASQKKMMTNSVSKENLPEVQLLTSFKGIGDYSAIGLIIEIGSVDRFATSKQLASYFGLHPVFKKSGDGTYAMRMSKKGRTSPREILFNVAFTAIRDNELIKEIYARHLKKGMSKMAAIGAIMHKILRIVYGMLKNNESYNPEKDRNDTKVVHELGQKRQIILDDIKIMIYTLQYQVVSQGREL

SEQ ID NO: 304937 - protein, 332 aa, unidentified
MLNCIGIDVSKASLNVHISKNSLDLQIGNTLRDVKKLYSKLKKLYKKELEELVFIYEPTGSYSEMLRKFCADKSIKCFIINPKQFSNYAKALGVEVKNDEVDARVLAQAITLAKPHQIKIPVYNADVEQIKELMSFYKFTTKQTAQLKGHLESLVAKDGDKFSIKELNKSIAASKEREKRIIKQVHEMIQGNEDYKRAYENITSIVGIGQIGGIALLHLFIKYPEANQRQITSLAGLNPVYKQSGSSLQTLSKISKSGSVFYRGALFMGVMTAVRYDDNFKTFYDRLKANGKHTTQAQIAVMRKMVLVAHSLYKNDQQYIKNYRNNEIKTMD

SEQ ID NO: 304938 - protein, 339 aa, unidentified
MNEVTLIGIDLGKHSFHLHAQDATGRMVFRKKLSRQQLLRTLANVPSCRVVMEACAGSHWLARQLAGLGHEPRLISPQFVRPFVAGNKNDFGDAQAICEAACRPSMRFVSPRNEAQQTVSAMHRLRERLVRERTATVNQIHGFLLEFGISLPRGAALMSRLPTVLDHETLPPRLVALVVRLRAQVHYLEEQIRQVEQDLTAALREDDKSRRLLEIPGIGPITASALAVELGDARQFANARQFSASIGLVPRQYSTGGKPTLLGISKRGDRNLRRLLVQCARAVMQHTDSRTDALSLWVKTLSTRRHSNVVACALANKLARIAWAVLARGTHYKARALTT

SEQ ID NO: 304939 - protein, 428 aa, unidentified
MNYNQNEKIAHITSQTLIIRVDIAKFKHVARAQDFRGLEFGAPCHFGNTHAHFDLFLSWINQLMKQNEMDKVIIGMEPTGHYWLNLAHFLKEKEIKFVVVNPMHVKKSKELDDNSSTKNDVKDAKVIAQLVKDGRYAEPQIPQGVYAELRVARKIRDLLSVDLQMLQGQIHNWLDRYFPEFLTVFKDWEGKAALQLLKLNVLPQELEYISDQDILTHLRKVVKRAVGLRKIHELKRAAKDSIGIREGSKMAKLELRTLLEKYELVVERFEELDSDIEDLLDQIPGVQQMLAITGIGKDTVAGFFAEVGDIRNYSHPRQIIKLAGLSLKENTSGKHKGLTKITKRGMKALRALLFRVAMPLVAKNAAFKALHQYYTTRQSNPLKKMQSMIAICNKLIRILFAIGTKQCEFSEERMLKDIPHMAQLRAAV

SEQ ID NO: 304940 - protein, 371 aa, unidentified
MIVIGVDTHKRQHALSAVDEGTGRVRGKRQITAQDSGHLAAVRWARELDSERVWAIEDCRHVSRRLEQALIAAGERVIRVSPKLMGASRKGEREPGKSDEIDSLAIARAVVREGADTFPVAYLDEQAMRIRLLSDHRQDLVAERTRMQTRLRWHLIDLCPELEAKIKPRSLSRTSALERLERQLRRLPACERLRVARDELSHIRRLTRQIDALEQELEALVKAHRPWLLRETGCGPLVASVLIGRTAGAQRFRSGSAFARQAGACPIPCSSGQTQAYRLNRGGDRQLNSALHTIAASRARVDPRTKEYLARKHAEGKTKKAALRCLKRTLANHFHQLLALPPLTASIPAEPTTNRKTQQITAAPTPMICIT

SEQ ID NO: 304941 - protein, 472 aa, unidentified
MPPSSSQPSVRGVEASPVVSPRDPISGFGELKPNAAGIDIGASSHWVSVPPERDAQSVREFGCYTPDLEALVAWLRGCAIETVAMESTGVYWIALYELLEREGFEVILVNAQHLKHVPGRKSDVLDCQWIRQLHSYGLLAASFRPAEAMCVLRQYIRQRDTLIQSAAQHIQRMQKALTQMNLHLHRVLSDLTGLSGMRILKAIVAGERDPETLAALKHERVRKSEAEIAAALSGTYREEHLFVLSQELSLYETYQQQIAACDAQIETYLNHLPSPLPPDEQPQPKVVRKAVQNQPTFDLATHLHRISGVDFCAMDGLGPLTVQTILSEVGLDPTRFGSAQRFASWLGLCPGSAISGGKRKSSKTRRVSHRAANAFRIAAMAAGKSDSAIGAFFRRLKARLGAPKAITATAHKLARIFYHLWSTGQSYDDVGAEHYEQQYRQRKLKYLQKQAAALGLELSKITQEETLTHDVS

SEQ ID NO: 304942 - protein, 307 aa, unidentified
MKLYGGMDLHSTNVVTQLIDEQDKVIYRKKQGCDLEQIVRGLETLKDDIEGLAVESTYNWYWLVDGLIDAGYCVHLVNTAAVKQYEGLKYTDDDSDAFWLAHLLRLGILPTGYIYPKQSRAVRDLLRKRGQLVRQRTAHVLSIENLYTRNTGSRPSCNAVKALSQEQIQQQFGDPNVALAIDSNRVIMTALDQQIKVLEQAILKQAQLDDRYRYLLTISGVGQVLALTIMLETGAIERFAQVGNFTSYCRCVGSEKLSNGKKKGHGNSKNAKSSRVVALKAVAHKLARASFYVMRDQVPFDSAKLFM

SEQ ID NO: 304943 - protein, 334 aa, unidentified
MPHGKLLMESLLETKASTIVDFIQGLHGTLSLTFEEGTSAAWLHDLLKPHVSRLVVCDPRKAALLKEGNKSDRIDARKLAELLRTNQLKAVYHEEHGIRALKELGRSYLTITKDVTRVMNRIKALYRSWGIPCSGTSVYAPRHRAEWLAKIVEPGVRVRAEHSYQQLDSLQPLRLQARRELLRESSQHPAVKLLRQIPSIGPIRAALLVALLQTPHRFRTKRQLWAYSGFAVETHDSGEYRYVRGKRQRNRERISVRGLNDNHNKDVKNLFKSAAISASTRPGPLHDCYVARVEKGMRPTMARLTLARKIAAITLTIWKKGVSFDPKHLHRQAA

SEQ ID NO: 304944 - protein, 389 aa, unidentified
MTYCVGVDIAKYEHVASVTDSSSGELIVDSLHFDNSLKGFKQLLSSLSKLNKDKVIIGFESTAHYHQALFSYLTGKHYRCYLINPLMISRFRSVSLRDSKNDNIDSRAISQFLLLEHRRLIEEEFRMNELKELCLQRSFLIESSTRLKIKLVSYLDRVFPELCKTIPDGTLYTKGVYAILKECPTAYRISNTRIDHLINVAKKASNGKYKESMVRKIKEAAASSIGFDSDALAIKIRQSIESLEAYKRQIDEISAAITDHESVIHSPLFQIKGINAIEIGYIMSAIISIDRFDSPKKLVAYAGLDPKVRQSGTWSASKTRMSKRGNALLRYALIWTANNIRKHPSKMKEYYELKRSQNKLHYNALGHCAAKLCHYIFWILNNPDKQFIN

SEQ ID NO: 304945 - protein, 414 aa, unidentified
MGGFPVFSLLPFQGGVALSALYIGIDVSKDFSTAQAIDGKGNKCFYLELAMTADGFDKLLKAITAYGKDIAQVTVAMESTGCYHINLFSFLTHKGIRCVIINPLLTANFARLSLRKTKTDKKDALTIAQFLLVHKNALLKTDLSPDRQDLKDLAREHESLTNLIAGMKNDIRRMLQITFPELESVCNIFSETILDLLRQFPSARSIKIAKPNTIAKALLHEDKRKKIAVSAEDIIRAAKASVASHGAAKEIILPEKISTLQYLIEKKVRMKKALVEACEGMMVEEIEIITSIGGISEITASRLLAELGDYRAFSTYKHLIAFAGLDPSVHQSGKFDGISRISKRGNRHLRYIIYLMTTCVVRGDNIFRTYYQKRRAEGQPFKKAIMATAHKLIRVLFTMLSKITTYKSMEVNAI

SEQ ID NO: 304946 - protein, 347 aa, unidentified
MEQIIRIGMDTSKYIFQVHGVNAAERPVLCKRLGRKQMLEFFAKLPPTVIGMEACGTSHYWARELKQIGHEVKLIAPQHVKPYVKRNKNDGRDAEGLCEAMSRPTMRFVPVKTVEQQAALMLAGLREQMIARRTQISNTIRGYAAEFGITVAQGLNQIEPLLARLAQDKSVPELARDLFALQGRDYAQLQIELKSIEARLMAWHRANADSRRLAKIPGIGPIGAATAVMKTPDPGAFASGRHFAAWIGLTPKDHSTAGKTRHGKITRAGDERLRSVLVAGATAVIQQAKHGRGHPSPWLIALLKRKPPKLAAVALANKMARIAWKLMMTGESYDGARMSKASAAAAA

SEQ ID NO: 304947 - protein, 355 aa, unidentified
MTMTDAKRAATEVVLGVDTHLDVHVVVALDHLGRRLGELSVPTTAKGYESLVCWAEGFGTVRCAGVEGTSSYGAGIARHLKTAAIPVTEVERPRRRHLHRNSKSDSRDAERAARAVLAAETAGEPKSADGRVEMIRALRAARRSAVKSRTQAANQLQGLRVTAPDGLRHRLRGLSTKELVAVTARFRLKDGPDKVLEATRIALRSVARRYEVLSEEIAQLDVQLDRLVVETAPKLVSLPGIGTDHAATLLIVVGDNPKRLKSEASFASLCGVSPVQASSGKVVRHRLNRGGNRDANRALYMICMVRMGRDRRTKEYVARRTAEGKSKREIIRCLKRYVAREVYRVLVPAASPVGP

SEQ ID NO: 304948 - protein, 400 aa, unidentified
MKEFNVETVQIETASALEAVSQAQGERHYPAYIGLDVHKDTIVVSVAQAGRAAPEFRGEIANKPKAVAKLVERLNREFNGEVLLFCYEAGPCGYGLYRQLLGLGHDCQVVAPSLIPKQPGERIKTDRRDASKLARSLRSGDLSAVWVPDQEQEAMRDLTRARDDLKAQERKARQQLNAYVLRHGHAWPSNKTRWTRAHYNWLESLRFAHDLQQVVLQEYINAVKAASHRVADISAQMERALPQWSLAPMVYSLVALRGIDKLAAMVLLAELGDISRFDSPKQLMAFLGLVPSEHSSGGRRRQGAITRTGNGHARRMLVESAWSYRFSARQTMHLKRKAKHASEEAKAIAWQAQKRLCGRYRTLLEAGKNTKQTTVAIARELVGFIWAIVCQEMPKLRQTR

SEQ ID NO: 304949 - protein, 374 aa, unidentified
MSVKRILAKEIDTNQSYEVIGLDLAKDNVSFVGITTDGEVIRVDRVEYTTLIEKAGQMDRTVFGMEPCTEMNWLCNELKALGHECRVINGKAVQNQIDTYFSGQKNDLNDAEAIAYLARENRIQMIRPKSREEMILQTYTTERELMRKHANSTLVSLKGLAQAWGLKIAKYLASEIKLIEIVDQASHIPEEIRESFKEMIKSCKTFERKANKLQKRIEAIVAKDKMCQKIMKVPAIGPLTAAQLRVTIGNIDRFDAPKKLPAYYGLVPKNLTTGHVEKMGHITKRGDKVVRSLVVQCASILAMLEKNDKLPQCPLTKWIKKKRKELGHCKLVVALAAKLLRIVWAILKYDKEFNLKRAGIARCNLPNETMGKLL

SEQ ID NO: 304950 - protein, 363 aa, unidentified
MSHYRVGCDAHRRYSQFAVLDQDGQLRQQTRVDHEPGAIQAFLESLPEGTPVALESVGNWYWIADEIEAAGCLPLLTHAAKAKVMMGNVNKTDKLDAKGLAKLLHLDSLPTVWLPPGEIRDERELHRTRMALSKLRTSLKNRIHATLAKYGITSTEHSDIFAGTGRVWLEATLSRLPPETGRCVAQEIEALDGLQLQIAQLEDRIRKRIALNPSIQLLKTLPGVGDILAIVIEREIGSFDRFCTSGQFTSYAGLVPTVHASGGKTRFGHMRKPSNQYLKWAFIEAANVVVRHRHHPAWKVTYVCQIYDQVSQRKGHAVAVGAVARHLAEGAFWILKRQQPYRPPALRQASPKQVRGRAQLVST

SEQ ID NO: 304951 - protein, 417 aa, unidentified
MNRARQWYAGVDWARDSHLVRLIDEQGRDIGEKIFEHSGQALAAMADWLIAQSGADDPGQLHIAIEVPHGPVVEALMERQFNIWAINPKQMDRFRDRYSPAGAKDDRRDGLVMASALRTDPHCFRRLGATDPVIIELREWSRIAEELGAERTRLTNRMREQLWRYFPAFLDLGADMEAPWLLELWQLVPTPDRAKRVRQGSIAAILKRNRIRRLDAAQALDILRQKPITVADGTTKAACAHITTLIDRIRLINRQISDAHQTLDSLTAKLGDDQEAQPGQPKQRDVDILASSPGIGTTVLATLLADATDALQRRDYHALRCLTGVAPVTKRSGKSCFVVRRYACHRRLANAVFHWARVAVQHDPASRTKYAALRARGHGHARALRSVADRLLRVICAMLRNGTNFSQTLALTNQSVI

SEQ ID NO: 304952 - protein, 455 aa, unidentified
MPHARVLTRGDRRRNERLTRLRSIVRRDYAVVAVDLASAKQAVVVTDHDSVVLGRRMFTGDAWVIDEVLDWAAPIAAEAGFAGVVLGCEPTGHRWKPLLDRARARGIELVCVNPMLVHRGREEEDFTRDRSDFKDATIIAKKMTELRCYVPYQLDGHWCRLRHLGARRDDQLVAAGAARQALRDLLECAWPAVLRTAAEPLDALTFRAAMSVSTHPEQIVAMGYEPFAAAVAAELGRWGGQRRNLRILRAIWAAAQAPGGVGAERDATAERAADTLRDWHRARTETLDVETRMLAVLDALELTELVTTLTGLSAVGAAAILAQTGDPARFDCARTWVKHAGLCPRANESGTFTGTTKVSGRGRPALRTAAWRAVWGALRHNPVYTARFTHLTSRAANPLRPGQARAAIAAALLRQLFIIVTRRVAWDPAIAAGHPTAGHPGSPGSPGSEVAPQAA

SEQ ID NO: 304953 - protein, 373 aa, unidentified
MSSDSVVLVGLDVHKDSIMVAYSVGFGDVENLGKISPRATDIDRLCKRMQSKASQVLFVYEAGPCGYGLHRQLTGKGHQCMVCAPSLIPRKPGERVKTDRRDAARLVRSLRAGDLSPVHVPTIEDEACRDLVRAWGAAKQDLKQARQRLKAFLLVHDVRYTGRADWGPAHRRWISGYSFDLPWQQIAFEEHRRTIEDRLTQCARLETTLREAAPQWRFYPVVEALQALRGVQFTTAIGLMAELGDLSRFDHPRQLMAWLGVTPSEHSSGQHRQLGSITKAGNSYARRLLIEAAWSYRHPAKVSPAIQKRHDRLPKAVIDRAWDAQLRLCKRYRKLTARGKHRNVAVVAIARELAGFIWDIARMTPITAAVQAA

SEQ ID NO: 304954 - protein, 374 aa, unidentified
MNIIGIDLGKTVFHLVVMNPGGAVIAKKRLSRAQLLTFLGNTPPSLVAMEASCGAHYLGRQFLGYGHDVKLIPAQFVRPFVKSQKNDYVDAEAIAEAAQRPTMRFVPIKTEDQLDLQALHRVRERLVERRTATINQFRAFLLERGIVVRRGREQLRKLMPDILAEAEQHFAPRMARLLAVLAVEWRMLEEEIAGMDQEISRIAATDQACIRLQTVPGIGPLIATAMVAAVGNGAAFARGREFAAWLGLIPRQSSTGGKTKLLGICKRGNTYLRWLFIHGGRSVQHRVSREPHTFGHWLTQLESRAHPNVVGVAMANKLARIAWVVLNRQEVYRPAGPDPCKGAPGFGLKQSDTPISSGAQGSSINSLCSALTST

SEQ ID NO: 304955 - protein, 379 aa, unidentified
MKAIKLHLGLDVHKDSITLAIAPAGLKSEIRLFGTITHDLHALEKVLSRIRKAHPGAPLEVAYEAGPCGFGIARRLQQLKVPCLVAAPSLIPKQPGAPFKTDQRDARTIARLLRAGELTAVYVPEPTDEAIRDLCRARTDAVDDLRRCRQRLKSFLLRHGYRYQGKANWSQPHLRYLRELVLPHPAMKAILEEYLQGIDSAHDRVQRIEASMLALLETWRLQPAVQALMAFRGFQLVAAMITVSELGDIHRFAHPRQLMTYLGLVSTEHSSGPRQHLGRISRCGNGHARWLLTECAEHYVRPPKVSKELSARQEGQPSHVRALSWKAQNRLHLRFTRLLARRLQRNKAKVAVARELCGFVWALLRTQPCYRLSTGGAAS

SEQ ID NO: 304956 - protein, 347 aa, unidentified
MGNHNKTGSVTVVGINLAKNVFHLHGIDASGDVVVRKKMSRTKLATFMANLPACRVGMEACGGSHFWARKFLAMGHDVRMMGPQFVKPYVKSNKNDLVDAEAICEAVQRPSMRFVPGKGVEQQDIQSLHRARSMAVSHRTAQVNQIRGLLMEYGIVVPQKVANLRKALPWILEDAENELSPMFRDLLTGLRDEFVRLDERIAGYDAKIKGLSEQSQLCKRLMGIPGVGPMSATALVAAVADASVFKSGREMAAWLGLVPRQYSTGGKPKLLGISKRGDVYLRKLLVHGARAALRVADKKQDRRSRWALEVADRRGHNIAAVALANKNVRTAWALLSRGEEYKTIAIL

SEQ ID NO: 304957 - protein, 382 aa, unidentified
MQTIDTVNPTILLAIELSASTWLVAARVPGWEKPHLHRIDGGDTAALLALISSLQARAARGLDATIGVVCCFEAGRDGFWLHRLLTAHGVVCHVLEPTSILVNRRARRAKTDRLDAEGMLRVLAAYLRGDHQACSMVRVPTPEEEDAKRTHREREKLVQERQRIENRIEALLFTQGIRKRPSLRSWERDLAVLRTGDGREIPRHLRAELDRLRRRLVMTLELIREVEAERDQAAKTKPQDRACHKIAALSRIRGIGENFAAVLTREVFYRSFDNRRQIASYVGITPMPYQSGGMDRDRRISRAGNPRARTTMIQLAWLWLRYQPGSELAEWFRERVGTLAGRTRRIAIVAMARKLLIALWRYAETGVIPAGAEIRAETTVAA

SEQ ID NO: 304958 - protein, 307 aa, unidentified
MANHVTKITLGIDVAKDHHVIYNWQTEQTTQLPNRTSDIRTWLKSCHGPVRIAIEPTSNYHLTMVDEALKLGYEVYLINPRQLAHYREAVNVRNKTDPLDAWLLARYLEHEEGHVRPFQPRDPRAQRLWTLILRRATVVKSRQQLQQSFAEVQMSIQGVLTQIQHLLVRIERHIIALIRELGWWSDYQYCLSIPGIGSGNASALVAAYHRGCFAGSDAFISYLGLDVRIRESGHFKGRRKLTKRGEPELRRLLFCASHPARYYQRFAEYYQLQLDKGMCKTAARVALSRKLARIAFTLMRNEEIFIR

SEQ ID NO: 304959 - protein, 351 aa, unidentified
MERRMNYEGQNVYIGIDVHKRTYSVCCLCEGVRVKRATMSACSTKLLEFIRKHFVGANVHTAYEAGFSGFALHRFLVASGIKNIVVNPASIEVAARDRVKTDRRDALKIATQLENGRLKGILVPSEEQERRRLLTRTREQLVGEKTRLSNQIKSRLYQFGLIAYDDRRKVSEPFLQEYLAMKLSDELKEALTVLAELWRFVAEKIKKFRTLLGEQAKQDSYLQSVYESVPGIGPLGARILANELGDMSQFGNEKRLFSFLGFTPCEDSSGDNRRQGHISRQGSGRLRWILTEAAWKAISQDTVLKADYERISAKAGGKKAIVAIARKMIARVRACFRKQQFYQLGYAKAAA

SEQ ID NO: 304960 - protein, 368 aa, unidentified
MGRQVRRGPGPSSTLITPDRAGNVVGVDPHKRTLTATVVDPRGGIVASEHFRVSGDGHRALEAWARQFGPIVRFGVEGASAWGRHTAIFLIDRGYDVRDVCPNRTAQHDRARQRGKSDTLDSERIARETLAHPLLPKAFKRARQDAGPDQHTELLAVWWTARCSLIKRRQHLLTECEALLRELPLELVERLPRVKPVRPRLAALPRLTARRRLAPPTALRVSILGGYREEIARLDAQERQITRQLAELVAQSGSTLGELRGLATVSVAELLVEVGDPRRFTLGGFGRFNGTAPLAASTAEGPGEPVRHRYNPGGNRRVNAVLHRMAITQLRCEPRAKKIYADARANAHTKNEARRILKRISRMSSTGA

SEQ ID NO: 304961 - protein, 400 aa, unidentified
MLSIGIDVSKGKSTVCGMKPGGEIVYAPFEVQHTREEMLELVSLLRSSGEEVRAVLESTGSYHCPVVAALLENGIFVSVVNSLRMKRFCSQSIRKVKTDRIDAMQIALYGLAYWQELQPTRLPEDTYRELQLLARQYYQMTSLLIKAKVDFNAICDQVLPGMQELMSDHAGRHKLSDFVLRYCHTTHILEMGETRFRKDYCKWAEKKGYRNCERMAALIFATAQNGIPVLPNAPSTQIVITEAIRVLHTVEASRDAILTQMQALAKTLPEYSLVREMPCIGDTLAPRLIAEIGDVRRFHSKRALIAYAGIDAPPYQSGKFCANNRHISKRGNRYLRKTGYEVMQSYVMHKPANDPIFTFIEKKRGEGKSGKLAMVAGLNKFLRVYYGKVTELYRSLPAIE

SEQ ID NO: 304962 - protein, 302 aa, unidentified
MSKRRLDAHVEPLGTFASFDNDAAGIAELAIFCRRHGVQLVVMEATGGYERTAFLLLWEAGIACGLTNPRSVRRYAEAMGFLEKTDRLDARIIARFAIAKDLKPNTPPTPSQQRLNALVARLCQITDDLVVQKQRRSSAMNSEMVTSIDEVIALLKRQTRTLEGEIASLIDDDPLWARLDEALRTKGVANRTVARLLAQLPEIGIYSNKAIAKLAGLAPLPDDSGTRIGKRHIRAGRAGVRSILFLVADIARRYDPSLAAFHQKLIKAGKEKMVVRIALARKLLVRLNARAREARESYALAT

SEQ ID NO: 304963 - protein, 341 aa, unidentified
MAVAGGLDLHRGQLTFDYVDTGTGESWRGRICPADRESLRGWLRRFHGVPDVEFAVEGCTGWRYVAEELQRAGITPHLAEPAGTAGLRGRKRRAKTDWADARHLRDLLLDGRIPESWIPPGHVLEARALVRLYKDLLEERTSWQQRVHATLFHQGIPVVPKLGTADGQQRLDAAELSAAGRRAVQAGLRQIERLTQEMASLRRELARLSSRQPGCRALRRAHYGIGGLLSVAVWAELGDCRRFSSSDDAVRHTGLDITIYDSDGRRARGHIARQGPPVLRWALYEAALYASRPASPDYAYYCGVRDRIDGQRALLSVARKLARRCYHTLRDLGEDALAPAA

SEQ ID NO: 304964 - protein, 311 aa, unidentified
MAKQDVFVGIDVSKDRLDVHVRPLRSGFSVANDAAGHAALVAQLKPLRSTRIVLEATGGYERALWIALTEAGLVAAVVNPRQVREFARASGRLAKTDRIDAAVIAHFAETFSPAGIRNPDPVADRLGEHVLYRRRLSEEAVALDNQLRQLAELRPRAERRLASLKAEIREIDREMQRIVAGDPRKKALYTCLTAYKGVGPVLACTLIANMRELGRLTRHQAAALIGVAPINHDSGAWRGHRAIAGGRVGVRNVLYVATLSAIRYNPAIKAFYRRLRDNGKPGKVALVACMRKIAVTLNAMVRDHLAEQPAT

SEQ ID NO: 304965 - protein, 348 aa, unidentified
MRFYHGQHRYYCGVDLHARSMYLCILDAHGAIVFHDNLRCDREAFLQAVAPFRDDLAVCAECIFCWYWLADLCAEHDIVFVLAHALYLKAIHGAKAKNDRVDAHKLAVLLRGGVIAQAHVYPPRMRPTRDLLRRRLFFARKRAELLTHIRNTFHQYNLPRPPAGRRIQAAHGPKLVARVPEAAVRRSLEADLQLCQFYDPLIRDLEKTIEHLAHHHAPQSLARLRTIPGIGRILGLTLLYEIETIERFPTVQDFSSYCRLVKPEKSSAGKRLGTSGARIGNAHLKWAFSEAAVCFLHANPRGQNYRKRLRRRHGKGKSLSILAAKLGRATYFMLKQQRPFDMDRFLRD

SEQ ID NO: 304966 - protein, 346 aa, unidentified
MMIIGCDFHPSWQQVAWLDSETGETDETKVVHTGAEARQFYQQMPRPALIGMEATGNSQWFVELVEDLGHEIWIGDAAQIRASYVRKQKTDKRDAAHILKLLVEGRFPKLWTPDREQRDLRQLVLHRHKLVGIRSRVKNELQHLSMNKGMQKKRTLWSRAGMQLLRELPLKPWASCRREDLLGLLAMLDEQIERLDRAVQQAAEEHPQARLLMTQPGVGPNTALAFALTIGDASRFARSKQVASYLGLIPREESSGGRQKLGAITKQGNRLVRSLLVEAAQIAVRCEPEFRKQYLHRCHRRPKGVAKVAAARKLAVRLYWMLRTQVGYPEIVRIESSPGVPRVGAS

SEQ ID NO: 304967 - protein, 419 aa, unidentified
MTRRCKGKHDHGYVLRDRLGGGPSRHPVVDDTGALVARARIENSAAGLSALLAMLAECGDTPAGLVPVAIERPNGLLVGCLRGTRPVYPINPRAVSRYRDRHGVAGKKSDAGDALVLAHILRTDLAAHRPLPADSELAQAIAVLARAQQDAVWDRQQLGNRLRSLLLDFFPAALHAFAGLAHGGLSRPDARAVLTLAPTPSEAAALTRRHLRTALVRAGRRRNIDRDVERLHGIFHAAQMRPPAVVEAAFGRQLKALIGQLGAACAAETELADAVEEAFNLHRDAPILTSFPGIGAVVGARILAEIGDDRTRFADARAVKAYAGSAPVTRASGRSRSVSSRRIKNQRLAAAGYVWAFASLRPSAGARAHYDRRRSNGDTHTEALRNLTNRMLGCLYHCLQTRTPYTESTAFSVQAAAAA

SEQ ID NO: 304968 - protein, 372 aa, unidentified
MEERSKIHVGLDVHKDSISVAAAEPDRAPGRLVGKVPHDVSKLLRVLAKVGTAERLHIVYEAGPTGFGLQRALKVKGYSCEIIAPSQIPRRPGERIKTDTRDSVQLAECSRAGQLSAVWIPDPDDEAIRDLSRAREDAVHSRVQARHQLKGFLLRHDVRYKGKTSWCGAYYRWLGTLNFGVGAAQTAFTEYWQAVTAADDRVDRLTKALLSSIAGWRFESVVGALQALRGVAAITAIGLVAEIGDLGRFAHPRKLMGYLGLVPSEHSSGERTSRGSITKTGNAHARRLLTEAAWNYRFKARIGKQAQIRQQELSEPIRRMAWTAQLRLTQRFAALNARGLQANKACVAVARELAGFVWAIGMQAQREKVEST

SEQ ID NO: 304969 - protein, 427 aa, unidentified
MQPENIRLERFRKLKKEVRGSVRHLLVGIDVAKEKHNVFLGTATGKTLVKGLVFENSKQGFEKLLTEVEAVKAKNKLSSVIFGLEPTANYHKPLGQYLINHDQELVLVSGTAVRKNRELLDGRWDKHDLKDAANVADLISQGKFQYYEHPGIEIRELRGLLSLKRKLKRQEQGLRVRIRNNLLSQYFPEMEPYYNTCERDNLAIMNNCLSPAVIGSMEYGEFFKTVVSRKNGLRQDKHLYRIWQLAKDSIGCESDSGTACESRVLVEQLKSTRQAIEQVEDKILQLCGAFSEYEFLISIPGFGPDITAKVLAYIGDQYRFEKARQVLKMAGFDLSASRSGKSSEKALPVISKKGKADLRYGLYQAALIASIHNNGFKTYFEEKIRGREKEKGIKIKMRVKLAAKMLVIAWTLMKNKEPFNPEYLTTN

SEQ ID NO: 304970 - protein, 517 aa, unidentified
MARNRRYRATSVKQVKLARIRELGEEVIIGIDVAKRVQYACIAAAAGDEEVLFRWSHPEETREFFGLCRGMRKQGQKLTMVLEPSGTYGDPFLHWFWQEGIETRRILGQQTRDGSAAIDGVSSGHDAKAAGMLVALHKLGGSREWLERTEGVRNLRALVSKYTLHDRRMQELHGAVEGILARHWPELRDILKPAAKIFWRILAEYGGPRGIAAEPEEVAAYMRRRAGSFLKSEKIEAVIQSAQTTLGVPMLDEEEEWMRTVALEFLRSTELKESTLGQMKAMVSGHADERLVRLLGAGTVATLIAYNLDPLRFDSVGAYRKALGLSLKERSSGQNKGRLRLTKRGAPHARWLLVLAAGRLIGKDPIVNAWHRKKRARDGRAGGLISLVAIARKLVGAAWHVARGADFDAKRLYDVSRLSVIDGDLEELVFEECNSTTSDAGPDEGADSDAPDTVTDNEPEQVEFNDPPQMQEKPKGASTEVAAARGKMAAHGRTPAWRIAGRPASKIFKGIISLLHG

SEQ ID NO: 304971 - protein, 429 aa, unidentified
MNSTQNKKIEQVKETTMIVGIDVGSEKHYFRAFNWRGIELTRKPIAFSNSMEGFNSFYNTIVELMQKSELEEALVGIEPTGHYWFALGQFMGEKDIKFVMVNPHHVHKTKELDDNSPSKNDRKDPRVIAGLVRDGRYFYSYMPTGVYAELRNASNRRFVLVEEQTRAKNRLQKWIAVYFPEYKGIYTHIDAKGGMLVLKKAPTPEEIVRLGVEGIIKIWKDAKLRGNGHKKAMLILAAAMRSIGLKAGLTEARMEIQDLIEDYELQTKRLERVNDLIKGLCQQVRYADKLLEIKGIGITTVAGFIAEVGDITRFDSTKELQKLAGLELVADSSGKHNGKTKISKRGRKRLRYLLFEAAISVVGKNEEFKEIHRYYTTREKNPLKKMQSLIAVACKLIRVFHAILTKGIRYDASKMLKDIRHPGEQLKAA

SEQ ID NO: 304972 - protein, 338 aa, unidentified
MKLYGAIDLHSNNNVTVLIDEQDQVVYQKRLPNDLPLIAQQLSGYRDRLQGIVVESTYNWYWLVDGLMDQGHRVHLANTAAIQQYEGLKYTDDHSDARWLAHILRLGVLPQGYIYPKEERAVRDLLRKRGQMVRQRTANLLSLQNLITRNTGSSIRSNRIKTLDAEQVDDLLPNSDLALAVKANLAMIQCADGQIDILERTVTDRIKLRAAFGFLKTVPGIGQILALTIMLETGEIKRFPTVGDYASYCRCVGSQKLSNGKKKGSGNTKNGNKYLAWAFVEAANFAIRYNARIKSFYQRKKAKSHGVLAIKAVAHKLCRACYYIVKDQVPFDIAKAFA

SEQ ID NO: 304973 - protein, 404 aa, unidentified
MFYFGIDWSHDHHHLCILNEAGARVSQLQFEHSLAGFAQVEVERRKLDVPASECPVGIETTYNLVVDFLLEHDYPIYVVPPQATNGYRNRQRSSGAHDDDSDAALLASIIRTDGESHRRLRPNLALTQQILAEVRLIEILRRSIQRQSNQLRAVLFRTYPQAVGLFSDLTNQIALEFLLAYPTAQDAQTLSREAFEAFLQQHGYTRSDLIPLRYAHMVEPFPTANPAIVQAYQDQVRALAQVLLPQVRGRTQAIAHLGQLFELHPDAFIFNSLPGTGFLLAPALLAKFGDDRDRFPTSVDVQALAGTCPVTARSGKRKLVLFRHGCDKEFRRIAQQFARASVPQSGWAAAYWHEIRPHCHSDSHAYRILANRWLAIIWKMWQDRKSYDEAYHLHQRALRRKPRA

SEQ ID NO: 304974 - protein, 370 aa, unidentified
MRDSIYVGLDVHKSSITVAVAESGRRGDVRHWGAISNRADAVRKLIEKLAKGGRELHFCYEAGPCGYGLYRQLTGLGHDCEVVAPSLIPVKAGDRVKSDRRDALMLAKLHRAGELTAVWVPDAAHEAMRDLIRARATAVRVLGKARQHLQGFLLRHGQVYAGKKGWTLAYRRWLTTVRFGHPAQQIVFQDYVHAVADAEQRVERLTGQIAELVPSWSLAPVVEAVQAMRGVGFIVAVTVVAEVGDFSRFENPRQLMAYLGLVPSEHSSGTTVRRGGITKAGSGLARRTLIEGAWTYRMQPRVSRKLHDRLEGLPSAIRDIAWKGQLRMCGRYRKLMAAGKAKSVVITAIAREMVGFIWDIARKVQLATPA

SEQ ID NO: 304975 - protein, 392 aa, unidentified
MQVVADQAEAPTAIQTDLRAIFVSLELSRSSWLITSLSPGGGEKMSKHSVQAGDIAGLLRRFAQLKEKARARTGRDFPIIVIQEAGLDGFWIHRVLQSERIESHVVDAASILTSRRRRRAKTDRIDGETLVRTLMAFKRGEPRVCSMARAPTPQEEDRRRVCRERRTLVGERVKHINRIKGLLFAQGVFGYEPLRKGRRERLEDLRTGDGRPLPVHLKAQIIRELDRLEVLLEQLKTVEAERDALLKPATDAAASPAAMLARLKGIGPETAVVLWSEGLFRQFDNRRQVAAYAGLAPTPWQSGSIDHEQGVSKAGNPRLRTTMVELAWLWLQNQPTSALSLWFHERVERLGGRMRKTIIVALARKLLVALWRYTTAGVVIEGAVMKPASATI

SEQ ID NO: 304976 - protein, 404 aa, unidentified
MNAVGIDVSKGRSIVAILRPMGEVVRKPFEVSHDYGALETLAYDLKGLEGETRVIMEYTGRYYEPVAQALHEIGVYVSVVNPILIHEYGNNSLRRVKTDKKDALKIARYGLDNWGYLREYTPMEAVRQQLKNANRQYQLYTKTKVSLKNNLIALLDQTWPGVNTFFDSPVRPDGRQKWVDFAYNFWHADCVCLLSEAAFTEKYRKWCKRGGYNFSAQKAGDIYIESLGHFHMLPKNANTKLLIREAIAALNAVSKTAETFHAEMQRLAALLPEYDVVMAMYGVGKVTGPQLMAEIGDVRRFSHRGALIAYAGVDPQPSQSGKHSRNSDPISRKGSGLIRKALYQVVETYLRKIPVDEPVYQFLDKKRGEGKPYFVYMTAAANKFLRIYYARVKEHLNALDIPKA

SEQ ID NO: 304977 - protein, 334 aa, unidentified
MYYSGIDLHTDNCYITTIDEQGALVKQQRVENISELIVDYFQRLPGPHSTVVESTSGWYWLNDLLEEHGIELVLAHAKYLKAIAYAKVKTDKVDSHTLATLLRQNLIPRAHKISRQLRGLRDTMRLRLRLVQQRTACLRRIDSIAVKFNTTTVPDPYRFQLSVLHHTRDTFTSQILALEKSLHPVLIPNDDVQHLLGVPGIGKLTAFTIYLEIDGIERFESDKRFASYCRLVPASDNSNRRVHHRSSKDGNKYLKIAFSEAAVHAIQYYSEYRCFYQKLARRSNQAIARTVVAKELAKIVYYILKNKTDYQGFKGQPISRQKSLEWPRLSSPHA

SEQ ID NO: 304978 - protein, 367 aa, unidentified
MKKNSTTTQRGKRAPAGTEATVIGMDLGDKTSRYCELDRDGKEREEGSVATTKQALTQRFAGKKRCRIALEVGTHSPWVSRLLKSLGHEVIVANARQVRLIAHSSRKNDRLDARTLARLARADPRLLSPIQHRGEQAQQHLAMIRVRAALVEARTKLVNAARGFSKAQGERLPACDAAAIGVKEMAELPAGLKAVLRPLLEQVESLTGQIKKADVELEQIARTQYPETALLRQVKGVGVLIALTLVLTLDDPERFQKSRDAGCYVGLRPRQRESGASQPQLRITKEGDRYLRTLLVQGAHHILGWRGPDTDLRRWGLKLASRGGKNGKKRAIVAVARKLAVLLHHLWVTGEVYEPLRNSGAATTQAA

SEQ ID NO: 304979 - protein, 412 aa, unidentified
MRLFAGDDWAEDHHDIEVMDEAGKVLARRRLPEGVAGMAQLHGLLGQFLPEEDPDSVEVIIGIETDRGPWVAALVAAGYTVFPVNPLQASRYRERHGVSGAKSDAGDAHMLADMVRTDSCQLRAAAGDSPEAAGIKVLARTHKTLIWERTRAVQRLRHQLREYFPAAIEAFDDLDAADTLELLGKAPDPARAAKLTRAQVSAALKRARRRNIPDKATAILAALRSEQLRQPEALTAAYAATVRSLIAVITTLNEQVKILQGQVEEHFGRHPDAEVYLSQPGIGAILGARVLGEFGDDPSRYRDGKARRNYAATSPLTRASGKKKVVAARFIHNDRLVDALNAQAFAALNASPGARAYYDELRTRKIEHNDALRRLANRLVGILHGCLKTGTLYDEATAWGHRENLPQSSAAA

SEQ ID NO: 304980 - protein, 358 aa, unidentified
MDTCADKWTIAQFQGEDEKPAKEFELVPDDTGYRKLIKFLKELEGEVRVVYEAGPCGYELYRRLTKAKLQCEVAAPSLTPRKPGERVKTNRRDASKLARYLRSGMLTVISVPDEGRESLRDLVRARHAVQKDVVSIRNQIVKFLLRYGYRYREGKTAWTERFWAWVGQIKLEGEYGQFVLDEMIRTHRQRLEQRARYDEAIEAAASKPEYAPSVAAYSVLRGIDRLSAMTVLSELGDLRRFPTAPQLMGAIGLVPSESSTGDTTSRFSITKTGNAHVRHIAVEAAWQYQRRTTNGPTIKKRRKDQPQALVDIAERCDLRLNRKFHRMTSRGKRSTVAAVAVARELMGFIWAIGQIVHP

SEQ ID NO: 304981 - protein, 421 aa, unidentified
MTRLPTDDFAAFVGLDWPDAKHDVCLQAAGSETREFSILVHTPETIDEWVSTLRQRFKGQPIAICLELNKGPIVYALRKYDFLVLFPVNPLTLARYREAFAPSHAKDDPTDAELQLELLLKHREKLTPLKPQSPAMRALEQLVEHRRRLVGDTGRLTNRLTSTLKNYFPHVLPWFHDKDTAIFCDFLAQWPTLKAAQLARRATLERFFRAHHVRYADVIEQRIQAIKSATPLTTDAGVIVPHALLVQALITQLRVTLQAIEDFDHAIAQRAQSHPDFPLFDALPGAGAVFAPRLLVAFGEQRDRYASAAELQKYAGIAPVTERSGNTTWVHWRLQCPTFLRQTFVEWAAESTQHSFWARAYYQQHRHKGTSHQAAVRALAFKWIRILFRCWQHRTPYNESIYLNALQRRGSPLMHNLANVA

SEQ ID NO: 304982 - protein, 395 aa, unidentified
MTNSKTKANLKIVNDLSRCLDPLDMDVTLIAVIEMSQSSWLVGGIVPGVERQPLKKLEVDEGALLNLLSRWRGEAEKNGRRITRMTVAFEAGHDGFWLARWLAAQGIETHVIHASSVAVTREHRRAKTDRLDTELLKRGFLGWLRGERGHCKMVAVPTLAEEDAKRPSRERETLVGEATRIIARIKAVFVRLGIRGFNPKLKAAAARLATLRTPEGEAIPPNTLAALKRDLERHQIVKRQIRELEQTRLDVLKQAPEKGPYAIVLLLARVIGIGVETADMLVQEVLSRKMRDRRAVGRYAGLTGAPDESGSKRREKGLARSGNARVRRGMVQLAWRFLRFQENSALARWYRQRTADAPSMRKTLIVALARKLLIALWQLARDGVVPEGVQLRPAA

SEQ ID NO: 304983 - protein, 487 aa, unidentified
MHPRTTNNPAKTSDVYGFTFESTGVLALDNEYSGFAVLPAHYIAFAERKRARPESTIYHFGRDDVKPLPTQPFTAYVGIDWADTKHDICLQAAGDDRREFDCIAHQVGCIDEWARALHKRFGGTIAIALELAKGPIVYALQKYNFFVLFPINPSTLAKYREAFKPSRAKDDPTDAELALDLLLRHPERFTPLHAQSAAMRTLLSLTEHRRQLVGDKTRLTNRLTNTLKQYYPQALDWFEQRDTILFCDFLTRWPTLAQVRRARQSSVKAFFHAHNGRRPRVIDARLDSIKAAAPLTEDPGVITPCRLHALVLVEQLRVTLQAIDRFDHEIAGLAPTLPDYSLFQGLPGAGPHLAPRLLAAFGEDRQRFQGADELQKYTGIAPVTERSGKKSWVHWRWQCPTFLRQTFVEWAAQTINKSFWAGAYYQQQREKGCSHQAAVRALAFKWIRILYRCWKTRTSYDESTYLNALRKRGSPLLHSLTLNPQNT

SEQ ID NO: 304984 - protein, 323 aa, unidentified
MSKIIGIDVSKQTLDVCFQEKNGKWKSFVISNQLKGFKELLKHLTEEDTVVMEASGPYYLQLAMFLHEQKIKVCVENPLVIKRYSQMQLQRAKTDKKDAKVIACYGMVHQPKIWKPESKAANDLKQLYTAKELIQKQIHQTERQLEAFTSSGVLDIFLKKQLNAIIKQLKKRYQTIEEQINEVAQKEYGELLVRLQTIPGIGRKTAIYLAVLTDGFKKFEHYKQLIAYIGFSPRIYQSGTSVKGRGHICKMGNGQIRKLLYLCSWTAKNANKYCKEMYERLKQKGKPERVVKIAIANKLVKQAFAIAKSNQTFNENYLKNTCF

SEQ ID NO: 304985 - protein, 411 aa, unidentified
MDKIYDKCCGIDVHKKLIVACFRCGKKQEVREFGATTRELLELADWLKDGGCEMVAMESTASYWKPLYNILESSDLNAIVVNARHMKAVPGRKTDVKDAEWIADLLQHGLLQPSYIPDKDQRELRELVRYRKSLVGERTRELNRLQKMLEGANIKLSGTVSDINGKSARSILEYLLTGESIDGSKYDEMYEQKIIAHNLKATKEQIMDDLNGVMSPLQRRMMKELLVHLDELNIHIKNLDDEIDNFMKPEEKQASQAIQDVTGIGNTSAQAIISVIGSDMGRFPTDRHISSWAGLCPSDNESAKKRKSGKTRKGNALLRTTLITCAHAAVKNKKSYFYAQYVRISAHRGPKRAYVAVAHSMLISIYHILKDGVVFKDLGADYYNQFNKERKINAYLKKLKALGWEAPIVAA

SEQ ID NO: 304986 - protein, 390 aa, unidentified
MHAPQDQYDSATAIRTDLGAIFVSLELSRATWLVTSLSPGSGEKMSKHSVRGGDTDDLLCRFAHLQEKARCRTGRVFPIITIQEAGLDGFWIHRVLQDHGIESHIVDAASIAASRRGRRAKTDKIDGETLVRALLAFKRGEPRVCAMVRVPSRQEEDRRRICRERRVLIAERVEHVNRIKGLLFAQGIGGYQPLRKDRRMRLEELRTGDGRALPPHLKAQIVRELDRLELLLDHIAVVEQERDLLVSATDESNPATTPAAMLCAIKGVGAEIAIVLCTEGLSRHFDNRRQVAAYAGLAPTPWQSGTIDREQGVSKAGNPRLRTTMIQLAWLWLRNQPSSALSEWFFQRVQSDGGRHKKSTIVALARKLLVALWKYVRFGVVIDGAVMKAA

SEQ ID NO: 304987 - protein, 343 aa, unidentified
MQIHSVGIDLGKTTFHLVALGAAGKVLVRKKFTQRQLLTYTANMQTSLIGLEACSGAHFLGRALRKQGHDVRLIAAQFVKPFVKSNKNDFVDAEAIAEAVDRKNMRFVPIKTDDQLDLQAIHRVRDRLISRRTAVINQVRAFLLERGLVFAKTPAKLRAAMPDILENAEADLTPQMRNLIDLLWGEWKTIEQQIEVLSLELERISAADAGCTRIRQIPGIGPIVATAIVAAIGNGAAFRKGREFAAWLGLVPGQYSTGGKAKLLGISKRGNVYLRKILIHGARAAVLRIKRDRSSIGVWMDALDARAPKNVVVVATANKLARIAWAVLSSGEDYRPIANGLAA

SEQ ID NO: 304988 - protein, 341 aa, unidentified
MDHTVIAVDTAKKVFQLHWVDHSTGSIERLQLKRTRMLEWFTLREPSLVVMEACGGAHEWARALAQLGHEVRLISPRKVRPFVQRNKTDAADAQAIWTACQQPGMRFVPVKTQAQQVVLSLHRIRAQLMKSRIMQTNELRGILYEFGLVLPEGHRALLKAMPDALVDAAQRLPAILMESLNEQMRRIAQLSQDIDQIEHRLAQQLRESPNCQSVAQIPGIGLLTATAVVASMGSPDAFKDAREFSAWIGLVPRQSGTGGRVRQMGISKRGDAYLRTLLMHAARSVVLRSHEASTWPWLQTLLKRRPYNVVVAAVANKLARTIWAVLAKGQAWNAQAWQGAH

SEQ ID NO: 304989 - protein, 418 aa, unidentified
MKVVYPICCGVDVHKTFFVATIITTKVITPHYSKKRFSTFNNSILQFKQWLIGNNCFDMCMESTGKYYVPVLNLLEDVIRVTIANPKWVRAVKGNKDDVKDSKWIGDLFRLGLVPGSYIPDKPIRILREYTRYRSKLVSCQSSEKNRFQNALTVCNVALDAVVSDMFGKSATSITDYLISCDSFDPDYCSSLLQRSLKKKADIVIESIEGYQMTKEQKERMVMVRSHLGFVHQSIATLDEKLDKMVVPYENAITLLCTIPGVDRTSAITIISEIGTDMSQFASSKRLCCWAGLTPGNNESAGKKKSVRITRAGVYLKPALVQVAHAAVQSNKSSYYKTKYECIFKRRGKKRAIIAIARMILTAIYHMFVTGEVFNPSDLYKIDMPQEMQEKQKEKAVKQAIKLLTSLGIMQVPDTTVA

SEQ ID NO: 304990 - protein, 346 aa, unidentified
MYSIGIDAHKRYSQIIIMQEDGKIINRCKVNNDRKSIKRALSPYAQDGLKAVLESGWNWGLLYDMLSDGDLEVKVAHPLKVKAIAEAKIKTDKISADILAHLLRADLIPECYVRGKSSRRIQQVLRQRMFLVRLQTMVKNKIHNLIDRQEEAREPAQSFTDLFGVKGMQFLRSTPLPLLERKLLDGQLELLEELRTRISWVESILTQLKENDEIAERLKTIPGIGEFFALLIRHEIDKIERFPTSNKLCAYAGLVPSTYSSGGKTYHGRIIKQGNKYLRWALIEAVIPAIRKDVQISSYYYLMRAKKGSNSAKIATARRLLKIVYQVWKENRFYRIKTSRTALIHT

SEQ ID NO: 304991 - protein, 400 aa, unidentified
MRSIGMDVHRSFAQVAVFDRGKVTAEFRMELDYDAVVAFGQKLRKDDEVILEATGNTSAIVRLLTPFVARVVIANPLQVKAIAHARVKTDKVDAKILAQLHAAGFLPEVWAADDDTLNLRRLVSERAALVRSVRRVKSRVQAVLHANLVPKYSGHLFGKGGRDWLSTAPLPKAERDLLARHLDELDWLNGKLEKLDSAMAQISLDDARTRKLMTIAGISSVVATAVIAAIGDISRFQTPDRLASYFGLTPRVRQSGDRGAIHGRISKQGNAVARTMLIEAAWSAASVPGPLRAFFLRIKDRKGLNVAAVATARKIANLIWQLLTKEAPYRWARPAFVAMKMRKLELRAGAARAHGPAGPGRDYWIKEIRHREMELVAQAEAAYAAMVATWRERPPKPQKG

SEQ ID NO: 304992 - protein, 397 aa, unidentified
MNYFLGIDIAKTNHVASLIDNDGNIVIKAIKFTNSNDGFNKLLSTIQDKLNDLSNIEVAMEATGHYWLSLYSSLTDNGFNVSVYNPYQIKSYRGAYNNRKQKNDVIDSIIIADYLRVFGSKVSTLPTDDIMSLKILTRYRSDLVSNIGSLKTQVISVLDKIFPEYKSLFCDIFGETSKQLLLKYPTPDDIIKISTTKLSNLLSKYSKGKFNKNTALHIKDVAKNSFGIKFTTNACSFEIKQLINQIIFLENQIDEVSLEIKELYNKLDNHLLSVPGIGVNLAPIIFAEIGDINKFDKPSKLIAFAGIDPSENQSGNKVSSGDKLSKRGSPYLRHAIYTASLVAIKNDKELRAYYDKKIAEGKHHFVAMAGIARKLLTIIYYILKEDRDYVKHNNFNN

SEQ ID NO: 304993 - protein, 429 aa, unidentified
MNFRPIAGIDVGKFFSEMAILSPTNEVVARMKIHHDSNTDVERAVELLNKTEKDFASRPFIVMESTGHYHKILFHSLCKAGLEVSIINPIQTDSIKNIGIRKVKNDKVDARKIALLYRFQELSTTNIPDEDIECLRSLCRQYYKLSDELTAYKNRLTGIVDQLMLNFKDVFSNMFSKAAIAVLEEYPTPAAILKANRNKLIPLIQKNSRKSLKWSTAKYELLVSKAREFAPLSVHNSSNIAMLGVYISMIRTLEDNLAKVLKAIHLLIAEDMAKDMPMLALTLELLQSLPGIGLLTAATILAEIGDFSAFSKPGKLVAYFGIDPSVMQSGEFTGTRNKMSKRGSRLLRRVLFTTALANIRTKRNKEACNPVLLEFYKQKCQSKPKKVALGAVMRKIIIYIFAVLRDRKPYQLRSPQEHAQMLAAKHIAA

SEQ ID NO: 304994 - protein, 426 aa, unidentified
MKKLDFLSTLFVGIDVSSKSNVICALDFSSNKLLEFTVSNNQPGAIELSLKIRTLMTGGKFKAVIFALESTSFYGIHIANFLSSDEGMLAFNPYVYCLNPKMIANYRKSFIGLDKTDPKDAFIIADFARVGRITVAPWRGSQFLALQRLTRHRLHLVDCITREKTYMVSNIFLKFSELSILKEEEHPFTNNHTATATAILTEMLSLEEIVAMSVEDLIAFICKVSKNRFADPKKVAFILQQAARNSYRLDKCLYEPLTISIASSFNCISAYQAEIKVIENAIEKVIKGLNTTEYQCLVSIPGIGPVFASGILSEIGSISAFHSQDALAKYAGLVWKQTQSGDFRADDTRMSKAGNKYLRYYLIEAANSVKNNISEYHEFYRKKYGEVKTHQHKRALALTSRKLIRLIFGLLAKDQLYSAKRVPPTT

SEQ ID NO: 304995 - protein, 415 aa, unidentified
MEVLYPRCAGLDVHKDTVVACVRVVADGAVRSEVRTFDTMTPGLLALADWLAEHGCTHVAMEATGVYWKPVWHVLSDGDLILILANAAHVKNVPGRKTDVADATWLADLLAHGLIRPSFVPEADTQAMRALLRTRKQLVREQAAHIQRLQKTLEDANLKLSSVLTNIMGLTGRAILEALIGGQDDVDHLLTLIDRRVKAPPEKLRAALQGRINDRHRFLLRLHLRQIDALADAVADIDQEVDRDLAPFRDAVRQLRTIHGVSDLSAQVIVSEIGTDMSRFPTAGHLVSWAGLCPRNDESAGKRRSNRLRKGAPWLKTTLVQCAWAGARTKGSYLQAQFRRLSHRRGPKKAICAVAASILTAAYHMLKDGTFYRDLGANHFQTASPDAQAKKLAAQIAKLGFTCTVTPNPDGLVSV

SEQ ID NO: 304996 - protein, 412 aa, unidentified
MAVVMNQDSGFDIWCGLDVGKTGHHACALDAAGRKVFDKPLPQDQKRLEELFDKLQTHGRVLVIVDQPNTIGALPIAVARSMGIQVAYLPGLAMRRAADLYPGNAKTDARDAFVIADTARTMPHTLRRVDAGEETLAELKVLVGFDEDLAAEATRLSNRIRGLLTQIHPALERVVGPRLTTKQGLAVIEQLGGPQAMAAASKSKLLRVISKAYPRGAQEFADAITTALAEQTVIVAGTAAAEQVLPQLAASLRQTLDQRHALAAQIEQVVDAHPLAEVLTSMPGVGVRTAARILLDVGDASQFPTAGHLAAYAGLAPVTRRSGTSIRGEFPARSGNKHLKRALFLSAFAALRSDPTSKAYYDRKRAQGNKHNAALICLSRRRCDVLFAMLKNREPYRAPTPTREPSPLPLAA

SEQ ID NO: 304997 - protein, 406 aa, unidentified
MNMNAVGIDVSKRKSTVAILRPGGKAVGKPFDVPHLSADFQSLIKRIRELDGETRIVMECTGRYYEPVARELSQAGFFVSAVNPQIIRNFQGQDNPLRKVKTDKADSVKIARYTLDSWANLKQYSLMDELRSQLKTMNRQFDFYMKHKTAMKNNLIGLIDQTYPDANAYFDSPAREDGSQKWVDFIDTYWHVDCVRKLSLTAFIDHYQKWCSRKKYNFSKSKAEEIYGKAKELIPVLPKDSFTKRIIKQAVGQLNAASQTVEQLRSLMNETASKLPEYPAVMAMKGVGPSLGPQLMAEIGDVTRFTHKGAITAFAGVDPGVNDSGDYSQKSVHASKHGSPALRKTLFQIMDVLIKTKPDDAVYLFMDKKRAQGKPYYVYMTAGANKFLRIYYGRVKEYLAALPTSN

SEQ ID NO: 304998 - protein, 385 aa, unidentified
MRLVCLKTSILWDDGGSVTNRPRHDWKPVRVLAVRPRASSALQPYLPYPNSCQGTSPHQQGRGTKVSEPYYVGIDVSIDRLDVAIRPGGRGFCVTNDAAGWAELVARLPQGAIAAIGLEPSGGYERGIVRVLLAAGFSVRRINPNKLRQFARAAGALAKNDRIDARLIADYVAVIPTRVVERNPALEQLAETVTMRRQLCDEHIAVESQASHLEDALLQRIAKRRLTRIKADIVLLDKRLAELVAAQPDLVQRFRLLCSMPGVGATLAYTLLALLPELGQIGRKQIAALVGLAPYAFDSGRFRGQRHIYGGRTAVRNTLYMPALAAFRFNPALRTFHHRLVAAGKKPKVAIVAVMRKMLTTLNAMLRDGNSWTDGHTGRHTVLAI

SEQ ID NO: 304999 - protein, 296 aa, unidentified
MTSTKYIGLDVHKESISIAVLNSAGKVVMECVIETKASTILQFIHGLGGDVHLTFEEGTWAGWLYDLLKPHVTELVVCNPRKNALLKEGSKSDRIDAHKLAELLYMSKLSSVYHGEHGLRMLKELSRSYLTITKDLGRVMNRLKALYRGWAIPCAGTQVYAPHYRSEWLAKIHEAGVRRRAELYYQQLDALRLVRQQARKELLAEARKHRATKLLRQIPGIGPLRAAHLVAVMQTPHRFRTKRQLWNYSGLGLETHDSAQYRVVEGQLQRSKKPVTLRGLNDNHNHDLKDIFKVRR

SEQ ID NO: 305000 - protein, 312 aa, unidentified
MDQPPCFVGIDVSKDQLDVHLRPSGETLALPRTGPGLEQLVDQLRREQPALVVLEATGGFEITVAAALAAAKLPLAVVNPRQIRAFARAVGKLAKTDRLDAEVIALFAERVRPEPRPVADLEAQALGELVARRRQLIEMIGMESNRQHQVHDRTLKARIHEHLAWLQQALADLDREIDGLVRRSPAWRETEELLTSVPGIGKITAQALLADLPELGHLGRRQIAALVGVAPLNRDSGQWRGHRAIAGGRFDVRRALYMATLAAIRFNPVIRDHYRQLRERGRPAKVALIACLRRLLTILNAMLRERTPWQPA

SEQ ID NO: 305001 - protein, 339 aa, unidentified
MSGSDKSQRTPYAVFVGLDVGKGEHHACALDPTGKRLYDKPLPNDETALRQVLASLTAHGPVLLVVDQPASIGALAIAVAGDMGIDVAYLPGLAMRRIADLHPGQGKTDARDAYVIADAARTLPHTLRQVGQDDEALAGLTVLAGYDQDLAAECTRLTNRLRDALLHVHPALEHLLGSHFDRPGVLAVLTAAPTPQALHELGAERIAELMRPRSPRLAKTLPAKILTALDSQTVIVPGTTEFGRVIAGVATQLAAVRTERDTPGKDLEDRLEAHPLAEVLTSMPGVGVRTAITWLTIVGDGTAFPTAGHLAAYAGLAPVTASPGPRSAARAATSAATTP

SEQ ID NO: 305002 - protein, 387 aa, unidentified
MSQAFDASRSLTALEQDSTLVVVVEMSQSSWLAAAEVPGLSRQPLKKLKVDADGLLKELHRWRDQAVKAGHRIGRIALAFEAGRDGFWLARWLLARGIEAYVIHAASVAVSREHRRAKSDRLDTEQLMRSFIGWLRGEKRHCSMAAIPTMAEEDARRPSREREKLVGEQTRLVSRIKAILTRFGVGKLPLTRQAEAKLAALRTPEGVPLPENTLAELRRSLALLRVVREQIREIEGERLRKLAASANHDGPAVMVRLLARILGIGVETADMLVQEILSRKLRDRRAVARYAGLTGAPDESGKRRREKGLARAGNARVRRGMIQLAWRFLKFQRDSALAQWFAARTADGRRVTRKTMIVALARKLLIALWQMVTTGEVPEGLVLRPVS

SEQ ID NO: 305003 - protein, 349 aa, unidentified
MTMLAELVEVVIGVDTHKHTHTAAIVQAGTGAVLARLAVSADPDGYAQLHALVEQYSGVRAWALEGSGGYGAGLARQLAEHGELVIELDRPVRPKRRAGAKSDPIDAERAARDALARTRLARPKTGAERAALQMHLTARRAAVEAAADAQRQLHALVVTAPERMRAKFRGQSTRLMITTASGLRVPRGGDAELSAAATVLRALARRIRFLEAEAADHERTLLALVRSWRPDLLQLPGVGPIVAATVLTSWSHAGRCRDEAAFAMLAGTAPIPASSGQTVRYRLNRSGDRQLNRALHVIALSRLRHDPATRDYAERRRAEGRTSREIQRCLKRYIGRQLYRHLEAGLPAA

SEQ ID NO: 305004 - protein, 410 aa, unidentified
MDIVHSRCAGLDVHKETVVACVRLASGDKVSREVRTLGTTTSGLLALLAWLTEMGCTHVALEATGIYWRPVWNILSDGAFELVLANAAHIKNVPGRKTDVNDATWIADLLAYGLIRSSFVPEPAMVREQTSHVQRVQKTLEDANIKLDCVITDILGVSGRAMIEALIAGETDPGILADLADRRLKAPHDQLREALRGRVTDHHRFLLRLHLGQIDALTAAAERVDRQVDAVIARMDAAVEAGQASVQAMIGLLITVPGIGPLAARMILAEIGCDMSRFPSAAHLLSWAGLCPRNDESAGKRRSARLRKGAPWLKTVLVQCAWAATRKKGSYLQAQFYRLRSRRGPKKALCAVAASMLTAIYHMLRDGTGYQDLGADHFDHRSTEARARRLVSQLAKLGFDVEIKPLAAVA

SEQ ID NO: 305005 - protein, 331 aa, unidentified
MKILETLGVDVSKKVIDIHLHKKELHNQFENNNKGFKKMISWLIKSTDTSKENILVALEHTGLYSYNFSVFLANNEFNYVILPGLEIKRSMGMTRGKNDKVDARRIALYAYEKRERLKPDTQSPENIISLKRLLSLRERMVKQRAGYKTSLKEQSEILSKKENKLLFKSQKSIIKSLSKEIEAIDSEIEAIIIDDDQLKKQYQLIITIKGVGKQTALYMIVFTEGFKKFKNWRKFASYCGTAPFPNSSGSSLRGRTKVSNLANKKMKSLLDLCAKSSIQYNEEMRSYYSIRTAQGKNKMSTINIIRNKLLSRIFAVVNRQSPYVDLMKYAA

SEQ ID NO: 305006 - protein, 419 aa, unidentified
MAPLSNQQFTAYVGIDWADTKHDICLQAAGNAKREFDCIPHQTARIDEWAKSLHQRFGGPIAVALELARGPIVAALQKYDFFVLFPINPSTLAKYREAFKPSRAKDDPTDAELALELLLRHPERFAPLRPQSVAMRSLFSLVEQRRELVGDKTRFTNRLCDTLKQYYPQALEWFEQRDTVLFCDFLTCWPTLLTVRRARRTTLEAFFHAHKCRIRLIAARLESIRTATPLTEDPGIITACRLHVLALVAQLRTVISAIDVFDREIAALARAQPDFALFDCLPGAGPQMAPRLLAAFGEQRDRFHGADELQKYTGIAPVTERSGKKSWVHWRWQCPKFLRQTFVEWAAQTINKSFWAGAYYRQQRAKGSTHQAAVRALAFKWIRILYRCWQTRTPYDETTYLNALRKRGSPLLRNLELPG

SEQ ID NO: 305007 - protein, 337 aa, unidentified
MTTPVSPPTPPISPEVFVGIDVAKDTLDMARSDSGQLLSVPNTTEGFKRIIAQLAGSPITRIVLEATGGFEQPVLDALLDAGLPVSRVNPGHVRYFAKALGILAKTDALDAGVLVEFARRTDTRLAVKRPQIQAQLDALVTCRRQLVETNTQQSNRLQATSDKAARKAINSVGRVLEKQIKSLDQQIARLIDSDDDFKRLDEILQSAPGVADGLSASLIAELNELGQTGRREISALVGVAPFNHDSGKLKGKRAIRGGRAGLRCVLFMAARSAITHNPIIRNFAERLREKCKPDKVVVVACMHKLLSLLNVMVRLNITWDQLNVVKQFNAVTNAKIA

SEQ ID NO: 305008 - protein, 406 aa, unidentified
MAEETIGWFAAVDWGSEKHQACVLDARGGVAGEREFPHSGAGLAELADWVQSITGEASVVAIAVEVPHGPVVDVLLDRGFIVHSINPKQLDRLRDRFSVAGAKDDRRDAYVAASGLRTDRHLFRRVQAADPRITELREWSRLAEELKQERVRLGNRLHHQIWRYYPQLLELTDDVAADWFLDLWTIAPTPAKGERLRKAAVEQLLKRYRIRRIDAETVLRNLRQPAIKVAEGVAAAASVHIRSLIVRLHLVNRELRDAERKLDELCASFEGGQQDDVAILRSLPGIGRINLATLLGEASGPLSRRDYPALRTLSGVAPVTKRSGKSHIVIMRYAAHARLRNAVYHWARAAVRHDPKSRCRYTALRQRGHSHGRAIRGVADRLLNVACVLLQRQTPFDSEHDQPAAA

SEQ ID NO: 305009 - protein, 340 aa, unidentified
MGEVSTIGLDLAKSVFQAHGADASGAVVFRKKLRRDQLLPFFASLPRCVVAMEACAGAHHWARELAALGHEPKLIPPPYVKPFVKRQKNDMADAEAICEAAQRPTMRFVQPKSAEQQAAGTVFRTRDLLVRQRSQLINALRGHLTEFGMVARKGSENAPQLIDYVMDPASDLLPETRSVLKVLAEALQQLDEKITVLDVEIRKRAKTSALAKRLMTIPGVGAVLATAMVAQAPAPETFRRGRDFAAWLGLTPLQHSSGGKERLGRTSKMGDRNLRRLLILGASSAARAAAAVGMTEGWLGRMLTRKPRMLVVVALANKMARIIWALMAHGGSYKAPTVSA

SEQ ID NO: 305010 - protein, 389 aa, unidentified
MNGQVDLTVKAQPSDFENTLFVAMELSRATWLVATFAPRLGDKISVHAVPGGDTKRLLDLIGRLQEKLRGKIAGRFQTVCCYEAGYDGFWLHRVLINHGVQNHVLDGASLPIDRRAKHVKTDNIDAKRLLKAIVGFVQGDPQSCRVVRVPTREEEDARRVHRERQRLVRERTGHLNRIKALLIAHGIRTVRITDAKWCERLDRMQTGDGRPLPARLKSEIEREWKRLKLVAAQVREVEAERDRLVRGNEPSPNVCIEKMRRLAKLYGIGAEFATVLTREVFYRPFQNRRQVASYVGLTPAPYDSGESKHDQGINKAGNTRARVTAVQMAWLWLRYQSKSELSLWYYRRVGDLKGRVRRIMIIALARKLVIALWRYVETGKVPTGAIVTA

SEQ ID NO: 305011 - protein, 414 aa, unidentified
MEIVHTHCAGLDVHKKTVVAAIIVADAKGGLRKETRTFGTMTLDLLALSDGLLAQGVTHVAMESTGEYWKPVFNILENNFEVLLVNAQHVKAVPGRKTDIKDAEWIAELLRHGLLKASFVPPLGQRELRELTRYRSTFVKERATLVNRLQKVLESANIKLASVATDVTGVSGRAILQALLAGQSSPEEMAELAKGRMREKRELLAKALQGQVKAHHRFVLTELLCQIDGLDETIARFDEQIEAYCRPFEEVVELLDSIPGVARETAEVIVAEIGTDMSRFPSADHLASWAGVAPGNNESAGKRRSGKTTQGNHALGVALNHAANAASHTKNTYLSAQYHRLASRRGKKKAIVALEHSILIIAYHIIQRKQPYHDLGGDYFDKRRPEATAKQLVKRLERLGFQVSLQQSPATVAA

SEQ ID NO: 305012 - protein, 402 aa, unidentified
MIESPTRFFGLDIHKEYFMAVGVNVQREVIFGPQKVSNYQLDIWASRLLTPQDSVVLEMTTNTYLFYDTLMPYVHSIIAVHPPSVALVTNAQVKTDKKAALALAQLHAAGMLTGVWIPPHEVRDLRALIARREKMVHLSTMAKNRLHSLLHRNHLVLPEKPFDPEQRTWWENLPISATEQFLVRSDLETLAFARKQVEQAEECLKKESAQDERILLLVQLPGVAMLTAITILAAIGGITRFSTAKKLVGYAGLGTRVHDSGMTHATGRISKAGRKDLRRAMVNAANHAIDHHVHWKKEFERLEPHLGRSKTVVAISRKLLVAVWHVLSKEVADRFADPRDVASSFLRYAYRVGVRNLPDEQPALAFTRDQLDRLGVGKDLKEIPWGSKRFKLPPSKILHEKE

SEQ ID NO: 305013 - protein, 343 aa, unidentified
MELYVGMDVSLKETSICVVDDDGEIQCEGTVISEPEALARFIKTNAVGAKRIGLETGPTSTWLWHELRTLGLPVICIDARHAKAALSMQINKSDRNDAVGLARIMQCGWYKEVQVKSLPCHEIRAVLSSRAQLVKAKRDIDNQIRGLLKNVGLVVGAGKGNVFRRRVEALVDQQGLLWEAVRPLLEVREMLRREIAGLYRKLVSLARNDADTRRSMTVPGVGPITALTFHSAIDDPSRFRRSRSVGAYIGLTPRRYASGEVDWSGRISKRGDAMLRTYLFEAAGVLLTRVPQWCKLKAWGHRLWKRIGFKKAKIAVARKLAVILHRMWRDGTDFQWSDKEAKA

SEQ ID NO: 305014 - protein, 391 aa, unidentified
MPMYFVGIDISKYKHDCCIISAADQQIISKFTITNDKDGFEQLLTALNSLSNPEDIKIGFESTAHYALNLELFLENAHHSFMEVNPVLIKEYKKSTTLRRTKTDSVDCESIARWLMTVEYKPHSKGFYHAYSLKSLTRLRDRLIRQRSFYLVKITNVLDHTFPEFKPFFNERLSKTALYLLENYGSAEKMARMNSASYDKLRCISRGKFSIQQFLRLKELAANTVGVNNSIFDLELNTLLTLYKSLSDEINTLETEIIKLIEEVHPHYMSIPGIGPISAAVIYAEYGDISNFSNPGQMLAFAGIEPGINDSGTESHGGRMVKHGSSQLRYVLLNACLPLIRFDLTFATYYEKKRAEGKKHRVAITHVAKKLIRVIYAMERQDVDFNAQKLR

SEQ ID NO: 305015 - protein, 315 aa, unidentified
MARIICGVDVSSTSLEARIGPEGAEGSFANNAEGITALAEFCGQHGVELVAMEATGGYEQLSYAQLSGQDLGVAILNPRAVRKFAESMGRLEKTDRIDAGMIAWYAEVRKSPAVSLAPQRQQHLRALVTRLRQLTDIRTAQRNQRRLVIDGVVQSSFTQLLALVESQIEELAAGIATLIGEDPLWKELDRSFRTIKGVADRTVSRLMAEMPEMGTLSNKTISKLAGVAPLARDSGKFQGKRTVRGGRSSVRELLFIVASVVGRHEPDFMAFQQRLKDAGKPPKVVRIALAHKLLVRLNAKAREVRQQMPRSLQTC

SEQ ID NO: 305016 - protein, 322 aa, unidentified
MSVTVLGIDIAKQKFDVALLTDGKTKHKAYKNSVEGFKILMIWLEKQGIKKVHACLEATGTYGEDLATYLHEAGHEVSIVNPARIKGFAQSELIRTKTDKIDAGVIARFCLAMKPEMWVPPTPEIRSLRALVRRVDSLIDMRSQEKNRISIAHESVIVLIKEHIVYLDQEIEKIRKQIADLIKQNPHLKQRKDLLDSIPGLGKATVPHLLAELDNLDKFTHVREMVAFIGLAPKETLSGSSIKGKPRLCKIGHARLRKALYMPALVSIQCNPVMIAFYNRLKEKGKNGKVIVCAIMRKLVHVIFGVLKSGKMYDPNYKPAFA

SEQ ID NO: 305017 - protein, 386 aa, unidentified
MARPENNLPAAAHNGAARCYLAIELSKRSWVIAASTPLSDKISRYTLTSGSLQELVELIERLCARITRATGQVVEVISCYEAGYDGFWLHRSLAKRGVRNHVIDPASLKVDRRARGAKTDRIDAERLLRSLMAYLRGEPKVWSVVRVPSIAEEDARRLHRERDRLIGERVQHVNRIKGLCAIHGIYDYEPMRLDRLRRLEQLRTAQGEELPERLKGEIGRELQRLALVLEMIRALEAERDAIVTDAAPAQLNADKIRRLNELRALGPEISTVLVGEVFYRSFNNRRQVGSYVGVTPSPFASGTIAREQGISKAGNPKARRTMIELAWLWLRYQPDSALSVWFRERVGTMKGRIRRITIVAMARKLLVALWRYLETGLIPPGALLKA

SEQ ID NO: 305018 - protein, 353 aa, unidentified
MERYIGMDVHAQSCTLAVVSAAGRRLGLQVVETNGTALKQAVAGIPGTRHICLEEGTQSAWIYELLKGLAEVVVTVPDGHGGPKDDARDAWALAESLRVGGIKRRVYKDCGPYSELRAAMRSYLMLRDDVRRTKNRLKAVYRSRGLMPPADTPFHSERHLVWARKLPPEQARTAAMLLEQLQLQEALWTKAEERLALASKRHPVVKLLATAPAIGPIRSAQIVATVVTPHRFRTKRQLWAYCGLAIVMRSSANWERDRNGSLVRSWMQQSLGLNRNRSSVLKEVFKGAAHQVVTRMTTHPLHHDFMRLVEGGMKPNLAKVTIARRIAAAVLAMWKHEEVYAPGKHVSRITAKT

SEQ ID NO: 305019 - protein, 391 aa, unidentified
MTMYFVGIDISKYKHDCCIISAANQKVVSKFTFKNDKSGFEQLNLILNSLSTPEDIKIGFESTAHYALNLELFLENANHSFMEINPVLIKDFKKSQTLRRTKTDSIDCELIARWLMTVEYKPHSKGFYHAYSLKSLTRLRDRLVRQRSFYLVKITNVLDHTFPEFKPFFHERLSKTALYLLENYGSAEKIARMNSASYEKLRSISRGKFSPQQFIRLKELAANTVGVNNSIFDVELNSLLTLYKSLVDEIKTLESEINRLVDEVHPHYMSIPGIGPISATIIYAEYGDISNFSSPNQMLAFAGIEPSVHESGTEAYNGKMVKHGSSQLRYVLINCCLPLIRFDVTFATYYARKRSENKPHRVAITHVAKKLVRVIYALESQDIDFDPKKLR

SEQ ID NO: 305020 - protein, 338 aa, unidentified
MKVHILGIDLAKNVFQLHGVDSKGRSVLVRRVRRDQLLKVLGELEPCLIGVEASKGAFYWQRQFEKLGHAVKIMAPQDVKPFVRRQKNDTNDAEAICTAVQQRNMRFVPKKTLEQQDIQALHRARQRLVNHRTALISQMRGLLLERGIAIAVSATRARRLIPKIMAAPNDELTGLMREIVSSLYAFMLQIDDRIRAFDRKINAIFKASDACQRIAKIRGIGPKTATAMIAAIGDGSDFKNGRHLAAWLGLVPRQHSSGDRRVMMGISKRGSQHLRTLLVHGARAVVRTAVRKTDSRSTWVNELRQRRGYNRATVAVANKNARVIWAVLTSGEPYRAAA

SEQ ID NO: 305021 - protein, 350 aa, unidentified
MRHCGLDVHTKRTTAVWMDDDTGEISRACSMPNDELVAYLQSLSDLKQVVMEAGSTSAFLKRQFDTCQIPAIVVDAHKASRLLEAINSQAKTDKVDAKGLAILSARGWAEQIAVWVADPPTQRLRTLTRSREQLSKVSNILRNGIRAMLRAEGLLCSATDLTGPTARAWLDDIEARLDPLTRQMLHQNRELIARTMENIAVIDVLLAQIAADDERCRQLDTIAGCGVVTAAAVVAEIGDITRFRSAKALRRYAGLTPKIEQSGERTVIGKLVRHCNKHLRRALIIIAQSFVKSARVTDTRAKSCYFRCLFRHGPNPAKVDLARRLCDIIFAMLRDGTDFDPGRLAPAKAR

SEQ ID NO: 305022 - protein, 318 aa, unidentified
MPTFSTPPARILGCDVGKSSIVIFDTASGVCRSVPNKKPDLLRLARTLGPGCLVVCEATGGYEAKLLSAMLAAGVAAHRADARKVKAFIRSFGTLGKSDAIDAQALARYGAERWKALLLWEQPDPVREQLQALVLLRIDLVKLRQAQSNRLAAPQARFVAAAVKALIREIEKQLRAVEQQIRELVRSHPALQRDAAVLKTIPGIGEITAHALAALMPELGGLGGAQAAALAGVAPHPHESGHRIGYRKTRGGRPDVKRTLFMAALAASKAKGALSAFYERLIKRGKKPIVAITAIMRKLIVIANARLRDERKVATQVS

SEQ ID NO: 305023 - protein, 348 aa, unidentified
MKQVTTIGLDIAKSIFQVHGVDAAGQSVLRQKLSRSRVLEFFAKLPRCLVGIEACASSHYWARELIRLGHEVKLMPAQYVKPYVKRGKNDAADAEAICEAVTRPTMRFVGVKTPEQQSIMMLHRVRLILMRQRTQLSNALRSHLAEFGIVSPIGREGLQRLLTIVADTDDGRVPAEARASLEMLAAQLEGVKAQILENDRRIIASARATEVGRRLLEVPGVGPVLASAFVASVADPAIFKSGRDLSAWIGLVPRQNSSGGKERLGGITKAGNGYLRQMLMVGAMAVIRYAQRNNARRPWLVQLMGRRPTKVAAIALANKTARTVWALMISGERYRDPQAIQAAVSATA

SEQ ID NO: 305024 - protein, 423 aa, unidentified
MGWTPPDFFSASSCQLAACVVRVSVNQKESEMNATSLLPVVGVDLSKNVFELAVADDHWRVSERARLTRSQFERWFANRQVGLVVMEACGSAHHWGRWLSALGIEVKLLPAKYVRAYVKRNKTDAADAAALLEAARASDIVPVRIKSVEQQALQALHRTRSLWMSTRTSRINALRGFCREFGIAIAAGSRIGLEQIGRVLADPHSAVPALLRGTLRLLVEEIRLLEVRIDQLERELTALARHSPACKTLLSVPGVGLLTATAMVAATSGQVNHFRDARHFASWFGLTPKESSSGMTRRLGRISKRGDRYLRMLLTHGARSVLRAATLAQQRGRPLDALRTWALNVQSRTLTTAPLAHSLTRWRAFVMRCCATVRTTVVHACTENCNARRLCYLLESALNDELVQSLALRLIAHHGTPGHPRTA

SEQ ID NO: 305025 - protein, 316 aa, unidentified
MTQSPVFVGIDVAKKRLDVALRPSGEVFQVANDATGLHHLVQRLHLVRPRLIVLEASGGYELMALATLRQEDLPAERVNPRQVRDFARALGILAKTDRLDALSLARYAEAVQPEVRPFPEAEQLELAALMGRHRQLTEMVVMEKNRLDTTFSVRVRQSLLAHLRSLKHQLQELEDELDDFLKQHPLFADKAKLLRSTPGVGPGTCYCLLAWLPELGTLNRKQIAALAGLAPFNRESGRWRGRRAVWGGRAQVRAFLYMATVSATRCNPVIRAYYQRLREAGKPAKVALTACMRKLLTILNAMLKNHQPWSCQEIFS

SEQ ID NO: 305026 - protein, 343 aa, unidentified
MDYFAGLDVSVKVTSVCIVDDAGKIVREARVASEPEALLQVLTNTIYRLKRVGLEAGPLSQWLYSVLAEAGLPVICVETRHMRAVLKAQINKTDRNDARGMAQMMRVGLYRPVHVKTLRSQKLRVLLTHRKLLQSKAVAIENDLRATLRNFGLKVGVVGAVKFEARIRELVESLPDMAVLVEPLLIVRRVIREQLGILHRRLLAIVRADDMCRRLMTIPGVGPVVALTYRVTVDVPARFRNSKAVGAVFGLTPSKYQSGQNDRTGAISRCGDEMMRVMLYEAAQSMLVRSTKWSWLKAWAMKIARHRGMKKAIVALARRLAVIMHRMWVDGTEFRWTREVAGA

SEQ ID NO: 305027 - protein, 365 aa, unidentified
MIVIGTDTHKASHTAAGVNAATGQVLADRTVRAKRRSFEDLLGWGRRLGGERVWALEDCRHVSGALERFLLARGERVVRVAPKLTAEGRESARERGKSDAIDAIAIARAAIRHGIETLPVAQLAGIELDIRLLVDHRERLVATRTRLINDLRWNLHDLWPELEIPTGGLIAVHWPERLASRLARAQQTARVRIARDELRRIRELTRTINALEQELSVLVAQVAPRLLAERGCGVLTAAKLVGEIAGIQRFQTDSKLARLAGSAPIPASSGRVIRYRLDRGGNRQINCALHRLALCKGLHDPATAAYLARKQAEGKTRREAMRCLKRHLARRVWHLLQPTHTPPERSPQTATTIHCNLPISGFALT

SEQ ID NO: 305028 - protein, 415 aa, unidentified
MKVVFPTCCGVDVHKRFLIATIITSPADSLQPHYQKKRFSTFNSDLNRFADWLHENACLDVCMESTGKYWVPVFNILEMRGIRVVIANPKWVKAVKGNKDDTKDSKWIGDLFRIGLVKSSFIPDKSIRILREFTRYRYKLTSMKSSEKNRFQNAFTVCNVALDSVVSDMFGKSATAITDYLASNEPFDVEHCVSLLQRSLKKKADAVLESIEGYSITDEQKLRIGIIRQHLDHLVDLIDKMDDCINTLVSGYEGQINLLCTIPGVRRDTAITIISEIGVDMSQFGSSKRLCCWAGLTPANNESAGKKKSVRISRAGVYLKPALVEVAHAAVKDKTDPYYALKYERIAKRRGKKRAIIAIARMILTAIYEMFSTGEVWNPVDLYKVDMPEHLKEKQLAKAVKQAIRFLETQGLKVS

SEQ ID NO: 305029 - protein, 367 aa, unidentified
MEKSSTVFVGMDVHKESIDITLAEPGGEVRRLGQIGGDRGSLLKMVRRQQSKGRKLVFVYEAGPCGFWIYREITALGHACMVVSPSLIPRRAGDHVKTDRRDSERLASLVRAGELEAIHVPDIRDEAIRDLVRGRDDAVIAQRRVRQQLKALLLRNDIRYVGRTSWTGAHRRWLSELKLPEPAQRIVFEEYVDAITVATGRIERLTRAIQTEVLTWRFAPVVAALQAMRGIQFVHAVTLIAELGDLTRFASARQLMGYLGLVPREDSSGEHRHQGSITKAGNSYARRALIEAAWAYRHPARVTRIIATRQTGIPKAVCDIAWRAQLRLSAKYRRMNARHLNHNKIVVALARELSGFVWAIGQSVKPQ

SEQ ID NO: 305030 - protein, 339 aa, unidentified
MKKSDRPTYLGIDVSKGSLDCCLYNGTEHKTRSFNSNKLSTVQKIITHFKISPDSCRVVLEATGVYHSAAFVGFTSQGFDVAVENPLRIHSFAMMKSLLRTKTDPVDARTIAEYGFTNEPAPTKPKEAYQCEVLAKLKLIGFFKKNIAQNRNYLEALNNNSFECNAPSLINLVKNEINHLNVTIKEINRDIEEILTKHCPELYKQYKSIPGIGSAVAGAIICFYGDFSGFSDSNKAAAFAGICPKVCKSGSSVDKRGSISKKGNSMLRTLLYMAALSAARCNDACQETYLRLRQAGKPAKVALIAVANKLLRQAMALARKGESFTENYKEISLCGAKTT

SEQ ID NO: 305031 - protein, 364 aa, unidentified
MDELTHIGLDVHKDTIAVTVLRSGTTTCDERVIPNTPEAVRKLFARYPDRSVLRTCYEAGPTGYDTQRLISSLGIACDVIAPSLIPRRSGVRVKTDRSDARNLARLHRAGELTAVRVPMPAEEALRDLVRAREDLKNDRRIARQRIRSFLLRYGKRYPSPGARWSFRFEVWMRALRFDEPASQAAFDHLVSAYSVRDAQLAAIDKQIEEATLCDPLADAVARLRAFRGIDTLTAVTLLTETCDFQRFATAGSFMAFTGLVPSEHSSGASRHQGSITKTGNAHVRRVLVEAAWAYRHRPAVRGAHAKRLEGQSPEVAAYSWAAQCRLNSTYRKLAARKGPNKAVVAVARELSGFVWGAMTERMAV

SEQ ID NO: 305032 - protein, 320 aa, unidentified
MQSPSIALNIGADVGKDEMATACAEGSFATRKTHNQRAALLALLKELPAGSRIGMESTGSYHESLAELAHKLGFVVYVLNPKDTRHYAKAMGLRGKTDRVDAELIARLIAHEHAKLHPWIPPTAEQRQIERLLKRRAKVSRIRAALTQSFKGVKGFAADVNALRERLDKLLARIDAKVKTLIEASTERKQDYARLRTIGGVGAVVGSSVLNTLERVPFKSADAFVAFTGLDPRPDESGHHHGRRRLSKRGPSELRRLLYLAAMAAAKTKIWKPLYQHYRARGLSTTAALVVLARRIARTAWSIYTHKTAFDPQRLTKALT

SEQ ID NO: 305033 - protein, 412 aa, unidentified
MEVLHPRCAGMDVSKKDVKVCVRLASPGRKTVQNTTTWSSMSGDILRLRDHLIAEQVTCVVMEATGDYWKPFYYLLEDAPFEVMLVNAHDAKTLPGRKTDVSDAAWLAQLAAHGLLRASFVPPEPIRRLRDLTRTRTAITRERGREIQRLEKVLEDAGIKLSVVVSDINGVSSRFMLQSLVKGERDPAVLAELSVKQLRRKIPALTQALQGRFTDHHAFLVELHLDFITEHTTRIDALTERIEKVMAPFQAKRDLICTIPGISTTTADVIIAETGGQMAQFPTPGHLASWAGVCPGQHQSAGRVKNVKTRPGNRHLKGALGATALSIASHKGTFLNAKYRRLVRSRGKPKAIVALEHTLLTVVWIMLTDNVVYDEPGPDYHQQRHPERTKNRAIYDLHKLGYDVTITPHGAA

SEQ ID NO: 305034 - protein, 421 aa, unidentified
MKNNAARKLRQIPAGYLTIGVDPHKKKHAAVAITENLMVRTKFKFDNSRAGFEQVLENARAEMINTGCRGVIFAIETGGHFWRNFAYFLEEKGIPLRLISQFTLKRMRDGRDVNRRKSDFRDAEMAAGVLRTGDFTETKLPQGVYSDLRSAYSAYFRLVKERSRIINLLKGLMDGLFPEFTQIFKDPCGLTALTVLSTCPIPTDIASMKEEDFLDTIRGRHRGRLMRKKLRALYQVAQTSVGIKPGASSVAMEVSLLVNRYSLVEEQAGTFVKALVRLVDRTEEGKYLLSIPGINYLSAAALLAELGPLKSYHSAKQVIKMAGTNPIESESGGKKRGQTPMSKKGRPRLRYSAWSAVIPLFRHNPDFRAWAKRLRERPVHANPLNGKEVIGAALNRLLRLVYTLVKKQEFYRLPQRALVAK

SEQ ID NO: 305035 - protein, 445 aa, unidentified
MPFVGLDLHKQVIEAAIVDEAGKLVHKSRFPATREALLAFAKRWLNQETSVAVEATTNTWPVVDVLEPLVREVVVSNPMRTRAIASAKIMTDAISAPTLAHLLRMDYLPRVWQPDERTRHQRELVTERTTLTTDRTRIKNRIHSVLHQRMIPAPAGDLFNEQNLAWLRALPVCDEGLNENGRRVLDRYLAQLEAIEKEAAELDTLIAKHAYAEPRVRLLMTLPGVDMAVALGLMAALGEPSRFASADKAAAYFGLVPSTKQSGRHCYHGRITKQGNAHARWLLVQAAQHVAEHEGPLGVFFRRLAQRKNRNVAVVAVARKLVTIAWHMLRRNEPYRYAHPATTAIKLAKVRIVATGKRRRGGVPKGTPRPESYGTGKQLRRMPSLDAVYAKEGLPPRQKLGQGEARMIAERGLEEFLGRIAEQQTTPKAPPSGKRRGPYHVRPIG

SEQ ID NO: 305036 - protein, 337 aa, unidentified
MTLYCGIDLHSNNSVVAVLDEQDRTVYEKRLPNDIATITEALCIYQSELAACVVESTYNWYWLVDGLMAADFPVRLAHTSALPEYSGLKYSNDFSDARHLAHLLRLGLLPTGYIYPKEERALRDLLRRRLLLVRQRSLHHVSLQSLIARHSGQRLNTLQIKQLTKGQLADYLQGHALLGGEITRQARCWLEAAVRKIEQELQRHIKPREDYQLLQSIPGVGPVLGTTIALETGTIERFASPGNYASYARCVKSEKISNKKYKGQGNKKNGNKYLAWAFMEAGHYGAIWDPRIKRFYQRKKAKAHILVAKKAVANKMARACYHMLKRGEEFDVTRAFS

SEQ ID NO: 305037 - protein, 343 aa, unidentified
MQTITTIGLDIAKSVFQVHGVDAAGQVVVRRQLKRRYVLAFFQKLPPCLIGIEACASSHYWSRELRALGHTVRLMPPAYVKPYVKRQKNDATDAEAICEAVTRANMRFVPTKTPEQQSCLMLHRTRHLFIRQQTAVINAIRAHLAEFGIVAPVGRKGVTELLHVVADPSDGRVPEVARACLAALGTQLLGLKEQIVEFDRLIMAWHRSNETSKRLHYIPGVGPLLATALAASVADPQTFRSGRNFSAWIGLVPKQHSSGGKDRLGSISKQGDRYLRSLFVAGALSVIRYAKIHGTKHRPWLTALLARRPTKVAAIALANKLARMAWAMMARGERYRQPVALAA

SEQ ID NO: 305038 - protein, 339 aa, unidentified
MLKRKFTLGCDVGSSTIVCSVLETLEKMILEPKEFANNFAGFERCISWLKSSDLKAKDVLVCMEHTGVYSESFCYYLYDQKIKVVIESGAKIKKSFKLATHKTDKIDSIAIAEYAIRYADRLIAWEPRQSAVESVKSLLSSRELFVKHRTAQKNALSAYKRKVVQNELIREEYEKSIQGLNQTIKNLENEIESILKQNEHWIAVIKIIKTVKGVDKLLPYNMFVISNAFSMKLDYKKLAAYLRICPYQHSSGTSIKKKAKSPKYGPKIMRKLLFLAAKDACQYDEYFRAYYARKDNEGKCYFVIMNNVGNKLLKIICAIINSGKPYIPNYRSVNPILVK

SEQ ID NO: 305039 - protein, 453 aa, unidentified
MSKVKPQVIDDEEHERVHDRVAAVDVAKDAGVVCTRTPHPSRPGARQSAIWTVKARMGTVRALGRQLKNDGIEMVTLESTSDYWRIWFFVLEACGLAVQLVNASQAKSLPGRPKTDKLDAQWLARLTEMGLLRASFVPPKAIRDLRDYTRARARLTQERTRCWQRLEKLLESALVKVSSVVSKLTTVSAQDMIKAMIAGQRDPRTLAALARTGMKAKHDELVEALDGMFDDHHGELAGLLLDQIAVLDGKISQLNARIEQMVAAIPAAWGINADGTTGPEAGTGPDAAVLPAAARLAEIPGVSPMLARAIIAEVGLDMARFPTAGHLVSWAGLCPSARQSGTRTRAGKKGQGNGYLRASLGQAAIGAARTATFPGERYHRIARRRGKAKAQVAVARSILVIIWQLLADPAARYTDLGPGYYQARTDKDKKIKNHIRQIEALLGHPITITPRAA

SEQ ID NO: 305040 - protein, 391 aa, unidentified
MIYVGIDVAKDKHDCFITNSDGEVLFKSFTIANNREGFETLFQRIQSVSDDLTKVKVGLEATGHYSYNLLGFLLDNGLPTFVINPLHTNLYRKSLSLRKTKTDKVDSHTIASMIMSDVNLKSYSDTSYHNEELKSLTRYRFDKVKERAKLKSSVSRLVCILFPELEKLVPQLHIASVYALLSEFPSAHAVASAHLTRLTHLLSESSKGRYGKDMAIIFREAARNSIGSNMPAKSLELKHTIKLIRELTSEIDEIEIEIKSIMDDINSPILTIPGISYRMGAMIIAEIGDFNRFNSADNILAYAGMSPSTYQSGQLDNCYSHMEKRGSRYLRYALYNATKYVCHWDPTFAEYLAKKRAEGKHYNVAISHAVKKLVRVIYAMEKSGQVYNKAS

SEQ ID NO: 305041 - protein, 414 aa, unidentified
MDVIVERCAGLDVHKKTVMACVRKPKDGKRVSVRREFSTFTCGLHQLRDWLASEGVTQVAMEATGIYWRPVWYVLEEMADLELLLANAQHVKNLPGRKTDAKDAEWLAQLLECGLLRGSFIPTPVMQRLRDLTRYRTKLTEDRAREVQRIQKVLEDAGIKLDSVISDVLGKSSRQMLEALIAGERDPEVLAELSKARMRAKIPDLRLALVGRFGEHHALMARMHLDHLDHLDEMIDRLDQEVAREMAPFAEAAGRVVSVPGLGQHTTQAILAEIGIDMSRFPTAAHLASWAGMCPGNHESAGKSRSGRPRKGNAALRAVLCEAAWAASHTKDTYLAAQYQRFLRRFGKKGQKKAIFALAHTILVIVWNILSDGGTYEELGYDYFERRIDTEEKKRRLIRQLESLGVHVTVEPAA

SEQ ID NO: 305042 - protein, 451 aa, unidentified
MKKRNKRLEQLELVHPNAAGLDIGAREIWACVPADAEENNVRPFATFTPDLCHLADWLEQCSIDTVAMESTGVYWIPVFEILEARGFKVYLVNARHIKNVPGRKSDYADCQWIQKLHSLGLLTASFRPDGKMCCLRSYLRHRAQLIQHRAPHILHMHKALQQMNLQLHHVLTDITGTTGMTILRAIIAGERDATIMAQWRDAHCKASEETIVKALTGNWKEEHLFVLRQSLALYDFYTAQIAACDVQLEQQFSAMKPRWDSSTQPPVTLSGKRHTTSKNAPAFDVRSQIIRLVGVDLGAIKGLSDSSIQTILSEIGTDMTKWPTVKHFTSWLGLAPHNDISGGKVLRSRTLRTRNRAGQAFRQAATAIASSPSALGAYYRRKRAQGGPQYAQVATAHKMARIVYFILKRRVAFIEIGAEAYEQKQREREVAALRKKAARLGFTLSTTQAAS

SEQ ID NO: 305043 - protein, 350 aa, unidentified
MDHIGIDVHKKDSQICMLTEAGELIERRVRTEPDRFAEVLGHRARARILIESATESEWVARCLEALGHEVIVADPNFAPMYAQRTRKVKTDRRDARALAEACVLGAYRRAHRLSDEQRHVRARLTVRDALVRTRTGYISVIRSLLRQHGWRVRSGAAESFSHRVRQLPLPGRLLSEIAPLLAVLRHVNQQLVYSDERIESVTGMDARVRRLRTVPNVGPVTAAAFVAAIDEVTRFRGAHEVEAYLGLVPRELSSGETQRRGRITKAGHSRMRRLLVQAALSTLRRPDPPTVELRHWATRIAARRGKKVAVVALARRLAGILFAILRDGTTYQPRRASGHDRAATASGVPA

SEQ ID NO: 305044 - protein, 474 aa, unidentified
MKKHKKTKPQEAKPLHEPVANAAGIDLGATEIWAAVPPERCQLSIRRFGAFTQDLKALVAWLVDCGIGSVAMEATGVYWIPLYQLLSDAKVEIYLVNARHVKNVPGRKSDVRDCQWLQYLHSVGLLQPSYRPDQAVCELRTIFRCRGNLLKQGAENLQHMQAALDQMNIKLHYVIDDLSGQTGQAIIQAILNGEREPLRLAKYRNKRIRASEETIAKSLEGDWRKEHLFVLRVAWQNAKHLQEQIKKCDQELMEYARQLEASPVVAQRTRPLRILGLNPEPGVAPLNPDLALRPVKPRRKTSKNEPDGPWREELHRFFGVDLTLIPSIGVLSGITLMTELGNDLRAFKKSHHFSSWLCLCPDNETSASKVLHRSTRRSQNRVRQALRMAASSLHHDKSYLGDKYRRLRARLGAPKAITAMAHQLARIIWHMLTYRVPFDIGIFAAQEKANQTRRLNRLHSNARQMGYQLTPIPA

SEQ ID NO: 305045 - protein, 347 aa, unidentified
MRFYTTTHKHSCGIDLHAKNMYVCILDREGKVLLHRNLRTDPELFLRAIAPFREDLVVGVECMFTWYWLADLCAREQIHFVLGHALYMKAIHGGKAKNDRIDAYKIATILRGGMFPYSYVYPSEWRSTRDLLRRRLRLVRHRGQLMSHVQNTHYQYNLPTPQKRIAYRANREGVDKQFTDACASKSVEVDLELIGHYDEIITDLELYLTRKAKVHDQDLFHLLRSVPGIGKVLSMTILYEIHDIARFERVQNFASYSRLVKCEKSSAGKKYGTSGAKIGNVHLKWAFSEAAVLFLRGNPRGQKYLKKIENKHGKRKALSILAHRLGRTVYYMLKKKRTFSMDAFLTA

SEQ ID NO: 305046 - protein, 347 aa, unidentified
MKHYAGINVSLNSSSVCVVDEIGKIVREVKVASEPVALIHCIKSLGVRVERIGLEAGPLSQWLYGALRESGLPVELLETRHVKAALSAMPVKTDRNDARGLAQLMRLGWFRPVHCKSMAAQEVRALLTARKLVQSKLYDIEMSLRGILRGFGLKVGPTTSRSFAARINHLAAGHPSLEMVAEALLSTHAAALCAFKNLEKNVRQISRADARVRLLMSTPGVGPVVALTYVSAIDDPKRFTSSKPVGAHFGLTPKKYQSGETDISGRISKIGDSSVRAVLYEAAHIILTRPIHGGALKSWAMRLAKRAGMKKAKVALARKLAVVLHRMWVSASTFDFEKANGCTRAAA

SEQ ID NO: 305047 - protein, 331 aa, unidentified
MSQQVHAGVDVSADSFSVAYEIPGQALQEARMDNSAAGHRKLCRLLTRGGRPARVCLEATGIYSFDLALALHRTKGIEVMVVNPRVTTDVMRARMHRTKTDATDAAAILEFVQRMPFTPWQPPAPEILALRAITRRITALTLMGGQERNRRHAADRCREFPGVLEAESTAHLEFLKTSIERLTQEALAIIQAHPRLRRWAAHLVSVKGIATTSAIGILAELAVLPDELAARQWVAHAGLDPRHFESGTSVKKPTRISKTGNKYLRAALYMPALVAIQHEPNVKAFYEKLLARAKKPMQAIVAVMRKLLHAIYGMFRHGRDFEGDKFYALTT

SEQ ID NO: 305048 - protein, 411 aa, unidentified
MNNTLFVGIDISKRSNVATFMNCEGKVVGRLTFSNNGSGADRLVAKILSYYEKEDFEAIRIGMENTSVYSKNLVWFLYEHEALNEHKLSIIPLNAIMVANYKKSFLDMDKDDITDSFAIADFIRIRPGLLPFKLDDRQEALKILTRSRYNYVQALSRMKSQFLTRLFLSFSEMEAGKPFYSIFSKTSLSLLEEEFTLDELAEKPIPELVEFLQEKGGGKFQNPEEIAKVLKKAASSSYRVPAMVRESLNRTMASDMEIMRILENEIHNCDKNIEKLMKSVPAILVSIPGIGPVLAAGIMSEIGDISRFQKQESLGKMAGFKWKRNQSGKKESEDKAAVLSGNKKLRYYLVEAANRVRIHDPVFEAYYRKKYEESKTHAHKRALILTARKLVRVIFYLLKENKLYKPDVGIS

SEQ ID NO: 305049 - protein, 418 aa, unidentified
MTATHSTVSTLLVAIDISKHRHEVLIGIPGKKRRRRLTVMNTLEDFQRLSAALASYDLPVLIGFEATGNYHRTLAHHLGQAGFELKLISSVGLARTREALHNSWDKNDPKDAQVFLHMLEIGAVQFFHDPLVTGTADIQELSKTHEIVSRSKTELWHRILTHYLPLYFPEAERFHRSSRTDWFLAFLEKYPTPHMISAMSLDAFIADAWQVVGRKVSKELLLSDIYATAVDSIGLPVHPDSDAIRMFRLVLAEGRSLIRQRNEIEARAVELLSDLPDYQLLTTIPGIGPINAMTILAEAGDLRRFRHHRQFLKFCGMDLATVQSGMFRGQSKISKYGNARLRRTLWMAGQTAVLKRTNSFRDKFERYISKDRHNAHLRRKAYTAIAAKMARTVHAVVKHGDPYRPFFEGVSPGGKTSL

SEQ ID NO: 305050 - protein, 347 aa, unidentified
MNIIGCDFHSRSQLIEMLDASTGEVIEKRLDHENGEVRRFYEGLKAPALVGIEATGYTRWFAEMLAELGHELVVGEAGKIRAMNPRKQKHDRRDAEHLLNLLLKGDFPKIWLPAAEERDVRVLVEHRHQLVELRTRAQNGLQAIALSYGLRRRKRLWSAAGQEELEKIPLREGMGRRRQDLLELVRQLGTWIKQLDQRIQQEVARRQDAQRLMTHPGVGAQTALAAVLVLGPVERFPDDRHLTSYLGLIPAEDSSAGRQRFGHLTKQGNRLMRFLLVEAAGIAARYDPRLQRAYRRLAFRKGAAVARVAMARKLAIRLYIMLRDGIDYQEFCRRGSHAGMLASKPLV

SEQ ID NO: 305051 - protein, 359 aa, unidentified
MKHDEKEPAIIGGVDTHKDSHTAAAITELGTLLGTQTFPANAQGYEELLDWLRTHGTVDRIGVEGTGSYGSGLSEFLRQAGVAVEEVNRPNRQSRRRHGKTDDTDAVSAARTTLAGEALGSPKVRDSLVEAIRVLRVERRSAIHSRTKTANQLHALVTTAPEPLRAELRGLSVRALVDRARRMRCPKVTDVESATKRALRGLGRRWHALHEEIGELDVELEPLVRKVAPDLVALVGVGIDVAGSLLVAAGGNPERLRSERSFAALCGASPVDASSGKQHRHRLNRGGNRDANRALWVIALVRFRRDPRTRDYVARRTAEGLSKPEIMRCLKRFIAREVFKVLRSLAPSTKTSASPQEAA

SEQ ID NO: 305052 - protein, 346 aa, unidentified
MENRTVVAVDIAKNVFEIAVSEIPGQVIRRERLPRSAFLEFFTQSPLAMVVMEACGSATHWGRQIERLGHGVTLLPAHHVRPYITRNKTDRTDAKGILEAYRNKDLRPVPMKTIDQQVVAAIHRFRAGWISSRTAQVNTLRGLLREIGVAIPKGIEKVLPQVRELLEDADSAVPDPLRPMVAAACDQIETLTRQVKQADRELAAIAKRIPEVRLLLSIPGFGVIVATAFFAVVGDVHRFPSGRHVASYLGLTPRERSSGTTRRFGRISKRGNSYVRMQLVHGSRSVLGHAKRAKSHDRLQLWVLNLHRRTSFNKAAVGLASKLVRVAWAVLKHGRPYEPMPIQLAA

SEQ ID NO: 305053 - protein, 325 aa, unidentified
MGKPILIEEPDAQEVYYDICCGIDVHQKTVVACLLRPNRKKEIRKYGTSTRELKELAQWLLEEKSEMIAMESTGIYWRPLYNIFEEYELKAMLVNAAHMRNVPGRKSDIGDAQWIAKLLKQGLLKASYIPRREQRELRDITRYRKNLVEEKSREVNRLQKLLESANIKLGTQLSDINGKTGRWLLECKLSGTVPGEEELKQKLPTKRMKERTEEIEQSMEGELSEAQEILLRQILKRIDGIETDIEQLSEAIERLSAKDAAIKEALTEIPGVGKSSAEIILAEIGTDMEAFATSEQLTAWAGVSPTKNESAGKKKRSEQEKGTSC

SEQ ID NO: 305054 - protein, 396 aa, unidentified
MLYLAIDQHRKQLTVNLRDEAGDVIWKRQISTEWARVRKFLEELRQRSMPKGGFVAIVEVCGFNDWFLKLLKEYGCREVVLVQPEKQSKTKTDRRDADSLGELLWTNRQRLLAGKKVQNLRRIVPPSARDAEDRQLTALRQRVGRQRTRTINKVQHLLLKHNLQQECPTKGIQTQGARKWLARLPLAVIDRLEMDQLLAQWELWDQQVEELEAKIRERQAENPTAAIVATMPGAGAYSSLALACRIGSIERFPHARSLAHYWGLTPGCRNSGDATRRMGSITKQGSGLARFLLSQMVLHVLRRDARIKEWYRRIKKRRGTKIARVAAMRRLATILWHLIKRQEPYRSVAMSKTKAEDKSGVILPDRNAFFEELQGRSRETKQKGRRSPATAAAARP

SEQ ID NO: 305055 - protein, 370 aa, unidentified
MKKNILYVGLDVHKNTIDVAIAEGQPEGKVRSYGKIDNTLDALDKLLRKLHSSGSELQFVYEAGPCGYQIHRYLTPTGVRCSVAAPSLIPRRSGSRIKTDRRDAINLVRLFRAGELTCIYIPTVEDEAMRDLIRCRDDIKRLERKVRQRLLSFLLRHGFHYAGNKNWTKGHMNWLAGIKLAHPAQQIVLQEYIDAVNESTERVLRLTGQIQALVPGWSRAPFVKAYQALRGVSLIVATTVVAEIGDMSRFKNPKELMAYLGLVPSEHSSGNSVRRGSITRTGNGHVRRVLIEAAWTYRMQARKTITILKRQAGLPKSICDISWKAQTRLCTRYYRLFAKGKSKQAIITAIARELSAFIWAIDREVQQTTL

SEQ ID NO: 305056 - protein, 372 aa, unidentified
MNYNTVYVGMDVHKESFTLCSCKYEDEKASHYQRTPASYKNVLRYLAFLRTIYGEYTRFVCGYEAGCLGYSLYHQLENFNVECVILAPTTMLEQRSKRRIKTDKRDAEIIARSLAQHNYSPVHIPTETDNQTKEFIRMRDDHKAELKKIKQQILSFCLRQGYQYDGSGNWTAKHVKWLRSLKTEGLYKEILDEYLLTYTILTDKLNRLDQRIEELASKEEYKESVSKLTCFLGIKIHTALSVIVEVGDFQRFVSARKFAGYLGLVPGQHSSGDDRNGLGITKAGNTHVRRLLVESAQSYTRGKIGYKSRVLRSRQAGNSPQVINYADRANERLRRRYYKMVLKDGKKYNIAKIAVARELACFIWGMMTDNIY

SEQ ID NO: 305057 - protein, 347 aa, unidentified
MNLSRAGVDIAKSVFHVHVVDRHGQPKWRAKLKRNEWLDALCQRLAPGAEVGMEACASAHHWARKLQARGFRVKLIGAQFVKPYVKSNKNDQVDAEAICEAMSRPGMRFVAVKSVAQQDTQAAHRIREELVGQRTAKANQIRGLVGEYGIVAPKGIQQLRRALPDWLEDAENALTVDFRSLLADLAEDLRYLDDRIALLDEQIAQRVKEDPVARRLLALRGIGPLTASALAGALGNAQAFNKGRDFAVSLGLTPRQHSTGGKDRLLGISKRGDAYLRKLLVHGARSVLRHAKDRDDALSQWLKALIARKHPNVVVVALANKTARVAWAIVHNATDYDPRLVAGKGTN

SEQ ID NO: 305058 - protein, 342 aa, unidentified
MNSMSTKLVGKLSPSKFVPEVEHEARIKHKGEREMEAPAAGVDVSKDKLTMYFQGRIYELPNNKQGFEEMRKILPPGCVIVVESTGIYHVNMAMYLRSEYKVRMINPLILKKFKDVRGKKSDQNDAKKLTELVNMSVEFVMDEARELTSQWEFVVKNIIRVKNRLKRDLTLLGHKDSLSKRNLERALGEGEGIVLDEVRFLLHELERLEERKRSVEEELAKLVPQDSPIFTIPGIGRTLGSIILARVGEVRRFESKRKFVAYCGLDPTVERSGKSVISKGISRRGDAMLRRAFYLAALSAVRVNPVIRRFYEERKGRLKGRKLIVACARKLAVITWATFYST

SEQ ID NO: 305059 - protein, 422 aa, unidentified
MSDRRAVAYSAYVGIDWSNSKHDVCVQQADPDTRKFEVITHSPEAIDAWVKSLHLRYGGTIAVALELSKGPIVSALQKYDFIDIYPINPSTLAKYREAFQPSKAKDDPTDAELAVDILLRHPEHFKLLKPQSAEMRALATMVEQRRRLVGDRVRITNRLRSALKQYYPQVLEWFDHIDTPLFCEFVKRWPTLGQAKQARAATLRRFFHEHHMYREGVLDNRLQAIKSARALTLDTAIIMPYRMQVLVLVEQLELMFKAIGQFDDEIERLASEHPDYSLFKSLPGAGPSLAPRLLVAFGEQRDRFKSAAELQKYSGVAPVTERSGQKHWVHWRLQCPRFMRQTFVEWAGQTINKSYWAGEYYQQQREKGSTYQAAVRALAFKWIRILYRCWQTGVAYDESRYLKALERRGSPLLKRQTMLKSA

SEQ ID NO: 305060 - protein, 413 aa, unidentified
MDVLHPRCCGLDVHKSSISACILLREAGRVQKHQRRFGAMTQDLQELAEWLGRFGVTQVAMESSGVYWKPVWNILEGQFTVVLANAQHIKNVPGRKTDQKDAEWIAQLLQYGLLRPSYVPCEIIRDLRDLTRMRASLSQEAARLSSRIQKVLEDANVKLASVATNVLGKSGRAMLEDIISGEDDPERLASLALGHLRVKIPQLRRALEGKIRSHHRFLLRRLLDQVQFVEQEIALLDQRLEDIGGQRPELAQAVERWDTIPGIDRVAAWALLAEISDNMAQFPTAEHLASWAALCPGNHESAGKHLRGTTRQGSPWLRRMACQCAWAAARTKNTYLSSQFRRLAARRGKKRAIIAVAHTIIVIGYHLQTNQSNYEDLGGNYFDRIHSDGLKRYLVKRLQQLGHKVTLEPMEAA

SEQ ID NO: 305061 - protein, 338 aa, unidentified
MDHYAGIDVSLEYSSVCVVDATGKIVREAKVLSEPAALISWFGSLGLSLVRIGLEAGPLSQWLYAALRGAALAVELLETRHVRNALKTMPVKTDRKDARGIAELMRLGWHRSVHCKSMAAQETRAMLTTRDLVQSKLHDVEMSLRGTLRGFGLKVGKTTPRRFEARILELVAGHPSLEVIAKALLAVRAVLLREFNTFEKRVRTMARSDIRARLLMSVPGVGPIVALTFASAIDDPTRFKSSKSVGAHFGMTPKKYQSGETDITGRISKIGDKRVRTVSYQAAHVMLTRPVKGCSALKSWAMKLAKRAGMRKAKVALARKLTVIMHRMLADGTMFANA

SEQ ID NO: 305062 - protein, 408 aa, unidentified
MQVTFGIDVSKSNSTVCELIGESKNELTITNDRPGFIQLLHELAAFSKHPQIIFEATGVYSRRLQAFLEDYGYEYVVLNPLKAKKEMNMGLRYNKTDKTDAYHLALIQRLYRHPVNQSESQTYKQLNALSRFYDQLTSDLVIAKNRLHQALQSTFPEIENLFSIARGKNYWQIVARYSHCDLVRKDDKKQIINWLMKLKGIAFNHAQRTTDKLIELAHLAYPVVSCSDIEVQQAQYYARRLLNLSNQRQRIITKMVKLAKTLPNHDLENLESIPGFAQTTAVRVLAELGDLRRFSNPNKINAFIGIDPGRYQSGEMDSNLSITKHGNAVARKLLYRAIGQIDNAAKTNPCHIADYYESKKLSSQTKGFKKIAIASIHKLIRTIYALIINDQPYDYNVATHNQKDFSRN

SEQ ID NO: 305063 - protein, 312 aa, unidentified
MLTHECPLFIGVDVAKPTVAIQFPDQLWSTANTAQGHAAFLAKLRSLGPVHVICEATGGYEHALVLALHHAGVAVSVINPRQVRDFARARGRLAKTDAIDAALLRDYGVALRPAPDAPPREGEAEFAELVRARQELVALLTDETNRREHATVRALVKLSLARERQLNKQLTTLDALIAEHIAARTTLTAQAERLQQVRGVGRVSAFTVLALLPELGRLGDAQAAALAGVAPFNRDSGQFRGQRHIHGGRAAVRRVLYMAALAATIHNPILKAFYQQLRARGKPAKVALTAVMRKLVILMNRLLKNPDFNLVC

SEQ ID NO: 305064 - protein, 461 aa, unidentified
MSKKKPGGRQKGSAQKKVDWKALEIVHPDAAGIDVGGSEHWVAVRPDRDAEPVRRFGPFTADLHEMARWLVEKGVRSVAMQSTGVYWMPVFEILEQHGLEVYLVNAQHTKNVPGRKSDVEECQWLLKLHAFGLLHNSFQPTDEIRIARTLWLQRGNLVAEASSAIQRMQKVLTEMNVQLSNVLSDIRGVSGMKIIGAILKGERDPQTLASLARPEVKATPRDIAKSLEGNWREELLFVLRQQVELYRIYQEKIADCDLQLRKHLESFGSKVDLQKQPIGPKPKGKKGGRNTPQFDLRTELYRITGIDWAQINGIDVLTAQTVIAEAGADLSAFPSEKQFASWLGLCPTNEQSGGKILSRRTRKVVNRATVAFRNAASTLLRSQSYLGAQYRRLRTRLGAPKAVTAMARKLACLFYRLVQHGQQYVDKGTEYYESRYREQQIRSLAKRAQKLGLQLVIPKTA

SEQ ID NO: 305065 - protein, 408 aa, unidentified
MQVTFGIDVSKSNSTVCELIGESKNELTITNDRPGFIQLLHELAAFSKHPQIIFEATGVYSRRLQAFLEDYGYEYVILNPLKAKKEMNMGLRYNKTDKTDAYHLALIQRLYRHPVNQSESQTYKQLNALSRFYDQLTSDLVIAKNRLHQALQSTFPEIENLFSIARGKNYWHIVARYPHCDLVRKDDKKQIINWLMKLKGIAFNHAQRTTDKLIELAHLAYPVVSCSDIEVQQAQYYARRLLNLSNQRQRIITKMVKLAKTLPNHDLENLESIPGFAQTTAVRVLAELGDLRRFSNPNKINAFIGIDPGRYQSGEMDSNLSITKHGNAVARKLLYRAIGQIDNAAKTNPCHIADYYESKKLSSQTKGFKKIAIASIHKLIRTIYALIINDQPYDYNVATHNQKDFSRN

SEQ ID NO: 305066 - protein, 317 aa, unidentified
MTTGNEKFVGIDVGKTWLDLAIWGSEEKWQVSNDASGIDKVVDRLVQLAPTLVVIEATGGYEQLVAQGLILRGFSVAVVNPTRVRALAKATGKLAKTDTIDARLIAEYAFKVRPAALAPQEASQMRLKALVSRREQLVGMRAAEQNRLGTTHSSMKIDVREHIEWISQRIQLLEDEIKALLASLPELKALADRLDTIPGVGLITAVSVVVDMPELGQLDRQKIAALAGLAPFNRDSGQKRGKRRIFGGRKGVRRVLYMACLSAMIHNPIIRAMYKRLTEKGKIFKVAITACMRKMLTIMNAMIRDKVDWRPPVPISE

SEQ ID NO: 305067 - protein, 285 aa, unidentified
MDEDIIIGVDLAKNVFQLHGARRDGQVVFRKKLSRPQFAKFCAEHPRSVFAMEACGTAHYWARELMSLGHEVKLIPPIYVKPFVKRHKNDAADAEAITEAALRPNMSFVVPKSAETQALAMMMRTRDQLLEQRTATVNTLRGHLAEFGLIAPVGLKNVERLRALVADHPNLPELVVTMANLYFIRIDQLSEEIDTLTGRIKNHCADSPEARRLQTMPGIGPVAAMAIEAFAPDMKFFENGRDFAAWLGLVTKQHSTGGKIGLGQTSKWAKRTSAARPLKPSSMYC

SEQ ID NO: 305068 - protein, 339 aa, unidentified
MSKLLKNFVGIDISKTYFDAAIIKADHPSGSMHNQFSQCQDGFKKMLTWLQQQDVLLKSETLFCMEYTGIYNRGLVNFLIEQKAQLWVEMPLRIKKSAGFERGSDDKISAIKIAGYAFRYQDKMQLWRPVDSSIEKIKHLIAQRDRVVNAITQLSVPVKELSDCGCSKEAKELEKLQRSPLKALQKTKEAIEELIVKTVQQDAVITKKVQQVQSIKGIGQVTAVAFLAYTKGFTAFSNAKELACYCGVVPFAKKSGTSIKFKPGVSLYANKKLKKLLHLCALSAIKSDKEMRAYFERKVAEGKNKMCVINAIRNKLIHRVFAVIRDDRFYEENYVRKCA

SEQ ID NO: 305069 - protein, 381 aa, unidentified
MKRVCGLDVHKDSIFVCILGDEGIVYQNKFGVQTPDLEQMAGEMHRHKVQEVAMESTSIYWLPVWRVLDPYFDLKLVNPYFIKQLPGRKSDAKDAEWIATCLFKGLIKGSYVPGELIQQLRQYNRRVYDLTGDIARKLTKLDNALQRCNIRISNYVSRTDSKSYTKVVEMLSQGVTDPESLTKAIHGRTVNKWGREAIKASLTGVVGPVDSDIIRQLREEIALSQRNKDECLSKMEALCRKFFPEQLNNLLTIPGVKLQSATAIIAEVGSDMSSFEDAPHLVSWCGLRPRNEESAGKILYRKITHGNKYIRKTLVECAWAASKTQGCFFNRFSYHQVMVRRKSKMKVIVAVARKILSAVWFVLHDGVPYRDFSNDIAPVSL

SEQ ID NO: 305070 - protein, 340 aa, unidentified
MTKLYTGIDLHSNNNYIGIIDDDDRRIYKKRLPNRGEVILAELEPFKKELAGIVVESTFNWYWLVDCLMDAGYKVHLANPAGIQKYKGLKYSNDAYDSFWLAHLLRLNILPEGYIYPKEDRPVRDLLRKRLHLVKLRTSLINSLQGIINRNCGVKLTSGKIKQVSQDNVISLLADEDDLALSGAVSKDTIDYLGQQITRVERSVKNKIKTKPAFTWLQTIPGVGLILALTITLETGSIGRFAKVGDFTSYCRKVPTSWTSNNKNKGKGNKKNGNKYLAWAFSEAAEFTRRYNEMARRFYNQKMARTNRMVAHAALAHKLARASYYIMRDNVEFDNNKLFA

SEQ ID NO: 305071 - protein, 415 aa, unidentified
MALKIVYPVCCGIDVHKTFVVACIASTNSSGITTYKRHRFSTFTKGLQELSQWLCKNDCKDVCMESTGKYWIPVFNILEHSCNITLAHPKYVKAIRGKKTDKKDAQWIADLFKHDLVAGSFMPPLPIRQLRDLMRYRFKLTNFSSSEKNRLQNSLTVSNIQLGNVVSDTFGKSSMNIINKLLNNPLDTSFDIEPLIHGSMKNKLPELQLAIEGAITPEQAGKIMVIKKHYENLEARKADLEAIILSLAGSYSEEITLILTVPSFKNIFSAIAVIAEIGVNMDVFPTSKHLCSWAGLTPTNNESAGKKKSVRISRAGCYIKPLLVQCATAVVKSEKHPEIRNRYLQLKKRRGHKRAIIAIARMLLTAIYHILKSKEPYNPDLYKKSDVRPVRHEITIEQAIRLAQAQGYRILEFAT

SEQ ID NO: 305072 - protein, 311 aa, unidentified
MKDTIGIDISKDTLDTYWLSKRKHKQFANNKTGLRALISWVREAEASLVVFEATGVYHRLLEVSLAAHDFSFARVNPRQARRFAEGTGTLAKTDRVDAAMLARMGSLLELKADKPKSEMLHNLKGMITARQALIKDRTAAKARLATATYPLLRKQATLRLRQVERDIAQIDATIETIITTDKTLSQKADILISIPGIAKITAYAMLVEMPELGSLSGKQAASLAGLAPISRQSGKWQGKERIQGGRAVLRKAIYLPAVVATRFNPDMKAKYHQLIGNGKCKKLAITAVMRKLVVMANALLRDGRKWTETRA

SEQ ID NO: 305073 - protein, 416 aa, unidentified
MKKHSNSGKKSEQPSKRTKSRGPVRRDTKEVLAELVGKLKEKLDRKKVAARSAGEKHQRGELRPNLDRLTVGVDLGDQWSHYCILGLEGETLAEGQLRTTEEDFATFFQGLNAARVVVEVGTHSAWVQEVIGGCGHEVLVANPRLMDGSKRRKRKNDRIDANKLARLGRVDPESLYPIQHRSREVRQDLVMLRARDALVAARTEIINTTRGLVKSMGTRLPKCSSQSFAKKGEEAVAVEMREALLPLVRLAATLSADIQEYDKKIEELGREKYGHTALLRQVKGVGPITALAYVLTLENPERFAKSRDVGPYLGLVPKQEDSGESQPQLGISKAGDTMVRKLLVGSAHYILGPFGPDTDLRRYGLRLCERGGKNGKKRAAVAVARKLAVLLHRLWVSGEVYEPLHNAMSAPIEAAA

SEQ ID NO: 305074 - protein, 386 aa, unidentified
MANQNDLSRSVVAFEQDNTIIAVIEMSLNSWLVAGIVPGIERHPLKKLSFNEEEVLLKLLRRWRDEAAKARHMITRIVVAFEAGRDGFWLARWLRARGIEAYVIHPTSVAVSREHRRAKTDRLDTELLKRAFLGWLRGEPDHCSMVAIPSVQEEDAKRPTRERENLVGERTRIINRMKACLVRFGIRNFNPTLRRAPERLNVLCTPEGVSLPPNTLAELRRDLARLRFVMDQINEIEAARLQRLEQEPTAEPHAMVRLLARVIGVGIETADMLVHEILSRKLRDRRAVARYAGLTGAPDESGSKRREKGLAKAGNARVRRGMIQLAWRFLLFQKDSALSQWYRTRTESAGKKRKTMVVALARKLLIALWRLVTTGEVPAGVVLRAA

SEQ ID NO: 305075 - protein, 332 aa, unidentified
MENFYFIGVDVSKKKLDFCVMFEGKVVHEEATANHQTAIMSLLRHLEEDYGIASGQMLVCAEHTGQYTFPLACACKAVECKLWLENAAEIKYSSGVQRGKNDRVDAKRIAIYASRFQDKVQYYERPTEDIERLKQLESERTLYVTDLAKYKGQMKDQKEYMPKSLYERKMKRLQALMDDLEEAIQSITDEMDEVIASCPVLFRQRELLMSIDGVGRVVATNMIIATEAFTRFGDPRKFNCYAGVAPFSYSSGTSQQSKARVSHRADKVMKRLLHLAAVAVTHRIGGELKKYYERKVAEGKNKMSVINALRAKIVARMFAVIKRNERYKPILS

SEQ ID NO: 305076 - protein, 421 aa, unidentified
MTQPYGNTGGVVLVAIDVAKKQNAVLIRLPDGTRKKLTVTNNLADYRELSSYLKKLEVPCKIGFEATGNYHRALAYYLQQRGFDLELISSVAASRTREAMFNSWDKNDPKDAQVILHMLQTGLTQTYHDPLVHRINDIQELSKTYCQVSLRKTRVQHSIMTHYLPLYFPEASKYFHTSRAEWFTSLLMTFPNPASVLKYSREGFIKAAQTVSGRKVNKAAWLKDFYETARESIGLPVPEDSEAVRMFRLVLQEHQDLCRMRRAIEARAELYLKDNADYLRLRTIPGIGAVIALIILAEAGDLRRFSHYKKFLKYCGLNLSTQQSGGFRGMSKLSKHGNSRLRYAFWIAGTSAIRMRENTFRKKFENYIKTDPQNPDLKRKAYTAVAAKIARVAYGLIKSGRDYRCYHESSIPSGIILSVGR

SEQ ID NO: 305077 - protein, 371 aa, unidentified
MNTVINIGIDVHKDSYSLCSYSFATKQAFGQTRIASNSNLVIKYVRKLQESQPNVEVLCGYEAGPTGYGLYRDLEKAGIGCVIMAPTTLPKASGNHVKNDRLDAMELSKHLAFGTYSAVHVPTSEDEAVKNYTRLRNTRLQALKKSKQNLLSFLLRCGRDFSEGKNYWTQIHYTWLKRQQFTDPVDQETFNEYLQEVYDQQEKVDRYNQRIEQLSQLEAYRDKVAKLRCFRGIETHTALSLVSEIGDFSRFANAQQFSAYLGLVPREDSSGQREKRGGITKAGNTRLRLLLIEGANSTLRSSLYGQKSKRLKARQEGNEADVIAYADKANRRLHRVYNNLTNRGVIKNKATVAVARELSCFIWGMMNNRFD

SEQ ID NO: 305078 - protein, 343 aa, unidentified
MENIGIDVHKNQSQICILTDNAELIEKRIRTDRARFAAVLGVRPPARILIEASTESEWVARCLEAQGHEVIVADPNYAPMYAQRSRRIKTDRRDARALAEACRIKAYRKAHRATDGQRHVKGRLAVRESLVRTRTKYISLVRSLLRREGLRIKPGSSSSFRERVGELEIPKYLQREIAPILTLMIPLNRQIERTTKDIEKIAHKDPAVRRLCTAPGVGPVTAASFVATIDTAERFQGAHQVEAYLGLVPRELSSGEKQRKGHITKAGNSRTRYLLVEAAWALLRTQRPGVAPLRIWTERLAGRRGKRVAVVALARKLAGILYAMMRDETEFEDQRWTTRRQGV

SEQ ID NO: 305079 - protein, 402 aa, unidentified
MTYDYVIGMDACKYFHHACVLDIDGTQVLSKRINQNEQSLRALFSAFSAHDHKVLVVVDQPNNIGRLTVAVAQDIGIDVRYLPGLAMRQLSRIHAGNAKTDIRDAYIIAHAAKNLPESLRSVDRVEEAFLQLKVLNGIDEDLARSYTRLINQIRSALVGCYPQFEQALRGQIIHRKWVLHLLARYGGPTKIKRLGKAKAAAFARRYKARNPEPVLDAIFAAISEQTVTIAGAHYAEMGVAMSAKDALLKLEHRQQIEKEVIELINDIPHTQFLLSMPGIGPKTAAQILMTAGDMSDFPSAGHLASYAGLSPRTNQSGTSIMSNSLNRAGNKKLKNALWQSSFASIRSHERSRQFYERKRREGKRHNAAVVALARRRLNVLYAMMRNHEHYHDPAPSQEDLAA

SEQ ID NO: 305080 - protein, 420 aa, unidentified
MTKLESTPAAAVLVAIDIAKVRNEVLIEASGHRRRRRLTVLNSRPEHDRLIEALQAYGRPVICGFEATGNYHRPLAWRLGEAGFELRLVSSLALARTREALHNSWDKNDPKDAQVILHMLRLHTTQAFHDPLRAGINDVQELSKTHEAVAKAKTEIQHRILTHYLPLYFPEIDRFRGNSRSDWFFAFLDAFPTPASVTALTKEDFVEAAWDVVGRKVSKTQLLMDIYETARTSIGLPLPLDAPAIRMFHMVVAEARSLIRQRNEIEMQADELLRHSQDYQLLRQIPGIGPINALTIIAEAGDLRRFRHHRQFLKFCGLDLSTQQSGQYRGLTRLSKFGNARLRRTLWIAGQVAIRQRENGFRHKFERYIARDRDNPDLRRKAMTAITAKMARVVHAVIKSGSDYRPFVEGRVPGGITSVS

SEQ ID NO: 305081 - protein, 346 aa, unidentified
MEYGAIDLHLRRSQFRIVREDGTIVKEGKFDTTRAELTRIFGGRERLRILLESSTDSEWVAQQLETFGHEVIVADPNYAPMYGTRVRKVKTDGRDTAALTDACRLGIFRRAHRVSAAQRARRQQLRIRRHLVRMRSGSVSLLRAILRQDGWRLPSGAVEALEARLDRLALPTALTAILEPLRTWLVELNRLIATADEEVAQTAKRDAIATQLMTAPGVGPVVALTFQAVVDDPARFGGHAGRASAFLGLVPSEDSSADRRHKGHITKTGPTDLRALLVQASWVIWRGRSAEGAALRRWAHALADRRGRRIAVVALARRLSRILFAMWRDRTDFRGEARPAAMPVTA

SEQ ID NO: 305082 - protein, 349 aa, unidentified
MSAKFNSEIAVIGIDIGKNSFHVVGLDRHGAIVLRQKWSRGQVEVRLSNLPPCLIGMEACVGAHHLSRKLTSLGHDARLMPAKYVRPYSRGQKNDFRDAEAIAEAVQRPTMKFVATKTAEQLDLQALHRVRERLVSQRTGIINQIRAFLLERGVAVRQGLRFLRAELPRILARPCKALSPRMLRVIEDLAGDWRRLDERIDGLSTEIEVLARQDAGCERLMSVPGIGPIISSAIVAAIGGGDAFSKGRDFAAWLGLVPKQSSTGDRTILGKISKRGNRYLRVLFVQAAWAVLIKPKSWARHGLKPWLEAAKKRLHHNVVAVALANKLARIAWSVLAHGRVFEATRIRAA

SEQ ID NO: 305083 - protein, 319 aa, unidentified
MAQKTRIVGLDVAKNKVDACIRSAGVRLMTPSTPEGQAELVAWLRAHRVRRAVMEASGGYERSWAEALRAAGFEVLIVDPRQVRCFAKAAGRLAKNDPIDAETIAWFAETFSDREAQPADPARQEIDRLVQARTALKDLEERIAQQGEHCPPDIVAKALGAIAEAMRAELRKLEAAIAAKIKANAVFARRAEIIDSVPGLGDQAIAGLIAWAPELGRITNQAATALIGAAPYDDDSGERKGVRHIKGGRRKLRNLLYMPDMGAATQHNPVLKAYYQRLRARGKEAKVALIACMRKLIVILNTMLARDQTWSPPPAKAAG

SEQ ID NO: 305084 - protein, 359 aa, unidentified
MTTTAVTTAAGPILAIDLGKYKCVACVYRSATEHTFQSIDTSRTEVARLIERTRPAVVVIEACSLAGWVHDLCLELKVPCRVANTGAEAWKYKHAKRKTDRDDALRLAQLYALGQLPEVVVPIKVTREWRALIAHRQALITQRVAAQNRIRSILVGQGLPAPRGAKAWSATGLAGIGQFARPLAECGPDDLWRGMLELALTAYRQAEELVAVAEARLDAIGKADARVRLLDSMPGLGPRTAEAVVAHLGDPKRFRSGKQVAAYGGLVPRQYQSGEDDRRGRITKRGPAVLRKLLVQCAWAMIRYNPWARAVYVRLSRGKARKKQAVVALARRILVRCWAMLRDGVPWRADPALAVVVAD

SEQ ID NO: 305085 - protein, 338 aa, unidentified
MTQHKIIGIDLAKNIFFLFEINHKGRNLSRKKLPRSKLLDYIAAQTLCIIAMEACSGAHYWAREFEKFGHKLLLYPPQHVKNQRRKQKNDYNDAEAIAELALYQRNYTVPHKSIEQQDIQSLIRMRRLCVTERTRLINQVRGLLAEYGIVISKGKASFRQTIPEIMENSENLLSPTLRELLAHQYERYLYIDEQIQWFDEKLNQTVKQFDNAKRLMSIPGFGPLTSQAVAVWLGSGQQFKTGRDASAAMGLVPKQDTTGGNVTLLGITKQGNTYIRSLLVHGARAALRRAKFKSDKLSKWMLDIQERRGANRAAVALANKFMRIAWAVTTKKEEYQPA

SEQ ID NO: 305086 - protein, 410 aa, unidentified
MDIIYDCCAGLDLHLKSIQAHVRSRAEGGAVTTASRKFGTTTAAILSLGDWLAEHGVRKVAMEATGVYWKPVWNLLEERFSLMPVNAQHFHNVPGRKTDAGDAEWLAQLLQCGLLRDSFVPPRAQRELRDLTRQRICLVDDKSRVVNRIQKTLEDANIKLSSVAGDVMGASGRDMLRAIIGGQEDSMALAELARQRMRAKIPELREALRGGVRDHHRFMLKQLMAQVEMLESQIALFESRIAQLLDEDQEIIDRLTGIPGVDQRVARIVVAEIGTDMTRFPTADHLCSWAGVCPGNHESAGKHKSGRTRGGNRWLCRTLVQAAWAGSHTKNSYFQAQHRRIARRRGFKRATMAVAHSILVVIYHMLKTGAVFKEAGAAFFDCIKPERAVKNLLKRLEALGYDATLTPRAA

SEQ ID NO: 305087 - protein, 317 aa, unidentified
MAQNGRVVVGVDVAKDKVDACIRSLSQRQTFPNTAPGHRKLAAWLAKHQVNKAAMEASGGYEREWAKVLRQASMEVRIVDPKRVRSFALSAGQLAKNDTIDAEMIAWFAETFSEAPGRPHDAARQELAALVKARKRLIDLKTRLQVQDEHAASGPVQKAHARVLKSLTSEIAKLEGAISVKVKSTPEFAARAEIIESVPGLAGTAAATLIAGVPELGQVSDAIAAALIGLAPYDDDSGKRRGERHIKGGRRWVRNAIYMPCLGAATLNNPVLKAFYQRLIAKGKEPKVALVACMRKLIVILNTMIARGEKWDSSRYA

SEQ ID NO: 305088 - protein, 411 aa, unidentified
MEVIDPRCAGLDVHEAFVMVVCRVLDAAGRVEKQVRRYSTMTADLLALADWLTATGVTHVAMESTGVFWKPVWNLLEGHFTILLVNPRDVKQVPGRKPDVSDAAWIAQLLQHGLLKGSFVPPAPIRILRDLTRHRTTLVRDKTRVVNRIHKVLEDANIKLTAVASDILGVSGRAMLAAIVAGETDPHVLADLARRRLRSKVPQLEQALRGRVQPHHRWLLHSLLGQLTFLEAQVVEVERAIDEAARPFAPAVVLLQTIPGVKARATTLLAELGAEMTVFPSAAQCASWSAICPGQDETGGKRGSGKTRHGNRWLKAALTEAAWVAARTKGTYAAAQYRRLAARRGKKRAIVAVAHSLLIAVYHILRDGVPYHDLGPQHFDRLHPTQLAQHLVKRLERLGLRVTLEAAIAPA

SEQ ID NO: 305089 - protein, 454 aa, unidentified
MTRQRKKSTAQAALPVMRPDAAGIDVGATQIYAAVPVDRDRERPVRCFPTFTEDLHALADWLEHCGIKTVAMESTSVYWIPLFQILEARGLEICLVNARHVKNVPGRKTDVSDCQWLQYLHAVGLLRASFRPEQTVCAVRSLLRHRESLVQMTGTHIHHMQKALDQMNLQLHHVISDITGMTGLAIMEAVLKGERDPKVLAKLRNHRIKASEETIAKSLVGDYRSEHLFTLRQSLTAYRSYQKLIEDCDEEIHRSLEEMDSKGDPSAAPPVHEEKEKEAPEKPPFQLSEQLKRILGVDLTKVPSLGTLNVQILLGEIGPDLTKFRSASAFASWLGLCPANDISGGAILRTGTRKVNSRAAKVLRLAAQTLYRSKTPLGDFYRRMRAKLGGPKAVTATAHKLARIIYHLVTTGQAYDATTFAQQQLRFQKHLEAKLRGKARELGFQLVPMEAASA

SEQ ID NO: 305090 - protein, 355 aa, unidentified
MNQEKYIGMDVHAATISVAVKNAQGKVLTECVLETKASTILEFIQAQRGTLAVTFEEGTMAAWLYDLLKPHVSRLVVCDPRKNALMRDGNQNDRVDALNLAELLRVNRVHAVYHGKHGIRALRELGRSYSTLTQDSTRVMNRIKSVYRSWAIPCAGTSVYSRRHRSEWLAKLVEPGVRIRAEHLYQQLDSLEPLRQAARRELLRESRKHAAVKLLRQIPTIGPIRSALLVALLQTPHRFRTKRQLWAYSGFAVQTYDSGEFRFERGKLKRNRERITVRGLNRNHNHDVKNLLKGAAVSAIERPGPLQDFYAALVEKGMRPSMARLTLARKIAAITLIIWKKGVSFDPKQLQRQAA

SEQ ID NO: 305091 - protein, 319 aa, unidentified
MADHSMFVGIDVGKRYVDVSFGGEGKVEQFPNDDEGIGQILSRLEGRKVEKIVLEASGGYQRQLLASLLSANYPAVAVNPRQVRDFARAVGRLEKTDRVDARVLALFAERVRPEVRPALDPTLEIVQEWVGRRAQLVGMLAAEKNRFQQAKVGGVRRNIQQHIDWLKGQLREMEKELSGLMKNCDAWDAKVQLIDAEPGLGRLSSVMLVAQLPELGKLSRRKIAKLVGVAPLSRDSGAHRGTRQTWGGRAAVRSCLYMATLTAIRVNPGIRAFYKRLVARGKIKKVAFVAAMRKLLTILNAIARDGAKRPPSLEATPAA

SEQ ID NO: 305092 - protein, 343 aa, unidentified
MSPYYYIGLDIHKRTISYCIKAVDGSLIGQGKVEADRKSLDEWAKELPGPWVGAMEATIFTGWVYDFLKPYAVDLKVAHPEMLKAITAAKKKNDRADAEKIADLLRVNLLPECHMLSEEIRELRRILRYRNHIVRTAVKMQNKISGLLMEVGVSYSKRRIHGKKYFHEILERVAEIPSSVKELLKLSRSSYEMFRTFQKKLVETLRTNTLIHDRVQRLMTIPGVGEITALTWVLEIGDPGRFASIRQAVSYCGLCSAQRESAGKEQRGPISKKRNKHLQTMLIEAAKLAPHWNEQLAIVHERELKKGNRNRATLAVARRLVAYMLAVDKKQADFKLPAEMQAA

SEQ ID NO: 305093 - protein, 370 aa, unidentified
MAHSSTLFSGLDVHKETIAVAYVAEEREAEVVSLGPIGTRQCDIDKLIRKLQAKGKTLHFVSEAGPCGYWLYRYLTQKTLQCWVVAPSCIPKKASDRVKTDRRDALQLARLLRSGDLTPVYIPSVEDEAIRDVVRAREDALKDLKAAKVRLKAFLLPQAIRSEGRATWGAAPLRWLAAVVCPTPAQQSVFQESVRAVSEHTERLQRLEAELPALVQSWRWAPVVEAIQALRGVQVSAAVTLIAELGELTRFETPRQLMSYLGLIPSEYTTGEHRRRGGITKTGTAHARRALIEGAWAYRYPAKVSRHLQLRLEKVPTAIQDISWKAQVRLCNRYRRLLARGKQVNQVVVAIAREMAAFVWAIAREVRGAH

SEQ ID NO: 305094 - protein, 344 aa, unidentified
MANHTLVAVDLAKTVFEVAVSHHPGQVARQKRYSRETFPLALAQLPPATVVMEACGSAHFWARYARSLGHTPLLLPAHAVRPYVRRNKTDRTDTKGMLEAYRNEEIHPVPVKSVAQQTLAALHRLRSGWLAERTARINTLRGLLREFGILIPLGAHHAVPAAWAQLEDADSGIPDPLRPALAELCAEIRDLERRIKMIEHQLAALAAQTPVVAQLLTIPGIGLLIATALVAFVGDIHRFPSARHFASYLGLTPRETSSGLRRRLGAISKRGDVYLRMLLIHGARSVLNAAKRSKTPDRLRSWALAKQAARGHNKAATALANKLARIVWAVWKHDRPFHSVPNAA

SEQ ID NO: 305095 - protein, 321 aa, unidentified
MKVVGIDIGKRKFDVALLDQGKVRNKVFDNTPAGHHALRHWLEAHACAVLDTHLCMEATSHYYEAVATALHAAGYQVSVVNPLQIKAFGESRLRRQKTDRADAELIARFCEQQSPLPWQPPAAEVKELQRLLARLEAVQEMRVQELNRRHEASGEALESVERMLGVLNDELAKLEQRIQDHIDQNPSLREQHALLTSIPGVGDRVSTYCLAWLQAERFDDVRQAVAFVGLSPSHHESGDSVHGKTRVSKVGHRRLRKILYLPAMSAARYNPAAKALSIRLKAAGKPGKAIVCAVMRKLIHWIFGVLKSKQPFDVKLALAKG

SEQ ID NO: 305096 - protein, 349 aa, unidentified
MYIGVDTHKKQHVLVALDAQGRHLGTQRSANSPEGWASGVQWASRWEERVWGIENSGSLGKGFAQFLLAQGEGVVHEVSPHRTAQYRRRGRTQDKTDETDALAIARLLVAEGETLPEVRRDDISTELRLLSDHRDNLLDERTRLINQLHGQMLQVDPLYKEKSGRLTDPRGVAYCRDLVVPDADRLLRTRLLIVHQRAEQIVRLDTEIATATAEIAARVQESQTPLLAVRGVGTIVAARIIGEIGVTPRLPSAAALAALAGISPVAVSSGGRGGYRLNRGGNRQLNRAIHVIALTQRRCDPRGRAYYMKKRAEGKTPRAALRCLKRRLVDVLFRTFRTRDEIPDLCAAA

SEQ ID NO: 305097 - protein, 392 aa, unidentified
MIYAGVDIAKADHVVGAVGETGDEVAKPMPFKNSKEGFERCVAWLEGIAETQDDVVIGMEATGHYWQACFSYLTSCGYRVAVINPMQVKAVRKLKSLSKVKNDRIDSVVIAETLRIGNFDETALATDELQSLKTLTRYQQSLKEQIAAVKTHVVCLMDTYFPEYDGIFSNMFGKASLAVLAKCPLPADIARVRESTLEKIVTEASHGRSGAGQAAKIKERAKASIGFTLGSEAASFEIKSYISQIGFLLARIAEADGRIAALLEAIEPLILTVPGISTTTGAQIVAEIGDVSRFKNAAAIVSYAGINSSVNQSGKFELEGGSITKHGSPYLRRALYLAAQGAYRLDPGLRAFYDKKRSEGKCHRVAVMAVARKLCHIIYAILRDQAPFESRG

SEQ ID NO: 305098 - protein, 422 aa, unidentified
MSKKKSSVAGLGALYARVCGLDVHKKVVVACVRILDPKDGTVQSTLRKFGTMTADLIELRGWLAEARVTHVAMESTGVYWQPVFNLLEGHFKTWVVNAQHIKKVPGRKTDMKDAEWIAQLMQCGLLRPSFIPDRQQRELRDLTRQQTKLVQQRNAVDNRIQKVLETTNIKLGSVASDVLGVSGRKMIEALIAGEKDVTVLAELAQRKLRDKIPQLQRALEGELTEHHGFLLRQLLGQYDFLEKEIARVSERLGAVAPPSFCAAVEQLDAIAGVGERGARALLAETGTDMSRFPTHKHFASWAGQCPGNHESAGKRRSGKTPAANRHLDAVLTEMAHAAVRTKNSYFKSQYHRLAGRRGKKRAIGAVKHSLLVIGYYMLRDNKPYKDLGVDYFDKINPQQRIHYHVRKLQELGQEVELSPMAA

SEQ ID NO: 305099 - protein, 324 aa, unidentified
MNVKTIGIDLAKNVFQIHGVDEHGKRLFNKQLRRAQMASFFANIPPCLIGMEACASAHFWANKLISMGHNVKLMAPQFVKPYVKTNMHDAADAEAICEAVTRPNMRFVPVKTAEQQAVLALHRSRQSFVKQRTAQANQIRGLLAEFGIVVPRGIQQLQRRLPELVEDADNPLPVLFRTQLSLLQHHMAYLFDVIATLDKQIEQCYRQNALCQRIGKIPGIGPVTASALIATIGKANNFENGRQLAAWLGLVPRQHSSGGKQVLLGISKRGDTYLRTLLIHGARAVLQSAKHKQDAVSSWANQLMARRNNNIASVALANKNARTV

SEQ ID NO: 305100 - protein, 387 aa, unidentified
MFYVGIDIAKNTHWASIMSSDGEIVKEPFSFSNDNSGFQKFISNLESLDKTKILIGLESTAHYGENIISYLFNLNYKIGLINPIQTANLRKSNIRKTKNDKVDTYIIIKALTLGNYSLITSRDINNLKLKGLCRSRRNLVTMRSKSKIQLVSYLDQIFPELAQFFKGNIHLNVSYQLLKEYSSPKQISCLHLTKLSNILHDNSRGRYGKQDAIRLRELAKSSVGIDNPSLSLQIKHAIFQIELYNKQIAEIESLYKSILDEMDSPILTIPGMSYNQAAVIVGSIGDINRFTHSCQLLAYAGLDPSVVQSGNFQARSTRMSKRGSGLLRYSLVYAAHNVVLNNKTFKEYYELKRSQGKSHYCALGHVSHKLVRIIFKMLKDNVAFNLD

SEQ ID NO: 305101 - protein, 401 aa, unidentified
MDNIKMFYVGIDVSKDKSDICIKDEKGNDLIHRFEITNKKADLEMLYETVESIKRNIPGNSDVVFGMEATGIYSLPLYSALKRDGYKVKLYNPIQTNGYRKINIRKTKTDPIDSAIIAEMLRHSEAPQVSEIQDMHLFQLRELVRVRHRLIEEQALCKVQMVRNIDTIWPGYGGVIKRVFGAASLAILKKYSVPSKLRSESFEHFYELVKKKSRSKISRSKAEEIYANAGNVLTIPELDSVIAIEIKTLITQLELYDEQIQSVEGKIDQMMKLTDTKIMSIPGIADILGPTILGEIGIIERFSNVKKLVAFAGLDPVVNQSGRFENKSGKISKRGSPLLRHALFLAANSAIQNDENLKRFYTKKRSEGKHHFSALNAVAAKLLRIVYWVLKNNKEYQIQLN

SEQ ID NO: 305102 - protein, 342 aa, unidentified
MYYIGLDVHKKTISYCIKDASGQVHREGTIGATRNELDRWMKTLPQPWTVAMEATIFTGWIYDHLLPHAAQVKVAHPLMLRAIAAAKKKNDRIDAGKIADCLRCDFLPECHMASTEIRDRRRRLRYRHLLVRQMAQRKNRVSGLLLETGVSQNKQRLHKVGYFRDLLSTNEDISESIRPLLRLSRETIVRLQKTDYGVVSSLQRDPLLAERIKRLRTIPGVGPITALTWALEIGDVSRFRSIQQAISYCGLCGDEKSSAEKVMRTPIWKQRNKHIQRTLGEAAKLAPSQNHELAVVYEKEKQKGHANRATLAVARKMVAWLLAVDRRQRDFVPSEDRKNAAA

SEQ ID NO: 305103 - protein, 394 aa, unidentified
MKLVGIDVGKNSHHFCVMDKETGEFNVTPSSFPNNKEGFDFLINSLKPYSKKSILLGMEDTGHYHVALLKFLLSNGYTVALINPKTTDLTRKMEGGITKNDKLDTITICDVLDTPERKKQYRITKVDRFDLYEQRQLTRHHHNLKEELNVYCNRLQKSIDLVFPEFNTLFSSKYSIVYMNLLKTFGSAEAIASTDIRTIRKCFEIKGRGNRISLTPEKLKECAKNSIGISSEVETIQIKHLVSQITLIKEQIAEIDKKIEEFSIPNNSPILSIPGISHFSGTSILAELGDIGNYSKPSQIIKFAGVAPYHYESSQYNAQHTGITKKGSKYLRKTLYQIILPVINNNPVFKKYYLLKISQGKGHRCAQGHCIRKLLRIIYHLLETGQSFDPALLR

SEQ ID NO: 305104 - protein, 351 aa, unidentified
MGRTRAARVVVQKRLGRKGLVAFFEKLPPCVVALEACGTSHSWGRTLLALGHDVRLLPAAYVKPFVKRNKTDARDAAAICVAAGRPEIRPVPVKSEAQQASRALERTRDLLLKQRTQLMNSLRAMLAEFGVVAAQGHRGFADLRAHLADDASGLPETLVAALRLLGAQIDGLTPAIEAMEEKIRQVAKADADMRRLSTIPGVGFLTAHAIVTAIGDGRQFACGRDFAAWAGMTPRERSSAGKRRAARMSRQGENRPRKLFALSAATLMRNARSREDRATRWQRGVLARRPMKVAVMAQAAKTARIAWAVLASGEDSASNRTPHIGHAYISSIQRLVQILCTLPKRGLNAPN

SEQ ID NO: 305105 - protein, 343 aa, unidentified
MQTITTIGLDIAKSVFQVHGVDAGGEVVVRRQLKRRYVLAFFQKLPPCLVGIEACASAHHWSRELQALGHTVRLIPPAYVKPYVKRHKNDAVDAEAICEAVTRANMRFVATKTPEQQSCLTLHRTRHLLMRQQTSVINAIRSHLAEFGIVAPVGRNGVEQLLGVVADTKDKRLPEVARACVAALGAQLRVLKAQILEFDRMIRAWHRSSEASKRLDQIPGVGPVLATALVASVADPKVFRSGRDFSAWIGLVPKQNSSGGKERLGNISKRGDRYLRSLFTTGALAVIRYAKIHGTRHRPWLTSLLARRPTKVAAIALANKLARMAWAMMAKGERYNEPAALAA

SEQ ID NO: 305106 - protein, 412 aa, unidentified
MELMYARCAGLDVHKVTVVASVRVPGLQPGERRTETKTFATTLRGLRDLLAWLIVHAVTHVVMESTGVYWRPVFAVLEGSVQVRLVNARHVKMLPGRKTDVHDAEWLAQLLECGLLRGSFVPPAAVRDLRDLTRLRKTVIRERGHHVNRIAKILELANIKLGSVVTDIMGKTGRAILQALSAGLDDPEQLAACAQGSIRQKQDALREAVEGRLTPHYAFLLQQHLALIDTLEVHITTLDARIEAAIAPFVEIVTLVHTMPGVAARAAPAILAEIGMDMAPFPTAAHLASWARLCPGTHESAGKRRPTTTGKGATWLRATLQEAAWAAVRTKKSYYRALYHRLKARRGPKKAIVAVQHAMLVALWHMLKHRVPHQDLGADYFDRRNTARLRRHHVRRLEKLGYDVVLVEKVAA

SEQ ID NO: 305107 - protein, 381 aa, unidentified
MTTAVTHKTNVHTTEATLFVAFELSEKIWKLGFTMGHGQKPRERNVTARHQERVLDEISLAKHRLGLPETAPVVSCYEAGREGFWLHRFFLAHGITNHVVDSSAIEVSRRQRRAKSDGLDVRKLLSMLIRYEQGEHQVWQVVKVPSVEAEDQRHLHRDLETLKRERASTTTRIQGLLSSQGIQVSTLAKLPEQLDTLRLWDGTPIPPGLRRRVLRVYAHHTFLTEQIAAIEAERRAQLQTSSDASIDQIRQLMMLKGIGINGSWLLVREFFGWRAFKNRREVGGLAGLTPTPYQSGESAREQGITKSGNPHVRWMITELAWSWLRFQPESALSVWFRARFGDGGKRLRRIGIVAVSRKLLMALWRFLETGVLPEGAVLKEG

SEQ ID NO: 305108 - protein, 459 aa, unidentified
MTTTPSTNSKPQPAEPTPALWIGLDWGDRQHSFALLDASGHREEGTLEHTPETLHAWLKGLEQRTGGRPVRLALETSRGAVVAVLLEYPWLEIYPINPVTSANFRKAFAPSGAKDDLPDARVLLDLLTHHADKLRPLQVQDAPTQKLAALVEARRGLVDRRTALLNQLTSLLKGYFPQALVLLGSLNTDLAIAWLRRWPDLLALKTAKPATLKRFYYQHQVRSDELIQERLELVARAQSLTTDQDRIAVAVLQLHPLLDQLEVLRRHVEVFNDEIKAAFAAHPEAGLFQELPGAGPQLAPRLCVAFGTVRPLYPDPDSVQKYMGVAPVREKSGNQCWTHWRWQAPKFLRQTFVEWAGQTVRYSAWAGKYYEAMEKKGKKHAVILRALAFKWIRILWRCWQDRTPYDEARYLRQGVSPPHNHTPQPHFPDACQRFAWVLPGAFRAVRRIFPRCGFPSRRA

SEQ ID NO: 305109 - protein, 315 aa, unidentified
MNSKQVFVGIDVSKDHLDIGLHPVGKTWQVVHDEVGKKQLYKELRKLKPELIIMEASGGLESAFASQLQEGKLSVVVVNPRQERDFAKAEGILAKTDRIDARVLARFAERIRPDVRPLPDEAQRALEGLMARRRQLVVMIGAEKNRLRRASAEVARGIQDHIEWLKKQLEGVDRDISGRIQRNDVWKQKEKLLKSAPGVGLVLSRSFLSGLPELGTISGKKISALVGVAPFNCDSGRFKGRRRIWGGREHIRSVLYMGTVAAVRWNPVIRSFFLRLVKAGKSKKVALTACMRKFLVMLNAIIASNEPWKFGKVVY

SEQ ID NO: 305110 - protein, 403 aa, unidentified
MNRHAVGIDVSKGKSMAAILRPYGEIVSSPFEIKHTSGNIQSLIQQIKSIEGESRIVMEHTGHYYEPLARELSLAGLFVTAINPKLIKDFGDNSLRKVKSDKADAVKIARYTLDSWTELKQYSLMDEIRNQLKTMNRQFGFYMKHKTAMKNNLIGILDQTYPGVNTYFDSPAREDGSQKWVDFAAAYWHVDCVRKMSLNAFVDHYQKWCKRKKYNFSRDKAEEIYGAARELVPVLPKDDLTKLIVKQAIEQLNTASKTVEELRTLMNETAAKLPEYPVVMGMKGVGPSLGPQLMAEIGDVTRFSHKGAITAFAGVDPDVNESGTYEQKSVPTSKRGSSSLRKTLFQVMDCLIKTKPQDDPVYAFIDKKRAQGKPYYVYMTAGANKFLRIYYGRVKEYLMSLPE

SEQ ID NO: 305111 - protein, 340 aa, unidentified
MKDIKVLGIDLAKNVFQLHGNDAKGKKVLTKRLTREKLIEFLSQMKPCTIGIEACIGAHYWARVFGKMDHTVKIMAPKFVKPYVMSNKNDANDARGIAEAVTRPDMRFVAAKSIEQQDALLLHRAKELAIKHRTALVNHIRGLLLEYGVVIPQGISHIKKLLIILEENQDKLTNISIGIFTKLYEQFKNYNTEIDLYDEQIARSAKENVVCKELMKIEGVGPVTASAIVATVGDAKTFKNGRQMAAWLGLTPRQHSSGNTSRLGGISKRGDGYVRKLLVHGARSIVQNCEKKFDKKSRWVTDKKSHIGYNKASVALANKNARIIWAIMATGECYRKSIAV

SEQ ID NO: 305112 - protein, 401 aa, unidentified
MVSDFKKGRYNLMKIFVGIDIAKLNHFAAAISSDGEILLEPFKFTNDADGFQLLVSKLESFDKNSIIIGLESTAHYGDNLVRYLVAEFYQVCVLNPIKTCQMRKNNVRKTKTDKVDTFVIAKTLMMQDDLRFITFFDLDMMDLKALGRFRQKTIKQRTRLKIQLTTYVDQVFPEIQYFFKSGLHQNAVYALLKEAPSPKEIASMHMTHLANLLKVNSHGHFTKELAKELRVLAQKSVGANDSAISIQITQTIQQIELLDSQLEKTEAEMTDIMKFNDSVIMTIPGIGYINGGMILGEIGDIHRFSNPNKLLAFAGLDPSVYQSGNFQAKTTRMSKRGSRVLRYALVNAAWNVVRNNATFKAYYDAKRAEGRSHYNALGHCAGKLVRVIWKMLTDEVEFNLE

SEQ ID NO: 305113 - protein, 412 aa, unidentified
MELLHQRCAGLDVHKQTVVAAVRLAIDGKVITEAKTFATTTAGLLALSAWLAENGCTHVAMEATGVYWKPVWHVLEDGELELVLANAAHVKNVPGRKTDVSDALWLAELLAHGLIRASFVPDGGTQELRVLLRTRKQLVREKTRHTQRIHKTLEDANIKLDAVLSDVLGKSGRAMLDAMVRGVNDPEQLAALAHAGVKCPQPKLREALRGRVTEHHRFLLRLHLRQIDALDEAIVTLDQEVDANLAPFRTAIDIVSTIPGVKALGAQAIVCEIGTDMSRFPTADHLVSWSGLCPRNDESAGKRRSTRLRKGAPWLKTALVQCAWAAIRKKGSYLQALFLRIKSRRGPQKAICAVAAAILRAVYHMLKDGTLYHDLGSDHFHNRSKTTQTQRLVRRLQHLGYDVEIKPLAAAA

SEQ ID NO: 305114 - protein, 337 aa, unidentified
MERRYVGIDLHRRRSVVVTMDEAGEVLSSVRIANDPVAMSIAVAEAGEGAEVAFEATYGWYWLADLLKADGHHLHLAHPLAMRGMTTNRRVKTDWKDATFLADVLRMGSLPEGWIAPPELRELRELVRYRAKLVALRSGLKAQVHAVMAKNGILPARVEMFGPGGQAQLDALDVPMNFTIRIESLRDLIEIYDREVAMLEREIHSQLKDDAGYQAIQKIVGVGKVLGAIFSAEIGDIHRFSSPERLCSWAGLTPKHRESDLTKHQGDITKQGSKLVRWAAIEAISGYRGGAKLRADYERIAQRRGKYRARVAVARKLLTLVYYGLRDGEIRCLETAA

SEQ ID NO: 305115 - protein, 412 aa, unidentified
MNQDKLYVGIDVSSKNNVCYLMYSDGSKHSSFSVPNNRNGAKIIVDRVTSVLLLQDIPQVVIGMEATSVYGDNLMRFLRESGSLGRFERSLHMLNPKQVKKFRDAYSDLPKNDHVDSYVIADRLRFGRINKEVYMDDYKYQALKMYTRARHQLVQELTREKQRFLNTVFISFSGLTQEKIFSNKFGATSMALIEEFSSLDELAYMSTDELVDYIRKKGKNHFENPEEIAEAVQRAAKNSYRPPQVIADAAKQMLAISMNTIRLLQKQIKEYDKAIEKMLEAFSQTLTSVKGIGNIYAAGIIAEIGDINRFPSQASLAKYAGLVWTQHQSSDFEAEDKRMIQGGNHHLKYYLCEAANALRRCDPEFKRFYALKYKEANKHNHKRALALTARKLVRLVYTLLKTNRLYIPPEEY

SEQ ID NO: 305116 - protein, 390 aa, unidentified
MYYCGIDVAKRKHAIALLDENGQPVQRAFTIENTRAGFDQLLQALAALNGPVLIGLEATGHYWWALYDDLTHHEHRVVVLNALQVHAFRKSGVRKVKSDRTDAVWIAEFLRFSRPEPAKPTTAVFLQLKDVSRFRYHLSDQIGDCKRKLLSVLDRVFPEYETLFSSVFLTTSRQLLTQAVSPQALADFDLQELTELLHTASRGRFDRAKADALQTLAKQSIGVRFLADAAQLQVRCLLGQIDLLEEQRQLVDDALAQLMAQVPQHLTSIPGVGSTTGAALLAEIGDIQRFDAPEKLVAYAGIDATVYQTGQFEARQMHMSKRGSPYLRHALWQAASMAIRYDDELRAYYDRKRQEGKSYGTALGAVCRKLITRVYIVLKENRPYEVRTKH

SEQ ID NO: 305117 - protein, 357 aa, unidentified
MTAPEIAVIGGIDTHTDVHQAAVIDSVGRHLDTQSFATNSAGYEQLLAWLHSQGEVIAVGMEGTGAYGAELARFLTANGVTVVEVDRPDRRARRAHGKSDPIDAYAAATAVLSGRASGTPKSRDGIVEAIRALRVVRKSAVKARTRTINQIRAQMVIAPSALRDKLRGLPTGLLIDTLARTRPVGDLADPDCADKTALRRLARRYQTLQQEIKEADADLAPLVARAAPSLVALPGVGTETAGQLLITAGDNPDRLRSEASFAHLCAAAPVPASSGRTNRHRINRGGDRHANSALYTIVLVRMRHDERTRNYVARRTAEGMSSKDIMRCLKRIVAREIYRHLVSTSTLNTTGSARAGS

SEQ ID NO: 305118 - protein, 343 aa, unidentified
MAIVCVGIDLAKNVFALHGVDEAGKPALVRPTVPRAKLVEAIAALPPCLVAMEACSGAHHWAREFQKLGHAVKLIAPKFVIPYRLSGKRGKNDAADAAAICEAAQRPSMRFVPIKNVEQQGQMCLHRVRQGFVEQRTALINRIRGLLSEFGIVLALKAATVRREALLHLEDLPGWANLAVGDCLSEVSRLDERIRDYDRHLAQLARQNESARRLMQLSGIGETTATALIAAIGNGHDFQCGRQFAAWLGLTPGQYSSGGKTRLGRITKAGDAYLRSLLVLGARAVLASAKNKADPISRWAMSLQERRGYWRAVVAMAAKNARLAWAVLRKGEGFTPPGAPSPA

SEQ ID NO: 305119 - protein, 288 aa, unidentified
MGDDVLIGVDPHKASNTLAVMDPVTKTVIARQRFVNTAVGYRRLREFAGGWTHRRWAVEGCHGAGRSLAQRLAGDGEIVLDVPAKLAARVRVYSQGHGRKSDADDAISIGLAALNSTRVAVVRRDDTLVSLRLLCDRRDELGALRTQAVCRLHRLLCELTAGGTHRGLRASRAEQLLAKLRPVDPVDVVRCQLAHQHLDDIRALDAKMTAVRAQIAALVDGTGTRLTELYGIGPVIAGRILAEVETIDRFPSKDHFASYNGTAPIEPPLGEQVRHRLPGTGDSITRCT

SEQ ID NO: 305120 - protein, 344 aa, unidentified
MDHFAGLDVSVKDTSVCIVDDTGRIVREVKVASEPASLLAVLKNPGYRFKRIGLEAGPLSQWLFSALAEAELPVVCVETRHMQAVLKAQINKTDRNDARGIAQMMRVGLYRPVHVKTLRSQKLRMLLTHRKLLQSKAIAIENDLRATLRNFGLKVGMVGTVKFEARIKELVENLPDLAVLIEPLLIVRRVLREQIVILHRRLLAVVRDDEVCRRLMTVPGVGPVVSLTYRATVDVHARFHKSKAVGAVFGLTCSKYQSGEVDRSGRISRCGDEMMRVMLYEAAQAMLRSKKWSWLKAWAMQIARRRGMKKAIVALARRLAVIMHRIWVDGTEFRWTREQAPAAA

SEQ ID NO: 305121 - protein, 344 aa, unidentified
MSSIDYIGFDIHKKMINFCAKAQDGTILEEGTIPARREALLAWARARPRPWIGAMEATLFTGWIYDLLKPLAQALKVAHPPMLKAIAVAKKKNDKVDARMIADLLRCNLLPECYMAPVAIRDLRRVLRYRNLVVREATRMKNRIAGLLMETGTAYNKERLHGKAYFSELLGSLQEVPGSVVELLKLSRGQLEFFTAIQRRLLKGLREHADLSQRVMRLQTIPGVGEILALSWALEVGEVRRFPSIGQAASYCGLTSAQHSSAGKEQREPISKQRNQHQQTILIEAAKLAPRYNPQLAVVHERELQRGNRNQATLAVARKLVAYLLAVDKSGKPFAMRASTQEAA

SEQ ID NO: 305122 - protein, 358 aa, unidentified
MSDGSKGQPRFTAGLDLGDKYSYLCLIDQHSGQVIEEGRLRTTPESFRRRFASEQPMRIAIEAGTHSPWASRMLEECGHEVLVANARKLRLIYSNKRKTDEVDAENLARLARVDPKLLYPLKHRGEESQAHMAIIRSREALVGSRTQLVNHVRGAVKSFGARLPKCPARSFHNKAPEHIPEALLPALGPILETIGSLTKRIREYDRRLETISKEHYPETELLRQVEGVGPLTALTFVLTVEDPYRFERSRSVGAYLGLVPASDRSGDRDPQKRISKEGDEMLRKLLVSGAHYVLSPFGSDSDLRRHGEKIASRGGKNSKKRAVVAVARKLAVLLHSLWISGEVYEPLRNAHRSGVRAA

SEQ ID NO: 305123 - protein, 384 aa, unidentified
MIKHNILFIGLDTHKTFTEVAYIEDQRGARPIHLGKILSNKAAFKKLARQLESKYPDATLHFVYEAGPCGYWIYRLLTSLHHCCYVIAPSLIPKKPGERIKTDKRDALKLAKLLKSEDLTPIYVPEPEDEAVRDLSRARETTMKDLKDAKYQLKALLLRNNINSKVKDNWSLQHLRWLAELVLPHPCQQIVLQEAVSTITERLKRLKRLDNELTHQVKNWRYYPVVKAIQALRGVRLLVATGVIAELGDLTRFDHPRKLMSYLGLVPSEHSSGGKRRQGAITKCGNSRARRLLVEGAHSYKHNANISKEMQLRQEGLSKEVIDMAWQAQLRLCRRYSRLMHKGKHRNVVVTAIAREMIAYIWAISREVVLPVIDVKLRLARMPA

SEQ ID NO: 305124 - protein, 403 aa, unidentified
MSKESVTVFGGVDTHKDVHVAAVVDERGRILDTAHFEANSKGYAALRKWLESFGTLAKVGVEGTGAYGAGLARYLADHGVEVVEVNRPNRQMRRQRGKSDPVDAEAAARAALNGEATVVPKSHDDSVESIRVLRIAFCSARDTRTRLAPQIRDLIVTAPAALRESMPSRTKERVEHCAGFRPKDPREPQEATRLALKTLSRRYQDLSEEMAELTKILDQLTKEANPALRAAKGVGADVAAILLVAAGTNCERLRGEAAFASMCGVSPILASSGQTNRHRLSRSGNRQANNALWRIATVRMSCDEETKVYLAKRTAEGKTRRDVTRCLKRHIVREVFWLLQNPAYEEVGPQLRATRKSAHLSLQAVSDDLGVWPTKVSRIERGLEHDPDFVERYEAWLTNKTAA

SEQ ID NO: 305125 - protein, 366 aa, unidentified
METIYIGVDFHARQQTICYLKTETGELVTCELKHQDKEVVRAFYAQFRDRVIVGLEASGYSPWFERLLETLGCEVWLGHATEIRRRARWRQKNDRRDAELILDLMLHDEFPRLHRPAVQSREVLRMLRYRQKLIKIRTMSKNSLQAIALQAGLAKRSRLFTKDGQQQLGAAEMSPVMQWQCEHWLQLMEPLNQQLLETMVWFKAQSKGDDSITRLRTHPGIGLLTSLCIAHTLQPVSRFRNTRKVAAYAGFDPVERSSAERKCFLGISKAGSRLLRYLLVEAAQTAVRKDEDLKRFYQRLADRRGRPKAKVAAARKLLIRAYIMLRDEIDYAEFRHRAVAARLARQGQGPSNVPEVLIGQPASPEQ

SEQ ID NO: 305126 - protein, 405 aa, unidentified
MTHTIEENEQRRAVIGIDVSKDKFDACCIDGNGKELFHVSAPMDSTGFDGLAQKIRTHGLIQGNVVAGMESTGCYHLNLFSFLTGMNFQCLIINPLLISNFMKLDLRKTKTDKKDAAVIAQFLRLHRDAVHQLNTSEEIADLRDLARQRESLCRQMSALKNDLKRLLSITFPELEKETNVFSHSVLTVLTLFASAAAVQRASVSQIAKCLSKGALGRKTSITAEQIKHAAKKSVGTTSMAKEFVVSQKASMLLYMGERMQELSDTMNELCASLLQQEIEIMTSVKGIGETTASEFLGEIGGDISKFESAKKVIAFAGLDPSVHQSGKHVGQSKISKRGSRYLRRVIWQMSVKVIRYNETFREYFMKRRQEGLVYRKAVLATAHKLVRVIFSMLMHKAHFCPPHYS

SEQ ID NO: 305127 - protein, 758 aa, unidentified
MEVLYPRCAGLDVHKDTVVAAVRVIDGDGSVRREVETFATTTPGLLALSDWLDGHGCPCVVMEATGIYWRPVWQVLAAEGRTLILANAAHVRNVPGRKTDVADAVWLSDLLAHGLIRPSFVPDQGTRAMRDMLRTRKQLVREQASHVQRIQKTLEDANLKLASVLTDIMGQSGRAVLGALATGETDPERLRALVSPRVKAGPEAIRAALTGRPGPHHRFLLGLHLGQIDALAAAIDAIDAEVERDLGPFREAVALLVTIPGVAELTAEVVLSEIGLDMGRVPTAGHLISWAGLCPRQDESAGKRRSTRLKKGAPWLKTALVQAAWAAVRKKHSYLNAQFQRLRARRGPRKAICAVAASILTAAYHMLSDGTSYADPGPHHFRRTEPTTRAKALDRWGGWLLLPVIVSSDDAGVRTAWRGATRMNAITVGLDLAKNVFHAHGVAADGKVAFSRPLRRAQMAGFFERLEPCLVGMEACGTSHFWARELGRLGHEVRLIPPAYVKPYVKRGKSDAADAAAICEAVSRPHMRFVPVKPPGQQAVLALHRARDLAVRQRTQTINMLRGLLAEFGIVLGQGAGHAIAYARSTAETDLPEAARFVVADLRATLIDQHDRIERLERELARISRDDSAVQLLRTIPGIGPITASALAATIGDARRFASGRDLAAWIGLTPLNKSTGGKQRLGSISRMGDRNLRRLLYVGMTSRLRRIKARPETEDPWAVELVRRKPARLAVVAMANKTARIVWAVLTRGEPCRPATA

SEQ ID NO: 305128 - protein, 319 aa, unidentified
MSARGVFVGVDVAKDALDVAVRPSDERWSVANDEADVAALVARLRPLEPTLVVCEATGGFEHAVIAALAAAGLPVVVANPRQVRDFARATGQLAKTDQLDAGILAFFAERVRPTPRPLPDAAAQLLDAVLTRRRQLLEMLTAEKNRLGFAPKPLHRGIRAHIRWLERQLDDVTKELAAQIEQSPVWRAKDDLLQSVPGVGPIVSYTLLGELPELGTLTHKQIAALVGVAPLARDSGTLRGKRLIWGGRASVRTALFMAALCGRRWNPTLKIFYERLKAAGKPTKVALIACARKLLVILNAMVRNNTPWMTPTARIQYSC

SEQ ID NO: 305129 - protein, 363 aa, unidentified
MEEVKRRFVGIDLGKREYAMAIIGKKGKMSIHKGKTSIEGRQAMYRLLEKSDKIALEAGNLAFIISREIQKQAGSEVRVLNSAKLPFIWDAPTKSDKEDAMKLAHLVEERRDEKLPIVPLPSEKEMERREIIANYGREVRDRTKLINRLHSLFVKQGITTMVKKNLSTPERRREAIHELTGQEWEDAEYILQHLDLHENRIKVLKRKVQEEAKTDDDMKLLQNIPGVGPIVAYAYMAHVGDGSRFNKGAQVSNYLGFVPRLDYSGTIQREGHITKRGNGYLRGLLVQAAWVAVRSGPKSSLKERFVYLTMFQGRSKKKTIVSIGRRIAELMYSILRNKTKYEARLWKGPTNNPAKLSGRAMSA

SEQ ID NO: 305130 - protein, 416 aa, unidentified
MNAVGIDVSSRKSTVAVLRPLGEVVCLPFDVTHDIAGLASLVEKLKALDGETRVVMEHTGRYYEAVAKALHEAGLFVCAVNPLLIKEYGANSLRRVKTDKADAVKIARYALDNWADLRDFTPMDAIRYDLKTLNRQFQLASKQRTASANNLIALLEQSFPGIRKCFDSPVRSDGTQKWGDFAHSFWHVDCVRKQPFPAFCERYRKWCKRHAYLFKLSNAEEVYALAKRAVVLTPKSKVVKVLVQEAANQLISISRSVEVYRAEMDRLAAMLPEYPVVMAMYGVGKSYGPQLMAEIGDVRRFERKQALVAFAGIDPMPNQSGDKNVRSNKSSKRGSPYLRKTLFNVIRTYLQCAPQDEPVFQFLNRKRAEGKPFYVYMLAAANKFLRRYYAKLRDYFASLDTLQPVAPIPTILKATL

SEQ ID NO: 305131 - protein, 344 aa, unidentified
MSNLDTCGIEVSAKELVVSLRRQEDLEPLRNFTNTPEGHLIILRYLRQAGRVVRVCMESTGLYGLDLALALSGQEGIEVMVANPRAVRHFAQAMMKRSKNDQIDAGVLEQFALHMPFKPWQRPSVAVLALHALARRLRELVEMQTAEKNRQHAAGLSKAIPAVVRRDLARSLRAQERAIQRLTRQARKLIAQDPQLTERFELLDSAPGIGETSAVQLLGELGVLAPDLEARQWVAYAGLDPRQYTSGTSVHKKPRISKAGNKHLRHALFMPALVAVQHDPHLRAFYQHLLARGKFKMQALVAVMRKLLHALHAMFKTHQPYDGSKLFRLKSAPAQEVTHVLVAC

SEQ ID NO: 305132 - protein, 373 aa, unidentified
MPANLRYLGLDVHAETIAVAVAEPGGDVRSLGMIPNAPSAVAKLIRKLGAREHLRACYEAGPCGYVLYWQLTKLGVACDVVAPTLVPTRPGDRIKTDRRDAEKLARCHRAGDLTAVWVPDAAHEALRDLVRAREAAKADQLRARHRVSKFLLRHGIRPPADAKPWTQRHRRWLDTLAFAPAAQQATLGDYVHEVDHAGARLERLETALDAAIAAAPPPMRAVMAALQTLRGIRQITAATIVSEVGPLSRFTHPRQLMGYSGTVPSEHSSGSSVHRGAITKTGNAHLRRVLLEAAWAYRFPPKCAQALRTRQRGQSPAIIETAWKAQHRLHTRYRRLLGRGKPLPHVITAVARELVGFIWAIGIAAEREVPVAA

SEQ ID NO: 305133 - protein, 376 aa, unidentified
MEHNSEAFIGIDTSKLKNAVAIAEGGRDGEVRYLGEIDTTDGATRKLVAKLAAKYRKVTFCYEAGPTGYGLYRLIKSLGHECSVVAPSLIPKKPGDHVKTNRRDAVGLARNLRAGELNEVWVPDTRHEAMRDLSRAREAAVDDLKSKRQQILSLLLRLGLHYSGKKTWGKSHRNWLASLKLGQREQRIVLEELFGAERQAQERVDRLVDAIIEAVPEWSLAKIVTALMAVRGIDLVAAVTIMAELGDLSRFASPRELMGFLGLVPSESSTGDSVKRGGITKAGNRRARRILVEASWSYRYPPRIGRDKLAKVAAAPEPVRAIAWKAQTRLSSRFRELSKKGKRPTIVATAVARELCGFIWAIHRAVTGPGGQQLVF

SEQ ID NO: 305134 - protein, 371 aa, unidentified
MLYLAIDQHRKQLTVNLRAEDGNVLLQRQVSTRWQAVREFLQDIQERGRQAGGGWMVIVEVCGFNDWLLKLLVDYGAQEIVLLQAEDRQRQKTDRRDANRLGELLWLNRQRLAARLRVQGMRRVVIPSADDRLDRHLTSLRWGIGRERTRLLNRIKGLLRRHNLEQECPTKGIQTKRARCWLGELALGELDRLELDQLLARWEALEPERAALEAKIRTRQAQNRGAAIIATIPGLAAYTSLALACRVGDVSRFPRPRSLANYWGLTPGVRDSGEAKQRLGSITKQGSALARFVLGQAVVHVLRKDAVLRKWYQGIKRRRGSKIARVAVMRRLTTAIWHMLRKQQAYVLVGPCAKGKRRTQVVAAAPGEVQG

SEQ ID NO: 305135 - protein, 358 aa, unidentified
MNDYEGFQKLKNELSVLGDPKQIKIGFESTGHYGINLKSFLSGLGYTYLEFNPQLTSQFSKATTLRRTKTDKIDAKLIATMLGQFDYKTLHSTFYHKNELKELVRQRDHYLEMKSEQLVHLTNVLDKSFPEFKGIFNNRMGKTPLYILKTYKNKEKISNLSMNHYETLRKLSMGAFSYPKFSKLKSLARTSIGHSSQSYDLLITTIIHHYEELVKMIEVLDREIEDLYFKTDSFIHTIPSIGIITAATIYAEIGDIKRFSNPGQLTAYAGLDVKISQSGTTEKFGKIVKRGSSLLRKYLYMYAFYALRYIPQINDYYYEKKDQNKHHKVILVNISRKLIRIIHHIETNKVPFDINKVV

SEQ ID NO: 305136 - protein, 332 aa, unidentified
MKSHFTLGIDMAKDSFMAVLIDSQGKTILSATTFKNNSKGFLKLIASIPQPQDTNVILESTGVYGKLFIKALSRSQVSLFEVNPLIIKRFSSSMVQTKTDQADALTIAQTGRLLASSQPETLNKYRVKYDSDRENLALWIAEYKRLSSANSRLKQQIQNLRHHAASKMDVILKRRQEEQQQIQKQLKITKKEIDALLKEQADEDAKCLTSITGVGTLTAATALVSIKNIGRFPSADSLKAYWGMYPRRRQSGKREARSHMATHGNKLMRHMLWNAAKSAARHNPVCKELFDRLVVRGKTEPAAYGAVARKLVQIIYGVLKNKTMFQIQPQNT

SEQ ID NO: 305137 - protein, 347 aa, unidentified
MRFYNRQHQFYCGIDLHVKTLYVCILDGAGQVLVHRNIPSTSAAFLEIVAPYRTDLVVAAECMFTWYWLADVCAAEGLPFVLGHALAMKAIHGGKAKNDKIDSHKIAVLLRGGMLPQAYVYPAAMRATRDLLRRRLHLVRKRGQLLAHIQNTNAQYNLPAFEKRLAYPGNRDGVVDHFPDPSVRKSIEVDVVLIDQYDALINDLELTIVREAKQHDGDAFHRLRSVPGIGKVLALTILYEIHDITRFDRVQEFASYARLIKCAKESAGKKLGTGGAKMGNVHLKWAFSEAAVTFLRHTSDGKKIVARLEKRHGKGKALSILAHKLGRAVYYMLVRGTVFSREKFVAA

SEQ ID NO: 305138 - protein, 346 aa, unidentified
MTLYAGLDVSVRETSVCVVDDIGKVLAERKVATEPDAIIELLRSISSEYGRIGLEAGPLSQWLVNGLAEAGLPVVCVETRHMKALLKAQQINKSDRNDARGIAQMMRVGLFKPVHVKTLASQERRMLLTSRKLLQKKLLDVEADLRGTLRNFGLKVGVVSAGGFDARIRELVEGFNSLAAIAEPMLAVRKVLREQFAVLHRMLLGLVRQDPVCRRLMTAPGVGAVVALTYRAAVDQPQRFLHSKAVGAHAGLTPKRIQSGESDYDVGISKTGDVMLRTMLYEAAQSLLTHSGARWSWLRSWGLRVAQRRGMRRATVAVARRLAVVLHRMWVDETDFRWSNKPAPAA

SEQ ID NO: 305139 - protein, 353 aa, unidentified
MHTHQKSSDPIATIGLDIGKSTFHLVGLDKRGAIAMRIKLSRHQLVRRLVNLPPCLIGLEAGSGSHHIARQIQPLGHDVRLIPAQYVKPFLKGHKNDYRDAEAIAEAVQRPTMSFVAIKTPEQSDLLSLHRVRSRLVRQRTAIINQIRGILIERGITIRQGPAPLRKVLPQVLSSPPEALSPRILRLIAELDEDWRRLDERLKALSAEILSLSENDPACQRLMTVPGIGPTISSAVVAAIGTGSGFKQGRDFAAWLGLVPKQESTGDRTKLGRISKRGNKYLRTLFVQAAHVVLERRPAAAMRALWPWIAQASKRLAHRNLLAIALANKLARIAWAVLARGRDYQPRITPNAA

SEQ ID NO: 305140 - protein, 343 aa, unidentified
MKLTRVGIDLAKNVFQVHGVDEHSKLVWKRRLKRATWLQVLLDKAEPSCVIGMEACGGAHHWARELQSRGYTVKLIPPQFVKPYVKDQKDDAKDAEAICEAMSRPGMRFVSVKTVEQQDIQSIHRVRSLLMSERTAKANQIRGLVAEYGLIAPQHMSRLRQAIPGWLEDAENGLTDRFRSWLHELWNELLRLDQRRKALDAEIERISDTHPGAKRLKQLRGVGPLVSTALVARFGDGRHFKRGRQAAASVGLTPRHHGTGGKNRLYGITKQGDRYLRSILIHGARAAVWQAKRRDDRLSLWLTELAARSHPNVAAVALANKTVRIAWVMLRHGTDFDLELAVA

SEQ ID NO: 305141 - protein, 408 aa, unidentified
MNPLFVGIDVSSRNNVAYLMKPDGSKHSSFSVQNNLGGAKILSERIVSALESVPLSDLVIGLEATSIYGDSLVYALREDGSLGRFQRKIHVLNPKQVRKFKEAYPDLPKNDWVDAFVIADHLRFGRIAKEVYMDDYRYQALRTLTRSRFDIIQNLTREKQRFANYLFLKCSGIAQAKDIQNTSATTIALMERFETVDDLANADLDELTAFIAETGRGRFADPDAAAKAVQAAARGSYRPPKTVNDTVNQAMAVSIASMRALKEQVKVLDKAIEQQFEIIPNTLTSIPGIGKVYSAGIIAEIGDIHRFDSQASVAKFAGLVWHRNQSGDFEAEHSQMIKSGNRYLRYYLLEAANSVRRCDSEFRRYYDLKFKEVNKYQHKRALALTARKLVRLVFRLLKDNRLYIPPED

SEQ ID NO: 305142 - protein, 340 aa, unidentified
MTLVGVDLHTREQSVAVLDTGTGGIQELRLRHEGDATERFYATLPPPVTVAIESTGYALWFHALMQRLGHTVVVGDAAKIRATVVRKTKTDRRDARHILRLLSEDRFPTIWVPDPRVRDLRALVAHRMRLVRVRTMLRNGVHAIALNYRLTLGRSLFTRYGLAQLEQLSLPAHTAHRRDESLELLAWLDARITALEATMAEVAAADPEARRRMTHPGVGPVTALTTLLVLGPVDRFPTSKHVVSDIGLAPAIASSAGKHRLGGITKHGNRMLRHVLGQAGQTALRMDPDLKRLYGRIQHRRGTARAKVAVARTLLVRLHIMRRDQVDYAEFRRRGQITAA

SEQ ID NO: 305143 - protein, 364 aa, unidentified
MYRLNNTIELSSPEETRSEFNRSTGAIKLGVDVHQDFYVVVKQEGGSNPKPPQRFQKEAFLQWAAKLKSRATEVHAVYEACGFGFRLQRQLTALGIKCYVVCPQKLDEQNRRVKTDGLDAKALCLKLDRFVQGNSDALALVRVPTEKEEQLRAIHRQREQLVKARKQLEAQGRSLMVNHGIEPVQQWWKERAFAKLAVPGWMKQLLQNSQPILLGLQEKIAALTLHLQSSAQSPQPRGLGKMTSVVIDREVGNWNRFNNRRQVGSYTGLCPGEHSSGNTRLQTCVTKHGNPRLRAALVELAWRLVRFQPGYKPVIKWRRILAKGAMATGAVRKKAIVAVARQLAIDLWRIRTGRCQAEHLGLMI

SEQ ID NO: 305144 - protein, 308 aa, unidentified
MDLIPTHPAVALDARGVVLDSLSVQNDTDGLNQLWAWSACFEGHCWAIEGAGNRYVAPLLALLFAKDQSVYHIHPSLTSQYRARRGKKKNDLVDAENVARVLLANPQLPPDQLSEQRTRLQELSRTRDKLAQQRKANQMMLEALPETTAVSLSTALQAVLTSLEAALKELEHAMATLVAQVASTLLTLQGIGVVLAGTVLAEMGDIQRFENVHHFASDCGAAPVERGSGKNTRWCVNVGGNRQLNRVLHLMALTRLRCDERTKTFVAKKEQEGKTKRAALRALKTHLAREVYRTLQASHVGGPIPAPS

SEQ ID NO: 305145 - protein, 331 aa, unidentified
MKNVNESAGIDVSKLTIDVQLYKKNKHHQFANKVSGFKEMILWIRKEGIIVDEVLFCFEHTGWYCLELSFYLHENSLNYTCVNPIEIKRSIGLKRAKTDKDDAGYLAHYAWLRRDEIEQSVPPSQNIIELQRMMSLREQLVKHSVALKNLRTGMLQIVVSREIDPSVLILDQTITELERQTKNIEKEMELLIKSDETLKENYLLSKTVKGVGKILAVQMLVHTHNYTRFLSWRQFSSYCGLVPYPYQSGTSIKGRNKIHSISDRKMKSLLSMSAISAIRSDKELKMYYEQRVSEGKPKMVVINIIRNKIVSRIFSTVKRGTPYVELNKFAA

SEQ ID NO: 305146 - protein, 421 aa, unidentified
MNNYIKTKKIKFVKPETLIISVDIGKNTITGYLQSTEGEEVKPFNFSNDLNGLSEFWNKVMRFEKKYGTGEIIAGFESTGPYGEPFKNFMRDKKVKLVQVNPFHTKRLKEVIDNSPGKTDKKDPKVIASLIRLGHTISLIIPKGIVAELRELIWARERRIKERTAYINIIEALMFKIFPEFCRIFKNFLSKTAIYLIERYTTPDKFKDIGLNELSQMLKKVSRGKFGEYQAKRLLYAANNSLGTREGLESILMEIRYIVHQIKTANEFISELEKEIKYKVAKLPYSRRLLSIKGIGPLTGAGIIGEVGDFESFNTQPEIMKLAGLDLYEISSGKHKGKKRISKRGRPLLRKILYFAALNTIREGGIFHSYYKRLIGKGKEKMKAIIAVARKLFKVIFAIVRDETNYIENYKLNYIHLKKVA

SEQ ID NO: 305147 - protein, 461 aa, unidentified
MHPLLEQIGIGATHHFFGKEVNTDAHDLCPSTGPQFRSDNHPFRHYDARGEPLEDRLYLPCGIDPHKKVCHVAFVHPLPHRQEILSQRSIPNRDLQSALWLVQEGERLANQFDATPIYVFETSGPYWQPYRLFLHQLGLPTATVSGRQTKRARGTGTRKTHNDLQAAYLIAKVFKQGESHASRIPPEPIASLREYTRLHLFFVEYSVAIQNRMFDIRYRTHPGFDDLLSKPTIPTALALAKEELVHPARLLQADDDQLVQVIRRASRGKLGDQLATALHHSALTAFYTPYAADAFSFNLRMLADAYDHIHLHILPPLRTRIEDSLNQLPFEQHLPEIPYYGPVVTGTFLGELGLPSWFKTVDSVVAWFGFDPSLSESADHPTGTSHLTKRGTKCGRRIKWLVARNWSRFVPQGRRMFQKEFYVNQLSYDGAICVIAAKLVRIAFAMVRDGTHFNMAKAFPG

SEQ ID NO: 305148 - protein, 354 aa, unidentified
MSQTAQTTISVIGIDIGKNSFHIVGHDERGTIVLRQKWSRGQVEARFANLPRCLIGMEACVGAHHISRKLNSLGHDARLMPAKYVRPYSKGQKNDFRDAEAIAEAVQRPTMKFVATKTADQLDLQALHRVRERLVSQRTGIINQIRAFLLERGIAVRQGQRFLRAELPRILATPPDVLSLRMARVIEDLAGDWRRLDERIEGLSAEIGVLAHADSGCERLMSVPGVGPIISSAMVAAIGAGDAFTKGRDFAAWLGLVPRQMSTGDRTILGKISKRGNRYLRVLFVQAAWVVLIKPKSWERHGLKPWIEAAKKRLHHNVLAIALANKLARIAWSVLAHGRDFEARKIDEAIAQPV

SEQ ID NO: 305149 - protein, 347 aa, unidentified
MITLGVDAHKRTHTIVAVDPNGRQLASKTITTTTKEHLGLLTWAEQLAKGNGLLWAIEDCRHLSRRLERDLLAAGQSIVRVPPKLMAHVRDSARTYGKSDPIDALAVARAAQREPDLPTARLDGPDRDVRLLGDHRESLVAERTRAINRLRWYLHELDPSWEPKARSLDRLAILDKVSAHLDPFTGTVVRLARDLLDRCRALTKQINELTAEIATLVADMAPSLIAIPGCGAITAAKILGETAGVDRFRSKDAYARHNGTAPMPVWSSNRARHRLSRTGNRQLNAALHRIALTQAHWHEPAKQMMERRKAGGDSGMEALRVLKRRLSDVVYAALRTDLTAGVETAAA

SEQ ID NO: 305150 - protein, 349 aa, unidentified
MRVLKQVLGVDVAQKELVVTLSVLNEDLSIDFLLHRVFHNKETGFVALLKWLKKHTDESIKLQVVMEATGVYHQKFAYYLDDNNISLCIVLPNKISSYLRTLETKTITDKTCSEAIAHFGLSRKLDNWTRPNKTYKVLQQLTRERDQLVFERTTIKNQIHAEESESEPNSSSIKRFNARIKFINKQEQEIKKEIDKWLNSDEKIKGQVEKITTIPGIGQLTAVTILAETNGFELIRNKKQLTSYAGFDVKEKQSGTSVKGKPKISKRGNRYLRKCMHLPSLSAVKYNETYKDLYARIVSKSGVKMKALIAVQRKMLELTYVIFKNNTVFEQDYEAKKRVLLLGEDTLTS

SEQ ID NO: 305151 - protein, 347 aa, unidentified
MLYAGLDLSRRRLDVHVLEEGGATREVLAVSPDADALRTLAAQAVRWGEPVRAAIESMNGARFVHDTLELHGWDVEICDAQKVKGLAPLACKTDRIDAWVLAELARRDLIPAIWLPTPGVRAEREIARFRLHLVRHRTALKNRIHATMIAFGHPCPVSDLFGQAGRELLRGLGLPEPWAGTVAASLELIEDLDERIRGCEAELRRLGADHPYVRLLVTAPGIAWVLGFTIASEIGDISRFPSPKKLAGYTGLCPRVHQSGGKDHRGPLSRNGPKYLRWALIEAATHAARHPCYREHYERTKRRLGKQRGAKVARVEVARKLAEAIWHMLTRNEGFAPAGPTRRALVA

SEQ ID NO: 305152 - protein, 421 aa, unidentified
MENSLARKLKQVPEGYLIIGVDPHKKKHAAVAITQDFSVRAKSKFDNTREGLEMMLRQARMEMTKSVCRGAMFAIETGGHYWRNVAYFLDERGIPFRFINQYTLKRRREGKDLNHRKNDYRDAEVAAQLLCTGEFVESVIPQGIYAELRTAHNGYRRLVKERTRITNLLKGLLDGLFPEFVQVFKDPCGLTALSVLSTCPVPGVIAAMTEEEFVATIEARHCGRLMRKKLGALHHIAEASIGIAAGAQSLSTEISFLVEKLNLIERHIGIIERTLIRLVDATDEGKYLLSIRGLNYIAVAGLLAELGCFKAYRSAKQMIKMAGSNPTESESAGKKGSRTPMSKQGRPVLRYCAWTAVIPMLRFNLDFRAWAKRRRERPVHANPLGGREIVGAALNRLLRLSFALVKNQTYYRSPQLVQVTG

SEQ ID NO: 305153 - protein, 358 aa, unidentified
MKYVGIDVHKKMCQAAILEEDGKLLDEIRFPNDPEGIEEFADKLTTFRDEVRAVVESTGNLWIQIHDRLEEHGFDVALSNPAKTRLIAEAKTKTDKVDARTLAALLRADMLPTCYVPGEELRSRRELLRHRLNLVKNRTEVKNRIHGLLDKHGLRMPGTTPFSKGNIAWLRERSLGFMDDAILRSDLAILEAVDGQVTLIEEKIAALAVEDRRVRLLMTMTGVGYFTAMLVMAEVGDVGRFRGDKEFASWMGLVPSVHQSGEKTRMGGVSGPGNKRLRWALVECAQAAVRFDPRFRGLYERVSRRRGSGCAVVAVAHEMARIMYFMLVREEPYRGENRGLTERKLKSMSKKAYDGLRN

SEQ ID NO: 305154 - protein, 345 aa, unidentified
MEITTIGLDLAKNVFQVHAINGVGEVVVRKALRRVQVLRFFERLDPCLVGIEACGTSHYWAREIGKLGHEVRLMPPAYVKPYVKRGKTDASDAEAICEAVSRPTMRYVAIKSCEQQAALTVHRTRDLFVKQRTQLVNMIRGLLAEFGIEIRRGITHALSLAERIAAGKMPDIPALAAKMIASLAEQVLDLQTRLREIERELLAWHRSSDIARRLATIPGVGTICATAFAASVTDPQQFRSGRQFAAWLGLTPLQHSSGGKERLGRISKMGDKYLRRLLVVGMTSLVRRAKYKPEAVDRWLAALLTRKPARVVTVALANKAARVIWAIMARGGIYRAPQPAGAAVA

SEQ ID NO: 305155 - protein, 365 aa, unidentified
MASVSHLALTHLGLDVHKDTISVAILAPDRDGPDVERIPHDEASVRRLVGRLGDPRWLRACYEAGPTGYDLARLLSSVGVGCEVIAPSLIPKAPGDRVKTDRRDCRRLARLHRAGELVAIRIPTPAEEAVRDLCRARADLVEDRTRARHRLSKFLLRHGRPWRGGNAWTLTHERWLCAQRFDEPAVAATYAHYRAVLDARDAQLLAIEADLTAWHDTPPFADAVHRLAAYRGITRLGALTLASEVCDWRRFARAAAFCGFCGLVPSEYSSGASTRRGHITKTGNAHLRAQLVESAWAYQHRPAVGLQLRERQQGLDPQIVARAWAAQLRLCGRFRRLAARKDSKNVVVTAIARELAGFVWAEMTA

SEQ ID NO: 305156 - protein, 369 aa, unidentified
MADRITYVGLDVHKESIVVAVAVGGLRGEVREYGRIANTAAALDRLMRKLSGEGVGLRFCYEAGPCGYGIQRHLSAHGHECMVVAPSLIPKRAGDRVKTDRRDAASLARLHRAGELTAVWVPDAGHEAMRDLVRARLDAVHALRRARQQLSGFLLRQGCHYRRPAWTKLHRRWLAGLKFEQAVHHIVLEDYVQAVEAAAARRDRLTAQIEAMLPDWTLAPVVAALQTMRGMALVNAATLIAELGDLSRFANPRQLMAYLGLVPSEHSSGASVKRGGLTKAGNSAARRLLIEAAWCYRFPARVSRELLLRQEEQPKPIREIAWKAQLRLCARYRKLARCGKPANVVTAAIARELAGFIWAIARRVLPAAG

SEQ ID NO: 305157 - protein, 315 aa, unidentified
MAQNGLVVVGIDVAKDKVDACIRSLALRQTCPSTVQGHRKLVAWLRKHQVNKAVMEASGGYERAWTKVLRESGIEVRIVDPKRVRSFAQSAGRLAKNDAIDAEMIAWFAETFSEAPGQVHDVAREELQALVKARLNLVDLKIRLEAQDEHVAPGPAQKARARILKSLLGEIARLEVAISAMVRTTPDFAERAEIIESVPGFAEATSAALVAGMPELGQVSDKIAAALLGVAPYDDDSGKHRGERHIKGGRRWVRNAIYMPCVGAATLNNPVFKAYYQRLLAKGKEPKVAITACMRKLIIILNTMIARRQKWDPRR

SEQ ID NO: 305158 - protein, 359 aa, unidentified
MCRVGEPVDSLLSLTVQIHIMTIHPKQIVQELKSLFAGIDVGAEELFLVIRKNGTPCKAQKFTNTPADRARLVKKLANLPGIIVCLEATGVYHFDLSIALHDAGVALMVVNPKASHNFARALMKNSKTDAVDAETLAQYAERMDFVAWARPSDEKIAIRSFARRIDALTRQKAAAKNQLHALTASKETPKGVLRDVNLSVSQLEKRIDCLTKEVRVMIEKYPDLERAFKLLVSVKGIAETSAIALMGELLLLPPGLSHREWVKFAGLDPRAFDSGKSVHKQARLAKAGNRHIRSALYMPALSAKQHDPHVKAYFQHLVDNGKKPLQAVCAVMRKLLHAIHGMLKHDKPFDNTRFYAIPA

SEQ ID NO: 305159 - protein, 348 aa, unidentified
MTVYCGVDFHARKQTISYLTTEDGEVQQTELHHEQDNIRGFYAKLRSQGPVIVGFETSGYAAWFEEMLEDLGCEIWIGMPAAIRRQARRRQKNDRRDADLILELMLRGDFPRLHRYTPASREVLQQLRYRHRLVKLRTIVVNSLQYLALSRGVSLRTKLLTGRGQQRMKELKLPSHLAKQRDEMCELLQELTAKIETAESWLELKAKQDAQVERLMSHPGIGPLTGLCLVSTLEQVERFANPRKVTAYVGFDPVEDSSGERQRIGAISKQGSRLLRFLLVEAGQVAVRTDPDLKTAYWRVQLRRNHQKAKVAVARRLLVRAFIMLRDGIDYAEFQRRGVAARSTRRTA

SEQ ID NO: 305160 - protein, 335 aa, unidentified
MQIKHFIGIDVSKDTLDLSVVVDGENIQYCHFKNSTREIKSTVNKLMKALGATVDDTIFCMEHTGMYNLPLVKWLQSQQGKMWLESGVHIRKTLGLVRGKNDKVDSARIAMYAYINRHQIRLWKAPRKVIERIAALLSQRSRMIKAKKQLNTANHEQRKFLDKEIMSSLNRYTYKAVVVIDKQIEAIEKEILGLIQEDEMLNRMYQIITSVNGIGFITASYILVTTNEFININNPKKYACYSGVVPFEHSSGSSVRGKTRVSQMANKNIKTLLHMAALSSVRMQGDIQDYYKRKVSEGKNKMSVLNAIRNKLVLRIFACVNQNREYEKYYCYKFV

SEQ ID NO: 305161 - protein, 416 aa, unidentified
MDVMFKFCAGLDVHKKIIVACVLLSSPEGLQRHIKTFPTMLVGLEALATWLAGFGVTHVAMESTGVYWKPVYNVLAAQLEVWIVNARDLHQVPGRKTDVKDAEWIAQLMRLGLLKRSFIPAVEQRDLRELTRYRTRLIGERAAASNRLQKVMEDANIKLASVASDSQGVSARAMLEALIRGETDPAQLADLAQGRLRAKIPDLEQALRGRVREHHRFMWREVLEHIDELNTRLLLLNERIRELTAPYESIIQRLDAITGVDRYTAEVILAEIGPNVTTFPTAKHLAAWACLCPGNDISAGKRRSGKTRRGNHWLRTALVEAAWAASRSKDTYLGAQFHRLRARRGDKRAAVAVAHSILIVVYHLLAKPEAVFTELGGDYFLKRNPEQEQRRAVRKLEDLGFTVTLTPVGTTAATAA

SEQ ID NO: 305162 - protein, 392 aa, unidentified
MQDATGRRLGKARLPEGIGGITQLHALLGVLLPEAAEPDQVVIGIETDRGPWVQTLVAAGYQVVAVNPLQVARSRERHGTSGAKSDAGDAHTLADMVRTDHHQLRRIAGDSDLAAAVKIVARAHQTLIWDRQRHLLRLRSVLRESFPAALVAFEDLTAPDVLELLGKAPDPASAARLGTAQIAAALTRAHRRNVADKAAAIRAALAAEQLGQPPVVAAAYAVAVRAQVAVLAALNAEIERLQAQVSAYFGRHPDAEVYRSQPGLGDVLAARVLGEFGDDADRYAGARARKNYAGTSPITQASGKKKVVLARYARNDRLTDALHQQAFSALQASAGSRAYYDALRARGIGHHAALRQLGNRLVGILHGCLKTRKPYDEATAWPQHADTDQAAA

SEQ ID NO: 305163 - protein, 321 aa, unidentified
MNKYKEIYGIDISKNVFDVYGSETGHTQFKNDEQGFKSFLKHLPKGVLVVMEATGYYHYRLAQFLFKSNILVSVVNPLSVKRFIQMKLAKVKTDKSDAKAISEYGQMNAVPLYTALTDVQSECLQLFRLLDSYLKHRTATKNKLKGEEVLGVPSKFVYRSLKRNLKHLNKEVDVLESRLLELVKQDQQHQITLLKSIPGMGVKTALFLIVVTDGFKKFETASQLCSYVGITPTIRQSGSSVRGRSRISKVGNKKLRNLLFLCAFSACKHNKACREIYERIVAKGKSKKLALIAVANKLLKQAFAIAKSGRPYDENFVSKLA

SEQ ID NO: 305164 - protein, 346 aa, unidentified
MGQTERPSSPVDASSFQYVVGVDIGSQTCSCCALKPDKSQALKPLEFANAPAGFTQVQEHLEHLGVPANHLLIGLEATSRYGENLYRFLESRGYQLCLLHPRQTHQFAQQRGLRAKTDQLDASTIARILLSGEARRGYVPTELIATYRELVRLHSHLSDEVARYKNEIHAELFVLFPEFRQIFSDPCRPTALGILKRYPSAQACASAGVEAMTVTLHELAPRHYGRKTAEQLVNLAQHSTSAGIAVSARSSSLKILCDQLEHTQSNLAHLEEEIENLLDADRGATGLQSVPEFGRQTVAVLRAELGDVTRFGRADQVVAYAGLDIQVRQSGKWKGEAKLSKRGSGR

SEQ ID NO: 305165 - protein, 315 aa, unidentified
MTSSDERFVGIDVGKRKNDVHVHGLADESQYHNDAEGIRDLVDSMLQLSPALIVVEATGGYERLMVAELSTAGLPIAVVNPTRVRRFADSLGQLAKTDKIDARTIAHFASVVRPPVRTLKSEEEEYLGELLGRRRQILTMQTAEKNRLHTSRGCIREDIQEHVDWLTSKEKELNKEIARLIRSNQEWSEKEALLQSVPGVGPVTAATLLADLPELGTINRQKVAALAGVAPFNKDSGKKRGKRRIFGGRSAVRRTLYMAALSCTRHNPVIKRFYHSLLERGKEKKVALTACMRKLLVILNAMVRDQEAWHHIPAH

SEQ ID NO: 305166 - protein, 404 aa, unidentified
MLFVGVDWAEDHHDICVMAQDGTVLGKRRVPDSVTGIGEIHGLVAEHAADDEPVVVGIEIDRGLVVWSLLAAGYEVYAINPMASARYRDRHATSGAKSDPGDAKVLADLVRTDRHNHRPIAGDSDLAEGVKLLARAHQSAIWSRQRQLNALRSSLREYYPGALVAFGTDLAGKDALAVLAIAPTPELGRGLSRSKIASALRKGGRQRNVEHRAEEIQEALRAEQLEAPALITKAHGLVTRSALALIATFNAQIVELEVALSEHFEQHPDAKVVLSLPGLGTVLGARVLGEFGDDRTRFSGPKSRKNYAGTSPVTKASGHSKVVLARFARNRRLGEACDQWAVCALTHSPGARSYYDQLRARGKTHRQALRQLANRLVGILHVCLERGDLYDEMVAWPVNSELAA

SEQ ID NO: 305167 - protein, 362 aa, unidentified
MKEINVLGVDIATRVLHAVGMDETGKIVARKRLSRHDLMPVIAQLPPVLIGMEACGGAHSWARRFRAQGHEVKRMAPPLVKPYVKSNKNESRDAEAIADAVTRPPRRFVPTKDVDQHDIQALHRVRERLRGERTALVHAGHGLLHEYGIVIPKGVGQFRQAVVGKLASEKDKRTPLSQEMCWKLVEAFAALEQQLASYQEKLEALATTPPACQRLRTIPGIGPLGATALVAAVSEASAFKNGRQCAAWLGLGPRQHTTGGQERLWGISTRGDSSLRTLLIHGARATMRWVGLTTDRRSQWIRQLSERRGKNRTAVAVANKHARIVWALLTSHQDDQPATNSGEQARGSAASHGLLARLAAAL

SEQ ID NO: 305168 - protein, 344 aa, unidentified
MDHFAGLDVSVKDTSVCIVDDTGRIIREVKVASEPDALLAVLTNSAYRFKRIGLEAGPLSQWLFSALAEASLPAICVETRHMRAVLKAQINKTDRNDARGIAQMMRVGLYRPVHVKTLRSQKLRVLLTHRKLLQSKAIAVDNDLRATLRNFGLKVGVVGAAKFEARIKELVECLPDLAVLVEPLLVVRRVLREQIDILHRRLLAIVRDDDVCRRLMTVPGVGPVVALTYRATVDVPARFRKSKSVGAVFGLTCSRDQSGERDRPGAISRRGDEMMRAMLYEAAQSMLVHSTRWSWLKAWAMKIAKRRGMKRAIVALARRLAVIMHRIWIDGTEFRWTREEIAAA

SEQ ID NO: 305169 - protein, 322 aa, unidentified
MAMLSFGGIDVSKDRLDVVVLPEEECSSVPNDAAGWAELVERLRGFSITAIGIEPSGGYERGAMRALLAAGMPVRQVNPFKLRQFARASGVLAKNDPLDARMIASFVTIMPTRPVQRQTPAAERLAEMLAIRRQLSAEKVAAENASRLLEDAMLQRLSHRRIVRLAADIDLLDKRMVEIVATDDALVHRYRLLTSMPGVGAVLACTLIALLPELGRMSRKQVAALVGVAPYAFESGTLKGRRCIWGGRAHIRQVLYMAAMSASNWNPVLKAFHDRLTAAGKLPKVVIVAVMRKMITMLNAMVRDDVVWADRLSGRHVLPTAR

SEQ ID NO: 305170 - protein, 388 aa, unidentified
MSKPVDLSKSLAALDQDSTLIVVIELSQSSWLAAARAPGVARDPLKKLKPDPEQLFKLIDRWREESRLAGRVVRRVCVAFEAGRDGFWLARLLRQHDIEAYVIHPTSIPVKRDHRRAKTDRLDTALLMRAFLGWLRGEADHCSMAAIPTLEEEDGKRPTREHESRVKTRSRIVNRMKGALARLGIQGFNPKLRKAAEKLEQLRTGAGEPLPPNTLAELRRDMAELRFVADQIKQIEKARETRLEKAPDEGMHPMVRLLASIKGIGLETAEMLVAEILSRHLRDRRAVARYGGLTGSPDESGSKRREKGLARAGNGRVRRGMIQLAWRFLMFQKESALAKWFEARTVDGPRGVRKTMIVAMARKLLIDLWRFVEDGVVPAGVVLFDPAG

SEQ ID NO: 305171 - protein, 347 aa, unidentified
MAFIGVDLHQNSFTVCRLDCDGSETFATYQLCRADLDRFCLGLDGDDEVAVEATGNSAWFRDEVISCVGRVVVVNPRQFQVIRKSVKKTDRNDARALAVFLSKDMLPETRVKTVAESELASLTQTRDLLVKQRTRLLNKIHALFNRHGIKLKNEGLSSKRRLAGLETGRFSALEQVELKVVRDQALGLSDAIAALDRAIEAAAETMDGYDRLVSIKGIGPRAAAVFLSGIGNVEDFESADKLAAYVGIVPRVSQSNDTDNRGRITKRGNKLMRTTLVQCTLIAIRYSGYLNAFYRRIKDRRGAGKAIIATARKLLKIIYDTLKNGWVFEDFPAFKIAGETIPAGQSS

SEQ ID NO: 305172 - protein, 340 aa, unidentified
MQIRSVGIDLGKTTFPLVALGAAGKVLVKRKFTRKQLLSFTANMQTSLIGMEACSGAHFLGRVLRKQGHDVRLIAAQFVKPFVKSNKNDFIDAEAIAEAVERKNMRFVPIKTDDQLDLQAIHRVRDRLVSRRTAVINQLRAFLLERGMVFAQTPAKLKAAMADILENTEANLTPQMRNLIDRLWSEWKLVEQQQIEELNDELERISASDAACTRIRQIPGIGPVVATAIVAAIGNGAAFRKGREFAAWLGIVPRQYSTGGKAKLLGISKRDNVYLRKILIHGARAAVLRIKRDRTPIGAWLDALDSRAPKNVVVVAMANKLARIAWAVLASGNDYRALAA

SEQ ID NO: 305173 - protein, 398 aa, unidentified
MTESSDYESVQVFIGVDVGKDTHHAVAINRSGKRLFDKALPNDENKLRSLISDLKQHGQILLVVDQPATIGALPVAVARSEGVLVGYLPGLAMRRIADLHAGEAKTDARDAAIIAEAARTLPHALRTLKLADEQIAELSMLCGFDDDLAAQTTQASNRIRGLLTQIHPALERVLGPRLDHPAVLDLLQRYPSPEKLASLGEKKLAAQLCKLAPRLGKRLAADIAQALAEQTVVVPGTNAAAVVLPRLALQLITLRKQRDEVALEVEQRVLAHPLYPVLTSMPGVGVRTAARLLTEVACRAFASAAHLAAYAGLAPVTRRSGSSIRGEHPSRRGNKALKRALFLSAFAALRDPLSRAYYTRKMSQGKRHNQALIALARRRCDVLFAMMRDGSFYTPQAS

SEQ ID NO: 305174 - protein, 332 aa, unidentified
MLYCIGIDVSKATLNIHISKSSQDLQIDNTLAAVKKLYTKLKKIFKKELEELIFVFEPTGSYSELLRKFCAEKQIKCFIINPKQFSNYAKALGVEVKNDEVDARVLAQSIVLAKPHQIKVPVYDTDVEQIKELMSFYKFTTKQTAQLKGHLESLETKEGDNFSIKELKKSIKLSKEREKRIIEQVHEIIQSNSSYKKAYENITSISGIGQIGGIALLHLFLKYPEANQRQITSLTGLNPIYRQSGSSLQSLYRISKSGSIFYRGALFMGAMTAIRYDDNFKAFYDRLKANGKHTTQAQIAVMRKMIIVAHSLYKNDTQYVKNTHKPKVLTMD

SEQ ID NO: 305175 - protein, 403 aa, unidentified
MDATAGIDLASEEHRLVVVDGDGREIEQRRIGNDEEGLSFLCRRLVEVGAARVALERPNGLVVDRLLETGVTVVPVHPNQLAAARDRYRAGGGKSDGFDAYVLAELARTDMHRLRALEPDADETRALRALTRARDELVGQRVALCNQLRAQLEAFWPGAAGVFADLDSPIALAFLARYPSPADARSLGEKRLASFLARNGYSGRRRPAELIERLRCAAQGRAGELEAEARRAIVLGLVATLRPLVAQIRALTSEIRGLLAEHPDGEIFRSLFRDPKAVITAAELLAEIGDRRERHRASSSLEAIAGQSPVAVESGKKKVARFRWACNKRLRDAVCVLADSSRKHNPWARKIYEDARARGHDHPHAIRILGRAWVRVLWRMWQDHEPYDPARHGSFQRLAAAGG

SEQ ID NO: 305176 - protein, 418 aa, unidentified
MNKIMRNNKRINSGQMIAAIDIGGTKNWAIFRSPKGHDCKAFSFDQTREGYDEFYKKLLANKAIYNTSSVIVGLESTGIYGEPFIHYLEEKNIPQVLVNPVHSKRIKEIRDNSPHKSDKKDPWVIADLIQLGCTLSVLIPKGTAAELRHLVHARERIISSLNVFLNQLQQQVWRVFPEFSLVIKSIDGKTALYLLKNYPRPEDIVKLGIGELEKLMRTQSRGQFNYEKAKELYDYAKDSVGLKEGISALIMEIHALITNIEQQNKHLDNFEKEIDSILNKIPYSKLILSIKGIGSIITAGILGELANFETIDSAEAALKLAGLNLFEISSGKHQGQKRISKRGRSLLRKLLYFAALNVIKHDGVFRETYQRYVDKGKLKNKALIAVARKLLRVIFALVRDGKMYDIKYCKEQQIQKAA

SEQ ID NO: 305177 - protein, 341 aa, unidentified
MMLYAQVESVDMLINVGIDVGKESLDLCILLDKTTGKMKSKKFRNKKEGFDSAFEWITKTTCNAPGKTLITMEATGVYHEGVAYYLYSQGFQIFLSNPGKAKKFAQSLGFVHKTDKSDAAMLAKYGSIQLDSIAFWIPEDDDVRVIKTLIRRLNALEKDKLRESNRLEASTISDAAERVIQSTVYLISVLDGEITEIQDEIDRLISCNPEMNKNRELLLSVIGIGKVMARELVYLFSAKKFTSAKQVAAYVGLIPRLNESGVFKGRSSLSKSGPSRIRSKIYLAAVCAGTHNPDIKAQKIRLTHAGKTKMQALGAAMRKLIQICYGVIKNQTRYQPQIVLI

SEQ ID NO: 305178 - protein, 343 aa, unidentified
MDQYVALDVSLQKTAVCVLNVSGRVLIEADVPSEPAALIAFIQTHAPGAARVGLESGPTSPWLWHSLKAAGLPVVCMDARHAHAALSVRPSKSDRNDAHGLAEMVRMGWYREVQVKSLAAHERMALLGVRRRLVDMRVEIDGQIRGILKTFGLVVGSGNKGAFAQRARMLAQNHPVLSALIDKLIEVREVAVAKVAALDKEIRRFVRDDLTLRRFMTVPGVGPVTALAFRSTIDEPNRFKRARDVGPYLGLTPRRYQSGETDRHGGISKCGDRFTRTCLYEAASVLLTKVQRWSPLKAWGTRLARRIGSKKARVAIARKIAVILRCIWTDGTEFWWTKETATA

SEQ ID NO: 305179 - protein, 457 aa, unidentified
MDKQTKGKEKGKKINVVKMAVVNPDAAGIDVAATMHAVAVPPGRDDVNVKEFGAFTEDLLTIATWLKKCEVTKVAMESTGVYWKQLYLVLIEHGFEVALVNAKHVRNVTGRKTDMDDAQWIQKLHSCGLLTSSFLPDDTTESLRSLVRHRKKLIDDASRYVLRMEKALELMNVKIHSVISDLMGKTGTAIVEAIIAGEREPENFMQHVDYRIKADHEEIKKSLQGNWRTEHLFLLEENYRLYGFLQERIVSCEKEIEVHLQKMVAMNNDGIIEELPKEGVLKKTKVKKGKNQPAYNVREYLLKIHGVDVVDIYGIRDSSAMEILAETGTDLSRWENEKKFVSWLNLCPNNKITGGKLISSTVLKKKAGIATMAFRAAANSVQKSDHWLGDYFRRKKAKGGNKYAVIATARKIAIIYYKMVRYKQGFTPIDPDEYREGYKAAKVAWLEKQLAKLKAAA

SEQ ID NO: 305180 - protein, 383 aa, unidentified
MRAVCGLDVHKDSVYLCILCDTGEIFENVYGVLTHQLKDMCRTMKAHCVTEVTMESTAVYWIPIWRVLEPHFHLKLVNPYFIKQLPGRKSDVKDAQWIAECTLKDLVRGSFVPPERIQQLRQYDRRIFDIDAEIVRKLSKLDAVLQRCNIRLSNYVSNTDTKSYKDVVDELCKGVTAPEELIKKVHGRIVNKHGRETILASLTGVVSEAEKDAMRQLRAEISLAEEHKQECQDKMLNICKTYYPKELKRLMTIPGIKERAATSLIAEIGVDMTKFQTAAHLASWSGLKPRNDVSNGKYKSRRITHGNVFLRKTIIECAWAASRTKDCFFSRFSYRLTQVCKKNKLKVLVAVARKLLIAVWHVLHDEKDYVDFNPDCKAPATNG

SEQ ID NO: 305181 - protein, 346 aa, unidentified
MKINRVGVDLAKNVFQLHGVDRKGKALWKRRLTRGKWLAVLCDTVEPGTEIGMEACAGAHHWARQLMQRGYPVKVIPPQFVKPFIKSNKNDANDAAAICEAMGRPDMYPVKVKTVEQQDLQAMHRIRDEIKGHRIAKANQIRGLVTEYGLVAPLQLYALRRAIPEWLEDADNGLTFLFRQLLQGLWGDLHALDQRMTELDKQIAVVAQEDPTARRLQQLRGVGPLIATALVATFGDGKQYRKGKDMAAALGLTPRQHSSGGKDRLLGISKRGDAYLRCLLVHGARSAVRTAKDKDDRLSRWIINLQARRHSNVVAVALANKIARMAWAMMTSSADYDPDLAAASVN

SEQ ID NO: 305182 - protein, 344 aa, unidentified
MTEVTTIGLDIAKHVFHAHGADGAGRAMFSRRLTRAKLLAFFAAQPRCLVALEACGGAHHWARELQAMGHEVRLIPPAYVKPFVKRHKNDAVDAEAICEAAQRPSMRFVAVKTEAQQAAALVFRTRDLAVKQRTQIANAIRGHLTEYGWVAPKGAASLALLADLLDDGEIGQALPEAARPMFAMMVDMLAQLDERIGVLDKEITRRAREDEVARRLMTIPGIGPITATAIAAIAPPAETFDKGRDFAAWLGLVPKQMSTGGKQKLGAISRMGERTLRRLLIIGASAVVLQESKRGAPAGSWLEGMLARKPRMLVTVALANKMAHTVWALLVKQEDYRAPVPAAA

SEQ ID NO: 305183 - protein, 391 aa, unidentified
MILVGIDIAKDKHDCFIRTLDGEVLWKPFTITNTISGFDLLYERICATGEDFDNIKVGLEATGHYSYNILGYLLDKGLPTFVINPLHTNLYRKSLSLRKTKTDKVDCTIIAGMLMSDVDLKPYSRALYHSTELKSLTRYRFDKIQQRAKLKISITRLVTILFPELPSLVSKIHIPSIYALLSEYPSAEAIATAHLTKLTGLLEKSSKGKFSKATAILFRDTARTSIGASMPAKSLELKHTIKLIGTICAEIEEIECEINRIMATINSPITTKPGIGRMTGAQILAEIGDFQNFSSPDKILAFAGLSPSTYQSGQLYSSYAKMEKRGSPYLRYALFTATTLVCNWDPTFSAYLAKKRAEGKHYFVAVSHAAKKLVRVIYQLEKTRHPYIKSA

SEQ ID NO: 305184 - protein, 413 aa, unidentified
MDSYKIAAIDVHKSMLAVVVTDAAVEGELPFERRKFGALGSDLKALAEWLAAQQVQEVVMESTAQYWKPVWRQLEGQCRLHLAQAHSNRARKGRKDDFRDAERLARRHLSGELILSFVPDPEQRLWRTLTRSKHQLTRDRVRLHSQLEALLEDARIKLSTCVTDLLGVSSRRMMEQLAQGATDPALLAALADPMLRATAETLTDALSGAAEMSTLHRQILRLFLDRLELMERQMEVLDRTIAATLQLHQDAVVRLAAVPGLGVDSAQQIIAELGPQAATFPSPQELASWVGVCPGREESAEVSKSDESPKGNRTMRRVLNQAANSARKTKGSIFQALYQRWVPRLGHNKTIWAIAHRLCRVVWIILHRGEQYIEFGNSRDPKSAAKRTAKLIHKLRSLGYQVTPPTPTPRVAG

SEQ ID NO: 305185 - protein, 459 aa, unidentified
MGKAKACKGGKNQLQVIHPRAAGIDVGSKFHVVAVSAEYDPDPVRKFNSFTTDLHRLADWLKAVGVTTIAMESTGVYWIPVFEILESRGFDVILVNAREAKRVPGRKTDIKDAQWLQQLHQYGLLSASFRPGEKIASLRSYLRHRERLTEYAAAHIQHMQKALMQMNLQLQHVVSDITGDTGMRIIRAIIEGERSASKLASYRDPHCKQSEKTISAALTGNYRPEHVFSLKQAVALYDFYQKQIKECDQEIEKALAALNSDKTAPSEPLPKARRTKKQKNEPGVPIREMLYTLTGVDSTQINGIGPYTTLRLVAECGTDMAKWPTSKHFTSWLTLSPGNKISGGKVLSSRTRRTKNRATTLLRIAAVNIGKTQTALGAFYRRLAARVGKAKAVTATARKLAVLFYTLMRYGKAYVEPGADYYERQYRERVLRALSRKAAALGYRLALKQENSPVTVNVS

SEQ ID NO: 305186 - protein, 421 aa, unidentified
MSYKIAAIDIHKKVLMVVVASTQAEVADATGAAVEFQWQKFGAGADQRHQVVSWLQQHQVQEVVMESTAQYWKPVWLDLEPHFVKLHLAQAQSNRAPKGRKNDFLDAKRLARRLLAGELILSYVPEPEQRRWRLMSRGRLQLVRERVRLQSQLEALLEEARIKLSSVISDLLGVSGRRILAALSKGESNPVQLAELGDKSLKCTKEELVDALKGSPEPGHIALLKLHLERLELLDKQIDELSRMSAQALQAHQDAVVRIAKVPGFGVESAQQIIAEVGVDAEVFPSAGEFASWAGVCPGSDVSAEQNHSPRCPKGNRYVRRLLSEAAQAAVKKKGSHFQNVFQRFLPSLGYNGAIWAVAHRLARLVWKILHDGVSYIEQAQETNPRAKKRRVQKLAQCLRRLGYSVTLTEINPAPAIGGAQ

SEQ ID NO: 305187 - protein, 455 aa, unidentified
MTGKKSRTVDALSMVNPGAAAIDIGSTMHMTAVNPLCGDNPVRAFGTFTAELNEMARWFKECGVTSVAMESTGVYWIAAYEVLEQHGFHVILVNARYAKNVPGRKTDVSDAAWLQRLHSYGLLRGSFRPEAGVATLRAYFRQRERLIEYCASHVQHMQKALMEMNVQLHHVVSDITGVTGMRILRAIVTGERAPARLAEMRDRRCHASVEKICVALTGNWRDEHIFALGQSLALYDFYQARILECDRKLEAALNALEVNQDHDIRSHPKVRTKTKQTNEPDFEVRVALYRVLGVDLTQIHGIGPSLALKLVSECGTDLSAWPSAKHFTSWLCLAPGNKISGGKLLSSRTRRSSNRATALLRLAATTIGRTDTALGAFYRRLAARAGKAKAATATARKIAVLFYNSLRYGMKYDDPGAAQYEERYRSRVIANLRRRAKAFGFSLHEQPAEAALAVS

SEQ ID NO: 305188 - protein, 422 aa, unidentified
MCRHLTILCNTKYAKNIIVATIVTTNKDGISEYLQKSFSTINSDIQRFHNWLIENNCYHVCMESTGKYWIPIFNYLENDIDVCLTHPKYVKAIKGKKTDKKDSKWIADLYKFDLVRCSFIPPKDFRQLRELSRYRFKLVCMKSSEKNRIQNCMTISNVGIASVLSDPFGKTATEIISYLLEHTADSMDEKAVRKLIKKGAKSKSDEIIEAIKGYTIETDQAKKLELARGHLEYLDDMITQTEVELYVRIKPYYEFVEFVSTMPGMTELSSTIVLAETGVDMDIFDDAKHLCSWCGLSPANNESAGKKKSVRIAKAGDYLKPMMVQCALAAIKSKKQPYFAIKYGRIKKRRGHKKAIIAIARMMMVCIYHMVSEKKPFTPTDYEELMDPQNHVESVVLNENNVFAYLESLGYDSSKLVKRNDN

SEQ ID NO: 305189 - protein, 406 aa, unidentified
MRFYIGLDWADAEHAVWVEDENATKIVGRIVPQTAEGLSEWGRWLDERRAEGIELWAAIEKPEGRIVDLLLDHGVLVFPVNPKALDRARDRFRISGAKSDPFDARVLATFLRTDHGHLAPLRPSSEAAQELKGLTRDHARQVRQQTRLLNQLTATLKAYYPRALEVCDDLKSQWARAFLREYSTPAALAALTARRWQRWTREHRLGAERTAELWAILQGPQLPVPAHVVRVNARLVGALLAQLEATVTAVEAYREAITDFFASMPAAEWATSLPGGRSGTTVPQLYAELGDAAGRWQTFRHLQGHAGSVPVTDRSGKQVSVQFRFACNMHLRQAVHQFAFQSLGKSEWARAYYDRGRKRGHSHHHAVRALAAKWLKIIFVLWTRQVAYDETYHLATMARQHLRQTA

SEQ ID NO: 305190 - protein, 430 aa, unidentified
MMEEVDDAELVVERIAALDLGKAGLEACVRVPSPHRPGRRMQELRGYGTTTAQLLEMVAWLRQWGVQRVVMESTSTYWKGVYYLLEAEGFDCWLVNAREVKNVPGRAKTDRADAIWLAKVAERGMCRPSLVHPAEIRRLRDLTRYRRALVQDRTREQQRIEKLLEDAQIKISSVLSELHGVTARAMMDALIAGQRDPRALAQLAKGRARKKTAQLEEALRGFFTDHHAAILRMMLDNTDRISAQIAALDARIEKEIGPFSGQAARLAEIPGVDAVAAAELIAEIGVDMTRFPSDAHLVSWAKFCPQTHESAGKSKSKGRGRGNPWLAGTLGRIAFANSRADTFLGARYRRLARRRGKQKAIVATGNSVLTVVYYLLSDPMATFCDLGPGYYESRINVHRRARDLVTQLQALTGQHIVIRDGKAVITDAAA

SEQ ID NO: 305191 - protein, 386 aa, unidentified
MIYVGIDVAKFKHDCFIMGSSGVIYEDALEIDNSLKGFTELTDCLEHFSIEDIRIGLEATGHYSQNIVNFLQSSGYDLVVFNPLRTTKFRKAFTLRKTKTDRVDARTLARILAMEDSESYSTPSYHAQELKSLTRHRLRMVKQQSKLKTSLTRLAHIMFPELSITLGEVHTRAVYALLSEYSIPATIKKIHLTHLTSIFRSYRNPRQTALDVREAAASSIGTATPALVFELRQVIPQIEFVSAQIKDIDRRIKALMTEVDSSILSVPGIGFTLGASILGEIRDISLFNTPAQLLAFAGMEPSTNQSGQKSSTGDKMVKRGSSYLRRSLYLAAEQIVRRDPAFIDYYAKKKSEGKHHEVVLSHVARKLVRVLFYLLKNNVKFVPQKH

SEQ ID NO: 305192 - protein, 303 aa, unidentified
MEGAPMLDTTTFVGLDVHARSIKAVSLDVMTGEVRAATFGYDAGAVAEWVRSVDPGARCVYESGVTGFDLQKRLSGLGVDCVVGAVSKMIKPSADRRRKNDRNDAEFLARMLSVGNVVEVWVPDDECEAARDLTRALEDARDDLSRSKQRLSKFLLRHGLVFDERTPTGRRKGNWTRAHWSWIESIRFAEGADEEVLAYYVDAVRRAAEEKARLEGLVEGEARKPRWRRRVDSLRCLKGVDTASAADLVFEAGEFSRFRNARSFAAWVGLTPSEHSSGESDRRGAITKAGNKHLRKTLVLALL

SEQ ID NO: 305193 - protein, 339 aa, unidentified
MTLQSEKIIQEPKQLFAGIDVGAEELVLTIRKNGTSYKPQKFANTHTDRARLVKKLVNLPGIIVCLEATGVYHFDLSIALHDAGVALMVVNPKSSHNFAKALMKNSKTDAVDADTLAQYAERMDFVAWTRPSDEKIALRSFARRIDALTRQKAAAKNNCHALSVSRETPKAVLRDVKLAISQLEKRIARLTQESLALIGKHAELERVFLLLTSVKGIAQTSAIALMGELLLLPQGLSHREWVKFAGLDPRAFDSGKSVHKKTRISKAGNRHIRSALYMPALSAKQHDPHVKAYFQHLLDNGKLPLQALCAVMRKLLHAIHGMLKHDKPFDNTRFYAIPA

SEQ ID NO: 305194 - protein, 388 aa, unidentified
MFAGIDVASERHMLARLDATGVPLGKPVPITEDREGYDTLLRLLGPPPVLVAMEATGHYWKNLYAALVAAGHSVVLLNPLKTRRFQDSALERTKTDAIDATGVARFAFEKRPEATQLHDAAAEALRELVRHRDRIRQDFDDRVRQLHRLVDLGFPEFTRYVRGLDSMLATALLTECPTAHDFARATPKRLAKLRYDGRHLVGAERAAQLIEAAKRSIGQHHGPAYRLQARHICQDLDMWRRRLVEIERDIDGLLESNEVGQLLLSIDGIGPQTTARIIAAVGDPARFKSAAAFAAYVGVVPGLKQSGKNGSRRAACAPMGNARLRRAVWMPVVGAVRRNAWLKSFYDGLIARGKPPKLALVAAMRKLLHAAYSVTKNRKPFTINLAEA

SEQ ID NO: 305195 - protein, 474 aa, unidentified
MFRKTGEAMKGKKKRTDQRAGETRQNRQNVAGLPTVRTNVAGMDLGSEEHWVCAPALDGAGREIASFGGTTGELLRLAGWLKERQVESVAMESTGVYWIAPHEVLEGQGLPVLLVDTRRLAEVPGRDKKSDPSDCEWIQHLHSCGLLRGAFRPREEVCMLRTMVRDKANLVAESGDWVRRMQKSLDQMNVRLHRAVSDIDGATGMAILRAIVNGERNPEKLAELRDPRCRSSQEEIAEQLRGHWREDHLFSLKQALTMYDAVQERIGAYDEEILRRLGTMERDAVRGTAVPPVKNPSKAKSIRRRGEEPMREALYRMSGVDLTSIDALGVETVQVVLSEYGADLSGFDTEGHFVSHLRLTPHKPTSAGKPLKKKRRNSASTRVAAALRMAATSMRNSQTALGAYYRHIAQRIGGDVAVFATARKLAILIYRLLRWGTAYVDEGAEAYERRCQQNRLQALKSRAKQLGYELVQTA

SEQ ID NO: 305196 - protein, 422 aa, unidentified
MNESKQFKATIGLDWADQKHDLWIRPADGSKSEHLRLEQSPEALHEWAAKLRKRFDTGPVAIGVETSRGPVISALMSYDFIVLFPINPKALKDYRAAFSVSGAKNDRTDAQLIEEFIRLHSEKLKALQPDTELTRKLSGFVQDRRHLVDERTRVVNQVHAKLKTYYPLAETLIGSEINSLLAAEFLSRWPDLESLLATPLPKIRAFFYKHNSRSAKKMEQRLAAIKTAKALTTDPGIIEPARELVLALAGMLKCLHKSVARLEQAIALAMDQHPDAPIFRSLPGAGPALAPRLLVAFGTQRDRFQSAQEVAQFHGVAPVVIQSGNSELVRLRRRCPKFGRQTFHENASCVAKTEPWGRTYYEQQRKKHDDKHHQACRALAYKLIRIYFSCWKTRTEYKSNTYLNALQKHGSPLHNRLNRVGE

SEQ ID NO: 305197 - protein, 349 aa, unidentified
MVIVGIDAHKRTHTAVAIDEAGRKLGQMTTTTTTTQANLELVRWADRFGTERRFAVEDCRHLSRRLEADLLAAGEQIVRVPPKLMAHARDAARTYGKSDPIDALAVARAALREPNLPLARLDARTRDLRLLVDHREDLVRERTSQVNRLRWHLHELDPSWDPAPRSLVRLKRLDEVASRLSTIDGTLGWVARDLVARIRELSLAANELERRITGIVGLEAPVLLGLAGVGALTAAKIVAETADARRFRSKDAFARHNGTAPLPVWSGNRERHRLSRTGNRQLNAALHRIAITQMRIHQPAKDYLQRRIAMGNTKTEALRALKRRLSDVVFRALVMDAEMAAEHALGDAA

SEQ ID NO: 305198 - protein, 339 aa, unidentified
MTMIGIDPHKATHTAVAVDDDENVIGEFTLEASNNQVERLCDWAEGLGKREWAVESANGLGYLIGRQLVTAGETVFDVPPVLASRVRLLGSGRSQKNDPNDARSIAIAALRSERLGIVKPDDHVTVLRLLVKRHRDMARLRNKHCSRLHALLLEVEAGGIGGKISVTNASELLDRLGVTDEVTRYRILVAREVINDIARLDQTLKASKQRIAVAVQASGTSLTNIVGVGPIGAATIIGYTKDVTRFPTRGHYATYNATAPIEVSSAGNTRHRLNPRGNRILNHAIHIAAVTQLRHDTNGRAYFDKKIAEGKTPKEAIRALKRRISDAVYRQLQHDAASN

SEQ ID NO: 305199 - protein, 283 aa, unidentified
MTIIVETRSITGGVDTHLDVHVAAALDANGGVLGVESFPTTTAGFAELHAWLCSFGTLCRVGVEGTGAYGAGLARFLRGAGVAVLEVSRPNRQARRRHGKSDTIDAIEAARAALSGRAHGVAKTADGNVEAIRALLVAFRSGRDARIKCLNQLRHLGYTAPDDLRERFRDVTADALARTAAGLRPNPDGDPVVDATKLAMQTLGRRVLDIDADCARLHGELAALVRKTAPTLVELHGVGPHTAAMLLVAAGDNAQRITSEAAFAHLCGVAPIHASSGKTVRHR

SEQ ID NO: 305200 - protein, 355 aa, unidentified
MTVTIVEETRSATCRTAITGGVDTHADTHVAAALDPVGGLLGVREFPATAAGYARLLGWLGGFGTVCLVGIEGTGSYGAGLARYVTAAGIRVVEVDRSDRQDRRRQGKSDPLDAVSAARAAQSGRARGAPKGRDGVVEAIRTLMVARRSAAGERTRTINQARALVLTGPDDLRTRFARHTPAALITGLASLRPRTGDVAGYATRIALRELGRRAQFPDGQLQRLDDLIVPLVTARAPGLLALYGVGPHTAALLLIAAGDHPGRLRSEAAWAHLCAAAPIPASSGKVTRHRLNPGGDRQANHALWRIVFTRLGSDPATRAYAERRTAEGKSKAEIIRCLKRYVAREVYPHLRPAGG

SEQ ID NO: 305201 - protein, 317 aa, unidentified
MNTPVCVGIDVSHAQLDVAVRPGKGFSVSNDAGGWATVVAHLQPLKLVRIVLEATGGLEVPLVGALAGAGLPVVVVNPRQVRDFARATGQLAKMDVLDAQILAHFAEVIRPPLRPLPDAQTQVLAALVARRRHLVEMLTAEKNRLRTAAPAIRRSLRQHLVWLQRERTQLDTELAETIHSSPMWRATDDLLRSVPGVGPVLTITVLANVPELGTLTNKQIAALVGVAPLNRDSGTLHGKRLVWGGRAHVRAALYMAAIVATRYNPVIKTFYQRLCQAGKAKKLALTACMRKLLTILNAMLKSGTPWRHGMDTVCAKG

SEQ ID NO: 305202 - protein, 415 aa, unidentified
MVEVIVERCAGLDVHRDTVVATVRVPGTGKSRRRRAQETRTFGTTIAQLELLGDWLAECEVTRVGMESTGCYWKTVFYALEQRFECWLINAKHLRNVPGRKSDVIDSRWCCELVELGLVRPSFVPPPEIRRLRDLTRLRSTQAQERCRAIERLEKVLQDAGIKLTSVASKVLTQSGRAIIEALIAGQRDPRALAELAKGKLRPKIPQLTAALQGHFGAHHAAVAACILGHLDFLDAAIAGLDEQVAIRIANGYQPAARLLRDVPGLDRRSIEVIIAETGADMSRFPNPGHLASWAGVCPGNHESAGKRRRVATTPGNQWLRRALIESARAAARTKGSYFGAQYRQIARRRGPNKAAVAVAHSLLDVIWHMLTTGEAFTDLGEDYFTSRQDKEHQARRLIGQLEKLGFTVQLTPAG

SEQ ID NO: 305203 - protein, 333 aa, unidentified
MACQVYCIGIDVSTAHLDTFNLPGKSGVHRRLSNTPESHAELAAALTDLCGSGNDVLVVMEASGGCERELHHALAGAGVPTAIVNPKRVRDFARSHGWLAKTDRVDAKVLHAFGQSHRPRPTALPDPVRAELKEMIAYRDQVVAEITARSLQRRHLRSAVLIERAEAALKSLRQEAETLALQIDMMMYTDETLGRRADLLRSFTGVGPQTAAVLVGHMPELGTLTDGEVASLAGLAPFARDSGSLRGVRTIYGGRGRVRQALFHATRAGLRWNPVLRAFYDRLRERGKPGKVALVACMRKMLVILNALLKAGQEWDPGHKHEKTGRTAGPASA

SEQ ID NO: 305204 - protein, 385 aa, unidentified
MANQNDLSRSLVAFEQDNTIIAVIEMSLNSWLVAGIVPGIERHPLKKLSCDEQMLLQLLYRWRDEAVKAGRMITRMVVAFEAGRDGFWLARWLRARGIEAYVIHPTSVAVSREHRRAKTDRLDTELLKRAFLGWLRGEPDHCSMAAIPSLQEEDAKRPTRERENLVGERTRIINRMKACLVRFGIRNFNPTLRRATERLNALCTPEGVSLPPNTLAELRRDMARLRFVMNQINEIEAARLQRLEQAPAEEPHAKVRLLARVIGVGLETADMLVHEVLSRKLRDRRAVARYAGLTGAPDESGSKRREKGLAKAGNARVRRGMIQLAWRFLLFQKNSALSQWYRTRAESAGKKRKTMIVALARKLLIALWRLVTTGEVPAGVILRAA

SEQ ID NO: 305205 - protein, 322 aa, unidentified
MENEQQKPVVEFDQIVLRGCGLDVHEKTVVATIDGQGLRRETRTFETFTSSLNELRSWLKQYGITHVAMESTGIYWKPVFNILEDSFEVILVNARHLKNVPGRKTDRIDSQWICKLLLGGLLKASYVPEEKIRQLRDLSRYTGKLIQQLAAEKNRIQKTLEDANIKLSSVVSDTSGAVATRLIDGLIAGREDLAQLIRECYHGKLKASQADLLKALTGRVTDHHRFMLRQIKRHMAWLEEEVAVLEGQMDKLLEADQESIELLSTIPGVNKAIARKIVAETGTDMEVFGNEKKLAKWTGICPGNNESGGKKKADEPPTATNT

SEQ ID NO: 305206 - protein, 368 aa, unidentified
MSEIIRIGVDTSKSVFQLHGVDAAEQPVLRKKLRRRDMLGFFERLPATKVGMEACGGTYYWARELTALGHEVKLMPPQHVKPYVRRGKNDRNDADAICEAMSRPRMSFVAIKTAESQAAQMLMTTRERLVAYRTQLINTIRGHAAEFGLTAAKGPGHVEPLLTRIAEDGRMPELAKELFAMHGVELSRLKIELREIEAKLKAWHRQNEMSRRLAEVDAIGPIGGCLLAIKAPDPQAFRCGRDFSAWMGLTPKDHSTAGKMRLGVITRAGDEALRRTLVVGATSVIKQVSNGKGHPSPWLRDLVARKPPKLAAVALANKLARIAWRLMVSGERYDAARAGIVSPTARIAPCSRRQGRGAPPAAVASGQP

SEQ ID NO: 305207 - protein, 338 aa, unidentified
MELYAGIDLHSNNNYLAIIDEHSQKVFGKKLKNSMPLILTILEPYKKELAGIVVESTYNWYWLVDGLQEHGYKLHLANPSAIKQYEGLKHTDDKWDSLWLAHLLKLGILAEGYIYPKKTRPLRDMLRRRMLFVNHRTADILSFQSMVTRTTSNQISGNDIKKLKESDAEQIFTDPDLIFTAKRYINIIASLTVQIKIIEKHVKDRLKLSENFKCLLTIPGIGYILGMVIMLEAGDISRFEKVGNYSSYCRCVKSERFSNGKKKGSGNSKNGNRYLSWAYVEAATFATRFCDPARKFYQRKSAKSNETIAKKALSAKLARASYYMMRDQVPFNSDMLFA

SEQ ID NO: 305208 - protein, 413 aa, unidentified
MAEETFAWFVGVDWGSEKHQACILDPQGGIVGEREFPHSGAGLAELGEWLLSTGGAASTVAIAIEVPHGPVVDTLVDLGFVVHTINPKQLDRLRDRFSVAGAKDDRRDAYVLGDGVRTDRRLFRRLHVSDPRLVELRAWSRLAEELQEERVRLSNRVHHQLWRYYPQIQKLTDDLAAPWFLELWTIVPTPAKAGQLRKSTVEQLLKQHRIRRVDAETVLRILREPAIKVADGVAEAASIHMRSLVARLRVVNRELREAEGKLDKLCTALGETAAVSGDCLQRQDVLILKSMPGIGRINLATLLCEGSGPLCSRDYAALRTLCGAAPVTKRSGKSHTVIMRYAAHVRLRNTVYHWARVAAQHDPKSRSRYVALRQRGHSHGRALRGVADRLLGLACVLLRRQTLFDPQFGRPAT

SEQ ID NO: 305209 - protein, 310 aa, unidentified
MGGINAAIDVGKQQLDVALGSAGERCAEPNEPRAIARLCQWLAAASCARVLIEGGSYQNLLVGALRAAQLPVVIVNPRRVRQFAQSLGQLAKTDALDARVLALYGERLQPPLRELPDEQTRTLRDLWVRREQLIEMLVMEQNRLEHARQALHRGLRAHIDYLRKQIKQADDDLDRTVRNSPLWDKYELLSSVPGVGPVLSVALLADLPELGRLNRREIAALAGVAPFNHDSGTLHGQRKIQGGRPRLRRVLYAATVAAARCNPLLRPFYLRLRAAGKKPKVARVAVMRKLLTILNLMLKTHTAWRPPCPA

SEQ ID NO: 305210 - protein, 318 aa, unidentified
MAMKTRHVMLGVDVSRGWLDIHQDGQEAVERIANERRAIDAFLKRFRDAAIAVEATNTYHELVVERALRLGLVVYLVSGYQIKHYGNAIGQRMRSDEIDARLISRFLSREIDRLKPYEPKSPQHALLWKLLKRRATVVQSRQQLQQSLAGIELLGETTRLVNSFARVLAELDRRIAELVKSLGWQAEVSRVQRISGVGPLTAQALVVAYHSGTFIHHDPFIAYLGLDVRAKDSGKFRGQRKLSKRGDGEYRRLLYCAALAAGRMPGYFRDRLQALMARGLSSTAAHVVVARKLATIAFNLLRKGVDFDPARLASGATS

SEQ ID NO: 305211 - protein, 393 aa, unidentified
MGAAKKHGPAAYPGIDVGKSGHGARALDAAGGVVFRADLDNGPDAIDRLLERAGDAALVVVDQKRNIGALVPAGAHALGRRCAYLPGYAEKRARDMMPGIAKTDAIDAEVVARTAMGMPRALGPIAAEDAAARSLRALSSQREYAIASRTRAKNRFRAVLLEADPELERAVDPSSPWQMAVLSELGGAPGCSAAGWGAFADAARRAGAPAARARELWEALDASAGSGRGAGAGEDVSVRMLAREISAPGSDVAELDGLIGGALAGDEACESLLAIPGIGPKTAAALVTAVDISLFGSHHELASYCGVAPADSRSGTSIRSTSPQRGGNKQLKNLLIFSRDPLVGTGNRFGRRYDERRARGGMGRNKALKAVARKRMKVVYAIMRDAVPYEPGR

SEQ ID NO: 305212 - protein, 325 aa, unidentified
MIFGEYMTVAIDVGKKSSYIVVEDNGNVTSEGYVPTTKDGFSTVLSGLDKPTVIVEASSTIDRVASLLEEYNADVKVAHPRNVKLIAESVKKTDKNDAHTLLNLYNSGYLPESYLASKEVRDTRNLCRNRNFLVRQRTAVKNKIQDQAFRLGVDFKHFNKRTLIELSSLSFPLERLVGELRNLNNEVTIFDKKLEDALQQNKNAKLLYTIPGVGVYSALAIAAEIADIDRFSTSPNLCAYAGLVPRTHQSGNKEWKGHIAKGNSYLKCILVECAHVHVRISDSWITEAYRRIKIRAGSKKAKIAAARKLLITIYCLLKEGRGYNA

SEQ ID NO: 305213 - protein, 483 aa, unidentified
MKRKSIPSSRGPKTSRQSKSKKQAWKVVHPHAAGIDIGATEHYVAVPPDAVAAGESTVRSFGCFTQDLDALVEWLKACGVDTVAMESTGVYWIVPFQKLEAAGLEVVLVNAHTLKHVPGRKTDVQDCQWIQQLHTYGLLRASFRPDELTCRLRTLVRHRANTVSSGAEYILQMQKALTQMNVQLHHVVSHLTGETGLRILRAILNGQRDPLILVELRDPQITRSTKEEMRKALVGDWRPELLFVLKQSLRGWEFCQEQMRECDGQIEQLLKEMPSAVAAKTPAARPQPDPLASTNPRPKGKQSRKRNDPEKDLGPELARICGVDLTAAHGLRLLTVLTLVSEIGVDVSKWRSAKAFVSWLGLCPNNKISGGRILSSRTRKVINRAANAMRMAAVGVGDTDTWLGSFHRRMRAKLGPAAATTATARKIGTVVYHLLKHQEPFIDRDLMAYEAKVYRHKLARIKKQAAALGYALVKTDEEKQLTE

SEQ ID NO: 305214 - protein, 357 aa, unidentified
MGTISLGVDLAKCTFSVCEMEGDTGRVLRRREFRRDAFAAWLAQLPVGTVVAMEACSGAHHWARRCREYGLVPRLMAAQFVRPFRKNPLAKNDSNDAEAIATAARQGNMRFVPVKDIDQQARLSWHRVREGYKAEHLAIGNRLRGLLAEFGVVVPHRDAALHRVLGDLDAYVELPGEFKELLRSLAEHWGQVRAAMAACDARIERHACQDDRCFRLRAVVGVGPLTADAMVASIGNAREFKNGRQLAAWLGLVPTQHSSGGHARLGAISCRGDGYLRTLLILGARSSLERAKRVGVDKATPEQAWIRSLACRMAFGKVIVAIANKHARQLWAMLAHDLDYDPQVDLKHPMQQQRTAA

SEQ ID NO: 305215 - protein, 413 aa, unidentified
MLKIVYPICCGMDVHKNFVVACIATTDDKGVTTYKKKRFSTFTCDLRRCASWLAENNCTDVCMESTGKYWIPVYNTLESTCQIVLAHPKYVKAIRGKKTDEKDAKWIADIFKHGLVSGSFIPPADIRQLRDLMRYRWKLTHDTVGEKNRAQNCLTVSNIKLDDVFSDVFGKTASAITDRLLESNEPFDVAPYLSRRIKTPVEKIQAAVDGELCAEQAEKLRIIRSHMNSLDLCKANLESLILSTAQKFLPQLELVMTVPGIQAYSAIGIISEIGVDMSVFPSSKHLCSWAGLTPQNNESAGKKKTTRISRAGAYIKPLLVQCALTVSKSSKHPEIRNRYLSLKKRRGHKKAIIAIARMLLTAIYNILQKNEPYNPELYLRCNNTPPEHRAVSVEEAIFILQRQGYLVTPSAPG

SEQ ID NO: 305216 - protein, 345 aa, unidentified
MKKLIAGMDLHSNNVVIGIMDSDGKRVASRKVDCNLAAVTKVLAPYKKQLEQVAVESTYNWYWLVDGLRAEKYPVVLANPAAMVQYDGIKHADDTNDAFFIAELLRLKILPTGYIYDPQLRPVRDLLRRRMMLVHQRTALMLSFKSLYARTTGQEMTLSRVKEMEVKAAAELYEHPANQLIAGLQIEHMDALAASIAKLEKVVLGAARALPCYTHLTTLPGVGRILGMTITLEVGDIQRFAGPGNFASYCRTVAAERISNHKSKGANNAKCGNKYLAWAFVEAANFARRFDEPCRKWFDRKAARTSQVIATKALACKLAKAAWYLMAEGTAYDSRRMLGQPPSQP

SEQ ID NO: 305217 - protein, 410 aa, unidentified
MPLYCAIDWAGETHEAILKDATGRVLHRGSFAHTAAGIAGWLHTVDRLRQGQPVALIYEATKHGLIDVLLEVAWIELLPVAPVKTKMLRKLHGEARGKSDRRDSDLLCEYLRSHYAELRGRYVEADPLYRRLRERVDQEQDLIGRATESQNRLHALVRRLCPEWDALVGQLEHTVYQQFFLHYSPWDRPRETTLRRFLGTHNVRGEDAVMRLIGLSHTAQPLGSDRRFQELLLDQIRAEVRLLAAVRTELDRVTNEIAALFAALPQVPIYDSLPGIGPKLGPRLAVWFGSAPSRHFPSKQHALAYAGQTPLTEQSGQTRFVHKRIACDRFGRHLCYLWARSCQRLKTTRWQREYLSTRKQHGDEVPTRYRKLGLKLLGIAYRCLCSGQSYDEKIFLQHRHHVSATHTVPA

SEQ ID NO: 305218 - protein, 309 aa, unidentified
MGSIFILARASRTGKHYLVVGGVNAGQEVVVPPRRVNLENWLKWAEANLKPTDAVVLEATTNAWEIYDQVLPLVGRAVVANPVQVKWIASARVKTDRVDVGRLACLLAAGLVPEVWVPPMEVRELRSLLAHRRRLVKMQATIRNRLHSMVHRHNLTLPKGEVFSCEHRSWWLGLEISRTEDLRIRQDLATLDHLEPQIAEIEGELNRLSTCAPWAEQVPYLLQLPGFGLITTMTLLAAIGDITRFESARKLVGYSGLGAGVHASGETHHSGRITKQGRSELRWALVARPGDPGQESRMGCGVPPCALEA

SEQ ID NO: 305219 - protein, 356 aa, unidentified
MSEKLNSKIAVIGIDIGKNSFHIVGQDRRGALVLRQKWSRGQVEARLANLPPCLIGMEACTGAHHLSRKLQALGHDARLMPAKYVRPYCKGDKNDYRDAEAIAEAVQRPTMKFVATKTADQLDLQALHRVRERLVSQRTGIINQIRAFLLERGIAVRQGLRFLRAELPDILAKRTDVLSPRILRIVEDLSGDWRRLDERIEGLSSEIEALARQDQGCARLMSVPGIGPIISSAMVAAIGTGDPFSKGRDFGAWLGLVPKQMSTGDRTILGNISRRGNRYLRTLFVQAAWVVLVKVGPKQWERYGLKSWIEAAKKRLHHNVLAIALANKLARIAWAVLHNGRAFECVKTNATASRSA

SEQ ID NO: 305220 - protein, 351 aa, unidentified
MSHKTAATVAHTIGIDTGKNTLHLIGLDDQGAIVLREKIARGRIAARLANVPRCLIGIEAGMATHYVARELGALGHDVKQVPPAYSKPFRQGHKNDFRDAHAVAEAVQRPSTRCVPVKTDDQLDLQALHRVRSRLVGQRTAVINQIRGFLLEHGIAVRQGLRFLRQQLPDILAQRSDVLSPRMISIMEDLSGDWRRLDERIEHITKEIEVLAGTDVNCGQLMTVPGIGPIIASATVAAIGNGAAFARGRDFAAWLGLVPKQMSTGDRTILGRITKRGNRYLRMLFVQGARAILLRPKSWVKHSFGPWLTTAARRLHRNILTIALANKLARIALSVLIQGRSYETRIVLAAA

SEQ ID NO: 305221 - protein, 337 aa, unidentified
MKYCGIDLHGNNNWVVIIDEQDRVLYSRRHANDLPRLLAMLAAHRSELCGIVVESTFNWYWLVDGLQEAGYRVLLANTAAIKQYDGLKHRGDESDARQLAHLLRLGLLPEGHIMPKAARAVRDLARKRMQLVQQRTAQILSIESSLSRHSGWKLSSNRIKCLRQADLDEMRLDEMPMLGLKANVAVMQALQTQIDGLEKVLADYCRTEPGYRLLRTVTGIGEVLATVILLETGGIERFADAGNYASYCRCVGSAHLSNGKKKGQGNTKNGNRYLAWAFVEAANFAVRSCEAARRFYQRKKAARNNTVAIKAVAHKLARACYHMLKSRQPFCVDRCFA

SEQ ID NO: 305222 - protein, 412 aa, unidentified
MQVVYDCCAGLDVHKDTVSVCISRCEASGQKRQQVRVYGTFTRDLLALVDWLKENGVTYVAMEATGVYWRPVWAVLEGHFPQILVNPQHIKAVPGRKTDAKDCEWIADLLQHGLLKGSFVPPTPIQDLRDLTRYRIELRQSQNRVANRIQKFLEQANIKLSSVASDVLGVSGRRMLEAIIAGQDNPEQLAELARGRLRSKVADLAQALAGRVRDHHRFLLAEYLDEWEALEQRIQRMEAEIDQQIRPFESAVALWRTIPGVDRVTACHLVAEIGVEMNHFPTAQHLASWAALCPGHHESAGKRKSGQTRAGNKWLRRTLCQAAWAVTRKKNCYLAAQFKRLTARRGLKRAALAVAHSILIIGYHLLETGQSYQELGGNYLEQIHKDQLQRYYIKRLQKLGLQVSVEPLLEEA

SEQ ID NO: 305223 - protein, 368 aa, unidentified
MSRLTKVDRFFKNVNLTSDDEVFVGVDVHKQSYHVALFLNDTPAVDFRMIAEPKQLNEKLTPLACSIKDIVYETGPTGYGLARHLRENKLPANVVATSRIPRPAGAEDKTDRFDSRKLAEYSAKGLLWPVSIPTYKQEADRQLFRMRHRQARQFGKVKNQIKSFLLMHSIAEPDGLKTWKLCSIEDLRNMRLIDTLRLSLDELLSDYDYFNNRIKVLNKILADNLDKGVLGQRIALLKTHPGVGPVVACQFVTELYHYREFSSTRQLYKYLGLSPRVSQSGERSNSGSINKASNGRLRGNLIQAAWSWVLTDIEAKKSFWRICDNCGGIKQKAIIAMARKMSGHLWAMLMNDQPYDKNKAKCRHNNER

SEQ ID NO: 305224 - protein, 294 aa, unidentified
MFFFWGRPSCKTLRLLVSTSASILSTFTVSDKSGKALLCTKFTRTKLIEFLAGCTPATVVMEACGGARFMVRRIADLGHEAKLIYPQFVRPFVKSNKNDFVDAEAICEAASRPSMRFVQPRTEVQQAMRALHRVRESLVRDKVKTTNQMHAFLLEFGINMPIGVTVIKRLSTVLAENELPPYLAQLLMRLHAHYLYLVEQITELETALEQELSRDETEQRLQTIPGVGPITANVLSSQLGDGKQYSCSRDFAASTGLVPRQYSMGGKNTLLGISKRGDKNLRRRLLTNLDDSIL

SEQ ID NO: 305225 - protein, 391 aa, unidentified
MTATQNQSSKNGERRLYVSFELGWSQWKLAFCSAAADPARVRAIGARNMEALRQELVKAKERFGLPTDAPVYSCYEAGRDGFWLHRWLSAEGIDNVVVDSASIETPRRGRRAKNDRLDAVKLVSMLVRYQGGEKKVWKVVHVPSGEDEDRRQLHRDLLELKAERTQHSNRIKGLLAAVGLAVEVGPKFLQQLPELRTWDQQAVPAGLQERLQREFARWEFVDKQIKALEKERVGKIRTEETAPVKRVRQLLELRGIGTNSAWLYVMEFFGWRELRNRREVAALAGLTPTPYQSGDSDHEQGISKAGNRRLRSMAIEIAWCWLQYQPGSALSHWYQQRYGPGKSRLRRIGIVALARKLLVALWRYLETGEAPQGAKLVDWHTKVGGAAAVSA

SEQ ID NO: 305226 - protein, 356 aa, unidentified
MAIAIGIDVHKKTSTFFAYGEDGEPLEEFNKRFKRVASNHDGYTEVLVWLGNTDCDFLMENSTKTHDVYWILQGLGYKNLYVAHSVDLKRITKSSKKTDQFDAEKLATYMRVKQQNIDQFRTCYICTPEDMRIRRLCRIAKQELFDMGRIRRRIRSHLLLTGREWMGGLNTKWECEALMNEDDPGLRHLGRQLNECRLRRDAAEEAVVEAIKGNEKMFPIYEKLKEIPNFGDITAAYLAAVIVDIDRFENPKKLAAYLGIVPRMRDSGETENHCGLTRSGDPAARWLLIQATFRLVNSSAPDSQLKAFFAEKNGGNIEERKEADTSGLLKRPALVATANKLIHIIFALLTHPDRHW

SEQ ID NO: 305227 - protein, 407 aa, unidentified
MLWGGGVDIAFVVADVNRWSSPMQTLNDLSRSLIALEPASTLIAVIEMSLSSWLVAGIVPGIERQPLKKLAVDESALLKQLHRWREEAEKAGCRIERIVVAFEAGRDGFWLARWLKARSIEAHVIHAASVAVSREHRRAKTDRLDTELLKRAFLGWLRSERDHCKMVAIPTLKDEDAKRPNRERESLVGEQSRIVNRMKAALIRLGIRGFNPKLKRAAGRLDSLRTPEGEPIPPNTLAELRRDMERRRFVRDQIREIEEARLQRLEQTPNEGPHAMVRLLARVIGVGIETADMLVHEVLSRNMRDRRAIARYAGLTGSPDESGRKRREKGLARCGSSRVRRGMVQLAWRFLTYQKDSALAQWYRARTENALGTRKSMIVALARKLLIALWRFARQGVVPDGVVLRPA

SEQ ID NO: 305228 - protein, 440 aa, unidentified
MVRIYFYARSAIPREKGKEMPYRVAAIDIHKRVHMVVVASMAEEVEDTAAAAVEFECRKFGAGASEREHLVAWLRERQVQEVVMESTAQYWKSVWLELEPHFGKLHLAQAQSNRAPRGRKTDFRDAKRLGRRLLASELMLSYVPEPEQRRWRLMTRGRLQLVRDRVRLQNQMEGLLEEARIKLSSVISDLLGVSGRRILEALAEGTRSPAQLAELGDRSLKCTKQELTDALTGAPDPCHIELLKLDLQRLQLLDEQIEKLSRMAAEALRVHQTVVLLVAKMPGWGAESAQQIIAEVGVDAEAFQSPGAFASWAGVCPGSNVSAEENHSSRCPKGNRYVRRLLTEAAQAAVKKKGSRFQNLFRRFLPKLGWNGAIALVRHRMARVLWNVLHDGVEYVECGQDTTPKARKRRAQKLTQALRKLGYQVTLTDVQIQTEPAATA

SEQ ID NO: 305229 - protein, 339 aa, unidentified
MYYGAIDLHKNNSVLGIINADGQRLCMRKIPNDLDLIKKALDPFAENLEGIVVESTYNWYWLVDGLQDAGYRVHLANPTAIQQYSGIKHTDDMTDAWWLAELLRTRLLKEGFIYPRAERAVRDLLRKRAHLVKQRTQNILSIQNLICRNTGGRLSANQTKQLTEETVQKFYDKEEERALAINCSLRVIQTLKREITIIEKQAKSKLKLSQPYQVLQSVPGIGELLAMVIMLEAGDISRFPGVGNFSSYCRCVNSVRLSNGKKKGSGNRKNGNKYLSWAFMEAAHYAIRYYPVIRKFYQRKSAKKGMMVAQMAVAHKLARASYYVLRDQVPFEETKCFVH

SEQ ID NO: 305230 - protein, 370 aa, unidentified
MGEYSEAFVAFDTAKVKHSVAIAEGGRRGEVRFLGEVASSPATVARLIGKLAGRYKKLHVCYEAGPTGYGLYRQMQELGHDCVVVAPSLIPKKPGERVKTNRRDAVTLARLLRAGELTSVWVPDTTHEAVRDLVRARQAAAEDLRRKRQQLLSFLLRHGHIFDGRAHWTLAHRRWLADQKFEHPAQQIVFQDALEAIGDAAARLRRLEAQLVAIVPSWSMAPVVAAYQAMRGASFLVAVTFAAEIGDVRRFDNPRQLMGFLGLVPRERSTGATVRRAGLTLAGNRRARRVLVEAAWTYRYPARVGETLRGRLEGLPKAVRDIAWKAQIRLCARYRRLSSAGKKLPVVVAAIAREMAAFLWAIGRQVQPAA

SEQ ID NO: 305231 - protein, 341 aa, unidentified
MNITTVGLDLAKNVSHVVCCNQVGKIVKKKILRRKEILNYFAQLDDCLVGVESCASAHYWARELEKLGHRVKQIAPQHVKAYVRGNKTDFNDALAIAEAVVRPEMRFVRTKTQTQQDIQSLHVLRKKCERDRTANSNEIRGLLYEYGIVIPLGVHNVYKALPELYDREANNGLSELFKELLEQHYKKLSELKAHLDVYTQKIHDLSKDDACVRLQSIPGIGPLIASAFYQHVGNGSEFNNGRAVSASIGLVPRQHSSGGKQNLLGISKRGDGYLRTLLIHGARAVMRVSANKDTPLAKWIKRIEQTRGRNKAAVALANKLARVGWAILKHGGRYNDDLVTA

SEQ ID NO: 305232 - protein, 354 aa, unidentified
MNIGVDTHKKTHVLVAVGAQGQTLGTRTVANSPAGWAAAVQWAREQQQQQVRWGVENTGSLGKGFAQFLLAQGEADVREVVPHRTAQYRRRGRTQDKTDTADALAMARLLGAEGDGLPLVYADDASTELRLLSDHRDNLVADRTRLVNQLHAQMLQLDPQYQERSGPLTRAAGVRYCEQFDPPHADALACTRLLIVRQLATRIAALTAEIAELTALMGRRVLALGTPLVQLRGVGPVTAARLLGELGCILRVHSAAALAALAGIAPVAVASGSRHGHRVNFGGNRQLNRAIHVIALTQRRCEPLAQAYYAKKRAEGKTARAAMRCLKRRLVDVLYRLWYARPVESPQPVAAIAA

SEQ ID NO: 305233 - protein, 437 aa, unidentified
MNTQPTTPNALPQDYDLFVGLDWADDQHVLSVGAAGATTIQRSTLEQTPPALAQWANALRTRCPNGWIAVCLEQSRGALIAGLMAYEHLVLYPVNPKSLARFRQALHPSGSKDDPNDADLLLELVLKHCDRLRPWRPDTVQTRQLALLCEQRRGFVDQRTALTNQLQAHLKAIFPQALQLVGQNLASPMATDFLKKWPTLAAVQAASPTVLRQFYYGHNSRSEELIRQRLGLVKSAVALTCDPALLAAHSLGIQTLVAQLQALRPFIEQHDQQIAQLFAAHPDHAIFESLPGAGAVLAPRLLTALGTDRSRFPKAVAHSCYTCIATVTEQSGKTQRWVHVRWSCPKFLRQSWHEFANSSRKFCPWARACYEHLRKKMEHHQAIRKLAYIWQRIVWRMWQNHDTYDEVRYLSSLQTRGLEHYASLSAKASPQPLQPAT

SEQ ID NO: 305234 - protein, 319 aa, unidentified
MVVGIDVAKAELVVAAGSAGPAEPGEPLDEAGVRALAERLAGLAPELIVLEATGGYELLAVAALAAAALPVVVVNPRQVRDFARATGQLAKTDRIDARVLALFGERLRPAVRELPDAAARDLAALLARRRQLLEMRQAERSRLLQVEGRAQRAVRQSLTRHIAYLERELAATDADLGALIRASPAWLEREDLLRSVPGVGPVVARTLLAELPELGRLDRRAVAKLVGVAPLNQDSGAWRGRRAVRGGRAPVRAAMYMAALVAARHNPVVRAFYARLLAAGKPKKVALVACMRKLLTILNHLLRSGQRWEAPGALQPAEP

SEQ ID NO: 305235 - protein, 387 aa, unidentified
MTTDHLATALQTVVRVNDTKLFASLELSKSRWLVTVSAPGSEKLSKHVVIGGDGGALLNLLSRLRATAERRAGMAVQVVVIQEAGLDGFWVHRLLEANGIESHVVDPASIAVDRRHRRAKTDVIDGEMLLRTLMAWARGERRVCSMVRPPSPEEEDRRRLTRERGTLLKERTQHTNRIKGLLSGQGITDYDPLRKERLARLDALKTGDGRPLPERLKAEIRREIERVDLVASQMAMVERERDALVGMTSDPAPETAAAVLMRLKGIGPELGSLIWLEALYRGFSNRRQIAAYAGLAPSPWQSGETDREQGISKSGNRRLRHALVELAWFWLRHQPASALSVWFRARVGQGRGRIRRIAIVALARKLLVALWRYATQGVVPAGATFKA

SEQ ID NO: 305236 - protein, 418 aa, unidentified
MSPLPEQPFTAYVGIDWADTKHDICVQAAGESRRESGCIAHQVAAIDEWANALHRRFGGRLAVALELAKGPIVAALQKYDFLVLFPINPATLAKYREAFQPSGAKNDPGDAELALDLLLHHPERFGPLRPQSVPMRTLVSLVERRRQLVGDQNRLTNRLCDMLKQYYPQALEWFDDRGTVLFCDFLERWPTLRSVRQARTAVLETFFHAHHCRSASRISARIESIRSAAALTDDPAIIGPCRLHVLALVAQLRAVLAAIVQFDLEIAAVVHTLPDYALFEDLPGAGACLAPRLLAAFGEQRERFRSADELQKYAGIAPVTERSGKKSWVHWRLQCPKFLRQTFVEWAAQTITRSFWAGAYYRQQRAKGSSHHIAVRALAFKWIRILYRCWQTRTPYNETVYLNVLRKRGSLLAGKLGT

SEQ ID NO: 305237 - protein, 393 aa, unidentified
MSSALPESGATSSSSTIYLGMDVHKDSITIAVLPENASAPTRVDRLSADYSKLRRYLDRTAREGNLRCCYEASGAGYVLQRAMLEWGYQCEVIAPSLIPQRPGVQRKHDKRDSADLARLYRAGELTTVRIPSQAEERVRDIVRLRETFQRELMKSRHYVLKFLTRRGFVFREGRHWTGRHLTWLRKLAGGSSALTTEDQFVLGEHLALLEYKLQRRDELDRKIESLALLPFLAPPVNHLQCFRGLAVHGAMVLATEIVDWRRFETPGQLSAYLGLVPRERSSGSRESRGSITKAGNSHCRHILIQAAWTYRHKPRLSRELSSRQKGMPATAIAQSWKAQHRLYKRFHHLAFRKSSQIAAVAVARELVGFLWSVMKDLPAASVNATSSDELKAA

SEQ ID NO: 305238 - protein, 392 aa, unidentified
MRTMTQVDDLSRSLAAFDQNSTLTIAVEMSAASWLVAGMIPGIDRLPVKKLEPDPDGLLRLVERWRAEAVKAGRTIARIVLAFEAGRDGFWLARWLRTRGVEAHVIHSTSVAVSREHRRAKTDRLDTGMLIRVFLGWLRGERGHCGMVAIPTLADEDAKRPSRERENLVAERTRISNRLKSALARLGIRGFKPTLRKAPQRLAGLRTLEGVPIPPNTVAEMQRDMARLAVVREQIDEIERARLQALQQAAKSGPHAMVRLLARIVGVGIETADMLVHEVLTRNLRDRRAVARYAGLTGTPDESGSKRREKGLAKSGNSRVRRGLIQLAWRFLRFQKNSALARWYRARTEGPKGARKTTMIVALARKLLIALWRMARTGVVPVGVELRQLASA

SEQ ID NO: 305239 - protein, 369 aa, unidentified
MPHVTSIGLDVHARSVAAAAFNPFTGEVVHRDFGTDAAEIAEWALGFEEPRACYESGPTGFHMARELRALGLDCAVAAVSKMQRPAADARRKNDRRDAEFIARMLATHNIVEVPLPDAAVEAARDLDRALDDATAEYRRARQRLNMFLIRLGHVWDERNADGTRKGSWTRAHWRWISGIRLEGPQRDVLEYYVTAARCAESDRRQLEKKVLALARTDRWRPAVEALSCIKGIDTLTAFRLAAEAGSFTRFRTAPAFASWCGLVPSERSSGETERRGGITKTGNRLARTALVESAWHYLTCTPRPKAPAPGADVPAAIRARADDCTARLCRRREALAAAGKSPCKANAAVARELACWVWEIGRRAEGTLG

SEQ ID NO: 305240 - protein, 330 aa, unidentified
MIVNEVAKNVEKIISIDTAKNSFQVLVVNQKTGKKKNTKVQRSKFVEYILKQGPCLIFMESCSASQHWARLFEGHGFTVKLIAAQHVKAFLRNRRVKNDERDAEAIYTCGIQPDTKFVRIKTVEEQTVALLHTLRKAAVSQRVELSNRIRGILAEFGIVVARGKGSFNSEIEALFNECEKIHDVYLRSAISSLFEDYHRLEQREKELSEKIESLNKDNELVKIALTCPGVGSLTASAIVAEVGDASQFRNGREMAAWNGVVPSQHSTGGRSTLGGITKTGNRYLRALLAQCACTIIQNASRHIEQGKATHLDRFALRLKLNGKPAKKIMC

SEQ ID NO: 305241 - protein, 489 aa, unidentified
MKGQPPKKAPKDKQESKKTSGKPTPGKWEEMNRKQRREMMRQMQSEDLNLEVVHPHAAGIDIGNASHYVAVPPSRDPQPVRCFGCTTAELKTMAEWLKQCGIRTVAMQSTGVYWIAVYEILEEAGLEVYLVNARETKNLPGRKTDVQESQWLMKLHTYGLLRNSFRPSQEIRTLRTYWRQRHDLVRSTGRHIQRMQKALTQMNIQLANVISDISGVTGQAIVKAILDGERDPRELAAYRDCRVEASEEEIAQALEGNWQQDQLFVLQQEQAGYEFCQKQITECDQQLAQYLAQLKDRTQGATLPEETRKGRRKKKKGNPQFNLREELFRMTGTDLTQIDGIDVMAAMTVISEVGWDMSKWKTENHFVSWLKLSPDNKISGGKVIGKGRLPTNNRATTVLRMAATTLRESDSYLGAQFRRFRTRLGPPVATKAMAAKLARLIYRMLRYGMKYVNQGAEFYETQHRKQQVIHLKRKAAQLGLQIIEVAAAA

SEQ ID NO: 305242 - protein, 336 aa, unidentified
MVTIGVDAHKRTHTLVAVDEVGRKLAELTVEATTREHLRVLEWAGQLPGGRRWAIEDCRLVSRRLERDLLGAGERIARVPTKLMAGTRKSSRTYGKSDPIDALAVARAAQREPDLPEARLDGDERELRLLVDHRENLVAERTRLITRLRWYLHDLDPALEPRRSSLTSTAALRRLDAQLMPLSGTLVRIARELVTRCLELTGSIRSLERELTDRTRMLAPALLAIPGCGAITAAKLVAETAYIRRFRSASAYARHNGTAPLPASSGSARHRLSRTGNRQLNAALHRIAITQTRIHPAAQAMLSRLHNAGKTRAEARRILKRRLSDVVYRALLADCP

SEQ ID NO: 305243 - protein, 410 aa, unidentified
MEVMFDRVAGLDVGKNSVTVCVRTPGPRGGRRSETRTFKTMFGSLRMMREWLVEAGVTIAAMESTSTYWKPPFYCLEEVMEVWLLNAAHMKAVPGRKSDVRDAEWIAQLLEHGLLAPSFVPPPEIRRLRMLTRHRVQLMGDRTRETTRLELMLEDASIKLSSVASSLNTVSARAMLTAMIDGETNPLVLAAMAKGRMRSKIPDLAQALTGTFDAHHAQLAKSILRRLGLVEQALAELDGVIAEACQPWQHQIELLQTIPGVGPKVAEVIVAETGADMSRFPTAAHLAAWAGLAPAMNQSAGRQTPAGKRHGNKWLNAMLVEAAGSVGRMHSKNYLAAKHARLTRRRGMGRAQVAVAHSILVAAYHMLLRDEPYNDLGPDWHERRNNEAHTRRLIKQLEHLGHTVVLDPAA

SEQ ID NO: 305244 - protein, 353 aa, unidentified
MAVAEGERGGEVRFHGTIPNEDDAVRGMVKRLAGPGITLDFCYEAGPCGYGLQRLLTRQGQPCIVISPSMMPRRPGDQIKTDRRDAMTLARLLRAGELAPIWVPDEAHEAIRDLIRARRSAQEDTSAAKQSVRSFLLRHDRRFSGKSAWTKTYWRWLSEQRFDFAHQQLAFEEAKRRVLEAQARTARLEAALVEAVDGWRFAPLVRSLQALRGVRLIVAATLVAEVGDLTRFQNPKQLMAYLGLVPSEYSSGARVQRGRITRAGNAHARTILVEAGWTYRLPAREERRYRDRVADLPEDIQAIGWKAQVRLCQRFRRLSATGKPQPKVNTAIARELVGFAWDIARRVQPVVAV

SEQ ID NO: 305245 - protein, 343 aa, unidentified
MDHFAGFDVSVKETSVCIVDDTGRIVREVKVASEPEALLTVLRNPIYGFKRIGLEAGPLSQWLFSALAEAGLPVICVETRHMRAVLQAQINKTDRNDARGIAQMMRAGLYRPVHVKTLRSQKLRMLLTHRKLLQSKAIAIDNDLRGTLRNFGLKVGVVGTVKFEARIKELVENLPDLAVLVEPLLMVRRVLREQFAILHRRLLAIVRDDEVCRRLMTVPGVGPVVALTYRATVDVPARFRNSKAVGAVFGLTPSKYQSGEINRTGAISKCGDEMMRVMLYEAAHIMLVRLAKWSWLKAWAMKIARHRGLKKAIVALARRLAVIMHRIWVDGTEFRWTREVTAA

SEQ ID NO: 305246 - protein, 463 aa, unidentified
MSKKGQNNSQPKTDRSKGDWKALEIVHPHAAGIDIGGSEHWVAINPERDEQPVRCFDCFTADLEQMADWLVDRGVRSVAMQSTGVYWIPVFEILQQHGLEVYLVNARHTKNLPGRKSDIAECQWLLKLHTFGLLSNSFQPSDEVRTARTLWRHRGELVAQASSAIQRMQKALIEMNIQLSNVLSDLSGVSGMAIVQAILDGQRDPQELAALANPQVKAPKEVIAKSLEGNWRPELLFVLRQQVEMYRMCHDKIAACDCQLQLHLQSMAPRVELEAQPLGPRPKGKRARGNAPKFDLRTELYRITGVDWTQVDGIDVQVAQSVIAEVGVDLKAFPSEKHFANWLGLCPTNETSGGKVLNRRTPKVVNRAKVAFRQAASTLIRSQSYLGAQYRRFRTRLGAPKAITAMARKLACLFYRLLQRGQQYVDKGTEYYEQRYRDQQVRFVIQRAKQLGLQIVTPATSTD

SEQ ID NO: 305247 - protein, 340 aa, unidentified
MKKVEFVVGLDVGSERISAAVLEGPDGSGLIEQDVENTPDGFKELEHWLGEHRVKAENAVFCLEATGVYGEALCYYLCSRGFRVAVEPPLKVKRAFQQSAHKNDTVDARQIAEYGHRFFDELQWWTPPEVTLEQIRVLLTAREQFTQQRIANVNALKALQRKVITTPIALKAYEQAIARLSENIKEIDQEIKRLVKKDDSFHRLITTVTSTPGIGMLLATNLAVLTNGFARHKAKELASYAGICPLEHTSGTSVYRRPHSRRFGPSRIRKLLYLAAMSVSTHNPEFRRYYLRKVAEGKPKRLVLNNVANKLLKVVCALVRSESAYIPNYKSVQPMFLKTA

SEQ ID NO: 305248 - protein, 402 aa, unidentified
MSMYFIGIDISKYKHDCCIISATDQKVISKFSIKNDKVGFEELITTFNSLSSPEDIRIGFESTAHYALNLELFLENAHHSFMEVNPVLIKEYKKSTTLRRTKTDSVDCESIARWLMTVEYNPHSKGFYHAYSLKSLTRLRDKLIRQRSFYLVKITNVLDHTFPEFKPFFNERLSKTALYLLENYGSAEKMARMNSASYEKLRSVSRGKFSPQQFLRLKELASNTVGVNNSIFDVELNSLLSLYKSLIKEIDTIEKEINKLIEEVHPHYMSVPGIGPLSAAVIYSEYGDISNFTNPGQMLAFARIEPGINESGTESHGGKMVKRGSSQLRYTLINCCLPLIRFDMTFATYYAKKRGEGKPHRVAITHVAKKLIRVIYALERQDIDFNAQKLRQSGGLILISPI

SEQ ID NO: 305249 - protein, 394 aa, unidentified
MIYAGVDIAKTDHVIGAVDERGTETCRPMPFKNTEAGLERAVAWLEGLAGSPSDVVVGMEATGHYWMACYSFLVARGYSVAVINPMQVKAVRKLKKLDKVKNDRVDAWLIAETLRIGQYDETRLATDEMASLRSLSRYLQSLRGMVAELKTQCICLMDAHFPEYAGIFSDMFGAGSRAVLSKSPLPFELARRRADSLARDIAEASRRGGKSSGYAAKIKAAAKSSIGVRLGQEAASFQVKSLIRQIEFADSECAGVEARLRSLLDEVEPLVLTIPGVSYATGAQIVSEIGDVSRFRNASALVSYAGLNSSVSQSGQFDSGGGPITKHGSPYLRRALWLAANRARQYDPGLRAFYDKKRAEGKPHRVAVTAVARKLCHIVFAVMRDQVPYDPGRE

SEQ ID NO: 305250 - protein, 317 aa, unidentified
MTAVGIDVAKHTLAVDLMLPDGRHRQKHCANASAGHAELVRWLGRYAVAPVAIGLEATGGYQEAVAIVLHDAGFAVSVLNPTAVAAYAASQLRRAKTDPTDAALIADYMRTQTPPVWTPAPVEARQLQALVRRLDALLEMRTQESNRLELAAAIVRPSITATVAHLDTQIATVKQQIARHIDQHPTLRAQRDLVQSIPGIGETTAAIVLGELLDIARFTSARQLAAFTGLVPRVRQSGTSVRGRGALSKLGSSRLRKALYFPALTAVRYNPVLTRFAARLRAAGKPKMVVVAAVMRKLVHQIYGVLRSGRAFDPAYA

SEQ ID NO: 305251 - protein, 422 aa, unidentified
MEGTESNYQWYVGIDWGAERYEVCVLDRQAHVVARRSIAHSGTGIAEFVDWLLKLCEGKPERVAISIETPRGAMVESLVERTFAVFAINPKQVDRFRDRYTVAGAKDDSRDAFVLGDSLRTDEHCFHRVGLDEAAILRMRELSRLEENLQQESNRLSNQLWEQLHRYYPQMLALSKAADEPWLWELIEWAPRPVEAGKLELARVQQLLGSHRIRRIRAEQVLEALKKEPLRLAPGAEEAASEHALLLLPRLRLAHEQRTQVAKRIQRMLREMSAAEPTEKADKREHSDVKILLSLPGVGRVVPATVLAEASGPLRERDYHRLRNYGGIAPVTRQSGKKKVVSMRYGCNMRLRNALYHWARTSVQKDAAAKKHYAALRQAGHSHGRATRGVADRWLAVLMAMLKAGTLYDPERRGKGQATKVS

SEQ ID NO: 305252 - protein, 375 aa, unidentified
MNNNNTLYVGLDVHKESITVAYAINSEPVELMGKIGTSPTDIQNLCKRLRSKSSQVSIVYEAGPCGYGLYRRLVKSGFDCMVCAPSLIPKKPGERVKTDRRDAIRLVRSLRAGDLSAVYVPGIEDEAFRDLARAWASARDDLRHARQRLKSFLLVHGGHYVGRADWGPAHRRWLSKYSFESPRRQLAFDEHRRTIEDRLAQCERLESALKEAVTEWRLYPVVEALQAMRGIQFIIAVGLISELGDLTRFEHPRQLMSWFGITPSEYSSGGSRHQGSITKAGNSYARKLLVEAAWSYRHPARISPAIQKRQENLPRPVIDRAWDAQLRLCKRYRKLQAKGKNVNITIVAVARELAGFIWDMGRIAMSVAQQPQCHK

SEQ ID NO: 305253 - protein, 381 aa, unidentified
MNDHIAAFVAFDTSKLRNAVAIAEEGRTGEVRFFGEIDNTADATAKLVKKLAAKYEQLAFCYEAGPTGYGLYRQIMDLGHDCMVVAPSLVPKKPGDRVKTNRRDALDLARQLRSGDLTAVWVPDGRHEAMRELTRARGAAVQDARQKGQQVSAFLLRLGRHYDADKKTWTKAHLGWLASQKFEHAEQRIAFEELLLAVHQARERITRLEEAIRTAVPEWSLAEVVPALMAMRGIDMVTATAFLAEIGDLSRFRTPRQLMAYLGLVPSEHSTGPTVVRGPITKAGNRRARRLLIESAWAYRHPPKVGKDKQAKVAAAPRAVREIAWKAQHRLYARYRALTRKGKLKTVAITAMARELAAFIWAVSREVANTGRAEAQQGIRG

SEQ ID NO: 305254 - protein, 343 aa, unidentified
MLTNNVIAIDLAKNVLQACHISVHGELLSNKPLSRQKMKEFLAKAKPSIVAMEGCCGCHYWGQLAEKHGHQVRIINPKKVKGYLEGHKTDHNDALAIANAAIQIGIKYSRPKSLEQQSMHSLESSRRFLSRSVVSLGQHIRGTMLGYGVANPRGEKGLKASVQTALDGETSIPANVVSILSMLWNQYKELKAQLIAFEKEKSALTRQIEPCQRLMEIEGVGETTAAMLYTTLGDGKQFKNGRQASAFVGLTPKQHSSGGKVFMIGIDKCGGVKELRSLLYLGAMSYVGRLPEKPKTQKDAWLRSIIDRIGFKKACIALANKVVRTAWAMLRYETEYKPVLLAN

SEQ ID NO: 305255 - protein, 458 aa, unidentified
MRKQNRRSPKVAVTPTLRRHNPAAAGLDIGAEEIWACVPAERDPQPVRAFGTFTPDLLALADWLVQCEVTSVAMESTGVYWIPIYEVLEARGLEVYLVNARHLKHVPGRKSDVQDCQWIQQLHSYGLLTASFRPAEDMRVLRAYLRQRAMLVEHRAGHIQHMQKALQQMNLQLTQVLSDITGTTGLQILRAIVAGERDPQVLARLRHGRCQRSEAEIAKALSGHYRPEHVFALKQALALYDFYTAQVQECDTYLEQHYAAIKPTYDERTPPPPLGPDPKPNSHAKNAPAFDVRACLYRILGIDLTATDGLEASSAQVLLSEVGTDMSKWPTEKHFASWLGLAPHNDISGGKVLRSKPLKGNRRAAQALRLAAQTLGRTQTALGSYYRRLRARKGPTPAITATAHKLARMLYHVLKHRTPYQPQSQETYDQHLRQRAIRHLKRSATRLGFTLVPQPVAA

SEQ ID NO: 305256 - protein, 394 aa, unidentified
MILVGIDIGKNSHYFCVINREDGEVLVDPTSFKNDQKGFGLFIQALQPFDKTSILIGIEDTGHYHFALLRYLLSKEFNVALINPVATDMTRKMQGGISKNDKLDTLTICDVLSSSNRKKSYRITKIDTFDYYEQRQLTRHHHNLKEELNVYTNRLQKCIDLVFPEFNSLFKSKYGTVYMKLLKTFGSADKIAHADIRSIRKCFEIQGRGKRISLTAEQLKAAAKESVGIASLADEIQIRHLIGQIELIHAQLDEIDKKIEEFSCMTNSPILSIPGISHFSGTSILVEIGDIGNYPKASKLTKFAGVAPYEHESSQYRAEHTAITKKGSKYLRKTLYQIIVPVIQHNEVFKRYYQLKRRQGKSHRCAQGHCVRKLLRVIYHLLTTNQQFDPALLR

SEQ ID NO: 305257 - protein, 357 aa, unidentified
MGKSIKNLSSVTIVGLDIAKNVFQVHGVDAGGALVVAKAVRRGQLLSFFASLPPCVVGIEACSSAHHWARSLIALGHQVKLIPPAYVKPYVRRNKNDAVDAAAICEAVGRPNMRFVPVRSVENQAQLMRHRARELLSGHRTRMLNALRGHLGEIGVVASQGVQNAYALKRLLADGCDDNGEVIVPDCVRQALAPLVHQIDAIDAEIAAIDEEIKTLVKADEIARRLMTIPGVGPLTAQAIVATVRETSAFASGREFAAFLGLTPRQSSTGGKERLGRITKMGDRYLRKLLVVGACATLCHRKGHNDALRMWADRLLARKAVKYKFKLTAVALANKVARIVFALMTRGGEYNELPIAA

SEQ ID NO: 305258 - protein, 394 aa, unidentified
MVQSERMVIGMDPHKRSATIEVMAGDETVLGGGRFTTDPDGFTTLREYVRAWPDRVWAIEGCNGIGRHVALRLLADGQDVVDVPPKMSARARVFATGQGRKTDATDAHSIALVGTRMAGLRPVVDDEQLAVLRTLVDRRRALGQEHTRMVSQLHHLLLELVPGGAKKFLSAAQAKEILSKVRPRDAAGKVRRRVAAELVGDLERTYKRKKAADKELTELVRATGTSLLDLTGIGPSGAARLLVEVGDITRFPNRAHFASWTGTAPIDASSGDHVRHRLSRGGNRQINRVLHIMATVQLRSPGIGRDYYDRKKAAGKTSMEAMRALKRRLSDVAYRAMLDDAVAHTTDARTGPGGHGGTSLTSSAAGSHPHTGTSDQSLPGPVTHDPRTALPAAS

SEQ ID NO: 305259 - protein, 342 aa, unidentified
MSISYVGVDLGSSNFHQVAISEGGVVTLNRELATSEANLVKACSGMRGEIHVHLEAGELAPWASEIIRLLVTRVVCSHPQKNAWIARDRDKSDRVDAYKLASLLRLNEFKEVCYPQSPLRRDFKAVVQHYDELTQQQARLKTKIKARLRMQGVITRGQQVFSVRGRKAVLPAVKSVVVRTAIQQLYGMLDQSLEAQAEARLLMLRAAQALPEISIMRTAPGMGPIGACRFSAYVHAPQRFSSTRKLWKYCRLSVSHRSSNGKPLRRPRIDRSGCGRLKDVSRKAFEAAMRRKDNNGFQRAYYRALAQTHDATHARLTVQRKIVSTLRAMWINQTPYGDQLMP

SEQ ID NO: 305260 - protein, 354 aa, unidentified
MYYANRVDFTGQPIYIGMDVHKKSWTVSIFMEHLEHKTFTQPPDVETLVSYLRRHFPGANCTAVYEAGFCGFRIHDQLQAHGIACRVANPADIPTRDKERRRKGDRSDSRKLARGLRSGEIEGIYVPARAAVEDRSLIRTRQAMVRKQTRCKNQIKSLLHFYGIPAPEDSRGWSRNFIRSLEALRLERPSGTLALNAHLEELLQLRQIVARLNRDILALSCTDEYRGRVELLRSVPGIGTLSAMVFLSELGDLSRFASLDKLCGYVGLTPDTHASGEKAGIGDITRRCNPVLRSLLIECAWTAARKDPALALAYHSFCQRTRKTKAIVKIARKLLNRIRFVLNNRCRYVSSLAA

SEQ ID NO: 305261 - protein, 344 aa, unidentified
MEVSTVGLDLAKNVFQVHAINSAGEVVVRKTLRRAQMHRFFEQLKPCLVGIEACGTSHYWAREISKCGHEVRLMPPAYVKPYVKRGKTDASDAEAICEAVTRPTMRFVAIKSPEQQAALALHRTRDLFVKQRTQLVNMIRSLLAEFGIEIRRGIEQALMVAKRIAGDDLPDIPPLAAKVIAGLAGQVLDLQARLREIERELQVWHRSNDVAKRIATIPGIGTVCATALAASVTDASQFRSGRQFAAWLGLTPLQHSSGGKERLGRISKMGDKYLRRLLVVGMTSLVRRAKYKPESVDPWLADLLSRKPARLVTVALANKAARVVWAIMVRGGVYRRSTEAATSA

SEQ ID NO: 305262 - protein, 497 aa, unidentified
MEKSSTAFVGMDVHKESIDVAIADAKEARHFGRIGGDAHSVDKLVRKLRSAHRVPVFVYEAGPCGFWLYRRLSAQGLQCMVVSPSMTPRNAADRVKTDRRDAMKLARLARAGELSPIYVPDALDEAMRDLVRAREDAISMQRQARQRLQALLLRNEIRYVGRSSWTRAHRRWISQVKLPNPAQQIAFEEYVQACEECERRVERFETAIATQLERWRWRPAVQEVQALRGISALHAVRIVAELGDFRRFETPRKLMGYLGMIPSEDSSGPRRRQGAITKAGNSSARRALIEAAQAYAHPARVVGDCAPSGARLKACVRHRLEGPASSVYPLWPPYGAPASEKQGDRCRGTRARRFRLGDRARDRAGLITYAQQKGGIAPSTSYRPDRQRGARHGWRILANVIDPAAMPAPQHLERGSSVTHNSLAAIQRPNISLIDRRHFDDAALPIGIPIRRTTSVYVKREAVARPLTALSHINVRVLPRRRKRAALSERRRSATRC

SEQ ID NO: 305263 - protein, 338 aa, unidentified
MPLYGGIDLHANNSVVVLLNEQDQVIYQRRLTNHLPEILEPLAPYQADITGVVVESTYNWYWLVDGLMEAGYRVHLANPAAMQPYSGLKYTNDHSDARWLAHLLRLGVLPEGYIYPKAERAVRDLLRKRAHLVRQHTANVLSVQNLMVRNTGARFGAKRIDEFTPAELAGILPEAEQVLAVTSSLAVMHCLGQQIKTLEKTVQKHLKHTPAYVQLQTVDGIGTILAQTIVLETGDIGRFPSVGHYASYCRCVGSTKISNGKRKGQGNVKNGNPYLEWAYMEAAQFAIRFSPTVQRFYQRKQVKSHLMIARKAVAHKLARACYYIMRDLVPFEVHKAFG

SEQ ID NO: 305264 - protein, 430 aa, unidentified
MEYVDGIRLREFQQVRKEIRGSGQHLIVGIDVAKERHNAYFGTATGRTLHKGLVFDNTIEGFRKLLTLAEALKVQYDLTKVIFGVEPTANYHKPLGEHLIKCGQMVVLVSAAAVKNNRQLLDGRWDKHDTKDSANVADLISQGKCLYYEYPDPRVRDIRNLLSLKRRLKKEEHGLRVRIRNQLLAQYFPEMDRYFGPSVSLSVIGRCLDPSMIAGMQYDEFCRSVAPGKLNLSQQKRLQAIWQTAPESIGCRVGDAVPFEAQVMVSKLHQVRETIKAVQDKIEDLCIEFPEYTCLLSIPGFGPDISSKVLGAIGYSFRFTSSKQVLKMAGFDLCANRSGKTSNSATPVISKQGKADLRYALYQAALIASLSNKDFMTYYTNKLRGRQREKGIGTKMRVKLAAKLLVIAWTLMKKKEPFDQKYLHKEDTKV

SEQ ID NO: 305265 - protein, 339 aa, unidentified
MRLYAAFDLHSRSSQLAILDEDGKRIFKSKLPNNPEPLLGALEPFHDGVVGVVVESTFNWYWLVDTLMEAGYRVHLANPAAIQKYNGLKYADDKTDAFWLAEMLRLGILPEGYIYPSADRPVRDLLRKRAHLVRLRTSLINSLDNIIARNGGVTLGADKIKQLTRDHVAPLLAGDDDLALSGRVSKETIDFLTRQIKKVEKVVLSRIKLRPEYQYLLTIPGVGDILALTIMLETGSIDRFAGVGNYASYCRKVPTRWFSNDKAKGKGNKKNGNRYLAWAFSETAAFARRFNSRIKAYYDRKAAKAGFPIAHSALAHKLCRAAYYLMRDQVPFDTDRLFA

SEQ ID NO: 305266 - protein, 365 aa, unidentified
MKKTSTAATRSDKNLHGKLTIGLDLGDRSSWFCVLDEAGEVVSEKKLGTTPKAMKEVFAAMPRSRIALETGMHSPWVSRLLSELGHEVIVAHARNVRLIGESRRKDDRLDARTLARLARIDPQLLSPVQHRSAQAQADLTVIRARASLVRARTALVNTARGLTKSYGERLRGCNPRNMDTEKAQTLSPELQAALSPLLQALESLSERIAEYNQQIEAIAQQSYPQTALLKQIKGVGTLIALTYMLTLEDPHRFRKSRDAGCYLGLQPGRRNSGQSEPQMHISKEGDPYLRTLLVQGAHHILGPFGADSDLRRWGLKLAERGGKNGKKRAIIATARKLAVLLHRLWVSGEVYEPLRNTKRTRLAVA

SEQ ID NO: 305267 - protein, 372 aa, unidentified
MTQSNILFIGMDVHKESIVLSLADDDRSEVRRYGSIGGTLKDFKKTLRKLVATGKDLFFCYEAGPTGYELYRYITAQGHQCIVVAPSLIPKKPGDKIKTDKRDADNLTRLLRSGDLTAVYVPDSEDEAIRDLSRAREDVVLVLKSAKQRLKSFLLRHNIRFDGSANWSEKHLRWLAESVNMPYPAQKIVFQEYLNSVTEANDRVKRLEKEILFHTKQWRLYPIVESLMALRGVRMVVAVTIIAELGDLTRFENPKQLMCFLGLTPSEHSTGDKRKKGAITKTGNQHARRVLVEAGWAYRFHAKVSKEMQKRQENIPLSVRDTAWKAQLRLTKRFRTMANNGKPRNVIVVAMAREIAAFMWAIAQEVPISSRN

SEQ ID NO: 305268 - protein, 424 aa, unidentified
MGKFTKTLCISERKEYSIMEGPIITVDVSKGSCHYQPFIENGHPMRKPKSLSATIDGFQKLGQTIKDLEAKTEREDIPVIFEATGVYHRPLQKYLEDHKIRYYIISPLLSATYRKTDLHSNKTDALDCAHIAKAYYCEKELRQYQAQPQEYKRLYQLSRLYESELVHLRKRKVSLRSMLDIIYPRIDKTFKGNQNLYDPIPMEILKRYPHPSLLLSHREDTIVKNVGHRTGHLKGYTERIVHKIYEKAKECYSGCDIDDIEVVKLPSLIENVQEQKKKCDSLLKEMIEIARTCPYFASIVSIVGIGENLAARTIAELGDVNRFDNRAAIVAYAGLNPKIQQSGDIDGLHLKISKKGNKHLRCLLYLGAQCNYRLRKEDPLYEFTKKKRQQTQCPLSSKAAYTASAHKLLVIIYSLCKNGTLYHS

SEQ ID NO: 305269 - protein, 356 aa, unidentified
MAMLADTVDGVIGVDTHRDTLTAAAVSHLGGVLAHTTTAADAAGYQRLLDFAHRHLPGRRCWAVEGAGSFGAGLAGFLHQHGEPVVEVGRPKRPAHRSGAKSDALDAVRAAREALGQDRPATPRRRGQREALRVLLTTRRCATLARVAAIGQLKALLVGAPEELRAELRGRSTARQIDYCARLRPRPTRSLEHQATVRALRATAQRIQLLQAEADQLQAELAVLVGAVAPWLLEVPGVGPLSAAQVLVSWSHAGRFRSEAAFAALAGTNPIPASSGQVTRYRLHRGGDRQLNRALHTILLVRLRIDPDTRAYMARRTAEGKSRRDAKRCLRRVIARQLYRLLERYDQPGVQVLRTG

SEQ ID NO: 305270 - protein, 414 aa, unidentified
MHIATCGVDWAQDHHDIAIVDTDGRLLTKRRIPESIAGFTELTAMLAEAGDNPNDPIPVAIETPRGLLVAVLRASGRPVYPINPTSVARYRERTSMSGKKSDHGDAVTLANILRTDAHKHRRLPADTELAQSITVLARAHQDASWRRTRASNELRSLLREYFPGFLHTFADRPGGISSPEARAVLAIAPTPAKAARLSKPQIVAALRRAGRHRGLTSLAATIQQHLRAPQLRHPALVEEAFGIQATAVLATLDAECASVDRLGEATATAFNQHPDHQIITSFVGLADLTGARLLAEIGDDRTRFADARALKAFAGSAPVTKASGRSIRITHRHVKNNRLAAVGFVWAFVASGCQGPTRAHYLARRDHGDRHPAALRHLYNRMLGQLYHCLQTGQTYDPIKAYGPPPTLAEQAAA

SEQ ID NO: 305271 - protein, 412 aa, unidentified
MTHPKMLHTYVGIDSHKDTHTAVFLDCFFEKLGELSFGNTTPDFEKFLDNAQKFLIDGTSFLFGLEDTSKFGRALAYFLTASGHAVKHVNAYLVAGERKNRNMEKTDSGDAECAARLLITEFGKLPDADNDEKYHMLRTLVVRRDFLTRNNRAIQSYIHSLLTIDFPNYHRFFSALTKKSAIAFFTTYPSPDKLAGVTAEELGEFLRENSNKILDVKRAMLILESVDTTAKPTPTHEIRNKTVLSAFRQLTFNMEETENIERDLTVVYKSFNVTLTSLMGLDTVTASQLLSCIGDIRNFATPAKLARYAGIAPVSHSSGNKDTRFANQRGDRELNSIIYNLAVRLIVTFKPKNKAQNAFFHEYYNKKLSEGKTKRQALKCVQRRLVNILWTMLTRNEDYVNPPYIEFDKART

SEQ ID NO: 305272 - protein, 391 aa, unidentified
MNDFNARLDSGCGGQSIEYAAYVGLDVHKDSITVAVALPGRDAAYDHGEIANNTKAVRKLVERLSKRFDGQLLLFAYEAGPCGYDLYWQLTAMGHDCQVVAPGLIPKKAGERVKTDRRDARKLAVHSRNGELTPVWVPDQEQESMRDLTRARDDFKAQQRKARQQLNAFLLRHGKVWPTGKTRWTKTHWRWLEALRFEHDWQQIVLQSYIDAVRETTGRVADITTQMERALPQWSLAPVVHSLVALRGVDRITAMVLMAELGDISRFDSPCQLMAFLGLVPSEHSSGSRRRRGAITKTGNRHARRVLVESAWCYRFPPRQTAHLRRKAADASDEAQAVAWKAQKRLCCRYRDLIHAGKNTKIVTVAVARELVGFIWDIARLEMPKVHAARQ

SEQ ID NO: 305273 - protein, 314 aa, unidentified
MTNGKEHFVGIDVAKDWFDVAVLGEKNAAQFASTRRGIAKLVKRMKVLNPMLIVVEATGGYEEDLVLALFEAGLPVALVSPQRVRQYARAKGRLAKTDQLDAQVLAEYGQKIQPRLFMGKSEERKQLSALVGRRNQLNAMIQAEKNRLRGSSGTIRSSLEQVIVCLETQLHWMEQEVRTLLQQHTDLQAQEKLLRTAKSIGPVTAATLLADLPELGQLDRQEIAALVGVAPMNADTGRKRGYRKTKGGRPDVRRTLYMATLTAIRYNPVLKPQYEQLVKRGKLKKVAITACMRKMLTILNAMLRDQQPFRYPAT

SEQ ID NO: 305274 - protein, 296 aa, unidentified
METKRHIGIDLHRNGFTACVRLENGRNYLSEWKLEDLPRFTRKLGAGDEIAVEMTGNTRFCHAAVAPHVARVVTVDPNQFQVISQSVKKTDPNDARNLALDLAKDLLPEVRMKEKTEAQIASLTQTRDTLVKLRTALKNKINNILAAHGINLAKEALSSEKALAAVLEMQFDEMVEVELQVIVKQIRGLNQSIAKLEQTIRDRGQKLKGHRNLTSIKGIGNLGASILLSVIGDIGDFADEGKLAAYFGIVPRVQNSNETERCGRITKRGAKRGGGKAILALARKFLGIIYRTLTGC

SEQ ID NO: 305275 - protein, 340 aa, unidentified
MLYIGLDVHKEFCQACVIDESGRALSNERFSSTSEELDRFLDRFQDAKFVLESTGIWEFIYEGIEKRGFEAVLAHPLKVRAIAEAKVKTDKVDAETLAQLLRADLIPRSWIPPKDIRDLRQLVRQRAYLVRDASRFKNRIHAEILRRGVRRPENLKTPFAQRSIRWMRSLDIPTVTSCLNCLENVQAQVEEINIQLLEEYNRRPDAQLIATVPGIGFYGALLILAEVDDVHRFHHPEKLCAYAGLVPTVRQSASSVKYGSISKDGSAYLRWILTESVHVHTRYDPSSQLSRFHERIAKRRGKRVATVATSRKLLRIIYWMLVRHEPFHSHGFNPVKRVHC

SEQ ID NO: 305276 - protein, 363 aa, unidentified
MNATTTKASPTAAASGLILALDLGKYKSVACVYRAADDTRFTTVPTSRQELGRLLDTYRPSVVLVEACLLAGWVRYLCADKGVPCLVANTTSEAWKFKHLKRKTDKDDALRLAEVYRLGKFPAVALPEKEVREKRGLIETRQKLVGRRVALQNRVRAILVSQGLPAPRGVRAWSALGLEGIAAHARPIAECGPLELWRGRLHLALTELGYVKGLLDQAEKKLDELARSDEGMKLLDTIPGVGPRTAEAVVAFLPNPGQCRTGKQVSAYGGLVPRQYQSADTDHRGRITKRGPRTLRQLLVECAWVMLRYNRWARAVYERLTHGGKSRKKQAIVAVARKLLVRCWAMLRDGTAWRAEPAGARAR

SEQ ID NO: 305277 - protein, 366 aa, unidentified
MDEITFVGLDAHAETTAIAVAEAGSAAPRFIGTFGAKFAELTKVLDKLGKHSELRVVYEAGPCGFAMVRQLRQVGYHCEVVAPSKIPRKTGDRVKTDRRDALSLAGLARAAQLTYVTVPDERDEAMRDLSRARIDAVRARLKTRQQLKALLLRHDRRYTGKSSWTAAHERYLAQVSFAHRAQEIAFVEYRRAIGEAQMRVDLLTQALSQELVDWRMRPLVQALMTLRGVDELSATSLVAELGEMKRFAHPRELMGYLGLVPSEYSSGQKRSLGAITKTGNSHARRLLIEAAWNYRFPARISLPLQKRQEGQPAAIRDIAWRAQLRLTQRYRRLSSRGLQHNKVCVAIARELAGFVWSIGQQVTVGS

SEQ ID NO: 305278 - protein, 388 aa, unidentified
MANSAADMQRLIDFLLGLGGRCRVALEPTGDYHRPIAHRLLRAGFEVVSISSVAQSRFREAMFNSWDKNDPKDAAVILEMLKQGRTQRYVDPMLAGHHDIQELSKTYYQISRARTKVQHAIINHHVPLYFPEMHKYWTSTRNEWWVKFMIEFPTPAHVRQHTCQEFIELASPVVGRRVHRVAKLTEIWECCADSGALPHDPQSVAVQTFLFTLHHYQHLNDMRRQLEEQAQNLLASDADYINLMSLPGVGPINALTILAEAGNLRRFGHHRQFLKYCGFDLAKSQSGVQRGREQLSKRGNARLRLAFWLAAVVAIRARENSFREKYDRYVSSNPKDPDLKRKALTAVAAKMARVAYGIIKKNQPYRRFFEQSLPSGSIPLNRAVGAPT

SEQ ID NO: 305279 - protein, 318 aa, unidentified
MEPNVFVGIDVSSKNLDVATRPTNKPLRVSNDAQGHLAIVEMLRGQEVLVVLEPTGGYERPLVVALVEAKIPVAVVNARQIRDFARSRGKLAKTDKIDAQMLAAFAEANRPEPREIPDEETRALEALVSRRRQLVDMRATEMARRALAPKSIRPSIENVIKLLSKEIDEVDSDLHTRIKNNSVWRAKDALLQSPKGVGPVLSRTLMALVPELGTLDRKEIAALVGVAPFNNDSGAKRGRRSCWGGRAAVRSVLYMATVVAATHNPVIAATYKRLVSRGKLVKVALVACMRKLLTMLNAMVRDGRPWSPPMLAEGAENA

SEQ ID NO: 305280 - protein, 413 aa, unidentified
MEVLYPHCAGLDVHKDTVVACVRHMVNGTVSREVRTFKTTTKELLALSEWLATEGCTHIAMEATGVYWKPVWHILNDGDFALVLANAAHVKNVPGRKTDVNDATWLADLLAHGLIRGSFVPDQQTQEMRDLLRTRKHLVREASRHIQRLQKTLEDANIKLDSVISDVMGLSGRRMIEALIAGQSDPEELAQLAHRRIKASPEELREALRGRLTRHHRFLLSLHLQQIDAIDAAIGAIDQEVDAQIEPFRTTVHLLTTIPGVDELSACVILAEIGRDMSRFPTAGHLISWAGLCPRNDESAGKRRSTRMRKGAAWLKTTLVQCAAAAARKKASYLQALFHRLRARRGAKKADQIEQGHRFALQGMDNVLVIDDVAVFAAWLRAPPAQAHQRRRAEKAFEPIVVKPHPQAMADQP

SEQ ID NO: 305281 - protein, 364 aa, unidentified
MLKYSLGLDISAYDIHCCFSAIDLQQKVIVKSSCKITNNPKGFEKMVDWLGKHRKQQEIPLVITMEATGVYFEHCALFLYQQQYNIAVVLPNKAKKYLQATGLKSKNDKIDAQGLARMGAEQSLELWQPMGEYYYQLRTLTRHHQSIQELKTNVANQFHADEKGMYVNKEVLAQLNTLIETFEKQLQELNGLIEAHIESNAEIASKVKNVCTVKGLGLHTVAVILAETNGFLLFKNSGQLVSYSGYDVVQNDSGKHKGKTRISKKGNSRIRRALFMPAFSVVTHKVKPFLDLYQRTFAKHHQKMKSYVAVQKKLLVLIYSLWKAEAKFDESYCNKKSKEQEPELPLCASAIAEGVGTENKIALA

SEQ ID NO: 305282 - protein, 419 aa, unidentified
MAFKIILRNACGLDVHKTWIYACIGIADNFDRVYYKEKRFSSFSKGLHELADWLASYSCKDVCMESTGKYWIPVFNILEKTCKVVLAHPKYTKPQRGNKTDRKDAQFICDLFMCGMIKPSFIPPADIREIRDLVRYRSKLVNTITGEKNRARNCLTVSNLKLDDVFSDVFGKSARSITEYMLAHPGQKFDVTPFVNGRCKAPIEEIQAAVDGAISDGQAVKLRECLNHIDELEKHKEKIEQEILSFTDKYKDTLDLIRTVPGLDKNPFTSIQILSEIGADMSVFPTDKNLVSWAGCCPRNDRSASHIKSTRISRAGSYLKPVLVQIANAIIRSKDHPEFANRYKRIKAHRGHKKAIIAICRMLLTAIWHILSDKKPYTADGFNTTTPVKEKTVLTKSQALFLLRQRGYIIRDDEPQTSV

SEQ ID NO: 305283 - protein, 317 aa, unidentified
MDVLGIDVSKGEFHACLLQRGKSLAKTFANDAKGYKQILTWLKKHGCGKVHSCMEATGAYWLGLACALYNGGLAVSVVNPSRIALFSRSQLRRTKTDRVDAAIIADFCATQRPVLWAPPAPETLELRGLLTYRDQLIGQRTAIRQIADQVQVGVDLRKIHKAQITALNVAVAAVEKSMKALLKKHSDLGERADRLKGIKGIGFLTAAAIVAKLPVERLHGAKAAAAYVGLTPRERQSGTSINGRPRICKTGNAELRRDLYMPALVAIRHNPLLKSFAERLGQRGKPPKVIIVAVMRKLITLAFRVLTERDFHPAGAA

SEQ ID NO: 305284 - protein, 355 aa, unidentified
MRLYIGLDNGWKWFRYVVLNDSGRRVKAGKEASCPEVLRSVLSKYAGAEEVTVAFEGGTGLYWVHDTVKSLGFVSHPFHASSFKVIVQSRKKTDKMDAGKIAKAAWKEYLPEVIVVPEGKERRLRELMSEREFVLKKLVSLGNRLHALGINVGRPLETKSLASDQERWEKAVEGFEGAARGQAVRLYRSALVFFQSAEEVEEELEAIFDDEELQEARKVLKSYPGIGPITSAGLLAWTGVDAKRFPGSREAASYFGLTGSTYQSGQVERGGHITKAGPPIVRRLMIQAAWTFLRSDSGRGSRWEKWFRRVARQRGRKIAIVGLARKLLTGMIASLQSGKKWDPRYRPPAFESCGR

SEQ ID NO: 305285 - protein, 275 aa, unidentified
MNIITVGIDLAKNVFAVHGVDDNGKPVLVKPKVSRADLLPLIAQLPPCLIGMEACSGAHHWARQFRQHGHTVKLMAPKFVAPYRMTGKRGKRGKNDAADAAAICEAVTRPAMLFVPIKEEHQQIILCLHRTRNGFVEERTACYNRLRGLIAEFGIVLPQKVTCLRREIGAHLEDLPGYANLCVSDLLAHTADLDAKIAEYDRAIAQAARDDARSKRLMKLPGIGPVTASALLASMGGGHDFDNGRQVAAWIGLVPGQYSSGGKARLGRITKAGDS

SEQ ID NO: 305286 - protein, 349 aa, unidentified
MWIIGCDYLPRMQEVALVETETGEYDERQLSHDHGEAEKFYCDQRGVNVRVGMEATGHARWFERLMAELGFALWIGDPAEINATRVRKQKRDREDARLLLKLLRENRFPRVWVPPPENRDLRQLLWHRHRLVQMRTRIMNQLQAIAMGEGVRLRKSLWSRSGRAKLESLQLAPWAAKRRKDLLELLDHLTPKIEELNVAFEQEAWNRPEVRHLMTQTGVGPVTALAFVLIIGTPGRFACGEQIGSYLGLIPCEDSSGGRQRLGHISKQGSSLLRFLLVEAAQQAVRFDADWKRQYLHLAMRREKRIAKVAMARRLGVRLYWMWRTGWDGKQALQFGSHAGQLVRSHGLT

SEQ ID NO: 305287 - protein, 432 aa, unidentified
MARQRARRQRSAQPFHPNAAGIDCGATEHFVAVPEDRDPQPVRSFHTFTADLHALADWLQQCGIDTIAMESTGVYWIPLFEILEARGFQVYLVDPGKIKNAPGRKTDVVDCQWIQQLHSVGLLSASFRPDDDICILRSYMRQHDMLVRYAAQHVQHMQKALMEMNGQLHHVIADITGLTGTRIIEAILGGERAPDTLAKRRAGHCQQDEATLARAWQGHWRDAHLFALQPAYDLSSFYRQHMAQLDTRLEASRHTCEDHTDGQPLAPCPRKRPPTPNAPPCARPTVLYRMPGVDLTTSDGIGGHLALGIIAEIGTDMRSWASEKHGASWRGLSPGNHTSGGQQKRSQTGTRPSANRANQLCRLAAMSRSRSDSARGAFYRRLRGRLGAPKAITATAHKLAKIVDNRLKHGQAYVDRGAQYDDQPYRQRAVKN

SEQ ID NO: 305288 - protein, 399 aa, unidentified
MFVGIDWAKESHDICVVDPAGKIRGRATIAHSQEGFDELAKHLGRWAEQGEVLVGIERPEGRLVDRILEAGHPIVLIPTFAMKDLRRRYAVGGAKSDPGDAYVIADVARTDGHRLRRLEPLSEETRALRSVVRARGDLVDQRVALGNQLRACLDAYWPGAAVIFADVCSEIALAFVERYPTPDAAAHLGEVRLASFLKKAGYSGRRSAAELLDRLRAAPEGVVGVEAEARADAMRSMVRVTRSLNRSIKDLDRAIAAHLGEHPDAEVFTSLPRSGRINAAQMLAEWGDCREAYPEPDAVSMLGGLCPVTHASGKHRDVAFRWACNKRLREAITTFADNSRHASPWAADIYRRAIARGCDHPHAVRILARAWVRVIWRCWQDRRPYDPALHGAAVLLEAA

SEQ ID NO: 305289 - protein, 326 aa, unidentified
MGTDATGRPIHKARFRRDTILQFFERAAPAVVGMEACPGAQWLARKVKAMGHTVRIVPAQFVKPYVKSNKNDTIDAAAIAEAVTRPTMRFVEVKSPDQVDLQALHRVRERMVTARTRLICQMRAFCLEHGVAMRQGAGAFKLDLSTAMQDESNDLTPMMRRLLGELRDDLLQLETRIAAVSREIEAVAARSDVARRLASVPGIGPLGATAIVAAIGDGRHFAKARDLAAWIGLVPRQHSTGGRTTLLGISKRGNPYIRRLLIHGARSCLMHLDRSRDRLGAWIDGLRARMHPNKVVVALAAKMARVAWVVLNKPGALYERREPAIV

SEQ ID NO: 305290 - protein, 405 aa, unidentified
MELTTLHKRVIGLDVHQAQITACALIEEADGTTRIEQRQFGAFKRDRRALAEWAAALRPDEVVMESTGIYWKSPYAALEAAGIRAQVVNARHVKNVPGRKTDVGDAQWLATLARAGLLRGSFIPPAKLRELRLIARQRQKLVGQLASEKNRLHKILTDGGIRLGVVVSDIHGQSARAMIKALIEGRPPHEVLQFASRRLKASREELFDALQGELTGSHGFVLDELMRHIEEIEARIARFDVRLLAGLHDQRNVLGLLQTLPGVDLIGAAMLLVEIGTDMDAFGSADRLASWVGVCPGNNESAGKRQSGRARKGNPYVRRLLCEFAHAASKTRSAFKSKFQSLIVRRGHKRAIIAVAHKLLRTMFFMLKRGEYYRDCATDYEALCVKRNAPRWIKALRQFGFIPAA

SEQ ID NO: 305291 - protein, 391 aa, unidentified
MHSDGSKHSSFSVPNNRNGAKLIVDRVTSVLLLQEIPQVVIGMEATSVYGDNLMRFLRESGSLGRFERSLHMLNPKQVKKFRDAYSDLPKNDFVDSFIIADHLRFGRINKEVYMDDYKYQALKMYTRARHQLVQELTREKQRFLNIVFICFSGLTQEKIFSDKFGATSMALIEEFSSLDELAYMNIDELADFIRKHGKNHFENPEEIAEAVQRAAKNSYRPPQVIAEAAKQMIAISMNTIRLLQKQIKEYDKAIEKMLETIPQTLTSVKGIGNVYAAGIIAEIGDINRFPSQASLAKYAGLVWTQHQSSDFEAEDKRMIQGGNHHLKYYLCEAANALRRCDPEVKRFYALKYKEANKHNHKRALALTARKLVRLVYTLLKTNRLYIPPEEY

SEQ ID NO: 305292 - protein, 411 aa, unidentified
MLKIVFKICCGIDVHKDFVVACIAKTDDKNVTTYQTKRFSTFTNGLRELSEWLCSNSCKDVCMESTGKYWYPVFNILEDSCKVIVAHPKYVKAIRGKKTDKKDAKWIADLFKHDLVVSSFIPDRCIRQLRDLCRYYCKLTNLTTSETQRTHNCLTVSNIQLANVVSDINGKSAQKILSKILENPNDTSFDIESLLHKSMLPKLDDIALAIDGVITTEQASKLQIIKKHFDNLNICKSDLENLIYELAKPYEREIALLQTIPGINSKLTAIRIIAEVSNDVSSFPTSKHLCSWAGLTPTNNESAGKKKSVRISKAGCYIKPLLVQCGLAALKSKDNPEIGNRYKNLKMRRGHKKAIIAIARMLMTIIYHILQDKVCYDKELYSHYNQLPTSKEITVEQAIALAKRQGYKLVC

SEQ ID NO: 305293 - protein, 377 aa, unidentified
MTRATRCAEYTPCLYLAFELGSDAWKLGFTTELGATPRVRTMPARDLERLTREIADAKQWFGVQAATPVRSCYEAGRDGFWLHRYLTSSGIDNVVVDSSSIEVNRRLRRAKSDGLDARKLLGMLLRYHAGERAVWSVVRVPTVEAEDRRQLHRELRTLKQERTRVANRMNGLLANQGLWLPPGTDVGAAAKTVRLWDGSPVPAALRARLEREWEPAQFLRTRILELERERQRVIAHGRGEAIDKVRQLLRLRAVGPTGAWVYVNEFFGWRRFRNRKEVGAAAGLTPTPYQSGDGSREQGISKAGSRHIRAVAIETAWGWLRYQPQSRLSCWYQARFGRGGIRARKVGIVALARKLLIELWRFLECGVVPEGARLKTA

SEQ ID NO: 305294 - protein, 320 aa, unidentified
MFNNSTFFIGLDLGDKQSHIFVLDPKGELIEESRLPTNPTSLQRKFASLPRSRVAMEVGAHSRWASQLLKDLGHEVLVANARKLRAIYSNPRKGDRADAETLARLARLDPNLLSPIHHRSPQAQADLAVLRSRDALVRSRTLLINHVRSVAKSFGARLPSCSADSFSNKAAASIPQPLRRIDGVGPITALAFVLTLEDPSRFQKSREVGPAIGLVPRTDQSGDRDPQLRITKTGNSYLRRLLVNSAQYMLGPFGPECELRTWGLMLAERGGKNAKKRAVVAVARKLAILLHRLWKNGEIYDPFYRSRSNAGQPVIASAAA

SEQ ID NO: 305295 - protein, 445 aa, unidentified
MEVVNPQAAGIDVGSRSHWVAVGQSEQDVRDFGVFNQDLYAMADWLHEKKVKTIAMESTGTYWQNLYAVLMSKGFDVILCNGKFTKNIKGKKTDVKDCQWIQKLHTLGLLTGSFLPDGKTEELRTYCRHRANLLHSAAGASKKMQKYLRLLNFRLDVVVRDICGLTGLLIIRAICEGETDPQKLASLRHGNCRKSKEEIALALQSNGRRDYLFALKQELDTYDHLQKKIEECDKEIEKMLDEIINSDDNKREHHIDTKPHKRINKNTPKDIDLNLKAYQMFEGTDLLAIEGISFSTVLSLMSEVGIEGIKKFKTAKHFASWLRLAPNNKVSGGKLLSSKVPKGSNRLKIALRNAANAIGNLKDSTPLRDFFHRISFRKGRVSAISATARKLAVIIWNIVVKGVPYINPEGYLYLDQKRKLGLVKRIQKQIDKFALTNEDLNLVNN

SEQ ID NO: 305296 - protein, 312 aa, unidentified
MTSGRNVGVDVCKGWLDVAVHESGQAWRVKNEAKGFASLITRLKEIEPSMVAFEATGGYERRCVKALGEAGLKVAVVNPTRVRRFAQAMGITAKTDTIDAKVIAHYASVAPLNAQSAQTPLEERLAACVERRRQRLSVVVAEKNRLTSSPECMLTDIEEHLAWLEERVAKLDEDIQACIEQKEEWRKRSQIIDSVPGVGPVTATTMVAELPELGQLNRQQIAALVGVAPFNKDSGPKKGKRKIYGGRAGVRGTLHMATLSAVRCNPVMRAFYQSLLKRGKEKMVALTACMRKLLVIINVMVRDGKPWRYLPA

SEQ ID NO: 305297 - protein, 354 aa, unidentified
MANTKRPELHAFSSIGIDIGKDVFHLVGFARSGQIVLRRKIKRLALVSTFEALSPCIVGMEACLSAHFVSRTLRKLGFEPRIIPAKYTKPFVKGQKNDYNDAEAIAEAALRPNLNLVAEKTQAQLDLQALHRVRSRLVSRRTATINQIRAFLIEQGIAVRTGAHALRNSLLAIVKNRKDEISPRMCGIIMGLYEDWLWLDQRIEGTTNEIEAISQCEGNCQRLMSVPGIGPVISTAVVAAIGMGEAFERGRDFGAWLGLVPRQYSTGGRPILGRISKRGSKYLRTLFVQAAQIILMRPKNWEKFSFGPWLKEASKRMHKNKLAAALANKLARIAWSILRHGKDFDTHRIEVTAI

SEQ ID NO: 305298 - protein, 429 aa, unidentified
MNLKPVAGIDVGKFFSEMAILSPSNEVVARMRINHDSNDDIKKAVKLLKKVEKDFDSRPHVVMESTGHYHKILFHSLIGFGFEVSIINPIQTDCIKNIGIRKVKNDKVDARKIAMIYRFQKLNSTKVPNRNVEYLKSLCRQYYKLSDELTMYKNRLTGIVDQLMLNFKDVFSDICSKAAIAVLEAYPTPVDIIKANRDKLTDIIKNSSRKGPDWAAKKCELLVLKAKEFKPLSLDNPANVAMLGVYISMVKSLEKNLDRVLKAIQELIKNDLAKDMPVMSQALDLLQSIPGIGLLTAATIISEIGDFTAFTKPKKLAAYFGIDPSVRQSGEFTGTRNRMSKRGSKFLRRVLYTAALANIRTKRNGEATNPILMDYYKKKSQSKAKKVALGAVMHKLVYIIFAVLRDKKPFELRSPEEHLEMLTAKHTAA

SEQ ID NO: 305299 - protein, 393 aa, unidentified
MFHNDIKELSISCVKLKAKTLIIKLNTMQETLTQIKTADKLFIGMDLHKNTSTLCVKNEAGAEILSQKILTDKNAMKKFIGDVKEKSTELSLVMEPVSQWYYYADLIENLGVDVHLAHPMRVKAIAAARIKTDKIDAGVLADLLRTNLLPEAYFSSVDVRSWKEQCRFRASLLNLRTQVKNKIHAILFKHALRHTFSNLFGKGGRAWMGSLKLKEPFKTNLEKYLLLIDQFTELVLQAEQMIQSTVTHNPQANLLISIPGISFCSALTIMAEIGDINRFNSAKKLQGYAGLVPSTYASGEKQVHGRITKQGSKWLRWIMIEAAYHQERCKKIPGFGSYYLSIKKRRGTKTAAVATARKLLAVVWRLLKDNRPYEVTAPHCWKSGTLAPKLSSI

SEQ ID NO: 305300 - protein, 317 aa, unidentified
MSRPMYVGIDVSKAQLDVSSSPTPELEGQRLPNTTAGIAHLVASLRPLQPSLIVLEATGGLERPLVRALVTAALPVVVINPRQVRDFAKATGRLAKTDGIDAQVLARFAEAVKPALRQVPDSAVQALAALMARRRQLVEMVTAEKNRLSRAVRSVRRRIQAHLTWLTAEVARVEEELDQAIQQSPIWREQEDLLQSAPGIGPVVTRTVLADLPEVGTLTRKQIAALVGVAPLNRDSGTWRGKRTVWGGRAQVRAVLYMAAVVAARFNPVIRAFYQRLCAKGKAKKVALTACMRKLLTILNAMQKSGTPWQGIVVQHA

SEQ ID NO: 305301 - protein, 361 aa, unidentified
MKQNSIKTVSIIGIDLAKTIFQVHGINADGKAIVRRKLKRHEVCKYFARLPECLIGMEACASAHYWSRVLSALGHTVRLMAPIHVKPYIKGNKNDMNDAEGICEAVQRPNMRFVSAKTPDQQAVLHCHQARHLLVGQRVALSNHMRGVLLEYGITLPQGNQVVSRRLPGLLEDADNDLPMLVRQTLSELKIEHDHIVEKIAQLFTHLKVWHAQSEASQRLAGIPGIGLLTATALAATVGDVKQFRNGRHLAAYLGLVPRQNSSGGKDRLLGISKRGNTYLRCLLVHGARSVIRHIKRRIESGQEKGNEWVVQLLRCKHTNVVVVALANKMARMAWALLATGKDYRMSHSNSATWENLSFPG

SEQ ID NO: 305302 - protein, 344 aa, unidentified
MHFIGIDLHKRIFTACVLDDNEKVVDELIDIETDEKGLDFFMSRYPADDCRIVFENLTRAHFAFHYLYDHGYAVDVAHTGHGSLREIACTNLKNDRVDAYKLALVCKDMWAGRRFIRRTHIAECDVMRMKAVIRMCNEYACIRDEMKLRILEYMNLHNIPEHPKYRDVAGQRYRRYLLDMKDPALTGMVNMMSAAIDEIEAANIEIARFAEMSEDAGLLMTIKGVSALTAVTVVTAIDGIYRFETPERLVSYFGLAVRVSESAGKQKKGHITKEGDPLVRKYLANVVRNHASFCPKADLSMFYKRKSEEMPHWKAVTAAMRKLVCQIWHMLTYREQYRPNVMKS

SEQ ID NO: 305303 - protein, 417 aa, unidentified
MNESAKLLPQKYMEGDKVHVLGIDVSRGKSNCALLHDHTVIKEFQIIHNKSGLAKLKSIITSDLPVMAVFETTGIYSRVLTRFFSEEGMNYLEINPLESSIRMAGLRRQKTDRSDAVKLALLGIDQKSLIHGRRPYSRPYEQLHLMAHRYLEITKERSRIINHLHAALDQTFPELNDIFNPIRSVLGLTFVSLFPHPDFLTGYIPGTMAKQIIGLVSPKIHSDLIVRRCNEVWQAGQLSYPAQPANSFLTNQIHSYCEEIQRYNQAHDLLKRQLITYAKTFPEFKLIASIPGAGEISTALLLGFTGKIARFPSYKQLNAYVGIDLRRIQSGGFKEADRINRRGQSSARYIMFEMIRSMLRNKARIDNHIVDYYYKLKKGPHPKPDMVAMIACVNRLDRTIMNLVRTNQIYNYARTSH

SEQ ID NO: 305304 - protein, 309 aa, unidentified
MEHELHYIGIDTAKEKLDVDVLRPDGRHRTKKFANTTKGHDELVSWLKGHKIDHAHICIEATGTYMEPVAECLYDAGYIVSVINPALGKAFAQSEGLRNKTDTVDARMLAEFCRQKRPAAWEAPHPLERALRALVVRHQALTDMHTQELNRTETAREVQRPSIDAHLLWLEAELKRLEKQIKDLTDDDPDMKHRRKLLESIPGIGEKTSAVLLAYIGLKDRFAHARQFAAFAGLTPRRYESGSSVRGASRMSKAGHVSLRRALYMPAMVATSKTEWGRAFRDRRRDDAQAGTGGVWSAEVRRAVRCVTA

SEQ ID NO: 305305 - protein, 400 aa, unidentified
MFYVGIDIGKRHHEVGVIDDKGQPVGKTLRFANTKAGSHKLLEYFNQHRLTPDNSVIGLEATGHYWLSVFSFIHKLGFKTTVFNPLQSDALRHFYIRKTKTDVKDAYLIAQVIRIDSPDQTPFTEEDLFRLRHLERLRYNFVDQASDIKRKVISLLDQVFPEYEKLFSDTLGKSSTEILKNYTLPKEFIEIDTNELANLLLEASNGRFGESRALKKATQIRESALNTFGISIGTDVFKLQIQLLLEQIQLIEKHLSEIEKAMIEISNRQKHYLTTITGISDVTACVILGEIGSIKRFERPEQLVAFAGLDASVHQSGDFNSQNTRMSKRGSPYLRRAIWQAAFVASNHDPALSLHYQKLRKRGKAHGTAVGAVARKLTHIIFAILRDNKPYKPRPQPNPN

SEQ ID NO: 305306 - protein, 386 aa, unidentified
MQKSNDLSRSLAVLEPNVTLIAVIEMSLSSWLVAGIVPGVERQPLKKLTVDENALLKLLQRWREEAEKAGRRIERTVVAFEAGRDGFWLARWLKARNIEVHVIHAASVAVSREHRRAKTDRLDTELLKRAVLGWLRGERDHCKMVAIPTIKDEDAKRPNRERESLIGERSRVVNRMKAALVRLGIRGFNPKLKRAAERLDGLRTPEGEPIPPNTRAELRRDMERRRLVNDQIRQIEEARLERLEQAPSDGPHAMMRLLARVIGVGIETADMLVHEVLSRNMRDRRAVARYGGLTGSPDESGRRRREKGLARSGNARVRRGMIQLAWRFLLHQKNSALTQWYRARTENARGTRKPMIVALARKLLIALWRLVREGVVPDGVILRPAQ

SEQ ID NO: 305307 - protein, 418 aa, unidentified
MSEDGNTRGWRRYIALDIHKKYCVIGGVDREGRVVLHAVRVEHADLEGWLKKNLHSTDHVVFESTTNAWHVYDLLEPLVERVVVANPAKVKQIANARVKTDVRDTFILARLLAANLVPDVWVPPVHVRETRQLLSQRRQLVETHTQIVNRMHSVAHRHHLQHERGKRFNEKNTLWQKDKRLSRVEQFQLELEMENRAYIEKQISRIGKEVAKMSHQKPWAESMTYIMQLPGFGIITGMTVLAAIGEVQRFGTPQHLASYSGLTGGLDQSGTHLVQKGITKEGRKELRWAMVEVAQRAVKSDPHWKQKFQEMQKRMHRNQAIVAVARRLLELVWYVLTRRQPYRHFSQERIAYKYLTWAWQMDEAARDGLTRQQFTRYYMMRLGIGHDLTRIALDPKHPRKIASESELLALRPELQHLE

SEQ ID NO: 305308 - protein, 341 aa, unidentified
MEYFGLDVHKRYTVFTRLDERGTLLGQGRVTNDAESLASLLAQSVEPAKVVLEAGGIWPVFTDALEDHAPEVVLAHPLKTRAIASARIKTDRIDSATLAHLLRTDLVPRAYLAPRSLREVREVLRYRVQLVRLRTAVKNRVHALLAMRGLMSPASDLFGHAGRRWLASLALPPVPRRAVDGFLSILDALNVQIRLIEREIRQRVRQSPEARRLWSIPGVGRFGALLILAEIGDVHRFPDARHLISYAGLAPSVHSSGGRTYHGRITKQGSPLLRWILVEAAVAASRQEGDLRERFRRVAQRKGPKTARVALARHLLTIVYHVLADGTPYHAHTSAVAPLAA

SEQ ID NO: 305309 - protein, 343 aa, unidentified
MKNTIITIDLATSVFELAIATPQYRITQRRRLDRDAFRQFIHEQEPALLVMEACGSAHHWGRLFREWGHEALLLPAQYVRPYRRRNKTDRTDCEALLEAYRCEGIKPVAIKSIGQQELQQMHRLREQWKRTKVARMNFLRGVFREQGIPLPASDREALREANLHVGQLSSLTLYMLRPLMQELETLETHMAGLEQQLIHATRQNETVANLQTIPGIGLLTSTALVAAVGKAEQFQSARQFASWLGITPRESSSGNRRFLGSITKQGNTYLRTLLVHGARSALVAAKRQAKSGKPLGRLQEWAVKLEQRSGHNKTAVALANKLARTVWACWKSGKPYQAGYCPA

SEQ ID NO: 305310 - protein, 332 aa, unidentified
MHYTTFIGIDVSKATIDVYVHKTNHHKKFQNGRRGFDSMISWIQKIDPDLNLNNMHVTFEHTGLYSLHVALFLEEINIDYSMMSALQIKRSLGITRGKNDKIDARRIAEYGYLYRETLQLTKFPSRQIMQLQPLLALRDRLVRQRGGFEATQGEQARFLDRTAALDMSDVYQQVINTLKEQIRRIDDTMKLIIDSNPELKLNYDLVTTIKGIGKTIAIHLIVFTHNFSRFSNWRKFACYAGIAPFENQSGTTFLGKTKVISLANKQMKKMLHLAALCASLHDTEMRSYMARRVQGGKSKMSVMNIIRNKMLARAFAVVARKTPYVDIVKYAA

SEQ ID NO: 305311 - protein, 342 aa, unidentified
MQDMMIGVDLAKNVFQLHGASMTGHVAFRKKLTRERFCSFMAKQPPCVVVFEACGSASYWAREMIRLGHAVKLIAPQYVRPFVKRQKNDAADAEAIVIAAQRPEMRFVAPKSEDQQARAVLFRARERLVHQRTELVNALRSVLYEYGHVVPQGIGQLERVAAILDVEHSDLPALVREECRDLMAQIAEQTARIDARTRTAKAIAAQTDKARRLQTMPGVGPLTALAIEAFAPDMATFRSGRDFASWLGLVPRQHATGGKERLGRVSKAGQADIRRLLIIGAMSRLGWLGRRTIPQGSWLARLMLRKPRMLVAIALANKMARQIWAMLTKKEDFRDPAREAVA

SEQ ID NO: 305312 - protein, 461 aa, unidentified
MPKSRKSGDRPGSTRPIAGLPIVRAKVAGIDIGSERHWVCAPGLEGSGREVADFGATTAELVRMAEWLKERKIESVAMESTGVYWIAPHEVLEKDFEVLLVDTRQLARVPGRNKKTDPNDCEWIQRLHSCGLLNGSFRPQEQVCMLRTLVRDQAMLVAESADWVRRMQKSLDQMNVRVHRAVSELSGVTGMAMVRAIAGGERDAQKLAQFRDRRCRQSKEEIAEQLSGHWREDHLFSLRQSLQMYDAIGERITAYEQEILKKLATMEIEEPPGGVVPPVKNPEKGKAIRKRGQEPKRQALYRMSGVDVTQIDAIGVETVEVVLSEYGPDLSRFPTEKQFVSHATLAPRVPKSGGKPVKGKKRNSASTRVAAALRMAALSLRRSPTALGAYYRRLARRIAGDVAVFATARKLATLIYRLLRWGQPYVDEGAQAFEKRYRQQHIKSLAARAKELGYQLMPTTT

SEQ ID NO: 305313 - protein, 318 aa, unidentified
MNNPTFQSINVGVDTGKTQLDIFIRPIGLFFSVSNDDKGIKEAITTIKKHKPERIVIEATGRLEVPFVLACTKAKLPYVVANPIHVRRFAGAIGQIAKTDKLDAQLIALYSERIEPPLSTLKPENIRLMSDLVIRRNQLLSMQTMEKNRLQILPKELAMTIKPILTTFKNQIQKIEEKIIKIIESCDEYKHKNEILQSVPGIGKVAAASLISNLPELGSISNKKASALVGVAPINRDSGLYKGHRKTKGGRKQVRTVLYMAMMSAMQCNPVFKSTYSRLVAEGKPKKLAIIACVRKMVVILNSMIRDGVMWDENHAKI

SEQ ID NO: 305314 - protein, 468 aa, unidentified
MEDVEFKFLVDWTKPVFYCGLDVHKYELAVAVYCKDDSETELLKTNIFSVDSAGLNRFWSFVAKFRPKGFVMEATGIYHHVIYRFLVKKRAHSEWAFNILVVNPADASGIPNRQKNDKIDAENLARYLAMGLLKSGKPVIEVIEDLKAIFRMALKLEKDRTALKNRIKKTLDRAGIRPKGMDLNHEWVREFLYYFIERETTLGQAISQLQVDLEILKAHRNKIFKNVKKFIPYFDFLLSPAQRSMIRQDLVELDFKTARKRLLAVEIDHLILERPALRQHAFNLSTIPGISPFSAVWILAEIGNIHQFHAVRPFLAYCGCSPRIISSAGKVYSAHISRHSNSYLRTIFYNAAVVLCNFEKKESALKEYATRVINHKRSVSMTLVYCIVAAKIAKITYALLKSSVPFNPKHGCDLDKRDFKAQGSKFSLTSKNLVRKARNLLRRVKDVQELGLLGEHVSILAEQLDLLL

SEQ ID NO: 305315 - protein, 362 aa, unidentified
MRIIGCDLHARQQTLAMLDTTTGEVVAMTLTHEGNNVREFYSSLPGPVRVGIEATGSMQWFSNLMEELGIECLVGHPAQIRAAEPRKQKHDRRDADLILKLLMENRFPAIWLPSKELQDLRSLLRHRHQWVRMRTRIQNALQSIALANGLRRGTALWSHDGQSRIASLPLPPHTAYRRSELQAMYEKFEAEIEKLNQRVEEQACQRPGARLLMTHPGVGPITALATEVFLGDPARFADSKALASYVGMIPREYSSGERQRLGGLSKQGNPLLRFLWGEAGAHAARKDPELQRFYRRKLVQKGLGKASVAVARKLGIRLWIMLRDQIEYHEFCRRGQKQQNSSDACAGMPETRYGAKSHRPVD

SEQ ID NO: 305316 - protein, 400 aa, unidentified
MDPELRVAVDIGCTRHRVAVGLSEGKLLEEFDINHDAAGLSEFFERVGRHERQWGRPVAVAMEGYNGYARPLDERVLLHGYRLFNVNNMKLARFKEIFPGPAKSDPVDARKMLEMFSLKDKLPLAREALQEVAPVAEINLQLKALTRRRKQLVNERMRVSSRMQADLQAVCPGLLDITGEADNLWFLNFLTCRADLTKLKTVRESSLLALQGVGKGYAGKIRHWQKQATFSETVAWVGPMIIEDAKRMIELRKAIGALQTQIDALAEHSEIARRIDTIPEFGRVCAPELAGEIGSLQRFRGESSLALYVGMAPLDDKSGARSGSKPPRHVNVRAKAAMMIAAAQNAASVPESKAFYDKKRSQGKTHNQALRALGRNLVRVMWSMLKHGRDYQLESPSKKA

SEQ ID NO: 305317 - protein, 443 aa, unidentified
MLPSSTSIRLLIFLPSPERTSKNSEGRESVDVVHPRCAGVDVSKRDAKVCVRIAGTGRARAKSTVTTWGAVTNQVLALRDHLIAEAVTLVVMEATSDYWKPFYYLLEDGPFEVMLVNARHVKNLPGRKTDVSDASWLAQLGAHGLVRGSFVPPEPVRQLRDLTRTRTAITRERAREIQRLEKLLEDAGIKLSSVASDITGVSGRAMLGALIAGERDPAQLADLAKRRLRSKIPELTEALTGRFGDHHAFLAQLHLDLIDQHTTAIDELTARIEVVIEPFRGARDLLVSIPGISTGVADVIVAETGADMARFPSAGHLASWAGTCPGSNESAGRIKSTKTRPGNPYLKGALGIAAMSAARSNGTYLSAKYRRIAARRGPMKAIVAVEHAMLIAIWNMLSTGAFYSDPGQDFYARLNPDKAKNRAIDQLRKMGYAVTLNPLAATG

SEQ ID NO: 305318 - protein, 429 aa, unidentified
MNSTQNKKIEQVKETTMIVGIDVGSEKHYFRAFNWRGIELTRKPVAFSNSMEGFNSFYNTIVELMQKSELEEALVGIEPTGHYWFDLGQFMGEKNIKFVMVNPHHVHKTKELDDNSPSKNDRKDPRVIAGLVRDGRYFYSYMPTGVYAELRNASNRRFVLVEEQTRTKNRLQKWIAVYFPEYKGIYTHIDAKGGLLVLKKAPTPEEIVRLGEEGIIKIWKDAKLRRNGNKKALKILNAAMRSIGLRTGLTEARMEIQDLIEDYELQTKRLERVNDLIKELCQQIRYADKLLEIKGIGITTVAGFIAEVGDITRFDSTKELQKLAGLELVADSSGKHNGKTKISKRGRKRLRYLLFEAAISVVGKNEEFKEIHRYYTTREKNPLKKMQSLIAVACKLIRVFHVILTKGVSYDASKMLEGIRHPGEQLKAA

SEQ ID NO: 305319 - protein, 507 aa, unidentified
MHYKMRHVYVGLDLHKAHHTAVIINCWHERLGEIQIENQPSAFDDLMKFVKKHTPKGMTPVYGLEDTGGNGRALAVHLVEKKQIVKEVNSALSYNERMSNATIQKSDSWDAFCIAKVLFARLDDLPDANPQDIYWTIGQLVARRNSIVKHAATLKNQLHQQLSYHYPSYKKFFCDIDGKAALAFWEKYPAPYQLESVGAEELAVYLRKASHNICSTRKAEEILELVKKDGETKRNYQASRDFLVVNMVQDMKRSRELIKETEAQLRQVLSGTDYKLDSMDGISTVTAAELIAEIGDIRRFSNADKLARFAGIAPIRFSSGGIGKDQASGQGNRVLNTIFHNLAVQQIQVAKGENKKQRNPVFYEYYQRKLAEGKTKKQALICVMKRHLFLDTKQLSVRGKPYEELYFQADPDIAHAWQKAQKGELNDAEKEWFKKLANHEIKEKEYMDGGMPLRDSSTWNAEKDTFDVVPEKNAHDKADVTDPNPPPFPDYDASKDFNKYFDKDIEY

SEQ ID NO: 305320 - protein, 348 aa, unidentified
MVTIGIDPHKQTHSGVAVDALGVQVAQRTVAARREGFGQLLGWGRKLDGERVWVIEDVRHVSGGLERFLIDRGETVVRLPPRLMAEARQGVRERGKSDPIDALAIARAALREGVQTLPTARLAGVELEIRQLALHRERLVDTRTRLINELRWLLHDLWPEWEIPKRVLIQPGWQTKITRRLGRAAATVQVQIARDMIARVRELTRTITELYEQLAGLVKQAAPQLLAEKGLGVLIAAKLIGEIAGVDRFTSDAQLARISGCAPIPVSSGRTDRHRLDPGGNRQLNHAFHMLAICKITSDPRTAVYLAKQRRNGKSNREAIRSLKRHLVRRVYHLLCDANSVPITICLT

SEQ ID NO: 305321 - protein, 364 aa, unidentified
MPAIGIDTHKRTLAACAVDDVGSVIAERTFSCDPAGFVELAAWAGGVAPAARIGVEGSASYGAPVAHHLIAAGFSVREVPPQLSRRERGHSRRPGKSDPGDALAIARVTLREPDLPPVRLEDRSTELGLLADARDDLVHAQTRARNRLHAHLVVLVPGYGRTVAQLVSGRQLAAMERALDGQAGVRAELARALLAEVRDLGRRAAELERSMTALVAGHPVLELPGVGILTAARLVAEAGDVGRFRSPAAFAMLAGVAPIPASSGEVQRMRLNRGGNRRLNRALYTIALSQAWHHDPAKAYIARRQAEGKSWAEALRCLKHRIARPVFRLLQAGRVGPSRLTTIGACPGLLAPLTSVPVPVAPSV

SEQ ID NO: 305322 - protein, 416 aa, unidentified
MSLALPEALFFTGIDWATETHSVCVADAGGKITAEFTIEHSADGIATLIRRLARYGAPGDMPVAIERPNGRLVDLLLEAGHPVVPVSPNAIKTWRDGEVLSGAKSDAGDAAVIAEYLRLRQHRLKTAAPYSDETLALRTVVRSRGDLVEMRVAATNQLSALLEAHWPGAKAVFADVESPISLEFLTRYPTPASACRLGEKRMAAFLVKHGYSGRRTAAELLARLRAAPAGTGREALAEALRDAVLAAVGVLTALNASVKSLDRSAAAHLGEHPDGKIFTSLPRSGQVNAAQVLAEWGDCRQAYDGPDSVAALAGCTPVTSQSGKHRSVHFRWACNKRFRVAMTTFADNSRHASPWAAKTYSDARASGKDHPHAIRILARAWIRVIWPCWLNGIPYDPARHGAAAALAEQPAKQVAA

SEQ ID NO: 305323 - protein, 311 aa, unidentified
MTDDTIGIDISKSTLDIHRLSDAKTMSFGNCPAGFKALARFCAKTTVTRVVYEATGAYHNGLERTLGAHLPLVKVNPLQARRFAQAQGVRAKTDAVDAKMLAEMGNAFALEPDEPAPKIQHDLKELRAFRSGLIKDRTSIMNRLKTQKLSITCRQSKTRLAQVDKQIAEISAEVDRLINANNRLAHSMKILRSIPGIGAVCAATILIEMPEIGKLDRRQVASLTGLAPMARQSGQWRGKSFIQGGRKIVRDALYMPALVAMRHNPDFKAKYQAMIKAGKPPKVAITALMRKLIELANALIKADRTWVKKGA

SEQ ID NO: 305324 - protein, 307 aa, unidentified
MCCVLMVVIATKKFANTTKGHDELVSWLKGHKIDHAHICIEATGTYMEPVAECLYDAGYIVSVINPALGKAFAQSEGLRNKTDTVDARMLAEFCRQKRPAAWEAPHPLERALRALVVRHQALTDMHTQELNRTETAREVQRPSIDAHLLWLEAELKRLEKQIKDLTDDDPDMKHRRKLLESIPGIGEKTSAVLLAYIGLKDRFAHARQFAAFAGLTPRRYESGSSVRGASRMSKAGHVSLRRALYMPAMVATSKTEWGRAFRDRLAANGKKGKVILGAMMRKLAQVAYGVLKSGVPFDASRHNPVAA

SEQ ID NO: 305325 - protein, 345 aa, unidentified
MKITTVGIDLAKNVFQVHGVDERGKPVLRKQLRRGQLAEFFVNLPPCLIGMEACASAHHWGRTLRRFGHTVKLMAPQFVKPYVKTNKNDVADAEAICEAVNRPNMRFVPIKTIEQQAILSVHRVRQGFVKARTAQANQIRGLLGEFGLVIPQGIINVTKRVSEILEDASNELPAPFRHLIDRLTAHLKELDRQVKEFEQEIIAWHRSSDLSRELEKIPGIGPLAASALVASIADARSFKNGRQVSAWLGLVPRQSSSGGKPTLLGMSKRGDAYLRTLLIHGARSAILAAKNKVDNTQGWLTDLLKRRHPNIAAVALANKNVRTVWAILAHGREFKSDYVPTRIAA

SEQ ID NO: 305326 - protein, 356 aa, unidentified
MAIVAHARPFVIGVDTHARNHAVSILACPTGEIVDEAQFPATAAGLSRAVTWAGRRTGGDVTVLWVIEGTGTYGARLRAVAADNGYTVVEAPRMNARANRAIGKSDPLDARRIAAAALPLHETQLREPRADDGVRAAVKVLLASRDHMSTERTATINALTALLRVVDLGIDARRPLTQAQIDATAAWRARDEALATATARGEATRLGKRVAALDKELKDITKRITDLVRQSPAGGLLDQPGIGPVTAAVALTSWSHLGRIRSEAAFASLAGASPIPASSGNTVRHRINRGGDRRLNRALHMAIVTRMRMDPRTRAYVERRTAEGRTLREIRRCLKRYLAREIYRHLTTAARAQLAA

SEQ ID NO: 305327 - protein, 467 aa, unidentified
MQHKPKRRRSGEKGSNGIALLERIQPDAAGIDCGQNSHFVAVPPERDPQPVREFRTFTTDLQRLADWLAQCRIKTVAMESTGVYWIPVYEILEQRGFEVLLVNARDVHNVRGRKSDVTDCEWLRELHSVGLLRASFRPAAAIVPLRSFVRQRATLVEEAATRIQRMQKALTEMNLKLHTVLSDLTGRTGLAIIRSILKGERDPERLATHRDPRCHASHAEIVAALTGNYRAEHLFALKQNFAAYNFLLQQITQCDSEIEAVLTTLAAQQPPPAAMLPAPRHRAISKHQPQFDLRSPLHRLTGGADLSQVDGISSQAALQIIAEIGTDMSRWKSEKHFTSWLALAPNNKISGGRLLSSRTAPSANRTAVILRRCAMSLARTSTALGAFYRRLAARTGKAKAITATARKLAVLVYRVLSGNFLYEDPGATAYYQLNRARQLSSLRKRAILFGFDLVDRATGEVLVNAVS

SEQ ID NO: 305328 - protein, 411 aa, unidentified
MNAVGIDVSKGKSMVAVLRPLGVVVAKPFEVSHTATELRKLTNFLKGLDGETKVIMEHTGRYYEPVAQVIHEQGLFVSAVNPLLIKEYGGNSLRRVKTDKADAKKIARYGLDNWAELRAYTPMNTIRYELKTLNRQFHLASKNRTACSNNLVALLDQSFTGVRGWFDSPPRKDGSQKWVDFAFTFWHVDCVRIISLDAFTERYRKWCKRHGYNFRTEKAEMIHREARDMIALIPKSATTKLLIHEAASQLLRLTRMVEVLRNEMNRLAAQLPEYPVVMSMYGLGESLGPQLMAEIGDIRRFTGKQSLVAFAGVDPMPNQSGMKDSRSNKSSKRGSPYLRKTLFNVMSCILQNAPCDVPVYQFLDRKRDEGKHFYVYMTAGANKFLRIYFGRVRDYLAESDEPARDTIPLNQ

SEQ ID NO: 305329 - protein, 363 aa, unidentified
MEAEKRRYVGIDLGKREYTMAIIGKNGKMSIHHGKTSDRGRQALYRLLEESDKVALEAGNLAFITAREIMEVVGSEVRVLNAAKLPFIWAAPTKTDKEDAMKLAHLVEERRDEKLPIVPLPSEKELERRKVLANYGREMKNRTRLINLLHAMFVHQGQTTIVRKNLATAEKRQEVVALLTGQEREEADWILKHLELYEQRIKELKSKIQMEAKKDEDMKNLVSIPGVGPIVAYAFTAHVGDGSRFNKGAQVSNYIGFVPRLDYSGTIQRHGRITKHGNGYLRGLLVQAAWAMVRCTKQSSLKERYLCLTVFGGKGKKKTIVSIGRRLTELMYSVLRNKTSYEVQIWAGRREYLAKLKELKKSA

SEQ ID NO: 305330 - protein, 349 aa, unidentified
MRTYINPTEAEMTCYSGIDLHSNNSVVLVSDAADRVLYQRRLPNDLPTILAALEPHRGELAGVVVESTYNWYWLVDGLQAAGYRVHLANTTAMKRYEGIKHSGDETDAAYLAHLLRLGILRTGYICPPDERAVRDLARKRLQLVRTRSSQVLAVENIVARQTGAGISANVVKRLERETVAALNLPEDVRRALAANVAVIKTLNAEIGKLEARLRERVRLRTPFRLITTAPGIGEVLGTTIMLEAGAIERFAAVGNFASYARCVDSKRLSNGKKKGEGNVKNGNKYLAWAFIEAANFARRYCPEAKRFYERKKARTNNIVATKALAHKLARACYHMLKEGKTFDVKRCFA

SEQ ID NO: 305331 - protein, 387 aa, unidentified
MTKKKGRVVGLDVHPDSFAGAVVEGSHPASAQVSSTSTRVELERLEQWALRHTRTEDTLVLEASGNAFAVAARLRRIGRKVEILDSHRAGKVGKVYCANDRVDAVKIARIYLSALSPIVWQPDAKTLERREIFSAYQAVVKESTRAKQQLRAMLNEHCVRLEKGFRLCHPNAIRRLVALREWTPARTMLLQQLHGTLVAARARRTLLRRHMAQEIVAEEALLRLTRLCGINLVTLYGVVAAVGDVRRFSHSKKLVAYFGLNPSVSQSGNFEGGGALKRHGRGALRALLIQSSKKLLEVNNPLQKWGLAVAARRGRNKAAVAVARKLCVALWHVLMGHLIGAFERLDTLATKLSKFATEIGPAALTAFGYNNKADFVEKKLYVLCSYP

SEQ ID NO: 305332 - protein, 429 aa, unidentified
MNCTQNKKIEQVKETTMIVGIDVGSEKHYFRAFNWRGIELTRKPIAFSNSMEGFNSFYNTIVELMQKSELEEALVGIEPTGHYWFDLGQFMGEKDIKFVMVNPHHVHKTKELDDNSPSKNDRKDPRVIAGLVRDGRYFYSYMPTGVYAELRNASNRRFVLVEEQTRAKNRLQKWIAVYFPEYKGIYTHIDAKGGMLVLKKAPTPEEIVRLGVEGIIKIWKDAKLRGNGHKKAMLILAAAMRSIGLKAGLTEARMEIQDLIEDYELQTKRLERVNDLIKGLCQQVRYADKLLEIKGIGITTVAGFIAEVGDITRFDSTKELQKLAGLELVADSSGKHNGKTKISKRGRKRLRYLLFEAAISVVGKNEEFKEIHRYYTTREKNPLKKMQSLIAVACKLIRVFHAILTKGIRYDASKMLKDIRHPGEQLKAA

SEQ ID NO: 305333 - protein, 383 aa, unidentified
MILENAPNIHCDDKMDMTNILFINANAGGAFMAKYNIGVDYHKKFSYLVVKEEKGRVLRSGQITNSKKAVADFLEPFKNDSAAVLESCRNWCVMHDWLEDIVDDVILANPYKVKAIAEAKIKTDKIDATVLADLLRADLVPQAYIAKRPVRDMRNLLRERIFFVRLRTMTKNRITTIFDRYPEEVRKEKAKTDLFGKKGRAQLENIELRPADRALIDRELIFIDFINVFIKEVEEVIAENFKVSKNAKHLKTIPGIGQFFSMLIDAEIGDINRFRNEKKFAAYIGLVPSTYSSGGTTVNGRIIKRGNKLLRWAFVEAVIPAIAHDEYMRWEYDKLRQRMNYNKAKTAMARKLSSIAFKCLKEQRNYKKFNKIELEYKKLGRAS

SEQ ID NO: 305334 - protein, 343 aa, unidentified
MQTITTIGLDIAKSVFQVHGVDAAGQVVIRRQLKRRYVLAFFQKLPPCLIGIEACASSHYWSRELQALGHTVRLMPPAYVKPYVKRQKNDATDAEAICEAVARANMRFVPTKTPEQQSCLMLHRTRHLFIRQQTAVINSIRAHLAEFGIVAPVGRKGVTELLHIVADPSDKRVPEVARACLAALGNQLLSLKEQIVEFDRMIMVWHRSNETSKRLHYIPGVGPMLATALVASVAHPRTFRSGRNFSAWIGLVPKQHSSGGKDRLGSISKQGDRYLRSLFVAGALAVIRYAKIHGTKHRPWLTALLARRPTKVAAIALANKLARMAWAMMAKGERYRQPVALAA

SEQ ID NO: 305335 - protein, 323 aa, unidentified
MIEAVRECVAGLDVHKDTVMCTILTGKEGGDLKKIIKEFSTFRDELNQLAKLLYFHEVELAVMESTGIYWKCVYEEIEEMGIPCYVVNARHIKNVPGRKTDVCDSEWLAELARCGLLRPSFVPPKDFRETRLLTRYRKKVLGMLGAEKNRLHKILESAGIKLGVVVSDIDGVSAREMIAAIIKGSHTSEQIAHMARGRLKSKEGDLVRSLQGRLSDRHRFLLKKIQNHILWLENHIHEIDSQVEEAMIPYKEEWQLLQTIPGVDKISAAMLLSEIGVNMDCFGNKGRLSSWAGMCPGNNESASKKKVVAQGTATNLSKQCCVK

SEQ ID NO: 305336 - protein, 344 aa, unidentified
MDHFAGLDVSVKETSVCIVDDTGRIVREVKVASEPDALLAVLTNPAYQLKRIGLEAGPLSQWLFSALAEAELPVVCVETRHMQAVLKAQINKTDRNDARGIAQMMRVGIYRPVHVKTLRSQKLRMLLTHRKLLQSKAIAIENDLRGTLRNFGLKVGIVGKVRFEARIKELVENLPDLAVLVEPLLIVRRVLREQIVMLHRRLLAIVRDDDVCRRLMTTPGVGPVVALTYRATVDVPARFRKSKAVGAVFGLTCSRYQSGETDRSGRISRCGDEMMRVMLYEAAQSMLRSKKWSWLKAWAIQIARRRGMKKAIVALARRLAVIMHRIWVDGTEFRWTRERAPVAA

SEQ ID NO: 305337 - protein, 394 aa, unidentified
MGKNRHHVSIRDLPQDKYYKAFSFTNDHDGFMELIATLDELSSEKSDFLIGVEACSYALNLSYFLMAMGFNLVEVNPFRAGQFRKAQGKKAKTDKIDARTIAAILALGDHKPLSIQDPILDNLRELSRFRVDLINEKATTIIHLREALSVLFPEYEKVFRQLDSAGSLALLAAYPGPEYVIAAGEETVGKTLSLASPGRMSRGMARRIIEAAKRTVGVVQKQPALGIKISILAKRIASLQATIRDLDRQITALFNSLSCKPCGFPVGRAPSLAAIISEIGDVHRYPTLKKFLSHLGWCPQSFQTGNYWMEHPKMSHAGNRYVRRLIWMLSIIAVQFVPRYREYFQRRVSEGKTKMHIIVAVGRKLLSALYAMLKRGTAYDPNREEHSHRAVAGH

SEQ ID NO: 305338 - protein, 363 aa, unidentified
MDEDTTVTVGLDVHAHSIRLAAVRADELVDERTLPYDEATLERVLRRFAKVRCCYEAGPTGFGLHRYLVGRGIECAVVAPGLVPQRPGDRIKTDPRDARKLARLHAGGLLEPIYVPTAELEAARDLVRAREAARLDRMRDRHRLSKFCLRHGLRLPGASWGLTRRRWLAEQRFAFATQQQAFDAYLHALDLVDARVAALERAIADAAEAGPWCELVGRLRCLRGVDTLTALGLVTEIGDFARFASAEEFMAFVGLVPSERSSGEARRQGSITKVGNAHVRRLLVESAWHARRHPRVGYELRRRHEGQDVIVIERAWRCQQRLYRRWRRMAARGNPSQKIVVACARELAGFVWAIATEQPLRAA

SEQ ID NO: 305339 - protein, 408 aa, unidentified
MTVVGIDVSKGKSMVAAMKPGGELVTTPYEVKHSDIELSCFALNVLCMEPDTRVVMEATGRYHEPVAALLHSEGIFVSILNPLLIKQSGAGSLRKVKSDPKDALKIAKYGLDNWSTLREYTPMEAIRQQLKLCARQCDLYSKNIVMLTNNLISLSDKTFPGVNELFSSPEKENGHLKWVDFYRTFWHCDCINRMSPDAFEERYKKWCKRKGYHFSADAADALYAASCGLYTTLPRDNNAKLLVTVATDQLIALRENQSKLETEMLNLCKQLPEYETVMAMYGVGKSTGPHLMAELGDIRRFPHRSSIVAFAGVDPGVVGSGKMQLSSVATSKRGSPQLRKALFQVVSAYVKRKPENEAVYQFYAKKRDEGKPYYVCTTAAANKFLRIYYARVKECLNAAESATQAEEG

SEQ ID NO: 305340 - protein, 456 aa, unidentified
MTAALKAERTAPQEGSCISSPGPQRSAPIRAARQMNTNWTEHAHFAALDWAGDHHDVCVVDRTGMITAEFRFAHTAAGWAEFTDKMKPFVGCPLTLETSSGPAVDQLLQRGWALYPVAPPAAAHYRERKVPSGTKTDRHDTWALADALRTDGHAWRPLRPQDEATATLRALCRDEIALIEERTALVNQLRAALREYYPAALEAFEDWTAAYTWVFLLAFPTPAQLQAAGKRKWEKFLHTHKLWRPQTVDQRLAIFAAATALPASAPVTAAKSLLAVSLAKVLLTLQAQLDEYRQRISQAFRTHPDHDLFGGLPGAKDVLGPRLLAELGSVREEYPDSESLMCQAGVSPVSYQSGQIEKCRLRRACDKVLRFTVHLWVNASRKKCAWAQAYYQRKREEGHSHASALRCLGKRWLKILWRLWVDRKPYDEKVYLTSLQRRGSQLWGQLNGATVPMPPL

SEQ ID NO: 305341 - protein, 338 aa, unidentified
MKNCNKQNEKIELVDEKTLVIGVDIGSYDEYARAFTCRKQELSKKPLHFYNTAEGFKTFKDWAVNIMKANGLEKIIVGMEPTSIYWEALATYCKDNGMILVHVNPAAVHKSKELDDNDPSKNDRKDPKVIADLVTDGRYSFPYMPEEEYAQLRELSNLRIRTQESLTQCKNRLARWYSRYFPEFKEAYKNVVPKTAMIIMDMYPLPEDIVTLGVEGILQIWRNKKVRAAGESRAKKLYEAAKNSIGRKEAAAVARLEFQSIKEDLDRYQERLEAIDKEVDEILPKIKNADKLFGIKGVGKATVLTFLSEVGDISRFENPKEIQKLAGYAIVTNDSCKH

SEQ ID NO: 305342 - protein, 313 aa, unidentified
MITLGLDPHPGSHTVVALDNNGASLGHLAVPNTPEGLKQLHEFGSRFSPRRWAVEGAGNHFIAAFVAALLANSESVFSIPPSLTSQYRARRGRKKSDVVDAENVARALLANAQLPPLHAVEHQRELQELTRTQRRLSEQLKASRGALKELAAGSSVREVLQPVIEILVDQLKILRQQIRLRVKDIMPALLDVQGVGPIVAGILLAEVGNPKRFASANHFASYCGAAPIERGSGQNCRMQVNPGGNRRLNWALHIVAMVRLGNDGGRSKTFLDKCRLRGKSQRSALRVLKTYIARELFSVMHHNIRANIEGFST

SEQ ID NO: 305343 - protein, 348 aa, unidentified
MLTYLKLKPKVMENSPQCQWVLGIDVSKDSMDACLIRQTDGQLFEQKFHNNLSGFKHLKSWCKEKQCECKGQTLCCMEHTGLYTRPLVHYLVSREVKVWLESSLQIKRSQGLVRGKTDKVDAQRIARYANVYQKKAQVIQISSLTLEKLKDLQANRTRLMKALQSLRVSAQELQQFDPDSGKVIEKVNREAIRGLETSLDKVDEKILAYIRQDEALKQKYDLMLSVKGVGKVLAALLLVYTQGFTRLADSRKLACYSGVAPFAYQSGTSTRGKTGVSKFANNDLKRVLHMAAVSSIQHDSELHLYYQRKVQEGKNKMSVINAVRNKLLSRVVAVIKRGTPYQLQLKNN

SEQ ID NO: 305344 - protein, 406 aa, unidentified
MICIGIDIAKRSHVASAVDEDGGTVVESFKFNNTANGFAKMLKRLRKADATPENSLVGMEATGRYWVALFDFLISHGYEAAVINPVQTDAFRDVWTVRKVKTDALDAAMIADLVRYKRYSPSALGDEATEELRNLARYRLSLVERSTALKNRATAILDRTFPELAGLFSNAYCSTHRELLQHCATPDQVLGTDVGTLERILREASRGRCGRAKAERLKALAKESVGVGFGSKTLAFEARLLMEELDFVQDQVKEVERELARLLERTQGKWLVTIPGIDVALASVIAGEIGDPNAFDDPHRLMGYAGMDPTRSESGETVRSDGHMSKRGPGALRWAFMQAADCARKNDPYFGDYYDRKRGVDGKHHYVALSGVARKLMGVALAVMKEGRPYEPAPPSNHRPGHLKEA

SEQ ID NO: 305345 - protein, 428 aa, unidentified
MKYAQIQVLPQTPPGGVTAGIDWASADHVACVVDAAGQVRARFSVSHDRAGIRRLITGLRAAGAGEVAIERSDGVLVGALADAGLTVVVIASRQMKNLRSRYGSAGAKDDRFDAFVLADVLRTDRARLRPLAPDMPATVALRAAVRARRDLVAHRVAACNQLRAHLGAAFPAGAGLFADLDSQISLAFLARFGSQDAAGQLSEEDLAAWLQTFRYRGNAARPEQLRARLQAAPRGPAGATGTAMAAVTAALVAALAGLAGQIKALEAEIAAQLAVHPDAHIFTSLPRAGTLRAARLLAETGDCRARFPDPESLTGLAGVAPVTRRSGKHISVSFRWAVNRQLRDAVCDFAGDSRHASPWAAAIYDSARARGKDHPHAVRITARAWLYVIWRCWQDGTAYDPARHNALHRIARQQAAAAAQHPGAGDSQ

SEQ ID NO: 305346 - protein, 366 aa, unidentified
MDTIYIGVDFHARQQTICYLKTETGELVTCELKHQHKQALRAFYAQFSGQVIVGLEASGYSPWFERMLEELGCKVWLGHATEIRRRARWRQKNDRRDAELILDLMLHNEFPRLHRPAVQSREVLRMLRYRQKLIKMRTMSKNSLQAIALQAGLAKGSRLFTKAGQQELGTAEMTPVLHWQREHWLQLMEPLNQQLLETMGWFKAQSKGDVSITRLRTHPGIGLLTSLCLVHTLQPVSRFRNTRKVAAYAGFDPIERSSGERKCFLGISKAGSRLLRYLLVEAAQTAVRKDEDLKRFYKRLADRRGRPKAKVAAARKLLIRAYIMLRDEIDYAEFRHRAVAARLARRGQGPSNVPEVLIGQPASPEQ

SEQ ID NO: 305347 - protein, 366 aa, unidentified
MLIIGCDYHPSVQQIAWADTETGECGEKRLMHSDGEAERFYRELKQKGVQVRVGMEATGHSRWFERLLAELGFELWVGDPAEISARRVRKQRNDRRDAEHILKLLMEDRFPKIWTPSPENRDVRQLLLHRHRLVGMRTRVMNQLQAIAMNEGMREKKGLWSKKGRARLESFSLAPWASRRRQELLELLDRLRPMIDELSKAIEQEAERRTEVRLLMTHPGVGSITALAFVLIIGTPERFHCGRQIASYLGLIPCEDSSADHWRLGHLSKQGNALMRFLLVEAAQTVARCEPEWRQYYFHLVLRRGRSIATVALARKLAVRLYWMWRKGQDYQQVKKFGSHAGQLETPNGVKSITVKLIEHPAPSIA

SEQ ID NO: 305348 - protein, 394 aa, unidentified
MILVGIDVGKNSHYFTVVNKDDGEVLLEPRKINNNLEGFDSLLSSIKPYKNSDILIGMEDTGHYHFALMKYLLDKKYTVALINPVTTDLTRRANGSVSKTDKLDTLTICDILASSNIKKPYRISKVNRFDLYEQRCLTRHHHNLKEELNVYSNRLQKCIDIVFPEFNDLFTSKYGTVYNNILKTFTSAANIASADIRSLRKCFEFKGQGKRISLTADKLKQAAKDSIGIDSISEVIQIRHLIDQIELINKQIKEIDKKIEEFSKQVNSPILSTPGISHFSGTSILAEIGDINNFSNHRQLIKYAGVAPLTYESSKFKAQHTSITKKGSKYLRKTLYQIILPVINNNETFKKYYDLKISQGKSHRCACGHCVRKLLRIIFHLLKTGQSFDSALVR

SEQ ID NO: 305349 - protein, 414 aa, unidentified
MSSILNIGVDISMRTAAVSFLSQEGNYLGKTFEIPNNPSGFERLEERIRAVLSTQPFSEIRLGLEATGLYGFHLTDYFGRVSFDCDIRVYLINAKYVSRFKKAFPEREKTDLVDAQVIAEYLRFGKLPAEYKPEALYLPLQRLVRYRYHLIKTIEREKKLFLANLFLLFPGWVQEKPIKGLGKSALEVINELSLDEITEMSLEELALFVAKAGNNRSPDPAALAEKIKQAAQESYRIRPQLAGCCKFVLASTTRTLSALKANLKEVDQAIAEEGEGFINPLLSVKGIGPVYASGILASIGDVKRFSSDDKLAKMAGLVWKRKQSGETESEEKRLVKECDKYLRYYLVEAANSLRVHNEEYRLYYQKKYPEVTKHKHKRALVLSARKLVRLVFALLTKNRLYDPNLAFQSARPSV

SEQ ID NO: 305350 - protein, 324 aa, unidentified
MSDAIVGIDIAKANFHAALIDDAGEHARSFPNNAKGFAQLERWLRNRKVSHVHACLEATGAYGDALAIALYEAGHIVSVVNPARVKGFAQSELARNKTDALDAGVIARFCKAMAPPPWTPPSPEIRALQALTRRLSSLIDARAQEYTRAETPGIVEVVTDSIRAHIDHLDGQIRELEAQITDHIDRHPTLREQRELLASIPGIGTATSARFIGEVPDVTKFASAKQLSAFIGLSPQQVQSGSSVRRKARLSKRGNARLRKDLYFPAIAAIRFNPIVRRFAERLRAAGKSKMLIIGAVMRKLVHIAYGVLKHRRPFDPNFNTVPA

SEQ ID NO: 305351 - protein, 337 aa, unidentified
MTLYCGIDLHSNNSVVAVLDEQDRTVYEKRLPNDIATITEALCIYQSELAACVVESTYNWYWLVDGLMAADFPVRLAHTSALPEYSGLKYSNDFSDARHLAHLLRLGLLPTGYIYPKEERALRDLLRRRLLLVRQRSLHHVSLQSLIARHSGQRLNTLQIKQLTKGQLADYLQGHALLGGEITHQARCWLERAVSKIEQELAPHIKPRKDYQLLQSVPGVGSVLGTTIALETGTIERFASPGNYASYARCVKSEKISNKKYKGQGNKKNGNKYLAWAFMEAGHYAAIWDPRIKRFYQRKKAKAHILVAKKAVANKLARACYHMLKRGEAFDVTRAFS

SEQ ID NO: 305352 - protein, 402 aa, unidentified
MNAVGIDVSKGKSMVAIMRPFGEIVSAPFEIKHTASDINSLVELINSVEGESRIVMEHTGRYYEVLAHQLSEANLFVSAINPKLIKDFDNDSLRKVKSDKADAVKIARYALDKWQNLKQYSVMDELRNQLKTMNRQFSFYMKHKTAMKNNLIGILDQTYPGVNTYFDSPARSDGSQKWVDFASTYWHVDCVRKMSLNAFIDHYQNWCKRKKYNFSQSKAEEIYGKAKELVPVLPKDDITKLIIKQAVNQLNIASATVESLRTLMNETASQLPEYPVVMAMKGVGTSLGPQLMAEIGDVSRFTHKGAITAFAGVDPGVNESGSYEQKNVPTSKRGSSNLRKTLFQVMDALIKTHPQDDLVYQFIDKKRAQGKPYYVYMTAGANKFLRIYYGRVKEYLSSLPES

SEQ ID NO: 305353 - protein, 406 aa, unidentified
MLFVGDDWAEDHHDVEIQDETGRRLAKARLPEGISGIARLHQLVGRFLPEDGDGAGVKIGIETDRGPWVAALVASGYQVYAINPLQSARARQGHDVSGAKSDAGDAHVLADLVRTQSHQLRTVAGDSENAGATKVLTRMHQSLIWDRTRQVLRLRSALREFFPAALEAYEDLAFPDVLELLTKAPEPDSAARLTRAQITAALTRARRRDREAKTAAIMAALRTEHLRQPPLIAAAYGATVRALAVLITTSNEQIAALEGQVEACFGQHPDAEIYLSQPGLGAVLGARVLAEFGDDPTRYDGARARKNYAGTSPITRASGKKKVVLARYVRNNRLADALHHQAFSALSGSPGARAYYDALRDRDISYNAALRQLGNRLVGILHGCLKTHTHYDEAVAWNQHTQQAAA

SEQ ID NO: 305354 - protein, 413 aa, unidentified
MVKREKIELVKRQRIFVGIDIAGSKHRARFIDNMGEEQIKPLSFFNDREGLEKLERRVNEIPGIGDDIIFGLEPTGDYWKPVAQYLREKGYPVVLINPYHLKRTKEIIDNSQDKTDDKDSYLIADLTKQSKYFFPVIPEGVYAELREVSINWKRTSQQLARLKCHLSNFLAKYFPEYKGIFSDILGKTSLYILKHFPLPEDIERLGINKLYRVMKKVSKGSIKEGKIQLLYEKARTSIGLKGGSQTAKVLLKEVLSDIEILKKRKEKLTKMMDELLYQSGYLKNLLSIPGVGIVAGSLFLGEIGDPDNYERASQIEKMAGLNLVENSSGAMKGEKKISKRGRSTLRYVGHLVATVAIGKSPEIKALYRYKVEECKKEKMKALTGLSAKMLRIMFAVCKNKTFYKHEEITRYFR

SEQ ID NO: 305355 - protein, 409 aa, unidentified
MEAIFPRCAGLDVHKETVEATSRIWEGRRVEPQTRRWGTMTRELLQMADWMAAQGVTHVAMESTGVFWKPIYNILESRFTVILVNARHLKQVPGRKSDVRDSQWIAQLLQHGLLRASFIPPRPQRELRDLTRHRTQLVAEQTRVANRLHKVLEDANIKLGWVASDILGVSGRAMIRALMEGEQDAAPLADRAQKQLRGKIPELERALEGRVTDHHRFMLRLLWKELASLEELIAELEGKIKQMTRPFTPCIQRLDPVPGVDRRIAEVVLAEVGADVHAFPSHQHLASWAGMCPGNEESAGKRKRSRTTKGNRWLRQALVQAAWAASHSKSSYLAAQFRRLAGRRGKKRALIAVGHSILVTVYHLLKYRTTYSDLGSDFFDRLHHDRLTRYHVKRLESLGHKVALEPVAA

SEQ ID NO: 305356 - protein, 436 aa, unidentified
MLAIWRRPIPSPFAGERDIALRRSRITIALVLAALLFSLGPATATSELRGTGDLGIVVERAAGSIVIVDTTRRIALGRVEGLGDLDVAMEETAICVIDREGKVVLETMVTTDPDAILKVLKPYLSKLRRAGHEAGSLSPWLQVELKQRGVPAICLEAWHARAALSAMRNKTDKADARGIAHIMRAGWFREVHVKSEESYRLRLLLTQRRNLKRKFLDIENAIRHSIKTFGLRIGRVGRGQFEARVRELVADDSLVAGLTDCMLRARAALWQEYPRLHEVVVAIVRRDELCRRFMRIPGVGPISALAFKTAIDDPHRFRHSKTVGACLGLTSRRWQSGSSIDVQGHISRAGDGDVRHPLYEAANGMLTRYRGFCSLKAWGLKIPKTRGYKRACVAVARKLAVIMHAMWRDGSEFRFKEPKPPVGRTSTAPKLIGAAM

SEQ ID NO: 305357 - protein, 391 aa, unidentified
MIYIGIDVAKDKHDCFITNSDSEVLFKAFTIFNNLDGFNYLYQKIESVMDDVTKVKVGLEATGHYSYNLLGYLIDKGLPTYVINPLHTNLYRKSLSLRQTKTDKVDARTIASILMSDVNLKSYSDISYHNEELKSLTRYRFDKVKERAKLKTSVSRLVCILFPELEKLVPTLHMASVYALLSEFPSAKHVATAHLTRLTNLLSESSKGRYGKDTAITFRDSARASIGSNMPAKSLELKHTIKLIQELDSEIDEIENEIKIIMDEINSPILSIPGINYRMGSMIIAEIGDFNRFDSPDKILAYAGFSPSTYQSGQLDGAYAHMEKRGSRYLRYALYNATKYVCHWDPTFAAYLAKKRAEGKHYNVAISHAVKKLVRVIYHLEKTKQQYIKAA

SEQ ID NO: 305358 - protein, 449 aa, unidentified
MPTVRTNAGGIDIGATEIYVAVPPDRAALPVRKFGTFTEELHTLADWLAQCGVTTVAMESTGVYWIPLFQILEDRGIEVCLVNARHVKNVPGRKTDVQDCQWLQFLHAVGLLRASFRPPKEICAVRTVRRHRDNLVRFASQHVQHIQKALTQMNLQLHNVISDITGVTGLAILDAILAGQRNPKTLAQLKDHRIKASARTIEKSLVGDYRPEHLFTLQQSLAGWRFLQTQIHECDAQIHRQLAAFAAKADPTKPLPPAPASRKKPRGNALRFDARTELYRICGVDLTAVPGLDAQLVHTVVSEVGVDLAPRFPSVHHFTSWLGLCPDNRITGGKVLSAHTRKVVTPAATAFRLAAQSAGQSHSSLGDYHRRMRARLGPPKAITATAHKIARIVYAMLTTRTPYNETICAKNDAQILEQRTHRLKNQARKLGYQLIPIPPLTEQPQSLVS

SEQ ID NO: 305359 - protein, 353 aa, unidentified
MSSLTDLREVVDVVIGVDTHVHTHSAAAIDTRTGGVLDEITVEATADGYDQLVEFADEQAALRAWAIEGTGGHGAGLTRHLERREEVVIELDRPERAKRRHGAKSDPLDAIRAAREALSRPRLGSPRSGADRQALSVLLAARRSAVNAATDAQRQVFSLVIAAPEKIRERFRGQKLPAMIKTAAAMRIHPSWDMETTTTVTVLRSLARRARALSEEAAEHEKALRVIVRSWRPDLLEQLGIGPIVAATVLCAWSHPGRIHSEAAFAMLAGVAPIPANSGQVTTRYRLNRYGDRQLNRALHTIVLSRIRHDQTTRDYVARRTSEGKTTREIKRCLKRYIARDLYRLLEHRPITA

SEQ ID NO: 305360 - protein, 418 aa, unidentified
MSGEICIVYPVCCGMDVHKSFIIACIAVTNERGNTEHHIRRFSTFTGELRKLAEWLASYNCRDVCMESTGKYWIPVFNILEKTCNVCLTHPKYVKAIKGKKTDKRDAKRISELFKCDLVRSSFIPPDDIRQLRDLCRYLAKLTNICTSEKNRAQNCLTICNFKLDDVFSDVFGKTASRILDKLFEQGNSDFDVAPLLDPKCKATVEEITAALDGELNASQSEKLKIIRKHQECITELKSTLEAAIFKLAEKYQPQIKLLMSVPGISTPLTAIRILAEIGADMSVFETSKQLVSWAGLCPQNNESGGKKKTTRIGRAGVYLKPLLIQIVLAVVRSNKHPELRNKFLTLKKRRGSKKAVIAIARKLMTAIWHILSKGEFYNAELYHKSDKPLVNRVLTPEQAFALLRSKGYQILEPQPAA

SEQ ID NO: 305361 - protein, 386 aa, unidentified
MQAPTVSTPITGHISTIFVAIELSQKTWLVTLHSPDRDKISRHKVQGGDHASLLALINRVRDRAVQRLGSVPAVVSCYEAGYDGFWLHRLLMKAGITNYVFDPSSIAVDQRARSVKTDRIDGEKMLRTLMAYLRGEPRVVRIVRVPAPEQEDARRDTRERGRLTKEQTAHTNRIKALLRLHGFAVGQPRRRDWLTWLAGQRDWQGQGVPPRVLSEIENEHARLMLVRKQLDALERTPAAADPAPAVAEVVRRSELLQRLKSLGPAFAKTLTQEVFYKDFRNRREVASYFGLAPSPWQSGGTDRDQGISKAGNPRARCSAVELSWLWLRHQPDSELSRWFRQRTLNAGKRTKRIAIVALARKLVVALWRYLTTGLVPAGAVLKSAKA

SEQ ID NO: 305362 - protein, 376 aa, unidentified
MRNNAFVPRDYDVFAGLDVDKKSISVTFTNHQGFIRSLHMPYSVEHLVNHVRKHFPDQKVAFAYEAGPTGYGLYDGLVANSYPCLIASPSMIPKAPGQRVKTNRLDGVSLSENLRGGQLKSIHVPSPVYRELRHLTQLRDTFVSEMVGMKQRIKSLLVLEGIGFPPAPAGSQWSFMVKAKLRKLPCSGTVRFKLDELLDSLEFNEKRVVKTTQQIRRFCQNDPELSRCIEYVMSVSGIGWIVASQLLARIGDWRELKNVRQLGGFLGLVPTEHSTGDRTDRGSITHTGDGRLRSKLIQASWSAIRQDDELREFFGSVCQSHARHLASRVAIVAVARKLSVRISVVLMKQRAYVVREKVESAPLTQEETSPQGTTRR

SEQ ID NO: 305363 - protein, 341 aa, unidentified
MNNTTTITIDLAKEVFQVAVFSKFGKQIINKAVNSKKLQLLVIQYPEASIYMEACGSAHYWGRRFTQLGHQTHLIPPHLVAKYRTGNKNDKNDAVAIYEASKNPAIYFVSIRTLEQQDLATQHKLRNGYVKQRTQLGNRIRGFAMEYGVKFPLGINRLRQLIPAALEDAENELTPVARACLNHLYLQLLSLNDIIEETTHTLVNHAKQIDACVRLEKIPGVGWLVASMLYARLGNGSAFRRGRDASASLGLVPSHSGSGGKNRLGGITKRGDKYLRCLLVHGARSTLHRVHNKEDGLSQWVRHQLATKHANNTAVALANKMVRMAWSVLRTGNDYKVPVAQ

SEQ ID NO: 305364 - protein, 402 aa, unidentified
MNAVGIDVSKGKSMVAIMRPFGEIVSTPFEIKHTSSDINSLVKLIKSIEGESRIVMEHTGRYYEVLAHQLSEANLFVSAINPKLIKDFDNDSLRKVKTDKADSVKIARYALDKWQNLKQYSVMDELRNQLKTMNRQFGFYMKHKTAMKNNLIGILDQTYPGVNTYFDSPARSDGSQKWVDFASTYWHVDCVRKMSINAFIDHYQNWCKRKKYNFSKSKAEEIYGKAKELVPVLPKDDITKLIIKQAVDQLNSASITVESLRTLMNETASKLPEYPVVMAMKGVGTSLGPQLMAEIGDVSRFTHKGAITAFAGVDPGVNESGSYEQKSVPTSKRGSSDLRKTLFQVMDVLIKTHPQDDPVYQFLDKKRAQKKPYYVYMTAGANKFLRIYYGRVKEYLASLPES

SEQ ID NO: 305365 - protein, 369 aa, unidentified
MGDRITYIGLDVHKDGIVVAVAEGGRRGEVREYGRIANTPAALQRLARKLSRAGVKLRFCYEAGPCGYGIQRQLSALGHECVVVAPSLIPKRAGDRVKTDRRDAASLAKLHRAGELTAVWVPDPGHEAMRDLVRARLDAVRALRRARQQLSGFLLRHGCHYGRPAWTKLHRRWLAGLKFEQAVHHIVLEDYIAAVEAAEARRDRLTAQIEAMLPDWTLAPVVAALQTMRGMALVNAATLVAELGDLSRFANPRQLMAYLGLVPSEHSSGGSTRRGGLTKAGNSAARRLLIEAAWTYRFPARVSRELRLRQEEQPRPIREIAWKAQLRLCARYRKLARSGKPANVVTAAIARELAGFIWAIARHVSPAAG

SEQ ID NO: 305366 - protein, 335 aa, unidentified
MPMTTMNSQGGAPGGLERPNCGIDVSKAHLDVRLGDEDLRLTNDSAGWGQTIAKLKKADVDLVVVEATGGYERGLVCAMQEAAITVARVNPRQARDFAKSMGVLAKTDKVDARMLRDFADVLTRHPGRAKYVTPMVEPERQALLELVTRRRQLIEMRVAESNRLDHAGKLTKRGILSVIKLLDKQIKAIDDEIDDNLEKHFKPQKDLLDSVKGVGPATIMSLVAALPELGRLDRRSIAKLVGVAPLANDSGQRRGKRSIWGGRASVRSVVYMAALVATQHNPVISAFYARLLAAGKPKKVALVACMRKLLTILNAMLRDAKSWDAAKALNLAPAA

SEQ ID NO: 305367 - protein, 401 aa, unidentified
MREFSPEQHWIETESALERVGNAGQEERHAAYVGLDVHKETITVAVAEPGRGEPVYWGEIANKPKTVEKLLGKLSEAYGGGLLRLCYEAGPCGYVLYRQILASGHDCQVVAPSKIPKAPGERIKTDRRDALKLARLLRSGDLTAVWVPDQEQEMMRDLSRARDDMKSQERKARQQLNAFLLRHGHHWPRGKSRWTPAHENWLAGLKMDHPWQQVVLQEYIDAERAAGERVAQLSDHLMRALPEWSLAPVVDALIALRGVDKLAAIVLLAELGDISRFESPRQLMGFLGLVPSEHSSGGRRRQGAITLTGNGHARRMLVESAWSYRFPARQTKHLKGKARNASPEAKKIAWKAQTRLCGRYRTLTRAGKNTKLVCVAIARELAGFIWDIVRQEMPRLALQEG

SEQ ID NO: 305368 - protein, 328 aa, unidentified
MSIITVGIDLAKNVFAVHGVDDNGKSALVKPKVSREHLLPLVAQLPPCVIGMEACSGAHHWARLFRQHGHTVKLMAPKFVTPYRMGGKRGKNDAADAAAICEAVTRPNMRFVPIKEEHQQIILCLHRTRQGFVEERTATYNRLRGLIAEFGIVLPQKVANLRRHIGARLEDLPGFANQCVGDLLSHADQLDVRIAEYDRLIAKVAREDARSKRLMQRPGIGPVTASALLASIGGGHDFKNGRQVAAWIGLTPGQHSSGGKDRLGRITKAGDHYLRTLLVLGARTILNTLGDKQDHFSRWARNLVARRGGMGARRSPLPQRMHGWRGRC

SEQ ID NO: 305369 - protein, 314 aa, unidentified
MSSKVIVGIDVSKARLDCFGLPMQEAWSCDNGPEGIERLVHRLRELDCELALMEATGGYETQAATALAAAGLRVAMVNPRQVRHFAKALNKLAKTDRIDARVLAEFAHSVNPQVRPLPDEHTRELSELLARRAQLVGMRTQEKNRLGQAAGRLREGIKTHIKWLDVEITKLEADLSAKLHASEAWCDKRDLLLSAPGVGPTTTFALLAELPELGQLNRQRIAALVGVAPLNDDSGKHQGRRFTWGGRASIRSVLYMAAVSAMRHNPLIRVFYQRLREKGKPFKVAIVACMRKLLTILNAMVKHNKPWQSLPQTA

SEQ ID NO: 305370 - protein, 403 aa, unidentified
MTMRRRAWVGIDVGKTSHHACAIDETGKVVWNQKVSNEQRAIEQLVSRACKGVEQVRWAIDLTSPMALMLITVLLCAEQSVVYVPGRTVNTMTHAFRGEGKADAKDARVIAETARLRNDLSNVVLPDELVVELTQLTGYRADLMADWVRGINRLRALLGSIFPGLEAAFDYSTRTPLILVCGLCTPAEIRVAGIDGMTALLVANHAWPTGIVKSAATAVALANEQPLALPGEAGTAALIKRLARKLLELDREIKDIDKTITARFREHPHARIIESLPGFGPGLGAEFLVVTRGDLASFATAGRLASYAGLVPVPKDSGRVTGNLRRPKRYNRRLRRVFYLAALSSLRADGPSRRFYDRKRTERLIHTQALLALARRLIDVLWALLRDDREFTPEKPTAATAAA

SEQ ID NO: 305371 - protein, 351 aa, unidentified
MKEFIAFDSHKRYTLVEREDVETGKTKQFRVEHCPGAIRQCLVGRGKGTAVAVEATGNWYWIVDEIEQAGLEPKLVHPRKAKLMMGMINKTDKLDVHGLNRLQRNGTLPTVWIPPRELRDQREITRARMVMTAHRTRLKNRIQATLSKYGWAGTEASDPFGKKARKELERMIEQLPCQTAHITEVLLEQLDFVQGHIEQIESRIRELVQDTPEMDLLRSLPGIGWILSAITGLEIGSIQRFASAERYASYSGTTPRVHASGDKIRYGRFRPDVNRYLRWAYIEAAHSVALHRGTYPSRHVSRLYERIRTRKGHPKAIGAVARHLAEATYHVLTRGKPYRDPVMKKGRSREV

SEQ ID NO: 305372 - protein, 323 aa, unidentified
MKKSIGIDVSMNTVDVVRYDGKFTKNTQYKNTVEGFQKLEDEISKGDTSETIITMEATGIYHLQAAYYFSEKGYTVSVVNPLIIKRYSEMKMLRAKTDSVDARTIAEYGFHEKPWYFIQKDDGRDHIVQLLKQIDALHAMQTENRNRLHALQRIPHADIRTLEIYQEIDTMLKRKEQEAEQRIDTIAKELYADVYKSLLDIPGVGKRLAALILGFFGEFENFNNAKQVSSFIGLNPSANQSGVSVHGRGVISKKGNRYMRKIFYMAALSAKEYNKTCREQYNRLISNGKCKKVALVAVANKLARQIFAIVKNGMIYDPCYQKI

SEQ ID NO: 305373 - protein, 288 aa, unidentified
MKRTTKYVGLDVHQATIVAVVRDETGRVIARTILPTEAAALTAFVGPWRGRVEVAYEEGTQAQWLHDLLRPLVARVVVCDRRAVRRQGNKSDWRDAEELAAMLQRGAIRSVYHGGGPQQAELKELTRTYVTLVQDATRVMTRVKALYRARAIPTRGRGVYHAGERATWLAKLPAGGVGFRATTLYRQLEVLLALRTGAKAALLGAARRDPAWALLQTIPFLGPVRVALLLGIVQTPWRFRTKRHLWAYAGLAVVTRTTAEWRNSAIPRVYQALSFGVHAANSGRECRP

SEQ ID NO: 305374 - protein, 465 aa, unidentified
MRKTRKHTLPRQPKGQPAQPQPPKLDALAQINHHAAGLDIGDAEIYAAVPESASDPAVRVFGTFTTDLQALADWLAACQVDTVAMESTGVYWVPIYELLEARGFQVYLVNARQLKNVSGKKTDILDCQWIQQLHTYGLLQPSFRPPEDICALRALIRHRGNLLRSCTAEIQHMQKALQQMNLKLTNVLSDITGLTGLAIIRDIVAGERDPHKLAQHRDPHCHKSEAEIAASLTGNYKAEHLFVLKQALAAYDFYQAQLAACDAETARMYQDLDAQVDPVTQPLPPARRPHRRRGNEPRFDLRTELYRMAGVDLTTVDGLDVLTVQAVLTETGVDMTPWRTSKHFASWLSLCPENAKTGGKIIKRGTRPGANRAALALRLAARSLHHSDSALGAFYRRMCSKLGKPQAVTATAHKLARIIYAMLKSKTPYNDPGADHLEAQVQERKLKQLQRQAKELGYELTPVAA

SEQ ID NO: 305375 - protein, 349 aa, unidentified
MSQNLNSAVAVIGIDIGKNSFHVVGLDERGAIVLRQKWSRGQIEVRLANMPPCLIGMEACVGAHHLSRKLKAFGHDARLMPAKYVRPYSKGQKNDFRDAEAIAEAVQRPTMKFVATKTAEQLDLQALHRVRERLVSQRTGIINQIRAFLLERGVAVRQGLRFLRAELPRILATPSDVLSPGMVQVIRDLAEDWRRLDERIDQLSSEIAILARHDAGCERLMSVPGIGPIISSAMVAAIGTGDAFVKGRDFAAWLGLVPKQMSTGDRTILGKISKRGNRYLRVLFVQAAWVVLIKPMSWERHGLKRWIEAARKRLHRNVLAIALANKLARIAWGVLAGSRTFEASKLQAA

SEQ ID NO: 305376 - protein, 324 aa, unidentified
MNVTDPHTPPSPAVEHFVGVDVAKHKLDVAVLPTRESFTLDYTDEGLAALVARLAALRPALVVVEATGGYERRVAGELADAGVPVAVVNPARVRHLARGTGTLAKNDRLDAFNHALFAQLVRPAPREKGPEKRAELDALVTRRRQLVGMIVMETNRLKQLPAGRARDSVAKVRTHLAAERALVDKAIFELLRSDDGWDGRLDLLTSVPGVGVTTAATLVAELPELGKLNRRQVASLVGLAPFDRDSGTLRGRRFIAGGRKGVRVALHMAALTATRCNPAIRAQYRRLRAAGKSFRCAMVACARKLLTILNGLAARNEHWKPQPA

SEQ ID NO: 305377 - protein, 412 aa, unidentified
MQVIHRVCCGIDVHAKMLVACLILANGEKQKRTFSTMTAELLQLRDWLVAVQCTHVAIESTGVYWKPVFNILEDALTVILINPEHAHALRGRKTDVKDAEWLADLLRHGLLQPSFIPPPVIRELRELTRYRESVVREQSSVANRIQKLLESGNLKLGQVASDALGVSGRMILKALAKGESDPRKLAALARGKLKEKSLSLEQALQGRLTVNQRFVLGELLSRWEQLEAADARVTGEIDKYVQANPKLARAREQLDTIPGIGPRVAEVIMAEIGIEMAAVFADAAHLASWAGICPGNKATGGKRLSGRTRKGNTYLRSALVQAAWGASLKKHCYLSSQFQRLVKRLGRKKALVAVGHSLLVIIFHVLQNDQTYTELGGDYFDRRHVEQQRDYYVRRLQMLGLKVTLEELPQAA

SEQ ID NO: 305378 - protein, 379 aa, unidentified
MNQSTTLFVGLDVHKDSIAVAYAPQERGAEAIFLGPIGTRQCDIERLIRQLHSKAPHLLFLYEAGPCGYWLYRYLQNKGEDCIVVAPSLIPRKPGDRVKTDRRDAVQLARLMRSGDLNPVYVPSVEDESIRDLCRAREDSMGDLKAAKHRLKSFLLRHDIRYAGKAVWNAAHLRWLADEVALPTAAQRIVFQDYVRAITHLMERLAQIERELQEQVKGWRLAPLVWAYEALRGVQFHVAVTIAAELGDLTRFTQPRQLMSYVGLHPSEYSSGSTRRLGGIAKTGNAHARRVLVEGAWAYRYLPKVSRQIQQRQESLPEPIREIAWKAQVRLCKRFRKLVARGKHPNVAVTAIARELVAFMWAIAQQVQLPESVPVQLAS

SEQ ID NO: 305379 - protein, 370 aa, unidentified
MLIIGVDYHPSFQQIAFLNQETGECGERRLNHSDGEAEAFYRDLIAHGIHVLVGLEATGFSRWFERLLAELGIAMWIGNAAEIKTKRVRKQKTDRQDAQLLLKLLLENNFPRVWVPNPENRDLRQLLWHRHRLVQMRTRIMNQLQALAMNEGKRWKNKLWSEQGRAQLEKLPLAPWASRRRKDLLELLDRLDPKIAELTTAVEQEARKWPEVLRLMTHPGVGPLTALAFVLIIGTPERFRCGKQIGSYIGLVPSEDSSAGHQRLGHISKQGNALLRFLLVEAAQAAARCNPDWRRRYFHLAMGRNKNIARVALGRRIAVRLYWMWRNGCEYSPSFEFGSYAGQLGTGHGVNQSAVHLIGHPAPCKGSLQK

SEQ ID NO: 305380 - protein, 345 aa, unidentified
MKIVGCDLHTRYQQIAMLDEETGELIERRLEHSSGQAKEFYTQLTGAVRVGIEATGHTRWFERLLAELGHELWIGEAARIRAAEVRKQKTDARDAALLLELLLSGRFPRLWRPSSEERDLRQLLWHRQKLVWMRNAVGNQLHALAMGEGICRKKQLFTRKGRCELQALQLDPWASRRREELLHMLDQLDASLKQFDQAVNEQSACAPEAVRLMTHPGVGPVTSLAFVLMVGPVTRFQRSKQLVSYLGLNPREHSSGGRQRLGAISKQGNPMLRGLLVEAGHTAARMDPELRQDYQRLRLRRGGSVAKVAIARKLAIRMYWMLRREINYAQLVRMQGSSRATLVQR

SEQ ID NO: 305381 - protein, 415 aa, unidentified
MTATTVTQAEARAQVCQQLETPGTLILGIDAGKGRHVGCVATAQGSVLQKRLAIRGDAVGWVALELALKRWGALTSYVAAMEPTGGYTVCLDQFFRDRGVTVVYVQPLKVKSNRRTLDLSENKSDERDTVNIVDLVRQKKFYLRMERDEANRLLMAGVKRHTVLTQRRTRLVARLRLLLEEHFPELERCFAEVPCPSLLAILRAGAHPEAIRRQPLSAYQKRFAGLRGLAAGRVAAIYRLAQTSVGCRGMEALFQEQLDAWMQDWTAFETQDQATQRRLATLVQASPAYADLNSIPGVGGMTIAAHLAHIPDPGRFPSASRVVKFFGLDVVERSSGQWNPTQRHISKRGSPIMRKALYNAALACLQHNPVLRAYYDRLIDRGKRPKVALVALMAKLARLLFALHRDHTQWDPDGV

SEQ ID NO: 305382 - protein, 349 aa, unidentified
MDATTVAVDLAKNVFELAVADSGGRIRAHHRLSRARLLPFFSNLPHCRVVMEACGSAHHFARRFSELGHDVMLLPAQYVRAYVRRNKTDRAYAAALIEAARCADIHPVPIKSVDQQAIQQLHRLRTQWMRTRTARINLLRGMLREFGIAIALGAMRAIEQVRRQLAAPDGTVPAALQPSLTELLAEIAALEQRCTHIERQLRSLTQHDAVVQQLLGIPGVGPLTATAMRAALVDVHRFPSGRHLASWLGLTVREYSSGERRRLGRISKQGDPYLRTLLIHGARAVLNAAQTARRRGQSLDRLRSWALSTHERCGHNKAAVALANKLARIIWATWKHERTFNANWVPTTA

SEQ ID NO: 305383 - protein, 431 aa, unidentified
MKNRTNQRLEEITIGTLIVGVDVAKSVQWARFVDYRGVEIGKAVSFKNDRQGFETIISKINAIFNNKFFKNKFEKIIIGMEPTGHYWKTLANHLMGIGYRVVCVNPYHTKKAKELDDNSQTKCDKKDAITIARLVKDGRYFEPYLPKEEYGELRGLSNARVSVIKRNNAIKNTIIAILDEYFPEIYEAFKNPLKGKASRQILRSCPFPEFILNMSEEDILCEVKKAVKKTVGMKKVRELIKIAGTSIGIKYGLEAAKMRLKMLIDELDLIEKQLEQIENAMENMIRRIEYAEQILAIKGIGIVTAASFLGEVGNPLRFDNARQIVNYAGYNLVEDSSGKSKSGTCISKRGRKQLRSVLYQMAFTMVGKNPEMKELYRYLTTRQKNPLKKKQALVVVSKKIITVIYSLLKKQEAYNPELVLGAVRKEMLKAA

SEQ ID NO: 305384 - protein, 388 aa, unidentified
MPQLKDDLSKSLVALDQNRTLIAVVELSQSSWLVGAIVPGIDRHPEKKLEPDQEALLRLLQRWRDEAVKAGRTIARIAVAFEAGRDGCWLARWLRARGIEAHVIHPTSIPVSREHRRAKTDRLDVGLLKRAFLGWLRGEPGHCGMVAIPTLEEEDAKRPNRERENLVGERTRIINRMKGTFARLGIRGFNPKLRKAPDRLATLRTPEGEPIPPNTLAELQRDMARLRFVTEQTKQIEAGRLDELQRRPGERPNAMVLQLTRARGVGIETADMLVHEVFCRDLRDQRAVARYAGLTGSPDESGSRRREKGLAKAGNPRVRRGMIQLAWRFLVHQRDSALSQWYRACVTAGKRRKTMIVALARKLLIALWRFATAGEIPQGVDLRPAMSN

SEQ ID NO: 305385 - protein, 365 aa, unidentified
MRTIIGLDVSKASAKLSVAVDGKTTYDGDITLDAIGFQSLNSIIQSYGGAEVVFEATGVYSRRLEKYLIDNSILYHILNPLVAKKRLDDGSRMRKNDVRDARGLAITEFTKEPVPYVPRFSDPLYRELSDMSRYYDQQTEDIKREKNRVHKLIQLSFPNFTDEIDVDNISSLEVLRLFPHPDTIKGHTVTEIADIILELGLRGIGQGRARTLAERLWRAHSVSYPAIESSSFVVKQLRQQVTNIIEMTVEREVVISNMINLAKKLPEFDILLSIPSIAENTAVRLIGELGDVRRFEKRSQLNSFIGLDLTEIQSGDYIAQRHITKHGNPHARKLLYWTVVNMVNSTAQPNHIRDRYEKKRATARR

SEQ ID NO: 305386 - protein, 344 aa, unidentified
MSEVTTIGLDIAKNVFHAHGADERGRVVFSKRISRGKLLEFFAAQRHCMVALEACGGAHHWARQLIQLGHQVRLIPPSYVKPFVKRHKNDAVDAEAICEAAQRPSMRFVAVKGEQQQAAGLVFRTRDLLVKQRTQLINAIRGHLSEYGWVAPKGPSHVAMLADLLEEKEMASTLPEAARTMLRVMLDLLGNLDDHIKELDKEIARRAREDEVSRRLMTIPGIGPIGATAIAALAPPAETFAKGRDFAAWLGLTPIQRSTGGKQKLGATSKMGERTLRRLLIIGSSSVVLQASKRGAPKGSWLERMLARKPRMLVTVALANKTARVVWALLVKQEDYKAPVAALA

SEQ ID NO: 305387 - protein, 337 aa, unidentified
MQVSLIGIDLAKNILQVAGVNRAGRQIFNKTIKRNKLLDCLRQYPDCIIAMEACSGSNYWGRTLEAQGFEVRLIPPNHVKPFVKGNKNDRNDAFAITEAAVRPHMQFVKPRTLEQTNAFMLHKVRERWVHQKVALTNQLRGLLSEYGIVIGLGDSVLRAQLADILEDADNGLSLSTRVLIQAIWQEWSETEERLAGLNKQMEATAKQDADCQRLMGIKGVSTITATAIKAFAGDGKQFKNGRHFSANLGLVPKEHSSGGKQSLGGITKRGNSYIRRLLVQGAWSVLRYAEGSEDRLSQWALKVLERRGKHKAVVAIANKMARICWSLLANQTEYRAV

SEQ ID NO: 305388 - protein, 361 aa, unidentified
MSIVLFGGLDVHQKSIAAHVFCPETGEFFEDEFPNERQHLVRAVSRWQRTGEVRLCYEASSAGFVVKRWLDEVGVSCEVIAPAFVPKGPGDRIKTDRRDARRLAQFYASGMLRVVRVPTRDEETVRAVVRHRDDLTRDMTRCKNRTLKFLGLQGHRYTGGSNWTQGHRRWLNQLELEPDQALVLRSHLGCLDHLEIQREDVDRRIHELAQTPAYAKRVQRLMSLRGVGVYTAMVLLTEIGDAHRFGKAKELMSYLGLVPRQSNSGTTRHSGGITKVGNTRARWILAETAWRQTTPPGNSKRLRQHWTSQPAEVVAIAKKAEKRLHHKFWKIAVRVDRKTAATAVARELAGFVWAMLTLEAA

SEQ ID NO: 305389 - protein, 394 aa, unidentified
MKLVGIDVGKNSHHFCVMDKENGEFNVTPTSFSNNKEGFDFLINSLKPYSKKSILLGMEDTGHYHVALLKFLLSNGYPVALINPKTTDLTRKMEGGITKNDKLDTITICDVLDTPERKKQYRITKVDRFDLYEQRQLTRHHHNLKEELNVYCNRLQKSIDLVFPEFNTLFSSKYSIVYMNLLKTFGSAEAIASTDIRTIRKCFEIKGRGNRISLTPEKLKECAKNSIGISSEVETIQIKHLVSQITLIKEQIAEIDKKIEEFSITNNSPILSIPGISHFSGTSILAELGDIGNYSKPSQIIKFAGVAPYHYESSQYNAQHTGITKKGSKYLRKTLYQIILTVINNNPVFKKYYRLKISQGKGHRCAQGHCIRKLLRIIYHLLETGQSFDPALLR

SEQ ID NO: 305390 - protein, 345 aa, unidentified
MQITTIGLDLAKSVFQVHGVDAEGKVAVRRKLRRAQIRQFFAGLAPCLIGMEACGTAHFWARELMAMGHQVKIMPPSYVKAYLRRGKNDAADAAAICEAVMRPHMRFVPVKTEEQQAALMLHKARELLVRQQTMLINAVRGHMAELGMSAPQGSAKIKDLIAVIQDSEDQSIPALARAALQPLVRQLHTLDEQVETLDREIKAWHTRNETSRRLATIPGIGVLTASAIAATVPDPSFFSSGREFAAWLGLTPRQNSSGGKERLGRISKKGNTYIRRLLVTGATSMLRFARAKTAAGADWVNGLLQRRPARLVTVAMANKTARIAWAVMVRGENFRVPVRPMTEAA

SEQ ID NO: 305391 - protein, 316 aa, unidentified
MAKREVWVGIDVSKRRLDVALGVHGELLQVDNDPGGFTVLLEKLGALGPELIVLEASGGYETALVGELVDAKLPVVVVNPRQVRDFARAIGQLAKTDALDARVLALFGERVRPPLRALPDEVGRELKAVTARRRQVVEMLVAEQNRLGQAPRMLHHQLRAHLDYLRKDLARLNRDLDQTLRRSPLWRETEELLRSVPGVGPVLARTLLAELPELGRLSRREIGKLVGLAPLNRDSGMMRGRRTIWGGRASVRAALYMPTMVATHKNPVIAAFYNRLLAAGKPGKVARAAAMRKLLTILNAMLKHHTRWSPLCLPIA

SEQ ID NO: 305392 - protein, 410 aa, unidentified
MDLYCGIDWAEGHHDIAIVDSAGDLLAKRRITDDAAGYRALMELLAEHGDTPEDPVPVAIETSHGLLVAALRAGTRKIYAVNPLSAARYRDRHGVSKKKSDPGDALVLANILRTDAHAHRPLPADTDQARAITVLARAQQDAVWARQQTANQLRSVLRQFYPALLQAGSVWQNGLARPETRELLRIAPTPGAAARLSTARIEAALRRAGRSRGIAAQAQRIKLILRGDHARQPQAVEDAMGQQVSGLLHLLDAACQAVDQLSIAVEEAFLAHPDAQILLSFPGIGTQLGARILAEIGDDRNRFSDARALKAYAGSAPITRASGKKKFVGRRFVKNDRLSTAGYMWALSALTGSPGARAHYQRRRAAGDWHAAAQRNLFNRLLGQLHHCLNTRTHFDEATAFTPRAADLAA

SEQ ID NO: 305393 - protein, 357 aa, unidentified
MRIIGCDLHTRQETMAMVDTETGEVVEKTLQHEGEKVREFYSALPRPVQVGIEATGSMLWFLNLMEELGIDSQVGHPAKIRAAEPRKQKHDRRDADLLLKLLMENRFPSIWMPSKELRDLRALLWHRHQWVRTRTRVQNALQAMALTNGLRRGKSLWSQEGQHAIASLPLGPHAAHRRTALQALYRELDADINALDKRVLEQALERPEARRLMTHPGVGPVTALATDVFLGDPVRFEDAKALASYVGMIPSEYSSAGRQRLGGLSKQGNPLLRFLWCEAAVHAVRRDPLLQRFYRRKLVQKGMGKARVAVARKLGIRLYIMLRDQIDYEEFCRRGQMRQKSGAARAGIPEVGYGPSL

SEQ ID NO: 305394 - protein, 410 aa, unidentified
MQVKYDRCCGIDVHKDTVVACVIVSGASGHVQKTTRTFSTMTGDLTALAQWLTETGCTQVAMESTGVYWKPVYNLLEGAFEILVVNAAHIKKFGNKTDVTDAEWLADLLRHGLLRGSFIPSALQRALRDLTRYRTRLIDDRSREVNRVQKVLEDANLKLASVASDVMGVSGRAILGQLIQGQGDPAVLADLAKGRLREKRAALEQALVGRFTAHHRFMLVQHLSHIDYLDEQIARLDAEIAAQIRPFQAAVDRWDQLPGINQRSGQVVVAEVGADLKPFADSAHLASWGGLCPGNQESAGKRQSGKTRKGSKWLRRALVEAAHSAARTKNTYFATLYHRLAGRRGKKRALVAVGHSLLVTGYTLITRQVDYQDLGANYFDELNKEAVKRRTVKRLEQLGFQVELKPLAAN

SEQ ID NO: 305395 - protein, 371 aa, unidentified
MEHSTFVGLDVHKRSTSVTIAEAGRGGEVRFHGEIPTTPEALRRLVGQLERPDRRLHFCYEAGPCGYGVHRLLRGQGQDCIVVAPSLIPSRPGDRVKTNRRDATALAKLHRAGELTEVWVPDDAHEAMRDLVRARATARRVLGKARQHLQGFLLRHGRIHTGTRGWTRAFRRWLTTVRFDHPAQQIVLQDYIHAVDDGESRLTRLERQIEDLLPSWSMAPVVEAIQAMRGVGLIVAVTVVAEVGDFSRFANPRQLMAYLGLVPSEHSSGTSVRRGGITKAGSALARRVLIEGAWTYRMQARVSRKLLDRIEHLPKEIRDIAWRAQLRLCNRYRRLAAAGKPKVVVTTAIAREMVGFIWAIACTVQPRPAIG

SEQ ID NO: 305396 - protein, 438 aa, unidentified
MINPDAAGIDIGSREHFVCVPADRDEQSVRTFKSFTSDLKEMVAWLKKCGIKTIAMESTGIYWIPVFQILETSGFEVILVNARHIKNVPGRKTDVKDSQWIQQLHSYGLLNGSFRPNDQICELRAFTRQRDRLTKNASTHVHRMQKALGEMNIQLHHVISDITGVTGMNIIKAIIDGERDPAKLATLRNNGIKSDEKTIIKALEGDYRKEHLTVLKQELEIYEFYLKQIKECDEAIEECYKKFDKRSDGDLPSDKKQQKSKNAPQFDLKGLLYDAAGVDFTKIPGLSELTAQTIVSEVGLDMSKWDTEKHFASWLGLTPTNKTTGGKVFDTRTKKVKNKASTAFRIAALNLGRGKTAIAGFYRRVKGKLGAPKAITATARKLACMFYRLLKYGQEYVEQGIEAYETRYNETMVVNLQKQAARLGFEVVKIEPLVEAVC

SEQ ID NO: 305397 - protein, 319 aa, unidentified
MRTEPHHWVGIDVSKARFDVCVQPAGTEWQVANTPAQIEALVERMAGLAPERIVLEASGGYEALLVAALAERHLPVVVVNPRQVRDFARATGQLAKTDRIDAQVLARFGEAIRPELRPLPDATARALRALVSRHRQLREMLIAEQNRLVSAAVQDAPQPLRDQLAEHIDWLRRQLRDVDDDVHRQLQASPVWRERENLLRSIPGIGPVTSATLLSQVPELGQLDRKAIAKLAGVAPLNRDSGTLRGVRRVWGGRGAVRAVLYMAALVATRCNPLIKAFYARLRAAGKPAKVALVACMRKLLVLCNSVLRSATPWRAMTP

SEQ ID NO: 305398 - protein, 500 aa, unidentified
MKVMYERVAGIDVHKDMIKVGVRSPGDKAWTRKTEILEYRTFYGVLQLMAADLRKRAVTHVVMEASGVYTEPVYYALCEQDFERVEVINPAHAKALKGHKTDAKDCARLAELYECGLLRGSYIPAAELKELRDLTRYRVKTVQARTSEIQRLGKALESGGIKIGSVVSDITGKSATAMIEALIDGERRGTVLADLAIGRMRTAGKLADLSMALAGRFTEHHAMLCRLHLDRLAVFDTAVSGLDERITARAVPWRREQHLLMSVPGFGDIVSQAWLAEIGPAPHQWFSTCEKLASWVTLSPGNNISAGKRKHGRTGDAGTYIKPMLVQAAWSAIRTPGRLQARYGRLVRRFGGAKNPAAKKKAIIAIAHTLLKIAYQVLKSGMPYQDLGADFYTQRESPQQRQAYLLRQLGKLNPGCTITISPPETRRLTRGSCPRHPRRQSPTPGTPALPPDNLTPPQTLATTQARVRSLGDLAWRVPGEAGLLLCAINGYACLTWCGCG

SEQ ID NO: 305399 - protein, 315 aa, unidentified
MTKLRPSVNVGVDVSKATLDIYLLERDRRFCIPNEPGAIAALISRLGRYRLERIVLEATGRLEQPFVRAALAKGLPVVIVSPLKVRRFAGAIGQLAKTDEIDARLIAQFAATLKPPVQPVADPKAQLIKDLVVRRRQLTSLRTMEKNRRQIMPETLKPSIDRIIETLDREIDSLEEIIRDAIEQHAAWRHKRELLTSMPGIGPSVASTLIGDLPELGALSRRQIAALTGVAPMNRDSGTVRGKRRIRGGRAHSRTALYLSAMVAIRYNPDIKRFYERLLQTGKHKKVALTACIRKIVTALNAMLRDNKPWQPSFA

SEQ ID NO: 305400 - protein, 406 aa, unidentified
MRIIGMDIHRVAAEVVSLLDGQLHRMGRIPMARDSLEAFARKELTHDDHVIVEATGNAAAVAEVLAPHVDRVVIANPKQVRMIAHAKIKTDAIDAAVLAKLYSTGFLPEVWVPDERTLALRRQVARRTQLVRQRVRLKNLIQSILHSHLIPPCPHGNLVGISGRKWIAAQIVPADERAAIERHLAQIDLIESSLKVIEGEIAHEAMADPIIRRLMTLPGVDMVVASGVAAAIGDIRRFADLTKLASYLGLNPSVRQSGEGPAYHGRITKQGRGQARGMLVEAAWAVARSPGPLRAFFQRIASRRGKHIAAVATARKLAMIIWHMLTKGTDYIWMRPALQARKFRSIELRAGLPTSHAKRGSAYDYNIPEKRAEERGRVEAAEQEYANFASRWRAKPRIRKVQVQPT

SEQ ID NO: 305401 - protein, 315 aa, unidentified
MKESQLFVGIDVSKERLDVAVRPTGEIWQVAYDADGINSLTGYLKELTPHLVVVEATGGMELVLAGELAAAHLAVAVVNPRHVRDFARAAGKLAKTDALDAQVLAHFAEAMDPEPRPLPDASTQELGALVARRRQLVGMITAEKNRVRTATRRIRPKVQEHIHWLEENLEDLDQDLGDFMRSSPMWRDKDELLRSTPGVGPVLSMTLLSGLPELGALNRGEIAALVGVAPFNRDSGTMRGKRKVWGGRGQVRAALYMAALVATRYNSVIRDFYQRLCAAGKPKKVALTACMRKLLTILNVMVKHHRHWNPIVQNS

SEQ ID NO: 305402 - protein, 449 aa, unidentified
MAEPQEIEDEEYEQVLERVAAIDVAKASGKVCVRVPHESKPGRRVSRVQDVDATTRAVIELGDHLVCQGVEKVTVESTSDYWRIWFYLLEAAGLDVQLVNAREARNVPGRPKSDKLDAVWLAKLTERGMLRPSFVPPAEIRQLRDYTRLRTDLVQERTRHWARLEKLLEDALIKVSAVASKIDTLSVRDMIEALIAGERSPRVLADLARGKMKAKRAALIEALTGRFDEHHAELARMLLDQIDQLNAQIAKLTDRIGELIGVMPAARGVDADGSTGPSAGAGPDAAVVPALQRLDEIPGIGPGGAQVILAEIGLDMSRFPTAGHLVSWAKLSPRTIQSGARTRGGRTGKGNPYLKGILGEAAAAAAKTDTFLGERYRRLVKRIGKLKALVAVARSILVIIWSLLADPQARYHDLGAGYYASRIDTGRKARNHIRQLEALGFTVTLAPAA

SEQ ID NO: 305403 - protein, 341 aa, unidentified
MIYSFGFDMAKDQFEVCLQQYQLDQQTGHILARNTFDNTPAGYKRWIKWARSRASDPQLPWRVTMEATGVYYEPLALFIQQNHPDIHLAVVLPSRAKKYINSQGFRSKTDKIDAQGLALMGAERRLAPWEGIDPYWRELRSMTRTRADLMDQRTQLRNQLHALTHSGRPCEQVVRSIQACITTLSEQIKQLTQAIYEQLNARDELGPVLDYLLSIPGVGRLTVATLLAETNGFAAFHSISQLISFSGYDVVVKQSGRWTGKPKISKQGSKYMRRAMYMPANAVIRSKKGPLYDYYQRLLDTHNVAMKAHVAVQKKLLTYVYVLWNKQERFDPQHIYSQRAA

SEQ ID NO: 305404 - protein, 482 aa, unidentified
MKKKTIYAGQSQELLRLFEEAGNNAKVMCVPIDYAKKDNVVMFCNGYGDILRKPFSVKNSPEGIEYLSDQVTRSCLSRSINPNHVFFGGEDVGSYAENFANALRAKGWFVGGVNAHDAKKQRANTQASTDRLDLMGIAIMLINRRANCSPAQSGIYLNLRNLVRHRASLVKLSTKVRNQIHTAVDRLLPGFLDEKKTGIAPFSKSSLYLMKDRFSAARIRRKKTDTLTEILRQYGTQNPERAASKLKEYAKAVLIPPNEYIGTLQVSLTQHVRHYGCIRENIDQLEKEIALWLAQTQGAFLTTVRGIGIVLAAGVTAEIGDPNKQKPLNNLVSYAGIIPRVKQTGGPEGNTYTGKVAKRCNRLLKNYVVQSGLHLGLHGPEDLMTDYKRREASGQHADFGIARRYLRMGLCLMRTSQIYLPQRLRHRNVEPKERASYYLMIWPKLRDKWSKLDALNAAFAKDRPLGKWRHMVQELYGITLKL

SEQ ID NO: 305405 - protein, 351 aa, unidentified
MIIIGVDYHPSSQQIAFMDQETGECGERELNHSDGAAERFYRELKERGVSVRVGMEATGHARWFERLLAELGFELWIGDPAEIKTKRVRKQKTDREDARLMLKLLLENRFPRIWIPSPENRDLRQLLWHRHRLVQMRTRIMNQLQAVAMNEGYRWKKKLFGQQGRALLEKLSLAPWASRRRKELLELLDQLDPKIAELTAAVEREANKRPEVVRLMTHPGVGPITGVAYVLVIGTPDRFPCGKKIGSYTGLIPCEDSSAGRQRLGHISKQGNTLLRFLLVEAAQAAARCDADWRRRYMHLMMRREKGIAKVAMARKLAVRLYWMWRNNWQYSQLVEFGSNAGKLGIVHGMK

SEQ ID NO: 305406 - protein, 393 aa, unidentified
MICVGIDVAKDKHDCFILSSEGEVLADVFTIPNNAEGFDTLLQTIRRCARPEDKIKVGLEATGHYSYNILGFLLNEGLDTYVINPLHTNLYRKSLSLRKTKTDRVDARTIAAMLMSDVDLKSYTDTAYHNEELKSLTRYRFDKVRERAKLKQSVSRLVTILFPELEKLVSTLHTASVYALLSEFPGAKQVSEAHLTHLKAVLYDASKGRYGRDMATTFRDAARCSVGSVMSAKSLELRHTIRLIHELDAEIEDIEAAIQSMMGEIQSPITTIPGMGVRMGAMILAEIGDFSRFDSPDKILAYAGMSPSTYQSGQLSLSGAYSHMEKRGSRYLRYALYNATKYVCLWNPTFAAYLAKKRAEGKHYNVALSHATKKLVRLIYALEKSKWPYSTAA

SEQ ID NO: 305407 - protein, 345 aa, unidentified
MKKNIIGIDFSKETFDATLLDCRNSELSEAVQSAVHEKFTNNKEGFQAFVKWIKSSVKKITPDELLLCGEKTGKYSLPLSNFLYAKGYSIWLDSGLRIKRSLGISRGKSDKADSLKIALYAYRYQDMAVCYVPLSKNVSRLKELFLYRQHLVSQVKAMDVRKNVTDDFKKELGDVKFIVDSAAKIIQQIKATIKKCEEKMQELIEEDDELKTTHDSITSIKGISLINATAFIAYTNNFKDFGGNAKKIATYWGVAAFAQESGTSVHKVARVSKIASKMLKSLLTQAARITVRWEPKFRQYFEQLISRGKHQGVALNNVKNKLIHVITALAVSKEKYNREYEYIKR

SEQ ID NO: 305408 - protein, 303 aa, unidentified
MSNVLGIDVGKAEIMVALLVDNKCIGKESFENDYKGFKSLSKWLKQKKISALKVCMEATGNYSNNIAEFLYKSGNEVHIVNPVCIKSFAKSRLIRTKTDAVDALIIAQYANITELIPYKPKSATFKELKSLHRCLDDLKGQCVQISNHLEHKEHVPKSVTSTWKKLLKDFKNEIKNIENSLDELFENNPELKQHRENLQTIPGIGKTTATSILAESPDLSSFKSPRQYAAYAGLVPKHRTSGSSIRGKARLSKLGSSKLRKALYFPAVVAKNHNPILKAFSNKWVFSNISEKRVIANCCIAVF

SEQ ID NO: 305409 - protein, 378 aa, unidentified
MPGRDQAEKLAEWAAAWPERTWAVEGAAGLGRLLAQQLVAAGERVLDVQPKLASRVRLLQAGDTNKNDPNDALSVAIAALRSRTCRQVAAEDHPAVLKVWSKRHRDLARLRNQVACRLHTVLCDLVPGGTSKQISAAQAARILGQVTPSGAAGLARAELAAEFLEDMRHLDAQLRGTRKKLAAAVKVSGTTLTEVFGVGPVIAGTIIGDVGDVARFPGRDHFAAYNGTAPVEVSSGNRKVYRLSLRGNRRINHAIHMAAITQIRHRHSDGRAYYEKKLAEGKTHKEALRSLKRRISDAIFARLQADARQAAASQAKGPGGHPGNNSASSAAGSHPARQLFGQATPGPGTSLRPGTTTDTPTTTATPSKRVSKKTQTTT

SEQ ID NO: 305410 - protein, 438 aa, unidentified
MASQRTVLTLDDAEAVIAAARAKAAEISVPMALDGMGDSPMVCWGVAGRSLTHKDSWVTEQEAPARPIRHLWEAPVFTERTSVGLDVHARSIVAAALDGQTSELHQARLTPSFEHVRSWLATLPGPVAVAYEAGPTGFGLYRDLTAAGIRCEVVAPSKLQRPVGDRVKTDVRDSIHLARLLRLGETTSVCIPTVAQEAARDLVRAREDCRGDLMRARHRLSKLLLRHGLVYDGGTAWTGAHDRWLRTVAASALTGAATRVAFDADYEHVLTMKARRDRLDVAIVAMAGDSEFTPIVRRMSCLRGVSTLTAFALTVEIGDWDRFTGNSIGSFVGLVPSEYSSGMSRVQGAITKTGNTHARRLLVEAAWHHRARYHVGAVMRERWEQAPAAARVRGDEGNRRLHQRWVNFLDRRKRPVIANVAIARELAGWCWSLAVMDC

SEQ ID NO: 305411 - protein, 435 aa, unidentified
MDPVNSTAAEASSNPDKQFDALTHFGGFDWAMEQHQFAVIDRDGTVLLNMQFSNDAVGWSELRAKVALFPHLGVAIETSCGPAVERLLELGVTVYPINPKAAERFRDRKAPAGVKNDPLDAWCFADALRTDGHGWRELRPLDPQTAELRILCRDEIALIEQRTAMVLQLKAALHEYYPTALAAFDDWTSQSAWQFIISFPDPHRLISAGKRKWEKFLHSHKLYRPETAQKRLDLFAKANEFVSPSQAVTNAKSLLAVTLCKQLCGLQTHLDEYRDRITELFANHPDRDCFGSLPGAGPKLAPRLLSELGNDRARFESHESLQAYAGTAPVTRQSGKRSIARMRRACNKTLRATVHLWADLSRPTCAWAQAYYQQKKDQGMSHAAALRCLGQRWLKILWKMWQTRTPYNESVHTRNQVSHGSWVIGLVPAANQSPT

SEQ ID NO: 305412 - protein, 345 aa, unidentified
MTVYIGVDFHAQQQTISYLTTEGGEIRRLQLDHGQPDEVRCFYGQFAGQRVVVGFESSGRAAWFEELLEELGCEIWIGHATAIRLFARRRQKNDRRDADLILDLLVRGDFPRIHRYSAESRAVLQQLRYRQRLVKLRTMVTNSLVFMASSRGVVLRSQLKSKRGLARLQQLVLPEALREQRDELCQFLLELKPKIDKVESSLAVKAESDIRVQRLRTQYGIGPLTGLCLAHTLESPERFANPRKVTAYVGFDPVEDSSGERRRIGSISKQGSRLLRFLLVEAGQMAVRRDAELARVYQRILVRRGHAKAKVAVGRRLLVRAFIMLRDEIDYAEFQRRGVAARSSR

SEQ ID NO: 305413 - protein, 407 aa, unidentified
MQEATQHDAVDVFVGVDVDVGVDVGKGQHHAVALDRNGKRLYNKALPNDEVKLRALIAELKTHRRLLFVVDQPSTIGALPVAVARAEGVLVAYLPGLAMRRIADLHAGEAKTDARDAAIIAEAARSMPHTLRSLRLADEQLAELTMLRGFDDDLAAQLTQTSNRIRGLLTQIHPALERVLGPRLDHPAVLDLLERYPSPSALAAANEKTLANRLTKLAPRLGKNWAAEIVQALNEQAVIVPGTQAATIVMPRLAQQLAALRKQRDEIAAEVERLVLAHPFWPVLTSMPGVGVRTAARRLTEAAQKAFATAAHLAAYAGLAPVTRRSGSSIRGEHPSRRGNKVLKRALFLSAFAALRDPVSRAYYSRKIQQGKRHNQALIALARRRCDVLFAMLRDGTIYPPKSAPDA

SEQ ID NO: 305414 - protein, 406 aa, unidentified
MNAVGIDVSKGKSTVAVLRPFGEIVVSPFDVSHSPKELSKLVTLLKTLNGDTKVVMEYTGNYYLPIALFLRNNGFFVSVVNPILVKDYSTKSLTVRKVKTDKKDALKIASFALDRWNELSPFSAQSEARLLLKSYNRQYNQYNKLKIILKNNLIALLDQTFPGANTLFSTPTRKSDGHEKWVDFVLKYPHADCIPKKSFSAFSKSYLSWCSKFGYNFSERKSRTVYDFACNCSPSLSFTESTALLVSNAIPQLNCINETLASLASEMNKIAATLPEYCTVMSMFGVGSVLGSQLIAEIGDVTRFSNKKALVGFAGLDASPFQSGNFNPQSRSISKRGSDALRKTLFQIMSVILQNSPTNNSVFQFMDKKRAEGKHYFVYMTAAANKFLRIYYARVTEHLKSLQPAV

SEQ ID NO: 305415 - protein, 412 aa, unidentified
MKQIRDKVAGLDVHRDTVVACCRIQQPDRSIDVTKRSFATTSKELAELAAWLTEAQVVTVAMEATGVYWKPVYYALEGLFDELWLCNAQHVKNVPGRKTDLSDAEWLADVAAHGMVRPSFVPPSDIRELRELTRYRKTQVDARAKEIQRLEKVLQDAGIKLTSVASTVWSVSSRAMIEAMIAGERDPKVLGQMAKGRLRAKISQLEEAFSGRFGSHHALVCRQIIDHIDFLDQSIATLTAEITERLCPFEPAVTILCSITGVSKITAEVMIAEMGTDMTRFPTAGHLCAWAGVAPASHESAGKRRPAGTIHGSTWLQRALIESARAAARTKGSYFSAQYGRIARRRGPNKAAVAVAHSILAVAWHLLTTGSLYDDPGAQYFELRHDPAIEAKRLQRRIEALGFQVTMTEIAA

SEQ ID NO: 305416 - protein, 379 aa, unidentified
MPSESIVYIAIELSVSSWVVAARLPGIDKSRLHRLEGGDTAALLKTISDLRMQASAKLGGTAEVACCFEAGRDGFWLHRLLTAHGIAAYVLEPTSILVNRRARRAKTDRLDAEGMLRVLAAWLADDGQVCSMVRVPTPDEEDAKRPHREREHLVQDRLRIENRIEALLFTQGIRGRPSLRSWERDVAALRTGDGRAPPPLLRAELDRLRRRLVVVLELIRELETDRAHALEEAKEADTMVDKITALQRIRGIGENFAAVLAREVFYRSFGNRRQLASYVGITPMPYQSGSMDRDRRISRAGNPRARTTMIQLAWLWLRYQPDSALATWFRERVGQLQGRTRRIAIVAMARKLLIALWRYVETGVVPDGIALRAESAATA

SEQ ID NO: 305417 - protein, 393 aa, unidentified
MSSRVVIGMDPHKRSATIEAMDEDEAVLGKGRYGTDPEGFAAMLAATARWPDRVWAVEGCEGIGKHLVLRLLERGEAVVDVPAKLSARMRVYATGQGRKTDETDAHSIALVGVRMTGLREVVNDETLEVLRLLVDRRRRIGEDHTRLVCQLHQLLLELLPGGAKKDLSAAQARRLLATVRPKDVAGKTRKRVAMELVVDLERVYARKKAANKELIELVKQTGTGLLDLHGIGPSGATRLLVEVGDVTRFPTKGHFASWTGTAPIDASSGDNVRHRLSRGGNRQINKALHMMAVVQLRNATEGRAYYDRKVAAGKTANEAMRCLKRRLSDIAYRTMLDDLVATKAAGARTGPGGHRGNVSDSSAAGSHPHTDSSDKSLPGPAKTKPKTPLRRAS

SEQ ID NO: 305418 - protein, 413 aa, unidentified
MGDAVVIGMDPHKRSATIEVMSDDETILGGGRYATDVAGYQAMLAFGRQFPDRTWAIEGCNGIGKHIAERLLADGEQVVDVPPKLSARVRIFATGQGRKTDATDAHSVALVGTRMSGLRPVVSNEQLAVLRVLVDRRRSLGDDHVRMVAQLHRLLLELIPGGAKKHLSAAQAKALLGKVRPRDAVGKTRRRVAAELIADLQQVYERTKAADKELKTLLIATGTTVTALHGIGPSGAARLLVEVADITRFPTRAHFASWTGTAPIDASSGDHVRHRLSRGGNRQINRVLHIMAVVQLRSPTEGRAYYDRKKASGKTSMEAMRCLKRRLSDVVYRQLLADALRPSAAGPGGHSGAATSSSAVDSNPDIDASEKSLPGPATGNATPTRGTRPDRSSARSRRPQTTPARSRRQAQSA

SEQ ID NO: 305419 - protein, 438 aa, unidentified
MSNKVIFNLDDLFISVGIDVGADFSWMSIALPNQQFVGKPYKILHSSIDSLTTAVSKIKEAEELYSLESRIFLESTGIYHYPLFCYLRDKGFNCSVINPIITKNSTNINIRKVHNDRFDSKKAALVGLKPDLKVSLMPSDLALNCRNLCREYYDLMDNRSAYVNKLQGELRMAFPQYLGIFSKVTINTSLTLLETYTSPSAFLEADKQEIIDIIKSTARFGLTYAQNKYNAIIQAATDANQFGYIIDSNIKRIRLYISFIRKYDEEINNILESLHELVDANEDADFVKQIHLIETFKGAGFLSAVSIMGEIGDFSAFSKPKQLFAYFGLDPAVKQSGKFEGTKVQMSKRGSAIARRVIHTLTLQSISISRNGEAKNPVLREYYLKKCDSKPKLVAMGAVSHKVCNMIFAILRDNKSFEIITPQEHIKQYNAAKCDLVA

SEQ ID NO: 305420 - protein, 452 aa, unidentified
MEEPQEVQDEEYERVWERVAAVDVAKASGVVCTRVPDEDRPGRRRTRVWTVTATVNAVTELADHLRCHQIEVVTLESTSDYWRIWWVVLEAAGLKVQLVNARSVKNVPGRAKTDKKDAVWLAKLTERGMLRPSFVPPPEIRRLREFTRLRADLVHERTRHWARLEKLLERALIKISAVASSLDTDSCRAMIEALIAGQRNPKAIADLAKGRLRPKRAALAEALEGRFEPHHSELARILLDQIDVLTEKTGQLPDRVTELIAAIPAAQGVDADGATGPGAGTGPGAPVLPAVARLDEITGCGVIAAQAVIAEIGLDMSVFGTPGRLVSWAKRCPQTRQSGTKTSTGKAGKGNPYLGGVLGEIAASAGRTDTFLGERYRRLARRRGKRKALVAVARSILVIIFHLLADPEARFCDLGPGYYDTHIDRQRKIRNHIRQLEALGLDVTTTPRHDAA

SEQ ID NO: 305421 - protein, 338 aa, unidentified
MSKFSGIDLHSNNAVVVVSDETDQVVYEQRHANDLAGILGALEHYRAELVGVVVESTYNWYWLVDGLMEAGYAVHLANTTAIKKYEGLKYSGDEADAAYLAKLLRLGLLPEGYIYPREARGARDLCRKRMQLVRYRTAQVLSIENILAAQTGARLTSAKVQRLTDEQISALGFAADVTLALRANAAVMRSLQEQILLLEERLAERVQLNADFALLKSVPGIGQVLATTIMLETGTVARFANVGNFSSYCRCVQSLRLSNGKKKGEGNAKNGNHYLGWAFVEAAHFALRHCPQAKSFYERKKRQRNGAVATKALAHKLARACYHILRDHKPFELARCFA

SEQ ID NO: 305422 - protein, 410 aa, unidentified
MDVLYPNCTGLDIHKDTVVACSRRLIDGKVIRELRTFKTTTGELLALSEWLATLGATHIVMEATGVYWKPVWNILSDGDFELTLANAAHVKNVPGRKTDVNDATWLADLLAHGLIRASFVPDTQTQEQRGLLRTRKQLTRERTSHVQRLQKTLEEANIKIDSAISDVTGTSGRAMIEALIAGETDPLRLASLASSRIKASPETLGEALRGRVTRHHRFLLRLHLQQIDALDGAIAQIDKEVEANLAPFRELIPVLTTIPGIGELAARVLLAEIGADMSRFPTSGHLISWAGLCPKNDESAGKRRSTRMRKGAPWLKTTLIQCAWAAARKKGSYLQAQFHRLRARRGAKKAVGAVAASILTAAYHMIANGAFYKDLGAGHFERRAKPTQIKRLVAKIQSLGYQVEIKPLAA

SEQ ID NO: 305423 - protein, 343 aa, unidentified
MQTVTTIGLDIAKSVFQVHGVDAAGQVVIRRQLKRRQVLAFFQKLPPCLIGIEACASSHYWSRELQVLGHTVRLMPPAYVKPYVKRQKNDAADAEAICEAVARANMRFVPTKTPEQQSCLMLHRTRHLFIRQQTAVINSIRAHLAEFGIVAPVGRKGVTELLHVVADPGDKRVPEVARACLAALGAQLLSLKEQILEFDRLIMAWHRSSQTSKRLHCIPGVGPMLATALVASVADARTFRSGRNFSAWIGLVPKQHSSGGKDRLGSISKQGDRYLRSLFVAGALAVIRYAKIHGTGHRPWLTALLARRPTKVAAIALANKIARMAWAMMAKGERYKQPVALAA

SEQ ID NO: 305424 - protein, 315 aa, unidentified
MTNLRKRKSRVNVGVDVGKWMLDIHIYEKDLHWQEENSPEGIKRILKRLAHYRVHRLVMEATGRYQLALATAAYQKSLPVCIVKPMSVRRYAGAIEQLAKTDKIDARVIAEFAAVIQPDPTPKVSRNLQIIKDLITRRRQVMEIRTQELNRLQIMGKTFEASCRRILRTLDAEIQRIEKKLTGVIEKQAEWSERKSILMSAPGVGETLAYTLLADLPEMGSMSNKQVAALVGVAPINRDSGKSRGKRRIKGGRAGVRTTLYMATLSATQCNPIIRAFYRQLVAQGKHKKVALTACMRKFITMLNAMVRDQVTWAY

SEQ ID NO: 305425 - protein, 353 aa, unidentified
MAHPQPPRITVGVDTHKDLHVAAARDQLGRRLGTTMARATSAGYATLLVWAQALGDVQAWGVEGTGSYGAGLARFLTARGQRVLEVNRPDRAARRRRGKSDPVDADAAARTVQAGEATGVPKAQDGVVEMLRALRVARQTAVKARTQAINAIKALLVTAPAELREPLDGLATPKLVAAAAALEPGTLTTPTAATMLALRGLAQRYQHLDAEISLLTSRLDQLTTRTASALRQLLGVGPDSAAALLIAAGDNPGRLRSEAAFAALCGASPVEASSGKTVRHRLNRGGDRQANAALHRVVIVRLRWHQPTRDYVARRTAEGKTKKEILRCLKRYVAREVFAVLPQLGEQLLVAAA

SEQ ID NO: 305426 - protein, 363 aa, unidentified
MTMTNVICVGCDSHEKTLVNMIGVNREAAQQWSVANTQRGRQRLIARLKEKADEIGGAEIVFGYEASSQGFVLHDELKAAGIECIVLAPTKIERSSKQKRNKNDKFDGQHILNIIRSHVLAGTELPAIWVPDAQTRDDRETVRMRHDVTEKQTVIKTQIQMLLKRHSIEKPVEVGKSGTKSYRRWLKAMSESQPGAGFRSALQSLIRQLEFSEAELRRLDQDVNQLYEMPHLKPVVEALDQEVGVGRLAAVTYAVEVGDFGRFRRRQQIGAYWGLTPSSNESGEVDDRKGHITHQGSARVRRMLCQSGWSRAKHDPGERAAYQRLVEKNPKRKKIAMVAIMRRLAIRLWHVGRKAQLEMTKAA

SEQ ID NO: 305427 - protein, 403 aa, unidentified
MKHVIAFDVSMGKSYMVVYNALEKCSLEKEIMHTRPAFEELSVLIEDLINGYGEQPHIVFEATGVYSRPLERFMRENKYAYCLLNPLEAKIQCDSLRIHKTDRSDAHRLALTHFKNDRRIETVLDDVYLQLKRLSRHYSELDNELSIVRNRMHKGVQETFPELEQIFTTKSELFLNVVQVYPHPDLVLNHSKTVIKNRLLANTNKRLSRKKAEEKAVELLASAKQAYPAVSSTDVLCDQVISYAKRFQELLLQKEQCTNKMESLSEELEEYNVLRSIPAIGANTAVRLIAEMGDIRRFDNNKQLNAYAGIDIRRYQSGKFIAKDRINKRGNKHLRKILYIAIQNMIKQRRFGQNHFVQYYDKLKTQPYNKCHKVASIACVNKLLKTIFFLVTQNQNYDYRLAP

SEQ ID NO: 305428 - protein, 346 aa, unidentified
MILIGCDFHPSWQQVCWLNMASGETNNQKLVHASGDAEKFYRRLTVPVRVGIEATGNCQWFLELLGKLGHEVWVGDAAKIRACDPRQQKHDPRDARLLLQLLMENRFPRIWTPSSEEKDLRQLLLHRYKLVRMRVQVKNELQHLAMNKGITQGRRLWSATGEKVLCELPLAPWASRRREDLFKLRSMLNEQIAGLDQAVEKVAEQNDGARLLMTQPGVGPITSMAFVLTMGDVSRFPRGKQVASYLGLIPREYSSGGHQRFGSISKQGNRFMRMLLVEAAQCVVRYDEGFRNEYLHRCHRKPRGVAKVAAARKLAVRLYWMLRTNTAYPEIARVGSSPRVALDGAS

SEQ ID NO: 305429 - protein, 387 aa, unidentified
MARKRTLSTLDTSIAYEAVGLDLAKEDVALAAFDSEHKEPYLIDRISYDKLYELLADMAPTLVAMEPCSGAHQICEQIEALGHEVLMINGRHVQAWVKDHCNGQKTDLNDAFAILNLAYDRWLTPIRGKSREECRLLALQASYRQLKGQRTKTLVHVKATLHAWGFPIRTGSFNQKVLHELIDANREAFGDEMAETLHLMINRVRDLDHDIATVLKLLTEATKRDPRASLLRSIPGFGILTTSRWCAVIGDIARFDSPKQTMAFIGLVPNNRITGHHTETSSGREARGQGRMSKRGDKMLRSLCILGAASLCLMVRNDRLPDCPFVASIKERLASPRPWFKVLVYVAAKLVRIATALLKYGETFSYEKAGISKAVLKQWELEQAKAA

SEQ ID NO: 305430 - protein, 347 aa, unidentified
MNEARWFLGIDVAKRKLDIALLVTDKIKSKVFDNNTSGHAALTRWLIERGAIQSHTHICLEATGPYSEALAIALVDAGWCVSVVNPARIKGFAQGELARNKTDRADASLLARFCAAMRPGFWTPPSSEWRELRSWVDRLQALKDMHQQESNRLEAHLASGQAALVEAVQTHLDWLTKHIEQLKRDIDDHIDRHPELKRDAELLHSIPGIGNTTIAKVLAYAGDVRRFASAKALAAFVGVTPRQRLSGTSVKGRSMMSRTGHADLRRALYMPGLVARRHNPLLKVFGDRLSAAGLAPKAVVGAVMRKLAHLIYGVIKSGQPFDPKFPPRDLISKTVSDPYCACDPYCA

SEQ ID NO: 305431 - protein, 328 aa, unidentified
MSASSEQIFIGIDVSKASLDLAIRAQSKARQFANTEEGIGALLASLEPQRQKIAVVLMEATGGLEHPAAVALCLAGYAVMVVNPRQAHDFSKSLGYLSKTDKIDAQALAQFAHTLYCSERRDKLLLKLATPEQEVLAAMVTRRSQLVGMRVAESNRLAGSHRTQRQSIETMIKAIDQQIQEVDGGIADGLGGHFKAKLELLKGMKGLGTTTKAVLMACLPELGQLNAPEIGKLVGVAPLNRDSGTMKGRRTTWGGRGNVRSALYMASLSAVRYDPVLKAFYQRLRAAGKPAKVALVACMHKLLTILNAVIKSGRPWQATFGCAQLANA

SEQ ID NO: 305432 - protein, 441 aa, unidentified
MRVMYERCCGLDIHKASITVCALITEKGKTQEETRRFGTMTADLRELAGWLQQKGIRHVAMESTGVYWKPVWNILEPAGFELLLANAQEVKIVPGRKTDQKDSQWIADLHKHGLLRNSFVPPRAIRDLRDLTRARAILTQEHTSVCNRIQKVLEDANIKLRSVASDVFGASGRAILRALMKEENDPEALANLSKGKLRNKIPQLRRALEGQVTAHHRALITGHWNRMEFLERQIADLETQIAERMKPTPAEMAPTMQNASEDAPVPLSPREEAIQLWMEIPGLGWTSACSMVAELGVNMDQFPSAAHAASWAALCPGNNESAGKRLSGKTRKGNIWLRRTMCEVAWAASHTNDSYFAAQFHRIASRRGRKRALMAVAHSILVTAYSMLKHKRHYKELGADFFDGINRDKVRDRLVQRLAKLGFNVTLESKGNVESVSDVTE

SEQ ID NO: 305433 - protein, 350 aa, unidentified
MLKYSLGIDVSKKDFHACLSVIDVNQHVKVKASRKFSNNQQGFKELLLWLGIHRKEVNVPLNIVMEATGVYYEFCAMFLFKAGLQVAIVLPNKAKKYLQAIGLKTKNDKIDAAGLARMGAEQHLELWQPMDEFFYTLRALTRHHQSLQELKTNIGNQLHADEHSIYSNKKVIKQLKKLVATIEKELLETSAEIDKQLHSNPEIAEKVQLITAIKGIGNITIAAVIAETNGFALFRSIAQLVSYSGYDVVENQSGNQRGKTRISKKGNSHIRRALHMPAFNMIRYEVGNFKPFFERILEKHNLKMKAYVAVQKKLLVLIYTLWKKNEAFMPNGPEAIKNTSREREAVPSFA

SEQ ID NO: 305434 - protein, 426 aa, unidentified
MNYNTQNKKIASITEKTLIVGIDVGSTTHYARAFDWRNYEYSKKPFAFSNNEEGFMAFKSWIEDIAKKHGKDKIIPGMEPTGHYWFNLGMFLQENDMRTVHVNPHHVKKSKELDDNNPNKNDRKDPKTIAALVNEGRFTYPYIPTGIYAEIRNLSNLRFQTQEEITRIKNRIARWFSIYFPEYKDVYGKVDSVSGMMVLKQAPLPVDIVKLGVEGVNRIWREAKLRAVGYKRAKTLVKLAEHSVGSHEAPNAARVEITNLICDYEMYIERMDLLMETIEQRLTEIPYIDKLLEIKGIGMITVCGFIAEVGDIRRFDNPKQLQKLAGYAIVNNSSGKHNGESHISYRGRKRLRYILYEAAISLVGKNVEFKEIHNYYLTRDKNPLKKMQSIIAVACKVIRIFYAILTKGIDYDGNKMLQDIVRPSVA

SEQ ID NO: 305435 - protein, 320 aa, unidentified
MQVPVLDPAKSFGVDISSAQLVIASAELGKPVISIANTPSAVTRWLKTLGPGCRIGMEATGSYHRCLVDLAVAAGHTVWVFNPTSVAHYLRSQRARGKTDPLDARGIARYVLHEAETLHPYVPPSPLQDRLHRLIQRRHQIVKQRASLQMSLADLPECDAEIGQLRAALNAVLARIDALIELAGASDPAWLARRNQLRSINGFGPLVSAAVAARLSRAPYANSDAVVAAFGMDPRPRDSGQYSGTRQLSKRGNAEERRLIYCAAMAACRYPLFKSMRDKLVDRGFSPIQAYCAIAPKLLRIAFAVWRSNQPFNPQRVGLA

SEQ ID NO: 305436 - protein, 400 aa, unidentified
MLSIGIDVSKGKSTVCGMKPGGEIVYTPFEVQHTREGMSELVSLLRGSGEEVRAVLESTGSYHCPVVTALLENGIFVSVVNSLRMKRFCSQSIRKVKTDRIDAMQIALYGLAYWQELQPTRPPEDTYRELQLLARQYYQMTSLLIKAKVDFNAICDQVLPGMQELMSDHAGRHKLSDFVLRYCHTTHILEMGETRFRKDYCKWAEKKGYRNCERMAALIFATAQNGIPVLPNAPSTQIVITEAIRVLHTVEASRDAILTQMQALAKTLPEYSLVREMPCIGDTLAPRLIAEIGDVRRFHSKRALIAYAGIDAPPYQSGKFCANNRHISKRGNRYLRKTGYEVMQSYVMHKPANDPIFTFIEKKRGEGKSGKLAMVAGLNKFLRVYYGKVTELYRSLPAIE

SEQ ID NO: 305437 - protein, 413 aa, unidentified
MQVVHPHCAGLDVHKKTVVACAITPNHKGGWHKEVETFSTMTCDLLRLSDWLTQRSCSHVAMESTGEYWRPVFNILEANFEVILVNAAHIKNVPGRKTDIKDAQWIAELLQHGLVRASFIPSVEQRDLRDLVRHRANFIRERVNLGNRLQKVLEAANIKLGCVASDVMGTSGRAMLKAIVGGEANPEVMAELAIGRLRNKQEQLKQALEGRVRSHHRFILAELLCHIDGIDETIERFNQEIEAFCRPFEAAVQLLDTIPGVARQTAEIIVSEIGIDMNRFPTANHLAAWAGLAPGNYESAGKRLSSKTRRGNRVLRAALVQAAHALTQTKTYLAAQFRRLTPRRGRKRAAVAVAHSILVIAYHLIERNEPYRDLGANYFDQQRPEAATKSLVKRLERLGYQVSLQPQATVTAG

SEQ ID NO: 305438 - protein, 411 aa, unidentified
MRRVLFVGDDWSEEFHDVELQDEAGRRLGKAKLAEGIAGVARLHAMIGEHVDEDAGPVEVVVGIETDRGPWVQALVASGYLVYPINPLQVARFRETERSSGGKSDAADAHTLADMVRLKRHTLRPMAGDSGGAETVKVLTRAHQTLIWERTRHLLRLRQMLREFFPAALLAFDDLAAPDVLELLGRAPDPVSAARLSTGQITAALTRAHRRDVPAKAATIQAALRSGQLGQPPALAGAYAATVRAQVAILTTLNTEIATLQGQVEAHFGQHPDAEIYLSQPGLGVVLGARVLAEFGDDTTRYADARARKNYAGTSPITRQSGKKKTVLARYVHNDRLIAALNRQAFAALRASPGARAYYDRLRARGVGHHAALRQLGNRLVGILHGCLKTATAYDETTAWAHQRQDLHAAA

SEQ ID NO: 305439 - protein, 336 aa, unidentified
MQMVVGLDIAKRVFQMHFVDPSSGEICRRQLKRAELPAFFATLAPAVVAMEACGSSHHWGRRFAEMGHEVRLLATKFVRPFVKTNKTDAADAEAIWEAAQRPDMRFVPVKTEQQQGILALHNMRDLLVKIRTAQIHQIRAAFYEHGIDLPTGRHWGLKALPRAFARLDGRVSEMVLDALREQLGLINDLTSRIEGIERKLEMYERGDDRCRRLRAIPGVGPLTATAIVASVGDAREFRSAREFAAWLGVVPKQSGTGGRVRLLGISKRGSPYLRAMVIHCARAVAARQKVQPPWLVKMLQTKHWNVAVVALANKIARVIWALLAHRRVYSANYARA

SEQ ID NO: 305440 - protein, 395 aa, unidentified
MYSVWVGVDVSKDFFSAVGLDKEGKELFSGTYEMNSNGFSEFLKAISSHCKRLDQGMVAMESTGCYHINLFSFLSSQAIRTVVVNPLLISNFAKLSLRKTKTDKKDASTIAKFLLVHQEGISQLSVSQDLQDLRDLSRERESLCHLIAATKVEIKRVLRTTFPELESIGNLYTRVMLRFLQQYPSARLARAAKPRAIAKALKGPYVGNKLTFCAEDILRAARSSVAVVSPAKEVILQGKISTLLHLEERLEEVTKLLTDLCKATRIQDLEILTSIKGVSTKTAAPFLAEMGQIENYASHKKLIAFVGMDPSVHQSGKFIGTSKISKRGNRHLRRVIYLMTTSVVSQNAFFKAYFLKRKREGLPPQKAIFATAHKLVRVIFAMLSQRTHFKVKEAL

SEQ ID NO: 305441 - protein, 438 aa, unidentified
MPSLPVLDPTAAAIDVGSEQLHVSIAGGPPKVFGTTTGQLYKLRDHLLEQGARSVAMEATGIYWLCPYEVLEKAGLQVVVVNGKYVKNLPGRKTDMSDCQWQATLHAHGLLKPGFVPPDHIRRLQDYLRVRSDHISMAGSHEQHMQKALERMNLKIHDVISDLTGMSGRKVIEAILAGQRSPLVLLTLCDMQIQKRKARQLCAALEGTWKTEHLFALRQAYELWQFYQKKIAECDQAIETVLKEMVGPEDPQNPDPPAHKRGGINSPEIAGLHGMLFRLCGRKDPTRLPGIADYVLLQVLSETGTDLAKHWPTEKHLSAWMGLAPGSRQSGKRRASQPRRSRNRAGRLFCVIARSVGRSVDKALGGFYRRIKGRKGGLVANLALARKLAELFWRLMVHGIDYVEQGLKKYEDKVLQTELRVLQKLAQKHNLTLSPKSS

SEQ ID NO: 305442 - protein, 416 aa, unidentified
MNAAGIDVSSRKSTVAVLRPFGEVVRLPFDVAHSTEGLASLAEQLKALDGETRVVLEHTGRYYEPVAKALHEAGLYVSAVNPLLIKEYGANSLRRVKTDKADALKIARYALDNWTDLRDYTPMDTIRYDLKTLNRQFQLASKQRTACSNNLIALLEQSFPDIRKCFDSPVRSDGTQKWVDFAHTFWHVDCVRKQSYNAFSERYRKWCKHHGYFFKQNNAEEVYALAKNAVVLVPKSKVTKVLVQEAANQLTSTSRSVETYRTEMERLASMLPEYPVVMKMYGVGKSFGPQLMAEIGDVRRFERKQALVAFAGIDPMPNQSGDKNVRSNRSSKRGSPYLRKTLFNVMGIYLKCAPLDEPVFQFLDRKRSEGKPFYVYMTAASNKFLRRYYAQVRDYLTALDDLPPVDMDSTGLKTSD

SEQ ID NO: 305443 - protein, 433 aa, unidentified
MEDAEDEPLFAERVAGLDIAKAEVEVAIRVPSDTTPGRRQQETRTFGTTRKELLALADWLRCWGVTKIGMEATGDYWKPVFFLLESRGFDCELYNAAQVKALPGRPKTDRADSIWLARITERGMISSSFVPPEPIRRLRTHTRYRRHLTQARTAEKQRVEKLLEDGHLKLSSVISDIHGVSGRDMLNAIAAGERDPKALAQLARGTMRGKIRRLEEALDCSFFTGEHAAVLAMMLVTIDHYTAQIDQLTAKIEKLAEPYLHQVAQLDAVPGIGTVCAQDIIAEIGADMNVFPAASHLVSWARWSPQVKQSAGKRKGSNATGRGNPYLSAALGEAAISTGRTQTFLGARYRRLSKRMPKKKALVATGNSMLTSVHALLSDPGACYQDLGADYYEQRMHTRRQARNHVKSLERLGYKVTIQAITPDTGQPLTAAG

SEQ ID NO: 305444 - protein, 420 aa, unidentified
MSKRAQRHEQVKGSKGPIPEGMAVLGLDIGSQTHVGRFWAAPGVREKARSFANTAAGAAALLAWLDERMGGDRSRVVVGFEPTGSYWQGFVGRLVAAGVRVRVIAPAHTKKYKELFDNSPNKSDAKDAGVIAELTKRGHGLLLRLPHGAYADLRALNEGYHRATQRITALQNQAREVALGLFPELGAAIDPFSATGRALWAVTPTPAAWLAKRRSTRERLVRQASRGRLGAAFVAQLSEKARDSLGGTEAVAPRVAELTFLMAELERWEGHRAALEAALSTTLDGCPEGAWLTSVPRLGRASAARILGETGPLTDFASGQAVLKHAGLNLYASSSGKRTPERVCYRITKRGRSRLRHVLFFAALRLVQRGGIFHAYYRRLVDDNGVIKVRAVVAVMRKLLRVLTALARDHAAYDPASVPT

SEQ ID NO: 305445 - protein, 353 aa, unidentified
MKLKIDPNAAPLTSIGIDIGKEIFHLVGLGTDGKIAFRRKIKRLALKEAFEKLPPCVVGMEACLSAHFVSRMLRTLGHEPRIIPAIYVKPFLKGQKNDYNDAEAICEAALRPNLRTVQEKSQDQLDLQACHRVRSRLVSRRTAAINQIRAFLIEQGIAVRAGTSALRKSLFEILKNRKDEISPRMANLIVGLYEDWLWLDKRIETITSEIKQLSQSEPNCRRLMSVPGIGPLISTGLVAAIGTGEAFERGRDLGAWLGLVPRQYSTGGRSILGRISKRGSKYLRTLFIQAAKVLLIRPQNWPRYSFGAWLKTAAERLHRNKLAVALANKLARIAWSVLRHDRTFDTHIEAGAI

SEQ ID NO: 305446 - protein, 417 aa, unidentified
MQYAPPMLAAQPVNGLTCGIDWARDDHAVAIVDGQGRQVHRSTVEHSSAGLRELVAVLARTGATEVAIERPDGPVVDALLDAGVTVVVISPNQLKNLRGRYGSAGNKDDRFDAFVLADTLRTDRARLRPLVPNSPATAALRATCRARKDLVMHRVAVANQLREHLKRVFPGALGLFEDLDSAISLKFLTRFDCQDRADWLTPTRLGTWLKSVRYTGRTDPGTLHARLTASPRGATAEQSTAHVCITRALVATLTNLIEQIAVLSKQIGEQLAAHTDAHIFTSLPRSGTIRAARLLAEIGDCRARFPTPQALACLAGVAPSTRQSGKMRTVGFRWACDKQLRDAVCDFANDSRHANPWAADLYDRARARGHDHPHAVRILARAWLYVIWHCWQTNSSYDPGHHRTLQALLKQHQQTAA

SEQ ID NO: 305447 - protein, 460 aa, unidentified
MSKLSKANTSLAEVRPFAGMSQVNPHAAGVDIGAHEIMVCVPGDNKTQLVRAFGNYTVDLQAIVAWLTEQHIELVAMESTGVYWIPLFETLEENGFDCLLISSRSLRRVPGRKSDVIDCQWIQTLHSYGLLESSFRPEAELVALRTLLRHRAQLLEHRSPHILHMQKALLQMNIQLSQALSDVTGETGQAIMRAIVAGERNPYKLAALRNYRCKKDEDEIAKALTGTWREEHLFVLRQSLEMYDFYKHQIEACDAEIERAYQLTRTPEGHDGGDDDLPPVAEHKRNSHSKNAPQGVQVRKHLKRICGVDVAAIHGFGESLAQDAVMETGTDMSKFPTDKHFCSWLGLAPKNEISGGKIIRSGTLKTRNRAGQAFRKAAASVMRSECMFGVFYRRMKARLGPAQAAVATAHKIARVYYQMLKYKVEYEPLSAQDYEQKYYEQQVKYLKRKAAKLGFQLSPA

SEQ ID NO: 305448 - protein, 412 aa, unidentified
MDTVYRCCAGLDVHKESVVACVLWVGEDGSSRKEIRTFATMTGDLLALSDWLAERKVTHVAMESTGVFWKPIFNILEGRFEVILVNARHIKQVPGRKTDVKDCDWIAQLLQHGLLKASFVPERPQRELRDLTRHRAQLVGEHTRVANRIQKVLEDANIKLSSVATDVLGVSGRAMIQQLLAGQRDAAQIADLAHGKLRDKKAALTAALQGRMTDHHRFMLQTLWDHLTYLESAIASLEQRIEETMRPFGAHVERLDAIPGVDRTVANALIAEIGVDMSHFPTADHLCSWAGVSPGNNESAGKRHSGRTTKGNRWLKRCLSQAAWAASHTKDTYLSAQYRHIARRRGRKRAIIALAHTILIIAYHILADGRQYQELGGDYLDRLHPQRLREYHVRSLKKLGYEVKLTGNEHAA

SEQ ID NO: 305449 - protein, 367 aa, unidentified
MKKLTTMIVQRTLNKQDGWLTIGLDLGDRSSFYCVLDEAGDVQLERRVSTTPKAIREIFGAMPRSRIALETGTHSPWVSRLLSELGHEAIVAHASNVRLIGESRRKDDRIDARTLARLGRIDPELLRPVKHRSAEAQADLTVIRARAALVRTRTMLVNAARGLTKSYGERLRGCNARGMKPKAAQDLSPELKSALEPMMREIESASERIWEYDQLLESMARSRYPEAERLKQIKGVGTLIALTYLLTLEDPHRFHKSRDAACYVGLQPGRRNSGQSEPQMHISKEGDPYLRSLLVQAAHHVLGPWGVDSDLRRWGMKLAEHGGKRGKKRAVIAVARKLAVLLHRLWVSGEVYVPLRPSIRATMPAVA

SEQ ID NO: 305450 - protein, 343 aa, unidentified
MDKVTTIAVDIAKRVFSVYWVDAQTGEIGARTMSRAKLEDFMRRREPSRVVLEAGGSAHYWGRWLAQHGHEVRLIPAQHVRPFVRTNKTDGADARAIWEAARRPEVKWVAIKSEASQAVLALHRMRRQLMDMRRMQSNQLKGLLYEFGVVVPAKLTAAKLQEWVAAGRMPQGLGAMLGEQLERIARLKREELELTRRIERHNAEDALAMRLMEVPGIGTLSASALAAELAESAGSYTNGRQYAACKGIAPRLSGTGGKVRPGAISKRGDPYVRTLLIHGARSVITHQRRAKRLSPWLTQLLARRPMNVAVVALANKMARIAWALSAHGRSYQENYGARSAVAD

SEQ ID NO: 305451 - protein, 357 aa, unidentified
MGLILAKTVIGMDIGKKYSWCEAISTETGEVLKEKRLTNRKEDFVSFVEALPKPVRLVMEATGNSSYLYECWEDLVEEIQLAHPLKTKAIASAKIKTDRIDDGILAHLGMADLVPQSYFPPREVRDLREILRHRAFMVTLQTRVKNRIHSYLWKLGIETEDTDLFGKSGLSWLRGLGTRDPYRALLDQDLKILEVLQQEIKNATQTIDRLAKEDPRAKLILTIKGIGKYSAMLILAEIGEIDRFPEPKKLVSFSGLCPSTFQSGRVSYHGKITKQGSKWLRWILVEAAQKYARAPGRLGDLFRRIEKKKGRKTAKVAVAREILVCIYHCLKKGVAFEETPKRVKRVESQHAPLVSGC

SEQ ID NO: 305452 - protein, 414 aa, unidentified
MLKIVYRICCGMDVHKSFVVACIASTNEQGVTTYKSKRFSTFTGDLRRCAVWLDENNCKDVCMESTGKYWIPIYNILEPTCDIVLAHPKYVKAIRGKKTDKRDAKWIADIFKHDLVAGSFIPPADIRQLRDLVRYRWKLTGFTTGEKNRAQNCLTVSNFKLDDVFSDVFGKAASAITARILENPTEKITDISDFRTKGMKATNEQVLAAVDGEMCAEQAEKLRIIRSHMDSLELCKLHLESLILSTAEKYLPQLNLVMTAPGIQSFAAIGIISEIGVDMSVFPTSKHLCSWAGLTPQNNESAGKKKTTRISRAGAYIKPLLVQCALCAIRAKHFPEVRYRYLALKKRRGHKKAIIAIARMLLTAIYNMLKKNEPYNPELYRRSDRPPVHREVSVEEAIFILQRQGYLVTAPSTP

SEQ ID NO: 305453 - protein, 342 aa, unidentified
MSNIQTIGVDLAKNVFSIHGVDAYGKCVLRKTVKRNKLLDTFANLPPCIIGMEACSGAHHWARELLKLGHHPKIMASKFVIPYRQNEKNDANDAEAICEAVSRPKTRFVSIKSEEQQAVLCLHRIRQGLIKTRTATINQLRGLLSEFGLVMPQGRYSAQQTIGSILEDAENGLPLLARELLQDLSNKIQSLNLEILHYDRRVSALVREMASAKALIDIPGVGEHSASAIVATVNDAKQFGSSRQFAAWIGLVPRQYSTGGHVHLGRISKRGEKHIRTLLIHGARAVIARCKEKTDRNSLWLQQLVERRGYKRAAVALAAKNARIIWALLTTGNEYKANYING

SEQ ID NO: 305454 - protein, 377 aa, unidentified
MKNVRFVGLDVHAETIAVAVAESGGEVRSLGIIPNRCEPVARLMRKLGKPEQLRVCYEAGPTGYALYWQLTRLGVKCEVVAPTLVPVKAGDRVKTDRRDAERLARCHRAGDLTAVWVPDAVHEALRDLVRAREAAKTDQLRARHRLSKFLLRHGRRPAEGVQAWTVKYWAWVKSRVNFEQPAQTATFTDYVHEVEHAAARIERLEQAIDTSVETAPPQMRAVIEALQALRGVAQVSAVTMVAELGQISRFARARQLMGYSGAVPREHSSGPRIRRGAISKAGNAHLRRVVIEAAWSYRHRPSIGRKLAMRQRGQTETVKEIAWRAQHRLFHRYRKLIATGKTRQQVITAIGRELLGFIWAIGVHIEKEPPSRVAVAA

SEQ ID NO: 305455 - protein, 438 aa, unidentified
MSNKVFFNLDDLFISVGIDVGADFSWMSIALPNQQFVGKPYKILHNSIDSLTTAVSKIKEAEELYSLESRIFLESTGIYHYPLFCYLRDKGFNCSVINPIITKNSTNINIRKVHNDRFDSKKAALVGLKPDLKVSLMPSDLALNCRNLCREYYDLMDNRSAYVNKLQGELRMAFPQYLGIFSKVTINTSLTLLETYTSPSAFLNADKQEIIDIIKSTARFGLTYAQNKYNAIIQAATDANQFGYIIDSNIKRIRLYISFIRKYDEEINNILESLHELVDANEDADFVKQIHLIETFKGAGFLSAVSIMGEIGDFSAFSKPKQLFAYFGLDPAVKQSGKFEGTKVQMSKRGSAIARRVIHTLTLQSISISRNGEAKNPVLREYYLKKCDSKPKLVAMGAVSHKVCNMIFAILRDNKPFKIIAHQEHIKQYNAAKCDIAA

SEQ ID NO: 305456 - protein, 353 aa, unidentified
MKPKTDFSTASLAVIGVDIGKEVFHIVGLAVDGKIAFRKKVRRLGFEDAFEKLPPSIVGMEACLSAHFVSRVLRRLGHEPRIIPAIYVRPFVKGQKNDYNDAEAIAEAALRPNLRAVQEKSQDQLDLQACHRVRSRLVSRRTATINQIRAFLIEQGITVRSGARALRNSLFAILENRRDEISPRMASLILGLYEDWCQLDKRIETITSAIEELSQVEPKCQRLMSVPGIGPIIATGIVAAVSMGEAFERGRDFAAWLGLVPRQHSTGGRSVLGRISKRGSKYLRTLFIQAAKVLLMRPHNWPRYSFGAWLTAAASRLHKNKLAVALANKLARIAWSVLRNEKAFDTHLEVAAI

SEQ ID NO: 305457 - protein, 469 aa, unidentified
MNAPQKNKKSKMKLKKMVKQYAKKIKKVGVLEQINLNAAGIDVGSEEIYVAVPEYRTDQSVRKFGTFTQDLEQIILWLKANGVTTVALESTGVYWIPLYDQMEKAGLDVYLVDARKTKNVSGRKTDVQDCQWIQQLHTYGLLSKAFVPDEQIRNLRSLERQRDMLINYRGSHIQHMQKALEEMNVKLTNVLTDITGKSGMAIIRDIIAGERDPSRLASHRDYRCRKSAKEIALSLEGNFNEQKIFVLKQAVELYDTYTQKMMELDVQSEKVFKTFARKVDVKSMPVKELARSLQNRKKNAPHYDLRSQLYQIAGVDLTRVNGFDVLVLQRIISEVGLDMSKWPKMKNFTSWLALSPNNKITGGKIISSATAKTKSRANNAFRMAAMGVARSNCPIGRFYRKMKARDGAQSAITATAHKLARIFYVMVSKQVEYSEELIKGDEEKNKKRMIKNLQRRAKELGYELVQKSA

SEQ ID NO: 305458 - protein, 416 aa, unidentified
MDAIVERCAGLDVHLDTVVACVLYGKLDIKPKKEVKTFSTTTKGLLELLDFINQKECTHVAMESTGIYWKPVWNILESGAFDLIVENAKKIKNVPGRKTDVKDAEWIASLLRCGLIEKSFVPPERIRDLRDLTRLRKELLGEVNRNKNRIHKVLQDANIKISSVLSDVFGETGKSILNQIIGNQCITEEFIYSLYEGRGKSKLKSTLMEMYEALNGKIRGHHVILLGMHNSNIVFLEKQINELEKEIDILLQKERDSLELLETIPGISKISASSIIAEIGTSMDVFKTEKHISSWAGLCPKNNESAGKKKRSGIKSGNNWLRSMLCECAWSATKKKDSRFKNKYWSMVPRMGRKKALIAIANMMLRLIYHLLKTKSTYKELEIQYFIDKDKRREDRIIKELKSKGYLVEKDSLQMA

SEQ ID NO: 305459 - protein, 354 aa, unidentified
MKQGYFIGLDAHGSFCELAVVNGTGELVERGRCRTSIAALRALIEKVASPRHVVFEEGPLANWLSRNLTDQAESVSVAQPRRNRLICCDGDKDDPVDAEKLAQLLRGRYIKTVHQIASLEDTVFKQLVAQYVRRVRRRVVVGQQLSGLFKQHGVIAQAKHFAKEEDRVVLLGQLPEQALLRELLQESLTEYDAALECEQAWRQRVVERAKQDEVVVRFTALPGISWIRAATLRVYLDTPWRFRSPKALWKYLGIGLERRHSGSGPEILSVPWQVNRLLKSTILGAARSAVAQGDNPFADQYRRWLEHGLSAKLARRNVARSMAATLWGLWKSGTVYHPEWVGVNLAATKGIEKS

SEQ ID NO: 305460 - protein, 391 aa, unidentified
MSLYFVRIDISKYKHDCCIISATDQKVISKFTIKNDKAGFEELITTFNSLSSPENIRIGFESTAHYALNLELFLENAHHSFMEVNPVLIKEYKKSTTLRRTKTDSVDCESIARWLMTVDYKPHSKGFYHAYSLKSLTRLRDRLIRQRSFYLVKITNVLDHTFPEFKPFFNERLSKTALYLLENYGSAEKMARMNSVSYEKLRSISRGKFSPQQFIALKNLAANTVGVNNSIFDVELNSLLTLYKTLVTEINSLEKEINLLIEEVHPHYLSVPGIGSISAAIIYSEYGDISNFDNPGQMLAFAGIEPGINESGTESHGGRMVKRGSSQLRYALINCCLPLIRFDMTFATYYAKKRAEGKPHRVAITHVAKKLIRVIYALERQDTDFCAQKLR

SEQ ID NO: 305461 - protein, 341 aa, unidentified
MAQATTIGLDIAKYVFQVHGADRAGHVLFRKRITRAKLLGFLAAQDPCVVAMEACAGAHYWAREIGKLGHHVRLIAPAYVKPFIRRQKNDAADAEAICEAAQRPSMRFVPVKTEEQQANGIVFRARDLLVRQRTQCVNALRGHLMEYGHAFPKGITHVETLAALVEDLQSSLPGRVRVILKLLVDTFTALEAQITALDAEINQRSKSDPTARRLMTIPGVGPIVSTAITALVPAAEEFPAGRDFAAWLGLTPLQKSTGGKQKLGAVSKRGERTIRRLLIIGASAVVQQASRRGAPKGSWLAQMLARKPKMLVTVALANKMARIIWALLVKGGTYRTPTAAA

SEQ ID NO: 305462 - protein, 386 aa, unidentified
MQTLNDFSRSLIALKPARTLIAVIEMSLSSWLVAGIVPGIERQPLKKIAVDESALLRLLYRWREEAEKAGCRIERIVVAFEAGRDGFWLARWLKARSIEAHVIHAASVAVSREHRRAKTDRLDTELLKRAFLGWLRGERHHCKVVAIPTLKDEDAKRPNRERESLVGEQSRIVNRMKAALIRLGIRGFNPKLKRAAGRLDSLRTPEGEPIPPNTLAELRRDMERRRLVRDQIRQIEEARLERLDHAPGDGPHAMVRLLVRVIGVGIETADMLVHEVLSRNMRDRRAVARYAGLTGSPDESGRKRREKGLARSGNGRVRRGMIQLAWRFLMHQKDSALAHWFRARTENARGTRKSMIVALARKLLIALWQLVRQGVVPDGVVLRPAQ

SEQ ID NO: 305463 - protein, 451 aa, unidentified
MADSFDNQTIHQIHPHAAGIDIGSDAHWVSVGAGVTSPSVRQFGCFTADLYAMAAWLKECKVTTVAMESTGVYWIPVFQILETQGLEVRLVNAHSVKTVPGRKSDVLDCQWLQQLHSYGLLSGSFRPEDQICVLRSYVRQRERLTQSASVHIQRMQKALVEMNLQLNRVVSDITGVTGMRIIRTILSGERDPERLAALKDPRAKRSVAEIAAALHGDYRAEHLFVLQQEVQLYDTYREQIQQCDQQIEQCLSQFESRPESDAPLPPRPQGRKPSRNAPPFDLRSHLYRISGVDFTQIDGLEALTVQTILSEIGLDPTRFPSAKHFVSWLGLCPGSHISGGKILSSKTRKVSNRAATAFRMAAHSLANSHTALGAFYRRIRSRLGPPKAITATAHKLARIFYHLWVTGERYEDPGVDYYEQQYQERVLKHLEKRASQLGFQLTPVTASKEVS

SEQ ID NO: 305464 - protein, 387 aa, unidentified
MSVIIGMDPHKSSATIEVVDEHGKIQAVGRYGTDKAGYGEMLKAGRKFDERIWAIEGCNGIGKHIAHRLVHDEESVVDVPPKLSAQVRVFATGNGRKTDPVDAHSIAMVALRSPNLVRVEVDPDLVVLGMLVDRRDALGRGRTQTINRLHRLLLELFPGGAKRYLSSRQARALIATIRPRDIVGKTRRRLVVELIDEFEGFDKKIKAVKKELKELVIARGSTLQDLHGIGPSGAARLLADVGNIHRFVNRDRFASWNGTAPLDASSGEQNRHRLSRAGNRRINRALHIMAVVQLRNPTKGRAYFDAKVAAGKTSMEAMRALKRRLSNVVYAQMLADQKRSETTGPGGHLGTTLQSGVTDLTPDIGSWDKPLPGPATSQPRTAVPAAS

SEQ ID NO: 305465 - protein, 460 aa, unidentified
MSRERSKKQKRAGQGGAVPSLNCIEPNAAGIDVGATEVFVAVPQDQDPSPVRSFETFTQDLHRLKEWLQQCRITTVAMESTGVYWIPLFQILEEAGLEVCLVNAQHVKHVPGRKSDVIDCQWLQYLHSVGLLRASFRPEDRVCVIRSLLRHRDSLVQMAAAHVQHMQKALTQMNVQIHHVLSDITGQSGLAILDAIVAGERNPVVLAQLRHSRVQASEEEVVKSLVGDYRREHLFTLRQSLEAYRYYQRLTTDCDAEIEQQLQNFDGHLPPDAPALPPARYPHSPRKNEFRFDMRSELYRIFGVDLTAIPSINALTGYTLLAEVGTDWSKFRNIHAFASWACFCPHNKKSGGKVLSAKTRKSANRVNRALRLAAQALERSTSYLGIFYRKMCARLGRPAGITATAHKLARIIFHMVTTGRAYDESIFAAEEQRQRKHLESSLRRKAAKLGYQLIPLPQTA

SEQ ID NO: 305466 - protein, 361 aa, unidentified
MTESTPIVAFDQHATTVAAVLLPGQRTPALHALASDSPTILRFVARLRRQGPVECCYEAGPCGFELQRALTSHGVACAVIAPALIPRRPGDRIKTDRRDAGQLAVLYRAGALTAIHVPTEQEEAARDLLRCREDIRADLLRAKHRLSKFLLRHGRRFTGTKRAWTRRHTAWLQAQTWTEPALGQTHRAYVRAVDEAFARLHAIDTELRDLLPLEPLRARVERLRCFRGIDDLTALTIAAELGDPRRFPSAPSLMAFIGLVPSEHSSGTKQARGAITKTGNAHVRRVLIESAWHYRHHPFLGRTLRLRQHGAPAAAVDVAWRAQSRLHRRYRRLAARGKPKQLIVTAIARELTGFLWAALTQ

SEQ ID NO: 305467 - protein, 461 aa, unidentified
MSKKRVPAKQKQAGGKKVDWRALEVMHPDAAGIDVGGSEHWVAISPERDPEPVRRFGCFTADLHEMARWLVEKGVRSVAMQSTGVYWMPVFEILEQHGLNIILVNARDTKNMPGRKSDVQECQWLLKLHAFGLLNNSFQPTDEIRTARTFWRQRGNLVAEASSTIQRMQKALIEMNIQLSTVLSDLSGVSGMAIVGAILKGERDPWKLAALADRGVKATAREIALSLEGNWRKELLFVLGQEVDLYRIYQKKIADCDRQLRKHLESFGSKVDTKAQPMGPKPKGKGSSKNAPQLDLRTELYRITGIDWTQVNGLDVITAQTVMAEAGVDLSEFPTERQFSSWLGLCPTNERSGGKILNRRTRKVVNRAAVAFRTAASTLLRSQSYLGAQYRRLRTRLGAPKAITAMARKLACLYYRLIKHGHQYVDKGNEYYEARYREQQIRSLTKKAQKLGIKLVMPDAA

SEQ ID NO: 305468 - protein, 346 aa, unidentified
MNSMNYIGLDIHKKSISCCVRQADGTIMQEGTIPATRDALDNWMKQLPQPWMAGMEATLFTGWIYDHLESCGATVKVAHPAMLQAIAAGKKKNDRVDARKIADLLRCDYFPECHMAPREIRDRRRVLRYRNLLVRQAVQMKNKVSGLLMEAGVPYNQQKVHQKKYFAELLQKQKKEMPPSMPELLRLSRSTVEALTGMQRQLIRALERDALLAARVERLASIPGVGRVVALTWALEMGDIRRFASVKKAVSYCGLCGAEKSSGGKTERTPISKQRNKHLQTILVEAAKLAPRWSTELALVYEREKQRGNRNRATLAVARKLVAYLMAVDREQRPFDTQLRVAGNAA

SEQ ID NO: 305469 - protein, 394 aa, unidentified
MRYAGIDIASETHVLAIVAADGTVAVKPTAFAEDDLGYQNALTLLGTPGEVLVSMEATGHYWKNLFAVLVAAGHAVALLNPLRTHRFAGVDLERTKTDAIDALAIARFAAQKRPPTTPLPDALAEELRELVQLRQRLMQDFGDRVRQLHRLVDLGFPEFTRYVRTLDSELATAILRDYPTAAAFRGVSARRLAAVRYDGRHQVGPNLARTLIDAARRSVGQHHSATYRLQIRYACDDLDTLRGRLRTLDRDLDGKLRQHEVGRLLTSIDGIGPQTAARVIATVGNPAHFRSGTALAAYVGTIPALKQSGKRQSLRGGHTPIGNAQLRAALWMPTLSAVRCNPWLRAHYQRLIARGKLPKVALLACMRKPLLVIYSVAKHGQPFAPRLQPPQAAT

SEQ ID NO: 305470 - protein, 345 aa, unidentified
MEQHAGIDVSLEWSSVCIVDASGKIVREIKVASEPEVLVEFFKGLSLPVTRIGLEAGPLSQWLHAGLSRAGFETVLLETRHVKAALSAMSIKTDRNDARGIAQLMRMGWFRPVHAKSVGSREVRALLVARKQLLSKLMDLEASMRGILRGVGLKMGVVTRKGFEARVRELSAGQAMLERVTSAMLEARAALWREFEQLHREMLRIVRDDEICQRLMSIPGVGPLVAITFKSAIDDPGRIAKSKTIGALFGLVPKKYQSGERDVSGGITRTGDESVRTALYEAANVMLTRTTRFSSLKRWALEVAKRRGLKRARVALARKLGVVLHRIWIDGTTFRWTKPNPAIAG

SEQ ID NO: 305471 - protein, 347 aa, unidentified
MTIVEAARGVTGGVDTHLDVHVAAALDPLGGLLGTERFETNAAGYKALLGWLGTFGDVTKVGVEGTGSYGSGLARYLRRVGVEVLEVDRPDRQKRRRSGKSDPLDAIEAARAALSGRAKGKPKSRDGAVEAIRVLVVAKRSARQARGKALVQMRHLGYSAPEQLRCRMKGLSVPALVAEGKGLRPGRSPDPVTAATKASLSSLAHRISSLDDELAELNERIEALLIATVPDLLNLFGVGPDTAAALVMAAGDNPERLHSEGAWAHLCGVSPIPKGSGKNSGRVKAHDGGDRQANSALWRIVMVRIAHDPETQLYFERRVKEGKTTHEVIRILKRYVAREVYRYLPRA

SEQ ID NO: 305472 - protein, 406 aa, unidentified
MRQRSLHSGAFLREAIRPLILIVARHKEDYDNFAEQLAAIGRPIVVGFEATGNYHRTLAHRLLTAGFELRLISSVALARTREALHNGWDKNDSKDAQVILHMLRIGATQRYVDPLAAGINDLQELSKPHEVVSKMKTQTWHRILTHYLPLYFPEIARFAGNSRSDWFLAQIERFPTPTSITALDRDAFSAEAWPLIGRKVSKARLINDVYETACSSAALPVPEDSIAITMFRMVIAQGRSLIHQRDEIERLAHARLAEHLDYQLLRNIPGIGPINALTILAEAGDLRRFNHHRQFLKFCGLDLATCQSGTFRGRTKLSKYGNARLRRTFWMAAQVAARQRDNSFRDKLGRYTAGHADDADRRRKAMTALTAKMARVAHAVVKTGTEYRPFLERSDARWKAPSLQVP

SEQ ID NO: 305473 - protein, 340 aa, unidentified
MKTSKKNYLGIDVSKPWFDVSLLSELNHVKQPMLTLRFDNTAQGLKLFKKWLTAQHVSFDNNTLLVIENTGIYHRLLWRFCSTHNLQLHIGNAAHIKWSLGITRGKSDIIDSKRLCLYCCKQAEELKATPALNPVFMKLKDLMTSRSRLVAQLHSTKNYLKEIQCTEDKQLLLVLESLHKAAIEGLKKSILKIEEYITKMIKEDAAIYHNYELIKSVPGIGHLTAVYIICCTNNFASKISGKQLASYAGVVPFEHSSGISIKGRNRVHKMANKDLKKMLHLCALTAIKYYPEFSNYFNRKKAEGKNGMSALNAIRNKLVLRVVAVVNKQTPYVDYSVKVA

SEQ ID NO: 305474 - protein, 424 aa, unidentified
MKNTAARKRKQVPERYLVVGVDPHKKRHAAVAITQDFTAQAKFKVDNTREGLETMLDRARAEMVKSCCRGVIFAIETGGHYWRNIAYYLDERGIPFRFINQYTLKRRREGKDLNRRKNDYRDSEVAAQLLCTGEFVESVIPQGVYAELRSSHNAYARLVKERTRITNLVKGLLDGLFPEFTRVFKDPGALTALTVLSTCPIPGVIAGMTEDEFMTTIEARHKGRRLMRRKLRTLHYSARISIGIQAGAYSMSSEIAFLVDKLELIKRHIHIMKTTLTKLVDETEEGKYLLSIRGLNYTAVAGLLAELGSFKLYRSPKQMIKMAGSNPTESESAGKKRSKTPMSKRGRPLLRHCAWTAVIPMLRFNADFRAWAKQRRERPAHANPLNGREIVGAALNKLLRLAFALVKNQTYYQDARPALIPVAV

SEQ ID NO: 305475 - protein, 343 aa, unidentified
MDYFAGLDVSVKETSVCIVDDTGKIVREARVASEPEALLQVLTNTNYRFKRVGLEAGPLSQWLFTALAEAGLPVICVETRHMRAVLKAQINKTDRNDARGIAQMMRVGLYRPVHVKTLRSQKLRMLLTHRKLLQSKAIAIENDLRATLRNFGLKVGMVGTVKFEARIKELVANLPDLAALVEPLLIVRRVLREQLGILHRRLLAIVRDDDVCRRLMTIPGVGPVVALTYRATVDVPARFRNSKAVGAVFGLTPAKYQSGENDRTGAISRCGDEMMRMMLYEAAQSMLVRSAKWSWLKAWAMKIARHRGIKKAIVALARRLAVIMHRVWVDGTEFRWTREVAVA

SEQ ID NO: 305476 - protein, 482 aa, unidentified
MKPKPQEKTKKATDHPRQQHWREMNRQQRREMMRNIQSEDISLEVVHPDAAGIDIGNESHYVAVPLSRNSQPVRRFGCTTAELKAMADWLQQCGIRTVAMQSTGVYWIAVYDVLEQAGLEVYLVNARETKNLPGRKTDVQESQWLMKLHTYGLLRNSFRPSQEIRMMRTYWRQRNDLVQSAGRHIQRMQKALTQMNIQLANVLSDVSGVTGQAIIKAILGGERDPHKLAAFRNPRVKASEEQIARSLEGNWQEDLLFVLKQEQDGYEFCEKQMAECDRQLNHYLKQRADRSHGAPLPEEKRKGRLKKKSGNKPQFDLRTGLFRMSGTDLTRVDGIDVITATTILSEAGWDMSKWVTEDHFVSWLRLCPDNRISGNKVIGKGRLPTNNRVTIALKMAASTLRLSDTYLGAQFRRFRTRLGAPVAIKAMAAKLARLVYRMLCYGMKYVDKGAALYQAQHRHLQIKQLNRKAASLGYQLIPVPAA

SEQ ID NO: 305477 - protein, 351 aa, unidentified
MLAPTQIAVSVIGIDIGKNSFHIVGLDQRGAIVLRQKWSRGQVDVRLTNMPPCLIGMEACVGAHHLSRKLRALGHDARLMPAKYVRPYCKGQKNDFRDAEAIAEAVQRPTMKFVATKTADQLDLQALHRVRERLVSQRTGIINQIRAFLLERGIAVRQGQRFLRVELPRILAMPPDVLSPRMVRVIEDLASDWRRLDERIETLSSEIETLARQDAGCERLMSIPGIGPIISSAMVAAIGTGDGFSTGRDFAAWLGLVPRQISTGDRTILGKISKRGNRYLRVLFVQAAWVVLVKVKPNRWDGHGLKHWIEAAKKRLHHNVLAIALANKLARIAWSVLARGRAFEASKLQAA

SEQ ID NO: 305478 - protein, 412 aa, unidentified
MQDILTCAMGLDVHRDIIVACLVKGAVDAEPEAETRTFSTLIPEMQKLRDWVIESECRNIAMESTGIYWQPIYEMLESCFDGEISILVVNARHMKNVPGRKTDMKDAQWIATLLRAGLLKGSFIPDKAFRELRHLTRYRKSVVHDITAQKNRIDKFLQSSGFRFTAFLSDTFGASGRNIIRHLIEHGSIDREALDKCLKTKTRNRIDEILVALNGSLSEHQRRFLNMVFRHLEDLEAHKHTVEDEITEEVLKHTDALNLLCSIPGIDVTAAAAIIAEIGTDMSSFPDSQHICSWAGLSPGNNESAGKRKSVHINKGNPYLKSMLCEVAWIMASHRKLYLSGWYWKVKQRKGAKRATIALARKILSIIYTMLKTGTPYNEECFEQRRLRCERKRANRLVNELQKLGDVVVAPD

SEQ ID NO: 305479 - protein, 471 aa, unidentified
MGKGSGGNGMTRGDRRRNARRERLRAMLPRDGAVIGIDLAEDKQALAVIDHDVRVLARKTVRVKVFRLGAALDWAVGQARAKGFGQVTVACEPTGPRWLQVQRLCAERGLPLVCIQPLISHIAREQQDFTRHKTDESDCVMIARLAVELHCYVPEELDETWAHLRHLGRRRAQLITAATASAQRIRDFLSVAWPTVPETCARPLESVTWLAALQVVTAKCGADPGKLAAMGEQEFTALVRGAVPGWGGQKAHGPISRRVFAALTDTEGVVVSSRRGLLRRVADELGDLQRTRAQLRAVEADMVAALDELGLSRLADIPGLTAVGAAAVLAETGDPHRYDNSSSLVKHAGMSPSDNASGAFSGQAHISRRGRPGLRLVVWRAVWPMLQFNPVMAAKYQAMTRAADTATAAGPQQGRAAQAAARARRAKARVACAASLLRWIYCMVVHDTDWDPAVASGAASRHAPHTQAEAA

SEQ ID NO: 305480 - protein, 344 aa, unidentified
MEVLIGIDPHKAANSLAVMDGRGEVVEQERFATNRAGLRALDRFGRRFPKRRWAVESASGLGRPIAQRLVAQGESVVDVPAKLSARTRLLSTGNERKNDSLDATYTALAANGRNGLTEVLEEGHAAVLRMLSDRRDDLVKERTRALNRLHVLLRDLVPGGAKRNLSAGDAAKLLRSVKPCGGAACARRQLACDLITDLRRLDRQISELERRVRAAVKEATTTLTKLFGVGPILAAKIIGQVGTIARFPAKAHFASYTGTAPIEASSGDVVRHRLSRIGNRKLNHALHMIAIVQIRHDTDGRAYYRRKVAEGKSGKEALRCLKRRISDAVFKALSADLERSSVLT

SEQ ID NO: 305481 - protein, 421 aa, unidentified
MQVLYERCAAVDVGKDVIAVAVRLPGGEPDGRQTIRRTFKTFYGVLREAARWLGSLGVTHVAMEATGIYSMPVYHALAGHGHFEQVLVCNAAHVKNVPGRKTDLADAEWLVHLLECGLLRGSFIPPAEIKAARDVLRYRTKVVQQRTSELQRLGGVLQDAGIKIDSVASSIATRSGRAMIEALIDGERRSQVLADLAKGKMRAKIPDLELALEGRFGDHHALMCRLHLDHIGHLDEMIAKLDAQVEAMMAPFRAERQLLTTIPGIGPLAAAAVIAEIGASPARFFPDAARLASWAGICPGNHESAGKRRSGKPRHGNQQLQPVLVEAAWAAVRHHGYLKSLYHRHVMKWGGYRSPVAKKKAIIVVAHAMLVIIWHMLAGGAPYHELGADYFTRRLDPERETRRLITRLEALGHHVSLQPAA

SEQ ID NO: 305482 - protein, 392 aa, unidentified
MTYFIGIDLAKYKHDCFIMDENGEVIRDSFSFNNDKEGFNTLLNVLNSLDSNQEKRIGFESTGHYGSNLKIFLERNGYSFMEFNPLLVHRHFKSETLRRAKNDKVDARKISSYLYTREYKPNPNSSYHLNCLKSLTRTREALIKDRTRHIIHMINVLDKMFPEFKLQFGNQGLNAASAMYLLENYGSPSKMSNMTRASYDKMKSELRHTISYAKFLRIKELARNTIGNEDEILVFELNTYLELFKELDKKILKVEDKITKEFSIMKCHIASIKGIGIITAAGILAEIENIDRFDNPGQLCAFAGIEPSENQSGTHDGGGKMVKHGSPHLRNYLMQSAGYMLIHNPVLYEYYLKKRNEGKCHTVALSHVAKRLTRIIFYLEKNDTDFNIDKMR

SEQ ID NO: 305483 - protein, 401 aa, unidentified
MESPIVSIDVSNGNSHYMCFIKNNKRFGKVKKIDHDIEGFKRLLEDIQKLEAETNEKVCAVFEATGVYTKPLERFLSKNSIKTYIINPLESARKRKEEIHNKKTDKLDPISISKVYYDKEEMMELKKKDKTYNWLRKKNRLYEDQLNHLRKYKVTFQNQLSICFPGYLDLFKDGYSDIPMTILKKYPHPDLLKNKKAETVARYLEKNTCHTHKVSLEYALKIIGFAKKTYPGCEKDDVEVEIFKILLDKVIETQRECEKTLNEMITVASTLEEYRYISSIDGIGPNLAARIIAEIGDIEEFKSREALVAYAGLDPHIYQSGDQDGKHLKISKKGNKYLRCLLFLAVGCSIRGAKDNPVNRFYQKKKQQSNPLNSKAAKTACTAKLLKIIYGICKNKTTYER

SEQ ID NO: 305484 - protein, 377 aa, unidentified
MKKVRFLGLDVHAETIAVAIAEPDGEVRSLGTIPNREESIRKLVKKLGPAEQLQACYEAGPTGYVLYWQLTSLGVKCEVVAPTLVPIKAGDRVKTDRRDATKLARSYRAGDLTAVWVPDEAHEALRDLVRAREAAKQDQLRARHRLSKFLLRQGRRAPAGVKPWTEKYMEWVRQQVEFEQPAQEYVRLDYLHEVEHADERVRRLEEAIGEAVKQAPAPMREVIQALQALRGIAQVSAVTMVSELGQISRFARARQLMGYSGMVASEHSTGRRVQRGAITKTGNAHLRRVVTEAAWAYRHRPAIGATLRRRQQGVSEEVKEIAWKAQHRLHQRYRSLAAAGKNQPKLVTAIGRELLGFVWAIGVQVEHPGNQPRRLAA

SEQ ID NO: 305485 - protein, 403 aa, unidentified
MNSVGIDISKGRSTIAVMRPFGEVVISPFEVRHTGSELSKLAKQLKSLDGETRVVMEATGNYHASVAKLLHNAGLYVSVINAKLVHGYGNNELRRVKTDRKDAVKLANYGLDRWLTLPRYIPEEDTRLLLKNCYRQYRQYSKVETVLKNNLISLLDTVFPNANRLFSSPIRGDGSEKWVDFVAEFWHCRCVSEKSERAFTSKYLRWCRKHGYNFREAKAHTIYAEASGHIGVMPKSETTKLLVEQAVAQLRATSTALAALKHEMQSLASQLPEYPVVMDLFGVGPTLGPQLIAEIGDVRRFYSKKALVAYAGLDAPPNDSGDVTGRHKSMSKIGASSLRRTLFLVMSVYLQTAPLDEPVYQFMDRKRAEGKPYRVYMMASANKFLRIYYATVKAYLESLEHTA

SEQ ID NO: 305486 - protein, 343 aa, unidentified
MEYYVGLDVSLKQTSICVVDQAGLVVREGVVGSDPEAISVFVRSKAPGAVRIGLETGPTSTWLWTELKRLGLPVICIDARHAKAVLKMQINKNDRNDAIGIARIMQTGWFKEVHVKDIDSHSVRALLASRALLVKIKRDLENHVRGLLKNLGLVIGRATFNVFAVRAEELIEDRPDLVAAVRPLLEARNAVEQQVSELDRKVMKLARRDAQVQRFMTVPGVGPITALAFKATIDDPARFARSRSVGAYVGLTSRRHASGEIDWSGRISKCGDAMLRSYLFEAAGVLLTRVPKWSTVKAWGMRLAKRNGLRKAKVAVARKLAVILHRMWIDGTKFNWSKKEIAA

SEQ ID NO: 305487 - protein, 489 aa, unidentified
MKAKTKENSKELRKTNKATHPTIQQPQWHRMNRKQRRELARSIQSEEITLEMVHPDAAGIDIGNEVHYASVPPNRDSESVRHFGCTTAELKAMVDWLKQCRIRTVAMQSTGVYWIAVFDILEEAGFEVYLVNARDTKNLPGRKSDVQESQWLMKLHTYGLLRNSFRPAQEIRRLRTYWRQRNDLVRSASRHIQRMQKVLTQMNVQLANVLSDISGMTGQAIIKAILAGERDSRELAAYRDRRIKASEEEIAAHLQGNWQEDLLFVLKQEQDGYEFCQKQMSECDREIEHYLAQMEDRSQGADLPKEKRKTRLRKKKGNTPEFDLRMELFRMTGKDLTQIDGVDVMTATTILSEVGWDMSKWKTENHFVSWLRLCPDNKISGAKIIGKGRLPTNNRATNALKMAASGLRTSNTYLGAQFRRLRTKLGAPVAIKAMAAKLARLVYRMLRFGMDFIDRGAEFYEAQMHDLQVHHLKWKAAKLGFQLSEIPAA

SEQ ID NO: 305488 - protein, 366 aa, unidentified
MRKASTSAVCRRGKLRDGELTIGLDLGDRSSFYCVLNSAGEVILETKVATSPEAMKETFSKMTRSRIALETGTHSPWVSRLLSELGHDAIVAHARNVRLIGESRRKDDRLDAQALARLARIDPRLLSPIQHRSAQAQADLSVIRARYGLVRARTALICTARGLTKSFGERIRGRNPKAFKPAMGETLSPQLQTALAPLLSALEAITARIREYDAQIERLAEETYPEVALLKQVKGVGTLIALTYILTLEDPRRFRKSRDAGCYVGLQPGRRNSGESERQLHITREGDSYLRMVLVQGAQHILGPFGDDSDLRRWGLKLAERGGKNGKKRAIIAVARKLAVLLHHLWISCEAYEPLHNTRRRRMAAA

SEQ ID NO: 305489 - protein, 450 aa, unidentified
MARRREKRECRAVVLEPDAAGIDVGAEEIYVAVPPDRDEESVRRFSSFTCDLHSLADWLIQCRIRTVAMESTGVYWIPLFQSLEARGIEVFLVNAHYLKSVPGRSDVSDCQWIQYLHSVGLLKASFRPPGDICAVRSLWRHRGSLLQMASEHIMHMQKSLSQMNLQIHHVLSDITGVSGQAILDAMLAGERDPMQLAQLCNWRVKSPRAKVAKALEGDYRSEHLFTLKQSLDGYRYYQKLIAELDREIARLMQILPSPRGGSQPIPSRTKHSAFQRQGNDPRFDLRRELYRIVGVDLTDIPGVSAVTAQVILTEIGTDVSRFRNASAFASWLGLCPERRISGGKVLSCKTRKVKNRAALALRLGANSLCRATGYFGEFFRRMRAELGTAQAITATAHKIARILYHVLLTKEPYTETIFHRCDEHARQRAEMRLRKRFPAWMGSGTTTRRS

SEQ ID NO: 305490 - protein, 345 aa, unidentified
MKITTIGIDLAKNVFQVHGVDEGGKAVLRKQLKRKDVVSLFANLEPCLIGMEACGGAHYWARKLAALGHTVRLMAPQFVKPYVKTNKSDRNDAEAICEAVARPNMRFVPVKTGEQQAVLSVHRARQGFVKARTAQANQIRGLLAEFGIVIPKGMGHIAKRLPEILEDGENGVPGMMRELLQRLGENLKDMDGQVGELERQIKLWHRDNEQSRKLEAIAGIGPITASAYVASVGDAKSFKNARQVAAWLGMVPRHEGTGGKVRPGRISKRGDVYLRTMLIHGARSVIAQFERKPDQANGWLKELLARRNKNIAAVALAAKNARIAWALLAHERSYQGDYVARRTAA

SEQ ID NO: 305491 - protein, 409 aa, unidentified
MLFAGIDWASEEHAVAVHDDAGKSVAAFMVEHSAEGLDKLVARLRGMAEPAELTVAIERPDGRLVDRLLEAGHPVVAVSPNAIKVWREGEVASGAKSDPGDAAVIAEYLRLRFRKLQALRPFSDETRALRAAVRARGELVDQRTVVHNQLAAILDAFWPGAREVFADIASPIALAFLRRYPTPASAGTLGEKQMAAFCKKQGYSGRRSPAELIERLRKPPAGIVAGAEMGARKAAVLAYVKVIASLNAAIKDLDKEVATRLGEHPDGEIFTSLPRSGLINAAQMLAEWGDCRQAYDGPDAVGALAGMSPVTKKSGKHKSVHFRWACNKRFRNALHTFAGQSRHGSDWAAGIYDRARKRGADHPHAIRILARAWIRVIFACWRDGVAYDPAKHNAAAAPAASSDSAPQAA

SEQ ID NO: 305492 - protein, 319 aa, unidentified
MEKEKVYIGVDVAKESLDIAVHPKHSPKRFKNNKTGISGAVSYVKNLTPSLVVMEATGGIEMSLTVALGASGMQVAVVNPRQVRDYAKSMGKLAKTDTIDAQVMADFAAAVQPEPRPVSDCQTRELRDILARRCQLNEMITAEKNRLDRARRPVSDHIKAHIAWLEQELDEMDSNLCRFVQESPIWREKDNLLQSIPGVGSVLSTTLLAELPELGMLNRKQIAALVGVAPLNRDSGKFRGKRTVWGGRAKVRAVLYMATLVATKHNAVIKSFYERLCAAGKAKKAAITACMRKLLTIMNAMMKHQTSWRLISNQSVISC

SEQ ID NO: 305493 - protein, 417 aa, unidentified
MTDGKNASPCRYVALDIHKHYSVIAAVNRDGEIVLDPVRIEHEDLEAQLRKKLLPSDQVVIESTTNAWHIYDLLEPLAAKVLVANPIRVKQIACAKVKTDIRDTLILARLLAANLVPTVWVPPVEVRNLRYLLSQRRRLVGMHTQTVNRMGSVAHRHHLNHPKGKRFIEKNTEWQQDDELSDSEKFQLELDMVTGEHLDGQAKKIAEKTARMSQEEPWAASMMYLMQLPGFGVITGMTVLSAIGDIARFEKPKNLSSYSGLTAGVEQSGTKNRGKGITKEGRKELRWAMVEVAQRAVKSDPYWKSRFQALERRMHRNQAIVAIAHQMLELVWHVLTHKQAYRHFSAERIAYKYLTWGWQLDEEARDGLTRQQFARYYLMRLGIGHDLKRIALNPKYPRKLASEAEVLALKPELNQTK

SEQ ID NO: 305494 - protein, 429 aa, unidentified
MKYSHNNTNENLKQLTSETLIIGIDISKVTHMARATDFRGMELSFTLKFSSNIKGFRELLKWIHTLSVAHEKSNVIIGIEPTGPYGHTLAQFLVHNDFQVVLVLGKQVNTAKELDDNTPSKNDPKDALLIAKLISEGRFRKLREFDEPTSSLKEAMSYNHQLTKDITRVKCRVDNWLCMYFPEFSIVFKDWTKKTAYVTLQNFPMPQDINLLTTMQIVTTWRENGVLRGIGTKKASELKVFAKNSTGLKSAAEFADIHIRGLIAQYEQLLQQQDELWIAIEALLKDIPLYNTLMQIPHIGKKAACGLAAELGDVNDFSHPKQLIRLAGLSITQVSSGKKRGMSQIIKRGRPHLRHWLYLAVLNLLKEKEPAFWALHQHYTKRNENPLKPMQSIIALCNKLLRIIFGMATKGRNYDPTLITSGVPALNAA

SEQ ID NO: 305495 - protein, 454 aa, unidentified
MAKKPEKRECRAVVLEPDAAGIDIGAEEIYVAVPPDRDEESIRMFSSFTCDLHALADWLQKCRIRTVAMESTGVYWIPLFQILEARGLEVYLVNAHYLKSVPGRKSDVSDCQWIQYLHSVGLLRASFRPTMEICAVRSLWRHRASLLQMASEHILHMQESLSQMNLQIHHVLSDITGASGQAILDAILAGERNPVQLAQLCNCRVKSPREKVAKALEGDYRPEHMFTLKQSLDGYRYSQKLIAELDREIQRLMQTLPSAVETGQEIPQRTKHSAFQRQGNDPGFDLRGQLYRIAGVDLTDIPGVSAVTAQVILTEIGPDLRRFRHASAFASWLGLCPENRVSGGKVLSCKTRKVKSRAALALRLGANSLSRAKGYFGEFFRRMRAKLGTAQAITATAHKIARVLYHVLLTKQPYTETVFHRSDEHARRRAEMRLRKQAALLGCQIIPVPADSAT

SEQ ID NO: 305496 - protein, 409 aa, unidentified
MGDDWAEDHHDVELMDASGRRLAKARLPEGVAGMARLHAMAGEALGDDAEDGDPGQVVVGTETDRGPWVAALIAAGYTVYAINPLQASQYRKRHGVSGAKSDAADAHVLADMVRTDSHQLRAVAGDTAQAAAVKVAARAHKTLIWERTRHMQRLRHSLRDYFPAALEAFTDLAAPDTLELLAKAPDPASAAKLTTAQITAALKRARRRAIPAKAAAIQAALRSERLGQPGAVAAAYAATVRAATAVLTVLNEQISTLEGQAGAHFSQHPDAEIIGSQPGLGAILGARVLAEFGDDPHRYADARSRKNYAGTSPITRASGKKKAVLARCIHNDRLIDALTRQAFTALTTSPGARAYYDQLRGRGVSHYAALRQLANRLVGILHGCLKTRTLYHEATAWPQHTAKAEKAAA

SEQ ID NO: 305497 - protein, 391 aa, unidentified
MRYNIGIDLAKSKHSAAVIAPGGERLLAGFEFRNDEEGFASLLAKLSEVGAGCEESGVCLEATGHYGRNLIAFLEAHGYAVFEVNPLLTSNWRKAMSVRKVKNDAVDAEALASWLLAGNPTRRRRSKSETDDLRSLARSRTSLSHIVGDCKRKAHAIVDVVFPEFHGFFSDDFGRAGLAVMTRWGSAANVAKARVDSVEKAMREAAGKKFGRADAERLKALAKSSVGHPSAPLEFQLRQLVAQIEFTQGQMKELDAELEKLLEGTLITTIPGIGTVCGAGILGEIGDASRFSSAAQIVAFAGCDPSVFESGEFEGARARLSKRGSPHLRWYLWLAADRARMSDPVLRDYYLKKRAEGKCHKVAISAVVRKLCAIIFAVLRDGKPYVCPAVV

SEQ ID NO: 305498 - protein, 417 aa, unidentified
MKCFVGLDISSTKLDVCIMLSDTSTPVTASLSNDLSGATEIKNHILDLNHTYHFERIVIGMEATSLYSFHPAMFFHEDRQLKELHVEIMVEQPNKIKKYRDAFEENKNDTIDAFYIADYFRIERFSPSFLKEEKYMALQHLTRTRLQIIEQLTRTKQHFIENIYYKCNTLAYQFKKEELSTNLWSSTMMTLMTDEMTLDELANMPLQELDDWLQKLGKGHFKDSEKLAQTIQAAIRGSYRLSKLQQDSVNVILGLLAREIRNLEKMIKEIDKAIEDMVETIPEYQCLTSIPGVGKVYAAGIIAEIGQIERFKDHPQVAKFAGLNWREKQSGNSNSQHTSLVNRGNRYLRYYLVEAANSVRRYDDKYKDFYKKKYHEVPKHQHKRAILLTARKFVRLVDVLLRNHQLYTPPRRIMEDN

SEQ ID NO: 305499 - protein, 344 aa, unidentified
MMNKQLKTNVSKVNHIYQAGIDVGAEELVMVIRKNGKLLNPQTFANTKADRARLVMKLVKLTGVIVCMEATGVYHFDLAIALHDAGVLVMVINPKSSHNFAKVLMKNSKTDAVDANTLAEYAARMDFVAWTRPSNETIAVRCFSRRITALTTQKAAAKNHLHALTATQETPKALLRDAKVAITQLEKRIDRLTAEALLLIAKYPKLERTLTLLISIKGIAQTSAISLMGELLLLPPDLTHREWVKFAGLDPKAFDSGKSVHKKSRISKAGNRNIRAALYMPALSAKQHDPHVKAYFQHLVANGKKPLQAVCAIMRKLIHAIHGMLKNDEPFDNTRFYKIPASAV

SEQ ID NO: 305500 - protein, 412 aa, unidentified
MVVCGWHVRGELAEVAVPEIWAGADIGKEHHHCVVVNSADEPLLSRRVLNDETELGQLIGDVLAISTDVLWAVDLNHGGAALLIGLLLNHDQPMAYLPGLGVHRASATYKGEDKTDTKDAFVIADQARVRRDLGLLRPGDEIAVDPRTLTNRRLEVVSDRTRQINRLRARLLEIFPGLERSLDLVNKGPVMLLTGYQTPAAIRRAGVKRIETWLKDWKVRGAAVLARTAVDTARAQQTALPGEKPAAAMVLRLAKGVTALDEEIVELDTLIEGRFREHPLAEVVRSLPGMGAKLGAEFIAATGGDMDAFGSADRLAGFVGLAPCPRDSGRVSGNLRRPKRYHRGLLRSMYLSAMVSITTYPASKAYYQRKRSEGKGHKQALLALARRRLNVLWAMIRGGRYYQDSTPVTAAA

SEQ ID NO: 305501 - protein, 318 aa, unidentified
MNSKSNQNEVNIGVDTGKHHLDIHIRSLDISFTVTNNEQGIKDAMKIFGKHKPTRIIIEATGRLEHEFIMACSRKGLPFVVANPIHIKKFAGAIGRLAKTDELDAKLISHYGEAIQPTLSQLKPEVMRNMSDLLSRRRQLITMQTMEKNRLQIMPQDVKGLIKPILTAIKNQLDKVDKKLLMLIENCDEYKVKNDIIQSMPGVGKVVSFSLLSNMPELGYLTNKQAAALVSVAPINKESGLYQGQRRIRGGRHQIRTVMYMAMMSAMQCNSVFKAMYQRLVAAGKPKKTAIIVCVRKMIVILNSMVRDRVYWNPEMGK

SEQ ID NO: 305502 - protein, 360 aa, unidentified
MEGNQERSAGRIVGGVDTHKDLHVAAVVDELDRVLASQCFATTRHGYKQMLAWMRGFGSLQRVGIEATGTYGAGLLRYMQKAGIEVLEVTTPDKHDRRKRGKNDDLDAQNAAHAAFAGKRTVTPKSRNGMIESLRVLKACRKTAVAARRVALQMIQNTIVCAPDELRELLRTMTRMQLIRTLAAWRPDLTDYRNVTSAYRITLKSLGRRYLELHDEIADLDTMIIAIVDELAPNLVARNSIGHESAAQLLLTAGDNVQRLRSEASFAALCGVSPVPASSGKTTRHRLSRGGDRAANSALHIIAIGRLRTDPRTQAYVARRITEGHSKLEAIRCVKRYIAREVFSLIKQRPKESHPASSLV

SEQ ID NO: 305503 - protein, 438 aa, unidentified
MRKKKSKATKKVHFQGLPLIHPNAAGIDVGSKEHLVAVPADRDPQPVRTFQAFTPDLHELAAWLKRCGIETVALESTGIYWISLYEVLEQYGFEVRVVNARHVKHVPGRSKTDVLDCQWIQKLHSFGLLNGSFRPDAQIRKLRTYMRLKDNLVVEGTQAIHHMQKALFEMNVQLSNVISDITGESGLRIIEAILTGERDPEQLASLCSVRIKASRQTVAKSLHGNWDEALLFCLKTGLETYRFSQNKIQDCDKCIENQLEAFEIRTTLPNATRNLRTQLHRVCGVDLTKIPGIKEQSAQIIISEVGLDMGRWNTEKQFSSFLGLCPNNLITGGKILRRATRKVYNRAADTLRLCAQSLSHSKSALGAKYRRLRARLGAPKAIVAMAHHLARLVYRMLRYGENYVEKGIEHYEEKFRLQRIKWLRKEARSLNFQLVLAQ

SEQ ID NO: 305504 - protein, 458 aa, unidentified
MNIRIIGIDLAVTAAHKAVVLDQASNTYVSPVLTCHTDPADLDSLLDIARAGASEPVRLLAVLEATGMSWYSVGQYLERHNVDVYRVNGQQVADLRRVYQRHAKSDRIDARVLARLPLVMPDSLHRCYFRSGPLMTLQRACREVARLKDLVTASKNRILATDELTWLGLKGILPPFSPLAFWLRENWYDPWRVQAAGEEQLAQAWLTAVPEASADLSWVPALIEQSRRVITLYNSPDLLDYAQFQASLQREQAFLQQADEQAHHLRLTTVRPLYRQLHPSRNLETLRGLGQDSAAIYIAFIGDIQRFPSLRDFLGWAGLIPFSRQSGDAEAQGLRVTKAGPNLVKASAFLNAGIARRWDPQIAAVYYQQMVKLGKHYLQAVCACATHLLTRVYAVLRDDRPYELRDVDGTPVDKHTAHRICLERYHVPDEIREHNNRRVRKARQEARLEKRQKREERR

SEQ ID NO: 305505 - protein, 345 aa, unidentified
MKINVYAVDLAKDKFQVHGYDARGERRAAKTLTRAGMLKFFDGREAAGVEVVMEACASAHYWGRRLLGLGYRVRLIPAQHVRAYVLGNKTDANDADAIYAVSRRKDIRAVPVKTVAQQDALLVHSTRERLVAARTALINQIRGVLAERGVVFGTKPAVLRHGLIAWLETPAAVEITETLRQWVRARRDEWAALDEQIAHCDREMRQWYQATPACAQISAVEGIGIITATAVVASVGDARQFDSGRQMASWLGLTPKERSSGATRHLGGITKRGDGYLRKLLVHGARAAVLAAKGKQDERSRWINALVARRGHNKAVVAVANKNARILWAILTTGECYRRPEPLAA

SEQ ID NO: 305506 - protein, 338 aa, unidentified
MGAITTVGLDLAKNVFQVHGIDGEGKVIVRRRLRRAEVMPFFEQLPPCLVGMEACASAHHWARAIVTSGHAVKLMPPAYVKPYVKRGKTDAADAEAICEAVTRPTMRFVAIKTEDQQAVLMLHRSRDLLVRQRTMLTNALRGHLAEYGIVSPQGTGGVATAIKALHEGQEGLPSLARSALHGLVTQLRGIETEIEKIEAEILKWHRASEASRRLATIPGIGPITASAIAASVPDASLFRSGRQFAAWLGLTPKAHSSGGTERQGGISKQGDGYLRRLLVVGATAVLRFARQGNASKAWAVRLLERKRPKVVAVALANKSARIAWALLARGTSYAAPSA

SEQ ID NO: 305507 - protein, 362 aa, unidentified
MKQFIGCDVHKRYSVFVSMDEAGKAGRAVRVTHGDGELETYLSGLPDGTPVAVETTGHWYWLLDAIEKAGLEPHLAHALAAKRMMVGPNKTDKLDAKGLATLLLNGTLPEVWAPGGSVRDLRGLLRSRLALRRMGTALKNRISSALARYGLPKQFNGDLFGSGPVATKCRQESIAALPAYSRFATEREWKLLQSVEEGVCALTAEMAGSIGKLGWVRRLRTMPGVGEILGPTIYLEIGQVERFPTAAHLAAYAGLVPRVISSGGHTRLGPTRRECNRFLKWAFVEAAEVVVAHQESMAARHVVRLYRRVKNNKPDRHNKAVVAVARHLAESAWHILTRNQDYREPQPTPGMIQRFHTVGRPL

SEQ ID NO: 305508 - protein, 394 aa, unidentified
MFLVGIDIGKHKHSFCIINKETGESIVKPKFFDNNKVGFEELLSSFKGLPKKDILIGMEDTGHYHFALLKFLLDKKYQVALINPVTTDLTRKLSGSHTKTDKLDTLTICDVLTSNQRTKPYRISKVDRFDLYEQKQLTREHHNLKEQSNVLKNRLQKSIDIVFPEFNSLFKSMYGVVYMNILKEFGSADALAHSDIRTIRKCFDFKGRGKRIELTAKELKNAAINSIGFPSIAEVVQIKHLVNQIELVEEQIEELDKKIEEFSIANNSPILSIPGISHFSGTSILAELGDIHNYSKPSQIIKFAGVAPLTYESSQFMAKHTAITKKGSTYLRKTLYQIILPVINNNKVFKDYYNLKLSQGKGYRCAQGHCVRKLLRVIFQLLSTNTQFDPTLLV

SEQ ID NO: 305509 - protein, 403 aa, unidentified
MSIDGAPVKAASVVAVDVGKNTVTLSVTDAARRRLLGPVDFAMTAPAVAVVLERVCAVLPAAPVKVGVEAAGHYHRPLLGSGVWPAGWELLELSPARVAEQRRVQGRRRVKSDAIDLEAITELVLAGHGVPVTARSAAVTELTGWAMHRSRRVQTRTATKNQLLAQLDRCFPGVTLALPDVLGTKIGRLVAAEFADPHRLAALGVTRFVRFAANRGLRVRHSAADRLVAAARAGLPTPEDAVARQVLADDLVLLADLDAQIAAAEAKMAGLMPDTPFAPLLTVPGWGTVRAGNYAAAVGDPQRWPGARQLYRASGLSPAQYESAGRRRDGTISREGSVALRRALIDLGIGLWHADPAAKSYGQALRARGKKGGVIGCAMAHRANKIAYAMVRDQTGYDPTRWA

SEQ ID NO: 305510 - protein, 399 aa, unidentified
MLAVGIDISKSKSVAAILNQDESMHTSPFEFHHTQPELDAFIKYILNSKQSATVLMENTGHYHYPVLKALQEAGLPVCMVNAYQIKKFGDMDLRKAKTDKKDAVRIARYALEKSYSLVPYTSMEQKYEDLRFLARQYNQRMLTLKTNKVFLLNLLDETMPGITNILPLTTRTPETSLSVLFINRFKSYDRIKKMGKSRFLDAFEKIARKSRNRQTKTYGLAIYEAALRNITTRGENEYTLAAQDQCLELVCESQKAADSIILKMQTLAEMLPEYAVLRSMAGVGDRLGPLILAEIGDIRRFHSGKALNAYAGNDAPPYQSGTFESHNRHISKRGNAALRKYCFEVMQALKLTRPQDDPVYLFLLKKEQEGKPYNVAKMAGVNKFLRIYYARAMETLKQQ

SEQ ID NO: 305511 - protein, 340 aa, unidentified
MLYIGLDVHEKYTKIQAMDEEGFLAMTKTIPTTSEAFDLVFSQLPDTARVSMEAGRSYWWLSQLLNSYSAVSQVSVVDPRRCRNLAKELSVLSGYGRAKNDRIDAEMSAEILRRGMSPAIHLPTLEQLEQRTLVRHRTQLVQQSTSSGSRLQGLLSMHGVRISTRSLVDDFQAQLESLESLPAYVRSILHHLLGQIQLYQRQMQHCERRLGKCLPPSHPQIKILMSAPGIGIVLARIILTEILSINYFDAPNYLISYAGLAPVENESGGKKGVVELNRHCNYYLKYAFVQAAHTARHYPKYRKKYNQDVKRHGKIRAKLNLARRIAKSVYWMLTRQEPFH

SEQ ID NO: 305512 - protein, 339 aa, unidentified
MKLYTGIDLHSTNSYLAIVDESGKRVFKEKSPNDMASILKSFEPYRSEITGIVVESTYNWYWLVDGLMAAGYAVHLANPTAIQKYSGLKYADDKHDAFWLAEMLRLNILPTGYIYPKDERPIRDLLRKRSHLVSLRSSLLISLQNIITRNCGMKLMTNDIKRLREDRVHPLLANNEDLALAGQVSKDSIDFLTHQIRSIETFLEKKLELKDTYKGLVTVPGIGKILGLTIMLETGPVTRFEKVGNYASYCRAVSSQWTSNGKSKGKGNKKNGNKYLSWAFSEAAEFARRGDDKARAYYNKKLRKTNFMVAHSALAHKLARAAYYIMRDQVIFMPEKTFT

SEQ ID NO: 305513 - protein, 462 aa, unidentified
MTPPPPASPGLRTGYREMRRRAPVSDRPGASPGAAGSSLPSQRGPLLSLSVPEAVFFTGIDWAAETHAVCVMDAAGKAVARFTVAHSAEGLGRLLHKLAGLGDPADMPVAIERPSGVLVDALLEAGHPVVPVSPNAIKTWRESEVLSGAKSDPGDAEVIAEYLRLRQHRLRTAAPYSDDTRALRTVVRTRDDVVDLRVAAVNQLGALLETHWPGGKAIFADLESRIALEFLTRYPTAACAARMTADDIAAFCREMGYSGKRPASVLLERLRAAPVRTCGDALTTAVRDAVLALVTVIKALTAATRDLDRSVTARLGEHPDGTIFTSLPRSGQISAAQVLAEWGDCRQAYDGPDSVAALSGVTPVTKESGKHRAVHFRWACNKRFRKAITTFADNSRHASPWAARIYAQARASGKDHPHAIRILARAWIRVIWPCWINGIPYDPDKHGAAAALMGQADKQLAA

SEQ ID NO: 305514 - protein, 410 aa, unidentified
MAERFVGIDVALREHRVAVLDRDGEAAGPSFTIAASKDGMATLLRTLAARDATAAQTLIGLEASGHLWENLEAALVGAGYRVLVLNPLQTRRYRDVLRRKAKTDDIDAHVIAGLIRSGAAQASYVPDEHIQSLRELARLRARLMDDWQDYLRQLIAQLDVVLPEHRTALGDLRSARARGILAQFPTAQHLAQASPRAIRRAAEDAGTRGFTLDDAIAVRDAARQSLFSGKAAAARAQVVRTLVNQLDRLSTAIDEVDRAATALLPPSEPGTGPSDADLLQTIPGIGPHTAATLLGELGAPMRFTDAPALVAYVGFYPVITESGQRVGTPRLSAVGSRIARRALYLAAVNAVRRSAEWRTIYLRKRAQGKSAKQALIVVAVKLLHTLYAMLKHRRPYNPSRLLVATATIGT

SEQ ID NO: 305515 - protein, 355 aa, unidentified
MEKPEITIGLDLGDRFSHYCMLNGDGEAIETGRIQSTEEALRRHFEGEPTMRFALECGTHSPWISRLLEQLGHQVIVANTRKIRAITSSESKNDKNDAEKLARFAFCDPRLLSPIRHRSPERQQDLNLIQARSTLVRARTMIVNALRGLVKSAGGRLPACSPQGFEARVEASIPPALAEAARPLLNQIVALNAGIQQMDRGIEQLANRYPEIPVLRTVPGIGPLIAAAYVLTLDRPDAVQHSRQAGAFLGLRPRQSQSGDSDPQHRISKTGNVYLRSLLVQAAHYVLGRFGPDSELRRWGLKLAGSGGKRGKKRAIVAVARKLAVILHRIWQTGKPWQAFPQSANNAASKDVCMV

SEQ ID NO: 305516 - protein, 452 aa, unidentified
MTRQRKKSTAQAALPVMRPDAAGIDVGATEVYAAVPVDRDRERPVRCFPTFTENLHALADWLEHCGIKTVAMESTSVYWIPLFQILEARGLEVCLVNARHVKNVPGRKTDVSDCQWLQYLHAVGLLRASFRPEQAVCAVRSLLRHRESLVQMTGTHVHHMQKALDQMNLQLHHVISDITGVTGLAIIEAVLEGERDPKVLAKLRNHRIKASEETIAKSLVGDYRREHLFTLRQSLTAYRSYQKLIGDCDSEIHRSLEEIDSKNDSPPSPPVNGGSEPPETLPFQLSEQLDRILGVDLTKVPSLGTLNVQILVGEIGPDLSKFRSASAFASWLGLCPANDISGGTVLRTGTRKVNSRAAKVLRLAAQTLYRSKTPLGDFYRRMRAKLGGPKAVTATAHKLARIIYHLVTTGQEYDPTTFIKQQLRFQKHQEAKLRGKARELGFQLVPLEVSSA

SEQ ID NO: 305517 - protein, 392 aa, unidentified
MIFVGIDVAKDKHDCFIIRSEGEVLADVFTISNSKEGFEYLLQTINTCTGIGDSKIKVGLEATGHYSYNILGFLLDNGLPTYVINPLHTNLYRKSQSLRKTKTDRVDARTIASMLMSDVSLKPYTNTAYHNSELKSLTRYRFDKVKERATLKSSVARLVNILFPELEKLLPTLHTASSYALLSELPSAKHIAEVHLTHLTNLLYTASKGRYNRDKAIQIREAARNSIGTYMPAKALELKHTIKLIKEFNNEIAEIESAIQSIMNKIDSPITTIPGISLRMGAMIIAEVGDFNNFDSPDKILAFAGLSPSTYQSGQLNNCYAHMEKRGSRYLRYALINATKFVCNWDPLFAEYLAKKRSEGKHYNVAISHAAKKLVRLIFALQKSGQPYISKS

SEQ ID NO: 305518 - protein, 416 aa, unidentified
MKLFVGIDVSSEKLDVCFLTDDNQLSILSEISVANDIEGASFIRETILEFNNSYHFDQIVIGMESTSMYSFHPSMFFHEDEKLKKLNTLVTIENPFRVKQFSRMFDENKTDRNDALRIADFLRIQRFTTSPIKEEKYMALQRLTRTRYQLIKQLIRTKQHFLENLTYKCNTLAREMRDESTSLFSATLISLMTEDFTLDELAELPLEAFCDLLQEKGKGRFKQPEKIAKAIQRAITMSYRLGALAQESINVVLSALVREIRALEKNIKELDKAIEQVIVVIPEYQCLTSIPGVGKVYAAGLIAEIGQIERFEDQTKLAKYAGLSWKVNQSGNYQSQNTPLTKQGNRYFRYYLVEAANSVKNYLPEYKAFYQSKYKEVPKHQHKRALVLTARKFTRLVDTLLRKHQLYTPPRSVIEK

SEQ ID NO: 305519 - protein, 346 aa, unidentified
MEQIIRIGMDTSKHIFQLHGVDAAEQPVLRKRLRRGEVLGFFAKLPSTVIGIEACGAAHYWARELNQLGHEVKLIAPQLVKPYVTRNKNDGRDADGLCEAMSRPRMRFVPVKTAEQQAALMLAGVRQHQIARRTQLGNAIRGYAAEFGLTAAKGLDKIEPLLAEIAQDETVPALARELLAFQGRDYARLQIELKAIEVKLRAWHRANADSRRLATIPGIGPVGATSLVMKTPDPRAFPSGRHFAAWLGLTPKDHSTAGKTRLGRITRAGDEMLRSVLVAGATAVIQQVRRGRGHTSPWLIALLKRKPPKLAAVALANKIARIAWKLMVTGESYDGARMLGASASAA

SEQ ID NO: 305520 - protein, 342 aa, unidentified
MPVVGGIDIHRAQLTFDYVDLDSGEVVRGRIAPADRDRLRRWLARFADRDQVAFALEGCTGWRYVAEELARAGIAAHVAEPAETAARRGPKRRAKTDRSDAQLLRELLLEGRIPESWIPPTPVLEARALVRLYKDLLDERTGWLQRVHASLFHLGAPDLDVGAMSVAGRERLAAAELSPATRTAVDVALRQVDRLTAEMNRVREQICVIGRRQPACRALQAAHYGVGPLTAVVIWAEMGDTRRFSSSDDAVRHAGLDVTVYSSDGRRSAGHLARQGPPMLRWALYEAAVYAGRPSSPDHAYFQQVKARLGGQLALLSMARKLARRCHHTLRNLDDQVLAPAA

SEQ ID NO: 305521 - protein, 436 aa, unidentified
MEDVEDEPLFAERVAGIDIGKREIMVTIRVPSDTRRGRRQQETREFRAVRKDLLALADWLRAWGVTKIGMEATGDYWKPVYFLLEREGFDCVLYHAAQVKALPGRPKTDKLDSVWLAKITERGSLASSFVPPEEIRRLRTHTRYRRHLVQARTAEKARCEKLLEDAHLKLSSVITDIHGVSGREMLAAIIAGQRNPKVLAQMARTRMRGKITQLEEALDCSFFTEEHAFVLAMMLANIDHLTAQIKELTGKIEALCQPYLHQIAQLDAIPGFGVITAQDIIAEIGVNMAVFPTAGHLCSWARQAPQVSQSGGKRKGKNATGRGNPYLGGALGESAVNAGRTQTFLGTKYRRLVRHMPKKKAQGAISRTQLVICYELLSDPEAVYQDLGTDHYERRANIRREVRSHARAIERRGYKVILEPIEPGLDPDILPVTKAS

SEQ ID NO: 305522 - protein, 391 aa, unidentified
MIYVGIDVAKDTHDCFIMSSEGEVLYDVFTIPNNLDGFDNLFLKISSASGDLRKVKVGLEATGHYSYNLLGFLLNKGLTTFVINPLHTNLYRKSLSLRKTKTDKVDARTIAVMLASDVDLKSYTNTAYHNEELKSLTRYRFTKVKERAKLKSSISRLVNILFPELEKLVPTIHMVSVYTLLSEFPGAHQVASAHMTRLKALLHGASRGHYDRDKAVEFRDAAKNSIGSKMPAKSLEMKHTIRLIRELDAEINEIEAAIKIIMDKMASPILTIPGISYRMGAMILAEIGDVSRFESPDKILTYAGLSPSTYQSGQLTSTYSHMEKRGSRYLRYALFNATKFVCNWDVSFGTYLAKKRSEGKHYNVAVSHASKKLVRLIFALEKSRQPYYQTI

SEQ ID NO: 305523 - protein, 369 aa, unidentified
MPHVTSIGLDVHARSVAAAAFNPFTGEVVHRDFGTDAAEIAEWALGFEEPRACYESGPTGFHRARELRALGLDCAVAAVSKMQRPAADARRKNDRRDAEFIARMLATHNIVEVPLPDAAVEAARDLDRALDDATAEYRRARQRLNMFLIRLGHVWDERNADGTRKGSWTRAHWRWISGIRLEGPQRDVLEYYVTAARCAESDRRQLEKKVLALARTDRWRPAVEALSCIKGIDTLTAFRLAAEAGSFTRFRTAPAFASWCGLVPSERSSGETERRGGITKTGNRLARTALVESAWHYLTCTPRPKAPAPGADVPAAIRARADACTARLCRRREALAAAGKSSCKANAAVARELACWVWEIGRRAEGTLS

SEQ ID NO: 305524 - protein, 308 aa, unidentified
MTTIGIDASKTELMLGVGDRTSKLRNDHVRLRAWAQSLDEDTRVGIEATGRYHRPMLRALHEAGVCSYLLNPMHVCRYIKAIKPKVKTDRTDAIFIARYLEREHDLLVPYKMPSPEIQELKDLLSFRETLIEKRVALRQSLSEQTFRLKSQASLDEGFRSTIAEVDARIRTIARGRPLYKRLLTIDGVGPLGAAALTWLFESHEFTSSDQAVAFVGLDISVRQSGKYIGKSKLTKRGPAFVRTFLHNGANSLRNIEELKPLFEHHANKKLAKTAVNNIVSRKLVRIAYAFATKPEAHYERKNLLPQLT

SEQ ID NO: 305525 - protein, 350 aa, unidentified
MAMVAETVDAVIGGDTHRDTHALEMTAPNGATIATLTINNNASGFAEALAWIAEHAPGPCIVVGLEGTRSYGIGLARALNSAGLTVVEVECPRRRHRRRGKSDPIDARLAALEVLRMDDVRKPVPRKDGEREAIRILLGARCDLTVVRTAQINRLRALLLTGDDDDRLLVRVTMSEHNLVAIARRRGRSGESTEAQVRRAEARRLALAIRDGARVLADNKRQLAELVEAFAPGLQDRLGVGPVSGGQLIVSWSHHGRCRHEAAFAALAGVSPVPASSGRTHRHRLNRGGDRHLNRALHDIVLTRWRMCPRTHAYIAAGRARGKSDPEIRRALKRYTARELFRVLNASVTH

SEQ ID NO: 305526 - protein, 370 aa, unidentified
MKSIIYIGMDVHKESYSLCALDDASGEILGRTRCAADVTLVEKFVTNVKKKSGGERAIQAGYEAGCLGYALRAQLVEKGIACDILAPTTMYSSAKNKRVKNDKMDAKMIALNLANGTYKSVYIPKKEDVEIKEYVRMLADFRAALTTVKQQIKALILRHGYRYEGKSSWTMAYMKWLRSLDLGDLLTETLEEYLLQYETLVDKIERFQARLETFSHQETYEQPVSQLKCFKGINTISAMTLQVEISDFTRFPNAKAFTSYLGLTPSEYSSGEKVNRNSITKQGNSTVRSTLVECAQALVKGKIGQKSKRVKQRQKGQASQVIAYADKAVERLQRKYHQMMYRGKPRNVVITAVARELACFIWGMETGNLE

SEQ ID NO: 305527 - protein, 425 aa, unidentified
MKISQVEQKSNKKGVMDVSVDVHKDMLNFFFEAGGKEYSDECANRTATVKARLYAYHRIATAQGMDTLRIICEPTGDYHIKLLRIARTMGFSTCFVNTESVARFRMIETNDTGKTDTKDPRVIRTLGKLGKVITHRILDEKYMRLRKLGKIYDETDTTITRLKCRIDKLLLELFCDYSFQKDFLYARSGLALIQCYHGNPVRILKSGYRAFCVRMRKRAPHIQTQTLKRLWSDAQSSILNEQPEGYLKLLEAHLEQLVDDCLAQRQRKDAIERAMIDLIRQLREEDPRIPPSTPGVISDKNIARLLGETGPLYEFAGWRTVMRYGGLNICMRKSGRYQGQNKISKKGRSLLRKVLHHIVLPLVKKRALYGSYYTRKRQIEKMPGTKAMVCVARHFLKKFYGWYRSGEMFNHERFFSCTMQQKAVA

SEQ ID NO: 305528 - protein, 355 aa, unidentified
MNDTKYIGLDVHQATISAAVLDSTGKLLMESVVETRASTILQFIHGLRGSVQVTFEEGTCAAWLHDLLQPHVANVLVCDPRKNALLKSGNKNDRIDARKLADLFRSGLLCPVYHGENGVRALQELARGYLALNRDVTRVMNRVKAIYRSWAIPCAGQRVYAPRYRSEWLGKITEVAVRRRAEIYYQQLDGLRSLRQQVRHDLLAESGKQGATKLLRQIPSIGSIRAALLIALMQTPHRFRTKRQLWAYSGLALKTSASGEYRFEEGQLKRSKKFLAIRGLNLNHNPDLKNIFKGAAIRAAAVPGPFQQFYAALVATGMKPTMARLTLARKIAAITLIVWKKGVRFDAQYLKQQAA

SEQ ID NO: 305529 - protein, 355 aa, unidentified
MSSEKYIGLEVHQATISVAVVDSQGKVVMESILETKASTILEFFAGLRGSLFVTFEEGTWAAWLYDLLKPHVTEVLVCNPRKIPLLKQGNKSDKIDARKLAERLRLHDLKPVYHGETGVRMLRELARSYLTVVKDLSRVMNRLKALYRSWAIPCAGRDVYYRRHRSQWLEKIPEAGARRRAEQLYEQLDMLQHLRQQARRELLAESRKHTITAKLRQIPALGPIRSALAVALIQTPHRFRSKRQLWTYSGLGLETRDSGEYHYVGGQVRRRKKQATIRGLNKDYNHDLKGLFKGAATRASVQPGPFQEFYQRSLAKGIKPTMVRLTLARKIAAITLTLWKKGEDFDIDKLNSQAT

SEQ ID NO: 305530 - protein, 321 aa, unidentified
MHCIAGIDVSKDHLDLALDSDVPIQRFDAEESGRDRLIQTLKSARVDRVILEATGGYERLIMAELVEAGFEVVRVNPRQIRSFARATGCLAKTDSIDAAMILRYGHAIRPSLRPVPDADLIALRELLARRRQLVEMRSAEKARLQQMLHSDAQTSVDRTLAFLEEELELIEHQLDDRMAQNTEWVAHARLLDEESGVGPVTVRTLLIELPELGRVSRQQIAALVGVAPMNRDSGKKRGTRSICGGRASVRRVLYMAALVATKHHPKIRAHYASLQAAGKCKKVALVACMRKLLVILNAKLRDYLKSHTDASPAVSFASPPS

SEQ ID NO: 305531 - protein, 348 aa, unidentified
MLADQLDYVVGVDPHRDLHALAVVHVLSGAVVFEATVAANSEGYGQALKLVDAHALGRRAFAVEGTGSFGAGLTRFLSGRGERVLEVGRLRRERRSGGKTDALDAVRAARSVLAQDQPATPRAGGERQALQALVAAREGAVNAKCAGLGQLRDLLITTPEPLRSELRPLTQARLLRHLAATRPDTRRDPELRGSMLALRSIARRVLELTAEERALRREIEALTRKLAPQLLEQPGVGPHAAAQLVLSWSHQGRIRSEAAFARLAGAAPIPASTGQTVRYRLDRSGDRKLNRALHMILVTRKRLHPPTIAYIERRLQEGKTRREANRCLKRYLARSLYRLLEHGPPLAT

SEQ ID NO: 305532 - protein, 398 aa, unidentified
MVVVMLLQAGGLVEKIERRRFGTTTPELEKLAAWLQALGVQEGVMESTAQYGKPVWGALEGKIPTLHLAQAFSNRARRGRKDDFRDAERLLRRLVAGELVLSFVPKPEQRNLRTMTRMQVHLTYDRGRLHNQVECLLEEMRIKLSSVLSDLFGVTGRRILGAMAQGETGPQKLAALAEHRLQCRPQELLAALTGKVELMHPRLLGLYLQRLQMIDAQIEELKRMIAEALEAQQEAVQRLAEVPGFGADSAQQMIAEVGPEAATFPSAGEMASWVGTCPGQNESAEENHRSRSAKGNRYARRLLTEAANAALKTKGSHGQVVFRRLLPRLGYQQAVWAVAHRLCRVVWKILHDKVRYVEQGINRDPKARANRARTLARALRQLGYKVELTPLTPAPAQT

SEQ ID NO: 305533 - protein, 444 aa, unidentified
MKVIYERCAGLDVHKKTITACPMHTQPNGGVEKDIRTFGTTTVELLQLADWLLVEWGCTHVAMESTGEYWKPAYNILEGQLEILLVNARHIKNVPGRKTDVQDAEWIADLLRHGLLRGSFVPPREQRELRDLTRQRSNLVRERAAVVNRLQKVLEDANIKLASVVTDVMGVSARAMLEAIVEGEADPVTMAELARGRLRSKRAQLEQALVGRVRDHHRFLLAGHLAHIDFLEEQIEHFNQRIAAHIEQATSSATPLKDAALTPPEPTEGQDGVLTYAQAVDLLDTIPGIDRQLAEVMAAEMGIDMSRFSSEHHLASWAGVAPGNNESAGKRRSGKTPPGNAALRKGLVQAAHGAKRKKGTYLAAQYHRLAARRGKKRAIVAVAHSIVVIAYHVLSRREPYRELGGNYFDERKREAVVNRLVRRLEKLGYQVALELQTGVTAVAA

SEQ ID NO: 305534 - protein, 349 aa, unidentified
MADVYLGVDVHKNYSFFAAIHPDGRIFKFGNRIANTYEAVSNFLNSFGKKHRFSAVLETGRNWGVMYDLLESLPMVESVKVANPFKVKAIAHAQLKTDKVDAVTLAQLLRVNYIPEVYVPPKEIRLQKYLLRQRFYWVRLLIRLKNRIHIILARNHILIPEVTDLFGKQGRAFLEAVELPKTEEIILKQHLQLLSYLEWQIRAIQEPITEDMKDNENIKLLKTIPGIGEVFAPMIALEIGDIERFTDYRKLWSYAGLVPSTYASGGRVYHGRLVKFCNKWLRWAFIEAAHAAIRSSVYFGRNYMRVRNRKGSAAGIIDTARKIAKIVYLVLKEKRAYWESQPSSKFANR

SEQ ID NO: 305535 - protein, 348 aa, unidentified
MKFYTKSHKHYCGIDLHARKMFLCILNGSGEILLHRNIATSPETFLKAVAPFRDDLVVGVECMFSWYWLADLCAKEGIEFVLGHALFMKAVHGGKAKNDKIDSHKIAVLLRGGSFPVAYVYPPEMRATRDLLRRRNHLVHKRAELLAHIQNLVIQYNLPDIEVNLTCEGNRKEVDQHFPDPQVRKIVQVDLAMIDAYDDVLKVLEPDIEKTARHQDWHSLMLLRSVHGIGKILGLVMLYEIHDIERFQTVQDFASYCRLVKCIHESNNKKKGTGGAKIGNAHLKWAFSEAAVLFVRFNPSAKKLMDDLVKLHGKGKALAILAHKLARAIYYMLKKNVPFSLEKFLATA

SEQ ID NO: 305536 - protein, 350 aa, unidentified
MIIIGCDYHPGFQQIAFVDKETGECSERRLEHREEAEKFYRDLGAQGAAVRLGMEASGHARWFERLLGELWFELWIGDAAEIRTKRVRKQKTDRQDAELILRLLLEDRFPRIWVPSGENRDLRQLLWHRHRMVQARTRIMNQLQAVALNEGLRCKKRLWREAGREQLESFELAPWASRRRRDLLELLDRLTPTIAELTQAIEQEVEKRPEAQRLQTHPGVGALTALAFVLIIGRADRFQCGKQIASYLGLVPLEESSGQRRRLGHITKQGNSLLRFLLVEAAQVTVRSDQEWRSKYFHLAMRRGRKIAKVAMARRLAVRMYWMWRKGWDYEQLKKFGSHAGQPGTGDGVR

SEQ ID NO: 305537 - protein, 390 aa, unidentified
MAPGDKIIRRPFDVKHTKEELQPLVDEIRVQAKYDEIKVVMESTGVYHLSIAYFLQQNGIFVSVVNALKVANFNKAENFRHTKTDSIDSTNIARYGIAYWAKLPQFDLNGDKYFLLKRLCDAYLNFSEERSRILLQLQSQLEQTMPGIFDLFGGFDINSGKDKLLDFLERYCHIEDIIAKPEAEFVASYCGWAKEKGYRSNESKAATIYAQAKNGIPSIPNNPIVRETIMWYVGLLRRADEALMASLTRMEDIAKDLPEYELVGEMGGVGRVTRVALIAQIGDVRRFKNKHSLICFAGLTPSIHESGKFRASQNHIVKKGPARLRKVLYQVMMSLVMHKIPKDDAVYRFIKKKEAEGKYKKVAKVAGMAKFLRIYYGRVMHLYRDLGLAA

SEQ ID NO: 305538 - protein, 337 aa, unidentified
MSVYVGIDVHRKRSQVAVVTEDGQVQLNKNVVNGSEPMLRLIGELPSGTPVAFEAAFGWSWLAELLEDYGFEAHMVHPLRCKAIASARLKNDKVDAAILAQLLRADLLPEAWIAPAKVRQLRALLRHRISLVRLATQTRNRIHAVAADHGYDRSASYWTGPGRGWLAELDLPAASREIVTDCLAVIDGLAPVIDRIDGELHQHAKADPRVKVLRTLPGVGEFTALVMVAEIGDITRFPSARKLASWAGLTPTVRGSDLHVRHGHISKQGSVWLRWAMNQAAQTAKRSPEFATAYSGITKRRGKKIATIAIARKLLTRAWHLLNDMQAADAATPLRRP

SEQ ID NO: 305539 - protein, 349 aa, unidentified
MTTQRLSYVGQSVYVGVDVHKDTYAVTCVCNKQIVKTATAKADPAGLTASLSQWFPGARLSTAYEAGFSAFVLHRALTKAGIMNIVVNPASIAVAANDKVKTDRRDSKKLALDLSDGRLQGIYVPTEDEELARLLPRTRAQIVEHRATIARQIKAKLHQFGLIAPASRRLISNRYLREIDAWPLPPDLRVSLTFLAEQWRFATRQLIEMRRLLREQAKAHPAIEQVYRSVPGIGEVVARTLATELGDMTRFANERALFSYTGLTPSEYSSGPSVRRGHISRQGSSRVRHLLIETAWRALPRDAVLKEIFDRIAATRGKKRAIVAIARRLTGRIRACFRQGTTYAVGTYA

SEQ ID NO: 305540 - protein, 410 aa, unidentified
MEVLYPHCAGLDVHKNTVVACARHMVNGTVTREVRTFGTTTKDLLALSEWLASQGCRHVAMEATGVYWKPVWHILSDGDVSLVLANAGHVKNVPGRKTDVNDATWLADLLAHGLIRGSFVPEAQTQELRALLRTRKQFVRERSSHVQRLQKTLEDANIKLDGVISDIIGLSGRRMIEALIAGESDPEALAALAHRRIKAPPAALREALRGRVTDHHRFLLQLHLQHIDALDAALSAIDREVGIQVEPFHTEVLLLTTIPGVNDLSAYVIRAEIGGDMSRFPSVGHLISWSGFCPRNDESAGKRRSNRMRKGAPWLKTTLIQCAWAATRKNGSYLQAQFHRLRARRGAKKAIGAVAASILTAAYHMLKDGTLYHDLGPDHFDRRAKTVQTKRLLTRLERLGYAVQLTPLAA

SEQ ID NO: 305541 - protein, 337 aa, unidentified
MNKSQACGIEVSAQELVAVWIDSKGKAVLRRFVNTAAGHKQLLHALTRGSERVSACMEATGVYGLDLALFLSAQEQVRVMVANPRAVRHFAQAMMKRSKNDVIDAGVLCEFVQRMPFVEWKRPSEKALALWAVSRRLGALTKQHAAEKNRLHAASVAISLPAVVRKSVQRMLRLIEREIKALRQEALALIADQERIQRRYRQLRSVTGIGEVSALALLAELLLLPEDRDVRQWVAFAGLDPRQYSSGTSLRKHTRISKIGNRHLRHALFMPALVASRRDPHLRGFYQALLARGVKKKPAVVAVARKLLHAIYGMFKSDSFYNGAKIFHAPTLSPACF

SEQ ID NO: 305542 - protein, 411 aa, unidentified
MDVVVERCCGLDVHKHTVVACVRTPGKRGKRNQETRTFGTMTADLLALRDWLVALGVTLCGMESTGVYWKPVFYVLEDDIECWLLNARHLRNVPGKKTDVADAEWICQLVEHGLVSPSFVPPKPIRELRDLTRYRKAQIEERGREAQRLDKVLQDAGIKLSSVASNIIGRSGRDMLDALVSSTRDPEVLAELARGKLRKKIPELQRALVGRSSANHALVVSTILAKLDFLEEAISGLTEAIEALIGPFEVEVALLDTIPGVDRRIAECLIAEIGVDMDRFGTSARLASWAGMCPGNNESGDKRRSGKTRNDSKWLAANLAEAAEAAGHSKDTYLGAQFQRLRGRIGHAKARKAVEHSMLVAAFHVLDRRVPYVDLGANWFQKRRPDAHAHRLARQIEALGYRVTIEPAEAA

SEQ ID NO: 305543 - protein, 358 aa, unidentified
MLTQSNKIDFKGHHIYAGFDVHLKSWKVTIMTEKLHHKTFTQPPKPEVLHHYLTRNFPGGIYHTAYEAGFCGYWIHNKLKDLGIDSMVVNPADIPTTGKEKVYKDDARDSGKIARSLRNGDLKPIHVPTISTLEDRGLVRTRATLVKDLTRYKNRIKSFLYFHGIEFPEEFQSSQTHWSNRFNQWLERVELTDTSGTASLKALLVQSKHLRDSVLGTNQLIRKLAETERYKNRQDLLRTIPGIGPLTAMIILTEIETIDRFATFDQLCGFVGLVPSTNSSGEKDQIGELTPRGHGVLRSAIIESAWIAARLDPALNKSYHEYCKRMEANKAIIRIARKLLNRIRFVLKNAQPYQHSVT

SEQ ID NO: 305544 - protein, 465 aa, unidentified
MRHNPKRQRVSEKDRPSVSLLERIQPDAAGIDCGQNSHFVAVPPERDPQPVREFRTFTAELDRLADWLAQCRIKTVAMESTGVYWIPLYEILEQRGLEVMLVNARDVHNVRGRKSDVMDCEWLRELHSVGLLRSSFRPAAAIIPLRSFMRQRATLVEEASTRIHRMQKALTQMNVMLHVVVTDITGQTGLRIVRSILAGERNPERLAAHRDPRCHASRAEIVAALTGNYRAEHLFALRQNFAAYEFLLRQIAECDGEIEVLLTALAAQQPPPSAPLPAPRKRDSKHQPQFDIRSPLHRLTGGADLSQIDSIGPHAALQLIAEIGTDMRRWPTEKHFASWLTLAPNNKISGGRLLSSRTPPSANRAAAIFRRCAMSLTRTSTALGAFYRRLAARAGKAKAITATARKLALLVYRVMSGQLVYTDPGVTAYQQLHRTRELKSLRRRARQFGFQLVDQTTGEILNAVS

SEQ ID NO: 305545 - protein, 343 aa, unidentified
MSEISMIGLDLAKNVFQVHGVDASGKVVLQRQLRRSAVEKFFAKLLPCRVGMEACGSAHHWARLIGRYGHDVKLMPPAYVKPYVKRNKNDCRDAEAICEAMSRPTMRFVAVKSVEQQAMLSVHTTRALLVKQRTMVANALRAQLSELGIVAAQGRKGLHELMARLQAPSQEIPEMMRGALLVLAGQWQSLDANERALEKQIVKAARCDPDACRLMEAPSVGPIIASMALAKVPDAKVFRSSRDFAAWVGLTGRDHGTGGKHRPGPISKQGDRVLRTLLINGASAHLRQQMKRGVSDPWLRELLARRPYKVAMVAFAAKTARIIWAMLATGEPYRDRVSASAAA

SEQ ID NO: 305546 - protein, 310 aa, unidentified
MEHFFTGIDVAKDQLDVHVRPTGEAFRVSHDSAGIATLLTRLRALAPTLIALEATGGLEVSLAAALAAAGLPVAIVNPRQIRDFARATGQLAKTDTVDARVIALFAEAIRPTPRPVPDEQAQALGELMARRRQLVDMLAAEQNRRRQVRDRRVQRQLDAHLTWLEEALRRLDHDLTTLVRSSPIWRDADDLLRSVPGIGPVTACTLIADLPELGHLDRRRIAALAGLAPFARDSGTIRGRRMIAGGRAPVRRVLYMATLAAIKHNPVIRLFHRRLVTAGRPAKVAITAAMRKLLTILNAMLRDRRPWQPA

SEQ ID NO: 305547 - protein, 426 aa, unidentified
MKSKAYRSVDVNGVDIGALLRDRKEALVHAGLDIGKESIFCTLRWSGKDFDRPWKASNPSEVVRLAELLCEVGRGRELVVAMEPTGTYGDALRQALERKGVSVHRVSPKNASDYAEVFDGVPSQHDGKDAAVVADLAAQGRCWAWPLPKPSEVEQELAYHVDWMDAQRRQMMVWCGRVEALLSRHWPEATSVMRLTSGTLLRCLAKHGGPAGLAGASDGVSQLRGWGGRLSREKAEALVASAGQTAGVSMGRWEEEQLRRYAEQIRNCRREIAACGRRLGELTNGHEVIESMGKVVGVATSCVLWVELGDPRSYSCGSAYRKSMGLNLAERSSGKWVGKLKISKRGSSLVRRWLYMASLRWLQKEPVRSWYVRQKAARRGEGQPAIVGVMRKLALALYRVGGRGEKFDEKQLYQSVIEAGAVSSPR

SEQ ID NO: 305548 - protein, 320 aa, unidentified
MRNAVGLDISKLTFNASAMVGNAEYSAKFDNDSKGLNQFSDRLKSLGCQNLHICMEATGSYYEEVADYFAQYYSVYVVNPLKISKYAESRFKRTKTGKQDAKLIAQYCRSAKESELVKRQKPTDEQYRLSRMTAAYAQIKSECAAMKNRHHAAKDEEAAKAYAEIIKAMNEQLEVLKEKIKEQTEKPNCKEGVKRLETIPAIGRMTAAVLFHHLTSSKFETSNKFAAFAGLSPQQKESGTSVRGKGKLTKFGNRKLRAVLFMPAMVAYRIRAFPDFIKRLEEKKKPKKVIIAALMRKLAVIAYHVHKKGGDYDPSRYKSA

SEQ ID NO: 305549 - protein, 334 aa, unidentified
MKSDTVHIGVDVSKEKLDVFVPAQKEGMRPTAKELHNNVTGFKELRDLARKAKATVCVEPTGGYELELIAFMHRFDVPVAYTDALRVRQFARAEGNLAKNDRIDAALISRFADKIGVRLIEAQDVEAVELKRKAKFRQTIMDSRTAMANRLETEINPEMRAMLRAQIKGLDRLIDKTERLCLETVGKNERMNTLRERFTLVGGVGDLTAISILAGLPEIGTLSDEKLNRLVGISPEENQSGSKDRLRRIWGGRKDVRNALYMAAVASIQWNAILGSYYRKKRAEGHPHKWAIVPTMRKLLSLLNRIARDPGFIPMPEPESTKQNANVGRKTKAA

SEQ ID NO: 305550 - protein, 423 aa, unidentified
MKPLGEQPFTALIGVDWSDKKHDFCLLGAGSQQRELGMVAHRPETIDQWARALYQRFGGPIAVCLEIAKGPLVHALQRYEFMVLFPVNPATLAKYREAFVPSRAKDDPSDAQIALELLVRHRDRLQALKPQSAPMRALTTLVEQRRNLVGDKTRITNRLCSTLKQYFPQALDCFEDRDTVLFCDFLQRWPTLKHVRRARPATLRSFFWAHNMRRSQLIEERIRAIRCASVLTDDEAVIAPCQLLVQALVSQLRVTLQAIDAFDAAIIDLAKRLPDYALFAALPGAGAILAPRLLVAFGEQRERYASAAQLQQYAGVAPVLERSGNKCWIHWRIACPTFLRQTFVEWAGSTIPRSFWASAYYQRQRDKGCSHQAALRALAYKWIRILYRCWQTRTPYDESTYLHALKRRGSPLLAAVSVPSPSA

SEQ ID NO: 305551 - protein, 317 aa, unidentified
MALQRIFVGIDVSKDWLDLWLEPVKRFERVSNDAAGWVATIGLLNSLGVEAGLVVAFEATGGYERGLRQALLEAGFEVRRLNPLRVRLYAKSLGRNAKNDRIDARVIARYAAAAETMPETLDPARERLAELVSHRRRLVDERVALGNQTDMLGCRLLQAQNRKRLALIERHIEQTDTLILEAIGQIPGLLAKVELLKTLKGVKDVTAIALLALLPELGRITRRAVAALVGLAPFDHDSGKLKGTRSIAGGRTAVRTALYMAARAAARSKSPLGDFYKRLIAAGKTPKVATVALMRKMLVTLNAMTRDNQAWKHAKAC

SEQ ID NO: 305552 - protein, 400 aa, unidentified
MISVGIDVSKGKSTVCLLKPYGEIVCKPFEVQHTEKDLEELANLLQKLDGEIKIVMEATGIYHLPILTFLLEKSFFVSVINPLMMKRFSRDNSLRGAKNDRLDSVMIANYGIEKWYKLKKYEVNDRIYTELRLLGRQYYRFMQTHVKHVQELTHLLDYTAPGLKAMFNSWNEHSNRDKLSDFVERFWHFDLITSLSREEFVEQYLLWAKEKKYHQSRSKAEKVYDLASNGIPTLSSHTPSTQMMIQGAINVLRIVNNSLYYILSRMKELAKSLPEYATVRSMGGVGDSLAPRLIAEIGNVKRLRNGHALVALAGIDPPPYESGQFVGTHRRISKRGSPILRKIGFEVMRVLKSHKEPEDNAVYNYILKKEAEGKNKKLSKIAGLNKFLRIYYVRVMEVSQ

SEQ ID NO: 305553 - protein, 432 aa, unidentified
MKRVIIGVDPHKLSATIEVVDDHETVLATGRFSTDKAGYAAMRKTVSEWSARLWAVEGSNGAGRSLAQRLLADAEQVVDVPAKLSARARLFDTGHNRKTDAHDAHAVAVVAVRTTGLRVLSYDVELEALRMLADRREELTRAKVQTANRLQRLLSELTPGRAKKDITVGQAKAVLASVRPRDLAGKIRRRLAAEQLAELVVVEKKTKALTKELKATVLARGSTLMDLPGVGPVVAARVLADVGDIARFADRNRFASWTGTAPLDASSGEQNRHRLSRAGNRRMNHMLHIAAVTQIRLDTQGRTYYRRKRAAGKKRMEAMRCLKRRISDAVYRQLVADARRLTGTGPGGHCGATQESSAVDLPPHIDTSDQPLPGPAPETLPATTGRANPHQGSAPQPTRRRAGAVKAERPTGRTVLTATSAGAHSKEPNPLP

SEQ ID NO: 305554 - protein, 326 aa, unidentified
MMTIGIDVSKAKIDCLWLRDVVTGKVKAKIFENTAKGHSELLQWAIKNCRMELEEIHFIMEATGIYHEALAHALYEAGANVSVVNPAQISSYGKIFGVRSKTDKKDSLVIARFGATQQPLFWQPEPSEIRTLKALISRYEAVSQDIQRESNRLEKATISSVSNEIIISIETMLAQLKAEKKRLEDLINKHIEQHPNLKQDRALLESIPGVGPIVSRLMISVIRSRTFTAAPQCAAFLGVVPVQYESGSSVRGKSRLSKAGSASIRAKLYMAAVVATRHNPDIKQQYERLLKNGKSKMSALGAAMRKLVQICFGVLKHQNPYQSRVS

SEQ ID NO: 305555 - protein, 354 aa, unidentified
MEIYIGLDVHAQSTTVATVGADGERLGVQVIETTREALTSTLAAIEGSKHVCFEEGTASAWIHEVVSPLAREAVCCQPKKRARNKNDANDAWRLAEELRRGALDTRIYKAVGKMGALREAVRGHRLLTQDVARLKNRLKSIYRSRGIAAATSAMFEPEHKTEWLMKLPPAQRELAELLHVELEALTPLRDRAEKRLLEESKPHAAIDRLTTIPGIGPIRAAYIVAIVVDPRRFRSKRQFWSYCGLAVVTTSSGDWKRVRGNWVRMNAAKPRGLNANRNPWLKEVFKSAAISVTQLKADHPLRIDYEAMVMRNMRPNLARLTLARRLAATALALWKKQEVYDYSKRHRPPTSRAA

SEQ ID NO: 305556 - protein, 336 aa, unidentified
MFIIGCDFHTRFQRIAMLDTQTGELVERRLEHENGEARAFYAALPGAARVGMEATGYTHWFEAMLAEQGHELWVGDAAEIRASVVRKQKTDSRDADHLLDLLLKDKFPRIWTASAGERDVRQLLRHRHKLVGWRTSVRNQLHALAMGEGICRKGKLWTAAGRKELEGLALGPWASRRRQELLQMQDWLEPPIRALDQAVIEEVQSRPAARRLMEQRGVGPVTALAFVATIGSVDRFRNSKQVVSYLGLNPRESSSGGKQRLGSISKQGNSMLRFLLVEAAQTASRGDPELRRDYLRLKFRRGSAVAKVAIARKLAVRLYWKLREARQPSAAGSYAG

SEQ ID NO: 305557 - protein, 422 aa, unidentified
MLEEAQDEEQIITHVAGLDIGKASLVCCARVPDETKPGRRLQEVRTYATMTRSLITLADRLAVLGVTRVVMEATSDYWKPVFYLLEAHGFEVWLVNARDVKHLPGRPKTDRLDAVWLCKVAERQMIRPSFVPPEPVRMLRDLTRYRVDLIAEAGAERNRAEKLLEDAQIKLSVVVSDLFGVSGRLMMAALVGGQRDPHTLADLARSVLRRKIPALEQALTGRFSDHHAFLLGKMIARVEAIETDIREVDARIEAQLAPFAPAVARLLEIPGIGPAAAATIIAEIGVDMTRFPTPAHLAGWAKFAPGVKQSAGRRKGNGATGHGNRYLARVLGQIAVTAARTDTFLGERYRRIARRRGAKRAIVAIGRSVLTIIWHLLSNTESRFHDLGADFYLSRTDTERRKRNHIRQLEALGYTVTLDLAA

SEQ ID NO: 305558 - protein, 341 aa, unidentified
MDKELYFGVDVSKKTLDLAYYDGETIDWKNAHIQVSNDDAGFKKIGFWVAKVGKDFDTFLFCMEYTGLYNQNFRLWLESKEYIYGMVEPRKMHRFEPDLDDDQRSLDRIKTDELDAFRIAIYCEQNHKKILRNPSKLPSPVYFKLKRLLAERKQNTKQSTLYKQQLHDICAYDTDLSVERKKLLLKNMKENLKAIDKEIDSYMNEDASISKNYDLLTSIPGIGRIIALETIVLTENFTAISNPRKYACYIGIAPFKKESGTSVRKRTSVSKKGFSEAKADLSIAVLSAIKNNPSIRDYWIRKRKEKCGGIVLNAVKFKLVLRMFAVIKRGTPYVETDAYKN

SEQ ID NO: 305559 - protein, 338 aa, unidentified
MFIIGIDPHKGSHTAAVLDHCETVIGELRVSADRRQRDRLLRFAASFTPRTWAIESASGLGALLAQQLVAAGESVLDVPPTLSARVRLLDAGCTDKTDPHDARAAAIVALRHSRLRRVAAVDHTAVLRLLADRHRDLTGLRTQAICRLHALLCGLTPGGAGRLLSAPQAGWILRGVRPTGPVELERKRMALELLGDVRRFDNQLVATSERIVEAVVASGTTVTDIHGIGPLGAAIILGHTGDIDRFPTSGHYARYTGTAPIAASSGPKQRHRLNPRGNRQLNRALHVAAVTQVRNDTPGRAYYRRKLDEGKTRKEALRALKRQIAKVVHRHLVADARH

SEQ ID NO: 305560 - protein, 343 aa, unidentified
MNEIKVLGIDLGKDVCSVVGLDETGKVLLRRRMRRDSVLKLAAGMPACVMAMEACCGAHHLGRQLTNQGHEVRLMSPEYVRPYVKAQKNDDRDAEAIAEAATRPTMRFVDLKSDEQLDIQSLHRARDRLVGERTTLINQLRAILLERGIMIAKGRRKLELRLEQLLAGEMAIGRRIRVLIEDMRAEWRALDARIVVFDAEFAELARTDASMKLLSTIPGIGSLNATAFVASVGKAETFGRGRDLAAWLGLVPRQMTTGGKPKLLGISKRGNGYLRRMLIHGARAALPSLAKGKTLLGEWLRGLLSRTHMNTAVVALAAKMARIIWAVLRSGRPFQMAALPSVG

SEQ ID NO: 305561 - protein, 352 aa, unidentified
MEYYIGCDAHKKYSVMTGLSETGEILPAERVEHDKESYRLFLRTLPTGSRIAVESIGNWYWMIDEMEKAGHQPVLVHAARAKLMMGQVNKTDKLDAMGLAVLARNGTLPAVWVPPGELRDKRELPRLRMVLVSTRTRLKNRIHATFAKYGITFPDASDLFGGKGRRLMEASLAELPPETRQSVIQQLELIDQVEQSIKEAEKRIGEVIKEDPAMQLLKTMPGVGAILAITIALELGDVSRFPSAEKFASYAGKTPRVSSSGGKTRYGRVRVDVNRYLKWAFTEAANVIVLQQHSLGDCHALRLYWRVRRRGGHAKAITAVGRHLAEAAYWMLRKQEAYREPERHTMALAVKG

SEQ ID NO: 305562 - protein, 351 aa, unidentified
MSQSLYGSVAVIGIDIGKNSFHVVGLDARGAIVLRQKWSRGQIEARLANMPRCLIGMEACVGAHHLSRKLKAFGHDARLMPAKYVRPYSKGQKNDFRDAEAIAEAVQRPTMKFVATKTAEQLDLQALHRVRERLVSQRTGIINQIRAFLLERGIAVRQGLRFLRAELPRILATPPDVLSPRMVCVIEGMAEDWRRLDERVDHLSGEITALARQDAGCERLMSVPGVGPIISSAMVAAIGNGDTFCKGRDFAAWLGLVPKQISTGDRTILGKISKRGNRYLRVLFVQAAWVVLIKPKSWERHGLKPWIEAAKKRLHRNVLAVALANKLARIAWSVLARGRSFEARPAVASAA

SEQ ID NO: 305563 - protein, 415 aa, unidentified
MDVLFRVRIQDKECVERTTAANHLERNQKLMFYVGIDIAKTKHDLACINETGETVITNFRFANSYQGFHQLKLKLKQLSPITQDIHIALESTGHYNYNIVAFLRELGYTVFAYNPFIIKQFAKSQSLRKTKTDKKDALLIASKLRSDVTPEYYQTDKVMDELKELTRYQNRLIQSRSKCKNLYIRLLDIIFSEINSYVSNLHSHFVYELLTKYPSAQKIARARVSSLLKIKRLTADKAHQIQETAKQTIGNASSALSLELVQLIESIQHYDKQVNQTQEEINRLMTGLDSPITSIPGIGSRLDAIILAEIKTIHNFKNPNQLQAFAGLDPAIYQSGQMDNTGQMVKRGSSYLRYALIQAAKLISIYSPHFKTYLKLKISHGKHYNVAVTLIAKKLIRVIYHLLKTNQTFDEAKLR

SEQ ID NO: 305564 - protein, 356 aa, unidentified
MEQLTTVGLDLAKDVIAACVLDVHGAVIERRVLRRGAFERWAEQLPSCKVAMEACGSAHQWGRWFAAHGHTALLIAAEFVVPFRKGGKNDTADAEAVAIAARQPTMRFVPIKTVDQQAILAWHSVREGWKEERTALLNRVRGLLAEFGIVIGRSSDRLLTALPELTEDSRLPDAIRAMLLEAREQFVALHARLARCDAQIATHARNSSAAQRASELLGVGPVTASALAATVPDAKVFKSGRQFGAWLGLTPRQHSSGGRTRLGRISLRGNVYLRTLLIQGARSTLQSAINAEPSRASRLQRWIIELYGRKGYHKTLIAIANKHARILWAMLAKDERYDAAAWQRHPMHELLLAGNA

SEQ ID NO: 305565 - protein, 342 aa, unidentified
MAIATIGIDIGKSCFHVVGFDARGTIVLRRRCSRTQLIRELANVPACVVGMEACCGAHHLGRLLASQGHHVRLIPPQYVKPFVKSQKNDLWDAEAIGEAVQRPTMRVVPLKTTEQLDLQAIHRVRARLVARRTAAINQLRGFLLERGVTFPVGRRALVERFADVLANPVVSLSPRFCLLLTRLRDEWRLLDDAIQDLDREIATLARDDEACCRLTKVPGIGPLTATAFVAAVGHGTAFTKGRDFAAWLGLVPQQHSTGGKTTLRGISKRGNSYLRYLFVHGARAVCRHHRRRPHRLGQWIASLEARAHPNIVVVALANKLARTAWAVLQHDAGYDGRLFMNT

SEQ ID NO: 305566 - protein, 288 aa, unidentified
MAKRTTICAGIDTGKRKLDVALDGNSEQLQVENTAEGHKALLEWLGRRKVKRVGIEASGGYEQAVVAELRRMRFVVVVFQPAQVRAYAKYRGQRAKNDRIDAALIAACAAAVNKIHPAPDARLSPLAGQLTLIDQIGEDITRFKNRLESCRDARIQKLWKEDIVRLAKRERVEFKALVAAIREQHDLAARLDLIYSVGGAGLPTAVAILVRMPEIGQISREQAAALAGLAPYDDDSGEHIGARHIIGGRKRLREALYAAALAASFRWNPQLIALYKRLIAAGRVTSAR

SEQ ID NO: 305567 - protein, 341 aa, unidentified
MKLYGGIDLHSNNSVINLVDENGKVVFKKRIVNDLSVIITLLESYFDAIVGLVVESTYNWYWLVDGLMDAGFKVHLANTAAIQQYSGLKHGDDDSDANWLANMLRLAILPEGYIYPKEERMVRDLLRKRLQLVQQNTLNLLSIQGLYVRHLNNRLSSNKLKQLTQEQLALDFTDSNVCMAVSGNLVVMQCLTQQIKLIEISLKQQLKLKEAFIHLTSIDGIGLILALTIMLETGDISRFKKVGQYASYCRCVNGARYSNGKSMRNTNTKNGNKYLAWAFIEAANFAIRYNDTVKRYYQRKLAKTNVIIARKAVAHKLARACFYVLRDQVEFDVNKAFGYSK

SEQ ID NO: 305568 - protein, 401 aa, unidentified
MKEFNPEQQGIETVSALEIVRTAENVDVHAAYVGLDVHKETIAVAVAEPGRGEPIYRGEIANKPKAVEKLLAKLSEAYEGGLLLFCYEAGPCGYVLYRQILASGHDCQVVAPSRIPKAPGERIKNDRRDALKLARLLRGGDLTAVWVPDQEQERMRDLSRARDDMKGQERKARQQLNAFLLRHGYHWPRGKSRWTPAHENWLAGLKMEHPWQQVVLEEYIAAERAVGERVAQLNDHLMRALPEWSLAPVVDALIALRGVDKLSAIVLLAELGDISRFESPRQLMGFLGLVPSEHSSGSRRRQGGITLTGNGHARRMLIESAWSYRFPARQTKHLKGKARNASPLAKQIAWKAQTRLCGRYRTLTRAGKNTKLVCVAIARELAGFIWDIVRQEMPRLASQQG

SEQ ID NO: 305569 - protein, 337 aa, unidentified
MDTSKHVFHVHGVDGDEQPALRRRLRRSQVEKFFAKLPPTRIGLEACGASHHWARVLRSLGHEVVLIPPQYIKPYVKRGKNDAIDAEAICEAMSRPGMHFVPIKSRDEQAALMLLKVRDLLMKQRTMLTNAIRGHAAEFGVIATKGPQNLAELLERLGEDANVPAPARELLNSLAGQIAALEVRLEALEAKLKAHHKADPRSRLLATIPGVGPITALSLTLKVPDATVFRSGRHFAAWLGITPREHSTAGRQRLGKISRQGDEGLRQSLVLGATAVIQQVKRRFKAQRVSRTDSPWLLQLLARKPEKVAAVALANKMARIIWAMLVSGELYRQPQAV

SEQ ID NO: 305570 - protein, 350 aa, unidentified
MLIIGVDYHPSFQEIAFLNQETGECEERQLNHSDGEAEKFYRELKQRGVSVRVGMEATGYARWFERLLAELGFELWIGDPAVIKTKRVRKKKTDREDARLLLRLQLEKHFPIIWVPTPENRDLRQLLWHRHRLVQMRTRIMNQLQAVAMNEGKRWKKKLFSEQGRAQLEKLQLAPWASRRRKELVELLDRLNPTIAELTAAIEQEAKRRPEVLRLMTHPGVGPITALAFVLIIGTWERFHCGKQIGSYVGLVPCEDSSAGRQRLGHISKQGNTLLRFLLVEAAQAAVRWDPDWRRRYLHLAMRRDRRIAKVAMARRLGVRLYWMWRNGREYSQSEFGSHAGQPVHVHGVQ

SEQ ID NO: 305571 - protein, 309 aa, unidentified
MEIVVGIDVSKERLDVAILPQSEVFAVGNDHAGIDELVERLKGIGVDAIALEATGGYEMLAVAGLSSAGLTVLVVNPAQVRAYAHAIGRRAKTDPIDAAVIAAFVLATKPEVRPLRDAETQALSELVARRRQIVQMVVAEENRLRMALAKQAQKSIKRLLKALRRELESLDADLDSHIRKSPVWRVREALLTSVPGVGATTARTLLAELPELGSLDRRQIASLAGLAPWTRQSGKWKGKSFIGGGRGKVRAVLFMAALVASRYNPDLKAFRDRLVAAGKPKIVAIVATMRKLLTILNAIIRDGRPWQNA

SEQ ID NO: 305572 - protein, 334 aa, unidentified
MDKVTTVGIDLAKSVFSLHGVDGAGRLLLRRTVRRDQLIQTVAALSPCLIGMEACSGAHEWGRRFQALGHTVKLMAPKFVAPYRKSGKNDGNDAEAICEAVTRPSMRFVPVKSVEQQALLAMHRVRQGFVVERTATINRLRGLLCEFGVVLPLRSVTVRRQAAAAAEKLPELARRAIGDLLEQLRVLDERIGGYDREIEAQARLCEPAQRLMKIRGIGPTTALAIVATVGNGREFKNGRQFAAWIGLTPSQYSTGGKPRLGHISKRGDAYLRNLLVQGARSVLNSASAHQDRMSRWILELQPRRGYYRTLVAIANKNARIAWALLARNESLRSA

SEQ ID NO: 305573 - protein, 425 aa, unidentified
MNVDSTDEPRFAAYVAIDWGDSKHVWSLQPADLDRRERGEIEHSPEAVAAWAAMLSARFGGQPVALAVEQSRGPLVFMLGKYEQLHVYPIHPRAAAQFRAALFPSGAKDDPSDAELLLDLLVHHRARLRRLKPDTEQTRLVQHLVEGRRKLVNERTRQTNRLTAQLKLYFPQMLDWFDAVDSPLVGALLKRWPTLEALQKARPDTVRSFFTAHNCRSQELIERRLDQIRQAVPAVRDKALIEAAQAMTKVLVELIATLREGIASFGCQIAQAVAAHPDFAIFDSFPGAGPALAPRLLAAFGSQRERYQSAADLQTFSGIAPVTERSGKSQWVHVRWACPRFLRQTFHEWAAHSIGFCDWARAYYQQQRGRGNDHHAAVRALAFKWIRIAFRCWKHAVPYDDARYMQSLRRRGSPLIAALAKPELP

SEQ ID NO: 305574 - protein, 340 aa, unidentified
MLTEKAGQRACRDKSAIEYDHYLSLDWSLKIMAIAHMSRRDQVPRVFERPADLKELKAYLRSLKGRVILTFEESGFAHWLYLELLDEVDRMIICDPFKNKLLHHGPKTDKIDARKLCELLRAGLLIEVYHSTSGLYELRLLVSAYDDVVRSGIRVLNQQAALKLGHRDKGKTATFINGVLTKNIELYRKSKEEYEQRFRDIARRNTLVRFQRRLAGIGTIGAVKIVACVVDARRFPYTGKYFSYCGLISHEKLSGGRSYGRRKPRYSRMLKSVYKTAALAAINGKNSFRDYYDYLLNSGVAEHNARHAVARYIARISYGMLKTGTRYEPYRWRNAQEKST

SEQ ID NO: 305575 - protein, 357 aa, unidentified
MNTTQKISFIDSHFFIGIDAHLRNWRVTIRFNGLELKTFSMNPSPLELLTYLQKHYPDGIYHIVYEAGFCGFWALRIFRQHNIDCIVVNPADVPTSNKEKVNKNDPVDSRKLARELENKSLHGIYIPDLAHEELRALMRLRYRIVQSQTRIKNRIKGFLHAQGIAIPLQFSGNARWSHAFILWLEQLQPLTSAGKFTLLNIIAQLKQIREHNKNVLKQLRSEARHPDIAPVINVLQSILGIAFITAMSFYTEIIDMKRFANDDQLANFVGLVPSIHASDENVYSNGISFRHNKFIRGLIIESAWTAVKEDPALSLKFKELSKRMKSQDAIIRIAKKLLKRIRHVWLKNEEYVYALVA

SEQ ID NO: 305576 - protein, 398 aa, unidentified
MTESSDYESVQVFIGVDVDKDTHHAVAINRSGKRLFDKALPNDENKLRSLISDLKQHGQILLVVDQPATIGALPVAVARSEGVLVGYLPGLAMRRIADLHAGEAKTDARDAAIIAEAARTLPHALRTLKLADEQIAELSMLCGFDDDLAAQTTQASNRIRGLLTQIHPALERVLGPRLDHPAVLDLLQRYPSPEKLASLGEKKLAAQLCKLAPRLGKRLAADIAQALAEQTVVVPGTNAAAVVLPRLALQLITLRKQRDEVALAVEQRVLAHPLYPVLTSMPGVGVRTAARLLTEVACRAFASAAHLAAYAGLAPVTRRSGSSIRGEHPSRRGNKALKRALFLSAFAALRDPLSRAYYTRKMSQGKRHNQALIALARRRCDVLFAMMRDGTFYTPQAS

SEQ ID NO: 305577 - protein, 322 aa, unidentified
MTISAQSERVANIGIDVGKAQLDVVWHETGEHQAIENTPKDIKVLIKRLMKEQVQRIVLEATGRYERAFVLAAVEAGLPVIVVNPLMVRRYAGAIGRLAKTDKLDAGLIAEFAAVIKPKVRLATNAKTLQIKDLLLRRRQLMGMRTMELNRQQQYAASQASSCKRVIALLEKEVALVERQLDLAIDDVAEWKAKKEVLLSVPGVGPTLAYTLLGDMPELGELNQRQIAALTGVAPFNRDSGSQRGNRRIHGGRAGVRTVLFMATLSATQHNPVIRAFYQRLVAAGKHKKVALVACMRKLMGILNTMLREGTRWDEKKAQIPA

SEQ ID NO: 305578 - protein, 477 aa, unidentified
MEVIHERVAGLDVHKNSVVACLRSHSGKSAARECRSFGTTTDELLALLEWLTTSGCQAVAMEATGVYWMPIYKILGDGDFPVLVANAAHIKAVPGRKTDMNDAMWIADLAAFGLIKASFVPGEYVHELRTLMRTRKQLVREQTSHVQRIQKTLTEANIRLDSVISDIMGLNGRRMIEAMIGGQRDPRKLAALADKRLKATAKELYDALHGRLTDHHRFLLKLHLKQWDALDVSVQTIDREVDARLGKIQAARPTVDTQPAANAEAVEAKPIKVKRTKTKTAKTEEVKTEEVKAEEVKTEEVKTEEVKANDNGVSKLVDLLSTIPGVSRVSALTILSEIGPDMSRFPTAGQLVAWAGMCPSQNESAGKKKGSRLRKGAPWLKTMLVQCAWAAKRAKSSYYRAQFYRLQARRGPQKAICAVAASILTAIYHMINNGSPHKDLGIDYFDRRTPETKAKRLAAQLGKLGYQVTLTQAAQAA

SEQ ID NO: 305579 - protein, 356 aa, unidentified
MNEGSWVGLDVHARSVVAGVIDAGSGEVRSIRVPPGKEGAIAWLNTLPPPVRVAYEAGPTGYGLARACADAGISCVVAAPSKIRAASDRVKTDRRDAERLARLLRLGEITPVRVPGPEEEAARDLVRAREDTRGDLMRARHRLSKLLLRHGAVYDATAWTRTHDAWLRKQRFQDGPLAIVFDDCYSRMVDAKARRDGLDKAITELAATPPYAEVVARLVCLRGVSTLTAFALTVELGDWSRFRPESLGPFLGLTPSENSSGERRRQGAITKAGNSHVRRLLIEAAWHHQRPPRLSRTLESRRVGRSLAVRAQADRSARRLHERWHALERRGKRRSIIVVAVARELAGHLWALATME

SEQ ID NO: 305580 - protein, 365 aa, unidentified
MMSSTVAGIDPHQATFTVAVIDPNGVEIVHDTFDNSRCGYIAAIELLNTQGVARVGVEGSASWGSHVAVALAAAGFDAREVPPQRSAQQRRARRLAKTDTVDAVATARALLAEPSLGPVQALEAYDGLVARIEAVLEHRRMLVETRTLVLHYAQDQLAKLPTEVRDRLGSHGKVESRLARLAKLDVDLAGVSTSAGVYRLSWLMLLVDQDRKALAEIRRLERELARLLDEHGTTLREESGIGPIAAATLIVEVGDPFRFESESKFARWCGTGAVALSTGEGRGTPVRHRLDFGGNRRINAVLYVASITQQRFHPDARAYFERKVAEGKTRRGARRAHKRHLANRVIRRMWKDEARRLNDTPTDAA

SEQ ID NO: 305581 - protein, 450 aa, unidentified
MGRRQVIDDVLFERVFDRVAAVDVAKKDGMVCLRQPHPGRAGQRQSVVWGVTATMSGVRELAVQLVAAGVQKVSLESTSDYWRIWFYVLEEAGLDVALVSASQARSLPGRPKTDKLDAVWLARLTELGMLRPSFVPPAEIRVLRGYTRARTHLTQDRTRCFGRLEKLLEDALIKVSAVASKLTTASVQDMIGALIDGQRDPVVLAGLARGRMKARHVQLVAALDGMFAGHHAELAQLLLDQISFCDKRIARLDILIKEQLAGIAGAWGIDAGGETGPHASDRDGEPAPVLPAAARLDEIPGVSAEVAAAILAETGLDMTRFPTAAHLVSWAGLCPRAINSGPRTRHGKSHGNAYLRGVLGQAAIGASRTATFLGERYTRIARRRGKAKAQVAVARSILVIIWHLLADPTARYTDLGPGHYGTRTDKNRKTRNHIRQLQALGYTVTLTPAA

SEQ ID NO: 305582 - protein, 403 aa, unidentified
MFAGIDIASERHVLARLDDAGAAIGKPITISEDRAGYDALLAALGRAPVLIVMEATGHYWKNLFVVLTTAGHDVALLNPLIARRFQETNLARTKTDALDATGLARLAFEKRPAPTHLHDEIAETLRELVRHRDRLRQDFDDRVRQLHRLVDLGFPEFTRYVRSLDSMLATCLLAEYPTAHAFARATPRRVARLRYDGRHFVGPDLAHSLVEAAKHSVGQHHGPAYKLQARHICQDLDTWRKRLAEIEHDIENLLNTHVTGKLITSIDGIGPQTAARIIAATGDPAHFKSAGAFAAFVGVVPALRQSGKQKGARASIGHLGHARLRRALWMPVLSAVRLNPWLRAFYQRLRAAGKPPKLALIAAMRKLLHAVYSVAKHRRPFVTTEQGRAVEPQKSATARPCGI

SEQ ID NO: 305583 - protein, 420 aa, unidentified
MDEITEEPGALVERIAALDIGKAALTVCVRVPHEDKPGARRQEVRTYATLTPALLELRDWLVCQGVTLVVMEATSAYWKPPFYLLEDDIECWVVNARDVKNVPGRAKTDKLDSVWLAKLAERGMLRASFIPSRPQRQLRDLTRYRRTLTQERTREKQRAEKLLEDAQIKLSSVISDIFGASGRAMLDALIAGQRNPHELAALAYRNMRAKTSVLQEALTGHFTDHHAFMLGMMLARIDALTAQIDTLTTRIGEATAPYARQIAQLDEIPGIGITAAQDLLAEIGTDMSRFPTPGHLVSWAKFAPKARQSAGRSKAAATGKGNPWLGGTLGEAATSAARTKTFLASRYKRIARRRGKQRALVAVGNSILTIAWHLLSDPAAHFTDLGPDWHDRLAPLRRKRQLIAELERLSGKKVTLHDTA

SEQ ID NO: 305584 - protein, 346 aa, unidentified
MQDTTIAVDLAKSVFELAVSQRPGKLAERKRLSRGQFSRFVRESEPATFVMEACGTAHFWGREAQARGHRVVLLPPHAVRPYVLRNKTDGADAKALLEAVRNETIRPVPVKSVDQHVLGALHRLRSTWLATRTARLNTLRGLLRELGFVIPVGAGQVVPHVYALVSDAESGLPDALRAVFADAAREIGELEERVRAVERQLESLAGESALVARLRTIPGVGLLTATALAAFVGDVHRFPSGRHFASYLGLTPRESSSGLQRHLGRISKRGDPYLRMLLIHGARSVLCHAKRSPREGDRLRRWALERERARGHNKAAVALANKLARIVWAVWRNECAYRKATELTNS

SEQ ID NO: 305585 - protein, 426 aa, unidentified
MSEIEVMGQEPQFAAFVGLDWADQKHAWCLQAVGATQRESGEVEHTPETVEAWVGQLCQRFGNRPIAVAVEQVKGALVFMLSKYEPMHLFPVPPAMSASMRKALSPSGAKDDPRDADLLLDLLLKHRDKLRRLAPDSEATRRIQNLVEERRNLVDEKTAQTNRLTNHLKIYFPQMLGWFDRLDTELVCALVERWPTLEELQKVPPARLRAFFRKHRCRDQELIERRMVGIQQAIPATRDGAVIEAKSAVVKVSAQLIRSLVRGIADLDRKIEEAAAAHPDFFIFESLPGAGAALAPRLLAAFGSQRERYANAEEVQAYTGIAPVTERSGKKKWVHFRWACPKFLRQSFHEWAGHSIAHSQWARSYYQQQRERGKGHHAAVRGLAFKWIRIVFRCWKDEVVYDESKYLAALAKRHSPLAAVVSEIIL

SEQ ID NO: 305586 - protein, 379 aa, unidentified
MYEDITWVGIDAHKDSLSMAMAVAGEEGVQQWRTRADKLAIARLVKRLLRLAPGEVVCCYEAGPCGYVLQRELDREERIRCMVVAPSLVPKKPGQRVKTDRRDARHLLGQLRAGELTEVFPPSPEDEAARDLCRYRDQVRRDLMRCRHRISKMLLRRGLVYRAGRNWTKSFRCWLDAVRFDEQAAQTVLDYMLVELTQLEERKKSLDGRIEELASTDRYREVVGWVRCFRGFNTLAAMIVVTEVFAFFRFRSPRHLMSYLGVVPSEHSSGESHCRGGITKAGNSYLRRILVEAAWHYRHLPKVTKTLATRRQDQPAWAIEIAEKAQLRLHRRYRRLALARRKNRNKVNVALARELTGFLWAVLHRGLVEKAQAPESHAA

SEQ ID NO: 305587 - protein, 343 aa, unidentified
MTQYVGLDVSLKETKLHVLNEAGNRVWRGRCATDPTAIAAAVRRYAPMAARIGLETGPLTTWLWTALTAEGLPMVCLDARHAKKALDMKVNKTDANDAEGLAHLVRAGWYREVRVKGRSAMLAKALLGARSQLLNMSLALENQIRGILKTFGRIVPKGAGGLFDKNVRALITDDGEIAAVIMPLLQAREMARSKCAALDRRLIGSVQGDGTCRMLMTMPGIGPLTAVAYVAALEKPDNFKQSRAVGAWLGLTPRRFQSGEVDYEGHISRRGDCQLRALLYEAASVLLTRVRRDSVLRRWGLMLWKRLGFKRAATALARRMAVVLHAMWKSGTAFNPTLGAATP

SEQ ID NO: 305588 - protein, 412 aa, unidentified
MQTLIERGCGLDVHQATVVACLLTVRKDGKVQKQMRTFGTTTRELVGLRAWLLSEGCTHVAMESTGVYWKPIYAILEGALEIVVANAQHIKKVPGRKTDVKDAEWIADLLCHGLLRSSFVPPKPIRELRDLMRYRRKLVESQAAERNRLLKVLETANIKLANVATDVFGMSGRLMLRALIAGKATPQEMADLAKGRLRKKIPELQLALEGKLEEHHRFLLELQLQRLEAADKDLAALEQRVQQKLEPYAAQLALLDEIPGVDWTLAAVIIAELGVDMSVFGSVSQLASWAGVCPGNNESAGKRKSSRVPSGNVYLKSGLVEAANAAARAKGTYLRDKFFRLKARRGYKRAAVAIAHKILVAIYHMLSQQVSYNDLGDLYLDKLNKNHLTRNLVHRLERLGYAVTLTLQQEAA

SEQ ID NO: 305589 - protein, 414 aa, unidentified
MTEQPAVTCGIDWSERHHDVALVDPNGRLVAKRRISDDVEGFTVLVGMLADAGDSDANPIPVAIETPRGLLVAALRAAGRRVYAINPMAVARYRERWTVARSKSDHADAVVLANILRTDAHAHRPLPADSELAQAITVLARAHQDATWRRTKVVQELRAHLREYYPGFLKAFAAAGVTNLASADARAVLAIAPTPAAGARLNAARISAALRRGGRRRHIDQTAADLRNALRQPRLRQPALVEAAMGTQTLALLDALEAACAGVDRLGTAIAETFPKHPDYAVITSFPGLADVTGARVLAEVGDDRSRFADARAIKAYAGSAPVTRASGRSHVVIHRRIKNDRLAATGYAWAFMAMTNNPSARAHYRHRKTLGDRHAAALRHLFNRMLGQLYHCLQTDQSYDDNLAFPAAISPAA

SEQ ID NO: 305590 - protein, 347 aa, unidentified
MTTLARSVTGGVDTHLDVHVAAALDEKGTLLGVEYFETTRAGYKKLLAWLENFGPVALVGVEGTSSYGAGLTRHLHAERIAVVEVDRPNRQRRRRKGKSDPEDAISAARAAFSGDACGAAKTQDGNVEAIRVIRVARVSARRARTQALNQMRSLISTAPDPIRDELRGLNIYNLVSRASAYRPGARRDVVSLTKWTLRSLARRAIELEEEISECDAILKDLVHQTAPELVGTLGIGTDSAAALLVAAGDNPHRLRSEAAFAHLCGVSPIDASSGKQERHRLNRSGDRQANSALWHIALTRSVYDPRTTEYLDRRMSEGLTKKEAYRCLKRYIAREVYGLLPMDRLTT

SEQ ID NO: 305591 - protein, 410 aa, unidentified
MEVLHLRCAGLDVHKKTVVASVRLAEENKVTTEVKTFATTTAGLLELSDWLSANDCTHVAMEATGVYWRPVWHVLSDGEFQLVLANAAHVKNVPGRKTDVGDATWLAELLAHGLVRASFVPDGQTQELRTLLRTRKQLVRERSRHTQRIHKVLEDANLKIDAELSDMLGKSGRAILAALVAGETDPVRLAALAHRNVKSPQAKLAEALRGTVTSHHRFLLKLHLQQIDGLDASLGSLDREIEANLAPFRVAVDIVSTHPGVNELSAEAIVSEIGVDMSRFPTAGHLLSWGHLCPRNDESAGKRRSTRLRKGGRWLKSTLIQCAHAAKNKRGSYYEAQYLRLRSRRGPQKAICAVAASILTAIYHMLQNGAVYQDLGADHFSRRSKDAHARNLLRRLEKMGYAVQMTPVVV

SEQ ID NO: 305592 - protein, 351 aa, unidentified
MSDHYMALDVHCAFCEMAVMTSTGKLVLRDRCETRIRALREAIAKVRRPRRLTFEEGPLADWLARELRSSVDELVVCEPRRNSWIARDGDKDDPIDARKLADLYRGGYLKAVHQSKSLGRSLLKQQVSLYHDRVKERVRQGNQLVALFRRHGVFVKATHTLRDETWRQCLKQLPKSPVLHQGLTLVRQIYALLRTQEESLRAGLIGLAKQEEPIRRFETLPGMGWIRGVTFYAYIDAPQRFRSKAALWRYSGIGLERRHSGRGPVQTRLSRQGNRRLKNVLLGAAQTAIAQAENAYADKYRHWTQEEGIPAPNARRNVARAIAATLWSLWKTGQTFDAKRVAMPAVSCEQL

SEQ ID NO: 305593 - protein, 438 aa, unidentified
MGKDKKRKKHRNVDTSHLEQLNINAAGVDIGAELHYVAVPNGRDPEGQDVRHFSTFTTDLHKLADWLIQCKIDTVAMESTGIYWIPLFEILDSQGFNVRLVNPRNIKNTPGRKTDVVDCQWIQQLHTYGLLQSAFRPENQICELRAYLRQRAMLVSYASHHIQHMQKALEQMNIKLNQVISDIAGVTGMKIIRAIISSERNPVKLARMRNPRCNNSETIIAKALEGNWRSEHIFALQQAIELYDFYKKQIIEYESRIQRHLESFDDRSNGSPLEKPLRKSGGSSNKFNFDARGCLHRITGVDLTRIEGIEAPAALNIIGEIGIDMSPWSTEKHFASWLGLCPGSKISGGKILSSKTKPSANRAAHAFRLAAYSLQRSKSAIGAFLRRKKAQIGAPKAITATAHKIARIFLKCSNMAPNMLTLASNIMSNAIKSEWLQT

SEQ ID NO: 305594 - protein, 314 aa, unidentified
MSTAVYVGMDVSQDWLDVHQLPEHRQQRFANTPAGFSELNAWLQGETVKLIMLEATGGFQREVSLSLSEAGFPVRVINPRRARDFARGAGTPGKTDRLDAQMLARFAEFCRDEAPSQLDREQMEMQSISHRRRQVTQMIASEKARLKQAFGAVVERIKAHITFLESEDESLQDELFIRLQADERWAQKFDLCLSVPGIGAKITTILLVEMPELGTLSPEKITALAGLAPFCRDSGKTKGKRFIQGGRAGVRSALYMAAMTGVRCNTVVKSFFEHLVSQGKPKKAALIACARKLLVILNAMLRDHMPWNPTAQPA

SEQ ID NO: 305595 - protein, 355 aa, unidentified
MKQQAIQYVALDVHQATLVVSVRDEQGSVVMRATVATEAKAIVGLVRGLGSRVHIVFEEGTQAQWLHEVLKPYAERVVVCNTRGRGGQDNKSDRIDADRLSELLRLGSVKSVFHGASELLTLKELVRSYANLVEDGTRVMLRIKALFRARAIKTPGTSVYSPSKRKGWLSQLEGRGTRMRAEALFAELDMLQELRPKAKAAMIAEARRQPGWKVLRSIPFLGPVRVAQILAIMATPWRFRTKRQAWPYVGLAVVTRSSADQEFADGKLRRRRRAPLTRGLNRNHHPLLKSVFKGAANAAAATEGPLKDFYDACVARGVREDMAKLTLARKIVAIALRLWKTGELWDATKLTLQVT

SEQ ID NO: 305596 - protein, 343 aa, unidentified
MKITAIGLDLAKSVFQVHGVDDRGHAIVRKQLRRDQVVPYFAKVPPCLVGMEACGGAHHWARRLREFGHTVRLISPQFVKPYVKSNKNDAADAEAICEAVGRPNMRFVPIKTVEQQSVLSLHRVRQGFVKVRTAQANQIRGLLAEFGLILPQGISNVARRVPGLVDEAAELPVPMRQLVNRLLEHMKMLDQQAKELEAQIKAWHQGSELSRNLEAIPGIGPLTASALVASIADAKSFKNGRQVAAWLGLVPKQDSTGGKPKLLGMSKRGDTYLRTLLIHGARSAIVSAQRWHKPNAWLERLLSRRHPNVAAVALANKNARTAWALLAHEREFRPDYVPQPPIA

SEQ ID NO: 305597 - protein, 338 aa, unidentified
MAVLDSAGKLVMEAILETKAETILQFIHGLRGSLRVTLEEGTCAAWLHDVLKPHVAHVLVCDPRKNALIKAGNKSDRIDARKLADLLYLDKLHPVFHGETGNRALKELGRSYLALTRDTTRVMNRLKALYRSWAIACAGQRVYAPRYRSEWLAKITEAGVHRRAEIYYQQFDALRSLREQVRRDLLAEGRKHKAMKFLRQIPSIGPIRAALLIALMQTPHRFRTKRQLWAYCGLALKTSTSGEYHIVEGRLKRARKFLAIRGLNANHNHDMKNIFKGAATRAAAVPGPFQEFHAGLVARGMKPTMARLTLARKIAAITLMVWKKGVDFDAEHLKQQAA

SEQ ID NO: 305598 - protein, 346 aa, unidentified
MNITTVGIDLAKNVFQVHAVDVRGKLVLRKQLKRDQVSRCFVNLPPCLIGMEACASSHYWGRMLEGFGHTVRLMAPQFVKPYVKTNKNDMADAEAICEAVARPNMRFVPIKSVEQQAVLSLHRVRQGFVKARTAQANQIRGLLGEMGLVIPQGIRFIAQRVPGILEDASNGLPLAFRQLIERLTNHLKELKEQVDAIQSQIVAWDRGCELSQKLQKIPGIGPLTATALIATIADVHSFKNGRQMSAWLGLVPRQKSSGGKPTLLGISKRGDAYLRTLLIHGARAAIHAAKRRPEGRENSWLAKLLARRHANIAAVALANKNARTVWALLAHGRDFDPAYVPVSAVA

SEQ ID NO: 305599 - protein, 375 aa, unidentified
MNKCRLNTELSSHEETRSQFNGSKAVIKSAEGRIRRYVGLGIDVHQDFYVVVEQVGGSNPKPPQRFAKEAFLHWATKLTRQGSQVHAVYEACGFGFGLQRQLSALGITCHVVCPQKLDEHNRRVKTDSLDAKALCLKLDRFVQGNKDALALVRVPTEQEEQLRAMHRQREQLVKARKQLEAQGRSLMVNHGMEPLKNWWKPRTFAALSVPAWLKELLSNSQPILLALQEKIRLLTMQLQAAAGPDQPRGLGALSSVIIDREIANWHRFNNRRQVGSYTGLCPGEHSSGNTRLQSCVTKHGNPRLRAALVELAWRLVRFQPNYRPIIKWNEVLRNGALATGAARKKAIVAVARQLAVDLWRIRTGRVRAETLGLIN

SEQ ID NO: 305600 - protein, 372 aa, unidentified
MKQNIIHVGLDVDDTQYHGSALNKSTGEVLDFTCRPTLKGFMGQLDKLHKYFPGNTFRLCYEASYIGFTLQRDLADKGFHCDVVAPTSIPSPRGRQIKTDRIDAVQLAQFYANDLLTFVAVPDPEQEQDRDLIRSRQKLLAQQTELRTHVQALLRRNGRHFKAETRYKTHWTKPHYFWLERTVDNASGSFKVNLALLIRQLKNIMHILAEFGQQIEVMANTPRYEQSVQALTCYKGIKNLFALTMITEIGDVKRFPHPRQLVSWIGMDIREYSSGGKHNRFGITKQGNRYLRSAFVEANQRGYRTAGISHTLKARRKNTDTELIHIADRCLKRLNKKGNRLLLAGKHPNKVKVACAREMVGFVWESLNKVAA

SEQ ID NO: 305601 - protein, 346 aa, unidentified
MKNTNIVGVDLAKKVIQVCLVKRDKVISNTEMAPKEFRCFLAKTKSCTIVFEACATSNYWKQVCLSEGHDARLISARLVSQIRQNQKTDKNDALAIVQASQLTGVRFIQGKQFSQQELQSISRMRELALKQKVATSNQLSALLLEFNIRVSNRNGGLNGVVQATLEDVTNDFSSEFRAALYETWQGYLSLVARIEKYDKHLSESVEKTPACKKLMALEGVAIINAVNLYTSLACSEESVLSSAKDASASLGLTPIQYSSGGRIKLGGIGKRVKNALLRSNLISGAMAVVKQVSQREPKTAKEKWLKALIERRGNKCATVALANKTVRTAFAMLRDGTEYHAQAITD

SEQ ID NO: 305602 - protein, 367 aa, unidentified
MKQQTSATSETQVKGRNIIDFTGKTICVGIDVHQKDYQVAKVLDAICLGNHRMESNPEVLIEHLRRRYPGSEFKCVYESSAWGFNLQRRLSAAGMDCIVVHAADVSTSDKEKKRKTDKVDALKLARSLAGGDLKGIHVPDETIQKERALIRYRKAMVNDINRSKNRLKSLLKYQGIEIPEQYLKNNWSCNFIKWVEQQAAKDDLLKDSLLLMLEQIKLLRQLLLKIEKKLRELRKGKYASKAQLAMSVPGIGPTTAMMFLLEVGDVNRFKGFDTLNDFIGFCPDTASSGEKDRNTGLTTRRHKQLRSALIEAAWQAIRTDPALLEYYQMLTKRMKGNRAIIRIARKLLRRLRAVLISGIPYQKGVIA

SEQ ID NO: 305603 - protein, 410 aa, unidentified
MTAINQFAAHVGLDWADKKHDVCVQFKNGERVFHVIEPTAEALDAWLTELHQKFKGRIAVALELKKGPVVYALQKYPFITVFPVHALSLARYRQAFSPSGAKDDPQDAELALELMLRYPQKIKAIEPDNSDIRLLQQLVEQRRQLVEDKRRFVNRIINTLKQYYPQPLEWFSHRGSLLLFKLIIRWPSLQQLKRARRETIRNFLNAKGGRAMALTEQRVVSIDNAIPLTTDPSVIEANALMATALATQIKVVSEIIKTYDERIETLFDTLPDATLFKSLPGMGPCMAPRMLAALGDNRDRFNSAEEIQNYAGIAPVTERSGQKSWVHWRWQCAQFVRQTFVEWAAKTVNSSYWARLYYQGLRERGKSHQSAIRALAFKWIRIIYRCWKTRTQYDEAKYLLALEARHSPLL

SEQ ID NO: 305604 - protein, 357 aa, unidentified
MESQEVKYVGVDCGKKSIEVVRINSENSLERRQFSTTESGINNLLQWLTLNDIVGLEAGSQSFRIAKSILNKGVQVIVLNPGNLATIYQSLKKTDKEDSLKIARLIQRFPIEELPTVPIPNDEEEDNRRLCTEQENWTKQLTQGKNRLHSLFTQAGLTQITKKHLRTKANREISVALLPSRYQKEAERILKVLDLVEQNLKLIEKEIQEALKKNKAYVQTIMSMPGIGMITSLAIMSYMGDCKRFSSAKQAAYYAGLVPRVDISGDTVRYGRIINRGCHSIRRVIVQAAWSLVRCQHGGKVKEFYQRLYLKKGAKKSIIATSRKMIEVLYVIIRTGKLFDSMPENILNRKLTQYGLM

SEQ ID NO: 305605 - protein, 283 aa, unidentified
MDKYIGLDMDCKKTVGYTIVPGQSESSATFGPDVESMRRYFRQERQGGYRIHAAFEISGQAGFLYDQLLEDVDSLHVVNPTKMTWIYRTAKKNDRIDARKMAVLLSIGELPTVYMPSKEIRQWRQTILHRQKIVQKVGQVKNRIRAALKSEGHRQPEHSGGWWKRANRMWMQQLCEETIHVDSLWRLQVRNLLDELTLLEKQRDRVTDYLDAYLAKESRAKLLTSIPGVGPRTAEAVLAYTDDINRFSNYKKYCAYFGVTPKLDESGSFRRLGHISKQGPAVV

SEQ ID NO: 305606 - protein, 361 aa, unidentified
MSDIETEGVRKCVVGGVDTHKDLHVAAVVDDLDRVLASACFATTRHGYKQMLTWMRSFGELTRVGIECTGTYGAGLLRYLEHAKISVLEVTAPDRSDRRKRGKDDTLDACNAAHAAFAGIRTVTPKKRDGMVESLRVLKVCRKTAIQARRVTLQLIQNTIVSAPDELREQLRSLTRMQLIRMLAAWRPDLSDYRQLASAYRIALKTLGRRYLELHDEIADLDVMIAGLVDELAPELVSRNAIGYETAAQLLLTAGDNSDRFRSESSFAALCGVSPVQASSGKVSRHRLNRGGDRAANSALHIIAIGRLRTDVRTQTYVAKRIAEGHSKLEAIRCLKRYIAREVYGIIQSRNLTINQSTIST

SEQ ID NO: 305607 - protein, 414 aa, unidentified
MEIVHTHCAGLDVHKKTVVAAIIVPDPKGGLHKETRTFGTMTSDLLALSDWLMEQGVSHVAMESTGEYWKPVFNILENNFEVLLVNAQHIKAVPGRKTDIKDAEWIAELLRHGLLKASFVPPLGQRELRELTRYRGTFVKERASLVNRLQKVLESANIKLASVATDITGVSGRAILQALLEGKSSPEQMAELAKGRMREKRELLAKALQGQVKSHHRFVLTELLCQIDGLDETIVRFDEQIEAYCRPFEEVVQWLDTIPGVARQTAEVIVAEIGTDMNRFPSADHLASWAGVAPGNNESAGKRRSGKTTQGNHALGVALNHAANAASHTKNTYLSAQYHRLASRRGKKKAIVALEHSILIIAYHIIQRKEPYHEFGGDYFDKRRPEATAKRLVQRLERLGFQVSLQQAPAPVAA

SEQ ID NO: 305608 - protein, 482 aa, unidentified
MKPKQQEKTKEATCRATQGNWQQMNRKQRREMTRKIQSEDIRLEVVHCDAAGIDIGNESHYVAVPPARDGQPVRRFGCTTAELKEMAVWLKQCAIRTVAMQSTGVYWIAVYDILEEAGLEVYLVNARDTKNLPGRKSDVQESQWLMKLHTYGLLRNSFRPSQVIRTMRTYWRQRNDLVQSGGRHIQRMQKALTQMNIQLANVLSDVSGMTGQAIIKAILAGERDPHKLAAFRDPRVKASEEEIARSLEGNWEEDLLFVLQQEQDGYEFCQKQMAECDQRLAQYLERREDRSAGAHLPEEKRKGRLKKKSGNKPRFDLRTGLFRMSGADLNRIDGLDVMTAMTILSEAGWDMSKWETEDHFVSWLRLCPDNRISGDKIIGKGRLPTNNRVTTALKMAANSLRTSKTYLGAQFRRLRSRLDTPVAIKAMAAKLARLVYRMLRYGKKYVDRGAAFYEAQHRQLQIKHLKSKATKLGFQIIQVPTA

SEQ ID NO: 305609 - protein, 403 aa, unidentified
MNSVGIDISKGRSTVAVMRPFGEVVISPFEVRHTDSELSELARQLKSLNGETRVVMEATGNYHAPVAKLLHDAGLYVSVVNAKLVHGYGNNDLRRVKTDKKDAVKLANYGLDRWLTLPRYFPEEDTRLLLKNCYRQYRQYSKVQTILKNNLISLLDTVFPNANRLFSSPIRGDGSEKWVDFVAEFWHCRCVSEKSERAFTSKYLRWCRKHGYNFSEAKAHTIHAEACGHIDVIPKSETTKLLVEQAVAQLRATSTALAALKHEMQALTSMLPEYPVVMDMFGVGPTLGPQLIAEIGDVRRFYSKKALVAYAGLDAPPNDSGDVTGRHKSMSKVGASSLRRTLFLVMSVYLQRTPLDEPVYQFMDRKRAEGKPYRVYMMASANKFLRIYYATVKIYLESLEHTV

SEQ ID NO: 305610 - protein, 404 aa, unidentified
MIFAGIDVAKHRHELCLVDDTGSTVLQMYIYNTQKGFEKLLLALDNFNLSHEDIQFCMEATGHYWLALYCHLTNLNYKVSVINPIQSDALRNLYVRKAKTDQKDAFLLADLLRFGRAPASQLASETVLKLQTLSRIRMDFVHQIGSLKNRVIGILDRIFPEYSKCFSDVFIRTSKELLKKYTEPEEIAQLDISELTDFLKVHSRGRIGAERAELIQSLAKGTFGINLALDAFTLQLRLMVEQIEFIEEQIAVIEEAINQVMEEMRPDPDTPYRHVLETIPGIGPVLAAAIIGEVGDISRFPNAKALVAYAGLDATVRASGQFEGTRNRISKRGSPVLRNSLWLAAISARRFNPELKAFYELKCSQGKHSSVATGAVARRLVHLIYSIWMENRPFDPDYAWSPNK

SEQ ID NO: 305611 - protein, 352 aa, unidentified
MNRKRKDVINSEELFVGIDIHKRTWHVTIRTDEVELFSGSIPGIWEVLLRLLNRYEAQRIYAVYEAGYFGFWLHDHLTEYGVDCLVTPPSLVPQEYGNRVKTDRRDSQKLARLLAKGLLKRIWVPSSEERFHRQVIRRRRQLVRDRVRIQNRIKAELRFYGVDLPSPKGKWTQIYFDNLQRIKFNNSWMQKSFTCLLEQYDFFCGQINKQTQLLKELSQLPRYRDRVEILRTIPGIGIINAMEILLELQDLSRFQRAEQLAAYVGLTPSQYSSADKVRMGRITGIGKNSVRSALVESCWMLISKDKEMQRRYKELKARSGAKRAIVAVARRLLLRIRRMLLDVQPYNFQLIA

SEQ ID NO: 305612 - protein, 401 aa, unidentified
MQDTQQHGAVDVFIGVDVGKGQHHAVALDRNGKRLYNKALPNDEAKLRALIAELKTHGRLLFVVDQPSTVGALPVAVARNEGVLVAYLPGLAMRRIADLHAGEAKTDARDAAIIAEAARSMPHTLRSLRLADEQLAELTMLCGFDDDLADQVTQTSNRIRGLLTQIHPALERVLGPRLDHPAVLDLLERYPSPAALAAVSEKALANRLTKLAPRMGKGLATEIVQALGEQAVTVPGTQAATIVMPRLAQQLAALRKQRDEVAAEVERLVLAHPLWPVLTSMPGVGVRTAARLLTEVAHKAFASAAHLAAYAGLAPVTRRSGSSIRGEHPSRRGNKVLKRALFLSAFAALRDPVSRAYYSRKIQQGKRHNQALIALARRRCDVMFAMLRDGTIYQPKSAPNA

SEQ ID NO: 305613 - protein, 355 aa, unidentified
MNSEKYIGMDVHQATISVAVMDSSGKLIMECILETKAATILEFIDGLRGTLSVTFEEGTSAAWLHDLLKPHVSHLVVCDPRRNALLKDGSKSDRIDARKLAELLHGNKLHAVYHGEHGVRTLKELGRSYLTITKDLTRVMGRIKALYRSWAIPCSGTTVYAVRHRAEWLAKILEPGVRLRAERLYQQLDLLQPVRQEARRDLLVESHKHHAVKLLRQIPSIGPIRAALLVALLQTPHRFRTKRQLWAYSGFAVETHDSGEYRFVRGKLVRNRERITVHGLNHNHNHDLKNLFKGAAISASTRPGPLCDFYVALVEKGMRPTMARLTLARKMATITLTIWKKGVEFDAKELNRQAV

SEQ ID NO: 305614 - protein, 372 aa, unidentified
MNYNTVYVGMDVHKESFTLCSCKYEDEKASHYQRTPASYKNVLRYLAFLRTIYGEYTRFVCGYEAGCLGYSLYHQLENFNVECVILAPTTMLEQRSKRRIKTDKRDAEIIARSLAQHNYSPVHIPTETDNQTKEFIRMRDDHKAELKKIKQQILSFCLRQGYQYDGSGNWTAKHVKWLRSLKPAGLYKEILDEYLLTYTILTDKLNRLDQRIEELASKEEYKESVSKLTCFLGIKTHTALSVIVEVGDFQRFVSARKFAGYLGLVPGQHSSGDDRNGLGITKAGNTHVRRLLVESAQSYTRGKIGYKSRVLRSRQAGNSPQVINYADRANERLRRRYYQMVLKDGKKYNIAKTAIARELACFIWGMMTDNIY

SEQ ID NO: 305615 - protein, 404 aa, unidentified
MQERTAGIDLASEEHRLVVVESNGSQVEQRRITHSEDGLAALLRRLLELDVARIAIEQPNGLVVDRLLDAGIAVVAVHPNQLAAARERYRSGGGKSDGFDAYVLAELARTDMHRLRLLEPDSDETRALKTLTRTREDLVEQKVALANQLRAQLEAFWPGAARIFFDLDSPIALAFLERYPSPEDARSLGQKRLAGFLARNGYCGRKPPADLLARLRSAPQARAGEAELEARRAVVLALVAILKPLVEQIKLLTSQIAGALRAHPDGTIFLSLFRDPKSVVTAAELLAEIGDQRQRHPTSASLEAIAGQVPVAVQSGKKKVACFRWACNKNLREAVSVLADSSRHHNPWAADIYQRARARGHDHSHAIRILGRAWLRVIWRIWHDQAAYDPARHGSLNRLLAAEG

SEQ ID NO: 305616 - protein, 320 aa, unidentified
MNQESYFIGIDVAKARLDIAVRPTDQRWQVDYIEERIQELVKQITKLHPTLVLLEASGGLELPVVTALAVASLPVVVVNPRQVRDFARATGKLAKTDSLDAMALAQFAEVIRPLPRSLPDKETQAVNTLVTRRNQVMGMLVAEKNRLHTSRPPVRQRIQLHIDWLEKELDEIDQDLKETLANIPIWCEKENLLRTVPGVGPQVAVSILAYLPELGTLDRKRIAALVGVAPFNRDSGTLRGKRTVWGGRSHIRAALYMAALVASRHNPVISTFYQRLLAAGKAKKVALTACMRKLLVILNAMLKHRCSWHYLNPQIFGPCS

SEQ ID NO: 305617 - protein, 343 aa, unidentified
MQAVTTIGLDIAKSVFQIHGVDAAGNVIVRRQLKRRYVLLFFQKLPPCLVGIEACASSHHWSRELQALGHTVRLMPPAYVKPYVKRQKNDAADAEAICEAVTRANMRFVATKTPEQQSCLMLHRTRHLFIRQQTSVINAIRAHLAELGIVAPVGRNGVEELLGVIADPSDKRVPEIARACLAALGAHLRVLKAQILEFDRMINAWHRSNETSKRLDEIPGVGPALATALVASVADPKAFRSGRNFSAWIGLVPKQHSSGGKDKLGSISKQGDRYLRSLFTAGALAVIRYAKIHGTKHRPWLTALLARRPTKVAAIALANKIARMAWAMMARGDRYREPVALAA

SEQ ID NO: 305618 - protein, 347 aa, unidentified
MKFYNNSHPYYCGIDLHARLLYVCIIDQNGDVCLHREIPASPEKLNSLLEPYIGQIVVGVECMHCWYWVSDFCDDIGVEFILGHALYMKAIHGGKAKNDRIDSYKIANLIRGGNFPVAYVYPKEMRATRDLLRRRLKMVRLSANLKAHVSNTTSQYNLPPNGVNLKNVCSREQVSHAFPDPVVQKNINLDLAMIDSYAKQLSKIEWFVEQQAKAHQPIYLHLLKTIHGVGRILALTILYEIGDIKRFETVQNFASYARLVKCKAESAGKSYGTSGNKIGNAHLKWAFSEAAVLHLKGNEKAKNYLLKLQKRMSKAKALSVLAHKLGRCIYFMLKNETVFDEQRFLKS

SEQ ID NO: 305619 - protein, 355 aa, unidentified
MSNEKYIGLDVHQATISVAVTDSQGKVVMESILETKASTLLEFFAGLRGSLFVTFEEGTWAAWLYDLLKPHVTEVLVCNPRKIPLLKQGNKSDKIDARKLAERLRLHDLKPVYHGENGIRMLRELARSYLTIVKDLSRVMNRLKALYRSWAIPCAGRDVYYTRHRSQWLEKIPEAGTRRRAEQLYQQLDMLQHLRQQARRELLAESRQHAITAKLRQIPSLGPIRSALAVALIQTPHRFRSKRQLWTYSGLGLETRDSGEYHFVQGQVRRRKKQATIRGLNKDYNHDLKGLFKGAATRASVKPGPFQEFYQRSLAKGIKPTMVRLTLARKIAAITLTLWKKGEDFDIAKLKSQAA

SEQ ID NO: 305620 - protein, 346 aa, unidentified
MLHAGLDLSRKRLDFHLLDEAGETVEVGAAPPDADGLRGLAGRVSRHRQPLRAAIESMTGARFVHDQLELHGWEVEIADAVKVKGLAPLACKTDRIDAWVLAELSRRELVPAIWMPDPAVRAERERARFRLHLVRHRSSLKHRIHATLLTHGKPCPVSDLFGVRGRELLERLCLPEPWASDVEASLRLIDELDREIEACERELRRLGAAHAYVPLLTTIPGIAWVLAYTIAAEIGDIARFPSPTKLAGYTGLCPRVYQSGESDRRGPLAKNGPRYLRWALIEATSHASKHPAYRDRYQRTRQRLGKQRGPKVAQVDLARRLAEAIWHMLTHDRPFAPAGATTPMTA

SEQ ID NO: 305621 - protein, 438 aa, unidentified
MSNKVFFNLDDLFISVGIDVGADFSWMSIALPNQQFVGKPYKILHNSIDSLTTAVSKIKEAEELYSLESRIFLESTGIYHYPLFCYLRDKGFNCSVINPIITKNSTNINIRKVHNDRFDSKKAALVGLKPDLKVSLMPSDLALNCRNLCREYYDLMDNRSAYVNKLQGELRMAFPQYLGIFSKVTINTSLTLLETYTSPSAFLKADKQEIIDIIKSTARFGLTYAQNKYNAIIQAATDANQFGYIIDSNIKRIRLYISFIRKYDEEINSILESLHELVDANEDSDFVKQIHLIETFKGAGFLSAVSIMGEIGDFSAFSKPKQLFAYFGLDPAVKQSGKFEGTKVQMSKRGSAIARRVIHTLTLQSISISRNREAKNPVLREYYLKKCDSKPKLVAMGAVSHKVCNMIFAILRDNKPFKIIAPQEHIKQYNAAKCDIAA

SEQ ID NO: 305622 - protein, 370 aa, unidentified
MLAPLFKTAINGESSYHHYSAKTLAGGFLMTKNIYFVGIDIAADNFVASIYQSPGKPVVTKEGWGNTFDGFNAFVSWLTEQGINTKNSIICMEATGVYGEGIAHFLVSQHYQVSVEPPLKVKRAFDPIGHKTDPVDSRQIAEYAYRFRDELRFWQPKEEIIEKIRHLLTAREQFVKQSTALQNSLGAYQRHVVQVALITDAHAHLLKELKKQITEIDKELEQLIRQNPGISNIKNQLMSLPGFGLLLSSSLIAMTNSFRDIASHKTLAAFIGICPYQHQSGTSVYRPAHIRPFGPSYARKLLMLAARSVVTHNAEFRKYYLRKLAEGKAKKLVLNNVANKLIKIACAMIKNNSRYVSAYKSINPMCLNIA

SEQ ID NO: 305623 - protein, 361 aa, unidentified
MSESMVLVGLDVHQAQTVAAVLDPSTGELSVQRLRGEPASVVPVFLEELDCPVRAVYEAGPTGFALARVAEGRGLDVRVIAPGSIPRAPGDRVKTDRRDAKRLVRLFAAGELSYAFVPSEADERFRDLVRCIEDARKDLMRSRHRLSKFLLRRGHRFPCKAWTQPHERWLGKLRFEDAPSQATFVDYLCAVQTLVGRRRTLIEVLEQTVPETSHAETVARLRCFRGINTLTAAGLCAEVGDFARFAKPALLSGFLGVVPSEHTSDEKRAQGQITKAGPPHARRLLVEAAHHYRHQPAVRLELKARQAGQDPRVVQVAWRCQRRLHERWVHLQGKRGKRTGTVAIACARELAAFCWEAATLD

SEQ ID NO: 305624 - protein, 452 aa, unidentified
MAKPKRSRPERDISLTHRDAGAIDIGARMHVAAVPPDRDHAEPVRTFGTCTGDLQRLADWFERCGVRTVAMESTGVYWIPAYEVLEQRGFEVVLVNARDAKHVPGRKTDVSDAQWLRRLHEYGLLRASFRPKGELAALRAYLRLRERLLEYAASHIQHMQKALMQMNVQLHHVVTDITGATGMRILRAIVEGERDPAVLASHRDRRCHASVEEVSAALTGNWREEHIFALGQALELYDAYQAKVVECDARIEAVLGRLRDAAARPASRLPPARHRDGTANAPGFDARAALHAILGVDLTQIHGLGPSLALKLVGECGTDLSAWPTAKHFTSWLCLAPSNKVSGGKVLSTRTRRSGSRAAALLRLAAVTVGRTQTALGAFYRRLSARVGKAKAVTATARKIAALFYNTLRHGMAYADLGASCYEERYRVRVLANLKRRAKSLGYVLQEAPSPA

SEQ ID NO: 305625 - protein, 374 aa, unidentified
MMQQDGRSRYIGLDVHRATIAVAIAEDDGCPPTSYGSIANEPSAIRKLMARLGGPNVRVRVAYEAGPTGYALHRQLTSMRLECMVVAPSLIPVRRGDKVKTDRRDALKLARLLRSGDLTAVWVPDEAHEALRNLVRARADAKSDELRAKHRLSKFLLRQGSHPPVGIRNWSVRFFQWLRQVKFEHVADEIVFTDYLAAVTAAGDRIKRLEAALRQCAETSSQVALIGALQAFRGIGFLSAVTIVAEAGDLRRFRTAPQFMAYAGVVPSESSSGRTHHRGSITKTGNSLLRHVLGEAAHHARHVPRVAGTLKQRQTNVPQPIVDLAWRAQQRLHSRYRHLGARIGVPKALTAVARELAGFIWAVSHVLEEVPTAA

SEQ ID NO: 305626 - protein, 408 aa, unidentified
MQVIHPVCCGIDGHPTQLTACLRRVGDDGTIHTEWRDFGTTYDQLLALRAWLAEQGCPIVVLESTGVYWKPIYHVLVERLEVVVANAHSVRQRPGKKTDKADAAWLAELLAHGLVDPSFIPPPEVQALRDLTRTRVALVQTRTQVQNRISKILEDTNIKVAHAMSDLFGTSGRRMLKALCAGERNPHKLAALAMGTLRRKLPELELALTGQFTEHHGRLIQGELELMDLLERQIAALDEQIRQATEPFAPQLEQLQSIPGIKSITARDIIAEIGADMSRFGSAKRLSSWAGMAPGNNESAGKRRKGRTRKGNRYLRRVLVQCAWAARKTPTFIGRTFRRFESRLGRKKAAMAVAHKILVIIYHVLIDGTFYDESRYDRHDAREEERDKKRAIAALERLGYEVALSPVH

SEQ ID NO: 305627 - protein, 348 aa, unidentified
MTVTIVETRAITGGVDTHADAHVAAALDPVGGLLGVQEFPATAAGYARLLAWLGGFGTVCLVGIEGTGSYGAGLARHITTAGIRVVEVDRSDRQDRRRQGKSDPLDAVSAARAAQSGRARGASRGRDGAVEAIRALMVAKRSAAGERTQTINQARALILTGPEDLRARFAGHAVAALVAELASLRPRPGSTVGYATRIALRELGRRAQFLSAQIERLDELISPLVAARAPGLLAVYGIGLNTAALLLIAAGDHPERLRSEAAWAHLSGAAPIPASSGKTVRHRLNPGGDRQANHALWRIVFTRMGSHPATLAYVERRTAEGKSKKEIIRCLKRYVAREVYPHLRASDG

SEQ ID NO: 305628 - protein, 355 aa, unidentified
MDNRKYIGMDVHQASISIAVSDAAGKLLMECIIETKAATVLEFIQGLRGSLWVTFEEGTSAAWLYELLNPHVAKVVVCDPRQNALLKAGNKSDRVDARKLSELLRAGLLTPVYHGESGVRTLRELSRGYLAASKDLTRVMNRLKAIYRSWAIPCAGQQVYSPRYRAAWLEKLGEAGVRRRAEQTYQQLDFLMGIRKETRKELLAESRKHPARQLLEQIPRLGPIRVALLIALIQTPHRFRTKRQLWAYCGLGLRTRSSGEYRYKEGQLQHARKPPALRGLNVNHNHDLKHLFKSAATQAGTKDDPLREFYQNLLAGGMEPPMARLTLARKIAAIALKIWKKGERFDPAKLKQQAA

SEQ ID NO: 305629 - protein, 320 aa, unidentified
MAEITNLTHIGIDVSKDWLDIVVLPSGETFRIENTEEQMSVLIGKLESLKPERIVLEATGGYERLVTSSLYLAGLPVCRVNPKRVRYFARSLGQLAKNDKLDAKVLARFGEVVKPALTQLPSEHEQRLSALLTRREQLSAILVAEKNRLGTAPAHVRPSLDEHVTWLKKQLKHLDKEVDAFITATPDLKEKDDFLQEVQGIGKKTAAKLIADVPELGACDRKQIAALIGTAPYDHDSGYKKGQRAIGGGRPDVRKVLYMATLAATRFNPVIKIFYQRLLKAGKKKKVALVACMRKLLTILNAILRDRKRWNPTPALPAVP

SEQ ID NO: 305630 - protein, 403 aa, unidentified
MNAVGIDVSKGKSMVAIMRPFGEIVSSPFEIKHTSSDINSLIKIINSVEGESRIVMEHTGRYYEALAHELSAANLFVSAINPKLIKDFDNDSLRKVKSDKADSVKIARYALDKWQNLIQYSVMDELRIQLKTMNRQFGFYMKHKTAMKNNLIGILDQTYPGVHSYFDSPARSDGSQKWVDFASTYWHVDCVRKMSLNAFIDHYQKWCKRKKYNFSQSKAEEIYGKAKELVPVLPKDEITKLIIKQAIDQLNSASTTVEELRTLMNETASKLPEYSIVMNMKGVGPSLGPQLMAEIGDVSRFTHKGAITAFAGVDPGVNESGTYEQRSVPTSKRGSADLRKTLFQVMDILIKTMPQGDPVYQFLDKKRAQGKPYYVYMTAGANKFLRIYYGRVKEYLATLPESD

SEQ ID NO: 305631 - protein, 415 aa, unidentified
MAIDIARYWNYVLLETAAGKLHRFKMGNTAPDFDRLIGFLQSLSGPCRVGIEPTGDYHRPIAYRLLMAGFEVVGISSVAVARYRDAMFNSWDKNDPKDAAVILEMLRRQAHQRYVDPMVAGTHDLQEIAKTYYQVSRARTKAQHSLINHGLPLYFPEMHRYWATTRNEWFIRFLMEFPTPAHVRSLSQEAFVLAAWDLVGRKVNKRAKLEEIWEIAGSSAALPHAPDSLAVEMFRVTLKRYQDLNQLRASIEERAEQVLAGNEAFEHLKTLPGVGSVIALTVLAEAGDVSRFAHHRQFLKYCGFDLAKQQSGNQRGREQLSKRGNARLRLAFWLAGVGAVRMRENSFRDKYDRYIKADPKNADLRRKALTAVAAKMARVAYSIVKTNQPYRRFFEQALPSGSIPLSAAIGAHATP

SEQ ID NO: 305632 - protein, 334 aa, unidentified
MKKHTANCEHHKDGPDSCTVGIDVSKQHLDACELPSGREARFSNTKEGVRAFGTWVCPRVARVVYESTGSYHLLLEDRLVDRLPLSRINPKRGKRFAEALGSEAKTDRADALVLAKMGRAMADDLMGTPVRTRREKDMDELRAARDAVNKALTVLKGRREHARNRLVRREIEKDIARAKRQIGRLDQELERLVATDAELSRKVALLVTIPGIARPTAIGLLVEMPELGTLSTREAGSLFGLAPLSNDSGGRYGKRSIQGGRKRARTLLYMPTLAAIRWNPVLRERHLQFKQRGKPGKVAVTAAMRKMVLIANAVIRDGKPWQLDHVPVPAHNAA

SEQ ID NO: 305633 - protein, 443 aa, unidentified
MEIINPNAAGIDVGSRSHFVAIGQGSGDVREFGVYNEDLKAITEWLLANEVKTVAMESTGTYWQSLFAVLQNAGLQVILCNGKFTKNIHGKKTDVKDCQWIQKLHTIGLLSGSFLPDKATEHLRTYCRHRSNLLDNAADTTRKMQKYLRLLNLRFDVVVKDIVGLTGLAIIEAICNGETSAEVLASLRHGNCKKSEEEIAKALQSNGRKDYLFALKHEFVMYKNLQASIQDCDKEIEKMLNEQINNNDDKRQHYIDKKVHRKVNKNAPKNIDINLMSYQYFEGVDLLAIEGVSHSTVLSVMSEVGLEGLKKFETAKQFASWLRLAPNNKISGGKVLSHKVPKGSNRLKIALRNAANAIGNLKDTPLSNFFNRINFRKGRVSAISATARKLGVIIWNMVIKKQPYNNLHGYEFLDQKRKRKVQEIKKLIHKFDIKTDELGLKLQ

SEQ ID NO: 305634 - protein, 386 aa, unidentified
MMTMTRTIESTATAPSCSTCLLLAFELGERVWKLGFTTGLGQRPRMRQVPAGATDRVLDEIVRAKRRLKRPADTPVISCYEAGREGWWLHRWLVAQGVTNHVVDSSSIEVNRRARRAKTDRLDLGGLLNLLARFVLGDARVWRVVREPSVAEEDARQLHRSWESVQQDRSRLINRLKGLLTTQGVRLRIDEEFPQRLAAARLWDGTPVPPELQQRALRVWAQLALLNQQRDELAGGRAALVPDANTTMDRYVRTLPTLRGIGPVGTWVLATEIFGWRAIRNRRELGALVGLVPAPYQSGDTNRDQGITRAGNRHVRRLMVQLAWSWVHYQPTSALTQWYRRRFGGGSKRLRRIGIVALARKLLIALWRYVEHGEIPEGAIVQGHAA

SEQ ID NO: 305635 - protein, 357 aa, unidentified
MLSSDVKYIGLDVHKEAIAIAVANGAGKLVMESIVETKSSTVLDFLHGLRGELHVTLEEGTWAAWLYDVLKPHVKEIVVCNPRRNALLKEGSKSDKIDARKLAELLRAGLLRAVYHGENGLQTLRELARSYLTISKDLKRVKNRLKALYHSWGICCAGKQVYAARHREQWLSKIEQVGVHRRAELFYQQLDGLLVLRNTVRGELLAESRKHQAVKILRQVPSIGPLRAALLLALMQTPHRFRSKRQLWTYSGLAVVTHDSAQHRYVDGQLQRSKKPQQIRGLNQNHNHAMKEIFKSAALNASRCAGPLQDFYARLLAKGMKPDMARLTLARKIAAITLALWKKGGSFDAEHLKSQAA

SEQ ID NO: 305636 - protein, 407 aa, unidentified
MDLLKTVFGIDVSSRKSNVCIMVNGQKVNDYAISNDMVGFNRLLGDLKQVTKPQIIFEATGVYSRRLQAFLDMHELRYVMMNPLEAKRKTKDDLHQNKTDKLDALYLAKLQSEHPQRLAYVQSKEYQELMANNRIYEQASHDLITNKNRLHKAVQLTFPEIEHLLANPRGKNYWSIALRFPHPDIVLETKEADIIDFLKGLSGIGKKRANDITQSLIRLAKVACPAVKKNSAHIRGLKMAINNILSAEEECQTALQEMAKLAPKRDLEILTSIPGIGENTALRIISELGDIRRFNNPSQLNAFVGVDPQVYESGNLTAHLSISKRGTAIGRKVLYLAINQIQSAKKAGKPCHIADYYEKRKRSSETASHKKAAIASIHKLLRTIFALIKNDQLYSYDVAKHNQRLLS

SEQ ID NO: 305637 - protein, 401 aa, unidentified
MNATTIFYVGIDVSKDKSDICIKDVNGDDLIKRLIIANKKADLEHLYETIERLRSKTPGNSDVVFGMEATGIYSLPLYSALTRDGYKVKLYNPIQTNGFRKMNIRKTKTDPIDSAIIADMLRFSEPPQVNAIKDLNLYQLRELVRIRDRLIDKQTVCKVQLVRNIDTVWPDYSSVMKGATSATSIAILKKYSVPSKVRAESFEKFYELVKMKSRSKISRTAAEEIYNHAGNILTIPELDSIISVEIKTLIKELELYDEQIRSIEKRIDQMMKLIDSKIMSIPGIGDTLGPMILGEIGDANRFPTAKKLIAFAGLDPIVSQSGRFENKSGKISKRGSPLLRKGLFLAANVARQNDENLKRFYDKKINEGKHHYSALNAVAAKVLRIVYWVLKNNKEYQTQVK

SEQ ID NO: 305638 - protein, 382 aa, unidentified
MHASNICTPIADHNGTIFVAIELSQKTWLAVVRSPERDRISRHKLEGGNDAGLLALIASVRARAARALGTVPAVVSCYEAGYDGFWLHRRLVAAGITNFVFDPSSIAVEQRRRRAKTDRLDGELLLRSLMAHCRGEPRVVRIVRVPSPEQEDVRRGSRERERLIKEQTAHTNRIKALLRTLGLAAGNPRRRDWLRWLAEQRDWEGRAVPPHYLAELAREHARLLLVVAQLGDLSQAPEATDGPAAARMAKQKTQLRQLKSLGLASAGTLVDEALYKDFDNRRQVGSYIGLAPSPWASGATSREQGISKAGNPRARHQAIELAWLWLRHQPDSALSRWFRQRTAGASARTKRIAIVALARKLMVALWRYLTTGLIPDGAVVKA

SEQ ID NO: 305639 - protein, 349 aa, unidentified
MNIKRIGIDLAKTVFQLHGVDSREQPVLRKKLKREQMLSFFRTIDPCLIGMEACSGAHYWARELQKLGHTVKLMAPQFVKPYVKANKNDAKDAEAICEAVSRPTMRFVTIKTIAQQDLQASHRIRKELVGQRTAKVNQIRGLLAEYGIVVGQAIEVLRKALPCLLEDAENGLSADFRILLKGLQEDLLALDERVAELDKRIHTLAHTHEDAKRLLQIPGVGPLTATAIISAVGDGSQFKRGRDLAAWIGLTPRQNSSGGKEQLLGISKRGDHYLRTLLIHGGRSVLRMAGSKDDPRSRWLKGISERRHKNIAAVALANKNARIIWALLTQKTDYEQKAGELSSGESVCA

SEQ ID NO: 305640 - protein, 388 aa, unidentified
MSKQTAAASTIQITSPAQTLMLAFELGEGAWLLGFSAGFGEAVLRRKVASRDTVALLREIERAKEKLDLPAEASVKTCYEAGRDGFWLHRFLESHGIENFVIDSASIEVNRRSKRAKTDRLDVNGLVDLLARHLAGSRKPVFSVLTVPSEQAEDLRQLGRELKLVKRDRTRVSNRIKGLLANQGLLIDRRKDMARQFASLRLWNGSKLPHHLRARLGRYVSDYGYYTARIKELERERKAVLHANEGEATEKVWRLLWLRGVGIETAWCYGMEFFGWREFQNRKQVGSLAGLTPTPHDSGTQEREKGIGKDGSRWVRGVAIEQAWAWLRFQPESELSQWYQERFGRGSKRLRKIGIVALARKLLIALWRYVETGLLPEGAVIASSVRLP

SEQ ID NO: 305641 - protein, 336 aa, unidentified
MNEARWFLGIDVAKRKLDIALLVTDKIKSKVFDNNTSGHAALTRWLIERGAIQSHTHICLEATGPYSEALAIALVDAGWCVSVVNPARIKGFAQGELARNKTDRADASMLARFCAAMRPGFWTPPSSEWRELRGWVDRLQALKDMHQQERNRLEAHLASGQAALVEAVQTHLDWLTKHIAQLERNIDDHIDRHPELKRDAELLHSIPGIGNTTIAKVLAYAGDVRRFASAKALAAFIGVTPRQRLSGTSVKGRSMMSRTGHADLRRALYMPGLVARWHNPLLKVFGDRLSAAGLAPKAVVGAVMRKLAHLIYGVIKSGQPFDPKFSTARLDFQDGI

SEQ ID NO: 305642 - protein, 341 aa, unidentified
MQITTIGFDLAKNVFQVHGIDATEKAIVRKPLRRGQVIKFFAGLSPCLVGMEACASAHYWARELTRLGHEVRLMPAKDVKAYVKRNKNDAADAEAICEAVRRPTMRFVRVKSAEQQGRLMQHRTRDLLLRQRTQVINALRAHLAELGIVAAQGREGLKELLAIIAEEGGGGLPLDARASLIVLATQLQALQTLIGSIEKRLVMQHRANEASKRLISIPGIGIIGASAIASTITDPKAFRSGRDFAAWIGLVPRQDSTGGKQKLGPISKQGDRYLRRILVVGAHSVLRRAKLNPEKYRWLTQLLARRPFKVVAIALANKMARVAWALLARGGTYRVPALAAA

SEQ ID NO: 305643 - protein, 393 aa, unidentified
MICVGIDVAKDKHDCFILSSEGEVLADVFTIPNNAEGFDTLLQTIRRCTHPSDKIKVGLEATGHYSYNILGFLLNKGLHTFVINPLHTNLYRKSLSLRKTKTDRVDARTIATMLMSDVDLKSYTGTAYHNEELKSLTRYRFDKVRERAKLKTSISRLVTVLFPELEKLVPSLHMVSVYALLSEFPGAKQIAGAHLTHLKALLKDASKGRYRRDMAVEVRDAARCSIGSDMPAKSLELQHTIRLIRELDSEIEDIEVAIQAIMEEMQSPITTIPGIGFRMGAMILAEIGDFSRFDSPDKILAYAGMSPSTYQSGQLSLSGAYSHMEKRGSRYLRYALYNATKYVCLWDPTFGAYLAKKRAEGKHYNVALSHAAKKLVRLIYALEKSRQPYNSVA

SEQ ID NO: 305644 - protein, 340 aa, unidentified
MKLYGAIDLHSTNNVTVVIDEQDRVVYQKRLPNDLVLVLKELSVYQSELEGMVVESTYNWYWLVDGLMEQGYKVQLANTAAIQQYNGLKYTDDNSDAHWLAHLLRLGVLRQGYIYPRADRPVRDLLRKRSQLVRQRTTNLLSIQNLLTRNTGSSLNANRVKGLDVQQVDELLPDGDLALAVKANLAVMSSADEQTKILERTVIERVQLRPQFCFLKTVPGIGKILSLTIMLETGDIRRFASVGNYASYCRCVGSQKISNSKKKGKGNTKNGNKYLAWAFVEAAHFAIQFNSKIKSFYQRKKAKTKGVVSIKAVAHKLCRACYYIMRDRVAFNVTKAFGQN

SEQ ID NO: 305645 - protein, 346 aa, unidentified
MQYVGIDWAYRHARWCAISEHGELVAEATTPADEDGLLRLIARLGPDVRACVEMMSGAVWVRDCLERAGWRVEVADARKLKGLAPLAAKTDRVDARLLATLAFRDLVPALWVPALSERALSERLKRRAHLIRLRSSAKNRSFGLLSQWGLRLSLQRLREPDAAELLESRGVPEVWRRSVFEAVALVDHLDRRLAPLERELLPLARADRRVQLLDSIPGVAAILGLTLAVEIGEVSRFATARKLVGYSGLTPSVRQSGESSRTGRLSKAGSATLRWAAVEAAQHAWRESNPWHRLYRDVKQRTGKTNAAKSAVARKVSIAAWHVLSREQPFKPHSPVSASSPQPLAA

SEQ ID NO: 305646 - protein, 376 aa, unidentified
MAVPKEVFVGIDVAKLRNAVAIAEAGRDGEIRYMGEFDASPEGVTRLIRKLAARHGKLHVCYEAGPTGYGLYRQILALGHECIVVAPSLIPRRSGDRVKTNRRDAQSLARLLRAGELTAVWVPDETHEAVRDLVRTRAMAVEDYRRKRQHVSAFLLRHARSYDGKTSWRGRHKRWLDGQNFSHPAQRLAYQEMLNAVQATVERMDRLEAALIELVPAWTMAPVVAAFQAMRGVQFMTAVTMVAEAGDLRRFDHPRQLMAFLGLVPSERSTGETRHQGGITKTGNSSARKVLVEAAWTYRHSAGLGVDHQRRQKDLPEPVRDVAWKAQTRLCARFRRLLAKGKRNTVVVVAIAREIAAFLWAIARLIEPCPLPGMAA

SEQ ID NO: 305647 - protein, 391 aa, unidentified
MVQSHIRKEPVVKKIRFVGLDVHAEKISVAVAEPERNGEVRLLGSIPNRPESVRRLAKKLGAGGPFQVCYEAGPTGYVLYWQLSEMGVKCEVVAPTLIPVKSGDRVKTDRKDAAKLARSYRAGDLTAVWVPDAAHEALRDLVRARLAAKRDQLRARNRLSKFLLRHGRRPASPMSISTAAYLNWVKSGVRFDQQAQEDTLSDYVHEVEHAGDRMARLEKAIDNSIDTMPEKMRAVVEGLQSLRGIAKISAVTIVAELGEVSRFSKPRQLMGYSGAVSREHSSGERIRRGAITKTGNAHLRRIAVEAAWAYRHRPCIGAGLKARQEKASPEVKAIAWKAQHRLHQRYSRLTAKEKIKQKVTTAVARELLGFIWAIAVDVEQKYSSKQQKQAA

SEQ ID NO: 305648 - protein, 461 aa, unidentified
MSAAHHATRSAIAERPTFTNCDVQLRDPRRPLDVESLRPECVEILWGESRRLIRFGFGTVTGERPMLQENEGTISTQDQPTGSDIFVSVEMSRSKWMVGIHTPLADKIGLHTMACGDVEALLALIDRARVKLVASGSNSPAAMICYEAGYEGFWLYRRLIALGIRVVVIDPASLLVDRRAKRAKTDRIDARAMVRALMAWARGERQVLREVRVPTVEQDDARRGLRERQRLVKERTGHGNRIKGLLKTQGIMDFDPRAADAAARLDAIVTGDGRPLAPCLKREIVRELERLALAMRQIDQVETERDAVVQACDAGAGTDALAAEPEREAAMIGELNRLKGIGMNDATILVREAFWRDFRNQREVGGWSGLAPSPWASGSVLRDQGITKAGPPMLRAHMIQMSWRWLLWQPDSDLAQWFRKRTEGATGRMRRIMVVALARKLLIALWRYATTGMVPHGAIVT

SEQ ID NO: 305649 - protein, 323 aa, unidentified
MAALSPRFVGIDVSKAHLDVALLPANTTFRVPNDDDGWAGLIARIAGDTPPTVVLEATGSYHVGVTLALAAAGMPPAVMNPAQTHAFIRSEGQRTKTDRTDARLLARFGQQKAPAPSPVLTQNARDLKELVACRDDFTTLLTMEKNRLHVATERTRRHHQAVIDHLVAARRTVDAEIAQLIAADAALAERDRIVQSVPGIGVVLGPVFLAGLDELGQDGAKDLASLAGVAPHLRQSGTQRGRSAIGGGRPTIRKALYQMAVTAVNHDPAMKAHFRQLRLRVPYKVAIIACARRMLGILNAMVRKGLTWQETKVGQGQFLPKEA

SEQ ID NO: 305650 - protein, 345 aa, unidentified
MIAVIGIDIGKNWFHVVGLDERGAIVLRQKWSRSQVETRFANMPRCLIGMEACVGAHHLSRRLRALGHEARLMPAKYVRPYSKGQKNDFRDAEAIAEAVQRPTMKFVATKTADQLDLQALHRVRERLVGQRTGISNQIRAFLLERGVAVRQGLRFLRAELPGILARRCDVLSPRMVRLIEDLAGDWRRLDERIESLSGEINALARQDAGCERLMSVPGIGPIISSAMVAAIGAGDAFTKGRDFAAWLGLVPKQISTGDRTILGKISKRGNRYLRVLFVQAAWVVLIKPKSWERHGLKPWLEAARKRLHRNVLAIALANKLARIAWSVLARARGFEARSVATAQPI

SEQ ID NO: 305651 - protein, 420 aa, unidentified
MDEITEEPAALVERVAALDIGKASLTACIRVPHGDKPGARRQEVRTYATLTPALLELRDWLVCQGVTLVVMEATSAYWKPPFYLLEDDIECWVVNARDVKNVPGRSKTDKLDAVWLARLTERGMLRPSFIPARPQRQLRDLTRYRRTLTQERTREKQRAEKLLEDAQIKLSSVISDIFGASGRAMLDALVGGQANPHELAALARGKMRAKTSVLHEALTGHFTDHHAFMLGMMLDRIDALTDQIGTLTTRIEQAIAPFAAQVAQLDEIPGIGPAAAQDLLAEIGADMSRFPTAGHLVSWAKFAPRARQSAGRSKAATTGTGNPWLGGPLGEAAAGAARTKTFLASRYKRIVKRRGKKRALVAVGNSILTIAWHLLSDPAAHFTDLGPDWHDRLAPLRRKRQLIAELERLSGKKVTLHDAA

SEQ ID NO: 305652 - protein, 444 aa, unidentified
MERARKRYVGLDVHKDTVEYCILDAAGKKIDGGNIVCEQSVLIRFATKTLCSKDHVALEATTNTWSVVDILEPHVAKIVVGNPLKTKAIAEAKIKTDKIDAMILAQLLRCDFLPAVWIPDAKTRVLRRLSSFRKTLVQDTTSAKNRIKGILNHLLIKHAVIWTKGGLDELKNLDIPSHERTIMDCEIAVLEHLGKQIEKVESEIKKLAYEEENVRLLMTLPGVDYNTATAIVAAWGDISRFKDADHATSYLGLVPSTKKSANSCRHGSITKAGASLARSLLCEAAQHLSRSESPLGVFVRRLLQKKTWNKAIVAGARKLATIAYHMLKNKEPYRYAAVARTREKLGRLRKSVTGKKLEPPRYRFDEQLTEHIENRSDVSVRFLPPISDVYEKEGLPAARAFDELSVGEQRAIKEMGLIKQVRKTETVQVIVKPKKRTDKPSCKE

SEQ ID NO: 305653 - protein, 424 aa, unidentified
MFDFNQTMFVGIDVSKDSNQVCFINFKREKLLNKSFKNNQEGANSMKTTIIEYLSKHNFSSLIIVLESTGIYSIHIANFLSYEAESICANTNVFLVNPVMSHNYSKTILGANKTDSNDAFALADFAASGKTNNLNVFKPNQHFAIQSLTRQRKHYIELMSSEKVRILNYIFIKFSDFNNGKHQNKVFSNTFGTTSIQTLLEFKTPQEIVDLSLEDLTDFIKSKSRNRFDDCEEVAKILKKACRDSYRLDKVVYDSINTNLAISFSVIDTYKTVIKQLDEEIIKLIKGSSLSNDIDILCSIPGINKVYAASILSELGVASNFNSDDAIAKYSGIYWSQHDSGNFISEDNRLKKTGNSFLRYYLIEATASVIHNNLVFKDFYDKKVQEVSKHKESRALVLTSRKFIRLIYKLLKDHQLYSYPSTIN

SEQ ID NO: 305654 - protein, 412 aa, unidentified
MLKIVYPICCGIDVHKKFIVACIASTNDKDITTYKSSRFSTFTNGLRKLSEWLCSNSCTEVCMESTGKYWIPVFNVLEVTCKITLAHPKYVKAIRGKKTDKKDAKWIAVLFKHDLVAGSFMPPLSIRQLRDLMRYRFKLTNFKSSEKNRLQNCLTVSNIQLSNVVSDTFGKSSMAIIDHLLENPNDKDFDFIPLLHSSMLDKVDDIRLAIDGTFTPEQLQKMNIILQHHDELEKCRLDLEALILSVSEQFTEERSLVSTVPGIKNPFSSIAIISEIGADMSVFPTAKHLCSWAGLTPQNNESAGKKHSVRISRAGVYIKPLLVQCANAVVKSDKHPEIRNRYLSIKKRRGHKRAVIAIARMLLTAIYHILKKRKPYNAQLYKKTDAIPASREITVEQAIFLVKRQGFSVIKD

SEQ ID NO: 305655 - protein, 440 aa, unidentified
MPILNADAAGVDIGATEIYVAVPADRDPEPIRMFPTFTLDLIHLAEWLQQCRVRTVAMESTGVYWVPLMQILEVRGLEVYLLNAKHVKNVPGRRTDVSDCQWLQYLHSVGLLRASFRPASDVCAIRSLLRHRDSLVEMATSHVQHMQKALDQMNLQIRHVISDITGTTGLAIIDAILGGNRDTQTLAALSDPRIRANQETIARSLVGDYRQEHLFTLQQSVDLYREYQCRIADCEEEMRRLMKTLETRADLRMSLPVAKDSVKKCKVMTPAKALELREEAYRVLGVDLTTIPGISVLHVQAILAELGGDVSKFRSAGAFSSWMGLCPDNDISGGKVLWTGTRKIKNRVAVTLRMAAQSLQKSQSALGEFYRRMRTRLGAPKAITAAAHKLARVIYHMLKTRESYDESVFARAEFKHRQRTENRLRALAQNLGYTLIPAHS

SEQ ID NO: 305656 - protein, 344 aa, unidentified
MEYSAIDLHLRRSQFRIVGEDGAVVREGKIDTSRADLSRVFGDRPRMRILVESSTESEWVARHLEALGHEVIVADPNYAPLYGSRSRKVKTDGRDTAALTEACRTGIYRRAHRVSAARRAQRQELRVRRHLVQMRSRSIGLLRALLRQDGWRLPRGSAEAVDARLERLRLPTGLATILTPLRTWLKELNALLDAADRAVEAQAAADPVAAHLMTAPGVGPVVALTFEAVLDDPARFGGEAARASAFLGLVPSEDSSAERRHKGHITKTGPSELRALLVQASWVIWRGRSAAGAALRAWAQALAARRGRRIAIVALARRLSRILFALWRDRSNFHVEGGRPLVAA

SEQ ID NO: 305657 - protein, 337 aa, unidentified
MSYQWFIGIDVSKQTLDITILNNNEKKMYEQIVNSDQSIKTFLKKLVSEQKIVLANCIFCLEHTGIYNSHFLKVMEEKKLAVCLESSVQIKQSGGLLRGKNDKVDSYRIALYAFKNKEFLTLWQPERTVIRHLKRLSGIRERLLNARKQISNTIKEDKKFIDKESSAQMMKCCKQSIKALEEDIKKTEGEIKKVIEKDEKLKELFSIIESVPGVGKITATEIVINTNEFRKINDPRKYACYAGVAPFEHSSGTSVRGKTRTSKKANMKAKSLLHMTSLVAARFSDDLREYYERKVAEGKNKMNVLNAVKNKIIHRIFACVNQKRLYEKNYKYCLVES

SEQ ID NO: 305658 - protein, 314 aa, unidentified
MAMHATRPVIGIDTAKEELVIQHDDEKRHLAVDNTPAAIRQWLAGLPKGCDIAIEATSTYHMEITERAHAKGHHVYVVDGYRLKNYREGVGGRAKTDLTDAQLLARYLRKEKDELRRWMPPPKAYRTLQSLLRRRAALVKARTALRQSLSAEPLLKTALATLLKQIDRIDQLIQKRLREAVHAAGLRDQVQRCQAIDGIGELTATALVMAFLRGDFQNSDAFVAFLGLDVRVRDSGKLKGKRRLTKQGDTEVRRLLHCSAMSGARHPTWKAFYQRYRDRGLKTTQALVILARKLARVAFALMKHQENYCAPRLS

SEQ ID NO: 305659 - protein, 401 aa, unidentified
MHAVIGIDVSKATSQVAVAVDGKVVQNFKITHDVFGFNQLNTVIMQFNTFPDIVFEATGVYSRRLKTFLEAHNYPYTYLNPLTAKKQLDQLRPNKNDLNDAKHLAETQFILKRAKSYVQNPIYIELQDMSRFYQQLNHDIVSAKNRLHRLLQLTFPEIETLFSTTDSQQYWEIVSLIPHATMAKHSRQTLSDTIQSSVSRQIGVARLTRLVDKLVALGSLSAPAVAVASYNVTEVRYYAQRLIALSQSKANVLATMVDQAKDLPEYDIYQSIPGFSDKTVVSLIAELGDLHRFATSNKLNAFVGIDLRFNDSGDYKSSGFITKRGNTIARKVLFKAISNIASTATYGHQNHINDWYQKKKQSSMSKGTKKIAIGAMSRLLRTMHYLVLNNQLYDYDTASKR

SEQ ID NO: 305660 - protein, 343 aa, unidentified
MEHFAGIDVSLELSSVCVVDGVGKIVHEAKVTSDPEALVGFFRGLETRVTRIGLEAGPLSQWLHAGLVAAGFEVVLLETRHVKAALSAMVVKTDRKDARGIAQLLRMGWFRPVHAKSPAAQEVRALLVARKLLQTKLLDVEFSIRGILRGFGLKMGEVSKGRFVARVRELAAGHAMLERITEPMLRAREALRTEYARLHGEMLAIARPDPVCRRLMTVPGVGALVAITFKSAVDDPGRFARSRVLGAHFGLTPRKYQSGETDVTGAISRVGDAMVRMALYEAANVMLSRVTRFSSLKRWALDVAKRRGLKRAKVALARKLATVLHRMWVDGANFHWGKQAAAV

SEQ ID NO: 305661 - protein, 406 aa, unidentified
MNFTMGIDTHGNGIQYQIENAGGEPITSGQLPKTRTGWLELLEVLHVHQVEASATAIFIEATGRHHLAWCDRLHEEDYAVYQLNPLLTKRLYSSANAIRDNKTDKIDAATLCEIGRLYRGKLERFRYEGKSQKLGLQALVSARQTLRNQCTNLLKAGGDLLDLVFPEGKQVGLRLTSRAVRGLLLKAPTPVRLSQLPLETLREAVGDKAQKLHEAACSSLTPEAMAQASSIALVQLLENIEKTCEGIANFDHEIKRAVLEYKDGAKMQRLIGSLPGFGKVTVPIIVAFLPDDFTKWVPKEKGRYKKKLVAKLQAHFGYDPRVRESGKYKGKVKLSKRGVEAARTALFQASVCSLLHDPQLRAYYDKKKAEGDHHTKAIVDVMRKNLRRLVAVLIQEKTFEFRAENA

SEQ ID NO: 305662 - protein, 349 aa, unidentified
MEKITTVGIDLAKQVMAVCAMDGEGRMVMRKVLRRDQVLRWTATLPQCVMAMEACGGAHYWARELTQQGHTVRIIAAEFVQAFRKSGKNDANDAEAIATAARQPTMRFVAMKSVEQQAALCVHRLRQGVTEERTAVINRLRGLLTEFGIVAPLSPAKLRRELARCQDPDDLRLPATVRQLVGDQVIALDQLDARLMSYAETIAAQAQQSEIARRLQTIAGVGPTTAAAMVASISDANDFRNGRQFAAWLGLTPKQHSTGGKTRLGRITKRGDAYLRTLLILGARSTLQSALRKPPEGRHRLQQWIVAVFGRIGYHKTLVAIANKHARIIWALLIKGEAFDVRRLAQHAV

SEQ ID NO: 305663 - protein, 411 aa, unidentified
MLEVKVEKCAGIDVGKKFLAVWVLIGLANQKPVGEVRRFGTSVKELERLRAWLLESGCTEAVMESTGSYWKPVFNILEGSLKIILANAEQVKALRGKKTDPNDSRWLASLLRHGLVQGSFIPPRDIRELRDLTRRRRRLVGDGAAERNRVQKVLEDANVKIGNVLSDVFGTSGQAMLEALLENKRSAAEIAELGHWSLAPKIPQIVEALEGHRMSDDHRFMIRQSLRHMRNIEEMIEELDKEIAVRLKPYQQQMKLACTVPGIKPTAAASILAETGMDMSPEGPFPDCHHLASWGTVCPGNNESAGKRKSGRTRQGNRWLRATLTQTAWAGAADKKSLFQMRYQRLKLRRGGQRAVIAIAHAQLIAIYGALRNGTPYPEQVQRLQEDRREAQIRHHLQRLTKLGYEPNMHG

SEQ ID NO: 305664 - protein, 337 aa, unidentified
MTIIRIGLDTSKHVFQIHGVDENEKPVLRRQLRRSEMAKFFTKLPPTRIGLEACGAAHHWARLLRGVGHEVLLMPPQYIKPYVKRSKNDAIDAEAICEAMSRPTMRFVAVKSADSQAALTMLKVRDLLVKQRTMLINAIRGHAAEFGVTAAKGPKQLIELLQRLANDAGVPALAREMIDVVAAQLDAVAAKLKAIEARLVAWHRQNQTSQCLATIPGIGPIGAVSFALKVPDPTVFRSARHFAAWIGITPRENSTGGKQRLGKISREGDEGLRRLVVLGATAVIQQAIKKDCAAPWLRGLLARKPKKVAAIALANKMARIAWAMMVTGETYRRPQPA

SEQ ID NO: 305665 - protein, 337 aa, unidentified
MKTTIPTTLRPSFFLGIDIGKKDLFCHIIGPDQSCSERFDNTQSGIKLLLKWIAKFCASAQLYACLEQTGHYGDAIAVALHDMQIAGLFLVNPQRIKAYGMQKLRRNKSDTADAKLIARFLKAEHLELRPWQPRSDTQQQITAFSRYADSLTQDTARLKTMLESQTEKLAVASIKRRIKLQENETLALRKKIKELIKSDAELHIKSALIKSIPGLGDIATQIVIAELPDLTQFDDARQLAAWAGLTPRHFESGTSGKTRTPITKIGSAHLRRGLFMPAMTARVNNPLLKTFGDRLIANGKKPKQVIIAIMRKLLHQIYGILKSGQPYNPEKRGYAGT

SEQ ID NO: 305666 - protein, 454 aa, unidentified
MRKPQVIQDEDHEVVYERVAAVDVAKASGVVCMRTPDPARPGRYVNQIWDNVPATRARITELGLELIRCQVQMVTLESTSDYWRIWYYVLESTGLAVQLVSASQAKNLKGRPKTDRLDAMWLARLTQRGMLRPSFVPPAAIRAVRDFTRARTDLVRERTRCLQRLEKLLEDAMVKITSVARDGMKAKSSVAMVAALIAGERDPRKLAELARGRLRAKRDALAEALDGMFDSHHGVIAQALLDQVAFLDQRIAQMEAGAIAALAQVEESWGVDTTGDTGPHAGTSPDSPVLAAAYRLAEIPGISVWLAIVIIAEIGLNMTAFPTPAHLVSWTGLCRSAAQSGTRHGKGKQKKGNSYARAAAGQAAIGANGTATFLGERYARIARRRGGAIAQVAVARSIMIIVWHLLSDPAARYRDLGPDWHDTRVNRDKKIRNHIRGLQALGVTITITADEQAA

SEQ ID NO: 305667 - protein, 343 aa, unidentified
MSEISMIGLDLAKNVFQIHGVDALGGVVLRRQLGRGAVEKFFAKLPPCTVGMEACGSAHHWARVIGRYGHQVRLMPPAYVKPYVKRNKNDGRDAEAICEAVGRPSMRFVPVKSVEQQASLAVHGTRALLVRQRTMAANALRAALSEVGIVAAQGIKGLGELMARLEAPSEEIPEMMRGALLVLARHWQALDADERALERQIAKAARADGDARRLMEVPGVGPIIASTVLAKVPDAKVFRSGRDFAAWIGLTGRDHGTGGKHRPGRISKQGDRMLRALFISGASAQLRHQKTRGVSDPWLRDLLARRPYKVTMVALAAKTARIIWAMLVKGEAYRNRTSAPAAA

SEQ ID NO: 305668 - protein, 335 aa, unidentified
MKEITTVGVDLAKSIFTVHGVDAMGRVVLRKTVRRAQLVELIAGLPPCLIGMEACGGAHEWGRKFQLYGHRVGIMMARFVAPYRKSSKNDGNDAEAICEAVARPNMRFVPVKSAEQQAILSLHRVRQGFIEQRTATINRIRGLLAEFGVVLPQRAEQVRRAAVVMAEGLPVLAREAIADLRAHLTYLDERITRYERQLVSLARQREAAVRIQRLPGVGPLTASAITASISDGHEFANGRQFAAWLGLVPRQYSTGGKARLGRITKRGDPYLRTLLMLGARAVLQNAAPKTDRLSRWAMALRARRGYHRAIIAVAAKNARIIWALLAKNREFVLPA

SEQ ID NO: 305669 - protein, 358 aa, unidentified
MASIPPTSRVVIGGIDTHKDLHVAAVIDTAGVLLGTEAFSTTRAGYRALVRWLRGFGDVRLVGIEGTGSYGAGITRHLGEAGIEVAEVDRPDRSDRRRRGKNDTIDAENAARAALTGRRTSTPKTKDGTVEALRVLRLTRTTAVKSRRVALQLLGNHIVAAPEELRDQVRNLTRMQLIRTCAAWRPDTTGIRDPVVATRIALKSLARRILDLNDEIADLDQLITTLVGELAPQLVAATGIGVETAGQLLVTAGDNPQRLRSEPAFAMLCAAAPLPASSGKTQRHRLNRGGDRQANSALHLIVITRMRVDQRTKDYVTRRTAEGHSKLEIIRCLKRYVAREIYYLLKPPTQANMKSRAA

SEQ ID NO: 305670 - protein, 368 aa, unidentified
MRDSTIWVGFDVHKDSITAATLEGDAERADVARLSGDLQKVRRFVRRLGRRGPVRVCYEASGAGYVLHRRLTADGFHCDVIAPSLIPRRPGDRRKTDRLDAVALARLYRSGHLTTVRVPDEDQEEIRTLLRLRLAHQREVKRVKHRIQGMLLYRGLRYDETRSYWTQKHRIWLERLRGELDGVFGQCLATELQHLEFEEQQVSAMDDELERLSRCAPYRETVEALMCLRGVKTLTAMTLAVEIGDIRRFSSPRELMAWSGLIPSERSSGDVQRRGPITKAGNSHVRRLLVEAAWNNRHQARANLILNRRRQGQPAPVVAIAIKAQARLSKRLFRLRQRKHTNVAIAAVARELCGFVWAIMHAAPQPQG

SEQ ID NO: 305671 - protein, 439 aa, unidentified
MKRRRDRVCGADVHKDLIVATITGDDVLPIRENFGTTKAELKRFRNWLVANKCEQVAFEATGVYWMPIYDALSKTIDTIVANPLQIKTIPNDKSDSKDSNRIATLCLNGQIKRSRVFTDEDRDLRMMTRARSGYVKTRTQFRNRIHKYLSSSGIKLSSTMDDMFCKSGRYILNGLAEEKPIEEILKGIPSGKIRKKQDLIRAALENGLNDTNRMLLIDALEILDNLESKIEKLSHEVLKKVQQKSKDLAIVMSIPGIGFVSASVILSEIGNYRDFQTPDQLAKWCGLNPGENESAGKKKKCGITKRGSKHIRVVLVQAAQTISNMGKTKLSRFFQRLIKKKERNVAIIAVARKIICLIYHLLINQELYQEDECRKRRSSQDKSCPAPSFQEEHLTDRVAAIVDAFYHLNDRGRKNALMREIADISESKVGQKRPSKGGG

SEQ ID NO: 305672 - protein, 343 aa, unidentified
MEHFAGLDVSVKETSVCIVDDTGRMVRETKVASEPDALLAVLTNPAYRFKRIGLEAGPLSQWLFSALAEAGLPAICVETRHMRAALEAQINKTDRNDARGIAQMMRVGLYRPVHVKTLRCQKLRMLLTHRKLLQSKAIAIENDLRATLRNFGLKVGMVGTVKFEARIKELVERLPDLATLVEPLLIVRRTLREQIGVLHRRVLAVVRDDDVCRRLMTVPGVGPVVALTYRATVDVPARFRNSKAVGAVFGLTPCKYQSGEIDRTGAISRCGDEMMRMMLYEAAQTMLVVSTRWSWLKAWAMQIARRRGIKKAIVALARRLAVIMHRIWVDGPQFQWTRATAAA

SEQ ID NO: 305673 - protein, 322 aa, unidentified
MNENTNYFGIDISKDVFDVMGSDGLFHQFSNEVTGFKKFIKLMECNSHCVMESTGVYHLRLAYYLIEHNIKVSVENPLSVKRFIQMKLSKIKTDKSDSKMIYEYAIMNSPSLWTGQTKSQKECSHLLSLSNLYTKEIIVLKNKLHSEEAQGSPVTRVIRSIKRSLSYYKKEIETLETTVLKLVKEEYQDLHSRIKSIPGLGAKASALLIVLTDGFERFNTASELCSFAGLTPIIRESGSSIRSRPRISKMGNRRLRKVLFICSFSASKHNKACKELYNRIVAKGKSKKLALVAVCNKLLKQAFAIAKSHLWYDENYRSVLVR

SEQ ID NO: 305674 - protein, 350 aa, unidentified
MSKGTTIGMDLGDKTHEVCVLDEAGEVIVRRQIANTKASVVKFFKPYAGALVVMETGTHSAWIAREVEALACCVLVGNARKLRAIWSSKNKSDVHDAEMLARIARVDRALLYPIHHRGAAAQQDLAVLKARDLLVAVRSDLVNHVRGAVKASGGRVAKCSTDAFAGRARDGVPSGLLPALLPVIEEIEALTGRIRAYDKQVVELIEQGHPDARRLSQVPGVGPVTSLGFVLSLEESGRFKKSRSVGAYLGLTARRDQSGQTDKQLRITKAGDEFVRRLLVGCAHYILGAFGPDCDLRRFGLKLAARGGKNAKRRAVVAVARKLSVLLHRLWVTGAQYDPDYREHSMKQVA

SEQ ID NO: 305675 - protein, 402 aa, unidentified
MKKFIAERASQQTAAVLDVARGWSRYGAFIGLDVHKDSIAVAVALPGRDEPQYRGEIAHERRKIQKWLARLSAEFEGLVLLFCYEAGPCGYGLYRQLVAAGHDCQVVAPSLIPKKAGERVKTDRRDALKLARLLRGGDLTPVWVPDAEQEAMRDLTRARDDMKSQERKARQQLNAFVLRHGYHWPRGRTRWTKTHFNWLESIRFEQAWLQVVLQEYIDAVKAAMQRVADLTDQLMRALPNWSLAPVVEALVALRGIDTLAAAVLLAELGDISRFDSPKQLMAYLGLVPSEHSSGGRRRQGAITLTGNSHARRMLVESAWSYRFPARQTMHLKRKAKLASPEAKAIAWRAQKRLCGRYQQLTQAGKNVKLVCVAIARELVGFIWDIVRHEMPRLVRYRAAVAG

SEQ ID NO: 305676 - protein, 343 aa, unidentified
MLTNNVIAIDLAKNVLQACHISVHGELLSNKPLSRQKMKEFLAKAKPSIVAMEGCCGCHYWGQLAEKHGHQVRIINPKKVKGYLQGHKTDHNDALAIANAAIQIGIKYSRPKSLEQQSMHSLESSRRFLSRSVVSLGQHIRGTMLGYGVANPRGEKGLKASVQTALDGETSIPANVVSVLSMLWNQYKELKAQLIAFEKEKNALTRQIEPCQRLMEIEGVGETTAAMLYTTLGDGKQFKNGRQASAFVGLTPKQHSSGGKVFMIGIDKCGGVKELRSLLYLGAMSYVGRLPEKPKTQKDAWLRSIIERIGFKKACIALANKVVRTAWAMLRYETEYKPVLLTN

SEQ ID NO: 305677 - protein, 400 aa, unidentified
MNAVGIDVSKGKSTVTILRPFGEIVAKPFEIKHTSSEINSLISMIKSIEGESRVVMEYTGRYYESLAQALTDASIFVSVINPKLIKDFDNESLRKIKSDKADSIKIARYTLDKWNNLTAYNSLDGIRSQLKTMNRQFGFAMKHRTAMKNNLIGLLEQTYPGANDFFNSPARNDGSQKWVDFVDTYWHVDCVKKMSLSNFITHYKNWCSKHKYNFSASKAEKIYMYSKDLVPVLAKDGISKMIIHQAIDLLNGTSKTVEELRELMRETASKLPEYHVVMQMKGVGPSLGPQLIAEIGDITRFSHKGALTAYAGVDPGVNESGTYTQQSVPTTKRGSAELRKTLFQVMDILVKTTPIEDTVYQFIDKKRAQGKTYYVYMTAGANKFLRVYYGKVKEYLNNNQ

SEQ ID NO: 305678 - protein, 451 aa, unidentified
MTKSKRRHPERDFTPTHPNAAAIDIGSRMHVAAVPPDRDTEPVRAFGTCTGDLQQLADWFERCGVRTVAMESTGVYWIPAYEMLEQRGFEVVLVNARDAKHVPGRKTDVSDAQWLRRLHEYGLLRASFRPKGELAALRAYLRQRERLLDYSASHIQHMQKALMQMNVQLHHVVSDMTGETGMRIIRAVVAGERDPAVLATHRDRRCHASEEEITAALAGNWREEHVFALRQALELYDAYHTKVAECDLRIEAVLRRLRDAAAKPVGRLPPARHRDKTANAPAFDARAALHAVLGVDLTQIHGLGPSLALKLIGECGTDLSAWPNAKHFTSWLCLAPANKISGGKVLSTRTRRSGSRAAALLRLAAVTVGRTQTALGAFYRRLSARVGKAKAVTATARKIATLFYNTLRHGTDYEDPGASYYEDRYRARVLANLQRRAKSLGYVLQKELSPT

SEQ ID NO: 305679 - protein, 364 aa, unidentified
MEDDGDVKERYEIVNCDESWQDLIHRYHASEVEIALETSTSGKYAARLLRDNGFSVHLADPSKLALIFNSVKKNDREDSYKLAKLLRLQELPEVHIPSRESDDLKTLVRYRKSLGEESTAIKNRIHAILAMHGIAIDESDIFGKRCMRKIENATSKRTEAENIVMSDMLERVIELNRRKQMVEDEIARISNNNEEVKLLMTIPGINVYSAAAIMSEIDDIHRFSSKEKLASYAGLVPRQSQSGSRDQKGHILKNCPSMLRIILVNAAHMVIKYSKRMKIRYLKLVKRLGKSRAIVAIARALAETIWTMLSRRIAFYDEIDLLTEKKIESIRIRSLRPNVSKNVMDTIKLIKNQDIALMLDKLFS

SEQ ID NO: 305680 - protein, 317 aa, unidentified
MNMYVGIDVGKLELEINCKNESFQVSNNQCGIKKLISILTKLVDKYNAIPLIVCEATGGYERLLVKQMRVNHYAVHVAHPNKIRAFAKSKGLLAKTDKIDASLIADYACVMQVTADDYLLSETTEKIGELLKRRDQLLADKHREQARLDKEYGDDINRSIQSHVKWIEKEITRIDKLLEEESQQEALQSQIILLTSVPSIGRLTALGLLAFLPEIGQANHEQLVALVGLAPFNRDSGSYKGKRYIQGGRGIIRKALYMAAISSLRWNKPLANFYQRLRSRGKPAKVAITAVMRKLLLVLNSIIKRQSPWQENICQHA

SEQ ID NO: 305681 - protein, 392 aa, unidentified
MIYAGIDVAKDKHDCFITNSVGEVLFKSFTIPNNREGFETLFQKIQSVSDDLTKVKVGLEATGHYSYNLLGYLIDKGLPTYVINPLHTNLYRKSLSLRQTKTDKVDARTIASMLMSDVNLKSYSDTSYHNEELKSLTRYRFDKVKERSALKVSISRLVCILFPELENLVPTLHMTSVYSLLYEFPGASFVASAHLTRLANLLSKASKGHYNKDTAVLFRQTARDSIGSVMPAKSLELKHTIKLIQELTSEIDEIEAAIKQIMDEEIKSPILTIPGISYRMGAMIIAEIGDFNRFDSADKILAYAGMSPSTHQSGQLDNCHSRMEKRGSRYLRYALYNATKYVCHWDKSFGAYLEKKRSEGKHYNVALSHAAKKLVRTIFAMERSGQSYIASV

SEQ ID NO: 305682 - protein, 399 aa, unidentified
MAKIYWPLAQGGTSMESQTFIPRDYEVFAGLDVDKKSISVTFTDHQGLLKSMRMPYSVEHLINHVRKHYGDKKVAFAYEAGPTGYGLYDGLVARQYPCLIASPSMIPKAPGQRVKTNRLDSRGISENLRGGQLKSIHVPTTLYRELRHLTQLRDALVSEMVAMKQRIKSLLLMEGLEFPPAPAGSQWSFVVKAKLRKLPCSAVVRFKLDQLLDNLEFGEKQILKSTREIRRFCHNDPELSQCIEYLKTLPGFGWIVASQMMARVGDWRQIKNIRQLPAFLGLVPTERSTGERTDRGSITHSGDPRLRSKLIQASWSAIRQDGELREFFRTVARKHPRHLGPRIAIVAVAHKLSVWASVLLMKQRPFEVRQKIQSAPLTQEETVPQGTTRRQAVPGEKTS

SEQ ID NO: 305683 - protein, 385 aa, unidentified
MSKVDDLSRSITVLDQARTVLVVVEMSQNNWLVAGMLPGVQRHPLKKLDPDPNALLGLIARWRSEAEAAGMPIDRVALAFEAGRDGFWLARWLQTRGIDAHVIHSTSVAVNREHRRAKTDRLDTAMLMRVFLGWLRGERGHCRMVAIPSLAEEDAKRPSRERENLVSEKTRIVNRMKGALARLGIRGFKPELRRAPKKLPDLRTSEGQPLPPNMLEEMRRDMARLAVVRDQITTIEKARIAQLEQAPASGYNAMVVLLARVIGVGIETADMLVHEVLSRNLRDRRAVARYAGLTGSPDESGSKRREKGLAKAGNARVRRGLIQLAWRFLRFQKNSELTQSFQARAAQGARKTTMIVALARKLLIALWRLVTVGEIPMGVTLRPMN

SEQ ID NO: 305684 - protein, 419 aa, unidentified
MKSIKIQRLTTVNEKALIVAVDIGKKVHHGYFRGPNGQEVKPFVFHNFRKSFEEFWKKICQFKGEHGLEDPVVGFESTGPYAEPLFHFLRKKPVKLVQVNPMHTKRLKELTGNSPNKNDKKDPRVIADVISLGHALSLVVPEGPAAELRRLSQARERAMKRRTAVINQLQDLIFVIFPEFLMIMKDITSKSALYLLKNHPTPEDIIAEGLGSLTMLLKKISRGKLAQERVQQLFEAAQSSVGIYEGKQSILLEIKRLVSKIGDEELFIDELEKQMSYYLKQIPYSRSILSIRGIAEVTTAGLIGEVGDFKKFKTISEMMKLAGLDLFEVSSGQHKGQRHISKRGRSLIRKLLFFAAINVVRSKGIMHARYQKMLDRGMPKIKALIAIARSLLRIIFALVRDNTVYVKNYSQIHRVKLAA

SEQ ID NO: 305685 - protein, 415 aa, unidentified
MVASYEKHKEEKVLISVGIDVSKEKSTICILKPFGEVLMPPRDFQHTKSDMKGLQSILKRYDEEIRITMEATGNYHLPIALFLRENGYYVRIINPLEMKRYRCQGIRNPKTDNIDAMMIAQYGIDFWNRPVKDYNVDAIRADLKLLGTQYASFMKTRQDRCLALGNIMDRTLPGMYGILDDFNKYTGKDKQSDFVYDFYHADKISKYSEGKFCEKYEEWSKKKGYIFKDKEARQLYSIAKDSIPTLKMSDNTKLIVREIISVLREVDDSLYRILNQMNELAKKLPEYETVLSMAGVGKSIGPRLMAEIGDPRRFHSAKALIAYAGIDAPPYQSGKFIGTERHMSKRGSRIMRKLGYEIMDSVNKHQKTYAEDPVCIYFLKKRSEGKHYRVAMFAAYNKFLRVYHSRVAYVLNNAE

SEQ ID NO: 305686 - protein, 340 aa, unidentified
MAIVIGCDLHARFQQLAVLDTASGEIVPHRLEHDGEQVREFYRRFPPPVQVGVEATTGVYWLQELLHGLGHELVVGDAARLRAMVVRRQKTDARDAEHLALVLAQGRFPRVWLPGPELRDLRQLLLHRHRLVRMRTQLRNGLHALARNHGPNPRRRRFTQAARAHLAALPLGEFAQLRREESIALHDDLDSRITALDGRLQQQLEVSEQARRLATHPGVGPVTALAWTSIIGDISRFGSSAQLCSYLGLIPSERSTGGKQRLGSISKQGNSFLRFLLVEAAQTAVRGDDQLGRVYRRLAARRDRPTAKVAIARRLAVRLYWMSRRNVAYSDLREEQAHAD

SEQ ID NO: 305687 - protein, 358 aa, unidentified
MVDKVTEAAVVGGVDTHKDLHVAAVVDQNNKVLGTQYFSTTRQGYRQMLAWMTSFGTLKRIGVECTDTYGSGLLRYFQNAGLEVLEVTAPDRMERRKRGKSDTIDAECAAHAAFSGIRTVTPKTRDGMIESLRVLKTCRKTAISARRVALQIIHSNIISAPDELREQLRNMTRMQLIRTLGSWRPDASEYRNVTNVYRISLKSLARRYLELHDEIADLDVMIAAIVDELAPELIKRNAIGYESASQLLITAGDNPQRLRSESGFAALCGVSPVPVSSGKTNRYRLNRGGDRAANSALHIIAIGRLRTDAKTKEYVARRVAEGHTKMEAIRCLKRYISREVYTLLRNQNRRINSIPITA

SEQ ID NO: 305688 - protein, 356 aa, unidentified
MLKDKKYIGMDVHKESISIAVRNGAGKIVMECVIETKTSMILQLIDGLRGDLHVTFEEGTWAAWLYDLLKPHVTELVVCDPRKNASMREGNQSDKIDARRLAELLRLNHLSPVYHGEHGLRSLKELVRSYLTITKDLGRVMSRVKAIYRSWAIPCTGKQVYAPRHRAEWLGKISELGVRRRAEFYYQQLDALRALRQQVRRDLLAESKKHPAWKRLCQIPSIGPIRAAVLLGILQTPHRFRTKRQLWTYSGFGIETHSSADHRSVHGQLQRVKKPSLIRGLNRNCNHDLKNLFKGAAIVASSKPGPFQEFYTALLTKGIRPEMARLTLARKIATIALIVWKRGASFDAQHLKPQTA

SEQ ID NO: 305689 - protein, 442 aa, unidentified
MAMRKREDSPEVFPNAAGIDIGGSSHWVAVPKAADEEPVREFGTMTDDLHAMADWLLACGVDTVALESTGVFWIPVHEVLEQRGLTVWLVDARQMKYVPGRKSDVQDCQWLQKLMSLGLLRAAWRPGDEVCVVRAVVRQREVLLTEQASWVLRMQKALVQMNLQLTEVLTDVMGATGQAIIRAIVAGERDPKALASHRHTRVRRSEEDIVRALTGNWREEHLFVLQQALAMFDSLAQRILECDAKIEALLVPLGRHDIALDGPGKRRSKNAPQFDARAALARWAGVDLTRINGLSVTTVMTILSEIGPDLSRFANVKHFCSWLGLCPGTKISGGKVLSARTRRSTNRVRQALKIAAMSLSRNASALGAFYRRLCARMDKPRANTAVAHKLARMVYFMLTRGEAFVDQGQQRYEEQQQQRSIAALRRRASALGFEITPTVLTP

SEQ ID NO: 305690 - protein, 336 aa, unidentified
MKKKFNYYIGIDISKLTLDISILFECENSTKTDYYKIENSEKSIAQFVRNKLGKYDSSQILFCFEDTGIYSMPLAYYLSANELTYWQVPAVEIKRSRGISRGKDDKIDSKDIAFYAFTHMHKFRAGKVSAQSIQQLRLLFTEREKVLKALALFENTAENKGFISKEVFNAVASVNKSVINQLGKTLQSIEQKMLAIIKSEEKLNGQYKLIISIPGIGMQTAIYLLIATKGFEAFDNWRQLACYAGVAPFPYQSGTSIHGRNKVHPLADKKLKSLLNMCAICAVRHDKELKAYYERKVAEGKVKMLVINNVRAKLLARVFAVINRGTTFVNTHKFAV

SEQ ID NO: 305691 - protein, 365 aa, unidentified
MGVPTMAQARTFVALDVHVSGTVAASIERESGELRRRRLSGRAAEVVEFVAGLPGPVRVTYEAGPTGFALARRLEAAGVSCVVCAPGLIPRGPADRVKTDRRDAERLVRLLIAGELHAVAVPSIEAESLRDLVRAREDLRGDLMSARHRVSKLLLRHDVRFEGTERNWTGAHLRWLAGVRFAQPGTQAAFDDYRGAVEALIVRRTELERLIAEQLPASPCAQTARRLMCLRGVDTLTAAGLCAEIGDFGRFAHPEQLMSYLGVVPSEHSSGTRRRQGSITKSGSQHARRLLVEAAWHYRQPPRVSEPLRRRQAGADPMIVALSWKTQRRLHRVWSRMEQRGKRRTIIAVAAARELAGFCWAVATA

SEQ ID NO: 305692 - protein, 419 aa, unidentified
MKRIQPGMPVRAKGRAVAGIDVGKRKHAATALTPNGERIAQLAFFLNTRAGIDLLEKEILRKAGGPGKTLVAMEATGHYWMCLYHELKRRGYESVVLNPVQTNAHVRAKIRKNRNDRIDSEGIARLVLAGEARATRVPDEKTAELRLWVRHRQRLLRAAGNMERFAHTLVDRVFPEYADILSKPFLPSAQKLIRQLGLAPADLAANGREVREVLQIASRNKIAPETIDNLLEAAKQSIGTRQAEDAANRQLVLVFDYLATLRQQIAAIEGELDLRVQEIDSPLFSLGLTANVVAAIHAESDPISDFGSADQYVAYAGLDPSSYRSGDTIDRRGKISKRGSPTLRRALYLAAFVVCRKHVYFRRIYQKHRRHGKNHCNALVVVARNLARVVWRMLTDGREFSKRPPQNAVTTRQSGCKAS

SEQ ID NO: 305693 - protein, 433 aa, unidentified
MSGKETMQPQLEFVAFVGIDWADQKHVWCLQEAGSRHREYGELEHKPETVEAWVGELCRRFGPGPIAVAVEQVKGALVCMLRKYECLHLFPVPSTMSAAMRKALYPSGAKDDPRDADLLLDLLVQHRDRLRHLQPDNEGTRRVQNLVEERRKLVEEKAAQVNRLIGYLKIYFPQMLQWFQRLDTKLVCEFLERWPSLEELKKVPPAELRKFFRQRQGRHHKLTEDRIQGIVQAMPAIQDQAVIEAKQVVVQVIAQLLRSLLEGIANLDRKIEEAAGAHPDFFIFQSLPGAGAALAPRLLAAFGSQRDRYDSADEVLKHSGIAPVTETSGKKKWVHFRWACAKFLRQSFHEWAGHSIAHSVWARAYYQQQRQRGQDHHAAVRALAFKWIRIVFRCWQDRVAYDENKYLAALARRGSPLSSVLTTATPLCNPCGS

SEQ ID NO: 305694 - protein, 405 aa, unidentified
MPMNMQYERAFGLDLSKKTFHGCILDGPDLGSRHFFTGEMGQQGKAKLAGRLCKGDLVLMEAGTASFSLARFLLENTESEVVVLNPTKLYNIFNSTLKTDKSDSEKIAKIARTMPREEWPTVSIPTKEEQAERSAVSLEVFLAKEITMLVNRLYALFNSMGHPFVKKSDLKTEESRLILANRLLCEDSLAIEQAIMLSDQIGHVTNQLEQCKQRLRDICLSHPKEALSLLSIPGIGLMTAASQIAFLGDGSRFNSPDSYVNYVGLSERRFDSGNKISKGHISHMGNKCIRRNIIQAAWVAVTKLKGNPLSRKYEALRLRGKSKPVAAVAVAKKMTQLSYTLVKGNGIYEFTKQQGLAAFQRKLRYHKLAALLDHLPEPIRIEMEEIDRNKRKEAAATTSRPKKLI

SEQ ID NO: 305695 - protein, 306 aa, unidentified
MHVGVDVAKQHLDWAEGPDATVQRVSNDAEGIRILLRRLQKLAPERVILEATGGYERSLLYALVEAGLAAVVVNPWRVRRFAQGLGTIGKTDAIDARVLARFGALTNPTPTIVPSPAQRAAADLIARRRQLIAMVVSEKQRVQRAPAYLRREIAGLVAILERRIARLDRQLDAALDQDPERNQTLQILRSAPSVGPGLARTLLIDLPELGALSRRQIASLVGVAPFPRDSGKKIGQRRIRFGRAPVRTVLYLAAMNGARFNPVLKDMYQRLRRAGKPAKVALIALARKLLTILNAMVRDRASWKAA

SEQ ID NO: 305696 - protein, 412 aa, unidentified
MRRVIGMDIHRTFGEVVFWEEGKLRHGGRVDMTRTALEGFGKSLVATDEVVIEATGNCMAVSRVLSPFVKRVVIANPLQVKAIAHAHVKTDKVDAGTLASLHAAGYLPEIWTPDAATERMRRLVARRYQVVRHRTRIKNEVHAILHAHLIPKCPHADLFNGRGRTWLMHQPIPDDERFAIERHVRELDRLAEDLAILDREIAESTLDDLAIRRLLTITGVNLTVAAGLMAAIGDITRFRSPQKLVSYFGLNPRVHQSGLGAAHHGRISKVGRSHARAMLVEAAWAAAKTPGPLHAFFVRIRAKRGHQVAAVAVARKLTVLVWHMLTKEKDYLWARPSLVAHKVRSMELQAGRPQRKGRARGDTYAYNVKELRNQEMHIARKAQENYENFIEAWRPRSPKERARGRLNPARLE

SEQ ID NO: 305697 - protein, 407 aa, unidentified
MIFVGVDWAEAHHDVHVADVEGNRLTKARLAEGVDGIARFHELVGEHVSGPAEVVVGIETDRGLFVTALVAAGYQLYAVNPMSTSRYRDRHSTSGAKSDAGDAQVLSDMVRTDRHNHRLIAGDSQEVEAIKILARAHQSMVWSRGRQTNLLRSTLREFYPAALVAFEDLASPDALEVLGIAPTPTLGAGLSRSKIAAALRRGGRQRRVDERTVEIQAALRSPQLQAPAAVASAMGASVSASVAVIAEMAAQAARLAEELSSGFEQHPDAEVVRSLPGLGTILGARVLGEFGDEPNRYVTPKCRKNYAGTSPITRASGTKQVVLARHVRNRRLADAIYLWAFASLTASPGARAYYDARRAAGDGHHQALRALGNRLVGILHGCLEHHVAYNETIAWAHRPETNLASAA

SEQ ID NO: 305698 - protein, 427 aa, unidentified
MPYTIAGIDVHKKMLAVVVADVEGEGDFQFERHKVGTSPAELRALAGWFVERQVDEVVMESTAQYWRPVWEALELHWRPQCRTRDGASPLSGTLHLAQAQSNRGAVGRKKDFPDAERLVKRLVAQELTLSFVPDAEQRLWRTVMRRKYQITRSRVQLHNRLESLLEEAHIKVSSVVSDLLGTSARRMLQAVADGERDPTALAALADSRLRATPDQLRNAFGACADLHPVYRRLVKLTLEELRVIEDHLAQLDQQMAELLGHHHDAVQRLAEIPGLGVDSAQQIIAEVGATAATFPSPKHLASWMGACPGTEESAGKNYSHRCPKGNRQMRRVLNQAANAAVKAKGTIFAIIYRRLVPRLGHAQAIGAITHRLCRLIWTILHQSVRYEERGPAVSEEAKKVRARKMIRELRSLGYRVEPLPAPSSSPA

SEQ ID NO: 305699 - protein, 453 aa, unidentified
MEQPQEIEDEEYERTWERVAAIDVAKGSGVVCTRVPDEGRPGRRKTHVWTVQATKRAVIELADHLRGLQVQVVTLESTSDYWRIWWVVLEAAGLKVQLVNARHVKNVPGRAKTDKKDAVWLAKLTERGLLQPSFVPPPEIRRLREFTRLRTDLVRERTRYWARLEKLLERALIKISVVLSKLTTDTARAMIEALIAGERNPKILAELAIGKARSKRAELAEALDGDWQPHHSELARILLDQIDALTAQIDTLTDRVSELIDQIPAAWGADAGGVTGPQAGTGPDAVILPAVARLDEITGCGIIAAQAIIAEIGLDMTVFGTSGRLVSWARRSPQTRQSGKKTTTGRAGKGNPYLNGMLGEIAASASRTGTFLGERYRRLAKRRGKRKAQAAIARSILVIIFHLLADRTARFHDLGPGWYDNQIDAQRKTRNLIRQLEALGHTVALTPAGAAAA

SEQ ID NO: 305700 - protein, 328 aa, unidentified
MAKEKFDVSFFDLTSKKVSNQPSHKVVKNNFKSIGRFLETLPSDAVLVAEHTGVYGDTLLKCCMDSNVKIAFVGGYVIHRYRATPDRAKTDVLDCALLRDFGERYPDKLKYKTFPEEALYELRQLARHREMLVEQRKQLITADRSEDCRPIRSLAVKRSMDHIKEMLDTEIAETEKEMLKVINGHESIHHNYELVKSVDGVGLITAVELLVKTENFTKITTARQYAAYAGTAPYEKSSGKMDKGAHISKIGNRRSKTLLYICAESARLHNKEIKLYYERRTLIDKKPRHYVLNAIANKLLRIIFTLVEKGEYYDANFIRQDPRVVKYN

SEQ ID NO: 305701 - protein, 365 aa, unidentified
MKNIAYVGIDYHLKSLTIAVMIESQNQFHDVITMSNEDKLITKYMKKLAKDFEIKACYEASFSGYSFKRKMESWGYHCDVIAPSLILKKKGDHRKNDKCDAMELAKLYAGGLLTIVHAPTEYEESVRNLIRCRLSFKDTEKRIKHQINSLLLAQGISWGNKKWNKKHRSWLAKLQLSEKYLQVALEEQLGLLSYLETRINALDDQIEKIAKSDVYAPSVIKLRAFRGIGTLTAMLLIAEITDFRRFPNARALMAFLGLIPSEDTSAEKHRGGAITKAGNSRIRKHLVEAVQHCSKEPRMSQQMKEDLSQIDAHSANIAVNCMKRLHKRYWHLILKGKIRSVALTATAREFAGFIGAMMQPELAIV

SEQ ID NO: 305702 - protein, 363 aa, unidentified
MNEITTVGVDLAKEVIAVCAADRSGKTVFTRVFRRDTFAAWAVRLPACVFGLEACGAAHHWARWLASHGHTPRLMAAEFVKPFRKSRAAKNDRNDAEAVLTAVRQPNMRFVAVKSIDQQACLSWHRMRQGWSEERTALINRLRGLLGEFGVWRGRSAGVLTRALPALEHDEALPLLVRRLVAEARPHLARLDAAIAGCEVQIKSHVKGNAAAQRITAITGVGSLTAAAVLATVTDARDFRNGRQFAAWQGLVPRQDSSGGQARLGRITKRGDCYLRGLLTQGARSALQAALDKEPMLRTRLQTWIVQLHARVGYHKTLVAIANKHARMIWAILAKGEAYDPDAWRRWTRAAPTTAPAMSDVTP

SEQ ID NO: 305703 - protein, 338 aa, unidentified
MSKLKNFVGIDISKLWFDAALIKADDPSQIIHQQFAQKAEGFVKMQEWLLMYEVKGDNETLFCMENTGLYNTGLVNHLVKNKAQLWVEMPLRIKKAGGFERGSDDKTASIKIAWYAMRYQDNVKLWQPADTNMEKIKNLITQRDRVINAVTQLSVPVKELKDCGCEAEANQMAKVQKPALIALQKTKMNIEALITKTVQQDEQINKKVKLVQSIKGIGPVTAVALLVYTKSFDKFDNAKQLACYCGVVPFRKESGTSVRYKPTVSPFANKKLKKLLHLCALSAIRTDKELRLYFERKVMEGKNKMSVINAVRNKLVHRVYAVLRDERMFEENYVRKCA

SEQ ID NO: 305704 - protein, 320 aa, unidentified
MQTTTKVLDIGADVAKDEIVVACSEGSFPVRKLANQRTALLAFLKGLPKGSRIGMESTGIYHELFASLAHKLGFIVFVLNPKDVRHYAKGVGRRGKTDRIDAELIARMVAHEQADLHPWVPPTPEQREINRLLKRRAKLSSLRQALGMSLKGMVGFSTDLKTLRQRFDQVIERIDQRIKELVDANPDRKEHVTHLRTIAGVGPVVSAALVNSLERMPLKNADAFVAFTGLDPRPDESGQHQGKRRLSKRGPSELRRLLYLAAMSAKKTKAWKPLFERYRAKGLSTTACFVILARRIARTAWSMYTYKTEFDLGRLTKGLT

SEQ ID NO: 305705 - protein, 312 aa, unidentified
MAMLSFCGVDVSKDRLDVVVLPEGWFFSVSNDTAGWAELVARLRPLTVSAIGLEPSGGYERGIIRALLAAGLSVRRINPNKLRQFARARGVLAKNDRLDARLIAEYVAIMPTRVVQRDAAVERLAEIVTMRRQLCDEHVAAENQAAHLEDAMLRRLSKRRQMRLEADIRLLDKRLAEMVAANVALAQRYELLTSMPGVGPVLAFTLIALLPELGKMSRKQIAALVGLAPYDFDSGKLKGHRSIYGGRMSVRNVLYMAALSASRYSPALKTFHKRLAAADKKSKVIIVAVMRKMITTLNAMLRDSAAWQPRSA

SEQ ID NO: 305706 - protein, 353 aa, unidentified
MKPKFPTATIGLDLGDKKHAICVLNGAGEIIDERSTTNNRESLRRLSQKYPGSRIAMEVGQHSPWTSRFLEALGHEVFVANPRKLRAIYTSNRKSDQSDAYMIARLARVDPTLLSPIQHSTEEAQRDLLQVKLRDNLVRQRVDIISSIRFTLKSMGVMVASPNTACFTKRCRKDLAGVNPQLLAMCEPSLRVVDELTQSIRELEQRIEELCVEAYPETEFLQQIAGVGPITSLAFVLTIGDPQRFDSMRDVAPYLGLVPKRDQSGETDKRLGISKAGDAYLRRLLVSAAQYILGPFGPDCDLRRHGLQLAERGGRGAKKKAIIATARKLSVLMLTLWYNEDIYEPLRNQSLVA

SEQ ID NO: 305707 - protein, 355 aa, unidentified
MESTKYIGMDVHKDAISIAVLNSSGKLVMESIIETKAITILEFVHGLRGSLHLTFEEGTWAAWLYDLLKPHVAKLVVCDPRRNGYLKQGSKSDRIDAWKLAELLRSDLLQPVYHGEHGVRPLKELARSYLTITKDQARVMTRVKAVYRSWAIPCAGKQVYGQRHRLEWLGKIQEPGVRRRAEFYYVQLDALRSLRLVVRRELLLESRKHGASKLLSQIPSIGPIRAALLIALLQTPDRFRTKRQLWAYSGLAIETHDSAENQYVNGQLQRSRKQASIRGLNQNHNHDLKNLFKSASAVAAAKAGPFQKFYDAQIGKGVKPEMARLTLARKIAAITLIVWKKGVSFDASYLNPQTA

SEQ ID NO: 305708 - protein, 375 aa, unidentified
MSTAATRMDQNTKKLYVAFELGEKEWKLAMSPSLAVRPKLRALRSRATARVLEILERERQRVGAVQVVSCYEAGRDGFWLDRFLHAHGIENRIVDSASIEVRRRARRVKTDRLDAQKLLTMLHREALGEEDLWSVVHVPAVADEDARSLQREYRTLVKERSRSSSRIKGLLASQGIVAPRIDGQFLPWLAAARLWDGSAIPSGMRARVEREFARWRFTRDQVLALEKERRDRTKDETDRSLEKVRALFALQGIGLGAAWTWGLEFFTWRDFRNGKEVGALSGLAPTPYQSGDSSHELGISRAGNRWVRGLAIEIAWGWLRHQPDSALTHWYNDRFARGGPRARKIGIVALARKLLVALWRYVETGALPEGAVLKA

SEQ ID NO: 305709 - protein, 392 aa, unidentified
MIYVGIDVAKDKHDCCIVDSNGTVLKDSLRIPNTRQGFEILYTSILSFLPNKTISNVKIGLESTGHYSTNIQNYLYAKGFHLSVLNPLATNLFRKAQTLRKTKTDKTDALVIAKMLFSDDTKSYSPVSYQIQELKSLTRHHYRLVGYRSKLKISITRLLDIIFPELATYVWSIHQPSVYALLSEFPNPKEISNCHLTKLTNLLYKATKGRYGREKADEIRKAASSSIGTSTKSLSLELQQTIRLIKSVQTEIVLLDEQIKELMIEIDSPIMSIPGISYNLASIILSEIGDVHRFTNPSKLLAFAGLDPSTYQSGKYTATYTPMVKRGSAYLRWAILMASRTVSMRDLTFSNYLAKKQCEGKHYYIAMSHVAKKLIRVIFYLLTTNTTFTPQI

SEQ ID NO: 305710 - protein, 433 aa, unidentified
MLKLNYMSTLFVGIDVSSKTNAVYAMDFEENKYISSSFGNNQPGADKLGNMIAECMHKHKNLDTVLIVLESTSVYSVHISNFLSTSEVLMPYKPYVFCVNPKATSNYRKSYIGMEKTDPTDAYLIADFGRVGRTKKLEPWRGGQFIALKRLTRHRMHLSECITREKTYMVSNLYLKFSELQLLEGDDKPFGSLYGATSSAVLTEFLSPQEIIDMPEEELLTFLAGKSRNRISDLSKTSELLRKAARDSYRLDKCMYEPLNVSLASSFNCIHAYQKEIKLIEQAIEKCINGMNPNALLILQSIPGIGPIWASGILSEIGDITVFHSSDALAKYAGLYWPKGDSGDFTSEDNKMSKAGNPYLRYYLGEAANSVRKHIPEYADFYARKYAEVTKHQHKRALALTSRKFVRLVFGLLVKNQLYTGEKLDAEYNIKSN

SEQ ID NO: 305711 - protein, 408 aa, unidentified
MDLTPMHKRVIALDVHQAKITACAVVEHEDGRVEVSKRDFGAFKRDRRALAQWALEIGPEVVVMESTGVYWKSPFAALEAVGIIAWVVNARHVKAVPGRKTDMADAQWLATLARAGLLRASFIPPVELRQLRLVARQRQKLVGMCSAEKNRLHKVLVDAGIRINVLVGDIHGQSARAMLKALIAGQPMHEVLDCRGRLRASREELCEALSTEQFSAVHRFVAEEIMQHIEQIEQRIARMDQYLLDGLQAWQPQLNLLQTIPGIDVQGAAMLLVEIGADMAVFSSAERLASWVGICPGNNESAGKRKSGRIRRGNAWVRRLLCEFAQAAARTRCALKAKFDSLAIRKGHNKSVVALAHKMLRTIYAMLASGTHYQDRSVDYEALSVARNAPRWIKMLRKHGFMAESAAA

SEQ ID NO: 305712 - protein, 341 aa, unidentified
MHITTIGLDIAKNVFQVHGIDEAEKVVISKQLRRGQVLKFFASLRPCLVGMEACASAHYWARELTKLGHEVRLMPAKDVKAYVKRNKNDAKDAEATCEAVRRPTMRFVGAKSAEQQGRLMQHRTRDLLMRQRTQVINALRAHLAELGIVAAQGREGLKQLLAIIADEKDARLPIDARASLVVLAAQLQALQTMIGLIERRLLVQHRANEASKRLESVPGIGLIGASAIAATVTDPNAFRSGRDFAAWIGLVPRQDSTGGKQKLGPISKQGDRYLRRILVVGAHSVLRRAKKTPEKYPWLAQLLARRPFKVVAIALANKMARVAWALLARGGSYRIPALAAA

SEQ ID NO: 305713 - protein, 370 aa, unidentified
MRIIGCDLHARQQTLAMLDTETGEVVNLTLMHEGNNVREFYSKLPRPVLVGIEATGSMHWFLNLMEELGIECRVGHPAQIRAAEPRKQKHDRRDADLILKLLAQNRFPAIWLPSKELLDLRALLLHRHQWVRMRVRMQNALQAIALANGLRRGPALWSYDGQAKIAFLPLLPHAAYRRSALQAMYKNMQSEIENLTRRVAEQAGNRCGARLLMTHPGVGPVTALATEVFLGDPQRFTDSKTLASYVGIIPREYSSGEHQRLGGVTKQGSPLLRFLWGEAGAHAARRDPELKRFYRRKLVQKGLGKARVAVARKLGIRLWIMLRDEIDYQEFCRRGQIQQKTVRPVVGMPETGNGAKSHRQSDEATRLPES

SEQ ID NO: 305714 - protein, 459 aa, unidentified
MGRARARKIPAQLVEDEEYQLRHERVAGIDIGKDKADVCTRLPPARAGGRRVSRTGEVPARAADIAELAGRLLADGAELVVMESTSDYWRIWYYLLEAAGLNVQLVNSAQCRQLAGRPKTDRLDAQWIARLAEMGLLRPSFVPPPEIRALRDLTRTRLQIVRDRTREWQRLEKLLEGAVVKLSSAVWSLSESKTARRILEAIAGGETRPAALAALASPRVTGGRAAVAAALAGMQVADHHRLLIRVHLDHITLLDRQAAAVGDEIEAALDAIPAAWGADATGETGPGAGRGPDPAVLPAAERLGEIPGVSPALARAIIAETGLDMTRFPTPAHLASWAGLAPAARQSGARTRKPGKGHGNAYLKGYCTQAAAGAAGTATFPGERHARLARRLGGNRAKCAVGRSILTIIWHLLKDPAARFADLGPGWHQRKASRDRKIRAHLRALQALGVNLEPTGATA

SEQ ID NO: 305715 - protein, 388 aa, unidentified
MSVVDARGRELVRHSVEHSAAGLAELVDVLARADVGEVAIERPDGPVVEALLEAGLTVVVISPNQVKNLRGRYGSAGRKDDRFDAFVLADTLRTDRARLRPLTPDSDATVALRRACRARKDLVSHRVAVANQLRAHLRNAFPGAVGLFAEIDSPISLAFLTRFDTQDRADWLSPKRMAAWLTSVGYCGRVEPAVLHARLTAAPRGVLGEHGTAQAHVTRALLAVLSTLVEQIKTLSTQISEQLALHTDQHVFTSLPRSGRVRAARLLAEIGDCRARFPTPEALTCLAGAAPSTRQSGKIRAVGFRWACDKQLRDAVTDFAADSRKTNPWAADLYNRARARGHDHPHAVRILARAWLLVIWRCWQDRTAYDPARHRALQRLLQDQQQAA

SEQ ID NO: 305716 - protein, 343 aa, unidentified
MITIGIDPHKRSLTAAALDPRSRQLTQLRVPATSQAAHQLLAWAAGWPQRRWAVEGASGLGRGIAQLLVAAGETVVDVPAKLAARARLLGAGNARKTDRIDAASVAAAAIHNHQLRPVTVEDQTATFRLLSDRRDDLVAERTRTLSRLHVLLAELHPGGANRGLTATRAAALLGQIHPITSVDTQRKRIARDLLADVRRLDRQITAATQSIRTTIGAQATTLTEVYGLGPVLAAKILGHAGNVDRFPNRDHFASYTGTAPVEASSGDVRRHRLNRAGNRQLNTALHIIAVCQIRDPSPGQIYYQRKLADAKTPEEARRALKRHLSNVVYGHLAADHRRRTLTS

SEQ ID NO: 305717 - protein, 482 aa, unidentified
MKKRNIYQNRSQELLRLFEVAGSSAKVMCVPMDFAKKDHVVMFCNGYGDIVRKPFSVKNSPDGIKYMVDQVTRSCRHRGIKKKHVFFGGEDVNSYAENFVNTLRSRGWLVAGVNAHDAKKQRANLQASTDRLDLMGIATMLLNCRANCCPAQSGIYRNLRTIVRHRRKLVVMSTEVRNRIHGVVDRLFPGFLDERRTGIVPFTKSSLYLMEDRFSARQIRRRKPQKLIEILRRFGTKEPETTALKLQQYAKQVLNTPVEYVSTLQLSLAQHVKHLKCLNEGIHQLEKEIAVNLAQTQGAFLTSFRGIGIVLAAGTTAEIGDPNEQKPLNNLVSYAGIIPRIKQTGGPYGKTYTTSVGKRCNRILKDYVVKSALHLGLHGPDDLMIDYKRRDASGQHADFGMGRRYLRTALSLMRSSQIYLPPQLRKAGTKPQERAGYYLTIWPYLREKWQKYGALKAAFDKNRPLGQWRSIVQDLYGIKLKI

SEQ ID NO: 305718 - protein, 352 aa, unidentified
MRFYDGQHTHYAGVDLHTKTMFVCVLDATGTVLLERNTLANPKSFLKAITPFREELVVGCECIFTWYWLADLCEREGIAFVLGHALYMKAVHGGKTKNDRQDAHTIARLLRGGTFPLAHVYPKEKRATRDLLRRRTHFVRKRAERLAHVQNTSWQYRLESFGRRLANRSVTTCRDEVVAAFDDPQVRASVEADLDLIAHYDRLIRKLERQLEQQARIDDRRTYDLLRSIPGVGQVLALIFLYEIDDVTRFDSHQQFCSYARLIRPTKTSAGKAAGLPSFKQIGNGHLKWAFSEAALVLMRESKAVKGYVERMTQKHGKGKALGILSHKLGRSLYYMLRRGQYFDEQTFLQTA

SEQ ID NO: 305719 - protein, 368 aa, unidentified
MKTEKTPRISVGVDLHKQQFTVNALNEESGEILLEEVYRTTREGYEEFCKKMHEHEEETGCSIRIAVEATGNARFFKNRMESEGFEVLVVNTNKFKVITMSTKKTDANDASTLAYYLSKDMLPESHLCDQTSEELRRMLKTRSVLVSAIVKIKNQIHGMLLGYGIETNAAQFQSKKRRQELMKDLADQGYSQFTAQSLEVTLNILDNICADVKRIEAQIQEMTKDNEEVELLMTMPGIGFVGATTIVSYLSNIERFEGDFKRFSSYLGIVPSVHNSADTVHYGKITKHGPQDLRTTFVQIALGIIRQPQNTNGWKLMQDYRIMKISKGSGRAIIALTRKIARIVFAMLNNHTPFDENLLRKAEKEVVA

SEQ ID NO: 305720 - protein, 349 aa, unidentified
MTKVSMIGLDLAKNVFQVHGIDAAGKVAVRRQLRRQQLEKFFAALPPGVVVGMEACSGAHHWGRVLQKLGHEARMMPPGYVKPYVKRNKTDGRDAEGICEAMGRPTMRFVPVKSLDCQAVMVLHRTRRLLVRQRTMSANALRSALAEFGIVAAQGLKGLHSLMQELEDPASAIPDKARMPLQVLARQWETLNTDICKLETEIVGAAKTDEVARRLMAIPGLGPIGATAILAAVPDASVFKTARDFAAWLGLTPRQFGTGGKQRSGGISKQGDRTLRTLLTIGATSYLRYERARGAKDPWVRDLLARRPFKVAAVAYAAKMARMIWAMLVTGEFYRAPNRSRSVAAQAAT

SEQ ID NO: 305721 - protein, 363 aa, unidentified
MRFYREQRQFYCGIDLHASKMYVCVLDDQGNVILHRNMRAEPEPLKRALAPYRASLVVGAECMFSWYWVADWCREEGIEFVLGHALYMKAIHGGKAKNDRIDSEKIARLLRGGTFPLAHVYPKEMRGTRDLLRRRTLLVRRRAELLAHVQNTHTQYNVPTASGKGRDRVREGIDTTAFEDPSVQLMLDADIEVIEQLDETIARLETHVLKHAKVHDPVRLHLLQTTTGVGKVLSLVMLYEIQDVNRFENIGQFVSYARLVSCAKESAGKKQGSGGRKIGNAHLKWAFSEAAALMIRSSPEAKAFMEKMTRQRGKARAVALVAAKIGRAVYWMMKRKQPFDARKLWKSSLPKGVRTREEAAMKG

SEQ ID NO: 305722 - protein, 317 aa, unidentified
MNNTEIQTPVNVGVDVGKANLDIALHPSGQFYTIPNTEAHIRRFVRILKNYSIERIVVEASGRYEQALVQACDQAGLPIIIVNPISVRRYAQAIGVLAKTDRIDAQVIAQYAATLKPEFKPIPDKTSQKIRDLLVRRSQLLEMSTMEKNRLQILPNPLHRSIKSMLRMLQSQIETVTRQIEQEVAKVDQWRSKMEIMTSVPGVGKVLAYTFLSELPELGSLNRKEIAALVGVAPINRDSGKLNGKRRIRGGRHRVRTVMFMAMLSSIQCNPVFKRFYERLKAQGKIPKVALIACMRKMIVVLNTMIKNQESWRAEMA

SEQ ID NO: 305723 - protein, 449 aa, unidentified
MPRTRNKSSGLPIVNDRAAAIDIGSRFHVVAVAPDMCDEPVQTFQTFTTDLERMADWIVSLGVTTVAMESTGVYWIPAYEILEGRGIDVVVANARESRAVPGRKSDVNDAQWLQRLHACGLLRPSFRPSGEIAALRAYLRLRERHLDYAAAHIQHMQKALTFMNVQLHHVVTDITGATGMRIIRAIVGGERNPSVLAAMRDRNCKSSVETIQSALVGNYQPEHIFALQQALALYDFYQLRIDECDVQIERTLATLTAGKVLPQEALAKARSRAQQSNGLSFDARGALYQLAGVDLTQIHGIGPYLAVRLVGECGTDLSRWPSAKHFTSWLTLSPGCKVSGGKVLSAHTRKTTNRVAALLRLAAVTVGKSNTALGAFYRRLASRIGKAKAVTATARKIAVLFYNAMRFGMKYADPGADHYEQRYKERVVKQLHRRAAQFGFALQPVEGVS

SEQ ID NO: 305724 - protein, 451 aa, unidentified
MSRGSNKPAGLPIIHDRAAGIDIGSRIHVVAVPPELCDDAVQTFQAFTGDIERMADWLVSIGIKTVAMESTGVYWVPVFEVLQDRGIDAIVANARESRTVPGRKSDVNDAQWLQRLHACGLLRPSFRPERNIAALRAYLRLRERHLDYASAHIQHMQKALTLMNLQLHHVVSDVTGVTGMKIVRAIVAGERDPDVLATMRDVRCKASPETVRASLVGNYQPEHIFALTQALALYDFYQLRLGECDGEIERALAELNAERQGPTEAMPKPRHKTVQPNAVNFDTRPPLYQLTGVDLTQIHGIGPYLALRLVAECGTDLGKWPTAKHFASWLTLAPGCKISGGKVLSAHTRKTSNRVSAHLRLAAVTVGRTDTALGAFYRRLAARIGKAKAVTATARKIAVLFYNAMRFGMKYEDPGADHYERRYRERVIKQLHRRAAQFGFTLQEASVQSVS

SEQ ID NO: 305725 - protein, 340 aa, unidentified
MFYVGLDIHAKHIAICVLNETGQFVHRSQVRTIDQMMRILEGLPDRFEVCYEASCGYGHFHDLLCPVAARVLVAHPGQLRLIYRSKDKNDRKDAERIAKLLYLGEVPTVHVPSLDVRTWRELINCRSQMIAKRTRAKNVVRSLLRSAGISPPRQPGLWTKQGLSWLCQLTLPTLSQQLRRDLLLEEIETLNRQLRRIEQALSRWAQHIPAVLLLQSIPGVGVRTAEAVAAFVDDPHRFPNAKAVGRYFGLVPRQDQSGDRNRLGHITREGAPVVRKLVAEAAWQARRHSPTVRAYFERAQRDDPQRKKIALVATAHYLVRVMWAMLKRGTFWEENKAAAG

SEQ ID NO: 305726 - protein, 364 aa, unidentified
MDDYITWVGIDDSADQLDIAVFYGNEDLPRHEFSVVNDTKGLGLLMKKLKTMPGEVRCVYEAGVNGYHLYRVFQKHGIACDVVAPSLTPRKPGDRVKTNRIDARKLATMHRSGDLTSIKVPKEEQEAVRDLMRGREDALEDLQMTRHRLGGFLLRRGLRYRDGKPWTQGHLKWLKGLTFENQYLQQVLEEYRLALDEATERLKRFEVRVEEAAEREPYKKLVALLMALRGVKVITAMTIIAESIDLKRYLSAPGYMDSIGLVPSEFSTGNKRRQGPITKTGNAHLRRVLVESAWHYRWAPGLSKAMKQRRKDLPADILAIVRKADQRLHKKYTRLITKGKSSKIAAVAVARELAGFIWAIGQAA

SEQ ID NO: 305727 - protein, 426 aa, unidentified
MKKADLLSTLFVGIDVSSRENVVCAIDYEAQKLLRFSVPNNHPGAIEMAEKLHAFLYGNRDINKLMLALESTSFYGIHIANYLSSCELLMPFHTHVYCLNPKMIANYKKSYIDLGKNDAVDAFVIADFARVGRITTAPWRGSQFLALQRLTRHRLHIAASLTREKTYMLSNIFLKFSELSMLDEDQQPFSDHYGATASSVLTDFLSTEDMANMPLQALIDHIGQKGKNRFVNPGHTASLLQQAARNSYRLDKCLYEPLTLSIASSFNLISAYESEIKAINKAIEKNLKGLDPNAYHSLLSIPGIGPVYAAGIIAEIGSIDAFNSHSALAKYAGLVWRENQSGNFRADDTVLSKAGNSYLRYYLIEAASHVKNHIPEYAAFYHKKYDEVKTHQHKRALALTARKFIRLIFGLLANHQLYSKSRVSQI

SEQ ID NO: 305728 - protein, 453 aa, unidentified
MARKAEKERTKDGLKLKIVNPNAAGIDIAYGEMQVCVPEDRDGENNRCFGSFTCDYEEIASWLKACGITTVAMESTGSYWVGLYFFLEEKGFDVLLANAKDVKNVSGKKTDEADAEWIMLMHSYGLLKPSFHPDAAARSIRELARHRDNMLRSAGKEIQHMQKSLVLMNIKVDTVISDILGKSGKAIIEAILAGNHDPKSLAQLADSRCKASKETIEKSLEGTWDSVHLFELKQSYNLYKYIHTQIADCEAEMDRLLTDYTDGSSTDMQGYVPTKKRVAKKNAISFDAEKHAFSLWGVNVMEVPGMSLGALAVLMGELGSGFAEKFTSAKSFCKWCNLVPNNKISGGKLLSSKVPKQKNRVGQVFRLCANSVKSVKTGLGVYFRRQKSKGGHLQAIVATANKIARIFYVMVTTKTPFDESKVGLDEKELLQRKIALAQRTLDRLNLRLSVAEG

SEQ ID NO: 305729 - protein, 344 aa, unidentified
MEQYAGIDVSLESACICVVDANGRIVREAKVASEPDALIAWFRGLGVPMSRIGLEAGPLSQWLYAGMREAGLAVELLETRHVRDAFKAMPVKTDRNDARGIAQLMRLGWFRSVHCKSLPAQELRALLTARKLVQEKRHDLEMSLRGILRGFGLKVGHTTPRSFEGRVRELVDGHATLLTVAEALLLARTTLGEQLGKLQKRLVSSARDDARARLLMTTPGVGVLVALTYVAAIDDPGRFKSSKAAGAYFGLTPKKYQSGETDVTGRISKIGDASVRTALYEAANVILTRPVKGSSLKSWAMRVAKRAGMRKAKVALARKLAVVLHRMLADGTRFAAEKAAAAAA

SEQ ID NO: 305730 - protein, 332 aa, unidentified
MTVFEVGIADRQWRLVERRRRNRRQCTRFLAEQSPSHVVMEACGTAHHWRRVAQSHGHRVTLLPVRYVKPYFRGNKTDRTDVDALLDAVRPGHIPPVTVKTAAQQELVALHRIREQWMATRTARITALRGFFREHGIPLPAGPRAALAAVPALAEQLPPQLALAVTSVHEDARALEQRIVNIERQLAAVAKDDATVQRLLEIPGIGLLTTTALVGSVGRITAFRRARQFASWLGLTPREHSSGLRRRLGSITKRGDVYLRCLLTHGARAVLLTAPRQAPARKPLTGLQPWAVQLAARKGHHKTTIAVANTLARIVWAVWARDAAYTAAPAAA

SEQ ID NO: 305731 - protein, 476 aa, unidentified
MRRLLGIDLAITADNRACIMEETGRVIAERRFGRTRGELEDLLAVATDGLGQGDELVVVMEPTANAWVAPAALFSSRGAVVHLVPPEQSADLRRYYTKHVKNDRMDAKLLARIPLLHPEGLHPAPLPVGARGTLRRVVTRRARLSAECARHRGRIRSLLQLAMPAMPAALGDELGKGALAVLGRYGDPRSLIRLGRARLTQVLIKATRGAWREERAEQILAAARDAVQLWQGLEGCDFAEVAEDLAAEVRLIRAIESELRELDARAAGLLDEIDPAGLHRSMPGFGERTATTVAGRLGDPSRFSGASKVRSFAGVIPGTNQSGESESRPHLTKAGDHVLRHSLFLAAETARRLDPQLAAIYHRQVVERGSHHTKAVCAVATALASRLVAVLMQERPYEIRDTDGTPVDAAAARAIIAARFTVPPEIRAARRQPRSAQRMKGRPVHGVRSKTSPSSPPVDEASEIDATRVLVGVDLP

SEQ ID NO: 305732 - protein, 341 aa, unidentified
MQVSIIGLDIAKQVFQVHVADAEGRGVAQVRLRRGQVLDYFAKLPSCLVGMEACATAHYWARELIALGHDVRLMPPAYVKPYVKRNKTDAADAAAIAEAVTRPTMRFVSVKSADAQAALMLHRVRELLVRQRTMLATALRAHLAEFGIVAPQGIHRVEKLAAEVRSPVVPPLAREALVLLVDELTSVWRRIEALEARLVQLHRNNEVSRRLASIPGIGPITAMAIANTVPDPTMFRSGREFAAWLGLTPKSHSSGGKDRLGRISKRGDRYIRHLLYVGAGNAVRFAKARAATGKSWIDALQQRRPAKVVIIAVANKMARIAWALMMHGGVFRSPTTTAVAA

SEQ ID NO: 305733 - protein, 336 aa, unidentified
MTMTTIGLDLAKYVFQVHGVDAEGNVIEKRRLRRSQVIAYFASISPCLVGMEACATAHFWGRELARLGHEVRLMPPQYVKAYLKRGKNDAADAAAICEAVGRPSMRFVPIKTEVQQAVLVMHRARDLLVRQRTQLINAFRAHAAEFGVIGAQGRWNVIRLLATIREGQAVPEPARTIVEMLAAQLDAISERIDEIDAQILAWHKANPVSQRLASIPGIGPLIATAIAATVADPAAFRNAREFAAWVGLTPRQKSTGGKQRLGRISRQGDQYIRRLLIIGAQTTLLRSKAARANPWIQSLLARCPRLKVAVALANKTARIAWALMAKGESYRPMALA

SEQ ID NO: 305734 - protein, 365 aa, unidentified
MSSVPSAAELIHLGMDTSVKEIVCAVLRPGEEIPVVDRVPSDEESVRRLIGRFADRRVLSACYEAGPGGYELHRLLTSMGVACDVVAPSLIPKGASEKVKTDKRDSVRLALTHRAGLLTPIRVPSPAEEAVRDLVRARGDLLDDRKRMQQRLNAMLLRHGRIWHGAKWTYAHRVWVDKQVFDEAALAEAFALYRGALDAREAELAAAEAQMAAWAGRDPLAGPVARLGAYRGIAQLTGLTLAAEVVDWRRFASAPAFMGFSGLTPTEYSSGSRTRRGHITKAGPEGVRTALAAAAWACRYRPAIGVTLRRRQEGASPDTLARSWKAQQRLHAKYKKMTARGKPPGVAVVAVARELAGFVWAEMTS

SEQ ID NO: 305735 - protein, 347 aa, unidentified
MRFYTKQHKFYCGIDLHARKMYLCILDNTGEVRLHRNINTDREGFLKAIRPFREDIVVAVECMFTWYWIADLCVQEKIPFVLGHALYMKAIHGGKAKNDKIDSRKIAVLLKGGMMPQAYAYPARMRATRDLLRRRNHLMRKRAELYAHIQNTRSQYNLSDPLGRIAKPENREGVAERFDDPSVRNMIAADFAVIAAYDPILAKMERDIIQSAKHHDPVSHALLNTIPGVGRILSLVILYEIENIKRFPTVQDFASYCRLVKCAKESNGKKYGSGGKKIGNAHLKWAFSEAAVLFLKGNEPGKKYFNRIANKHGKGKALSILAHKMGRAVYFMLKNKKPFDQDTFLGL

SEQ ID NO: 305736 - protein, 356 aa, unidentified
MKYFKNIEKFVTNKAVFCGIDIHLDRWSLCYICDGQVVEKLSLKGEFKYLLSNINQSYVSASSIHFVYEAGFSGFHLYRKLKENGYECTITPPNRVPSVLDKVKTDKRDAEKLARYLAGGLLKSVFVPPPSVEAERHILRMRNSCQTKMTRTKTQIKSLLNLQGIIWPAENGRAWTISHLDWLKTLKFDQNEIRFVLDHYLMEYQFLRQQIATLTKKIRELSKNSAYSANYKRLTACRGIGLITAMTFLLELCDIVRFPSAEKFASYLGLTPSQYSSGTKVRLGHITREGNPHVRRVLVESAWTVIRHDPVLCDKYNRIRSKGTNGKKAIVGVARSLAIRLRRCLLDQVPYAIGVD

SEQ ID NO: 305737 - protein, 372 aa, unidentified
MPQRSRVFVGLDTSKLKISVALAEEGRQGEVRFLGEIDNTPEAVRRLVGKLASRYSEVLFCYEAGPTGYGLQRQIAALGHECDVIAPSLIPKRPGERVKTNRRDALTLARLHRAGELTAIWVPDPGHEAVRELVRAREAAMADLRAKRQHLQSFLLRHGRLFPGRKPWTRAHARWLSELAFEHPAQYLVLREYRQGLEDAQARLERLTQQIAEVLTTWSMAPVVEAYQALRGVALLTAVTFVAEIGDVRRFESPRQLMAYLGLVPCESSTGERVRRGSITKAGNTRVRRVLIEGAWTYRFPARMSRLLQERQANLPQIVRTIAWKAQVRLCARYRRLMAAGKRQTVVTTAIAREMAAFLWAIGHAIEPRSAA

SEQ ID NO: 305738 - protein, 343 aa, unidentified
MDHSAGLDVSVKETSVCIVDDTGRIVREVKVASEPEALLSVLTNPGYHFKRIGLEAGPLSQWLYSALAEAGLPVICVETRHMRAVLKAQINKTDRNDARGMAQMMRVGLYRPVHVKTLRSQKLRMLLTHRKLLQSKAIAIENDLRGTLRNFGLKVGMVGKVKFEARIKELVENLPDLAELVEPLLVVRRVLREQFVIQHRRLLAIVRADEVCRRLMTVPGVGPVVALTYRATVDVPARFRKSKAVGAVFGLTCSKYQSGESERSGRISRCGDEMMRVMLYEAAQSMLLHSKKWSWLKAWAMQIARRRGMKKAIVALARRLAVIMHRIWVDGTEFRWTREAAVA

SEQ ID NO: 305739 - protein, 370 aa, unidentified
MSNATTFVGLDVHARSVKACAFVPETGETIRKSFGYEPGEIASWVSSLPQPARCVYESGVTGFHLCRELNAMGVACVIGAVSKMHKPAADRGRKTDRRDAQFLAVQLALGVVTEVHVPDAECEGARDLARALADARDDAVRAKQRLSKFLLRHGFVYDERNSAGQRRNRWTGDFWAWVGRIDLGDGAAMATLDHYCVRVREADAAKAALEAKVKSLAQQPRWKPTCDALKCLKGIDAVTAASIACEADGFARFATASGFAAWVGLVPSEHSSGESQSRGGITKAGNKHLRKLLVEAAWHYKGASRSPKDLAKGQAVDAATRRHANAGVRRLVDRRRSMDDAGKQSSVANVAVARELACWCWAVGRMAEGA

SEQ ID NO: 305740 - protein, 341 aa, unidentified
MKNLFIGVDFSKEKVDVAILFADGLAETAARVFNEFKTTVSGYRQLVKWVEQNSCSIDSSLWLFCGENTGDYSKGLCNFLYGKGYDMWLENAKSIKDASGLRRLKSDRADASMIAEYAMRNYDKAVMYEPLSESLTQLRELFLYRQMIVRHRCSFQVRRGEKRLTMEKSPVKTMISQSGRHIVSELNKEIEKIDKRIADLIKSDEELTEVFTIVTSVPGIGTQNAVCLMVYTDNFRRFNYDSRKIACYYGLAPFGKDSGTSVHSDPHVHYMANRQIKAMLTQAALAAVNFNPIMARYYMRLVERGKKKQVALNNVKNKLVHLVTAMVRNRQTFTPEYKISA

SEQ ID NO: 305741 - protein, 421 aa, unidentified
MTSILSNTQPTAWVGIDIAKRHNDVLVDRPGHRRRSFRVANQLDDYQRFTQYLSDLPERPVIGFEATGNYHRTLAFFLAEKGFSLRLISSVAAARTREALYNSWDKNDPKDAQVIIHMLKTGLTQHYHDPLIHEINELQELSKTHFQISLHKVRIQHSILTHYLPLYFPEAEKYMKSTRAQWFTHLIERYPCRAAVEKFSQAEFIEDAWSFVGRKVNKTAFLEDFYETGTNTIGLPVSEDSEAIRMFRIVLREHQRLCEVRAEIEKEAESFLGDDVDYIRLKTLPGIGPILSLTILAEAGDLRRFAHHRQFLKYCGFDLASKQSGQFRGRTKLSKRGNRRLRYAFWMAATIAIRMRENSFRDKYARYTQSDPANADLKRKALTAVAAKMARVAHGMIKNETNYRPFHERAVPGGTIPAKGR

SEQ ID NO: 305742 - protein, 343 aa, unidentified
MNSNIKIIGMDIAKNVFALVGLEEKGKIVYKKTVTRNMVLPTFRNLPSTKVAIESCSGSHYWARQLQALGHEVILIAAQHTRAYVTGNKNDYNDAAAIAESGSRASTKTVAINTQAQQDLQILHRARQALMQERTALINRLRAFAGEYGKVFAVGVARFRLGLTDWLQDDNHGLSGSAHSSLTELKEQWDDKETRIANYDQRLQQAAKDDPRAKRLLDIPGVGKLTATAVIAALSDARHFKTGRDFAANLGIVPKEHSSGGKQRLYGITKRGDSYLRTLLIHGARSALRTAGKKTDRLLSWGFKIAERRGVKVAAVALANKMARVIWALLAHGREYQAIGCFK

SEQ ID NO: 305743 - protein, 388 aa, unidentified
MQIAADRPQASTAIRTDLGAIFVSLELSRSTWLITSLSPGGGAKMSKHSVRGCDVAGLLERFAHLREKARARTGQRFPIIVIHEAGLDGFWIHRMLNAEGIESHVVDPASIATSRRRRRAKTDRIDGEALVRALLAYKRGEPRVCSMVKAPTPEEEDRRRLCRERKVLTAERVLHVNRIKGLLFSQGITGYEPLRRDRRERLEQLQTGDGHTLPDHLKGQVRRELDRLELLLDQIKAVEAERDALLAAERAAARTPAAMLLDIKGIGPEFAAILWSEGLFRHFDNRRQVAAYAGLAPTPWQSGSVDREQGVSKAGNPRLRTTLIQLTWLWLRNQPHSALTLWFHERVRRNGGRLRKTTIVAVARKLLVALWKYVTAGVVIEGAVMKPA

SEQ ID NO: 305744 - protein, 339 aa, unidentified
MELCCGMDLHSSNTVIGIIDEKRKHLIDRKLPNDPELIRSFLRPYKPDLKGIVVESTYNWYWLADVLQEEGYQVHLSHPVANEQYNGLKHSNDKHEAFWLAELLSLGILKEGYIYPRQVRSVRDVLRKRAHLVRVRTALIVSLQHMISRNCAVKVKTGDIKRLTADLISPCLEKEEALLLAGKTSKDVIDCLTRQIDKIERWGLKRLCREGVFIQLVTLPGVGDILGMTILLETGPISRFREVGNYASYCRKVSSRWTSNDKVKGRGNVRNGNKYLAWAFSEAAEHARRTNEACRRFYDRKVRQTNTKIAHNALAHKLARAAYSIMKDQVSYKEDKMFS

SEQ ID NO: 305745 - protein, 350 aa, unidentified
MEATTIAIDLAKNVFELAVANEAGRVVDRKRLSRNQLRRYFENYPAAHVVMEACGTAHYWGRWFTERGMRVSLLPPHYVRAYVRRNKTDRADATALLEASKACDIIPVRVKSAEQQALQGVHRVRSAWRVTLTARINCIRGLCREFGIVAPLGARRGFSELVKQLAEESPAIPGVIRVVLLRIVEEIRSIQERIRQLELELATVAEQSPVCQRLQKIPGIGLIGATAFVGSVGDITSFRSPRRFASWLGLTPREFSSGGIRRLGAISKRGDGYLRMLLVHGARAVLYSADCARRAGRPLDALREWALRLRARGGHNRAAVAVANKLARIVWATWYRQRDFEFRPPASIAV

SEQ ID NO: 305746 - protein, 388 aa, unidentified
MQTVADRPEAPTAIRTDLGAIFVSLELSRSTWLITSLSPGGGEKMSKQVVRGGDVAELLERFARLREKARARTGKVFPFVVIQEAGLDGFWIDRALQNEGIESHVVDPASIATSRRRRRAKTDGIDGEVLVRALLAYKRGEPRVCAMIKAPTPEEEDRRRLCRERKVLIVERVRHVNRVKGLLFSQGISGYEPLRRDRRRRLDTLQTGDGRLLPVHLKAQVCRELDRLELLLEQIKAVEAERDVLLAAQQVAAPAPAAMLLDIKGIGPEFAAILWSEGLFRHFDNRRQVASYAGLAPTPWQSGSVDREQGVSKAGNPRLRTTLIQLAWLWLRHQPHSALALWFEERVRRNGGRLKKTTIVALARKLLVALWKYVTAGVVIEGAVMKRT

SEQ ID NO: 305747 - protein, 348 aa, unidentified
MAHFVGLDVSVRETSVCVVDDVGKVILEQKVLSEPDAIIALLTSLGATYGRIGIEAGPLSQWLFNALTAAELPVICVETRHMKALLTAQQINKTDRNDARGIAQMMRVGLFKPVHVKTLVAQEQRMLLTSRKLLQRKLLDVESDLRGTLRNFGLKVGVVSGSRYEARVRELVEGFPGLAAIAEPLLNVRRVMRQQLAVLHKMLLDTVRGDPVCRRLMTAPGVGAVVALTYRATVDQPQRFAHSRAVGAHVGLTPKRYQSGETDYDGGVSKCGDALLRTMLYEAAQVLLTHGSKWSWLKAWGMRVAQRRGIRRAIVAVARRLAVVLHRMWVDGSEFRWSKDSAAAPTVA

SEQ ID NO: 305748 - protein, 407 aa, unidentified
MEVVYRCCCGIDVHKKLTVACLYTDGKRELRQFGTKTGEIKEMAEWLLGAGCEMIAMESTGVYWKPLYNLFEIMGLDAMVVNAADMKSLPGRKTDVKDAEWIGDLLRHGLLKASYIPDREQRELRDLARYRKSLVEERSRELNRLQKLLESANIKLDSVVSEINGKSARKLLDRIVADDMPTAAQAAEMINARMLPKLDAIMQAIDGIATKLQRQLIGKVIEHIDDMTRRIAEMDELVKGYTDEYQAAIALLQEMPGIGQRSAEVVLAEIGLDMNRFPTAGHLASWAGLCPGNNKSAGKRISGKTRKGNTTLKAALTQCAHAAVRCKSSYFSAQYQRVSARRGKNRATIAVAHSMLIAIYHILKHGTPFRDMGATYFDNFNREHKIKACLRRLTALGYPVDTLPQPT

SEQ ID NO: 305749 - protein, 366 aa, unidentified
MLGVDVGKAELYGTWRDPETEAVRWHGAVPNTAVGIRHLLQRAPASPVVVEPTGRYGETLIRTAQAEGRTVLPAPTRKARAFLSAVQSRAKTDRVDSAGLALYGLRGRLRPYILPSDEVDELKQLLAARRGLSQSRTALKQQLDALPRVAATLEPAVTALAQQLEELDRQLAKLSTPPKPPTASKTTAASPSAAVAAAPASTVAAAEPVVPAAPPPSPVLAAARTLRAVPGFGPVTAAALAACLVEQQFTHPDQFVAYLGLDIRVHQSGKRKGQVGLSKHGDAELRRLLYIAAVSAAQSRDTTVATRYAREQAKGLAKIAALNAVARKLAKVAWSLIAHHSTYDPQRVDRQPTKDDAQPPRVDTQA

SEQ ID NO: 305750 - protein, 429 aa, unidentified
MTILQSTPAGFVWVAIDVAKDRHETLIEAPGWRSRKRIRVQNAAEDFRSFAEFLHSLGFPVRIGFEPTSNYHRALAYFLHSEGFELQLISSLALARTREAMHNSWDKNDPKDAQVILHLLKSGLTQHYHDPIVHNLNDLQELSKTHHQVSLEKTRTQHRLLTHYLPLYFPEIARYHSSARSEWLWALLIEFPTPHSMTCLSKADFIRRAWSLVGRKVAKERILTDIYLTAQSSIGLPAEEHSETVAMLRVVLRQLLSLCQLRATIEERAHLLLESNVDYQRLRCIPGIGPITALTVLAEAGDLRRFSHHRQFLKFCGLDLATEQSGQFRGVTRLSKRGNARLRAVFWMAASVAVRMRENSFRAKFERYMRTDSGSADRKRKAYVAVAAKIARVAYALIRSGADYRCFPEVAVPSGRTRSARAVEAMPTS

SEQ ID NO: 305751 - protein, 413 aa, unidentified
MYYVGIDIAKRVHVCAVLDEKNSVVIKPFRFTNDEKGFKKLLVHLERLACKRDDLIIGMEATGSLFENLYRHLKSLVYPVVLLNPYQTSKFREMDTMKRVKNDNIDAVMIAALLKSGRFSKGYVSDEQLHSLRELYRHKESLANQIKALKRNTQTILTVVFPELETVIKDPFSISGMALLEKYPTAKHYEYASVDRILKVFRGIQGNTFTQEKAKQLLDCAKHSIYSGVAKEARAMHIRMNIKQLRMLQEMLDETLEAMHSLFKDDAPLKAEEKEVVSDIIDNLRTIPGVSDKTILALLAECGNLDRFSSAKALVGYLGLYPTLDESGERSRGGKLAKRGAKLAKRAIYLAAIAAIKHNEQMHTIYLKYRSRGKAKKEALIIVARKLIAIIYAIYTRNEPYDPVRVFTAKPNA

SEQ ID NO: 305752 - protein, 371 aa, unidentified
MDESSKTLYVGLDVHKDSIAVAYAPEDRGAEVVSLGSIGTRQCDIDALIRKLQSKGATLVFVYEAGPCGYWLYRYLTRKGLSCHVVAPSLIPRKPGDRVKTDRRDAVMLARLMRSGDLTSIYVPGIEDEAIRDLSRGREDAMRDLKATKYRLKAFLLRQDIRYEGRANWNAAHLRWLAEVVCPTRAQQIVFQEYVRGVTEQHERLQRLEGELHAEVKGWRLYPVVEAIQALRGVELTGAVILMAELGDITRFDTPRQLMSYLGLTPSEYSSGERRRQGGITKAGNTHARRALVEGAWAYRYPAKVSRHLQLRLETLPAEVQAIGWKAQVRLCKRYRQLSARGKHVNQIVVAIAREMAAFAWAIARTVPRAL

SEQ ID NO: 305753 - protein, 453 aa, unidentified
MSRKQRPRHDQIPAELPNVHLNAAGIDIGSEFHFVAVPANRDERPVRRFAAFTADLEAMAKWLRECGIETVVMESTGVYWIPLFELLESQGFEVLLVDPRQLKSVPGRKTDVVDCQWLQQLHTFGLLSGAFRPAETITVLRSFLRQRAMLIDYAGQHIQHIQKALQQMNIKLEKVLSDVTGVTGLRILDAILSGERDPEKLAKLRDKRCKNDVPTIAKALQGNWREEHLFALRQALALYRTYHAQIIECDAQIVLHLNSMSDRSNGTTLPDQRRRTGRHRNQPMFDVRTALHRVTGIDLTRIDGIDEHTALKLISEIGTDMTRWRTVKHFTSWMGLCPGNKRSGGKNLSGKTKPCANRAAKVLRLAAYGLHHSQSALGAYLRRMKARLGPPKAITATAHKIARMVYFALKNGMEYVDKGAQWYEDQFRARLLRSLESRALKLGYVLVPQVSGT

SEQ ID NO: 305754 - protein, 343 aa, unidentified
MQIARIGLDLAKYVFEIHGVDAHGKTVLRKTLRRHAVSTFFANLPPCLVGMEASNGAHFWAKTLLDLGHDVRLISPQFVTPYVKSNKNDRNDAEAICEAVGRPNMRFVPVKSAEQLAVQAVHRIRTRLVADRVRLVNQVRGLLGEHGIVVAKDIGNLRRALAGLGDNEDRALNPMVRALMGELREELTELDARIVGYDRKIRELYRNSEICQRLGKVEGIGPVTATALIAAVGDRSSFKNGRQFAAWLGLVPKQRSSGGRARLFGISKRGDRYLRTLLIHGARAALGRVRDKQDPRSLWLGKMRQRRHPNVVAVALANKNARIAWSLLTSDNVYDASLSVGAA

SEQ ID NO: 305755 - protein, 341 aa, unidentified
MITIGIDPHKSSHTAVALDSTGRVVGESRLPATKTTLERLLCRAERWPDRIWAVEGASGLGHLLAQRLVASGETVFDVPATLAARVRLLARGHGRKTDGIDAASVAQSQPDLRRVGPEDQSVVLRLLSDRRDELTGERRRAVNRLHRILRDLLAGGAPTELSAEAAARPLGRLRPRSAVDLERKAMARALIADVRRIDRSLVENRARCATAVAASGTTLTSVFGISEVLAAKILGHVGDVGRFASADRFASYSGTAPNEVSSGEVVRHRLSRSGNRSLDDALHIAARVQTMHAGPGRDHYSRKVREGKSSREALRSLKRQLAKVVYRQLVADHAHRRALAG

SEQ ID NO: 305756 - protein, 394 aa, unidentified
MKLIGIDIGKNKHFFCVMDQQTGEIISQPVSFSNDKEGFDFLVQKIKSYPKDSILIGMEDTGHYHFALLKYLLDLQYTVALINPKTTDFNRKMQGGITKNDKLDTINICDVLDTPERKKQYRITKVNSFDLYEQKQLTRHHHNLKEEENVYKNRLQKCIDIVFPEFNKLFNSKYGIVYMNILKMFGSAENIANTDIRTIRKCFEIEGRGNRISLTPERLKECARSSIGISSSAEVIQIKHLTAQIELIEEQLTEIDKKIEEFSIQNNSPILSIPGISHFSGTSILAELGDISNYSKTSQIIKFAGVAPLHYESSQFNAQHTAITKKGSKYLRKTLYQIILPVIRHNPVFNKYYQLKISQGKGHRCAQGHCVRKLLRIIYHLLKTNQQFDPQLLR

SEQ ID NO: 305757 - protein, 404 aa, unidentified
MAKYHVGVDIGKQTHKACIRNLGQDSYSGVFSIDVSRQGFEKFTRTLEKHSINKVDFLVGIEATGNYGSTLVYFLISQGYKVVEINPYRADNYRKAQGKKAKTDRIDARSLAGFLSMEGHKALSIPDPIIDNLRELTRFRADLVKDRGTLLNQLHNVLTTLFPEFAGIFSKLDSATSLAILTAFPGPEYIQIAGEDKVSEVLRCSSRGRFGKDLALSLISAAQNSIGIMQRESALAVKLSILGERLISLKLAVERVEKEINELFRKLPYNPEDFPVGDVTSIATIISEVEDINRFSTIKQFLSHFGWCPKSCQTGTYNQEHPRMSHAGNKYVRRIIWMLSIVAIKNVTCYRDYFLRRVAEGKAKMDIIVAIGRKLLSVFYAILKTGIPFNPNLEVNGRYALARH

SEQ ID NO: 305758 - protein, 349 aa, unidentified
MIWIGVDAHKRVHEAVAISESGVIGTRTIPNTPAAWAALLSWAAQWPERIWAVEGAWYLGRGLAQHLAERGERVHEVNGRWTAARRRGMRRPGKSDRLDAHSVAQLLREEADTLPRVYAEDDAQASVQLWSRLQAELTKDMTRVVNRLHDLLLVADAEYQAKLPALTTQQGIAATLAYTAPGEGALARERERAIRATAEQLRLLDEQDRDLRRKLERASKARFSPLRRIEGIGALIACGLVAELGRPRPGFGEEQLASLGGLSPLEASSAGAVRHRLNRLGNRRVNMFFHQIVLTQARIHTPAQAYLARRKAEGRTAREARRALKRLLVRRVFRAWSECFTTSIEAVAA

SEQ ID NO: 305759 - protein, 270 aa, unidentified
MTITYPIAGIDIGKDILDISLLHANGSFEAFSFANEKASRKKLARRLKAKGVRLVVLEATGGYELPVMAALAEEGIAFARVNPARVRAFAKSMGQLAKTDRLDAKCLALYGERVRPKPTPMPSENESRLNALTLRRRQLVGMRQKERNRAHRTGEPDIAHSIERAIAFLSEEIDAIDAAIETLIASAPEMAERRDLIDSVPGIAANTANVLLAGLPEIGRMGTRKLRKLVGVAPLNDDSAERRGERGSPGLAGGLTDRLGLGPLRRLHLG

SEQ ID NO: 305760 - protein, 321 aa, unidentified
MRYIGIDVSKATFMVAYPQQNGGYKTREFKNTAKGVHEFIHTLETDDHCVMEATGNYSYLLLYLLNHANITTSMENALKVKNFARTMLSVTKTDKADAQLLSLYGERMRPTPFKLPSESILLLKQKRAAIRQFQKQLHATNNLKKSLEALPKKDPATFKSIDKITETLEKQIRKMQEEMIVLTQAEFNQQMDKLTSIKGIGVSLAAAIIITTGGFTYFDNAKQVSRYLGICPTYQQSGTSINVKGHINRNGDSALRSQLYVASWCVSQHNAECNKLYTRLKEKGKPGKLIMIAVANKVIRQCFAVVKKDTYYIDGFVSEKP

SEQ ID NO: 305761 - protein, 406 aa, unidentified
MEGPIITVDVSKGSCHYQPFIENGHPMRKPKQLSTTIDGFQKLGQTIKDLEAKTEREDIPVIFEATGVYHRPLQKYLEDHKIRYYIISPLLSATYRKTDLHSNKTDALDCAHIAKAYYCEKELRQYQAQPQEYKRLYQLSRIYESELVHLRKRKVSLRSMLDIIYPRIDKTFKGNQNLYDPIPMEILKRYPHPSLLLSHREDTIVKTVGHRTGHLKGYTERIVHKIYEKAKECYSGCDIDDIEVVKLPSLIENVQEQKKKCDSLLKEMIEIARTCPYFAPIVSIVGIGENLAARIIAELRDVNRFDNRAAIVAYAGLNPKIQQSGDIDGLHLKISKKGNKHLRCLLYLGAQCNYRLRKEDPLYEFTKKKRQQTQCPLSSKAAYTASAHKLLVIIYSLCKNGTLYHS

SEQ ID NO: 305762 - protein, 335 aa, unidentified
MKNIKVLGIDLAKNVFQLHGTDEKGKRILSKRLSRGKLVEFISNLKPCLIGIEACTGAHYWARLFTHYGHTAKIMAPQFVKPYITSNKNDRNDAKGIAEAVTRPNMKFVPIKKIEQQEALLLHRARELAVKQRTAQANQIRGLLAEFGVIISQGIAQMRKLSSVLEANTDKLKSRSQEIFLELYTQFQIYDAQVKKYQKQIEHEVNQNSTCKEVMKIGGVGPITASAIVATIGDAKAFKNGREVSAWLGLVPKQHSSGNKISLGGISKRGDRYVRKLLVHGARAEVKYCEKKTDKRSKWIADKKYRCGFNKAAVAVANKNARIIWAIMATGECYR

SEQ ID NO: 305763 - protein, 327 aa, unidentified
MKVVFPTCCGVDVHKTFLVATIITTPADSLQPNYQKKRFSTFNSDLNRCADWLLEHNCLDVCMESTGKYWVPVFNILEKRGIRVVIANPKWVKAVKGNKDDTKDSKWIGDLFRIGLVKSSFIPDLNIRILREFTRYRYKLVSMKSSEKNRFQNAFTVCNVALDSVVSDMFGKSATAITDYLTSDESFDAEHCVSLLQRSLKKKAEQVLESIEGFSIADEQKARIKIIREHHDFIEEMIATVDTRVNEMVAKYEGNINLLCTIPGIDRRSAITIISEIGTDMGQFGSSKRLCCWAGLTPGNNESAGKKKSVRISRAGVYLTTLYLTYI

SEQ ID NO: 305764 - protein, 328 aa, unidentified
MRKSIGIDVSKEKLDLCWLRDRQTRKKKSKVFKNQRASFAQLVTWVLSNTGAEPQDIQITLEATGVYHEALVYYLHEQGFTIFMANPGKAKKYAESIGLTHKTDKSDAAMLSYYGEEQPQDIRLWQPEAPEVRELKSLMRRLSALEKDKQREHNRLESCEISDTSDRVRQSLHEMITAIEVEIDKLKQNIDEHIDRHPPLKKNRKLLESIKGIGEVMSRELTYLFAAKRFKTAKQVAAYMGLIPKMKESGKIKGYTALSKTGPAHLRAKLYMAAVTAKQHNPDIRRQYERLLAAGKTKMSALGAAMRKLVQVCFGVVKNQSEFQVQTA

SEQ ID NO: 305765 - protein, 316 aa, unidentified
MTETPTYAGIDVAKDRLGVVLRPSGEYVEATNDERGIRSVVRRLRKENVALAVLEATGGLEQPAAAALALAGVPVAIVNPRQVRDFAKATGKLAKTDRIDAAVLAHFAEAVRPEPRPLADEHARELSAVVLRRRQILAMTTAEANRARTAPKVVRKRIEAHLRWLRKELARVDGELERVVKESLVWKERAALLMSVPGVGPTLSATLLAELPELEHLDRRRLAALVGVAPLNRDSGTLHGIRTVWGGRSGVRTTLYMATLCATRHNPAICEFYGRLVASGKPKKVALTACMRKLLTILAAILRNRTPWQPRLLQAP

SEQ ID NO: 305766 - protein, 359 aa, unidentified
MSSIPVYVGLDYHQDSVQVCVLDRTGNQLCNRGVENKAKTIEQVIRRYGTPRRIAIEACCGAADLAEELATQRKLPMRLAHPGYVNRMKRSPDKTDFGDGQLLADLVRVNYLPGVWLAPRSTRELRRLMRHRAQLVRRRKDTKLRVRGLLRENRLKCPGANAWTKAWHAWLLNQAELSESDRWIMEDHVAELRSLSVRIAAVEERLRTRTQDDPVVAQLLAQQGVGLVTAVTLRAEIGRFDRFDTGKQLSRFCGVTPRNASSGSRQADAGLIKAGNPELRTVLIELAHRLIRASAGRWGKLAAGMLARGKPKNVVVAAIANRWVRWLHHELRREEGARPTSAQAQQKGAAPSIITVAST

SEQ ID NO: 305767 - protein, 375 aa, unidentified
MSDHSEAFVGLDSSKLRNAVAIAEGGRGSEVRFLGEFENSAAATTKLVKKLAAKYQRLTFCYEAGPTGYGLYRLIKNLGHECIVVAPSLIPKKPGDRVKTNRRDALNLAKLLRAGELTAVWVPDRGHEAMRDLTRARETAMMDLRSKRQQISAFLLRQGLHYSERKRTWTKTHMNWLASQKLEYAEQRLVFEEMMLAMRQAQERLERLEQAIRVAVPDWSLAAVVTALMAMRGIDLISAATFLAEIGDLSRFQHPSELMGYLGLVPSEASTGDKIKRGPITKAGNRRARRMLVECAWSYQHPPRVGQEKQEKVAAAPPAVREIAWKAQCRLHGRYRALVRRGKLKTVAVTALARELAGFIWAVSRAITIARAVAK

SEQ ID NO: 305768 - protein, 348 aa, unidentified
MLIIGCDYHPGFQQIAFVDTETGELKERRLAHREETEQFYTGLKGQTVRVGMEASGHSRWFECLLGELQFELWIGNAAEIRRKRVRKQKTDRQDAQLLLRLMLEDRFPRIWVPDSENRDLRQLLWHRHRLVQMRTRVMNQLHVVALNEGLRRKKALWRPAGRKELESFVLAPWASRRRQDLLDLLDQLTPKIQDLTSRLEEEVEKRPVTRRLMTHPGVGPLTALAYELVIGTPDRFHCGKQLASYVGLVPAEESSGDRRRLGHISKQGNALLRFLLVEAAQVTVRTQPQWRSKFFHLAMRRGRKIAKVAMARKLAVHLYWMWRKRWDYGQLQKLGSHAGEPGNLDGVQ

SEQ ID NO: 305769 - protein, 349 aa, unidentified
MSVDPAYKVVRGGALAKEAKWKDRIVIDGLLGIDVSKDTLDASMSSCNKVRAKSFANSPDGWRHLLDWLISQKIRRVHACLESTGRYSLGIACKLNEAGHVVSIVNPAQIRDFARTKLGRNKTDGVDASHIREYCELFKPSPWAPPSHAHRQLGELQTIRAGIVAGLTEWKNRKNSGMVDAVAQSLADATISHFTSQLGAVEKAIAQTIDNDSDLRRKRDLLLSISGVGETLASAVLAELPGPDVLRSSAEVVAYAGLNPRQHQSGTSIDRPTRISKIGNVVLRTALYMPAMSAMRYNPAIVALVTRLKARGRLKPKQIVVAAMRKLLVLCFGVLKTGKPFDPALAMGC

SEQ ID NO: 305770 - protein, 357 aa, unidentified
MQVAEAVVVIGVDAHKKTHTFVAADGVGRELASTTLAATADGHRAAVAWAARWPQRRWALEDCRHLTRRLESDLLRAGERVQRVPTHLMAGARRSARQRGKSDPIDALAVARAAWREPNLPVAQLDGPSRQVRLLVDHREDLVSERTRLQSRIRWHLHEISPELDIPLRGLRSQHIVERVGDHLAQVDGLIAAIAREQLERIRQLNQRINELERDIKQLVSGLAPTLLAIPGCGALTAAKIIGETAGAKRFRSKGAYARWNGTAPQPAWTGNTTRFRLSRGGNRQVNAALHRIAITQARTSQLGRGYIDKRLKHGNTKTEALRLLRRRLSDVVYRTLLHDETTITTPTQTTTTTTTP

SEQ ID NO: 305771 - protein, 343 aa, unidentified
MRKYAALDVSMEQTAICVVDESGKKIIEGKVQTDPDTVTTWLAEKAGSLEKVGMETGPLAVWLWNELRARGLSIVCLDARHASAALAMMPNKTDRHDAAGLAQIVRTGWYKEVRIKSHAAYVVRALLSARDTLVGIRGKIENEIRGLLKTFGVMFGRKVGGFTRRAEEIVAGELAASPEIKRIIEALLEARRAILDRIKVLDSRVRSFAKANATARLFMTAPGVGALTALSVASAYDDPARFSRSSSAGAYLGLTPRRYESGEISRNGRISKRGSKLTRKHLFEAANALLTRVGKFSSLKAWGLRLAKIAGFKKAKVAVARKLAVILHAMWKARTPFRWSVAV

SEQ ID NO: 305772 - protein, 452 aa, unidentified
MAKRSKKRCEELPILHPHAAGIDVGASELFVAVSADRDPQPVRSFPTFTRDLNALADWLQQCGIRSVAMESTSVYWIPVYQILESRGLEVCLVNAQHVKNVPGRKTDVSDCQWLQYLHSVGLLRASFRPPGFICAIRSLWRHRSSLIQMAAEHVLHMQKALDQMNLQVHRVLSDITGISGLRILDAILAGERDPVTLARLCHGGVKSSEDTIAKSLEGDYRPEHLFALRQSLAAFHYYQELVVEVDQEIQRQLGSLGTAATAEPTVPKRTKASPYQRGRYEPKAFDLRSELYRIFGVDLTNVPGISAITAQTILSEIGTDVSRFRNACAFASWLGLCPENKISGGKVLYTKSRRVRSRLATALRMAANSLHHAKDYLGEFFRRITRKLGKPQAITATVHKLARIVYHLLSTKEAYDETVFHRCDEEVLRRAQFRLRRQAAQLGFQVIPLQNG

SEQ ID NO: 305773 - protein, 339 aa, unidentified
MHVTTIGLDLAKNVFQIHGICEDGEVAFNRALRRAQVLTFFESLEPCLVGIEACGTSHHWAREISKLGHKVKLIPPVYVKPYVKRGKSDAVDAAAICEAVTRPTMRFVEVKTPEQQAILAVHRTRDLIIRQRTQTINMLRAQLAEFGIVLAKGIYHALQFAKQCLNGEQPDLPEVAGDVIFELCDQLRFLHSKILRCTRQMNKIARCEKRVALLRTIPGVGPITASAIVATVGSGKQFNNGREFAAWLGLTPLNRSSGGKERLGHISKMGDQYIRRLLVLGMTSRIRSIRTEPEKFDPWFADILERKPSRVAAVAMANKTARIMWAVLTRNEPYKVRSI

SEQ ID NO: 305774 - protein, 346 aa, unidentified
MAIVGGLDIHRRQITYDWIDTTTGETRRGQLSPATRVELRGWLAQFRGQQASFALEATTGWRFVAEELERAGFRAHLAEPADTRALRGPKRRAKTDRTDARHLRELLRAGTLPESWPPPVHIADARTQVRLRRALVGGHTGWQQRIHAILFHHGLPDRSGLLTADGRAWLTRVELPPVARQTVDLALRMIDHIDTELDTLDTELARIARAQPGCQALMGRYGIGRLTAVAIWAEFGDVRRFANSRQAVRFTGLDITISESDGKRARGHLARQGSPVLRWALHEAAMCAARPTSPDHAYYLQVKQRLGGKRAALSVARKLAREAYHTLYELGDQALAPVPAELPTAA

SEQ ID NO: 305775 - protein, 382 aa, unidentified
MITMARPSESTAPTGGLLLAFELGQRVWKLGFTVGMGQRARIRQIPAGAVSALMTEIERAKQRFGLSSDAPVTSCYEAGRDGFWLHRYLVAHGITNFVVDSSSIEVNRRARRAKTDGLDLAGLLSLLARYVLGDRRAWRVVRVPTVGEEDARHLPRTLEALTQDRTRLVNRLKSLLTTQGVSLPIDAKFLQRLEAAHLWDGAPMPPGLQERLTCTWTQLQAVDGHVRDLKARRLNRPELLTPATSRALTQLLTMRAIGPTGASVLATEIFGWRRIRNRRELGALVGLVPAPYQSGETDYDQGITRAGNAHVRRVIVQLAWGWIRYQPASTLTHWYQQRFGAGGKRLRKIGIVALARKLLIALWRYLETGVVPAGAQLKPMEV

SEQ ID NO: 305776 - protein, 349 aa, unidentified
MASLPAVVCQVTVGVDSHKDVHVAAAVDQVGRVLGTTWVPTTTQGSAQLLRWATRLGQVQRFGIEGTGSFAAGLSRWLQQQGYQVVEVNRPNRQTRRRRGKSDPVDAEAAARAVLAGEATTTPKAANGTVEMLRVLRVARRSAIKARGQAANQLHSLLVTAPDPLRHQLRGLPLARLVQVAAAVRPGPLTDPQAATKFTLRELARRYQFLTAELERLDAQLAALAPKAAPRLLARRGVGAQVAGALLVVAGDNPGRLRSEAAFSMLCGSSPLEASSGKTVRHRLNRGGDREANNALWTIAMTRLSCDERTQRYLARRTAEGKSKREIIRCLKRYIAREIYRDITATVGS

SEQ ID NO: 305777 - protein, 413 aa, unidentified
MELVVERCAGVDIGKDEVVACVRGPGPGGRGRSKETRTFRSFTAELEAMAEWFAAQGVTEVVMEATGSYWKPVWYVLEERGFELKLVNARHVKILPGRKTDVADAEWLAELLEHGLLRGSFVPPPAIRQLRDLTRYRKRLVQAHTAECQRIHKTLEDAGIKLDSVASDVLGVSGRAMLGALIAGERDPQVLAELAKGALRKKLPELRHALRGRFGAHHALLIGLCLDHITHLEAAVARLDTEIDTVIAPFAEARDRLDTITGVGKRAAECIVAEIGADMTRFPSAAHLASWAGMAPGNNVTGGKRRSGRTTKGDVWLRDILTECAWAAARTRNTYLGAQFWRLARRIGKKRAAIAVGHSILVISWHLLHENRDYDDLGGDYFTRRGDHNRHQQHLVRQLMDLGYRVTLERTAA

SEQ ID NO: 305778 - protein, 451 aa, unidentified
MRSYRSYQKKRGKAAEKTIIGIDPGKSRHQAVIIDADGIPEGKTFSFAVNYKGYYEKLWNEINKQITSYTSSDLLFAVEASCNLWQTISNYLRSAGYAVVLVSPMCTKQSRVMLNNDFSKTDPKDALLIALNAQRGYYIEMRNYSERSNDMHTLSIAYNKLRKDHSSYRGRLRAAIELIFPEFLEVITLGTKTSFYLLEKYLFREEYLNMNIEVESLQIGNISRRQYGIKHLHKLQELAKHTIGIPSNNELYDRTIVLTWLEGMKEIGSRMKVILAQLIKLASSMKEFSILTSLMGISAETASLFLAEIRDISAFDNYKEIEKYAGYNLRLTQSGKHIGSRRISHLGNCRLRWVLYRMTEETMKYIPEVRIKYLKRQLKKQIYRKNLVSCVPQLLKLIFSLVKENRYYEYYEDRVTEMEKLNIQYQVVKAERAAKHRKHRSTIKEELRKTA

SEQ ID NO: 305779 - protein, 338 aa, unidentified
MTCIGFDHHKKWTQAAAVDDQGKIIREMRVLNDNSSLKGFLKGLPQPLKGVVEAGPTWGWIYDTLTELGVKMIVANPSAVRAIAAAKIKTDKIDARMLASLLRVGLIPEVYVPTEEVRSQKMLWRERIWLVRMHVRLKNRIHRLLNHYHLEVPEFSDLFGAAGRRFLEELKLPEPGNRILNAQLKLLQSYRLQIEEVQRWAVKATQGHPNRAYLESLPGFGKVFAPIVALEIDDPKRFASPGKLASYCGLVPSLYSSGGKSWQGGIGKEGNHWLKWAFIEAAWAAIRSSAYFRVVYQRLRQRKTAQVSIIACARRLCEIAYHLLKERRCYEERPFRCA

SEQ ID NO: 305780 - protein, 355 aa, unidentified
MQTQVTKKIDFSGKNLYIGLDVHKKSWHVTILCQQMSLKSFSQPPTPEALYLFLNSNYPGANFYSAYEAGFCGYSHHRELNKLGIHNIVINPADVPKSNKDSHQKNDKSDSRLIAEALRGDLLKEIYVFDTDSEEFRGMFRARLALAKDIRRTKVRIKGFLLYRNIEIPASVDNPNSLAYSNWLKQLEFEDKKAKIQLSLLLDRLLFLKEQKRQFEQQLKDTARYRDKELFNLLQTIPGIGPITALGIMAEIGNIKRFKNIKNFASYVGLIPRIKQSGEKEQTGNITYRHNKYLRPLLVEAAWQAVRSDPAMLQYYQDSCLKGNAKKAIIKVARKLLSKIMFVMRNRIKYERGIL

SEQ ID NO: 305781 - protein, 371 aa, unidentified
MRADKKRRGKGCDMNSIVAGIDLGDRESLATVLSPVGDVTDRFSFPMNEEGYAFFSSRVPKDARVAFESTIMAYPIMRALKMHGYGDVTVAHPKTLAWIVKSKKKNDKVDSLKIAKLHMAGMLPESHLLDRDEQIARDLLVQRVKLGVEIGRLKSSVIGYLKREGLHHVLPKTRDNFSAARRRAIHALRFDDERDLVLRTMMDRLSFLEDQCIPLENCIKENAKENDNAKLLMSVPGVDYYLASLLSSFIGDVNRFPSDDHLASFFGIVPTSRDSADVKRRGRMTKDGSSIARWTLSIMVDTVMRYNKPIRDHYLSVKKRTGSGKLAHVSTMRKLTRMLYHMLKTKQHWKWENPHLTERKMTKLEDGGDVS

SEQ ID NO: 305782 - protein, 426 aa, unidentified
MNTQNSDPLQTTEFAAYVGLDWGDQKHAFGWCTGSDKTPAQTGSLDNSPEVLHTWLQELAQRFVGRPVALAVETSRGPLIHLFGAYPWLTVYPIHPATSARYRAAFKPSGAKDDLPDALLLLELVRDHRHKLRPLQIPDAATRKLAALVELRRDLVDRRTQVLLQLMALLKSYFPQALELVGHDLTSGLALAFLRRWPDPVALKAARPSTLKSFYYQHAVRSETLVTHRLALVQQARALTTDEAVLMPARLHLAALLEQLRTLAKHIELVERQSQALFKEHSEAYLFRELPGAGKALQPRLLVAFGEDRALYPDPGSLQKYGGLAPVIEKSGRQAWVHWRWHASRFLRQTFVEWAGQTVVYSTWAREYYQHMKAKGKSHHVILRALAFKWIRILWKCWQTRTAYDEARYLKQLLARKSPHAVKISS

SEQ ID NO: 305783 - protein, 478 aa, unidentified
MKKHTMINLDERKVPHGLKPAKGADARRTSNGLDAIRPDTAGIDVGSTEMWVAVPEGLGCPSVRRFGAFTEDLRAMSAWLKGIGIKHIAMESTGVYWIPPFEMLQSDGFEVVLVNARHVKCVPGRPKTDKHDSQWLRRLHACGLLNPSFRPSEKVCRLRAVKRCGENFVRDAATQVQRMQKSLHQMNIQLDKVISDITGATGRRIIEAVIAGERDLGRLADKRDPQVKASRETIMKALEGNYRAEHVFSLRLAHEAYQFNTAKALECDREAASILEDMANKLAASTAIDEQPLPERPVSSLSENKRQAPPDTATKAWLRQLLGVDLTAVPGIGVDTALRLVAELGTDFSKWPTASHFASYLGLCPDLRISNSLVKGHKTRKVPTRVPRALRLAAQSLHHSGTALGAFLRRMKSKLGGRKAVTAAAHKLAVIIYKMVTTGKEFVELGGDYYDRLHRSRAVKSLRRRAQAMGFELVEKAA

SEQ ID NO: 305784 - protein, 418 aa, unidentified
MKVVYPICCGVDVHKTFLVATIITSQGITPHYSKKRFSTFNNSILQFKQWLIDNDCFDVCMESTGKYWVPIYNLLEDTIRITVANPKWVKAVKGNKDDTKNSKWIGDLFRLGLVPGSYIPAKPIRILREYTRYRSKLVSCKSSEKNRFQNAFTVCNVALDAVVSDMFGKSASSITDYLISSDSFDPQYCSSLLKRSLKKKADTVVESIKGYQMTKEQKERIVMVRSHLEFVQQSIVKLDEKLDKIVAPYESAITLLCTIPGVDRTSAITIISEIGTDMSQFANSKRLCCWAGLTPGNNESAGKKKSVRITRAGVYLKPALVQVAHAAVKSNLSPYYRIKYERLCKRRGKKRAIIAIARMILTAIYYMFVTGEVFNPSDLYKIDMPQEMVQKQKDKAVKQAIKLLISQGIIKDTDISVA

SEQ ID NO: 305785 - protein, 423 aa, unidentified
MMKLKYSICCGLDVHKNVIVATIVTTNSQGISEYLQKSFSTINSDIQKFHDWLIENNCYHVCMESTGKYWIPIFNYLENDIEVCLTHPKYVKAIKGKKTDKKDSKWIADLYKFDLVRCSFIPPKDFRQLRELARYRFKLVCMKSSEKNRIQNCMTVSNIGIASILSDPFGKTATEIMSYLLEHTSESMDEKAVRKLIKKGAKAKSDEIIEAIKGYNIETDQAKKLELARAHLDYLDDMITQTEVELYVRIKPYYEFVEFVSSMPGMTELSSTIILAEIGINMDIFDDAKHLCSWCGLSPANNESAGKKKSVRIAKAGAYLKPMMVQCALAAIKNKKEPYFAIKYGRIKKRRGHKKAIIAIARMMMVCIYHMVSEKKPFSPTDYGELMDPQNHVERVVLNENNVFAYLESLGYDSSQLVKRNDY

SEQ ID NO: 305786 - protein, 500 aa, unidentified
MKTKGSKAKIRAGRKSISVPCSEPAQELRILRPDAAGIDCGAQEHYVAVPPDRASAGQPTVRRFSAFTEGLDAVVDWLKDCRVTTVAMESTGVYWIPLHQKLETAGIEVYLVNARHVRHVPGRKTDVQDSQWLRQLHRFGLLNASFRPEDIICRLRSLHRHRDNLVSSSASEIQHMQKALQQMNLHLHHVVSDITGLTGLRIIDAVLAGQRDPEQLVRLRDRRVYKSTPQEMQAALVGDYRGEHLFVLSQSLQAYRFYQARIEECDREMEPLLEKLAQQIEATSANLMLDALEPSGSKGESNRPEQLPEPKPTSGPKSKRKRKPRANEPKIQLAGLLERICGIDLTQVVGLNVLNVLLIVSEIGVDMSKWRSAKAFCSWLGLCPGNKISGGKLLDSRTRQVVNRVADAFRLAAQSAGRTQTCLGIFYRRKQAHLGAPKATTATARKLACLIYHLLKNKQPYQEPDSASYQLRLQKSALSKLQRQAIALGYTLLPTAPVPA

SEQ ID NO: 305787 - protein, 341 aa, unidentified
MEKATIIGIDLAKRVFQIHAASKDGRPVLRKKVSRAQLLGFLAKQPPAIVAMEACATAHEWGRAISGLGHDVRLVPPIYVKPFVRRQKNDAADAEAIAEAASRPTMRFVALKTEEQQARSMIFRTRDLLVRQRTQLVNALRGHLAEHGIVGAHGLAKVKVLATAMQDTGSLHPLMRDLGQRYLDHIARLDVEIAELDQRLRRASKDEETAKRLQSMPGMGPITAAAIEAFAPPMATFKRGRDFAAWLGLVPRQHTTGGKPKLGRTSKMGQRDIRRLLIIGAMSVVRWAVRKGAAKGSWLARMLAKKPRLVVAIALANKMARSAWAMLSKGEDYRGSALAPA

SEQ ID NO: 305788 - protein, 354 aa, unidentified
MNIKYIGMDVHKETISIAVMNGDGKLVMESIIETKASSILQCIQGLHGDLHVTFEEGTWAAWLYDLLKPHVTELIVCDPRKNALLKEGNKSDKIDARKLADLLRGGYLRSVYHGENGLRTLKELARSYLTISKDLTRVMNRVKALYRSWGILCGGQQVYAPRHRAEWLNKIGEAGVRRRAEFFYQQLDALRALRQAVRRDLLAESRKHSATKLLRQIPSIGPIRAALLIALIQTPHRFRTKRQLWTYSGLAIETRDSAQYRYVAGQLQRSKKPQQLRGLNENHNHDMKAIFKSAATMASSREGAFQAFYQGLLRKGMEPAMARLTLARKIAAITLILWKKGAHFDAEQLKPQAA

SEQ ID NO: 305789 - protein, 429 aa, unidentified
MSYRIAGIDVHKKMLAVVVSDVEVDGEFRFERRMFGSNPEQLRTLAAWLLEQEVEEVVMESTAQYWKPVWETLERYWKPIREKREGASRKSGTLHLALAQSNRGRRGRKRDFPDAERLVKRLVARELTLSFVPDAEQRLWRTVTRRKYQLTRDRVRLQNQLESLLEEAHIKLSSLVSDMLGASAQRMLKALADGETNPAALAALADRKLRATPEQLCDALGACTDLKPVYRRLLKMALEQLQFLEQQIGQLDQEMASLLSPHQDAVERLAEVPGLGVDSAQQIIAEVGPTAATFPSEKCLSSWVGACPGDDESAGVNYSHRSPKGNRHMRRVLNQCANAAARTKGSIFEIVYRRSVPRLGHNQAIGAIAHRQCRLIWLILHQGVHYEERGPAVTKQSKQNRTARMIRQLRSLGYRIEQTNPQPSQAQAQ

SEQ ID NO: 305790 - protein, 404 aa, unidentified
MSPSKKRYLHFCGIDVGKDKHVAAVVDIEGNFLVHTQAIPHSRPGFERLRDRLNGLGRPADTLVGLEATGHYWQSLHEFLTAHGYAVVVLNPIQTAREGKKAIRKCKTDKRDARSIAVLIKNGTRPPTLIPDDLAMTCRQLTRTRHALVRKMTRAKLQLWAKLHPVWPEYEPLFSDPFGTTGRTLLARYPVPADVRRAEPAELMELIRSASRGKYGPDRREKIRHAAETSIGVTKGLDGFRAAIRSGLDELAALRKLRDALDERILPYAGEVPSCLLTLPGISPRLAVSLYGELHPVTHFKTPETIVAFAGFDTSVFQTGNYEAPHRTISKRGSPYLRQTIWRMAARAVQSEGDPRTFYLRKRKQGLHHLAAVTATALRLCHVIWRIWTDRRDYRPEGRPEKTS

SEQ ID NO: 305791 - protein, 314 aa, unidentified
MTSNAEFVGVDVSKATLDVASRTSNEYKRFRNDPTGIQELIDWLKILQPELIVLEATGGLELPFVAELAYAKIPVAVVNPRRIREFARSIGQLAKTDKLDAKVIAHFGEATHPEARKLPTNDEEKLTALITRRRQIIEMLTAEKNRIHSARFSMKERIETHLSWLESELRDLDNEITKFIHQSPIWKEKDKLLRSVSGVGPVTSATILAMLPELGTLNRQKIAALVGVAPVNKDSGRRQKKRRVYGGRANVRSVLYMAALSASKHNPRIKAFYDRLIRMGKEKKVALTACMRKLLVLLNAIIRVNQNFDLKTAF

SEQ ID NO: 305792 - protein, 419 aa, unidentified
MALKHDSEIVSVVHPICCGLDVHKKEISACLLSNDAQGQVETLIAEFGTFTDDLAALRDWLKEHDCPVVALESTGIYWRPVHNVLEGEVQVVLVNARHIKNVPGRKTDIADSQWLAGLLRHGLLRGSFIPPQHVRQWRDLTRLRKSYQESLGDFKRMTHKLFESANIKLGSVVADLFGVTGRNLMNLLATREGEISLEDISQAARAGLRQKTTELWRSIQGFFTDHHRYQLQLLLSTIAALEAQVAGLQERLKELMMEQHPLLQRLKGIPGISDVAAATILAEIGHTLETFPSSAHLASWAGLCPGNNQSAGKRKSGHSPVRQHHLKTILVEVAWVTVRQPGSYYKEKFHRLRSRRGTKRAIVAIAHRLLKAIYYIIKDGVGFRDLGEEYLNRKHQASRLYVLQKQAKMLGYELVPLAA

SEQ ID NO: 305793 - protein, 412 aa, unidentified
MQVQYERCCGLDVHKDTVTACLIILGPDGQPVKEIRTFSTMTGALNALAQWLKEKGCTHVAMESTGVYWKPVYNLLEGAFEILVVNPTAIKKLKNKTDVSDAEWIADLLRHGLLRGSFIPSAQQRILRDLTRYRTTLIDERTRAVNRLQKVLEDANIKLASVATDIMGVSGRAILAQLIQGQTDPVTLAELAKGRLRNKQELLEQALTGRLKPHHRFMLIQHLSHIDFLDEQIAQLDTEVEEQMRPFQAAVDRWEQLPGIKQRNAQVIVAEAGADLKQFAKAERCASWSGMCPGNNESGGKRRSGKTNKGNVWLRRALIEAAHGAARTKKSYFSALYHRLAGRRGKKRALMAVGHSLLVTGYHMITKQMDYKDLGNNYFDERNKESIKRRMVKRLEQLGYQVELRLLAANPA

SEQ ID NO: 305794 - protein, 366 aa, unidentified
MTTIVKPVSCVSIDVAKAKFDVALLKPDGKYRSKVFSNNPEGFRQFLDWLEKQEALKAHLCMETTGAYGRSLARFLAQQQLLISVMNPALIHAFGKTELSRAKTDKADARLIARYCQMHRPAPWMPPAEAIVTLQALVQRLDDPLGMQNMENNRLEMAEPAARASIEALLLTIHQQIDVVRRQIQDHMDDHPDLKSQKALLLSIPGIGEATAAMLLAFLSPLTRFHSAKQVVAYAGLNPRIRESGQWAGKSHIAKAGNVLLRKALYLSAVVAKRYNPAIAAFCDRLLIWMPPCSQDAFDVWHIEVGLLSYIRPLMQDNKPAGPDGIRRKSPYLSHVLEGQVTTRFSLPWSDLFCHQSFISLRNAFC

SEQ ID NO: 305795 - protein, 395 aa, unidentified
MEGPIISFDVSKGCSHAQGFLSSGKPLGKAFKFEHNMEGYKKISELASILKEKTGVNPSVVYEFTGVYAMPLMAFLIDFGFTIYQISPLESAKMRKAEIRPTKNDSLDCSTIAKVYYGRPLRPLSIPDQTYSDLKEMSRQYQYELGVAVEEKNRYHRCLDAVWPLFDQVMAYDSRASLSIVIKFGHPSQIKTRRGVASAIEGVHLGRHTTKDDLIEDVIEYTKTHNSGCTSDSYLVQETVEMAKRVRREKERLKEVLERMLEIAAKLPEFQLLKSIPGIRDTSALRLIAEIGDISKYNDIKAFVAYIGLDPMVLQSGKNTGEHLHITKKGNKFLRCTLYLCVTNILTHYPDSRIGRFVAKKKNDGLCQKAAKIAACTKLARIIYSMMTNGAYYSE

SEQ ID NO: 305796 - protein, 355 aa, unidentified
MDSIKYIGLDVHQSTISVAVLDADGKLVMQSAIATHATTILDLLHGLRGTLHVTFEEGTHSAWLYDLLVRRVAKLVVCNPRKNALLKAGNKSDTIDARKLAELLRAGLLSPVYHGQNSTAAVKHLGRSYAALTEDTTRAMGRLKALYRSQAIACAGKKPYGARHREEWLAKLSESGLQRRAERLYQQLDLLQELRRDARHDLILECRKHSETKLLRTIPWLGPIRVALLIGRVQTPHRFRSKRQFWAYCGLALETRSSADYGFINGQLERKKKPVFIRGLNLNHNHDLKNLFKSAATTASGSNGPFRPFYENLLIKGMKPELARLTLARKMAAITLHVWKKGEPFDAEYLKPQAA

SEQ ID NO: 305797 - protein, 429 aa, unidentified
MKKNRAYQSVRVNKVDWNRTNRFEEQQAVHVGVDIGKFELMSVLRWPDGSFERPWQAKNPGEIGSLVDLLFRVHESHQLTVALEPTGTYGDAVRQALDDAGLCVHRVSPKASHDYAEIFDGVPSQHDGKDAAVIAELSALGKSGSWRYESPSLIDQEMSYWVDWMDAHRRQKAMWVGRLESLLARHWPEATRLLKLSSSTLIRVLEHYGGPAALGNDKEAINQVKAWGGPRLMLSKVGQFVWEAQTTMGVRQGTIDVQRMQQYARQARAAGNEIKTSQQHLKRLSKGNKVLEAQGAAIGIPTACVLWVHLGDPSNYHCGSAYRKAMGLNLKERSSGTWKGKLAISKRGSAQIRNWLFFAALRLIRGQPVKEWYDLKKAKDNDGATRALVGVMRRLAMALYQIGACGQSFDAGKLFPGGQLIYENSIQGR

SEQ ID NO: 305798 - protein, 414 aa, unidentified
MEVVHERCAGMDVSKRDVKVCVRSPGKRRGSYAKAVTTFGSVTAEILRLREHLITAGVTLVVMEATGDYWKPFFYLLENGPFEVMLVNPAHARNIPGRKTDVSDAQWLAELAAHGLVRGSFVPPPPIRILRDLTRARVILTQDRVREINRLDKVLEDAGIKLSSVASDILGVSGKAMLEALVAGERDPHLLAGLARMSLRNKTDQLAAALTGRFTDHHAFMVGLHLKLIEQLTAGITDLTHRIDTVIEPFRPVLKLLTSIPGVSDKVAIVIVAETGGDMTQFPSAAHLASWAGVCPGHHESAGKRKSAAPRPGNSYLKGALGNAAMGAAHTNGCYFQARYRRLAARTSPLKALVAVEHSILTAVWNMITNNQTYNDLGGDYYSRRDPTAAMRRITRQANALGLTVRFEPIEQRA

SEQ ID NO: 305799 - protein, 428 aa, unidentified
MNNEDIIRREQFCQIQSEICGSDDYLVIGLDVAKDKHLAFMGSATGKSLLRKLVFENNLNGFRKLLERSDAVRGQNALCKVVFGLEPTANYHKPLGTHLIRCGCHVVLVTGKAVKNNRELLDGRWDKHDTKDAANIADLVSRGRCLYYDYPSGSINQLRQLLSLRRRLKKEEHSLRMRIRNNLLAQYFPELDRFFSACESETLAIVRWCLDPKTISSLEFDEFFSMVTTAKRGIAQKLRLQKIHRLAVESVGCSMGPAAEFEATLLVDKLKQVRHQLKEIADLMEDFCMEFVEYSCLLTIPGFGPYIAARVLASIANPRRFDSSNQVIKLAGYDLGANRSGKRSNEAVPVISKRGNSELRYALYQAAQVASSRNPNFIRYYTRMLRGRERERGIKTKMKVKLAAKMLKIAWTLMRKQEVFDPDHLIIE

SEQ ID NO: 305800 - protein, 342 aa, unidentified
MEHYAGIDVSLEYSSLCVVDGAGKIVRETVVPSEPEALIGWFGSLGFGLARIGLEAGPLSQWLYAAMKQAGLAVELLETRHARDAFKAMPVKSDRNDARGIAQLMRLGWFRPVHCKSMSAQEVRAVLTARKLVQNKLLDLENSLRGILRGFGLKVGKTTDRSFAGRIQELVKSHPNLEAIGEALLSVRAVLLRELNAFEKRVRAMARSDARTKLLMSTPAVGPIVALTYASAIDDPARFKSSKQTGPHFGLTPKRYQSGETDRSGRISKIGDAAVREALYQAAHVMLTKPVKGCSQLKSWAMRIARRAGMSKAKVALARKLAVILHRMLANGTPFDAAAAAA

SEQ ID NO: 305801 - protein, 374 aa, unidentified
MLGSHAARSFVPRHHDIFVGLDVDKTSISLTCLDHEQMIKSLRMPYQAAGLLKFVEKQFPQKHIAFVYEAGPTGFGLHDDLTQAGYPCLVVSPSMVPQAAGNRIKTNRLDSQRLAESLRGGQLKSIHVPSEPYRQLRHLTQLRDTFVQQSRATQCRIKALLLLEGLAFPGTQWSQVTINKLEVLICSEAVHFKLNKLIQTLRFAQAQIKDTTKEILRFCRQDPEIKACLEYLISIPGIGTATGTQLLARIGDWRNLRHVRQLASFLGLVASEHSTGETIRRGRITHAGDSRLRNKLIQGAWAAIRQDPQLRDFYYRIYHRHPAGQASQKAIVAVARKLTTRIYAVLTQQRVYVVRAQEEQTPPGETRMPAEPAS

SEQ ID NO: 305802 - protein, 391 aa, unidentified
MICVGIDVSKDKHDCYIATSEGEVLADVFTVPNSMEGFKQLFQKIKSVAPDLSKVKVGLEATGHYSYNILGFLLGKGLATFVLNPLHTNLYRKSTSLRRTKTDRVDARTIAAMMMSDVVLKSYSAISYHNEELKSLSRYRFDKVSQRARLKQSVSRLVCILFPELEQLVPTLHMRSVYALLSELPGAKQIADCHLTHLTKLLEAASKGRYGRDKALQIRNAARNSIGSTMNAKSLELKHTIRLIAELDSEIEEIEIQIKQIMDSLSSPILTIPGISYGMGAMIISEIGDFSRFDSPDKILAYAGLSPSTYQSGKLDNAYAHMEKRGSRYLRYALYNATKYVCYWDKTFADYLARKRAEGKHYNVALSHAAKKLVRLIFALQRSGQIYAPAP

SEQ ID NO: 305803 - protein, 455 aa, unidentified
MSEPPVAPIPIPMPAPAPAPAPAPAPAVAPATCEPGGEQFARLTHFGGFDWGGAEHQFVAVDRQGQIVLSLRFANDAEGWALFRQRVAALPALGVAIETSCGPAVERLVDLGLGVYPMNPKAAERYRDRKAPSGAKDDTLDAWSFADALRTDGHGWRPLLAQDPLTTELRLLCRDEVKLIEQRTALVNQLRAALCEYYPAALDAFDDWTAEGPWRFVIAFPDPPALAKAGKRKWEKFLHAHKLYRPQTAEKRMAAFAAALAFASPNPAVTRAKGLLAVTLAKQLCLLESQLEEYRRRVVQLFRDHPDHDCFGSLPGAGAKLAPRLLAELGANRAVFATAEALQNYAGTSPVTRQSGRSRVVVLRRACNKTLRATIHLWADLSRRTCVWAETYYQQKRAGGMNHTAALRCLGQRWVKILWKMWQTRKPYDEALHTRNQTEHGSWVVRLLPPAPAKA

SEQ ID NO: 305804 - protein, 409 aa, unidentified
MLDSSLVRSVAADGMFIGVDWGNSHHQLCMLDPAGRVVYQGRFTHDVAGLRELGERLGRHGPVAGVAIERSEGLLVESLQEQGHRLFCVSPRMSARARERYRAAPGKSDAFDAFVLADSLRHEHRHWRSLAIPSPLLAELRALTRDRERLVWNQRDTENQLRAIVQAYHPAVLHLFSSLDRDICLAFLRDYPTTAQAGRVGAARMAAFCTRHGYSGRTRPELLAERLRANLLSASPGTAAGKAFSALLFADQLELLNSQVRAITKKIRGLLAAHPDAAIFLSFPGMGHVTAAVMLAEMGEDRARFPAPDVLLAETGTAPVTRSSGRSRTVRFRYATNKRMRHAIDWWAFVSVRENDWARAAYEQARARGQLHNRALRGIGARWTRILWRCWTDHTPYDPARHMKNQPAP

SEQ ID NO: 305805 - protein, 332 aa, unidentified
MAIIGCDLHTRYQVIAMLDTVTGEITRRQLEHESGEARKFYAELEKPSLIGIEATGYTQWFERLVGELGHELWVGDPAEIRARAVRRQKTDTRDAEHLLDLMLTKRFPRVWVPTPEERDVRQLLKHRDKLVKMRTSVQNQLHFLAMSQGVCRKRRLWSERGRAELAGLELGTWASQRRQELLALLDRLGPRITELDEAVKKEAARRPEAQALMQEAGVGPVTALAFVLTVGPIERFRRSRQLVSYLGLNPREDSSGGHQRLGHISKQGNEMLRWLMVEAGHTAARCDPQFRQRYARLKSRRGAKVAKVAIARRLVVRLYWRLRRHAAGSHVQ

SEQ ID NO: 305806 - protein, 397 aa, unidentified
MIAVGIDISKAKSTVAVIDSDGTVLASPFTMAHSQPEMEAFVTYLKGLGEPTTILMEYTGHYHYPVLKKLQGEGFPVCIVNPYQMKKYGDVEIHKAKTDKKDALRIAAYALEKSYKLVPYSSMEQKYEDLKFLSRQYSQRITYVAKLKVQLIALLDQTMPGITRILPLNSRNPEKCALLLFIRRFKSFDEIHRIGKARFLASYDVLAKKTSERSASSKGLSIYELAVDSITTRGEDPYIWLSQNQCVDLLSTTQNAADEIISQMRNIAETIPEYKVLRAMRGVGDRLGPIILAEIGDIRRFHSGKALNSYAGNDAPPYQSGQFESRNRHISKRGSSALRKACYEVMQALKLTKPQDDPVYLFMLKKEQEGKPFNVAKMAGVNKFLRIYYARAMELYK

SEQ ID NO: 305807 - protein, 414 aa, unidentified
MEPIHERVAGIDVHRMKHVVTVLISGDGGAVSSETREFGGFKRDMRALVDWLRSHRIQQVVMESTGIYWKSVFSHLETAEIPALVVNAFHVRNVPGRKTDVGDSEWLAQLARFGLLRGSFIPPKDLRELRVVSRYRQKLTATLAGEKNRLHKLLDDAGIKLGGVVSDIDGVCARKMVAGLIAGGTPEQLSALGRGKLKSTGEELEAAMDGDLSPRHRLVLSMILNHLRYLQQELARLDRYLIEAMKPYAWAWRLLQTIPGIDEIAAAMILIEIGDDVHRFGSASRLASWAALCPGNNESAGKRKSGKTRHGNPIVRYLLCEAANAARRTKTVFRAKYDSLVIRRGHKKTIIALAHKLIRTIYFVLARRKPYRDSTFDYQAASVAKNAPRWIRALKKYGYWPTASAESTRAAAAS

SEQ ID NO: 305808 - protein, 315 aa, unidentified
MSSFNSVLGIDLSQDWLDAHLLPQGQTSHLSTDPVELERWISSLPDGITLAVMEATGGLEARVAALLHERGIPVAIVNPRQIRDFARAVGLLAKNDRLDAHAIALFAQRVQPPTRALPDAQQTALRELIARRRQLLETLVAERNRLRRATTTPVRKSLTRHVQWLERQLESLEREIGALIQSSPLWREQEERLLSVPGVGPATVRTLLAELPELGRLTRREIAALVGVAPYCHESGKWRGRSFIERGRAHVRHVLYMAALAARRWNPLIRIFAERLRQKGKAPKVVLVACMRKLLVIVNAIVRHKSYWKSLADNP

SEQ ID NO: 305809 - protein, 387 aa, unidentified
MPEDAPRPAQAAIRTDLGAIFVSMELSRRTWLTTSLSPGAGEKMSRHAVAASDVSGLLQRFAELRRKAAARTGQDFPIIVIQEAGLDGFWIHRVLVAEGIESHVVDAASILTSRRRRRAKTDRIDGETLVRTLMAYKRGEPRVCSMARAPTPQEEDRRRVCRERRTLVGERVKHVNRIKGLLFAQGVFGYEPLRKHRRERLETLQTGDGRPLPVRLKAQILRELDRLEVLLAQLKTVEAERDALLEPATDAVASPAAMLARLKGIGPETAAVLWSEGLFRHFDNRRQVAAYTGLAPTPWKSGSIDHEQGVSKAGNPRLRTAMVELAWLWLQNQPTSALSLWFHERVQRLGGRMRKTAIVALARKLLVALWRYTTAGVVIGGAVMRAA

SEQ ID NO: 305810 - protein, 349 aa, unidentified
MVGELYVGLDVHKLTTVATILDAEGKRVDQSRFGSSDAELLAYLKRFPAPQHVVLEACNVWPHIYDAARSTGAEVTLAHPYKVRVITEASLKSGKVDSAALARLLRLGSVPESYAPEPSVRNLRQLVRDRVFYVRQERDIKNHLYAVLLRRGIAYDDGVFGLKRKREALRELHLPEIDRGLDVLAHLDESCAGLDRAIHEEFAKSKEAQLLETIPGIGELTAMALVAELCPIDRFPNIEKLCSYAGLVPTNHQSGETSFHGHLKKDSNQLVKWLLVEASWTHRRYAARSDVSKVAKRVSRRRGKQKGNVAGAHKLLKIVYAVLKRGTPYSPERPSSGPNTAESKTVASP

SEQ ID NO: 305811 - protein, 425 aa, unidentified
MNYKQNEKINQVKESTLVVGIDIGSTIQYARAFDWRGIELGKVFTFSNSREGFEAFKAWMQRLQDKYRKSDVIVGIEPTGHYWFDLGAYLEDEGILLVMVNPYAVKQTKELDDNSQSKNDRKDPKVIAKLVTEGRYSAPYTPDGVYADLRIMVTNRKRLIREMTQIKNRFARWFAIYFPEYTDVFGDYEAQSSMLLLKKVCTPEAIVELGAEKINQIWRDAKLRAVGMKRATTLCETAKRSIGLKKGSSAAQYEMKLLLEDYEYKKAQLDAVIEEIEKLCRKIPESEQMLAIKGIGVITVAGFLAEVGDVRRFESPRQIQKLAGLSLRENSSGKHKGQTTISKRGRSKLRAVLFNAAIPLIATNPEFKSLHEYYTTRANNPLKKKQSVIAISCKLIRVFYAILANGVTYDAQKMLSDIHRQPQAA

SEQ ID NO: 305812 - protein, 421 aa, unidentified
MSKHSDAGMEVLYARVCGLDVHKKVVVGCVRILDAKGVVHSVLRRFGTMTADLVELREWLAQAEVTHVAMESTGVYWQPVFNLLEGYFEVWLINAQHIKKVPGRKTDVKDAEWIAQLLQCGLLRPSLVPERKQRELRDLTRQRTKLVQQRNAVNNRIQKVLESANIKLGSVASDVLGASGRLMIEALINGETDAMVLAELAQRKLREKIPQLHRALAGEVTEHHRFLLRELLDQYDFLEHKITRMSKRVMEVAPSPFRTAVQQLDPIPGVAERGAEAVLAETGTDMSRFPTHKHFASWAGRCPGNHESAGKHHSGKTPAANRNLDAVLTEIAHAAVRKKGSYFQAQYHRVAAHRGKKRAIGAVKHSLLTTIYFMLRDNTAYRDLGANHFNHLDPQQRIRYHVRKLQELGQEVELSPMADAA

SEQ ID NO: 305813 - protein, 319 aa, unidentified
MASKPSWVGIDVSKAKLDVAVQPSGSTWQVGNDPGGISALTEQLGALSPERIVLEATGGFEVVVAAALASVALPVVVVNPRQVRDFARATGQLAKTDRLDAQVLAKFAQAIQPELRPLADATTRALSALVSRRRQVQEMLTAEQNRLLAAAVQNAPEPLREQLGEHIDWLRRQLQQLDKDLDQQVRSSPLWRAQENLLRTIPGVGPILSATLLSQVPELGHLDRKAIAKLVGVAPLNRDSGTFKGKRRVWGGRAAVRAVLYMAALVATQHNAAIKAVYQRLLAAGKPKKLALVACMRKLLLICNAVLRSNSPWRRPVSP

SEQ ID NO: 305814 - protein, 337 aa, unidentified
MEQFIGCDAHKKFSIFASIDEKGEYGPTFRVGHAREVFRAFLKDLPAGSKIALETSGCYYWMVDEMEQARHIPLLAHALTAKRRMEGRHKTNERDARGLAMLLRNGTLPVVWIPPAELRDQREMLRWRMCLSRMRTRVKNRIHGVLQRYNIDIAVSDLFGDGGLSLLDQLQMVDTVETEISECEQVLQEMLYPSAERDLLDSLPCVGKILSAVLALEIGDVRRFGGPDRLVSYAGLVPVARESADWKRKDRCPRDCNTYLKWAYVEAANLISMQRKRWPERHVVQLYERVKQSTKMHGKATLAVARHLAEASYWMLRKQEVYQEPNSKRQLLSSTHG

SEQ ID NO: 305815 - protein, 368 aa, unidentified
MEPYYVGLDVHSRQSAFVIEDGGGRVSAQGEIPTTPAGLEHLRAAHRLPPSTPVALETGTVAFFVARQLAAIGLAPQVIDAHEVRLKAHRPTQKSDRRDAFELCEGLRRGIYRAIVHVPRAAVLRLRETLARRRHFVRLQTAQISAVKALLRGAGLGRLSRSLGSEVGWAKVLAALAEHREVQAYVEQHRALWRCAREQITTLEVALAQQQRASFADALRRLQTIPGVGSIVASTAIAVFSDIGRFPDAKHAASYAGLVPATYQSGERDAHGRITKRGAAELRAMLCEAAHHASRPDHPLHPYFAQLAARRGYKMAVVAVAHRLCRIIFAMLRDTSDFDVGKLAVERGPFERKVVRLYRRTPAVPGRR

SEQ ID NO: 305816 - protein, 412 aa, unidentified
MAVVMNQDSGFDIWCGLDVGKTDHHACALDAAGRKVFDKPLPQDQKRLEELFDKLQTHGRVLVIVDQPNTIGALPIAVARSMGIQVAYLPGLAMRRAADLYPGNAKTDARDAFVIADTARTMPHTLRRVDAGEETLAELKVLVGFDEDLAAEATRLSNRIRGLLTQIHPALERVVGPRLTTKQGLAVIEQPGGPQAMAAASKSKLLRVISKAYPRGAQEFADAITTALAEQTVIVAGTAAAEQVLPQLAASLRQTLDQRHALAAQIEQVVDAHPLAKILTSMPGVGVRTAARILLDVGDASQFPTAGHLAAYAGLAPVTRRSGTSIRGEFPARSGNKHLKRALFLSAFAALRSDPTSKAYYDRKRAQGKKHNAALICLSRRRCDVLFAMLKNREPYRAPTPTREPSPLPLAA

SEQ ID NO: 305817 - protein, 355 aa, unidentified
MTSAKYIGMDVHKESISIAVRNDAGKIVMECVIETKASMILQFIDGLRGDLQVTFEEGTWAAWLYDLLKPHVTKLVVCDPRKNASMREGNQSDRIDARRLAELLRLNHLSSVYHGEHGLRSLKELVRSYLTITKDLGRVMSRVKAIYRSWGIPCSGKQVYAPRHRAEWLGKIGEPGVRRRAEFYYQQLDALRILRQQVRRDLLAEGKKHKAWKRLCQIPSIGPIRSAELLGILQTPHRFRTKRQLWTYSGFGIETQSSADHRSVGGQLERVKKQISIRGLNRNCNHDLKNLLKGAAIVASSKPGPFQEFYTALLTKGIRPEMARLTLARKIATIVLMVWKTGACFDAQHLKPQTA

SEQ ID NO: 305818 - protein, 350 aa, unidentified
MERYIGLDAHAASCTMAVVGPSGRRLREHVVETCGEALVGTICSIRGQRHLCIEEGELSGWLYELLRPHVHRIVVAQAPRKDGPKSDSIDAYGWAEKLRTNAITTAVYKAPQRYATLRELARTYRMVTQDLVRAKNRLKSLYRSRGIDVGGDAIYQGANQRLEELPQSARIAAQVLHAEVAELTALKAQAQQHLLKEASRHAIVSILQTAPGMGPLRVAQLVPIVVTPHRFRTERALWSYSGLGIVMRSSSDWVQLADRSWIRAKTQQTRGLNRRRSPVLKEIFKGAATTVSAQKPGSTPLRDSYQRLLDEGTKPNLAKLTIARKIAAVVLRMWKEKKVYDAEAHRAQLK

SEQ ID NO: 305819 - protein, 429 aa, unidentified
MNYNTQNAKIASITEKTLIVGIDVGSETHYARAFSWRNYEYSKKPFAFSNDEDGFASFKAWMDDIAEKHEMEKVIPGMEPTGHYWLNLGAYLQGQGMRPVHVNPHHVKKSKELDDNNPNKNDRKDPKTIAGLVNEGRFSYPYIPTGIYAEIRNLSNLRIQTQEEITRIKNRIARWFSIYFPEIKDVYRNPDAVSGLMVIKQAPLPCDIKGLGVDGVNKIWRDARLKGAGIKRAKTLVTAAEHSIGNTEAPRSARKEIRNLLNDYEIYKSRMDELMEEIEELLSEIPYIDKLMGICGIGIKTVSCFIAEVGDIERFDNPKQVQKLAGYAIVADSSGKHNGESRISHRGRKRLRYALYEAAISVIGKNKEFKEIHHYYRTREKTPLKKMQSVIAVSCKLIRIFYTILTKGIDYDGQKMLRDIVRPGMQSAA

SEQ ID NO: 305820 - protein, 351 aa, unidentified
MKEYIAFDSHKRYTLMEREQVKSGKTTHLRIEHAPGAIRQCLCSREPGTPVAVEATGNWYWIVDEIEQAGLEPKLVHPRKAKLMMGMINKTDKLDAHGLNRLQRNGTLPTVWIAPRQLRDQREITRGRMVMTAHRTRLKNRIQSTLSKYGWAGTEASDLYGKKARKQVNEAIQQLPPETARITEALLKQLDFVQDQIEDLEKRMRELVRDTPEMDLLRTLPGVGWILSAVIGLEIGVIGRFASAERYASYCGTTPRVHASGDKIRFGRLRPDVNRYLKWAYVEAAHSVCLQKGKFPLRHGSRLYERIRKRKGHPKAIGAVARHLAEATFHVLTREEPYCDPVLKAGRSREV

SEQ ID NO: 305821 - protein, 442 aa, unidentified
MMDLSTTHQGGALTMKFKQSDAQNQRIERITTSHIVVGIDMAKETHVAQATNFRGIVVSKRHLSFSNSIEGFEKLNRWMTELQQKHRLKKLIIGMEPTGHYWFNLANWLADKGLHIVMVNPATTKRNKENRDNSPSKNDPKDALIIADSVSRGFYYEYTRQSLVFQRLRTIMSDREFWVSNSVRLQNRIIRWLDIRFPEYPSVFKDWTCKRSLATLKTFPCPQDLETYAIPDVIRAWRTHMQRAGGSTGIEKAAQLIAHAKRSVGDRTAVEESKADLIRLIEEYERVTTMLEQIEKDIEALLSEIPMAQQLRTIKGLGKIFTAAILAGTGDLSQYAHGRQVLRKAGLNLAESTSGKRKGRIVLSKRGDSALRKYLYLATVQLVWNNPVFRHLHEHNVQEKKMKKQQSIFKLIGKLARILVGIVQRGEKFTPEKTVVAWAEAA

SEQ ID NO: 305822 - protein, 335 aa, unidentified
MKNYAYYIGIDVSKMTLDFCLIDASSAETLLQGKIDNTKKGITSLIRKMAAKKVSTSETFFCFENTGVYSVPLSIFLSEKGEDYMEVAALEIKKSKGITRGKTDKTDARDIALYSLRNKDKLKLSIIPSKEIMTLKVLVSERKKTIKSIKSFSMGKENIGFLPDEVCNKWKEGNSQIVKQLKDYKAYLERQIEEVVRNCDYLNNQKKLLMSVPGIGKTIATYIIIATKGFTCFTNARQFACYVGVAPFAYSSGTSIKGKTKVSHLADKNLKALLYMGALNAIKYDPELKAYYERKMKEGKHFMLVMNNIKCKLIGRAFAVINRNSEFINIKKFAA

SEQ ID NO: 305823 - protein, 343 aa, unidentified
MIVVSAFIGPGWLPEQDGSLNKAGSTKMTQISATAGIDTSKAKLDVAVHGGAAHWQVDNTSVGWRRLAADLCKAGVTRVGIEASGGYESGVVGHLRDNGFTVLVLQPIQVKAYARLHLRRAKNDKLDAVLIAACAATIEQQRIEPDRRLEKLAQHLTFVEQIEEDIARFKVRLEHVGHPRLRRMVIADIARLKARRSAELLRIVAVLRAHDDLARRLNLVLSIPGLGERTALALIIRMPELGRVSREHAAALAGLAPFDDDSGKRTGERHIAGGRRRLRRSLFAAALPAAFRWNKALIELYARLTARGKAHNEALIACARKLLIYANTVVQRGTPWSERPLSV

SEQ ID NO: 305824 - protein, 392 aa, unidentified
MQKAKNNKQPKELSIQIINQNAAGIDVGDRLLSVAVPPGRDEVSVKEFGAFTEDLHALAHWLKKCNIETVAMECTGVYWKNIYTVLIQYGFEVYLVNARHTRNVSGKKTDAKDAQWIQRLHTCGLLNSCFLPDDRTQTVRTLVCWRRSLTQDSTRYLLRLQKAVEMMNSKLHAVISNLTGKTGTAIIEAIIAGERKPENFLPLVRKGIKADKDTLLKSLQAHRRTEQLFLMEQSYRIYQFIQQEIKHCESQIEEALQSFIAASNEGIIEQNDPSPGRTTKNKLSFDAPIYLEKIHGIDVTAIYGISEIAALEILAETGTNLSKWPTENHFVSWLNLCPNNKISGGKLISSQMLKKKPNIASQAFRYAANTLQRSDHWLGDYFRRMKAKGGNK

SEQ ID NO: 305825 - protein, 340 aa, unidentified
MGEVTIIGLDLAKHVFQVHGVDAEGATVLRKQLRRAQVLAFFSRLPRCMVGMEACGTAHYWARELRALGHEVRLMPAQYVKAYVKRNKNDAADAAAICEAVVRPTMRFVAVKTVEQQAAVLLHRGRERLVRQRTGLVNALRAHLAEFGIIAPQGLRHVGRLTAIVRDEGDARLPDLARQVLQVLAAQIEQLEAAVAAIEKQLMAWHKSNPVSQRLATIPGIGPIIATAIAATVTEPSGFRSGREFAAWLGLVPRQNSTGGKVRLGGISKRGNRYLRRLLINGASANLLRSKATKADPWVIGLRRRRPSLVVAVALANKTARMAWAVMQRKENYQRMAAAA

SEQ ID NO: 305826 - protein, 326 aa, unidentified
MKDISGKVQSEGKIPATRQGLREWVGTLAKPWTVAMEATMFTGWIYDYLRPHAAAVKVAHPLMLRAIAVAKKKNDRIDAGRIADCLRCDFLPECYMAPMEIRQRRRTLRYRKLLVRQNVQLKNKIAQLLMESGVSYNKEKLHQQGYFHQVLPANPEIDPSLWPLLKLTREMIERTQKTERALLRSLEADPLLATRVERLMTIPAIGHVTALTWVLEVGEVERFHSVKQVISYCGLCSGEKTSADSSRRMPISKQRNRHLQTVLLEAAHLAPRLNPELAVLYEREAAQSNRNQATIAVARKLAAYLLAIDRGERAFVTHQVHSRVAA

SEQ ID NO: 305827 - protein, 355 aa, unidentified
MSQEKYIGMDVHQATISVAVMDAQGKLIMECLLETKAATIVEFIQGLQGTLSLTFEEGTSAAWLHDLLKPHVDRLVVCDPRKAALLKDGNKSDRIDARKLAELLRTNQLKPVYHGEHGVRTLKELGRSYLTLTKDVTRVMNRIKALYRSWAIPCSGTTVYAPRHRAEWLAKIGEPGVRVRAERLYQQLDVLQPVRQAARQDLLSESHKHPAVKLLRQIPSIGPIRAALLVALLQTPHRFRTKRQLWAYSGFAVETHDSGEYRCVRGKLQRNRERITVRGLNDNHNKDLKSLFKSAAISASTRPGPLHDFYAARIAKGMRPTMAHLTLARKMAAITLTMWKKGVGFDPQQLHRQAA

SEQ ID NO: 305828 - protein, 309 aa, unidentified
MAQKYIGVDIAKNWIDIFFPETGEHRRIDTTSAKLRCFVKETKGHVVVFEASGGYERPLMDILDTFSTDFSRVNPRQARNFARATGLLAKTDKVDARMLARMGKALELKPSRLKEKARDRLTDLVSRRDDLVNCIGRERNRRAQARDGWIKRQINSLLVVLNSHLKKIEKEINSHITTNDKLKDDCERLQSIPGVGPVLSSTLVSSLPELGKLDRRKIAALAGLAPHACDSGLFKGKRKIWGGRSNVRRTLYLAAFIASRHDPKFKEFRDRLQKSGKPVKVAITACARKLLTILNAMVRDKTTYKIGHI

SEQ ID NO: 305829 - protein, 352 aa, unidentified
MTTTLETILAIDLGRYKSVACVYQRSSREHNFRTFDTTPAELTKLLARHPSSLVVIEACANAGWVHDHAAAAGHPVKVANTAAESWKFQHLKRKTDHDDARRLAELEAIGQLPTVALPDPATRQRRMLIATRQELVGQRVRCQNRIRALFAGQGLPVPRGAKAWTATGLAGIEEQSKTLADCQPDEVWKGLLNLAVTQYRFVVEQTEKQLDALASKDAATQLLESIPGVGPRTAEAVAAHLGDARRFATAKQVGAYAGLVPKQYQSGVTDRKGRITRRGPGVLRKLLVECAWCMLRYNPWARAQYARLTGGGASRKKPAIVALARKLLVRCWAMLRTGQRWRADPVPVPAKT

SEQ ID NO: 305830 - protein, 463 aa, unidentified
MNKVTGKGKRRSHRKPKQGLRVIRPNVAGIDLGSREHYVCCPPTAAGEPNVDHFGTTTPELNRLADWLKEQGVESVAMESTGVYWVPIYEILESRGFEVLLVNARALSSVPGRKTDMLDCQWIQMLHSCGLLKGSFRPGDDICALRSLVREKTTMESQRSDWLRRIQKSLDQMNVCVHHAVSDISGVTGMAIIRAIVDGERDPIKLAKLRDNRCRKSEKQIAEELTGNWRAEHLFSLKQALRMYDHICAGIAQYDAEIQRTLTALQPPENRTRKAPEVTNKNKRKNFRARGQEPMREALFRLTGHDLTTIDGIGVDTAETVLSEVGTDLSCFPSENHFVSYLKLSPKLAISGGKPVPTKRSGSTTTRLGATFRMAALTLRNSKTALGAEYRRIARRKGASVAVFALARKLAILVYRLLRYGQAYVDEGMQAYEERFKAARIRTCKQIAKEFGLTILEPEKAAS

SEQ ID NO: 305831 - protein, 429 aa, unidentified
MNCTQNKKIEQVKETTMIVGIDVGSEKHYFRAFNWRGIELTRKPVAFSNSMEGFNSFYNTIVELMQKSELEEALVGIEPTGHYWFDLGQFMGEKDIKFVMVNPHHVHKTKELDDNSPSKNDRKDPRVIAGLVRDGRYFYSYMPTGAYAELRNASNRRFVLVEKQTRAKNRLQKWIAVYFPEYKGIYTHIDAKGGMLVLKKAPTPEEIVRLGVEGIIKIWKDAKLRGNGHKKAMLILAAAMRSIGLKAGLTEARMEIQDLIEDYELQTKRLERVNDLIKGLCQQVRYADKLLEIKGIGITTVAGFIAEVGDITRFDSTKELQKLAGLELVADSSGKHNGKTKISKRGRKRLRYLLFEAAISVVGKNEEFKEIHRYYTTREKNPLKKMQSLIVVACKLIRVFHAILTKGIRYDASKMLKDIRHPGEQLKAA

SEQ ID NO: 305832 - protein, 439 aa, unidentified
MVRFIGLDVHKRVVQVCLLDAAGQPLGQQRFALSRATLLDFARTQLQPDDRLVLEATTNTWALVGLLRPFVAELAVSNPQQTRAIAQAKVKTDKVDAHVLAQLLRCDFLPRVWEPDAATQELRRLCSRRAGLVGQRTAVKNRLHAVLAMRLLLPPVDDLFSAKGRAWLQSCELDAEGRSLLDSDLRLLEALEAELATLDGLLVGKAYADDRVKLLLTLPGVDYTVAQTLLAALGEIGRFRSADQAASYLGLCPSTKQSAERCVHGPITKRGSGQARWLMVQAAQHLGKHPGPLGVFFRRLARKKTRNVAVVATARKLVVIAWHLLTRREPYRYAQPRTTETKLQRLRVKATGQRRKTGPKAGQGTGGPKLAAGVRSRTIKPLAQVCQEEGLPAPGAPPAGEARTVADSGTAAYVGSLQAAQVLAQRPRPTPPAAPAAPD

SEQ ID NO: 305833 - protein, 340 aa, unidentified
MSSIQILGIDLGKHSFHVVGHSHSGKEVLRKKYNRNQLISFIAKLEPTIIAFEACGGSHWLARKCINLGHQTKLIPPQYVKPYVKGNKNDFIDAAAIAEAASRPSMRFVAVKTEDAQVIATIHRIRDGYIKERTACMSRIGAILLEFGLSLPKGHANMKALFQWLAEQNQELPPSLLNELCSIHEHYSYLSQQIKAQDIKLHDISEHNELARLLKTIPGIGDLTSTLCIADVSSANNFANGRNMAAWLGLVPRQFSTGGKPKLFGVSKRGNKQLRTLFVHGARAILSRPETTGKVFRQWLVNLRATKPFNVVVVALANKLARIAWAVLQHLQAFKAALQP

SEQ ID NO: 305834 - protein, 412 aa, unidentified
MTVTNQFAAHVGLDWADKKHDVCVQFKNGERVFDVIEHTAEALDAWLTELHQKVKGRIAIALELKKGPVVYALQKYPFITVFPVHALSLARYRQAFSPSGAKDDPQDAELALELMLRYPQKIKAIEPDNADIRLLQQLVEQRRQLVEDKRRFVNRIINTLKQYYPQPLEWFSHRGSLLLCELIIRWPSLQQLKRARRDTIRNFLNAKGGRAMALTEQRVASIDNAIPLTTDPSVIEANALMAAALATQIKVVSEIIKTYDERIETLFDTMPDAGLFKSLPGMGPCMGPRMLAALGDNRDRFNSAEEIQNYAGIAPVTERSGQKSWVHWRWQCAKFVRQTFVEWAAKTVNSSYWAKLYYQGLREKGKSHQSAIRALAFKWIRIIYRCWKARTCYDEAKYLLALEARHSPLLKP

SEQ ID NO: 305835 - protein, 344 aa, unidentified
MKHYAGLDVSVKETSICIVDEAGRICREMKVVSHPEDLLAVLCDPAWRLERVGLEAGPLSQWLFSGLAEAGVPAICIETRHAKAFLKAQVNKSDRNDARGIAQMMRVALFQPVHVKTLASQKRRALLAARKILQEKALAIENDIRGLLRNFGLKVGIVGVVGFEQRIHDLVEGVPELADIMEPLLAARRVLREKFAKLHRKVLLLARANEVCQRLMTIPGVGPVVSLAFISTVDVPARFRNSKAVGPSLGLTPVLNQSGESHRVGRISLCGDEAMRALLYEAAQVMLARVQKWSWLKAWAMNIAKRRGQKKAIVALARRLAVIMHRMWSDGTEFRWTREMAPTI

SEQ ID NO: 305836 - protein, 338 aa, unidentified
MSIYAGLDVSDKTTHICVVDAEGKVLLRDVVASDPDVLAKWLTRRCPDLGRVVLETGTLSTFLYHGLAERGVAVECICARHAKGVLSARVNKSDVHDAEGLAQLARTGWFKRVHMKASATHIDRAALRIRAQLITARTSMANQLRGLLKLFGLRIGTARTPGRRAERLAAFYAQRPDLKALFAPLIASMEAIEEQLRASNCLLNERAKADEVCIRLMSVPGVGPITALTYTSTIEDPHRFARSDDVGAYAGLVPRRSQSGERDTSGHISEAGDPMLRKALYEAANVALSHVKRPFALQAWGRKMAEAKGAKRARTAVARKLAALLHSLWLNETEFRWA

SEQ ID NO: 305837 - protein, 369 aa, unidentified
MTFFIGVDLHKTQFTVHVRTEEKVESLDQIKQYPTTVAGYAEFLSRIETYRATGAAVKIGVESTGNTRFFKNQVEKAGAEVTVINTLKFKVINESTKKTDKHDASTISEFLSKDMLPESYLCGKETENIRRLLKSRERLVRSTVGQKNEIHALLVSLGLSDELRSLQSKKGRQKILDTLESNNDYVLEAQSVKLMFEIIERIEESVKIIEKQLVELTKEDEMVNRLLTIRGCGKITAWTIRAYTEDISRFATAKKYAAFCGLVPWVQDSNETIHHGKITKRGPQELRTCFVQLVLGIRRCKDTSEWRMMQRYEYMKKNKGSGKSIVAAARKMAEIVWAMLSDKQDFNADRMKGVYKPMILANEALSAIN

SEQ ID NO: 305838 - protein, 422 aa, unidentified
MNINTDSKRRQVPDDYLVAGIDPHKKSHTMVLMTREEKVLTSLKFDNSKTGFEHAVKRVDDQISKSGSKGVVFAMEAGGHYWRNLAYFLNKRGMWFCLVNPFTAKRLREGKDINRAKSDMRDARVMAELVISNGVPQTNLPQGIYAELRAVYNAYQRLIKERSRIKSRMKSLLDQLFPEFCLVFSNVCSKTAMQVLGCCLAPTDIARMHEAQFIARIREGFTGRALKIHSLQELYQLGKTSIGAEAGARGLALELNLMTQQLLLLSEQIEKTKHILQGLLLSIPESRCILSIQGVGHIAAAGILAETGPLQAYRNSGQLIKLAGANPISWESAGKRHSITHMSKKGRPKLRSCLWIAAIALLRSNPDFKEWARVRRERELHMHPLKPRETVGAVANRLLRIVYALVKNGSMYCLPKANEVLV

SEQ ID NO: 305839 - protein, 338 aa, unidentified
MMKKAATLAPFGKCHSLGIDVSKESLDVVGVTQVDVWRNKIGNQLTDIERLAGSLVKAGYCGKIICESTGHYHLLLALVFARYGLDLRIVNPLQSSKHQTGRIRKTKTDPIDGYVLATMSTTERDLPKAANLQPKQVLARLKQGQLQSLDKQIQRLSRSLAAYRETYEQLDMAAGQAFQSLEQALKQLRAAKRQLEAELEQAYLDSAQAEDVIRLRSIPGYSALVSAMIAGAFDREVNSERSWIAFSGMDISIQQSGKWVGRGRLTKRGNSFFRKRLYGAAWGAIMNYPDVRRYYDQLKSQGRHHVETLCIIARKLLRIAYAVLVKGKTYNPEIAFPA

SEQ ID NO: 305840 - protein, 391 aa, unidentified
MTMYFVGIDISKYKHDCCIISAANQKVVSKFTFKNDKSGFEQLNLILNSLSTPEDIKIGFESTAHYALNLELFLENANHSFMEINPVLIKDFKKSQTLRRTKTDSIDCELIARWLMTVEYKPHSKGFYHAYSLKSLTRLRDRLVRQRSFYLVKITNVLDHTFPEFKPFFHERLSKTALYLLENYGSAEKIARMNSASYEKLRSISRGKFSPQQFIRLKELAANTVGVNNSIFDVELNSLLTLYKSLVDEIKTLESEINRLVDEVHPHYMSIPGIGPISAAIIYAEYGDISNFSSPNQMLAFAGIEPSVHESGTEAYNGKMVKHGSSQLRYVLINCCLPLIRFDVTFATYYARKRSENKPHRVAITHVAKKLVRVIYALESQDIDFDPKKLR

SEQ ID NO: 305841 - protein, 362 aa, unidentified
MFTERTSVGLDVHARSVAAAAIDGDTGELVQSRLTPSFDQIRSWITDLPGPVAVVYEAGPTGFGLYRHLTQAGIRCEVAAPSKLHKPSGDRVKTDAKDAIHLARLLRLDEVTPVAIPTVEQEAARDLVRAREDSRGDLMRARHRLSKLLLRHGIVYDGGAAWTGKHDLWLRGDALGQLTSPATRLTFDADYDTVLMMKARRDRLDAAIQEMATDSEFTPMVRRLGCLRGINILTGFALAVELGDWHRFTGNTIGSFVGLVPTEHSSGGSRSQGSITKTGNRHVRRLLVEAAWHHRPAYRVGKTMRDRWDLAPAAARARGDEGNRRLHARWVAFIARKKKNTVADVAIACELAGWCWSLAVLE

SEQ ID NO: 305842 - protein, 346 aa, unidentified
MIIVGCDFHPGWQQVAVFDSATGEIREEKLENGNGEAKRFYASLPSPSRVGFEASGNTQWFEDLLDSLGHEVWIGDAAEIRASYVRKQKTDRRDAAHILKLLIENRFPRLWRPSQAERNLRQLLIHRHRLVGIRTRVKNGLQHLMLNRGVQLKQKLWNEAGQKVLSELPLEGWAAQRRQDLLKLLSELNPQITKLDQAVERTAYQHPGTRLLMTQPGVGPITALAYVITMGDVTRFQRGKQVASYLGLIPSERSSSNRRRLGSISKQGNPFLRMLLVESVQTVCRLDEGFRNQYKHRCHRMKKGVAKVAAARKLAVRLFWMLRTNTAYPEIARIEGSPRDGVVGGS

SEQ ID NO: 305843 - protein, 398 aa, unidentified
MTESSDYESVQVFIGVDVGKDTHHAVAINRSGKRLFDKALPNDENKLRSLISDLKQHGQILLVVDQPATIGALPVAVARSEGVLVGYLPGLAMRRIADLHAGEAKTDARDAAIIAEAARTLPHALRTLKLADEQIAELSMLCGFDDDLAAQTTQASNRIRGLLTQIHPALERVLGPRLEHPAVLDLLQRYPSPEKLASLGEKKLAAQLCKLAPRLGKRLAADIAQALAEQTVVVPGTNAAAVVLPRLALQLITLRKQRDEVALEVEQRVLAHPLYPVLTSMPGVGVRTAARHLTEVACRAFASAAHLAAYAGLAPVTRRSGSSIRGEHPSRRGNKALKRALFLSAFAALRDPLSRAYYTRKMSQGKRHNQALIALARRRCDILFAMMRDGTFYTPQGS

SEQ ID NO: 305844 - protein, 326 aa, unidentified
MKQFIGIDVSKAKLDCLWLRDPDNLKIKTKVLRNDKAGHTQLCDWLTTTTNGNAEDIIVVMEATGIYHEVIAYALYKAGFGVAVVNPAQIKAFGKSLGQTHKTDKQDSLVIARYGWTQKPSLWQPEPLEIRELKSLIARLEALETDHRRESNRLEKAEFSVASLTVIESINTMLQELSQEKARVEKEINDHIDRHDQLKKDRQLLESIPGIGAVVSRMMLSVIHSREFTRASEVAAYVGVIPTITESGIFRGRSRLSKKGPARVRAKLYMAAIVASQHNPDIIDQRQRLLANGKTKMQALGAGMRKLVHICFGVIKNQTKYSPQAI

SEQ ID NO: 305845 - protein, 359 aa, unidentified
MLKYSVGLDISAKTIHCCISVIDAAQKVTVKSSCKIDNTLSGFKQLDQWVGKHYKQKEIPLVVSMEATGVYYENCALFLFKQGYSVSVLLPNKAKKWLQSEGLKSKNDKIDAQGLSKMGAEKALEPWQPAAEYYYQLRALTRQQQTLQETKTVANNQLHAEYNGMYKNKMVIKQLKQQISLLDKQITDVESAIEKHIASDKVVAEKVKNICEIKGVAILTVAVILAETNGFLLFKNGPQLVSYAGYDVIENQSGDHKGKTKISKKGNSHIRRILYMPAFNMVKYKQTPFLNLFERTFEKHGIKMKSYVAVQKKLLTLIYALWKNNKAYDINYLNKPTRELEQELSLGLASIEATLENAV

SEQ ID NO: 305846 - protein, 428 aa, unidentified
MTVKDCTSVKEFWQLKKEIRGSKDHLIVGIDVAKDDHKAFFGTAYGKTLLKRLTFNNDIEGFEKLLTRVKEMKVKHSLDELVLGLEPTGNYHKPLGDFLIKCGRIVVLVSGVSVKRNRELLDGRWDKNDTKDSANIADLISQGKCLYYEYAPLLLKDLRGLLSLKRRLKKQEHGLRIRIRNSLLAQYFPELDKYYSKWEPEILSVVRWCLNPSVIAGLEYDQFVSLVSPGSKNIRQQGRLEWIWKKAVDSIGCDAGEAAEFEAKVMVEELRHIREIIKETDAKIKDVCVRFPEYDYLLTIPGFGPDVSSKVLATIGNPFRFNSVSQVLKMAGMDLNANRSGKRSNTAVPVISKKGSAHLRYAIYQAAFIASVRNKYFIRYYTSTLRGREREKGIKTKMRVKLAAKMLVIAWTLMKKREPFDPAYLKIG

SEQ ID NO: 305847 - protein, 340 aa, unidentified
MDHFAGLDVSVKDTSVCIVDDAGRIIREVKVASEPDALLAVLTNRIYHFKRIGLEAGPLSQWLFSALAEAELPVICVETRHMRAVLKAQINKTDRNDARGIAQMMRVGLYRPVHVKTLRSQKLRMLLTHRKLLQSKAIAVDNDLRGTLRNFGLKVGMVGTAKFEARIRELVENLPDLAVLVEPLLVVRRVLREQIGILHRRLLAIVRDDEVCRRLMTVPGVGPVVALTYRTTVDVPARFRKSKSVGAVFGLTCSRDQSGERDRPGAISRCGDEMMRAMLYEAMLGRSSRWSWLKAWATQIAKRRGMKRAIVALARRLAVIMHRIWVDGTEFRWTREAAAT

SEQ ID NO: 305848 - protein, 319 aa, unidentified
MQDILEICCGLDVHKETVVACLLKGNVGEEPTKTIRTFSTLLAGLEELKAWLEAENCRHVAMESTGVYWQPVYNVLEEAFDGSMVLIVANARHMKNVPGKKTDMKDAEWIATLLRAGLLEGSFIPSKPIRELRNLTRYRKSIIEEIASQKNRIEKHLQSCGFKLSTFLTDIFGVSGRAIMEHLCRHGKISAREVETLVKGRARCKLHEIKQAVNGKMDVHQREFLKLLLGWLDQHYEHLRQVEQKLEEKLNQYQRQLEQLDGIPGIDKTAAAAILAEIGIDMSRFKTAEHICSWAGLSPGNNESAGKKSPLAPPTVTPI

SEQ ID NO: 305849 - protein, 315 aa, unidentified
MHLGIDVSKQTLDCCLISDGIFYERKFTNDSGGIAKLQTWLQEHGADSNLHCCCEATGTYYEESAIALARLYKMSVVNPRTIKGFGTAVMNRSKTDRQDAKLIARYCQAMKPEQWQPFTPEHRQLQELVRYIARTKQQRASEQTKYKTAPDFIKPHIQETINHFTQLIDSLEQELQAYYRNNPEQDKRIKTLKSIDGIGENSAAVLCSIITERFTHAKQLVAYLGLDPKEHQSGTSVKGRTRISKIGKSETRAALYMPALVAYRMGAFPDFTARLKAKGKPPKVIIVAIMRKLAVIAFNLLKNGEEFDRSRYRKI

SEQ ID NO: 305850 - protein, 395 aa, unidentified
MAILRPFGEIVRKPFDVYHSRSGLEELAKLILSLEGESRVVLEHTGKYSQPVIKVLSESGIFVAAANAKLLHDFGGDTIRRDKNDKLDAKKIAGYCLVKWENLKRHIPEEETRVLLKTYNRQLGEFMKIRTAQKNNLISLTDQVFPNVKRLLTSIARESDGHEKWVDFLLRFWHSERISKISYAAFAEKYKGWCHKHGYKYSETKAESIYRAAQNAVPTLPMNDFTKILVRNAIRQLNSLYETVAEIKAQMTQLAKTLPEYEVVIAMHGVGKSLAPQLIAEIGDIRRYPKRASLARFAGIEPPDNQSGAYNQYSRRISKQGSPHLRRALFQVMRCVLQNSNPDEDTFRFIDRKRSENKPFKVYMIAGANKFLRIYYARVKELFDSLYPQETFLTA

SEQ ID NO: 305851 - protein, 322 aa, unidentified
MKTQELFIGVDVCKDRLDIANDSNSEAWSEANDDSGVSLLAEKFTTLKPTLIVMEATGGLETLLYSALVTAGLPAVVVNPRQVRDFAKALGKLAKTDAIDAWVLARFGALMRPEVRPIKDEQTRELAALVTRRRQLLSIRTAEKTRLRQAAKWTRKDIKSLIKVLDTRLAKLEKEIGNNVKNTPGWKEKDEIITSVPGAGPNLSSYLLANLPELGKLNRKEIAMLVGVAPLNRDSGKFRGGRIIWGGRSQVRSALYMSTLSASIHNPHIKGFYQRLIEKGKKPKVALTACMRKMLTILNTMVKNNTTWDINYSLTLESNHGC

SEQ ID NO: 305852 - protein, 378 aa, unidentified
MNRIIKIGMDVHTTNYTLCIFEPSFEHNGTVHCITQVKPEIKKIIHVIETFKKKHENEELNIVCGYEAGCLGYSLYHELKEKGVECVILAPTTMKTEKGGRKLKNDYRDAKMIAECLAYGGYSAVHVPTELDNSVKEFIRMRDDIKENLKSIKQQIIAFLTRNGKQFEGKSYWTRKHIDWINTVSFSEPLLQDTLKEYMIEYNHLCDRVETLDRQIEEISLKEEYVEKVQQLQCLIGIKTHTALSLIVETSDFNRFKKGNMYSAYLGLIPGDDSSGGHEKKLGITKAGNNHLRRLLVEAAQGYTRGRVGFKSKDLKSRQEKCSSEVVAYADKANERLRRKYYRMILRGKKYNVAKTAIAREIACFIWGIMTDHIDLCS

SEQ ID NO: 305853 - protein, 412 aa, unidentified
MEVIHSRCAGMDIAKRDAKVCIRLAGSGRRRTVETVTTWGATTRQILALREHLVAERVTCIVMEATSDYWKPFYYLLEDLVGVEVMLVNARHVKNLPGRKTDVADATWLAQLGAHGLVRGSFVPPAPVRQLRDLTRTRTAVTRERGREIQRLEKVLEDAGIKLSSVASDITGVSGRAMLEALIAGNSDPTAMADLARRRLREKIPALTEALTGRFTGHHAFLTRTHLNLIDQHTAAIDELTARIEVVIEPFRRFRDLICTIPGIGGNTADVIVAETGADMSRFPSAEHLASWAGTTPGNNESAGKVKSSRTRPGNPYLQGALGIAAISVSHTKHTYLAAKYRRIASRRGPLKANVAVQRAMLIAIWNMATTDTAYLDPGADYFTRLNPEKARTKAIRQLEAMGYHVTLERAS

SEQ ID NO: 305854 - protein, 317 aa, unidentified
MQSFLNIGVDVAKESVVVACAEQSFPVHSIANQRAALLTWLKSLPGGSRIGLESTGGYHELLADLAHVQGHTVFLLNPLDTRHYAKAMGNRAKTDRVDAELIARLIAQEHAHLRPYTPPTADQRRLDRLLKRRAKLTSIKGALKLTMRNLDGFAAELGAVICKLEALIAKIDDAVSAISARSPQYTETQQRLQTIVGVGPLVGTALTNTLERISFRNADALVAFIGYDPRANDSGRKAGRRRLSKRGPGELRRLLFNAAMSAAKTKTWQPIYEHYRALGWSTTASLVIIARKIARAAWSIHHYRTTFSPERITKCLT

SEQ ID NO: 305855 - protein, 356 aa, unidentified
MSILADLVDHVIGIDPDKETFSAGIVDALTKGDLGGERFTTRAAGYDSVIEWADTHTDPERRAWAIEGSGTYGKGLARALHDAGEWVIEFSFPQGLAAPNGAKTDHLDALRAGREVLGRMKWAQPRNADGHAAAIGVIAGLRTLMVGQRTQVINHLKALLLRAPNDLRDQLRDHSNAKLVATCANLRPSTDHALLLDETANTKIALRTAARQIQTLNTDIAALLDRLDAQTILKAPQLRAEQGVGPAIAATVLIAWSHPGRVRSEAAFAALAGTNPIPIDSGQNQNRHRLNRTGDRQLNRALYFVTLSRARHDKQTQDFIARKQAQGRTIRHARRCLKRTLARRFYRILENPPTTT

SEQ ID NO: 305856 - protein, 387 aa, unidentified
MTKNKGRVVGLDVHPDSFAGAVVQGRDPASAMVLRTSTRVELERLEEWARRHTSPEDTLVLEASGNAFAVAARLRAIGREVEILDSHHAGKVGKVYCANDRVDAVKIARIYLSALSPIVWQPDQKTLERREIFSAYQAVVKESTRAKQQLRSMLNEHCVRLEKGFRLCHPQAITRLLKLREWTPARTMLLQQLHGSLLAARARRTLLRRHMAQEIAAEEALLRLTRLCGINLVTLYGVVAAVGDVRRFSHSKKLVAYLGLNPSVSQSGNFEGSGALKRHGRGALRALLVQSGKKLLEVKNPLQRWGLAVALRRGRNKAAVAVARKLCVALWHVLMGHVIGALERLDTLETKLSKFATELGPAALAAFGYNNKADFVKKKLYVLRSYP

SEQ ID NO: 305857 - protein, 351 aa, unidentified
MLYAGVDTHKKYSRVVVTDSHGARVAQGTLQNTQGSFRDFFSQFNEQTKAVLEAGSTWGIIYDILEDIGADPVLANPLKTRAIAEAKIKTDTIDAHTLSTLLRADLIPTVHVPSQKVRSHKNLLRQRFWLVEMRTRIKNRTHNILDRNHVTLPDCSDLFGKAGRQLLDQIEIPHPDNHLLTANLELLDRINEQIRAAEKWAKEALEDHPGLAILRTIPGLGKILAALVAVEIDDISRFSTPDKLCAYAGLVPTTYASGGKVRHGNLLPTCNRWLRWAYVEAAWVAQRTSPYCHSYFEGIKRRKGANCANTALARRLCEITWHCLTEKRSYQERTPARKEINQPAAFVSSWS

SEQ ID NO: 305858 - protein, 400 aa, unidentified
MLSIGIDVSKGKSTVCGMKPGGEIVYAPFEVQHTREGMSELVSLLHNSGEEVRVVLESTGSYHCPVVAALLENGIFVSVVNSLRMKRFCSQSIRKVKTDRIDAMQIALYGLAYWQELQPTKLPEDTYRELQLLARQYYQMTSILIKAKVDFNAICDQVLPGMQELMSDHAGRHKLSDFVLRYRHTTHILEMGETRFRKDYCKWAEKKGYRNCERMAALIFATAQNGIPVLPNAPSTQIVITEAIRVLRTVEASRDAILTQMQALAKTLPEYSLVREMPCIGDTLAPRLIAEIGDVRRFHSKRALIAYAGIDAPPYQSGKFCANNRHISKRGNRYLRKTGYEVMQSYVMHKPANDPIFTFIEKKRGEGKSGKLAMVAGLNKFLRVYYGKVTELYRSLPAIE

SEQ ID NO: 305859 - protein, 317 aa, unidentified
MAKTSTTTAGIDTSKDKLDIAVHGQSGCWEVANDLPGWRRLVQLLTQAGVRRVGIEATGGYERGVVEHLRAAGFIVLVLQPIQVKAFGRARLRRAKNDKLDAALIATFTASLEQVRDAPDPRLAELAEQLTFLEQAEEDIKRFKTRLEHMTEPGLRRLVLDDIARLKARRLSQIHNIAKQLRAHHDLAARLDLVLSIPGIGERTALALLIRMPELGRISREQAAALAGLAPFDNDSGQYKGQRRIAGGRARLRRSLFAAALPAAFRWNKAVMALYARLTAAGKAHNAALIACARKLLIYANTVLQRGTPWTEKLLGV

SEQ ID NO: 305860 - protein, 349 aa, unidentified
MTIVGCDLHTRKQQVAVLHTDTGEVVEQELLHAGDAVEQFYRTLPRPVTVGIESTGYALWFHELMQHLGHTLLVGEAAKIRAMVVRKTKTDRRDAQHLLDLLKHDRFPAVWIPDPATRDLRALVTHRMRLVRMRTMVKNGLHAIAMNRRLTLGPSLWSQRGLAQLQGLALAPHTTQRRDESLQLLTWLTARIAALDDRVAAAAQADPGARLLLTHPGVGPLTALTTVLVLGPVARFPDSKHVVSYTGLAPAVHASADTCRLGQITKQGSPLLRFVLGQAGLIAAHAEVDLTRHYRTILRRRGRPKAIVAIARKLLVRLYIMLRDQIDYEEFRRRGRTPRRQEVPPPALA

SEQ ID NO: 305861 - protein, 362 aa, unidentified
MRIIGCDLHARQQTLAMLDTTTGEVVVLTLKHEGDNVREFYSSLPRPVRVGIEATGSMQWFVNLMEELGIECLVGHPATIRAAEPRKQKHDRRDAELILKLLVEGRFPAIWLPSKELQDLRSLLRHRHQWVRMRTRIQNALQSIALANGLRRGPALWSQDGQNRIASLPLAPHTAYRRSELQAMYEKFEAEIEKLNQRVEEQASQRPGARLLMSHPGVGPITALATEVFLGDPARFADSKALASYVGMIPREYSSGGRQRLGGLSKQGNPLLRFLWGEAGAHAARKDPELQRFYRRKLVQKGLGKASVAVARKLGIRLWIMLRDQIEYNEFCRRGQKQQKSSDACAGMPETLYGAKSHRPVD

SEQ ID NO: 305862 - protein, 332 aa, unidentified
MSKVYGVGIDVSARELTVSLEGRSAESFENTAKGHKAIGRMVANHAAEREARVCVEATGSYSLDLCLHLQGTGVSVMVANPRAVANFAKAMMARSKTDPMDAEVLREFAERMPFVEWAPPPQAGLELRAASRRLDSLSNMLTREKNRLHAAGATKTTTSIVSDDLKSSIKHLEGRIERLVKKIEVFLKSEPALHARYMRLQTIRGIAARSAIRILGEVATLPPDMSAKQCVAHAGLDPRQHQSGTSVNWSARISKCGNRYLRSALYMPAVVASQHDPIIKAFYERLVAQGKKPLQALVAIMRKLLHGIIGMFKTESDFDARRLFPNIRIEEA

SEQ ID NO: 305863 - protein, 405 aa, unidentified
MGNDNVVFGIDVSSRKSHVCEMIGQDNVIKRYEISNDQIGFNILLNNLRIFAQKPEIIFEATGVYSERLQSFLDAYHFSYCRLNPLKAKQQLMRFRVNKTDKHDAYSLANSQYIFHRRPEYRIAPTYKKLKSLGHYYDQLTHDLIISKNRLHRILQESFPDIEQLFATPKGENYWQCIIKFSHPELVKTAGLDNITKRLMTLKRVGHHRANYLAQRLLDLANITYASVPVDFPQVAQARDYAQRLITLTSKRKEIVTQMVTMARQLKHDDLSLLTSVSGISNTTAVLLLGTLGDIRRFRNPNALNAFVGVDLRHYESGQFTAADHISKRGNAMARKILYRTIGQMVSASYYHQSHIADYYAQKKKSSQSRNSKKIAIAAVHKLIRTIYHLIIYGQKYDYQFANHD

SEQ ID NO: 305864 - protein, 418 aa, unidentified
MQTELSQFTAVIGIDWADKKHDVCVQDMATGKRRASQVRHRAEDLDEWARSLHRRFGGPIAVAVELSKGPIINVLQKYDFFVIFPIDPSKLANHRKTFTTSGAKDDPTDAEFALDLLSKHTEHFKPLSPQSVEMRTLLTLVEQRRQLMNDRVRITNRLRNALKQYYPQPLEWFDHIDTPLFCDFIRRWPSLPQVKRARRATLEKFFREHNMNRKPLLERRIDAIKSAMPLTTDAAVIMPHRLQVQTLAAQLEVVLKSIKQYDTEIASLAPQHPDYELFDPLPGAGPVFTPRLMVAFGEQRERFNNAAEVQKYGGIAPVTKRSGQSTWVHWRWQCSTFLRQTFVEWAAQTINKSYWAGLYYHQQRARGCSHQAAVRALAFKWIRILYRCWKTRTPYDEARYLKALQERGSSLLKTAEAA

SEQ ID NO: 305865 - protein, 415 aa, unidentified
MKTYILRDSKPVEPQKIARSPRTQLAAPKTATDRQPRPSAPLKGPVLFIGLDVHNDSIAVSLAPSDSTEVRRYGIIGGEHEDVLKLAKKLEAAHPGMVLKFCYEAGPRGFALCRCLQAHGLDCILICPSKIPRKPGERVKTDRRDADDLARLYRAGELTGIYVPELEDEAMRDLIRARFQVGRQQHRARQQLKMYLLRHNLRYGGQSSWTPAHLRYLAKIKMPFPVQQIVFQEMLEVITHATAQLERYDQEIERAVPGWRWEPAVRALMSLRGMALLHAATLVAELGDFNRFEHPGQLMGYLGLVPSEHTTGKDRQQGGITKMGNGPARRALVEAAWQYRAPARISPHLKKRQEGLPKAITDIAWEAQRRLHHRYCHLTRVGKKKSQVAVTAVARELSGFVWAIARQVKPRPAKP

SEQ ID NO: 305866 - protein, 392 aa, unidentified
MNPCALGWDNHRKFSKVSLMEQTPEGEIRVVERARLEHHDQQAMRTWLSHLDPEIPVALEATFGWPWVADLLQELGHPVHLAHPPVVRALAKHEAKTDRCDGDRLGKFQLRGILPESYLAPPEVRQRRERTRYRMALSALRTAVKNRAQAILHRHGILHDFSDLFGKAGRRFLDDLALPEGSRQALNGYLRLLDTLTLLIHEVEQWMVENLEADEIVRLLMTIPGIGLILAHVIRAEIGEIERFPTFRHLASYGGLAPMSDDTAGREGPRHCSSACNHILRWAFIEAVHGVQRTKGPRGFRLRRLCARLCGSGRPKGRKSSAKVAVAHQLSKLVYVVWTKRAPYTDTPPPRPGSRQGRRPHKESPTAKTTLRSDQPRHPMVRRRATVGQTRS

SEQ ID NO: 305867 - protein, 351 aa, unidentified
MMIIGVDYHPSFQTIAFLMEETGEGGEQELNHSDGQAEKFYRDLKQRGIGVRVGMEATGYSRWFERLLAELGFQVWMGDPAEIKAKRVKKRKTDREDARLLLRLMLENNFPQIWVPGPENRDLRQLLWHRHRLVQMRTRIMNQLQALAMNEGYRWKKKLFSEQGRVQLEKLALAPWASRRRQELLELLDRMNPTIEELTAAVEGEARKRPEALRLMTHPGVGPLTALAYVLIIRTPTRFQRGKQIGTYVGMIPCEESSARKQRLGHVSKQGNSLLRFLLVEAAQAATRIHPDWRRRYIHLAMRRHKSIAKVAMGRRLAVRLYWMWRNGCEYSPALEFGSYAGQLGTGHGVK

SEQ ID NO: 305868 - protein, 386 aa, unidentified
MQADANQTESSVAVRTDLAAIFVFLELSRSKWLITSLSPGAGEKMSKFVVPGGDVSALLERFEHLQRKASARSGRSFRIVSIQEAGLDGFWIHRVLEDSGIESYVVDPASIAISRRRRRAKTDRIDGETLVRAWLAHKRGEPRVCAMLHVPTPDEEDSRRLVRERKALINERIRHVNRIKGLLFSQGVSGYEPLNRDRRERLEALMTGDGRPLPKALKAQISRELARLELLIEQIGDVEEARDAVLAEAEHSTRGPALLLNLRGIGPEFAAVLWSEGLSRRFDNRRQVAAYAGLAPTPWQSGQISQDQGVSKSGNPRLRATLIQVAWLWVRHQPTSALAAWFKARVSQNGGHRKKSTIVALARKLLVALWKYVNAGVVIEGAVVRT

SEQ ID NO: 305869 - protein, 424 aa, unidentified
MKVTYQTCCGVDVHKSFLVATIVKTTGGIEPSYQKKRFSTFNNSILEFKQWLLDNDCHDVCMESTGKYWVPVFNLLEDEINVVIANPKWVKAVKGNKDDAKDSKWIGDLFRLGLVKGSYVPCKKVRILREYTRYRYKLVSCRSSEKNRYQNALTVCNVALDSVVSDIFGKSSTSIIDYLLEQSGSSINHEEIASKLLRSLKSKEDAVIESIEGYQMTDAQKYRMRLIRAHMDYITAEINDVDKMIENMISSNPDFKNAVQFLCTIPGVKRDSAITIISETGTDMSQFSSSKRLCCWAGLTPGSNESAGKKKSVRITRAGVYLKPALVQCAHAAVKSDKSPYYKKKYDSLVKRRGKKRAIIAIARMILTAIYQMLSTGELWNPSDLYKIDMPVALVEKQKAKAIRQAKKLLQREGLLPPDEPLAS

SEQ ID NO: 305870 - protein, 405 aa, unidentified
MLFAGDDWPEDHHDVEVQDGAGRVPGRARLPGGVAGIGRFHELTGRLADPDAGPDQVAAGIETDRGPWVAALIAAGYVVYAVSPRQAARYRERQSTSGARSDAGDGHMLADMVRADSRQLRAVAGDSGQARAVRVVARAHQALIWERTRHVLRLRSALREFFPAALDAFDDLTAPGALELLARAPGPAGAARLTIAQITAALKRARRRNTAEKAARIQAALRGQQLAQPPVVAAAYAAAVRAAVAVISVLNEQAAVMEAQVEAHSGQHPDAEIIVSQPGPGMVLGARVLAGSGDDPDRYADARARRNYAGTSPVTRASGKKKAVLARYVRNRHLADALHQQAFCALTASPGARACYDQLRARGTSHHPALRQLASRLAGILHGCLKTGTSYDEATAWQHRLEDAA

SEQ ID NO: 305871 - protein, 368 aa, unidentified
MNQRIRFLGLDVHKETIAVAIAEEGSEPQLHSTIANRPEAVRKLVREVGSQGVQLVAAYEAGPTGYAVHRQLIQLGVDSKVVAPSLIPRASGDRVKTDRRDAVRLARLLRSGDLVPVWIPDDEHEALRDLVRTRADARVDLLRARHRLTKFLLRRGLVPPPGIKAWSLKHQAWAKSLTFTEPAAEVVFHDYRRQVEAAVERVRRLENELTHYAQHSPHLPLIAALQSMRGIALVTAVTIVAEAGDLRRFKTAGQFMAYTGLVPSEYSSGASTHRGRVTKTGNANLRHVLGEAAHHSRHQPRVQGALKQRQDGVPQDIVDLSWKAQQRLHMRYRHLSARIGRPKALTAVARELAGFVWAVAQRMEAPAA

SEQ ID NO: 305872 - protein, 443 aa, unidentified
MSFDRLKRTQRRKRLPGHKLKPSRATLFVQNSKPHLSMKPTYFLGIDAAKHKMRAALSNRSEHVLFEKDLSVQATGLRQLLAAIKRQVNDPEQLLVLIEATGLLHLNWSAALTKAGYAVAVINPLIARRLYTLQNSIRDNKSDPIDARGLCTIGLLHGEKLLVHYRFSLRPEQFILQRAQSVRKALRSALTNLKKTYQSLMDLSFPELGGLLQLDGVGIRQLLIQAPTPAAIAGKRLSTLEKNWMVRPKAAALQALAADSMADPDLAAASGPALVALLQAVAAMEARLHALDQQIAKLACTSVDPQTKALIETIPGFGPVNAAKTLAWLPTEILHSGSNRKIAARLQAFMGNDPRLRQSGQWKGHTKMSKRGVEMLRTAFFQSAFSAAHNDPELRAYYQCKRAQGKTHEVALSHLMRILTRRLVAVLRSGKPYQSHYNLKNAA

SEQ ID NO: 305873 - protein, 346 aa, unidentified
MVHYVGLDVSLKQTSICVVDQAGSVVREGVVDSDPEAIAAFVRSEAPGALRIGLETGPTTTWLWTELKRLGLPVICIDARHAKAVLKMQINKSDRNDAAGIARIMQTGWFKEVRVKDIDSHLVKALLVSRALLVKIKRDLENQIRGLLKNLGLVIGRAKFNVFAVRAEELIENRPELVAVIRPLLAARKAIEEQIGDLDRKVVKLARHDEQVRRFMTVPGVGPITALCFKATIDDPTRFKRSRSVGAYVGLTTRRHASGEVDWSGRISKCGDAMLRMYLFEAAGVLLTRVPKWSALKAWGMRLAKRNGLRKAKVAVARKLAVILHRMWIDQTEFNWSKKEATASQG

SEQ ID NO: 305874 - protein, 341 aa, unidentified
MEEIIRIGMDTSKSVFQLHGVNAGEQPVLRKKLSRREMVKFFEKTPPTTIALEACGGSHHWARLLSSFGHEVKLIAPQLAKPYVKRGKNDAADAEALCEAMSRPTMRFVPVKTADQQAALMLVGVRERLIRNRTQLANAIRGFAMEFGIVAATGMCRIEPLLERIAADQSLPELARELFVMHGIEYRDLLAETKAVEEKLTTLHRSNECSRRLAEIPGVGPVGASLLMMKTPDPRTFKSGRDFAAWIGLTPKDHSTAGKVRLGVITRAGDEMLRSILVVGATALLQHVRAGRSRHASRWLIELLQRKKPKLVAVALANKIARIAWKLMVSGEAYRRTEEQT

SEQ ID NO: 305875 - protein, 378 aa, unidentified
MREENKIGGVRDRSQSGNKPARKHDPYTFSLIIRTVTREQTRISKKGTSNEKPITKRQPKRENNETFVGIDVAKNELVVHVLPTNQQLTVPNSIEGIKELLTLLKEIKPKQIVLEATGGLERELLTNLVANEWSATAINPRQARDLAKGLGDLAKTDAVDAKILARFAQLQVIPTRPVPSQKTQEMNDLVTRRQQLIQMRTMETNRSHQTRQKTIVTSIEKIVNALNKQIDDIDVRIQKMIDENPDWSEKDKILQSVPGVGAKTSQMLIAALPELGDLNRREIATLVGVAPFCRDSGKKVGQRCIKGGRADVRAALYMATFAAIKWNKTIKVFYNQLRARGKKFKVAVVAAMRKLITILNVMLKTKKVWREQCILPEK

SEQ ID NO: 305876 - protein, 359 aa, unidentified
MEQRRCVGIDLGKKTYEVKFIAADGKVTGTNGKTSPAGRKALYEKLLPTDRVALEVCSLAMVMAKELQKKVGCEVVLLNPSQIALIYRSLKKNDKEDALKLARLVQKYTNDELPKVELPTEHEENIRQILTELRQLKHDRTKEINRLHAIFLECGITEMKRKDLATSVNRNESIKILNGLALIQAERNLKKLELIDEQITEVEKLLDKELEGDKNVETLMEIPGVGKQLASSFVAFLGDGSRYSNVSCIGAATGLVPKLDMSSTICRLGHITKCGNPGLRSLLILAAWSHVRSNGGGAIKDKFIYMTTVQSKSKKIAIVAAARKLAELMYTLLKNGTSYEKRTSSDFSKLAGEALSIAS

SEQ ID NO: 305877 - protein, 372 aa, unidentified
MHQSSTLYVGMDVHKESIAVAYVAKDHDAEVISLGTFGTRQCDIDTLIRKLQSKAKHLVFVYEAGPCGSWLSRYLTKKDDVCWVVAPSLIPTRAGDRVKTDRRDARQLARLMRSGDLTPVDVPAVDEEAIRDLRRAREETLRDLKAAKLRLKAFVLRHDIRSTGRANWSPAHLRWLSEVVCPTPAQQIVLQAYVQTVTEQRARLGRLELELHEQVQTWRFAPGVEALQALRGVQCTVAVTTVAALGDLTRFDTPRQLMHDLGLTPSEYSSGARRQQGGMTKTGNTHARRALVEGAWASRYPATVSRHLPLRREKLPTAIQAISWKAQVRLWKRYRQLMAKGNHANQVVVAIARELRAFMWAIAKQVAGSPKA

SEQ ID NO: 305878 - protein, 382 aa, unidentified
MQASTVDTPTAGHCGTIFVALELSQKTWLVTLHSPDRDRISRHKLEGGDHAGLLALLESVRTRAAGKLGTAPKVVTCYEAGYDGFWLHRLLTAAGITNFVFDPASIAVEQRSRRAKTDRIDGELLLRTLMAYLRGEPRVVRIVRVPSVEQEDARRASRERDRLVKEQTGHTNRIKALLRLVGMATGNPRRGDWLGWLARQRDRQGDPMPPGLLSEVKREHARLMLAREQLAALEQAPVAAATPATAQMAERRDLLLRLKGLGPVFAATLAHEVFYKDFHNRREVAGYCGLAPSPWRSGGIDREQGISKAGNPRARLKAVELAWLWRRHQPDSALSRWFAARTANAGKRAKRIAIVALARKLVVALWRYLTTGLVPEQAVMKA

SEQ ID NO: 305879 - protein, 343 aa, unidentified
MTRFVGLDVSQKMTVICVVDDAGRRLWRGQCPTVSEQITVLVRRHAGDDARIGIETGAMTPWLVHELRNLGLEVVCLDARHARAALKMQINKTDQNDAEGLAQIVRTGWYRSVHVKSFESHRARALLGARTQLTGMTTRLSNHIRGVLKTFGLLPGAMRGLPFDRKVEALLLDRSDVALIVRPMLVAWRQLREQIVAFDKAIRALVKSNSACRLLMSVPGIGVLSALAYVSTVEDPARFGRSRSVGAHLGLTPRQYQSGEVDRSGRISRCGDTLARTLLYEAAVVILSRVKRASRLKDWARAIAKRSGNGKARVALARKLSVILHSVWRSGEPFRWSEHARAA

SEQ ID NO: 305880 - protein, 332 aa, unidentified
MNKRSIREMNVIGIDISKAKLDCAWLRENNKVKSKVFSNQIEGWKALISWAKENTQEDTAQLHFVMEATGVYHENFASWLYEQGASVSIINPAYVKHYAQGIGVRTKNDKKDSVVLARYGVKESPLLWQPAPLEIRVLKALLVRLDAVEKDLLRENNRLEKSAFTETPTAVLESIELTIAFLKKERKNLEKLIEEHLNKHDKLKADNALLKTIPGVGPVIAQRMIMIAGGHQFNSASQCAAYLGLIPVEKESGSSIKGRSRLAKNGNPTLRAKLYMAAISAKQYNPDIKAQYERLTEKGKSKKSALGAAMRKLVQICFGVLKHQQPYQPQIG

SEQ ID NO: 305881 - protein, 344 aa, unidentified
MSQVTTIGLDIAKNVFHAHGADERGAAVFSRKLSRARLLDFFARQPACLVAMEACSGAHHWARELIRLGHEVKLIPPVYVKPFVKRHKNDALDAEAICEAAQRPGMRFVAVKSEEQQAAGMVFRTRDLLVRQRTQMVNALRGHLAEYGWVAPRGLAQVALLADLLDEEEMASSLPDAARAMLRVMTDMLAELDDRIADLDKEIARRAREDEMARRLMTIPGIGPIAATAIVALAPPVEIFTKGRDFAAWLGLAPLQHSTGGRQKLGRISKMGERTIRRLLIIGGSAVVRQATVRGAPAGSWLERMLARKPRMLVSVALANKMARTAWALMTRNEDYRAPAAVAA

SEQ ID NO: 305882 - protein, 293 aa, unidentified
MAMLSFGGIDVSKNRLDVMVLPEEQCSSVPNDAAGWANLVEQLRGCSIAAIGIEASGGYERGVMRALLAAGIPARQVNPFKLRQFARASGVLAKNDPLDARMIASFVAIMPTRPAQLQAPAAERLAEMLAVRRQLSAEKVAAENASRLLEDAMLQRLSRRRIGRLTADIDVLDERMVEIVAADAALAHRYRLLTSMPGVGAVLACTLLALLPELGRMSRKQVAALVGVAPYAFESGTLKGRRCIWGGRAHVRHVLYMAAMSASNWNPVLKAFHDRLKAAGKLPKVTIVAVMRC

SEQ ID NO: 305883 - protein, 412 aa, unidentified
MLKIVYRICCGMDVHKSFVVACIATTNDHGVTNYKSKRFSTFTGDLRRCADWLSENNCKDVCMESTGKYWIPIYNILEHTCNIVLAHPKYVKAIRGKKTDKRDAKWIADIFKHDLVSGSFIPPADIRQLRDLVRYHWKLTNFNVGEKNRAQNCLTVSNIKLDDVFSDVFGKAASAITTRLLESNEPFDVKPYLTKNIKKPIEQIQAAVDGEMCAEQAEKLRIIRSHMDSLELCKLNLESLILSTAEKYIPQLNLVMTAPGIQSFAAIGIISEIGVDMSVFPTSKHLCSWAGLTPQNNESAGKKKTTRISRAGAYIKPLLVQCALCAIRTKQFPEVRNRYLALKKRRGHKKAIIAIARMLLTAIYNILKWNEVYNSELYRKADRPPAHREVSVEEAVFILQRQGYLVTAPAVT

SEQ ID NO: 305884 - protein, 473 aa, unidentified
MFPLGRFILHDDDQAPGAETLKLNAIALMKTLPVINSHAAAIDVGSEQFHLSIAGDEPVVFGTFTQEVYRLRDYLKAQGVTSVAMEATGVYWLYAYAELEAAGLEVVVVNGRHVRNLPGRKTDMADCQWLATLHAHGLLRGGFVPPAAIRRLQDYQRLRADHIIGAGSQLQKMQQALERMNIKFHDVISDLDGVSGLKVVRAILAGERHPEALLRLCDPQIQKKKGERVLQSLHGTWAAEHLFALRQGLAAWEFYQKLLTECDQQIEAVLKEMAGPPSEPDQTTHAGKPPGKNAPQIEQLHQLLMRICGGRDVTAIAGIGDNLLLQLLAETGPDLKAWPTEKHFTAWSGLAPGSRQSGKRKGSVKRQRNRAGRLFCAGARSLVNSVDKALGGFYRRLAARKGGLAAMKALARKLAGLYYRVLKYGLAYAEQGLRAYELKYAESQRRLLAKLAAKQGFKLVSVQAEASPTTTTM

SEQ ID NO: 305885 - protein, 359 aa, unidentified
MLGSTDVSDATTSTVIIGVDPHKLVHAAVAITGLGARVGETTIPVSAKGYRDLEAWARSMGTVRAFAIEGTGSYGAGLSRFLCEQGHTVLEVGRPNRQLRHQHGKTDHLDAEGAARAVLSGQAAALPKSATHTVEMIRHLKVARDTAVKARTQAMLTLKALIVSAPAALREPLDRLTTKMTLVRHLAALRPGPISTTTASAKTSLRALARRWLALDEEIKAHDVHLEHLTRQCAPTLVEAHGIKANTAAELLLLVGDNPERIHAEAALAKLCGVCPVPASSGKTNRYRLNRGGHRQANAALYRVVIVRMRTHQPTLDYVKRRTAEGKGKPEIIRCLKRFVVREIFGHLCRTPATANLSA

SEQ ID NO: 305886 - protein, 366 aa, unidentified
MKKISTVAKNGNEIFKEHKLTIGLDLGDRSTHYCILNEAGEVILEHNLPTTQKGIHQVFDGIPRSRIALETGCHSPWVSRQLTQLGHEVIVAHARNVRLIGESSRKDDQLDARTLARLARIDPSLLGPVKHRSAKAQIHLTVVRARAGLVSARTALVNAARGLTKSYGERLRKCGTRQVSRDLVAGLSAELRDALEPLLAEVEALNERIAEYDRRIEQIAKEVYPEVALLKQVKGVGTLIALTFMLTVEDPHRFRRSRDVGCFLGLRPGRRNSGMSEPQLHISKEGDRYLRTMLVQGAHYILGPFGQDSDLRRWGLRLAERGGKNAKRRAVVAVARKLAVLLHKLWVSGEAYDPLRNNQKVESAVA

SEQ ID NO: 305887 - protein, 347 aa, unidentified
MRFYTKQHKFYCGIDLHANKMYLCILDQTGEVRLHRNLITDREVFLKAIHPFREDIVVAVECMFTWYWIADLCVEEGIPFVLGHALYMKAIHGGKAKNDKIDSRKIAVLLKGGMIPQSYVYPAKMRATRDLLRRRNHLMRKRAELFAHIQNTRSQYNLSDPLGRIAKPQNREGVAERFEDPSVQKMIATDFAVIEAYDPIIAEIEQDIIQSARHHDPVSHALLHSIPGVGRILSLVILYEIENIKRFPSVQDFASYCRLVKCAKESNGKKYGSGGKKIGNAHLKWAFSEAAALFLKGNEQGKKYLDRLTAKHGKGKALSILAHKMGRAVYFMLKNKKPFDQDKFLGL

SEQ ID NO: 305888 - protein, 403 aa, unidentified
MYYCGIDVAKRKHAVALLDEHGHPVQRPFTIENTRAGFDQLLQALAGLKGPVLIGLEATGHYWWALYEDLTHHDHPVVVLNALQVHAFRKSGVRKVKSDRTDARWIAEFLRFSQPEPAQPSTTVFLQLKEVSRFRYHLSDQIGDGKRKLLSILDRVFPEYETLFSSVFLSSSRHLLAKAASAQELAAFDLSELTALLQTASRNRFDRTKAEAVQTLARQSVGVRFLADAAQLEVRCLLAQIDLLEEQRQQVDQALAQLMDQAPQHLTSIPGVGPTTGAALLAEIGDVHRLPMSLATGQGGPVRDAPEKLVAYAGIDATVYQTGQFEARQMHMSKRGSPYLRHALWQAASMAIQYDDELRVYYDRKRKEGKSHGTALGAVCRKLLTRVYIVLKENRPYEVRTQH

SEQ ID NO: 305889 - protein, 319 aa, unidentified
MDAVLGIDIAKAKFQVALLADGKLRHKTCPNTLAGFQQLADWLVRQGVTRVHACLEATGTYGDALAAWLHDADHVVSIVNPAIIHAYARTQLTRSKTDRLDAELIARYTATQHPDAWTPPAVEIRQLQALVRRLDALHGMRTQEANRLAAGVTVPEVRLSIEAVLANLDAQIAHVQSLIRQHLDQHPGLRAQRDLLTTIPGIGEATAAILIAELFDKRYTSARQAAAFAGLVPRLIESGTLRGRSRLSKIGPGRLRKALYFPAVTALRWNPTIRAVRARLHAAGKPTMVIIGAAMRKLIHLAYGVLKTGRAYEPPCAHP

SEQ ID NO: 305890 - protein, 457 aa, unidentified
MKKMGTKKGVQRRRTLTSLHPDAAGLDVGATFHVVAVPPGRAERSVRSFRSFTTELHALADWLTEVGIKTVAMESTGVYWIPVYEILEARGFEVLLVNARDVKHVPGRKTDVNDAQWLQQLHEHGLLRGSFRPREQVVQLRVYLRHRERLIEYAASHIQHMQKALMQMNVQLHHVVTDITGVTGMRIVRAIVVGERDPRVLASYRDVRCKASLETIEEGLKGNYRPEHVFALRQALELYDFHHRKVAECDAEVERVMHALNAGRVAPTRPLPKVRHASGRHEPAFDARGALYTLLGADLSQIHGFGPYTVLRLIAECGDDMRKWPTAKHFTSWLCLATGNKISGGRLLSSRTRRSSNRAATLLRIAAVSIGRTQTALGAFYRRLAARTGKAKAVTATARKLAVLFYNALRHGLAYEDPGVGYYEERYRQRAVRNLERRARQLGYTLVTPEAATGGVS

SEQ ID NO: 305891 - protein, 344 aa, unidentified
MTYFAGLDVSLRSTNICVVDNQGELIAEGKTDADVAGIVAFLDALDVEITEVGLEAGTLTQYLTYGLQFAGYEVVCMEARQVKSALSAMRNKTDKHDARGIAQLLRSGWYSRVHVKSMESHRVRALLASRRAVLAKCIDLEQEIRGIFKVYGIKLPSRLGHGAFDPKVRPLIEADEVLSLSLLPVLDARLVLYRTFRELDNRTRKLAQSDPICQRFMTAPGVGFITALTFKAGVDDPARFKHSRTVAAHFGLTPRRFQSGELDLEGHISRCGDASVRSTLYTAANAMLTRSSKWSSLKAWGMKLAKTRGHRRAVIAVARKLAVILHRMWIDDTQFRWGTEAARS

SEQ ID NO: 305892 - protein, 369 aa, unidentified
MSTSVVYVGLDVHKESITIAVAREGREPAETLKTIPYDGVRLRKTLSMLCKNGEVLKVCYEAGPTGFGLCRRLREKGTDCIVVAPSLVPGKAGDRIKTDPRDARRLAHFLRSGDLTEVYVPDEAVEAIRDLERARDDAKCAERVARHQLSKFLLRQDRHWEGTAWTGKHRDWIRVQKFAHPAQQRVLEDYLKTVEDLAERVEKLTAQVEELVQETALAPLVKALQAFRGISVVSAVTIAAEAGDLRRFATASQFMSYVGLVPSEDSSGKRQCRGGITHCGNRHLRRILVETAWHYRHPPGLSKELRRRNQGIAVRVQRIAWESQKRLNKRLYHLVHAGKNVNKAITALARELAGFIWAVGQEEKLLEAT

SEQ ID NO: 305893 - protein, 348 aa, unidentified
MRCYTNPHRFYAGVDLHARSLFTHVLDHQGKTVFEKDLPAEPQAFLDAVTPFRDGLVVGCECMFSWYWLADLCEDHQIPFVLGHALYMRMIHGGKAKTDRIDAAKLASMLRGGLFPMAYVYPRAKRPTRDLLRRRSFFVRQRAQLITHIQNTNTQFNLAPFPKKLTYAANRSTDIAERFDHPSTRLSITADLGLIDAYDTQIAELERHLVKNAKVDDPVTFGLLRSVPGIGPILGLILLYEVDQIVRFPEAGNFLSYSRLVRCAHVSAGKVKGSGGKKIGNAHLKWAFSEAACLMLRALPAAKAWMQRQERKRGKRKALSILEAKLGRTVYHLWRKQVPFDAKRFLAS

SEQ ID NO: 305894 - protein, 446 aa, unidentified
MFANEYSGHADKLLTIFLSKSVECISIPDEKELVVTAINQFAAHVGLDWADKKHDVCVQFKTGERVFHVIDHTPEELDIWLNDLHKQVKGRIAIALELKKGPVVYALQKYPFVTVFPVHALSLARYRQAFSPSGAKDDPQDAELALDLMLRYPQKIKAIEPDNAQIRLLQQLVEQRWLLVEDKRRFVNRLINTLKQYYPQPLEWFSHRDSSLFCELIIRWPSLQQLKRARGDTVRHFMNAKGGRAIALTEQRVASIANAIPLTTDESVIEANALMATALATQIKVVSEIIGTYDARIESLFDTLPDAGLFKSLPGIGPCMGPRMLAALGDNRNRFNSAEEIQNYAGIAPVTERRGQKSWVHWRWQCSKFVRQTFVEWAAKTVNSSYWAKLYYQGLREKGKSHQSAIRALAFKWIRIIYRCWKARTCYDEAKYLLSLKERNSPLLKS

SEQ ID NO: 305895 - protein, 368 aa, unidentified
MDEITRAMPVRVGVDLAKSVIQVDGVDAAGRRVVAKVLRRGQFLRWCAQLPPGCIVAMEACSSAHHWARKLRALGLDARLIAANFVSPYRMEGKSGKNDATDAAAICEAASRPNMRFVPIKSCQQQGLMSLHRVREGFKEERTACINRIRGVLAEFGLVFGKSPKVLRGALHDVIEDASNDLSTQARWVLQRALQHWRELDEHLHWCDRQVGAHVRNDPAARRAARITGIGELGASAMAASVGDFKQFRSADQFGAWLGLVPRQNSSGGKISLGRITKRGDDYLRTLLIQGAKSAVMSAHKRDDPISRWLVQLRQRVGWQKACVAMANKNARILWAVMTREHEFDPRHDSVKPPAKQPTAQTPSHCAA

SEQ ID NO: 305896 - protein, 429 aa, unidentified
MNPTQKIDPSSSTTQFVAWIGLDWGDKEHAFCLVASGSSQFETGKLTHSAETLHRWFKDLEQRFGGRPVALAVESNRGAVLHVLAQYSWLTIFPINPVTSARYRKAFIPSGAKDDLPDAAIVLDLVRYHQDKLRPLIWEDENTRQLSALVLARRDTVDRRTQALNQLTSVLKTYYPQAFGLAGEDLRAPMALEFLRRWPDLISLKAARLSTIRNFYYRHNVRRPEVVEKRLAQIKEMVALTTEEAVVSVALLQLKLLLELIATFNKHIARFEGETATTFAAHADAALFKALPGAGPALAPRLAVAFGTDRTRYPNAESFQKYAGVAPVREKSGGQLWTHWRWQAPVFTRQSLVEWAGQTVIWCQWAKRYYERMKAKGKKHHVILRSLAFKWVRILWKCWKTNTAYDEGMYLKALEKKKSPNLPLPETSH

SEQ ID NO: 305897 - protein, 424 aa, unidentified
MQYALTQVLPDVPAGGVCAGIDWATADHVACVVDMAGRVTDRFSAAHDKAGITAMITRLRRSKVTEVAIERGDGPLVDALLAAGLTVVVITSRQVKNLRSRYGSAGAKDDRFDSFVLADTLRTDRARLRPLVPDTPATISLRMAVRARRDLVRHRVAVCNQLRAHLAVAFPAGITLFHDLDSPISLAFLARFGSQDAAAELDEQAIGAWLATIAVRGRPAPASVLCARLHAAPPGATGADGTAQACITAALTTTLTTLSAQIKALETQIAGQLAAHPDQHIFTSLPRPGTVRAARLLAEIGDCRPRFPDPESLAGLAGVAPVTRRSGTRIAHGFRWSVNRQLRDAICDFAADSRHASPWAAAIYDDARARGKDHPHAVRITARAWTYVIWRCWHGGTAYDPAKHNALQRILAQQATESATQDDR

SEQ ID NO: 305898 - protein, 354 aa, unidentified
MTQSRTLYVGLDVHKDALAVASAAKDDGAEVVSLGHIGTRQRDIEQLVRRLHAQSPQLVLVYEAGPCGDWLSRSVTTKGHGCWGGAPALLPKQAGDRVTTNRRDALKLARLRRSGDLPPVSVPAVEEEAMRDLCRARAETLHALQAAKLRRKALLLRHALRSTGHAPWGPAPLRWLSKVVCPTAAQPIVLQASVHAVTAHTACLERLEQALHDHVQTWRLAPVVDALQGLRGVQGTVAVTTVAARGDLTRFENPRQLMRYLGLTPSAYARGERRRQGGLTKTGNAQARRALMEGAWAYRSPAKGSRHLPRRLAKLPTPIPALSWQAQVRLGQRSRRLIARGKHAHQVVVAIARA

SEQ ID NO: 305899 - protein, 338 aa, unidentified
MKITTVGVDLAKSVFTVYGVDEHGKPALRKTVRRGKLLELFAQLPACVVGMEACSGAQHWARELRELGHTPRIMAAEFVEPYRRGGKNDTNDAAAICEAVARPQMRFVPIKSVEQQAVLAVHRLRQGLVEERTALANRIRGLLTEYGLVIGVGLDRLRKALPSILEDAESGVPGIAREVFADATRQLIELDARIGEYDRRIAALARASEPAQRLMKMEGVGPVTATAIVASVGDAKMFRNGRQFAAWLGLTPRQHSTGGKQRLGAMTKHGDVYLRTLLIHGARAVLRVTPTHSDAKSRWAESLRHRRPDNVAAVALAAKHARIIWALLARGQHYRPAV

SEQ ID NO: 305900 - protein, 411 aa, unidentified
MEAAVITAVGIDVSKSKSTVAVRRPGGEIVLRPFEVHHTNSDLKKLASTLKKLGGDIRIVMEHTSTYWRPIALTLKEADFFVSVVNAMLIHDFSDNTIRKLKTDRADALKIANYALTFWDTLPPFNNEEETRLLLKMQSRANERITATATALRNGLIALADQIFPGVNIAFDPNTKNANGHEKWVDFFLRYWHKDCVCQYSMEAFTESYRGWCKRKNYKFRTDTAHQIYLLAQEGVATLPKCESTKILITQACKSLNAVCEAKQSTQLEMQRLAAMLPEYEVVMQMEGAGPITGPALMAEIGDVRRFKNKKALVAFAGIDAPPFQSGAFESKSRHVSKRGSPHLRRTIFIVSNTILTRSNPENAVYCFMDKKRSEGKHYYVYTVAGSAKFLRVYYARVTEFLRSQPSPDAC

SEQ ID NO: 305901 - protein, 387 aa, unidentified
MYFVGIDISKFKHDCAIVDEFGDVITPSWSFQNDREGFSLLKELLDALDGEKKIGLEATGHYGQNLKLFLENNDFSFMEFNPLLINRFVHSKSLRKTKTDSIDALMIAQYLMTVEYKPYPPSFYTFEKLKSLTRFRDSLIRQRSRQLVELTNILDKVFPEFKPFFKGRFSATALYILSHYASPEKISNMNSKSYEPLRHLSRGRFSMVDFVELKTLVRNTVGSTCDYLLQEMEITIDIYNQLQSKAEEIELQIHDCVLDLAPPMLTIPGIGAASAAVILSEFGDLSKFNSPSKLLSFAGMEPGYFQSGTSESTGKMVKHGSSHLRYAMMNCAQTVINNEPTFAAYYAKKRAEGKEHRVALTHVAKKLLRVIYTLQTKELSYNPDLVR

SEQ ID NO: 305902 - protein, 393 aa, unidentified
MIYIGIDVAKDKHDCFITNSEGEVLFNAFTIPNNADGFHDLFQKISSLTNDFSNVKVGLEATGHYNYNLLGFLIDKGLPTFVINPLHTNLFRKSLSLRQTKTDKVDAHTIALMMMSGVNLQSYSNTSYHNEELKSLTRYRFDKVQERAKLKTSISRLVNILFPELEKLVPSLHMVSIYALLAEFPSSAQIASCHLTRLTNLLANASKGHYNKEKAIEIRNAAKHSIGSNMPAKSLELKHTIRLIQELTSEIDEIECSIKSIMDEIRSPILSIPGINYRMGAMIIAEIGDFNRFSSPDKILAYAGLSPSTYQSGQLDGCYSHMEKRGSRYLRYALFNATKFVCIWDNQFSAYLAKKRSEGKHFYVYMIAAANKFLRIYYARVTEHLNLFTTTTA

SEQ ID NO: 305903 - protein, 403 aa, unidentified
MKQEPRRLAGIDWASRAHAVCVLEPGGGIRARFDVPTTGKSFAGLIKRLAKLRVGDVAIERPDGPLVEAMLKEGIRVFVIAPRMLKALRQRYGATGAKSDPGDAYVLADVLRTDGHRLKPIQADAPETKVLRALTRTRKDLVEARVALVNQLRAQLELCFPGAIGLFNELDSAVSIAFLRRYPTALRARALGEARLAAFLRRIGYCGRRPVGELLARVKEAPAAGIAGAEAEGRGVCVLALLDAIETCNAQARELEAEVVERLELHRDAHVFTSLPKAGRGVRAASLLAEIGDARERFPDEESLGALAGVAPVTRASGKARSVGFRWACDKKLRNALIDFADDSRHASPWAARVYTDAISRGKRHPHAVRILARAWVRVIWRHAAPSSYARTMAWYAGWLSSS

SEQ ID NO: 305904 - protein, 330 aa, unidentified
MNFKNVIGIDVSKNTIDVCIHNSQSFRQFKNTKKDLVSFLEWVKQNVENHLSILFVFEHTGMYSHLLTVFLNDKKCNYLIASGLDIKRSMGITRGKDDVIDAKRIALYGHRLKDEIKPSKKREDSITKLKSLMSLKTKLIKQRASFKATLGEQKSIYKFKDFKTIFGVQEKMIHYLTKQIQNIETEILEIINHDDKLKHNLTLALSIKGIGLQMATTMIIATDNFQKFENWRKFASYCGIAPFPYQSGTSIKGRNKVSQLANKKIKVLIHMCAINAIQHNPEMKMYYEKRLELGKNKMSTINIIRNKLIARIFAVIRRQTPYVDIMKFAS

SEQ ID NO: 305905 - protein, 429 aa, unidentified
MNYTQNERIKQVDEKTVVVGVDIAKEIHYARVFDNRGIEYGKVIKFRSNIEGFKALEKYIKEIAKRERKEKIIVGIEPTGHYWYTLANYVIKKGMNLVQVNPYHVKQAKELDDNTPSKSDRKDPKTIAMLVKDGRYAVPYMPEGIYAELRKTNEIREVIKKKEYAVKNRIQRWIDIYFPEYKKVFKGLYGKTSIKTLEKIPMPFEIIEYKPEEIVSIWKEDVKRAVGKKRAEKLINIAKETTGITTGMIMARYEIKSLVEEYKNLEKEIEEIEETLKKQVYTIPGIEKALSIKGIGIITISGFIAEIGDIKRFSHPKQIIKLAGLNLKETSSGKHKGRTTISKRGRRRLRSLLFKAILPMVAKNNEFKMIHKYYTKRKENPLKKKQSLIALMGKLIKIIYTLITKKIEYDPSKLINDVHGNKKMQFITE

SEQ ID NO: 305906 - protein, 344 aa, unidentified
MEHYAGLDVSVKETSVCIIDAAGKVTHEVKVATEPEALRAVLLDNTFTIERIGLEAGPLSQWLYSGLAEAGLPIICVETRHMKAALSAQLNKSDRNDARGIAHMMRVGLYRPVHVKTLTSQKRRMLLTSRQLLQAKAIDIENDLRGTLRNFGLKVGPVGTSKFEARICELVADNPDLAAIAEPLLIARRVLREQLAVLHRRLLAVVREDEVCRRLMTVPGIGPMVALAFCATVDVPARFKNSKAVGAVFGLTPRRHQSGEVDRTGGISKCGDAMMRRLLFDSAHVMLTRTIRWSWLKAWGMKIARHRGMKRAVVAVARRMAVIMHRMWADGTEFRWTNTTAAAA

SEQ ID NO: 305907 - protein, 350 aa, unidentified
MVMVGIDAHKETFTAVAVDEVGRRMAEKTFKSTSDGCYELVRWASRWGERRFAVEDCRHLTRRLESDLLTAGETLVRVYPRLMAGERRGDRERGKSDPIDALAVARVALREPDLPVARLDGPARELRLLTDHRETLVRERTRLQNRLRWHLHELDPEFHIRRRGLRAMSQLDRVAARLETMQGLVAELASDLVERCRELNRKINDLERRLRPLVRQLGPSLLAIPGCGILSAAKILGETAGVDRFPTPAAFARFNGTAPIPVWSSNTERFRLNRGGNRQINHALHMIAVTQLRGVGPGKAYVEKRITGGNTRTEAVRLLRRRLSDAVFAAMRADHNRLVDTANASNGQAA

SEQ ID NO: 305908 - protein, 336 aa, unidentified
MDSLVEFWIGIDVSKRKLDVALLDARGKLKQRVFANDAAGCGELHQWLMGRGVTPLAGRICMEATGPYSETSATALVDAGWVVAVVNPARVKGFAQGELLRNKTDSADAALLARFCARMKPEPWQAPPPAVRELRALVDRLQVLRDMQQQERNRLEAHAANQVVSPSIREHINWLQACADKLQTQIDDHIDAHPLLAKDAELLNSIPGIGQVTTPKVLAFLGDVRRFANAKALAAFIGVTPRLKESGSSVRGRSMISRAGHAQMRKALYMPALVAARHNPAVRAFSERLRASGLAPKAVVGACMHKLAVLIYGVLRSGVPFDPRIAMPRLDLEDGI

SEQ ID NO: 305909 - protein, 323 aa, unidentified
MGVDVSKNTLDVCCAEIKQHIQIKNGTEGFLQFKKWCRTFDIKLQKCFLVMEYTGGYEYKLIQFCESNNILYTRIPGLAIKNSLGITRGKNDKVDAGRIAQYGEEKHKLLNADKPLNEAVVKLKELLSFRKRMVRENAGYKSSIKERRHMYGDNKKDIMVKMLEQKQKENSKKIEIVELQLIKIVTTDEKMHTNYTLLTSIKGIGKINALMTIAYTENFVSFTNPRSYAVYVGVIPFDHSSGTSIRGRKRVSHIANKELKQELNQAARSAMEWDKEMKLYGENKMKTKCYKVVLNNIKFKLILRMFAVVKKGKMYVENYKNAA

SEQ ID NO: 305910 - protein, 326 aa, unidentified
MCESSNIIEVIGADISLREIVLAWARSQRPCLSIANNRKAIVAWLKQLPAGCVIGMEATGRLHHLLADLAVGHGHIVYVLNPKHVASYAKGVGQRAKTDPLDAGVIARYVDRERDALHRYVIPSALQRTLRDLISQRASVVRHTMALKQSIQATGTGPNRALKRAHQAALKSLNTLLTQINNELKRVIADNDELENKRKQLQRITGIGFINSAALTHRFDRTPYANSDAVVAAYGLDPRPKDSGNHLGKWRLSKQGNPEDRRLIYLAAQSASKTKLFNPIYRSLLARGLSTTEAIVILARKLLRIAFAIWTSGKPFNPNEVGKRAC

SEQ ID NO: 305911 - protein, 391 aa, unidentified
MSMYFIGIDISKYKHDCCIISAADQKVVSKVTIKNNKAGFNELLTIIHSLANPEDIRIGFESTAHYALNLELFLENSLLTFMEVNPVLISEYKKSKTLRRTKTDSVDCESIARWLMTVEYKPHSKGFYHAYSLKSLTRLRDKLIRQRSFYLVKITNVLDHTFPEFKPFFNERLSKTALYLLENYGSAEKMARMNSASYEKLRSVSRGKFSPQQFLRLKELAANTVGVNNSIFDVELNSLLSLYKSLVKEIDTIEKEINKLIEEVHPHYMSVPGIGPLSAAVIYSEYGDISNFTNPGQMLAFAGIEPGINESGTESHGGKMVKRGSSQLRYTLINCCLPLIRFDMTFATYYAKKREEGKPHRVAITHVAKKLIRVIYTLESQDIDFNAQKLR

SEQ ID NO: 305912 - protein, 416 aa, unidentified
MLFIGDDWAEDHHDIEIEDADGRRLCKARLPEGLQGIAALHALVAQHAPPAWVDLDPHQVAGQALVGIETDRGPWVAALRAAGYQVFAINPLSSARYRERHSTSGAKSDAGDAHVLAEIVRLDRDHHRLIAGDTDLAEAVKLVARAHQTAIWERTRHVLRLRSTLLQYFPAAVEAFEDLAATDSLILLGRAPSPMRAAKLTRAQIDSALRAARRHHIETKTPALMALLRAPALQQPPTIDGAFAAVVLGEVRILTALNMQIAELQVVVADHFSRHPAAEIYLSQPGCGPILAARVLGEFGDDADRFTDARGRKNYSGQSPITRASGKKSVVMARYATNRRLGAALHLQAFSALTGSPGARAYYDELRARKIGHHAALRQLANRLVGILHGCLKTATKYDEDTAWQHRRPDIQTVAA

SEQ ID NO: 305913 - protein, 371 aa, unidentified
MSNVAKYIGLDVHKATIAVAVAEGGPGGEVRFVGTVANDDDEVRKLVKRLATPGATLSFCYEAGPCGYGLQRLLIKLGQPCIVIAPSMMPRRPGDHVKTDRRDAMTLARLLRAGELTAIWVPDEAHEAVRDLIRARRSAQEDATAAKQTVRSFLLRHDRRFEGRSAWTKMYWRWLSEQRFDYPHQQLAFEELQKRVLEAQARVVRLESALGEAVASWHFAPLVRGLQALRGIKLVSAATLVAEVGDLTRFDNPKQLMAYVGLVPSEHSSGARTHRGRITRAGNAQARTTLVEAGWSYRLPAREERRYRERVADLPEEVQAIGWKAQMRLCQRFRRLSATGKPQPKVTTAIAPELVGYAWDIARRMAPAMAN

SEQ ID NO: 305914 - protein, 331 aa, unidentified
MNCIGVDVSKQELVTYDGVKERIFSNTRGLEAFHRFLKRSKEPLVVFEPTSTYSRRLETLCRASQISCCRLNPRVVPHLRLVGKGRSKTDSSDAELLYRYGIERGQQEAAQLENDALAESIQARLTCYRVAQKARVAYQNVLEALSQDPATSGELLGEVREEIRELKSKEKQQVDAAQKLIEDDSDTKHRFDLLLSIPGVGPITALTLVALFRKYANSNRSQIVALAGFDPIRIQSGTSVHGKSRISKRENREVRRRLYEATLSAARYNPSVRAIYRRLKESGKPEKVARTAAARKLLVIAHAIYKSGESFRETNRKRLGVLQEFPSCSPR

SEQ ID NO: 305915 - protein, 362 aa, unidentified
MQIIGCDLHARQQTLAMLDTATGEVVHKTLSHEGESVREFYSTLPGPVRVGIEATGSMKWFLHLMEELGIDCQVGHPATIRAAEPRRQKHDQRDAELLLKLLVENRFPSIWQPSQELLDLRGLLLHRHQWVRLRTRIQNALQAIALANGLRRASSLWSESGQEAIASLPLATHTAQRRSELQAMYARFEAEIEQLNQQVLEQAGQRPTAGLLMTHPGVGPITALATDVFLGDAKRFRDGKALASYIGIIPREHSSGGRQKLGGLSKQGNPLLRFLWCEAAAHAVRRDPELQRFYRRKLVQKGLGKARVAAARKLGIRLWIMLRDQIDYQEFCRRGQMKQRSGDACAGMPGGRYGAKSHRLID

SEQ ID NO: 305916 - protein, 363 aa, unidentified
MNYVGIDIHKRYSVLAAQDESGRKLKEARIEANSAEQYAQFFQDLEGPSKAVLEACWNWGLTHDLLEEIGEVEEVVLAHPLKTRLIADAQIKTDRLDAFALGTLLRGNLVARAHIPRRETRARKNLLRQRLYWARLRTMLRNRIHALLDRQRNLELPVCSDIFGVRGLGFLRRLELAEPDHTLLREALALHDLIAQQMKAQEKRIAAEFKEEATHRHLLSVPGIGPTLAAVVACEIDQIERFVSADKLCGYAGVVPTTYSSGGKVHHGRLLPSCNKWLRWALVEASWVAISCSPYFGALYRQQRARGKKANTAITIVARRMCRILFQLLSEKRSFEKRAPKMQTYFVPGCSALALTATSAMKS

SEQ ID NO: 305917 - protein, 397 aa, unidentified
MIAVGIDVSKSKSTVAVIDSNGVVLASPYTIAHTQPELHTLAKYLKELKEPVTILMEYTGHYHYPVLKQLQSEGFPVCLINPYQMKKYGDTEIHKAKTDKKDALRIATYALEKSYKLVPYSSMEQKYEDLKFLSRQYEQRISFVAKLKVQLLDLLDQTMPGITKQLSLTSRNPEKCALLLFIKRFKSFDEIQRMGKTRFLSSYETMTKKTSDRYAAQKGLAIYELAKDSITTRGDDPYIWLSQTQCVDLLSAAQNAADEIILKMQNIAQTIPEYAVLRAMHGVGDRLGPIILAEIGDIRRFHSGKALNSYAGNDAPPYQSGQFESRNRHISKRGSSALRKACYEVMQALKLTKPQDDPVYLFMLKKEREGKPYNVAKMAGVNKFLRIYYAKAMELYR

SEQ ID NO: 305918 - protein, 343 aa, unidentified
MNKLNVIGVDLAKNVIQVSVLSPSNHELRNSSLTRRKFAEFLGRQRPSLVAFEACATSHYWARVAQRLGHEVKIIPAKAVFPFRQGHKTDENDALAVAEAARRPNVKLAPLKTVEQQGMQAIQRSRELLVHERVSLANHLRGLLMEFGMVIPQGFASLYRLLPEILEDGENELPDLYRPTLNLLYGRLCDLREDLERLNREIEVLVQANPVCRRLTALEGVGPIGSVLLYATLGTGEAFTNGRQFSAYLGLTPKQFSSGGKVNLVGISKRVANRRLRAVLITSARAYVYHMKEPKTAKDRWLWAIVERSGKCKAAVALANKNVRTAWAMLTQNTEYQHYPIAA

SEQ ID NO: 305919 - protein, 416 aa, unidentified
MNTLSNQSFTAFVGIDWADRKHDVCIQEANCNRREFAVIPHKVELINEWVQSLVQRFGSPIAVAVELSKGPIVYALQKFDCFVIYPINPSTLAKYRETFTPSGAKDDPTDAEFAVDLLLRHPDRFKPIQPQSVEIRTLTTLVEQRRNMINDKVRITNRLRSALKQYYPQALEWFDHIDTPIFCDFIEHWPTLTQAKRARKNTLTTFFHEHNMRFAQVLEERLTAIKNATPLTMDDAVIIPHRLQAQVLIEQLRITLAGIKQFDEEIERVAHKHTDYALFSSLPGAGPSLAPRLLVAFGEDRTRYRNAADLQNYSGVAPVTERSGKKHWVHWRWQCPTFLRQTFTEWAAQTINKSFWAGQYYRQQRAKGCTYQAAVRALAFKWIRILYRCWQTGKPYNESTYLKALEHRGSPLLKQA

SEQ ID NO: 305920 - protein, 355 aa, unidentified
MEEISVIGIDLAKSVFQLEALSSDGAVVWKRRLRRAAFMRFMEKQAPRCLVGFEACGGAHYWGRFLGDLGFQVKMMAPKAVKAYREGPHKNDGRDAHAAAEAASRAQVRAVRVKSKAAQAVQALVRVRLLQIKQMVQTGNQLRGILTEFGIVMPRGHHRLQQAIIALGEDPRYQRLPPELREAIVGLREQLAEQVERVRLATAALAQATRADPACELLRSVPGLGPINVAGLSVALEAPQSHRNARAFAASLRLVPRQWQSADKQQLRGIAKQGASDIRRNLVLAGQSLLTMIERRQEPPQDRLLIWAQRLIRRKQRNVAAVAVAAKLARIAWAVLAKGEAYQTRQFTAREPAAA

SEQ ID NO: 305921 - protein, 428 aa, unidentified
MNEPSNNDDTQNDYAAFIAIDWADRKHVFSLQVAGQTKKETATLEQKPEVIGPWVAKLRERFGGRPVAVAVEQSRGALIHALLTYDFLVIYPLHPATVAKFREAFKSSGAKSDPLDTDQILQILTKHLDQLKPLKPDTEETRLLARLVEDRRKAVDLRTSHVQALTAALKEYFPQAIELVNGNLTSRLACDFLKKWPGFEAFQQAKPSTIKRFYYGHNIRSPEVIEKVLGLATTANPLTTDSAIVESGSRLSQMYAQIIQTLNPVIVDYDRRIEKVFHEHPEANLFNKLPGAGPALAPRLLSFFGTDRSRYEAAGNVQSFSGIAPVTKSSGKSRVVYFRHACPKFDRQTFHEFARLSLAKCQWARNYVDYYTAKGKKFHAIIRALAFKWIRILFRCWKNRTPYDETQYMDNLKKRGSIFATLHLEQKS

SEQ ID NO: 305922 - protein, 311 aa, unidentified
MANIICGVDVSSETLDGRIAGSGLELSVRRDPEGIAALAAFCGEHGVELVVMEATGGYEKLPFGLLWAAGVPCAIANARSVRRFAEAMGVLEKTDRIDAGIIADYARAKGLVGQAPESQAQEHLRALVTRLRQLTELKVAQSNQRRLVQNPAVVAGFDEILALIARQSRGLEIQIADLLDADPLWRTLDAAFRQIKGVAGRTVARLMAQMPEIGTVSNKAIAKLAGLAPIASDSGRRKGHRSVRGGRAQVRSILVVVAGVVARHDPDIAAFHQRLTLAGKPKLAIRVAVARKLLVRLNAKARDARALMQTA

SEQ ID NO: 305923 - protein, 416 aa, unidentified
MEPQRNKVCGIDVHKRFLIATILSRDGKKDTQRFRITLEDLLKFRDWVIENECEQVAIESTGIYWHPVHAVLEGKVDLIVANAYKIKHTPGRKTDVSDSEWIAELCLNGMNEPSRIFPKDDRELRRLTRAREGYVKQMTQEKNKIHQSLDSACIKLASVISDIFGKSGMYLLNCVLEGRDIDEIIEGIPSGRLKKKADQIKESIKNRLEISQVILIRGSLSLMRSIQERIDELDGEISARIQYRKNDLAIAMSIPGTGFVSATAILAEIGNYIDFKKPEQLAAWCGLVPSLYQSAEKTILGGITKQGSKHIRRMLIQVAYAISRTKDSKLKKFFLRIQAKKGSKVAAVALARKVLCILHHLLINQEMYLEDRDKKNMRQKPLTSPSPIEMSIQEMIDCIVRAGYVVTKSDSRGGFG

SEQ ID NO: 305924 - protein, 348 aa, unidentified
MVRYVGIDVGKAKCRAALMNQNGAVESEFFFENSNKGILKLVSTLTSEDKVVMESTGNLWLNIYDTLDAKRIKVVLANPLKTKAIASAKVKTDKLDARILAHLLRADLIAESYVPPENVREIRALVRHRLSLVQMRTMVKNKVHAITDKYGYRCEYSDMFGKAGTQWLKTQEMSEIDCLLLENHLSLIESINMQIRRVDEAIRERASQDEDVRLLLSLTGVDVYTALLLRSEIGPIERFADYKRLVSWAGLAPSVRQSGNVEFHGRITKRGSSILRWALVEAARIAVRHDDRMKAFYERVAKRRGDQKAAVAVACKMLKIAWFMLTRHETYGNANVKRYGEKLKKIDA

SEQ ID NO: 305925 - protein, 353 aa, unidentified
MKCDKYMGMDVHQAMTVVVVLDGEGKVILETMVPTEAAAIIRLVQSLRAPLHVTFEETTQAEWLWNVIRPFVTEVIVCDPRRNKLLSEGSKADKVDARKLADLLRTGMLRSVYHGHEATRKLKELVRAYEALSIDTQRTMARIKAIYRGRGIHTPGRGVYQAKQREQWLALLTEPGIRQRAAWLYQQLDQLRPLRRTAKETMLAESRTHRAVGLLKTIPQLGPIRAAFIVATVDTPHRFRTKRQFWSYVGLAVVTHMSSEYEMIAGRVVRRRKPVATRGLNHNCNHRLKKVFISAASAGNRYEPYRPYLAALTQNGMRAEMARLTLARKIAAVALIVWKKGEAFDPKKLNLTT

SEQ ID NO: 305926 - protein, 345 aa, unidentified
MNIIRVGVDIAKSVFHVHGVDRHDKTQWQGKYARQKWLDALSRKVPVGAEIGMEACASSHYWARELQKRGYCVRLIAAQFVKPYVKSNKNDRVDAEAICEAMSRPNMRYVAPKTAAQQDVQAAHRIREELVGQRTAKANQIRGLVGEYGVVAPVGIQQLRRALPRWLEDAENGLSDSFRILLNGLADDLRYLDDRVAALDQRITDTVNQDPVARRLMTLRGVGPLTASALSGALGDGQAFRRGRDFAASLGLTPRQHSTGGRDRLLGISKRGDSYVRKLLVHGARAVLRHVNGKDDGLSHWLKGLTSRKHVNVATVALANKTARIAWALVHNGTAYDDKLAAVGT

SEQ ID NO: 305927 - protein, 334 aa, unidentified
MKKRYFMGIDVAKATFDFCLLSSAGACLWRGRFCNDARGIERFLAQLRARSWKLSQIHFALEATGVYGKALVAALHRADLAVSVLNPAQVKYFAFSVLRRTKNDTVDAEIIARFCRERKPLATRPLRPIEEQLKVLVHERESRVGEQTRERNRAKKDPFQIELPSLISRQRQQRLKQLAKEIAQLDAAIDSLIASDECLRTQSQLLCSIPGIAELTAAKLLSELAAKEFQSARQLAAYAGLTPAEFRSGYFLYGKTHLSKIGNAFLRKALYLPAAVARRWCKPLKPWIAILESRKLHGLAIRGAIMRKLLHIAFGILKHQKPFNPLLLSFPKTV

SEQ ID NO: 305928 - protein, 379 aa, unidentified
MDHANTDTPAETILHGALELSKNSWLLALQFPDRVQPSLYPISGGDTVGLIAKLMAARDRWAKVSGKAPSILLCYEAGYDAFWLARFLKARGFECLVVDAASMQVNRRARRAKTDRIDVGMLLRALIAWGQGDRHVWSVVRVPSVDEEDLRRSHRERDRLVRERTAHINRIKGLLFAQGIRGINVKTKYKTLQIDKLVTGDGGPLPPRLASEITREIARLALIQEQITALERERDQAPTPCKATEKKRLQLMCLTGIGPAIAAVMTREVYYRQFGNRRQVAGFLGLATSPHDSGDVERSQGISRAGRGQVRGIMIQAAWLWLKHQPKSAITRWFVQRTAGQSTRIRRIMIVAVARKLAIALWRFLEQGLVPQGAMLANR

SEQ ID NO: 305929 - protein, 550 aa, unidentified
MSSVKIAAKPCKHGTFPDDRLRLFFKTAKPTAVGISLKSPALRGFVGGLRALATAALYLVIFSNGDITPQSTFKTGINALKSDDIISSCGQRISCFYLCSQVYCAQTGTSALWDVTYEPDVGAMDRFLLISQQVVTFSSTRNVRNLNMRGAYTMYIVGIDIAKRKHEAAVIDGEGTVIIKPFSFTNNCSGYNRLLAMLAKAKLPLDEVSFAMEATGHYWLALFTRLQKEGFRVQVINPVQTNSIRSFYIRQAKTDPRDALLIAEVIRFGHFSESTLHPENIYELRELCRGRHAIVSMQADVKRKVVALLDQVFPEYETAFTNMFSDTSMAILQTCPTPKELSEIPLEELCHLIEVSSHKRFRMAKARELQELARNSFGFAMAGDVFSTMIRLYAKHLDFLKQQVREMDRKIAEIMDTLDTPITTITGIGPTLGAYILSEIGDISRFSSAAKLAAYAGIDPTMRQSGEYNGVRNRMSKRGSPYLRHAIWLAASSAVLHDPALKLYFQKKRDEGKPYMASVGHACRKMVSIIYAVMRGNKAYTPCIPNEISA

SEQ ID NO: 305930 - protein, 418 aa, unidentified
MAKLRKVFDQLHERVAGLDVHKAQVTAAVRVPGPDGTRVQEVAEFRTTVQGLLALRDWLSAHGVTYVAMEATGVYWRPLWAVLEDPFECILCNARDVKQVPGRKTDVADAAWLAQLAEAGLLRASFVPPKPIRALRNQTRYRKAQIEERQREANRLHKILEDTGIKLDCVASDILGKSGRAMLDALVSGTTDPEVLADLARGRLRSKLPELREALEGRFDDQHALIVSAILSHLDFLDEQIALLSEAIEEQIRPFAAAVELLCTIPGVKQRTAEVIIAETGGDMSAFPTDKHLASWGGQCPGNDESAGKRRSGRSRKGSRWLGIALTEAALAATRQTDTYLGAQYRRLRGRRGHKRALGAVRHSILVAVWHMLTTGEVYNDPGADYFDRKVNPERKIKRLIAQLEGLGQQVEVQPAVA

SEQ ID NO: 305931 - protein, 354 aa, unidentified
MLIIGCDFHTRYQQIAMAREETGELLVERRLDHASGEAHAFYRSLQSSQEPVRVGIEATGPIHWFERLLADLGHELWIGDSAKIRASEVRKQKTDERDAALILDLLLAKRFPRIWVPTPAQRDLRQLLWHRHKLVSMRTMLGNQLHALAMSQGLCRKKKLFTKKGRVELVSLGLAPWASRRREELLKLLDQLEPPIAELDRAVLEEAKHHADAVRLMTHPGIGPVTALAFVLAIGPITRFRRSKKIASYLGLNPSEESSGGRRRLGAISKQGNTMVRWLLIETVHHAVRQDPELRQDYQRLKFRRGHAVAKVAIARKLAVRMYWMLRSGADYARLVRRQGSPGGTLVGASPSLA

SEQ ID NO: 305932 - protein, 393 aa, unidentified
MQRISVGIDIAKEIHWITAIDADGVVLIDRKLANTPSDIAALADQLTALGGAIRVGLDVMGGIAGLAEAMLAEAGFILVHVPGLAVNRARQGTVGGENKSDPRDARTIADQLRTRVDLRRIEPATEIDLEIRLLVGRRRDLVEAQTQRLARMHDLLVGIFPGLEACLDLKTEGPLHLLARFVTPAELRDAGRKRLIRHLQAAGGLPNVEALADRALAAAAEQTIAVPAERMTARLVRELAAEALASRARLIELDREVEALLDRHPDAALIRSLPGMGVVLCAEPIAEAGNLSRFRSADALASAAGMAPVLRQSGRSRFLRRPNGGNKGLKRVFYQSAFCSLAHSDSRAFYDRKRREVKRHHQAVISLARRRVNVLWAVLQNRTPFQTGFKTAA

SEQ ID NO: 305933 - protein, 355 aa, unidentified
MSKTNPVKIIIGVDTHKDIHVAVAINGIGAHLGTLTIPVSPKGYQNLETWARAFGSIHAFGIEGTGSYGAGLARFLQAKGHTVVEVNRPNRQLRHQNGKSDPLDAESAARAVLGGQANARPKSADSSVEMIRHLKVARDTAVKSRTQAMVTLKTIIINAPAALRQALDRIIGKMALIRHLAARPGPILSVTASAKGALRAIARRWLTLDAEIRAHDADLEALTASCAPAMLEAHGISTGTAAEMLILVGDNPERIRSEAAFAKLCGVCPVPASSGKTNRHRLNRGGNRQANAALYRVVIVRMRNHQPTLDYVKKRKADGKGKMEIIRCLKRFVAREIFGYLCGAQRSVPSISKAT

SEQ ID NO: 305934 - protein, 345 aa, unidentified
MRDVKVIGVDLGKNVCSLVGLDAAGAVVLRRRVRREGLVALLSKLPGSVVVAMEACCGAHYLGRLLTGRGLEVRLMSPEYVRPYVKAQKNDDRDAEAIAEAATRPTMRFVALKTEAQLDVQVLHRVRDRLVGQRTSLMNQVRSLLLERGMVVPQGRRSLLDALASVSADGDASGLGQRIRLLLDDMLDQWRALDSRIAALDDEFAEIARRDPAARRLATIPGVGVMNATALVAAIGDGRAFSRGRDLAAWMGLVPRQVTTGGRPRLLGITKRGSKYLRKLIIQGARSALPSLARTATPIGAWLRGLLSRAHGNTVVVALAAKLIRIAWALLRNGTSWSVARLAPV

SEQ ID NO: 305935 - protein, 391 aa, unidentified
MIYVGVDVSKDKHDAVILDKDGVVLVDNFTFSNNMDGFNLLLAKINSVTDNSENVKIGLEATGHYSYNILGFLTEKKYTTYVLNPLHTNLYAKGISLRKTKTDKVDASNIALMIMSKQFLKSYSNISYHNENLKSLTRYRFDLVAQRAKLKQSVSRLINVLFPELESLVSTLHLKAVYALLSEYPSARHIADTHLTKLTNLLLENSRGHFSKDFAIRLRDVAQSSIGSHMPAKSFELKHTISRIQEIDGLVKETDKETKLVLKQTDSNILSIPGISHTLGAMIVAEIGDMNRFDSPDKILAYAGLSPSTYQSGKLESAYAKMEKRGSKYLRYALFNAAKFICNWDSTFKAYLAKKRAEGKHYNVAISHVTKKLVRLIFALHKSGQPYIPKS

SEQ ID NO: 305936 - protein, 312 aa, unidentified
MKIICGVDVSKARLDACIEPGTIFASFDNDPAGIAALAAFCRQHQAGLVVMEATGGYERRAFLLLWEAGMPCAMTNPRSVRRYAEAMGILEKTDRLDASVIARFAHAKNLQPTPAPTPAQQRLKALVARLRQVTDDLTVQKQRRASFADNAEILASIDEVIALLKRQSRKLEGEIASMIDDDPLWAQLAEAWRSVKGVAGRTIARLMADLPEIGTYSNKAVAKLAGLAPIADDSGKRNGKRSIRGGRASVRSILFLVARTAAKYDKSLAAFRDRLLAAGKHKMTVRIALAHKLLVRLNAKARDARAQYANAT

SEQ ID NO: 305937 - protein, 349 aa, unidentified
MRTFQPPANTRFYAGVDLHARAAFVVVLDRDGQVVFAKNLPAAPDHFLRAVAPFRDGLLVACECMHCWYWLADTCRDQKIPFVLGHAWAMKAVHGSKTKCDRKDAEAIARLLKGGNFPPAYAYPRERRGLRDLLRARLRLVRQRAQLYGHVHTARRQANLPPVSSDVKYKSKRAAITADIADPLVRRRVETDLALLAPLDAAIRQLEAELEDAAKEHYPTELAVLQSTPGVGLVLSLTILLEIDTVGRFDTRQQFCSYARLCGAVQTSADKRAGAGNRKAGNAWLKWAFSEAAVLSAQKDEQIGALLQRLVSRLGKAKALSALAHKLGRAFYHMLHTKEVFDVRRFVRH

SEQ ID NO: 305938 - protein, 346 aa, unidentified
MRKSITDLSSVTIVGLDLAKHVFQVHGVDASGRVVVAKAIRRNKLLEFFASLPACLVGLEASGSAHHWARELITLGHDARMMPPVYVKPYVRRQKNDASDAAAICEAVTRPSMRFVGVRSLENQAALMRHKTREMLVSQRTQLLNGLRGHLTEIGVIAAQGPRHARELAELIEACDETIPFEVCEAVAPLVVQLRNLDEAIARLERSIAKLAQKDETARRLMSIPGFGPITASAMAATIQDTSSFAGPREFAAFLGLTPKQNSSGGKQKLGRISKMGNRNLRKLLVIGAHAVLFHRKSHTDPLRMWAKKLIEKKPFKLVAVALANKMARIAFAIMRGKTVYREIPA

SEQ ID NO: 305939 - protein, 381 aa, unidentified
MQTMTRDGEFSAATPSLLLAFELGERTWKLGFTVGMGQRPRVRQIPAGAVGLLAAEIAHAKRRFGLPAEVPVISCYEAGRDGFWLHRYLVAHAIINHIVDSSSIEVNRRARRAKTDRLDLGGLLSLLARYVQGDRRVWRVVRVPTLAEEDARQLPRTAESLTRDRTRLVNRLKALLVTQGVRLRIDRHFVEALDGARLWDDTPIPAGLRDRVLHDWAQLQNVDTQLRELKAARAQRVDATQPTGRAIEQLQTLRAIGATGAWVLATEIFGWRQIRNGRQLGALVGLVPAPYQSGETRYDQGITRAGNTHVRRVMVQLAWGWLRFQPTSALALWYQRRFGHGGMRLRKIGIVALARKLLVALWRYLETGAVPDGATLKPVMA

SEQ ID NO: 305940 - protein, 446 aa, unidentified
MQKSKAYRATNVKGVSLERVMQNGPAGAVSVGLDVGKEEIYAVLRWSDGTFERPWKALNPSEIPVLVEMLRKIGASRSLTAAMESTGTYGDALRARLGQAGVGLHRVSGKAASDYAEVLDGVPSQHDGKDAAVIAELAAYGKSSPWPYHEPNEEDAELAYWVDWLDLQQRIQMMWIGRLEALLARHWPEATRVVELTSVTLLRALAHYGGPAALAADPEAVRRLKAWGHWASTEKAERVLAAAVRTEGARQGMRDRLRMQQYATLALAARHETRKAHRRLQELARGTDILQRMAGVVGLATTCVLWVTLGDPRNYPSGGAYRKALGLNLKERSSGKYKGRVKISKRGPGNARRWLFFAALRMAKNPRVRRWYEAKKAKDNNHGMKAVIAVARKLVLALYNVAVHGQAFEAWRLFPGRSTARQALASSRETAPSLTTQENKQRKKRS

SEQ ID NO: 305941 - protein, 428 aa, unidentified
MEFKEDRLQQFQSMRETIRGSSTFLVVGVDVAKDQHHAFFGTADGKTLWKKLVFDNTLQGFKKLQTMAEELLIQHNLKTIVFGVEPTASYHKPLAEYLIRQQHQVVYVSNVAVKKNRGLLDGRWDKNDTKDAANIADLVGQGRCQFYDLAEEDVLELRSLLAYRAKLKKQEHGQRMRIRNNLLAQYFPELDKQMPQGGQDGLILDIIIQGFAPAQIANMPFETFRQQHDMQKRHLVQEKRLRTIWEASQESVGCALPESAAWEGRMLVEQLLQTRQIKNELEARLKTVGQRFQSYGCLLTIPGFGPIISAMTVAAIADAHRFTSRKQVLRLAGLDLSASRSGKQSNSAIPVISKQGKAGLRYALVQAAIIASYKDAAIRSYFTRSLKGRELERGIKMKMHVKLAAKMLVVAWTLMKHNEPFDSDCFQL

SEQ ID NO: 305942 - protein, 419 aa, unidentified
MLNAKWYVGIDWASEAHEVCILDHAGRVHERRQVKHTATALEAFVDRLIELAGGDPSSVAIGIEVPRGALVELLVERGFAVYAINPKQLDRFRDRFTAAGAKDDRRDAQVIGDSLRTDRPAFRRVRLDNPIVIQLREWSRVDEDLGIEVTRLTNQLRDLVYRMAPGLLALSPAADEPWFWALLREAPTPADQRRLSVRRLERLLRDQRIRRLEATHVREVLQQPTVYTAPGVVEAVAAHIRLVLPRVELITAQRREAERHLTRLLDALDGEAPPADDPREHSDVAIVRSMPGIGTRVAARMLAEASQPLVDRAYHVLRTCMGVAPVTKQSGRRRTVSMRYACSGRLRQAAYHWARVGAQRDPASRAYYATLRARGHSHGRALRSVADRLLRILITLLERGQLFDPAHGQQSPLAMAAGA

SEQ ID NO: 305943 - protein, 350 aa, unidentified
MKSLAIDQHRKRSRYVVLDQGGKVISKRTIASTAEAYREEFSGFDPGEVRVVLEATGHWFWAVDVLQELGLETHLANPRKVRLIAESTIKTDTVDATALAQLLRMGWLPESRITPQAMRLLRERLRYRIVLVSIRTGLKARIHAVLGKCGIPTPGVSDLFGKAGREWLEQVALAQAYRDNVDGYLRLIDFLAGEIKRVETWLAAHTREDPDTRLLMDIPGIGRFGAALILAEIGDIGLFRTPRKLSSFVGVVPGSRNSSDTVRDTGLKKDSNRYIRWLLAEAATKAGQLVPAWQRLYQRVHAGNDKRKAKARMAVMHKMICAVWRVLTTQEGFNRLHNCPELNNTTASSA

SEQ ID NO: 305944 - protein, 344 aa, unidentified
MKKNLFFIGLDIAEADFAASIYQTPDKPIVTKEAIPNNPEGFDLFLLWLKEHHINKTNSRICMEATGVYSQAIAYYLLFAGFPVSVEPPLKVKRAFDPVGHKTDPVDSKQIAEYAYRFQDELTSWQPRDEILEKIRQLLSVREQFTKQKVALKNAIQAYSKQRIQVALIKKAHQETLAQIEKQIVRIDKELAKLIKQDPGILQKANHLKSIPGYGMLLAAHLLVITENFTKIQQSKRLASFVGIVPYQHQSGTSVFKRAKIRHFGPGPSRKLLRLAAQSVATHDVTFRRYYLRKLAQGKAKALVLNNIANKLLKVACAMVRNNTRYIKEHRSIHPMYLKSLKSA

SEQ ID NO: 305945 - protein, 309 aa, unidentified
MSEVYAGIDVSKEFLDVAVLPSGEKKRYSNDETGIGKLVVRLKKIKVQLVVMEPTGGLEAPLAAAATLEGIKVAVVNARQVRDYARATGKLAKTDKLDALIMAEFASVIKPPVREMRDEETQEIKAIVSRRRQLLEMLTAEKNRLAIAPKDLKPKILSHIEYLKKEIADWDRDLRQRIEDSPVWRVKDDLLQSIPGVGKVLSATLLAELPELGKLNRRQIAALVGVAPYNRDSGTMRGKRSIWGGRASVRSALYMATLVSTRFNPVISNFYQRLLEKGKAKKVALVACMRRLLTIMNAILKTQKAWQYT

SEQ ID NO: 305946 - protein, 344 aa, unidentified
MGAQSIQSEVILGVDTHLDTHVGAVISETGKLLGTLAVSTDSAGYLKLLTWAKSLGRLRRAGVEGTGTYGAGLARVLHEHEIGVLEVNRPDRANRRFQGKSDPTDAESAARAVLAGTATAIPKAQSGAAEAMRAVSVARRSAVKAKTQAINQVRALLVCAPQEIRERLWKGKPAECIDGCARLRSLGTTPLLHTLTATLRMLAKRWLMLAEELKELDAMLEHLTGQHAKRLRQQFGVGPHTAAVLIGVAGDNPERLRSEAALAALCGASPLQASSGKTTRHRLNRGGDRPANNALWTIAMVRMRSRSTNACVRREAHRRRHVTQGNSPMLEALHPQGAVSADPR

SEQ ID NO: 305947 - protein, 411 aa, unidentified
MHKRNDNRQVEKRQRITNKTLIVGMDIGCEFNAMCLMNKEGTVLGRYPKIYNSRKGFDYFHAIIETTKKKYGFTDVLIGMEPTGNYWRKIAFFAMEKGCEARFIRTTALKHQRELDESSSAKNDMRDAYTITNIVREGKYIDAIIEDGAFRQLRTLAHTRERICRSNTGSKHALKGVLEDYFPELKSIFWSMKARGLWALLEQCPFPEDVLSMGMDRLTKLIAKSTKRRAKANEKARQVYQAAQSSVGLRNIGKADRYRVASYLSDIRHSESQLKEIELQMKAILENIPFARYILSIPGIGVLTCAVFLGEIGNPYNFKDPKQIVKYAGYDPKEHDSGQRTGRRIISKKGRWLLRKYLYSPFFTEYYGNKQKTMKKKEALCAVVIKLIKVIAALLRDRRMFTETGRLKMAA

SEQ ID NO: 305948 - protein, 378 aa, unidentified
MIESLSEAGCGRSNDLRSTKTVGKRGRHALISNKARTVVRVNQTRMMQGRAKKEKRPMTEEPVCVGVDVAKSTLDVAVSHSKETRQFDNDYKGITSAVRYIAGLKPAKIILEATGHLEMPLAASLQASRLPVVIVNPRQVRDFARATGVLAKTDRIDARILALFGLQVKPEVRLLPDQKAREMSNLLARRRQLIEMLTAEHNRFLQADDSIRPSIEIHIKWLEEAVSAINDDLDRQIRSSPSWLEKDNLLKSVPGVGKVVSTTLLIELPELGILNRRKIAALVGVAPLNRDSGTLRGKRTVWGGRAKLRAVLYMAALVGVRCNPVMAAFYQRLLNAGKAKKVALVACMRKLLTILNAIIRSKTTWRSENTYGAIVVEE

SEQ ID NO: 305949 - protein, 377 aa, unidentified
MKNVRFIGLDVHAETIAVAVAEPGGEVRSLGSIPNRAESVRRLVGKLGKPERLRVCYEAGPTGYVLYWQLSELGVHCDVVAPTLVPVKAGDRVKTDRRDAEKLARCYRAGDLTAVWVPDAAHEALRDLVRARLAGKRDQLRARHRLGKFLLRQGRRAPEGMRAWTGKYLAWVKQQRFEQPAQEATLLDYLHEVEHVAERIVRLERAIDAAMESMPESLQAVIAGLQCLRGVAKVSAVTVVSELGQLSRFEHARQLMGYAGIVSREHSSGERISRGSISKAGNAHLRRIVTEAAWSYRHRPALGNALKARQAGCSEAVKAIAWRAQHRLHERYRALTGRGKNKQKVITAVARELLGFIWAIGCEIERQQERAPLRRAA

SEQ ID NO: 305950 - protein, 387 aa, unidentified
MEKYSLGVDISCRSFHVCLSSLASDGRIKIKSSTSLPNNEEGFKKLTVWIEKYVEKGPPFSIVMEATGVYYERCALHLFKAGYRVSVVLPNVAKKYLESLGQKTKNDKIDAKGLSRMGAERVLEAWQPMDDFFYTLRSYTRQHEGLQATRTILRNQKHALENSIHLNALVEKQLDELIATIEEQLKELAKAIEKHLRCSNEVWKKVEGICWIKGLAVLSVAVVLGETNGFALFKNIPQVVSYAGYDVIEDQSGKRVGKTRISKHGNGHIRRILYMPAIHAATWQGSVFEKLYNRIVLRTGIKMKAYVAVQKKLLIMIYTLWKKEEAFEKEHSDTKHTEEQEQVLPSLGSDEVAENDIKKVVPAVPELHKVNIPMEPSQYAPSLVKQI

SEQ ID NO: 305951 - protein, 341 aa, unidentified
MKQEMSILGIDIAKRVLHAVGMDERGKIVLRKRLSRHDLIPFMAKLPPVLIGLEACGSAHDWTRRFRAYGHEVKLMAPQFVKPYVKSNKNDSRDAEAIAEAATRPTMRFVMTKDVDQQDAQALHRVRERLIGERTALVNAVHGLMHEDGIVIPKGVAKLRQAVVGKLEAEKDKLTPLSQEMFWKLVEEFAALEEQLAYYQEKLAALAKMHPECQRLMTIRRIGPLSATALVAAVSDASAFKNGRQCAAWLGLVPRQYSPGGKERLLGMSKRGDSSLRKLLIHGARATLRWVGRKTDRRSQWIRQLVERRGKNRTAVAVANKNARLVWALLTSHQVYEPAKG

SEQ ID NO: 305952 - protein, 340 aa, unidentified
MWYSGIDQHKAFCLITTYGADGPRVKQARVASTALALEQYFAQFPGPHQAVVESTGGWYWLADTLVALGVELILAHATGVKAIAAAKVKTDEVDSDTLALLLRADLIPRAHMIAAAQRGPRDLMRTRLRLVEKVVSASNSIDRLLEKFNLDDVAQLTDPLYQLQAQCHAAQIHLLEEQIQTVERALYPYLLPTSDVQRLLWVPGLGKVNAFTIYTEIDGIARFASAGQFFSYCRLVPGAKNSAGQTRHRSGSKAGSRYLKLAFSHAQIRAVQYYPEIRAFFKAKARKKAIRIARTLVALELARIVYHVLSTGEEFNGRFKDRPVVGSGRSGHAGQAHPPN

SEQ ID NO: 305953 - protein, 362 aa, unidentified
MDNATHVGLDVHRDTIAVAVLAPGDTSLDERTIPATNEAVTRFVRSLRARGPLVACYEAGPTGYDTQRLLERLGVPCEVIAPAMIPRRPGSRVKTDRLDARNLARLHRAGELVAVRVPAPSEEALRDLVRVREDLKAERRRARQRIRSFLLQHGHPWRGTAGWSRRLEDWAGAQQFDEPVAQATFEILLASQSARAAEVDALERKIAEAASSSAAADQIARLRCLRGIDTLIAVTIASEVCDFGRFPTGPAFMAFTGLVPSEHSSGMSSRHGSITKTGNRHVRRVLVEAAWAYRHRPAIGVELRRRSQDQPADVRAFCWKAQLRLHARYRRLSPVKGSRKAVVAVARELSGFVWALMNDRID

SEQ ID NO: 305954 - protein, 408 aa, unidentified
MQVLYPRCAGLDVHKDTIVACVRCISPPMHQEVRSFGATTAELLKLADWLAEHDCTHVAMEATGVYWKPVWHVLEDEFELVLANAAHIRNVPGRKTDVNDAMWIADLLAHGLIRSSFVPPQAIQQLRDLTRTRKQLVREVSQHSLRIQKVLEDANLKLGSVLSDVLGKSGRAMLDAIVAGETDPACLAALAQGTARNKSAELREALRGRITDHHRTMLRLHLQVVDALQRTLAELDAAVGKALAPIQERARLLTTMPGISDLTASVVVAEIGVDMSRFPTAGHLVSWAGLCPRSDESAGKRRSARVRKSGTWIKTTLVTAAWSAVRVKTSYLRAQFLRIKARRGAKKAILAVAASMLTAAFHMLRDGTEYNDLGSEHFDRQDKSKTIRRLLKRLQDLGCDVPELAHTA

SEQ ID NO: 305955 - protein, 413 aa, unidentified
MASELLLREICRDRLVVAIDPGKVTNRVWLTTGERGLIGEPVSLPVLRDGVDELARRIAGSGVDGSPVIGIEATGALHRAWAAEVERRWPGSLRLFAPSETQAARAQLGSRRFKTDDRDCAALVWLLRQGAGRPSAPSAVEALLGAVRHRRQLVAARRVAQQRLHDQLNALCPGLSAPAGHGRALALEDPSGRAVLACAVAFAGRAPSVRSLLARSPGRLTEINARFWTERWKRLLAPPADAELRAQRLGRDVERWLGLREDIAALETQLGELLAGTDGQILTSLPGVAVVRAGGFTAHTLPIERWPDPEHLYSATGLAPASYQSASVTRRGRISRQGLAEHRDALMGIAWGLSQHSPAFRERDREYRARGFRPIQARVALARHACRLAWRLMISQQPYDEQRYDRARHSRGR

SEQ ID NO: 305956 - protein, 380 aa, unidentified
MSKIRFVGLDVHADTIAVAVAEAGGEVRSLGIIPNRLESIRKMIGKLGPAGDLKCCYEAGPTGYVLYWQLTQLGVACEVIAPSLIPTKAGDRVKTDRRDAEKLARCYRAGELTPVWVPDAAHEALRDLVRAREAAKKDQLRHRHRLGKFLLRHGKRPQDAGKAWTQKYLNWIRIHVHFEQPALEATLKYYREEVDHIAERIVALEQAIDEAVRQAPAEIRAVIEALQALRGVAQTTAATVVSELGSLSRFPNPSQLMGYSGLVSSEYTSGNRVQRGRITKSGNAHLRRVLLEAAWTYQHRPNVQGRVLRRQKSLALSEEAKRIAWKAQQRLHKRFSALTARGKETNVAATAIARELLGFMWAIAVHAEAQHKPAKPAKAA

SEQ ID NO: 305957 - protein, 344 aa, unidentified
MKGKTIAVDLAKNVFEIGVSERPGHVEKTYRLSRGKFLKFFVDQSPSRVVMEACGSSHYWAREIGKYGHEVKLISPQYVKPYVQRNKTDRADVKGLLEADRNGDIHAVPVKTIDQQQLTALHRIRSRWMATRIARINTLRGLLREFGFIIPVGARHVIPAATELIEDAEADLPSALRDVFYEMCTEIRELEARLESVEQRLEALASQTPAVARLRSIPGIGLLTATALVGFVGDVTRFRSSRHFASYLGLTPREHSSGNVRRLGRISKRGDVYLRTLLIHGARSVLWSAHRKSITPSPLQQWGLRIHQQRGYNKATVALANKLARRVWAVWKRDSDYQSDYRAA

SEQ ID NO: 305958 - protein, 342 aa, unidentified
MGEVSIIGVDLAKNVFQVHGAAADGSVAFRKKLSRPQFARFMADQPPCLVAMEACASAHHWAREISRYGHEIRLIAPHYVKPFIKRQKNDAADAEAIVEAAQRPTMRFVEPKSAEQQARAVAFRTREQLVKQRTEAVNALRSHLYEFGHVAPEGIGYVPRLERVVEDPDADIPDLTRDICRMLLEQIAHLTDRINALKARIAAMSNEAEMPRQLQTMPGVGPITALAVETFAPPMDQFRRGRDFAAWLGLVPRQHSTGGKQKLWKTSKMGQRDIRRLLVIGATAVIRWASRRGAPKGSWLARMLERKPIPVVAVALANKMARGIWAMLTRGESYRGPVLIGA

SEQ ID NO: 305959 - protein, 412 aa, unidentified
MKDLLEISCGLDVHKEKIVACILTGPLGKPTRSEIREFSTLIPDMIALRNWIVSKNCHHVAMESTGIYWMPIYEILEDAFSGDITLLVVNARHMKNVPGKKTDMRDSEWISTLLRAGLLNGSFIPEKRIREFRDLNRYRKSVIRDITSQKNRIEKFLQSSGFRLSSFISDIFGASGRNIILHLVEHRQIDKTALDSCLKTKTRNRIDEILMSVNGTLSEHQKAFLRILMTHYDSLKKHLAEIETSLEEDMAPFALQVEQLNSIYGISTTASCAIIAEIGIDMKPFKTAEHICSWAGLCPGNNESAGKRKSTSVTKGNPYIKSMLCEIAWVIAGKRNTYLSAWYWRIKQKKGAKKAIVALARKLLVIIYTMLKQGTVFDESCFETRRKHCEQKQLSRYIRELEKHGYHVEAQS

SEQ ID NO: 305960 - protein, 363 aa, unidentified
MIVIGADTHKSTHALAAVDAGTGEVRGEREITANDDGHRNALRWAREIDPDVVWALEDCRHVSHHLERALVTSGERVVRVAPRLMGQTRRGEREAGKSDQIDARAVARAVLKDGVEKFPSAHLDERAMEIRLLCDHREDQVAEINRLTNRLRWNLVILDPALEASIPPRKMDFAGQLDRVVRRLRGMETSARVRIAKEQVRKIRELSRQARELKRELDTLVAAYRPELLAELGCSTITAAILIGQTAGAERFPTDAHFARMAGVAPIPASSGKQERHRLHRGGNRRLNRALHVIAITRGRWDPATKAYLQRKEAEGKSRMEALRCLKRQLARHFHRLLLKPPASAAPHTAIPISAAISVPCLT

SEQ ID NO: 305961 - protein, 403 aa, unidentified
MTVRPLVWVGIDVGKTSHHACAVDETGKVLWNQKISNEQRAIEQLIARAHKGAEQARWGIDLTSPMALMLITVLLGAEQSVVYVPGHVVNTMTGAFRGEGKTDAKDARVIAETARMRSDLSEVVLPDELVVELAQLTGYRTDVMADWVRGVNRLRSLLGSIFPGLEAAFDYSNRTPLILVAHLCTPAEIRAAGIKGVTAYLGDNGGWPTAIAKTAATAVAAAKQQPLALPGEAGTAALVKRLARKLLDLDHEIKDIDKTITERFRDHPYAHIIESLPGFGPGLGAEFVVVTGGDLASFATAGRLASYAGLVPVPRDSGRITGNLHRPKRYNRRLRRVFYMAALSSIRGDGPSRQFYDRKRGERLIHSQALLALARRLVDVLWALLRDGREFTPDKPTPATAVA

SEQ ID NO: 305962 - protein, 347 aa, unidentified
MSITRIGLDTAKSVFQLHGIDEVGKVQIKRKLQRREMIPYFEKLEPCIIYLEACGAGHYWARILIGLGHDVKLIAPEAVRPFVKKGKKNDPADAAALCEAGGRPDIKFVPVKTEEQQAMLAVHSVRALLVKQQTMLSNAMRGLAAEFGLIVPKGIDKLVELMAQVDADENVPKQGRLAVQELFDQREFVAERIETLEAEIVAHARQNEAARRLATIPGVGPIAASLIAASVADFSVFKRGRDFAAWLGLVPRQHSTAGKTRLGKITKAGNREIRTLLVLGATSMTFRAPQWKSAAGVWADRLLQRKPFRLVTVALANKIARIAWALMTRNEVYQANGRVVTAAEAVA

SEQ ID NO: 305963 - protein, 361 aa, unidentified
MAGTMTWVGLDVHARSTHAAAIDVMTGELSRVRFGPGVQAPVAWLMSLSGPVRACYEAGPTGFGLYRALTAAGIATQVIAPGKTPRGPSDRVKTDRKDAELLARQLLAGSLTAVVVPSPEVEAAREMTRAHDVCRQELMRARHRVSKMLLRHGRVYPKPKTWTAEHRRWLSQQRFPERPSDAVFADLLAAVDGISARKAAIALSLSSLASDERWWPTVARLRAFRGVDTLTALSIHLELGGNWERFDRAAALSSWLGLTPSLSQSGESSRQGAITKTGSVLARRLLVESAWHYSRQPRLGATLANRQQGQPEHVLAISNRAQQRLYRVNRRMRARGKPHNVTVVACARELACFLWAAATAD

SEQ ID NO: 305964 - protein, 318 aa, unidentified
MKTNTATVYVGVDVAKATLQVHQQGRQIELHNVPAGLTQFCKKLKALEGAHVICEATGGYERALVQALHKVKIPVSVVNPAQVRGAAQAQGQRAKTDRIDALMLTDYGQRYQPQPTPPASQSQRQLAALAQWLKQLVDAQAVAKTQAEHHEDPFVRKQHKTLLDHYQSQIEAVETKLKALMRKDPVLAQRVECLDAIEGVGLRTAFMILAHMPELGQINRQQATALAGLAPWTRDSGTMKGMRCIGGGRSEVRLALYMSALSAARCNPVLSAFYQRLIAKGKLPKVALTAVMRKLLIYMNHQLKALDAQPAPDAQKQN

SEQ ID NO: 305965 - protein, 402 aa, unidentified
MAYDFVIGVDVGTYFHHACALDSQGRQVLSKRINQHESSLRKLFGQFLADNASVLVIVDQPNNIGRLTVAVAQDMGADVRYLPGLAMRQLSRIHVGNSKTDVRDAYVIAHAGLNLPDSLRSVDRVGEVFIQLKVLNGIDEDLARAYTRLINQMRSALVGTYPAFEHVLRGQMIHRKWILHLLAKYGGPTKIRRIGKTRLKAFARKHRARNPEPVIDAMLAAIHEQTVSIAGAEYAELGVAMSATDALTKLEHRKEIEAQVLKLIQDIPQTEILLSMPGIGPRSAAQILMTVGDMSDFPDAAHLASYAGLSPRTNQSGTSIMSNSPNRAGNKKLKNALWQSSFASIRFHERSRQFYERKRKEGKRHNAAVVALARRRFNVLFAMMRSGELYRDIPTVQEAAAA

SEQ ID NO: 305966 - protein, 388 aa, unidentified
MQSITERHEEPTAIRTDLGAIFVSLELSRSVWLITSISPGGGEKMSKHDVRAGDVAALLARFAELRKRALGRTGKMAPIIVVQEAGLDGFWIHRVLQAEGIESHVVDPASVATSRRRRRAKTDKIDGEALVRTLLAYKRGEPRVCAMVRAPTPDEEDRRRLCRERKVLTNERVLHVNRIKGLLFAQGVSGYEPLRRDRRQRLDELSTGDGRPLPVHLKRQIGRELDRLELLLEQVKAVDGERDALLAEQDAATPAPAAMLLGIKGIGPEFAAILWSEGLFRRFDNRRQIASYAGLAPTPWQSGSVDREQGVSKAGNSRLRTTLIQLAWLWLRHQPQSALALWFKERVMRNSGRLKKPTIVALARKLLIALWKYVAFGVVIEGAIMKAA

SEQ ID NO: 305967 - protein, 407 aa, unidentified
MTNDDISVIAGIDTHADTHHVAIITNYGQHLADKKFLAVGSGYREIAEYITQYGPVIAVGVEGTGSYGAELTRVLTHEGFDVKEVNRPNRQARRIHGKSDPLDAYQAAESVLAQRGTSTPKARDGNVEALRVLRTARTSAMKARTAVLTQISAVLTSAPESIRAKYRGKTSESRAKSMAASRPTGDITDPLVATAVTLKRMAARHAYLTTEIDDCDAELARIIAEHAPALTLIKGVGTAVASQLLVTIGDNPERLTTEAQFAALAGVAPIPASSGKTTRHRLSRGGDRAANCAIHRIVLVRMAKDQRTQDYVVKRTSEGKGKKEIMRCLKRYVAREIYRVLQNPRPGLLTNDLRPRRLALHLTQTAVALELGAWPKAISRIERGATQDRALSERYRTWLNEQPKVSA

SEQ ID NO: 305968 - protein, 312 aa, unidentified
MDAMVIGIDVSKDRLDVAVRPTGESLIFKRTGVGIEDLIARLGALSPKMVAIEATGGFEAVVAAGLAGAGLPVVVVNPAQVRAFAQALGKRAKTDLIDAAVIAHFAEATKPKLRQMPDEVTRLLADLVARRRQIVEMIAAEAQRTRRMTDKRLTKSVARLRKALEKELSELDGLIDDQIRGSAVWVEKEDLLASVPGVGKTIARTLIAELPELGSLDRRQIAALVGLAPWTRQSGQWRGKSFIGGGRKSVRSALFVGAMVAARYNPQLKHFRDKLVAAGKPKLIALVAVARKLITILNAILRDRRPWQPIPA

SEQ ID NO: 305969 - protein, 350 aa, unidentified
MEYIAFDSHKRYTLASVEDGRGNVVCERQIQHTRGALKEFLARREPGSPVAVETIGNWYWIVDEIEAAGMSARLVNARVAKLMMAGANKTDKLDCHGMNRLQRSGTLPTVWIPPGELRDLRDLPRTRMVLTRQRTRLKNRIHATLAKYGISVDEEVSDLFGKRGMVELKRGMEALPPHTRFAAEQLLEQLEMLRGQIKLFEQHMDGLLGDSEDLKLLRSLPGVATILATVIALEVGDVSRFACAPRLASYAGSTPRVHASGGKVRYGQVRTDVNRYLKWAYLEAASAVARNYRLRPNTHVSRLYARVRERRGPQKAAGAVARHLAEATYWILKKREPYREPKNAVSSTGR

SEQ ID NO: 305970 - protein, 325 aa, unidentified
MIQNKEKVESRIILGADVAKASIVLKQLRDGHPVCAGVKTIPNNAADITKALINLGQIDLIVCEVTGGYERQLLEAASQLAIPIHRADGARVKAFITSHGVRAKTDAIDAYGLALYGQDRFNSLPRWTPPDPKREELQSLVKHRQALLDQRTMATNRSKAPNSHYLAGFLQDEISFINTQVEKIEQQISDIMKSHATIKAQEKRLRAIQGIGPVSAHTLIAMLPELGHATRKQIACLAGLAPHPAQSGNSFKKYPMTGGRDLIRRTLFMAALTASRCHPDLKHFYQNLLNNKKPKKLALAAVARKLVTIANAVLKTFQSTNAQLT

SEQ ID NO: 305971 - protein, 324 aa, unidentified
MTDAVLGIDVSKNTLDTSFLAGTKPRSRSFANSPDGWRQLIAWLAKEGVRQVHACLEATGRHSLGIALALHEAGHVVSLVNPAQIRDFARTKLGRNKTDPVDAAHIREYAELFKPRPWTPPSPALRRLCELQTIRAGMVASLTEWKNRSTSGMADDRALALAKATIQHFTSQLEAVDQAIAETIDNDRELCAKRTLLVSISGVGETLAGIVLAELPGPEVLGSSGAAAAYAGLNPRQHQSGTSINRPARISKIGNAVLRSALYMPALSAMRYNPAVAALVDRLKAQGRLTGKQIVVAAMRKLLVICFGVLKSGKEFEPAIALGQ

SEQ ID NO: 305972 - protein, 410 aa, unidentified
MPKIVYPICCGIDVHKSFVVACIATTDEKLVTTYKSKRFSTFTQGLRSLADWLAQNNCRDVCMESAGKYWIPVWNILELTCNLVLTHPKYVKAIKGKKTDKRDAKWIADIFKHDLLNGSFIPPADIRQLRDLVRYRVKLTSYSTGEKNRAQNCLTVSNIKLDDVFSDVFGKAASAITGRLLENNEPFDVKPYLTKGIKASPEEIQAAVDGVMCAQQAEKLRIIRSHMENLEMCKTNLESEILTVAQKYLPQINHVLTVPGIQTFSAIAIIGEIGVDMSVFETSRHLCSWAGLAPQNDQSAGKKKTTRISRAGVYIKPLLVQCALAATKSNKHPEIKLRYQAIKKRRGHKKAIIAIARMLLTAIYNILKKNEPYNAELYRQSDKPPVQREVTVEQAIYILQRQGYLVTASS

SEQ ID NO: 305973 - protein, 374 aa, unidentified
MTTKKIVHVGIDVDDKAFHGAGLSLETGEFVQFKCKPDFGVLRKKLEKYFPTDKIRLCYEACHIGYPLCRSLNNVDIHCDIIAPSLIPSKPGKRVKNDRLDALKLAEFYAKGLLTPIYIPSEEDEEIRDLLRSRGFLVKQRKMLKTHILSACKRYDIFFLKETCHKTNWTDTHISWLKKRAKDLNREVCRIDIEMLLAQFTSLTESIEKLEAVAIRISESERYKKVNDALVCFRGISTITAMTLISELGDIWRFPHPKQLTAYCGLDIAEYSSGGKQNKKGITKTGNKHVRTILIESCQLALNPPILSKRLRKLREGQPQEVIDIADRCMSRLHKKSTRMLYAGKHKNKIKIAAAREMLGFIWEVMKLTTPKAQ

SEQ ID NO: 305974 - protein, 346 aa, unidentified
MEQISRVGMDTSKRFFQLHGVNAAEEVVLRKKLRRKEMVEFFQALAPTVIGIEACGSSHHWARLLRSFGHEVKLIAPQLVKPYVKRGKNDGADAEALCEAMSRPTMRFVPVKTAEQQAALMLIGLRERLIGNCTQLSNAIRGYAAEFGFTAAKGMAHLDPLLERIQADESLPLAARELFAVQSKEYAQLRGQINEVEAKLKAWHKSDECSQRLIKIPGVGPIGAVLLKMKTPAPEQFRTGRQFAAWIGLTPQDHSTAGKVRHGGITRAGDEALRAVLVAGATAVIQQAVRYGGRASPWLDALLKRKPPKLAAVALANKMARVAWKLMVTGDSYSTKSAPAAVASPV

SEQ ID NO: 305975 - protein, 342 aa, unidentified
MKEFIRIGVDLGKRYIQIHALESEDGRAVKRKLPRSRFLEFFADVAPCLIGMEACGSAHYWARQLRAMGHDVRLMPPAYVKAYVKRGKNDAVDAAACCEGVSRPDMRFVPVKNEEQQATLTLHRTRELLIRQRTMCVNALRGHLTEFGLVAAKGIGHAGELIDMAENDAALPEIAKSVVKIFAEQLAAIQASIAALEKEIAGVHAQSPMSQLLAGVPGVGKIIASAIVASVPDPKVFKSARGFAAWLGLVPRQNSTGGKTKLGPITKKGDRYLRKLLVLGATSALRVAGKRKGALRDWLATLLEKKKSARLASVALANKLARIIWAMMTSGEAFRKDIFESA

SEQ ID NO: 305976 - protein, 341 aa, unidentified
MDEVTTIGLDIAKQVFHAHGADASGRRVFSRRITRAKLIEFFAAQPRCTVALEACAGAHHWGRELQRLGHEVRLIPPAYVKPFVKRQKNDAADAEAICEAAQRPTMRFVPVKSEEQQASAAVFRARDLLVRQRTQLLNALRGLLAEHGWVAPKGLFHAGAMMAKIENPGCALPPSARDVFLVMIGSAKALDERIGLLDREITKRAREDETARRLMTIPGIGPFTATALVALAPPPESFRKGCDFAAWVGLTPLQRSTGGKARLGSITRMGERTLRRLLILGSAAVVLHASRRGAPKGSWLEQMMARKPRMLVTVALANKTARIVWAVLANGGVYRAPAVAA

SEQ ID NO: 305977 - protein, 337 aa, unidentified
MLIKELSVRFHVGIDVSKLTLDIFILECNIHKKVSNNPRGFNDLLQMIEKNTHVSPELVVFCFEHTGLYSLSLALYLEERNLHYAMVAPLELKKSLGITRGKNDKVDSARIADYARRFGDRVPLTKLPAKDIRKIHYLLNMRERLVKNIHGHLVTYKETLRVMRPFDFPELFSFYESTISMLKAKIKEVEHLIKTILKENSALWSSYRLITSVKGIGLIVAAYLIVYTCNFTRFDTWRRFSCYSGIAPFEHQSGTSVKGKTQVSPIANRQIKMLLHLSAICALHTDTELREYYQRRQAEGKSKMAIINILRNKLIARVFAVIKRGTPFVDIKRYAAT

SEQ ID NO: 305978 - protein, 386 aa, unidentified
MICVGIDVSKNKHDCFIAHSDGTVIKDVFTIPNSIEGFKYLIDSIPSTDEIVKVGLEATGHYSINIANFLNSNGYPPIILNPLQTSLFRKALTLRKTKTDKVDAKCIASMLSNPDLKPHSNLDYQILELKSLTRHRKRLREQSSKLKVSLNRLVEIMFPEITDCLYSINQKSTMAILYEFPSLKLIADAHLTKFTNILKKNSKDKYSKAKAIDIKNSAKNSIGSDSRALSFELKQTIRLINDIEEELILLDNEIKSIMEDIQSPILTIPGISYNLGSIILSEIGDIHRFSSSSKLVAFAGLDPSTYQSGNFRASNVSMVKRGSPYLRWALLQAARLISMRDNNFKNYYKKKRSEGKCHNVAITHVAKKLIRVLHHLLINDLEFVPQ

SEQ ID NO: 305979 - protein, 336 aa, unidentified
METFTFFIGIDISKATLDWAVDLANKLLFHYQSSNDKKGIESFINYLTQRCPEASMGNSLYCMEHTGIYNNHILSLLEVNKANVWVEHPIHIKESLGMIRGKNDKIDAQRIALYAYKNRDEARLWTPKREVIQQLDRLTATRSRLVKIRKMLQSPLTDSDGFISKKDHTAEKKSCHRTLDALTKDIKQIQADIAATIANDPYLKELYGYVQSVKGIGPAIATELLIITNEFKAITDPKKLACHAGVVPFVYSSGQYRGKAKTSNKANKPLKALLHNGAMSAIQHSQELKAYYVRKTAEGKNEMLVINNVCNKLIQRVFACVQRKEKYKDFYSPLVA

SEQ ID NO: 305980 - protein, 452 aa, unidentified
MVGMQEVIPVKKKSTYKSVAVQRVDGTQLAARFSGQRCIVGIDVAKTDMFASFSTVADESKAIVRFQHPAETRLFVELCKQVRDGGAGVEVAMEATGTYGDALRAQLVASELPVFQVDARRSHDAAMVLDGVPSWHDRKSAVLIAWLHAHKISRAWRVATDGERAARAALARRDLYAGPLERNTNRLEALLAKHWPELLDHFTLASVSMLTLLSKYPTPALAHADRENAVRFLRTAGHGMFRVDKLTQAIASATTTLGEPTTKDEEVLLSVLVAQTLDLHRCVERVDAEITEIVRGDVVMQRLASPLGAVTAAAIVAHMGDPGSYASSQSFLKAIGLNLKERSSGKHQGKVMITKQGPTRVRFYLFFAALRFIITDRVVRAWYRKRKHYAEGHRMRGIIAVMRKLARALPYIARGETFDSAKLFDTRRLSLAETAASQGASPVAKEGATMLA

SEQ ID NO: 305981 - protein, 338 aa, unidentified
MYFTGIDVHKKTSFLTTVNERGQVVSRANLSNDPEAILRYFKALDVRPKIVIESTASWFWLYDLLTENGHHVVVSNPLKTKAIASAKIKNDKLDSYMLAQLLRADLIATVYVSPLPIRRLKELTRHRQKLVRDASRMKNRIHSILAKNNCQSPYSDLFGVQGVKYLEQIKLPKHHRAQLETFLLIHQHLQDLIAPLTGEIYKLARSCPTAKLLTTIPGIGPITAMFVVAEIGDIDRFASYRKLASYAGLVPSLKASGQTAHMGSITKQGSVYLRTALIEAAQAAARMKHGRINLFFRRRIVKAGYRKAIVATAHKLLQYVYFVLKNQTPYCETYPRAA

SEQ ID NO: 305982 - protein, 394 aa, unidentified
MFFVGIDVAKRKHEAVVIDDKGRIVQKSFSFPNSLSGYNSLISCVKRITSTRKDIVFGMESTSHYWLALYSHLIKDGYTAHVINPIQSDAFRGLFIRQTKTDPIDAVIIAEVIRFGKYSSTHFPQHKILALREMCRNRLYMVDAISDLKRKTIALIDQVFPEYDQLFSDTFLVSSIEVLYRYPTPKKLLHIRRDTLTNLLIKTSGGHFGSAKADEIIHAAKNTFGIDDPYDVYADLIKTFIKQIKFIQKNVSEIDQKITAIMDEIASPITSIPGIGVTLGAVILSEIGDISRFKSADKLAAFAGIDPSLKQSGDYSSIRNHMSKRGSPYLRRALWMACIPATQVDPMFRAYYLKKRSEGKSHMKTMGHIAKKMICVIYAVLRDNKEYQPVLTFH

SEQ ID NO: 305983 - protein, 429 aa, unidentified
MQNESTPDARGPVFCGVDTHADSHWLCVLDWRGRRVLSRRFPADAAGYEALAGAIAAAGEPACVAMEGTSSYGAGLTRHLASLGMPVREALSPAGTQRRRPGQGKCDEADAERAARAAMSGSKLGTPKSQDGWVDGVRCMLAARSGAVKARTSAINTARSLLTTAPEGLRSRFRGMGGPRLMEELPSVRAEGALGAALGALADLWAAARDAALDMELAIEASLEENCPALLAMYGCGPVSAAKLAVAAGDNPGRLRSEASFAAICGACPVPASSGKTVRHRLNRGGDRQANSALHEIARQRVMRDPETAEYAERARGRGKSDREVMRCLKRYVAREAYRALMRPHEIRRPEDASGLVAARRAAKVSQVRAASILGTSEKYISMLERGQRELKPIRRAYEAWVEAGLPLDWDRQAFEAEPKMDSKKHLAK

SEQ ID NO: 305984 - protein, 351 aa, unidentified
MTIVGGLDVHRQQITFDYVDDDGLVRWGQIRPATRKMLRGWLAEHCGDGDGEFALEGCTGWRYVCEELGAAGVVAHLGDPAEIAALRGPKKRAKTDRADARLLRTLLLQGRFPESWIPPAHVVEIRTLGRLYCALMDERRGWQQRIHAQLFHQGCPPITALLSVAGRDALARAELSAAGRQYVDTALRRIDELSAEIEPLRTQLIGFARRQAGCRALQARHYGIGWLCAVIIWAEIGDARRFASSDQLVRFAGLDVTVYSSDAKRAPGHLSRQGSPELRWAAFEAAKSAARRGSPDHAYYHKVAAKHDGHNGKNPTLAVERKLLRRCYHTLRDLGDGALAMPVPERQEVVA

SEQ ID NO: 305985 - protein, 367 aa, unidentified
MEKSSTAFVGMDVHKESIDVAIADANEARHYGRIGGEAASVDKLTRKLRSAHRRVVFVYEAGPCGFWIHRRLKAQGLECMVVSPSMTPRNTADRIKTDRRDAMKLARLARAGELEPIYVPDAKDEAMRDLVRAREDAVCTQRQARQRLQALLLRNEIRYVGKSAWTQAHRRWISELKLPNPAQQIAFEEYVQAVHEAGERLERLASAIGAELEHWRWRPVVEALQALRGVQSIHAVRIVAELGDFQRFESPRKLMGYLGLIPSEDSSGPRRRQGSITKAGNSSARRALIEAAHAYMHPARVSWVIARRQSGLAKVACDIAWKAQLRLCARFRRLAARRLPRNKVIVAVARELSGFVWAIARQTKPAA

SEQ ID NO: 305986 - protein, 312 aa, unidentified
MTQHIAGIDVSKHSLDACVLESGAARSFGNDATGRKQLIRWLRRHGGAVVGLEPSGGYERPAIKALIGAGFGVRFADARRVRLLAQAHNAGAKTDAVDARFIARFIAETGGRAIRLDPAREALAELMAARRHFIGAAQRLTQQGEAAGHAPARRAIERQVKKLMAEAKAMEAAALAHVRAHAGLAASLRLMMSAPGVGPIVAATLIAEMPELGALNGKQAARLAGLAPFVRESGQWKGRAAIAGGRRVPRNLLYLAAMAAKRTCRAAGAFFDRLVAAGKPKMVALTALMRKLITALNAMMRDQKPWTDHAPI

SEQ ID NO: 305987 - protein, 347 aa, unidentified
MTIVETRAVTGGVDTHLNVHVAAALDGIGGLLGVESFPTTPAGYTALTDWLCGFGTLERVGIEGTGSYGAGLARHLAALGVPVLEVDRADRASRRQSGKSDPLDAVSAARAALSGRARGQSKGRDGQVEAIRTLMVAKGSARRDRTAAINRMRALVVTGPDPIRVRFAHHTTVSLVNEAAAMRPRNSELVELTTLIVLRELARRAAYLAAEIDRLDDLLLPLITLRAPALLATPGVGPDSAAILLIAAGDNPERLRSEAAWAHLCGSAPIPASSGKVVRRRLNPAGDRQANHALWRIVLSRMSFEPRTRAYVERRLAEGKSKPEIMRCLKRYIAREVYPLLRQPVTS

SEQ ID NO: 305988 - protein, 340 aa, unidentified
MKLYAAIDLHSDNNVTVVIDEHDRVVYQKRLPNDLALILKEFSVYRTELEGIAVESTYNWYWLVDGLMEQGYKMHLANTAAIQQYEGLKYTDDHSDARWLAHILRLGVLPEGYIYPRADRPVRDLLRKRSQVVRQRTANLLSIQNLMARNTGSSLSANQIKGLDVQQVDELLPNGDLALAVKANLSVMCSADEQTKILERTVTQRVKLRAQFSFLKTVPGIGQILALTIMLETGDIRRFSSVGNFASYCRCVGSQKISNGKKKGKGNTKNGNKYLAWAFVEAANFAIRFNSKIKSFYQRKKAKTQGVVAIKAVAHKLCRACYYIMRDHVAFDVTKAFGQK

SEQ ID NO: 305989 - protein, 448 aa, unidentified
MRQPRTLAVGIDPAKRVHQAVAVLYPDHVVLSRTLRNRIEDIERLDEDVQAVAAEHQAEVVYGLEDHRRYGEALLQVLQARGRRVTVVNPLWTHRQKDFYGQDKDDLIDARAIAAVVLRRGPRLPDATDAHAETAALREAERTLQDLAERFTRAMNRLPRQLSTVYLDTYETFFADIKGPWAWRFFARFPYPQMLNGLTAPELAETLRALAGGRVGPYSREASRQVLVQQAGRILEATTHLRTQPVTAVHRLRAELIRQLCAELLQIHESQRRLRRLIDEELLPAPGRSLLGLCGVNITLAATVVGEVGDIRRFSSRHAFAKYNGTAPASRSSGGRIRHTARKSGHHRLKRALWLMAVTAMRHDPLARAFYDRCRARGLSKLESLKRVARRLSDIVYAILRSGQPYDRTRVEASIRRRAEQTAQEPASGCMPVVDQASQRDRAPAPIP

SEQ ID NO: 305990 - protein, 412 aa, unidentified
MSLVLREAKFFTGIDWATEIHAVCVMDATGKIAAQFTIVHSADGIATLIRRLARFGSPAEMQVAIERPNGRLVDLLLEAGHPVVPVKPNAIKTWREGEVLSGAKSDAGDAAVIAEYLRLRQHKLTIAVPYSGQTRALRTVVRTRGDLVQTRVATANQLTALLEDSWPGAAVIFADIESPIALAFLTRYPTPESARHLGEKRMTAFCSSHHYTGRRTAAELLERLRSAPAGTLGQALTVALRDAVLALVAVLTALGAAVKNLDRSAATRLGEHPDGEIFTSLPRSGQISAAQMLAEWGDCRQAYEHPDSVAALAGVTAVTKESGKHRSVHFRWACNKRFRQAVTAFADNSRHASPWAAKIYNDARASGKDHPHATRILARAWIRVIYRCWIDQAPYDPAKHGAATTLANQIAA

SEQ ID NO: 305991 - protein, 395 aa, unidentified
MMRPEAWFADVDWASQTHHVCVVGGDGSKQEERAFRHGGTGLAEMADWIAARCGGSAPEDIPVAIEIPHGPVVESLMDHGFAVYSINPKQLDRFRDRFSPAGSKDDSLDARVLADALRTDLHHFRRIDPVDPVVIELRAWSRIDEELKRDRVRLSNRMREQLWRYYPQILDAVGSVVEPWVLDLWAKVPTPAKARQVQRRTLESLLKRHRIRRITADQLQEVLRAPAVAVAPGTTEAAVAHIKSVSERLRLVHRQLADAKREIARLIDVLADSEDSGSGQPGGQRDVTVLSSLPGVGQTVLATLLAEAPQALARRDYKALRCMCGVAPVTRRSGKDKLVVRRMAAHARLRDAVYHWARVAVQRDPASKAKYAALRGRGHAGSSPSAARRPGWPLR

SEQ ID NO: 305992 - protein, 357 aa, unidentified
MNKSSAKISYEGKKVFVGIDVHKKSYSVVAVVEGVIVKKWRTVASPDKLAEQLRRYFPGPSIHTAYEAGFSGFVLHRVLEQAGIDNIVVNPGSIEVAINNRVKTDKRDARKIATLLEAGRLTGIRVPSPQQEQERMLTRTRQQLVEERSAIKNRIRMKCHQMGLIDPNDNREMSHKMVEEMLTQSPSQEFTLVIKAYWAVWKSIETQIRQLEQKLKEQAKTDPNETIYRSAPGIGFLSSRILSLELGDLSQFANERQLFSYTGLTPSEFSSGDTVRKGHITHQGNRRVRCILNQAAWKAITKDRHLKEFFERLTPRTGKKKAIVAVARKLIGRIRAAFRYQTPYQINPLIPEVAQTG

SEQ ID NO: 305993 - protein, 371 aa, unidentified
MEKSSKTVYVGLDVHKESIAVAYAPEDRGAEVVSLGTIGTRQCDIDKLIRTLQSKGAALVFVYEAGPCGYWLYRYLTRKGLTCHVVAPSLIPRKPGDRVKTDRRDAMLLARLMRSGDLTAIYVPQVQDEALRDLSRAREDAMRDLKAAKHRLKAFLLRQDIRYEGRASWNAAHLRWLSEVVCPTPAQQIVFQEYLRAVTEEHERLGRLENELHDQVKSWRLYPVVEAIQALRGVELTGAVILVAELGDLTRFDNPRQLMSYLGLTPSEYSSGPRRRQGGITKAGNTHARRALVEGAWAYRYPAKVSRHLQLRLEKLPAEVQAIGWKAQVRLCKRYRQLTARGKHVNQVVVAIAREMAAFAWAIARTVPRAS

SEQ ID NO: 305994 - protein, 362 aa, unidentified
MNRNTGMSAGQIIGTLNGLQVMGLDIAKHVFQLHTVDMGTGEIANVQIKRAKVLEYFVNKPKSLIAIEACGGAHHWARELTALGHSVRLLHAKIVRPFVSGNKTDATDARAIWLAVQQPGVKFVGIKTAAQQATLTLHRQRELLMKMRTMQTNALRGLLYEFGATFAQGRKALFKDVEQALEVLAGQLPQMIRDSLREQVGRIKEMGDAMLEIEKRLALQLKADPHMQRIAQIPGVGLLTATAAIATMGEASAFKSGREFCAWLGLVPSQTGTGGKVRLGGISKRGDTYVRTLLIHGARSVLSHAKEPSPWLQQIKQRRPANVVIVAQAAKMARTIWAVTAKEQSYQRGFQSVRPSAAMHAA

SEQ ID NO: 305995 - protein, 359 aa, unidentified
MSTITLGVDLAKSVFSACEMDGAGHVRRRQDLRRDAFIAWLPQLPAGTVVAMEACSGAHHWARRCQAYGLQPKIMAAQFVKPFRKSSRSKNDRADAEAIATAARQGNMRFVPVKGVDQQVRLSWHRVREGYKVESLAVGNRIRGLLAEFGVIVAQSDRALRRRLADLDAQLALPAEFKELLRDLADHWTQVRLHFDACDARIEAHARQDARCVQLRAMVGIGPITADAAVATVGNAREFKQGRQMSAWLGLVPTQHSSGGHAQLGGISCRGDAYLRTLLIQGGRSSLQRAKAVATEKATPEQLWIRSLDGRLPFGKVIVAIANKHARQIWAVLAHDVDYDPHACLNHPMHRQSHARHVA

SEQ ID NO: 305996 - protein, 398 aa, unidentified
MTRKNTLKSLPTDTEFRVVGLDLAKSDVSVAAIPVDDNTPSLVDQMTYADLLDWAGKISPTLFAMEPCNGYSLLCLQLENLGHEIKVISGSTVSMWINTHLSGQKTDLNDAIALARLAVSDAELTPIRHKSITEIRIQTVQAVRQQLMSQRSKSIVSFKALAQQWGIPCAAGHRNLKKLRESIEAKVDLITRPVANAMLFLLDAVKSLDRQIGQLNQTLQELVMSDERGRLLQSVLGVGTQISARVITVVGNIERFNSPRSLVAYVGVAPRNFITGHKNLTKKKHGNCPDLSHKGQGKISRRGDKLLRSLFIQGAACLYMQFCKDQLPECQLKRWILKQLAMQKPYGKLMVSLAAKLIRIVWAVLTYREKFNIQKAGMTRSMWSEMALETPLNKEVPA

SEQ ID NO: 305997 - protein, 363 aa, unidentified
MGNDITYVGMDDHKKSIHLAVLLPSGELLEWQIANEARAIRRMVKKLHKVVEGEVQCCYEAGPCGFVLQRRLEQLGVPCQVMAPSRTPKRPGARIKTNRRDAMELAKLLRGGLLEEVFPPTVQQEADRELCRCRETLQRDLTRARHRVTQFLLRRGCNYNQGRNWTERHRRWLKQIQMEQKQDQQVLDCYVWAVEQLEQQVAHLVELSKQPEYEKAVGALRCFRGIETLTAITLVCELYSFGRFGSARGLMNFLGVVPGEKSTGEKEIRTGITKAGNTHARRLLVETSWHYRHRPAVGKVLERRRIGQPSEVIAHADKAMLRLHRRYWKLVMAGKASNKAVVAVARELAGFLWAVLYRQASVA

SEQ ID NO: 305998 - protein, 438 aa, unidentified
MSNKVIFNLDELFISVGIDVGADFSWMSIALPNQQFVGKPYKILHNSIDSLTTAVSKIKEAEELYSLESRIFLESTGIYHYPLFCYLRDKGFNCSVINPIITKNSTNINIRKVHNDRFDSKKAALIGLKPDLKVSLMPSDLALNCRNLCREYYDLMDNRSAYVNKLQGELRMAFPQYLGIFSKVTINTSLTLLETYTSPSAFLEADKQEIIDIIRSTARFGLTYAQNKYNAIIQAATDANQFGYIINSNIKRIRLYISFIRKYDEEINSILESLHELVDANEDADFVKQIHLIETFKGAGFLSAVSIMGEIGDFSAFSKPKQLFAYFGLDPAVKQSGKFEGTKVQMSKRGSAIARRVIHMLTLQSISISRNGEAKNPVLREYYLKKCDSKPKLVAMGAVSHKVCNMIFAILRDNKPFKIIAPQEHIKQYNAAKCDMAA

SEQ ID NO: 305999 - protein, 377 aa, unidentified
MSSSAASIIYLGMDVHKDSITIAVLPMTAKNPTRLERLPNDLPKLKRFLDRTAREGELRVCYEASGAGYVLHRALREWGYACDVIAPSLIPKRPGVQRKHDKRDAADLARLYRAGELTPVRIPSEAEERVRDVVRCRETFQREILKSRHYILKFLARRGFVYREGTNWCTPHLRWLEHLTSEGSPLAPADRLVFREYHALLAYKLQRRDELDRQIEQLALTPALAGAVARLQCFRGISLHGAMVLATEIVDWRRFERPGQLAAYLGLVSREDSSGPRERKGSITKAGNSHCRHVLVQAAWCYHYRPNLSVEIRRRQQGQPPAVVAHAWKAQQRLHQRYQHLAYRKLPQIAVVAVARELVGFLWAVMRDLPTPEVAAA

SEQ ID NO: 306000 - protein, 401 aa, unidentified
MKEHYVLAIDVAKGKSMVSLIGSCGEVLISPYEINHNLNDFKNLDERIKKLNVFNDTAVIMESTGIYQMPVKRFFKENNYNLYVINPIYSKMYKQNLRKTKTDKEDCLKLAELFFIKDLKKYIEQEQFYLNLNAISRKYNTLIEAQTRLKNEFRNGVYEVFPEYEKLFKGSLIFSNTSLEFIKKYPHADIISNTRIDALANTMAKLNGRHENYYLKKAKLIKEYASNSYPSVSEDDEKVNNLIITIELLLSYIKQIENLKSKLISNAKRSYMFNLINSIDGIGEFTTSLIIAELGDISRFDNIKQLTAYCGLDPSIKQSGSSINIGGPISKSGNRYIRRILFVTVQNIIPIASRNFPDNDILLYYRKKRNEGKHHYVAVVDSTTKLLRKIFALVKQYQNNI

SEQ ID NO: 306001 - protein, 350 aa, unidentified
MEQEYHIGIDLHKRFSQVAVLNKEGEVLDNRRVDNDPPLLLQHLSPFPKETPVTLEATIGYEWMSDLLAGNGFKINLANPKKVRLIAEATIKTDKVDAVTLAQLERTNFLPAAYLPPPEVRDTRELLRHRMKLVNLRKGLKNRIHAVLAKRGVLFYPVKDIFGKVGREFLSSLQLPSIYRKEVDGYLSLIDQIDFLIKKREKEIKSQVVKENKEAQLLLTIPGISYFSALLLVAEIGDIKRFPSPKKLASYTGLTGTISASADKTYQGSLKKDSNKYVRWILIEAADHAIKKDPGLFAFYRKIAHKKGENKARVAVAHKLLISIYFMLKNNQVYQLRKPSGKPLLCHGRQ

SEQ ID NO: 306002 - protein, 415 aa, unidentified
MESMESIIPRCAGLDVHKESVEADVRRIEPDGGTHHETRRWGTMTRDLLAMADWMAAQGVTHVAMESTGVYWKPIYNILEGRFTVLLVNARHLKHVPGRKSDVRDCQWIAQLLQHGLLKGSFIPPRPQRELRDLTRHQTQLIEEKTRTVSRIQKVLEDANIKLGSVATDILGVSGRAMLQGLIEGEKDPVKLADFAQRKLRGKIPELEKALQGHLTEHHQFMLRLLWKQLAQQEELIAELESKIDEHVRPFAEAIERLDAVPGVDRRVALAVLAEVGADMTPFPSHQHLASWAGMCPGNEESAGKRRRRRITPGNRWLKRTLTQAAWAASHTKNTYLASQYRRLAGRRGKKRAVIAVGHSMLVIFYHMLKASTTYAELGGNFLDRLEPQRVAHYYVKRLEALGHKVILELNVVTA

SEQ ID NO: 306003 - protein, 370 aa, unidentified
MGNRSMFVGMDVHKETIDISVAEGGRQGEVRHYGVIATDVEALDKVVRALRAPNRVLHVVYEAGPCGFGIHRHLTARGEDCVVVSPSMVPKRSGDRVKTDRRDSATLARLHRAGELRAIYVPDATDEAMRDLVRAREDAVVVATQAKYRLKAFLLRQGRRYPGRAGWTIAYRRWLADLSFSSAAQHIALQEYRDAIDETERRSARLTEQLRQLTAPGRWALLVAALQALRGVSFITAIGLVAELGDLTRFGHPRELMAFLGLVPSEYSSGPRVRRGGITKAGNPHVRRLLAEAAWAYQGLPRIGRQQLYRQEALPKVVCDIAWKAQLRLTARFRRLVARGKAKPKVATAIARELSGFVWAIAREVRPAEA

SEQ ID NO: 306004 - protein, 340 aa, unidentified
MFYVGLDIHSPRISICVLNETGQLAHRSQVRSLEEMLRVLQGLPDRFEVCYEASCGYGHYHDVLQPLASRVLVAHPGQLRLIFRSKNKNDRNDAERLAKLLYLGETPTVHVPSLEVRTWRELINCRSLVIAKRTRAKNTLRALLRSAGVNPPKHPGLWTKAGFRWLRQLELPTFSQQLRRDLLLEEIETLVSQVRRIEQQLNRQARRTSAVAQLRTIPGVGARTAEAVAAFIDDPHRFPNAKAVGRYFGLVPCQDQSGGRNRLGHITREGAPVVRQLLAEAAWQALRRSPTVRAYFERTQREDPQRKKIALVATAHYLVRVMWAMLRHGTIWQERAVQAA

SEQ ID NO: 306005 - protein, 400 aa, unidentified
MISVGIDVSKGKSTVCILKPYGEIVSKPFNITHTQKDLSELSSMLFRLNDEVKIVMEATGIYHLPVLTYLQEKGFFVSVINPYLMKSYRNESLRKAKTDKIDSRIIANYGIDHWFKMKEFQTSGEIYEELKLLGQQYRHYMKLHLLSLAELTHLLDLTMPGIKNLLASWNETNRKDKRSDFVERFWHYDVITSMSEQEFTEEYILWAKEKKYVPSQEKAKVIYALAQESIPTLPSETSSIKMLVTEAVRVLKEVDATLGLILSRMQEIAKTLPEYSVVIEMGGVGNTLAPKLIAEIGDVRRFRNGKALVAFAGIDPPPYESGQFVGCNRKISKRGSASLRKVGYETMRSLKMRSRPEDPVYRYVVKKESEGKSKKSAKIAGLNKFLRIYYARVTELYKNI

SEQ ID NO: 306006 - protein, 371 aa, unidentified
MEHTRFVGLDIHKERISIAVAESGRSGAVEYLSEIANEPGAISKLCDRLRRPGKPLAFCYEAGPCGYGVHRQLTRLSHRCDVVAPSLIPTKAGDRVKTNRRDATMLARLHRAGELTPVWVPDADHEAMRDLIRLRGVVRQIVTRARQHLQGFLLRHGRKHGRGTAWRMAYRRWLSTLAFEHPAQQIAFQDYVDAVMDAEQRLQRVEEQIFSLLPEWTLRPVVDALQAMRGIALINAVVLVTEVGDFTRFSNPRQLMAYFGLVPGERSSGETIRRGGITKTGNTHARRALVEGAWAYRMKARIGRHKIDRIEALPKVVRDIGWNAQVRLCARYRRLRARGKTANVVNVAIAREMVGFIWSIACTIQSAPRTT

SEQ ID NO: 306007 - protein, 416 aa, unidentified
MNAVGIDVSSRKSTVAVLRPLGEVVCLPFDVTHDIAGLASLVEKLKALDGETRVVMEHTGRYYEAVEKALHEAGLFVCAVNPLLIKEYGANSLRRVKTDKADAVKIARYALDNWADLRDFTPMDAIRYDLKTLNRQFQLASKQRTASANNLIALLEQSFPGIRKCFDSPVRSDGTQKWVDFAHSFWHVDCVRKQPFPAFCERYRKWCKRHAYLFKLSNAEEVYALAKRAVVLTPKAKVVKVLVQEAANQLSSISRSVEVYRAEMDRLAAMLPEYPVVMAMYGVGKSYGPQLMAEIGDVRRFERKQALVAFAGIDPMPNQSGDKNVRSNKSSKRGSPYLRKTLFNVIRTYLQCAPQDEPVFQFLNRKRAEGKPFYVYMLAAANKFLRRYYAKLRDFFASLDTLQPVAPIPTILKATL

SEQ ID NO: 306008 - protein, 276 aa, unidentified
MTTNAVVVGVDVAKDRLDVAVRPSGETWSAANDEAGISALVARLRPLGPALLVCEATGGFERAAIAALAAAGLPVVVANPRQVRDFARATGQLAKTDQLDAAILALFAERVRPTPRPLPDAAAQLLDAVLTRRRQLLEMLVAEKNRLGFAPKPVHRGIQAHIRWLERQLDDVTKELATLIEASPVWRAKDDLLQSVPGVGPIVSYTLLGELPELGTLSHKQIAALVGVAPLARDSGTLRGKRLVWGGRARTCAPRCSWPRCAADAGTPPSRSFTSG

SEQ ID NO: 306009 - protein, 450 aa, unidentified
MPQGRQVEVEEQEEILARVAAIDVGKASGMVCTRVPHEAKAGKRVTTVWDVAATTSVIMELADRLVCQGIQRVVVESTSDYWRPFVYLLQAHGLLVWLVNARDVKQVPGRPKTDRLDAVWLCKLNERGMLRPSFIPPAEIRRLRDLTRLRVDLTEERSRHKQRVEKLLEDALIKLSTVATDIFGVSGRAMLEALIAGERNPVRLAELARGRLRVKRAALVEALTGQFSDHHARLARILLDQIDGLTAQIDQLTTLIEEAIAAIPTAHPPVAGLDPGSTVGAGAPAQGPLPAVRRLDEVPGIGSKAAQVIIAEVGLDMGQFPTPGHLVSWAKIAPQTIQSGAKRRAGPTGKGNPYLRGTLGEVAAAAAKTDTFLGERYRRLVRRRGKLKALVAIARSILVIVWHLLADPTARFRDLGADYHTSRVDTGRKTRSLVRQLEALGHTVTLQPAA

SEQ ID NO: 306010 - protein, 320 aa, unidentified
MISETTILGIDVSRDWLDGFCLPGQNRFRHPNTADGHIALVAMIQKLSGPVKVGFEATGGHEWVLWTELVDAGIIAVQLSPAQIKAFALSRGTLAKTDRIDAELIARFMAFRPEAGRELPDENLRILRTLTTRRGQLVDMRKRLKAQIAARRKQGISADVETMDDELKEVLDTQIDQIERRIENVIAQVEPLAAKANLLRSIPGIGPVSAAMLIAELPELGRMTSGEAGAMTGLAPVPHDSGAMRGRRTIAGGRRSLRRVLFQAALAAACHNPVLKPVAKRLKERGKPHKLVIIAIARRLITIANAIIKTGIPWQLQLGE

SEQ ID NO: 306011 - protein, 401 aa, unidentified
MFIIETVVVCVLAPDGEEGKPLKKVYGTFRNDLGRMRGWLKQLKVTEIAMESTGVYWRPLWNVLEGHGFHLILANPKQVKALHGRKSDKRDSQRIAEFLQDRRIDPSFVPPPELRRLRDLLRYRVSLLEQQNETHNKIRDLFETANIKLSSVASDLLGVTGQKIVEALIAGETSPDRLSWKVKGSLRKKEKEVRQSLAGCFDEFHRQMLELLWKQYKFLSGQIEQVETKTRREMEPHGELIELLDGVPGIDEMVAWTLIAEMGTDMGVFPTTGHVASWAGMCPGTNESAGKQMSTKTRKGNRYLRRALLQAAWAATRKQDSYLRAFFYRLMYRKGWGKAIVALGHKLLEIAYGILKTRTPYYELGADYYDQLNPEKTIQRLVRRLGKLGVEIVITPKEANA

SEQ ID NO: 306012 - protein, 361 aa, unidentified
MEYYIGLDVSQRQTAICIVNGKGTRVAEGKALTEPPGIYAWITKHVDPKVITKVGLEAGAMSAWLYTELSKLGLPMLCLEAYQAAEFLKAQRNKTDRNDARGLAQMVRMGGDFIKPVIIRSQCSQEARALLTMRQFLVHQKVGLENNITGTLKPFGLITARGNISTKVFRERVLATLDRADERGILVRETVMPSLDLYDTLCKQLAVLSKKVEGIAKSDPVCRRLMTAPGVGPIVALSFVTAVDNPKRFADTNDIGAYFGLTPRQYQSGEIDIRGSTSRRGDVMTRYHLVQAATVLLFNTKKWCALKAWGMKIAKRHGFSKARIAVARKLAIILCKMWLREEDFCWTNIPASPVLAGATPA

SEQ ID NO: 306013 - protein, 391 aa, unidentified
MIYVGIDVSKDKHDCYIVNSDGVVLADVFSVENNLDGFDLLLQRLKSVAPDLLNVKVGLEATGHYSYNILGFLLDKGLATFVLNPLHTNLFRKSTSLRRTKTDRVDARTIAAMMSSGIVLKSYTAISYHNEELKSLSRYRFDKVRQRAKLKQAVSRLVTILFPELEKLVPSLHIASVYALLAELPGAKQVASCQLTHLTNLLSAASKGHYDRSKAVELRNAARRSIGSAMPAKSLELQHTIRLIRELDAEISEIEAAIKQIMDQIASPILTIPGISYRMGAMILAEIGDFSRFDSPDKILAYAGLSPSTYQSGKLDNAYAHMEKRGSRYLRYALYNAAKYVCHWDASFCAYLAKKRAEGKHYNVALSHAAKKLVRLIFALQRSGQPYCPTA

SEQ ID NO: 306014 - protein, 343 aa, unidentified
MQTVTTMGFDIAKSVFQVHGVDAGGQVVIRRQLKRRHVLAFFEKLPPCLVGIEACASSHYWSRELRALGHTVRLMPPAYVKPYVKRQKNDMADAEAICEAVTRANMRFVPTKTPEQQSCLMLHRTRHLFIRQQTAVINSIRAHLAEFGIVAPVGRKGVTELLHVVADPSDKRVPEVARACLAALGAQLLGLKEQILEFDRMIMAWHRSNQTSKHLHYIPGVGPMLATALVASVADPRTFRSGRNFAAWVGLVPKQHSSGGKDRLGSISKQGDRYLRSLFVAGALAVIRYAKIHGTKHRPWLTALLGRRPTKVAAIALANKIARMAWAMMAKGERYRNPVALAA

SEQ ID NO: 306015 - protein, 402 aa, unidentified
MKEDIAKAISQQTAAALNDAKGWSRYGGFIGLDVHKDTIAVAIAMPGRDEPVYRGEIAHEPKALKKWLDRLNDEFGGAVLLFCYEVGPCGYGLYRQLTEAGHECHVVAPSLIPKKPGERIKTDRRDALKLARLLRAGDLTAVWVPDTEQEAMRDLTRARDDMKSQERKARQQLNAFVLRHGHHWPRGKTRWTQAHHNWLESIRFEQPWLQIVLQEYIDAAKAASRRVADLTDQLMQALPGWSLAPVVDSLAALRGIDKLAATVLLAELGDISRFDSPKQLMAYLGLVPSEHSSGPRRRQGAITLTGNGHARRMLVESAWSYRFPARQTMHLKRKAQHASEQAKAIAWRAQKRLCGRYRQLSQAGKNIKLVCVAIARELVGFIWDIVRHEMPRLEVQVAPTGR

SEQ ID NO: 306016 - protein, 343 aa, unidentified
MKDTTIAVDIAKDVFEIAVSDEPGVVNEKRRLTRKKFLSFFVNRPVATVVMEACGSSHHWARELEKLGHGVVLLPPHVVRPYVQRNKTDQTDAKGILEAHRNKDIKPVPVKSIEQQGIMALHRVRSSWVGSRTARINMARGLLRELGIFIPLGASKVVPTVLELLEDADSVLPSALRHTLYEVCQEIRDYEQRIRSIEKQLEAVSTQIPTVGLLRTIPGIGLLTATALVALVGDIQRFRSARHFASFLGLTPRLRGSGFALHLGPISKQGDRYLRALLAHGARSVLWRAGAMDEPDRLRAWALKVYSRRGHNKATMAIANKLARTVWAVWKHNTKFQSYPKAA

SEQ ID NO: 306017 - protein, 317 aa, unidentified
MKRIYVGIDVSKDKLDFALKDGASKTFANSEEGIKKALTWLKANTQGSCSKIIVESTSWYHWLVCLLLTDNGYDVRLINPLLTKKYQKSSIRDAKCDKVDAYRLAEIGYLENDLPRFFDSRQELRNRRIQTLISSLEKTKQRLQRTLRDTLKSLETIDMEVDLSAVEKALESVELALKTCQKLIQQEADGLAQKLALIPGISLYQASTLTIAVSGRTFTKREKLVAFFGLDVRVRQSGRWRGNSCLSKRGNPYYRKILFQIGWSLQRHNEIFREYYDRLRTKGKHYYTAIIATARKFLYYFFKLLKEFREERRIARV

SEQ ID NO: 306018 - protein, 468 aa, unidentified
MSKLSPSKRDNVEIRPFAGMRRIHPLAAGVDIGAHEIMACVPGSDHTQIVRPFGTYTADLHALTDWLLQHHIQTVAMESTGVYWIPLFETLEAAGLECCLISATSIKRFPGRKSDVLDCQWIQTLHSYGLLASSFRPTADLVALRTLLRHRAQLIEHRSPHVLHMQKALLQMNLQLSQALSDVTGETGQRIIRAIVAGERDPHKLAALRNYRCKKDEAEIAQALTGTWRSDHLFVLQQSLALFDFYTTQIHLCDEEIERIYSLIRPAWSADAHESTSKTLPAHKPHSHSKNAPKAVQVRAHLKRITGVDLVAVHGLSASLAQIIVAEVGTDMSKFPNEKNFCSWLGLAPHNDISGGKVLKSRTLKTRNRAGQACRLAAASVARADCAPGAFYRRLKARLGPAQAIVATAHMIARIVYRMLKFKMEYQAMCAEQYEQQFREREIKYLQRKATRLGLILAPATPSAQAVS

SEQ ID NO: 306019 - protein, 427 aa, unidentified
MMSFRKEVLFMNYCLSIDVGKNKSCYGLFRVNDVTLGIKDGMECIIKQTYFNHTAEEAKKIEDRITSYSKNEIAVIMESTAVYHRPLQKYFEDRGYKVSVINPFLTGHDNSSLRKTKYDKGDVSKIAFVYFKGNCNIQFVETILEKNRRILSRLSEEITDTLSKRKTELLMKLAETAPEYEKTFKKSGIYTNSVLSLIDKYPHSDLIREANEKAVAKAMHYAKKNYHVKDYAVWAEKLKRENGRWLPGTDRDSAELESIHYLIAKIQEETIESDEKIAELVSVCEDEEIYKVLLTFRGIGPDIAAHLTAELGNMARFKKPQSIIAYAGFDPSKEQSSQSLDVNGKITKRGNKHLRRWLFVAVQSMIMHAKEGDREFADYYASKRGDKRKGGQTHYHFYAMTACCNKLIRKIYFRYLDACKAETEKTK

SEQ ID NO: 306020 - protein, 341 aa, unidentified
MEHIAIDLGRRESQICVRDDDGQILHETRYRTSELRSYLSQRPAGARVVVESSAEAFTVADWATELGHQARVVPSILVPALGVGERGLKNDVRDARKLSEMDCRMAVPSVHIPSAARRAHQAQLTAREALVRMRTKLINTVRSFVRMRAVAPIRATAPALPRAVRAALLGTPEGVPEHLEALLGSLEHLNAQIQRADRAVHEVAHADPVCRLLMTMPGVGPVTALSFVCALDEVTRFEHAGRVTSYLGLVPGERTTGFKTRRTSMTKAGPTRVRWTLNQAAWTLVRTQPDSALGQWYQQVSERRGKKIAISALTRRMAAILYAMWREQRPYDATRASSRQP

SEQ ID NO: 306021 - protein, 345 aa, unidentified
MTYYTGIDVSLRSVAICIVDEKGEVCLEAKEVAEIDAIVDRLRRFSGDVKLVGFEAGTLTQYLTYGLQAAGFEVVCLEARQVSVTLAAMRNKTDRNDARGLAQILRTGWYSRVHVKSLHSHQVRALLASRKAILKKCIDLENELRGLLKVFGIRLPSRVGHGSFDAELRETVSSDEMLACALVPLLDARTVLYKTYLKLENAVRGLVRVDPICRRLMSIPGVGPVTALTFKAAVDDPTRFKSSRTVAAHFGLTPRRYQSGELDNPGHISRAGDADVRSALYVAAHSLLTRNAQWSTLKAWGIRLAKTRGHRRAVIAVARKLAVILHRMWVDGSEFRWGNPAHMAS

SEQ ID NO: 306022 - protein, 331 aa, unidentified
MKAIEQWKGEAGKAGHETRRVVVGYEAGVDGFWIARALRAHGVEVYVIHPASLSVERRGRRAKTDRIDLDILLRALLGWLRGEPRHCTMAAIPSEAEEDLREPGRQREALTTARLKVENQMRSLLARFGIADFRPRLKKAAEHLERLLAFDGRPLPRNARASLERMLAQHQLLSKQLKEIETARAQAVAIPNPDRIARMIQALAVLVGVGAETATTLVHEVFSRRFRDRRALAAFVGMTGTPYDSGGSKREQGLSKNGNPRVRRILTQLMWRWLIFQPRSALAQWFLARTGGAKGRMKKIMAVALARKLLAALWRYVETGVIPEGARLATA

SEQ ID NO: 306023 - protein, 361 aa, unidentified
MGDGSTEHSRITVGLDLGDKYSHICALDTDSGELLEEGRLRTTPEAFGRRFGYERGLRVAVEVGTHSPWVSRLLEDCGHEVLVANPRRTRLIYGEGRKTDKLDAQKLARLARADPELLYPIEHRGEGSQANLSLIHSREALVRSRSQLISHARGTVKSFGSRLPGCSAPSFHKKVREHLPSELAEGLGPIVDTIASLTEKIGDYDRRIEQLATERYPETELLRQVQGIGTLTALTFVLTLEDPKRFAKSRDVGAYLGLVPGRDQSGDKDVQRGITCAGDKMLRALLVSSTHYILGPFSQDSDLKRHGQKIASRGGKNAKKRAVVAVARKLSVVLHHLWVSAEVYEPLHNARCTESIGEEIA

SEQ ID NO: 306024 - protein, 343 aa, unidentified
MQTITTIGLDIAKSVFQVHGVDVAGQVVIRRQLKRRYVLAFFQKLSPCLVGIEACASSHYWSRELQALGHSVRLMPPAYVKPYVKRQKNDMADAEAICEAVTRANMRFVPTKTPEQQSGLILHRTRHLFIRQQTSVINAIRAHLAEFGVIAPVGRKGVEELLRVVADPNDKRVPEVVRACLAALGSQLLSLKKQILDFDRMIMAWHRSNQTSKRLNCIPGVGPLLATALVASVADPKTFRSGRNFSAWIGLVPKQHSSGGRDRLGSISKQGDRYLRSLFVAGALAVIRYAKLHGTNHRPWLTTLLARRPTKVAAIALANKLARMAWALMARGERYNYPVALRP

SEQ ID NO: 306025 - protein, 387 aa, unidentified
MTVLTVTNLPAATHGETVRCLFAIELSRMSWVIAFNTPLSEKISHRTLTGCKWKRLLELIEEVRARISRETGRAVEVISCYEAGYDGFWLHRQLSAHGIRNYVIDPASLQVDRRARRVKTDRIDTERLLRSLMAYLRGEPKVWSVVRVPSVAEEDARRLHRERDRLVSERVQHVNRIKGLCALQGIYDYNPLRPQAMARLEQMRTTQGGALPPRLKSEIKRELQRLELVVEMIATLETERDAIVADEASTHVNAKKIQNLHKLKAIGPEFAAVLVGEIFHRDFNNRRQLASYVGFAPSPFQSGSVAHDQGISKAGNRKGRTTGIELAWLWLRYQPDSDLSGWFRARVGTTKGRIRRIAIVALARKLLVALWRYLETGVVPRGAVLKG

SEQ ID NO: 306026 - protein, 304 aa, unidentified
MFGSGIDVSGENLDVAVHEQAFRQFKNNKRGWSSLIKWLQQWPAKQVVLEASGGYEQKALDALHEAGLPMVRDNPGRGRSFASAIGKLAKTDRMDAMVLAHMADALKLTRYVPPADWQRRLGELCQRRRHLVQMRVSEHQRMRAFSEPCLISMLNQHLCEIHKSIRQLDATIAALLAEQQGWRDFAKLKGAGPVLMATLACELPELGKLSGKAISALVGVAPMNRESGTWKGRRSITGGRAVVREALYMAALTAKRYEPRLKEFFESLVKQGKPGKVALVAVMRKMLVILNARKRDAEAQMASA

SEQ ID NO: 306027 - protein, 572 aa, unidentified
MSSTPSLERIGIGIDTARYGHRVNFLRPDRRPAAKALTVTEDRAGYDSLLERLKMLHTQHPQARFFIRIDAAGQYATNLEHFLRGLDFQMTISIGEPKRNKDYRKAHFPKRTTDDTESHAMARFAVVEQPEATPPSCPRMLLLREITGCLQAQVKQSTRAINRLHNILARTFPELAQLTDDLSAGWVLRLLARFPTAERVASAHIHSLERISYMTPEMAGVIHTAAQTSVASLHGPTPETLVRNLVTELRLSLRAEARLRELLVSEFDELPASGHRQAVTIPGIGRTTAAILVAKIVDINRFATADKLVGYFGAFPEEHSSGVDKNGNPLPLGSLHMSRKGCDLARGHLWNAALTAIRCNPAVRPLYHRLKAKGKRGDVAMGHCMCKLLRLVYAVWKTDRPFDPNHFPWGDPAGAAAPSKDKEAVGHKQDTPARKVVTTATSTVEPAADPVKLAKPKQLPTRRRVDFAFVRQQVTMEQVLDHLGLVDCLRGRGSQRRGTCPIHCQAGKTKPTFSVNLSKKAFQCFHAQCAAKGNVLDLWALMHRLPLYEAALHLCTTFQLAANREEEPVIKS

SEQ ID NO: 306028 - protein, 369 aa, unidentified
MKQVTTIGLDLAKAVFQVHGVDAAGAVTLRRAVRRRQVLSFFAKLPPCLVGMEACATAHYWTREIAKLGHDVRLIPPAYAKAYVRRNKNDPADAAAICEAVSRPSMRFVAVKTEAQQAAAGIHKVREMLIKQRTMLINTLRGLMAEFGIVVAEGPHHVGELVAILADPADKPIPTPLHEGLLASVEILRGLERRIEIVDKQIVDWGRGSQTCRHLITIPGYGPILSSAMAAMTVNPTAFGSGRHFSASLGLVPRQDGTGGKVKLGPISKRGNGYLRRLLVSGAMSVLCSKRAKQDPWLVKLLETKKRKVAACALANKMARIGWAVMMRQQDFRNRRHDQPCPDRHEPGAVLAALKTASRAPSAVAFGQS

SEQ ID NO: 306029 - protein, 399 aa, unidentified
MNNFSIFVGIDVSKDKFNVCAISNPSSIIFESSFDMSQQGFSSFANKLSAFPKQSIIIAMESTGCYHLNLLAFLSSNDFACAVFNPLTVKNFASLRKTKTDKIDARIIATALFYLQHQIPSSAFVNSELRDIVRARENIIHRIAKVKDNIEKLLNVLFPELERVTNIYSDTILNLLSHFPSAKAIQKARNLDVFFSKDRGRSTKLNAQKLKELANNSIAQYWPMKEKILVQNIKELQFLQQQLEEYDKMMKEYCECSAINLDIEILTSIPGIGENSAMHFLAEVGDISRFSTYKKLIAYCGLDPSIAQSGKSKVEGHISKRGNAHLRRILWLMAVSVVIHNEYFRTYYERKRQQGIPYKKAIMSVVHKLLRTLYAMLRKKEKFNIDYAISHSKQKFNFA

SEQ ID NO: 306030 - protein, 338 aa, unidentified
MQTVVRMGLDIAKNAFQVHGVNAQGKVVVRKQLSRGEVRRFFANVPACLVGIEACAGSHYWARELTALGHDARLMAGQFVAAYRKNGKNDANDAEAICEAVGRPNMRFVPVKSEEAQAVLTVHRARQLLVAERTALGNQIRGLLGEFGIVIAAGLAPLRHGLGRIGTGHRALPVLARETVGELHDRLRLLDARITQYDRKIEALARASEPARRLMRVEGIGPVTATALVASVGNARAFKNGRQFAAWLGLTPSQYSSGGKNRLGRITKRGNVDLRTLLIHGTRSLLRLTAKRRDRKSAWVEALKARSGANIAAVALAAKHARIIWALLAHGTEYQPAI

SEQ ID NO: 306031 - protein, 342 aa, unidentified
MQSTTIGLDIAKNVFQVHGIDAAEKVVVRKQLRRSQVLAFFKALPPCLIGMEACATAHYWARELTKLGHKVRLMPAKDVKAYVKRNKNDAADAEAICEAVRRPTMRFVRIKSAEQQGRLMLHRARDLLMRQRTQVINALRAHLAELGITAAQGTAGLKELLKIIASDEDARLPVDAHASLVVLAAELQAMQTLVGSLEKRIMAQHRGNEASQRLETIPGIGFIGATAIEATVTDPTAFRSGRDFAAWIGLVPRQDSTGGKQKLGPISKQGDRYLRRILVVGAHAVLRYAKQNPEKYPWLTQLLARRPFKVVAVALANKMARMAWALLAHGGTYRAPRLAAAA

SEQ ID NO: 306032 - protein, 323 aa, unidentified
MTTDYLGIDVSKAKLDVALLQGKQAFSAVFKNTQTGFSALKKWLEKYQSKPHIALEATCSYGKAAAKFLHASDYPVSVINPMQIKAFARSEMLRVKTDKVDAALIARFCRANQPRLWEPLEEAVEELQGLTRRLLELKNMKLQETNRLQDPSCTGLVKDSVERSLVHLEQEIAKLEKLMKSHLDQNPKLKAQKDLLKTIPGIGDATAAMLLSEIGDRERYTSARQLAAYAGLTPAIRQSGSSVRGRGAISRMGNPNLRKALFFPAMVAQKCNPIIRDFCNRLAQAGNPKMLIITAAMRKLLHIVFGVLKGKEGFNPDYLTSPS

SEQ ID NO: 306033 - protein, 334 aa, unidentified
MKQVNQVGVDVDSEALVCAAKHTGQRLPLATFANTAAGHKKFIRWATKGARPVRVCLEATGIYSLEFALALHHAKNVEVMVVNPRAIKDFARACMQRAKTDAVDAGGILEYLERMPFAAWQPPATAILELQAINRRIVQLNTELTREKNRRHASQFAGASATAIAHDIEVNIHHLERRLERMHQSGLQLVRGVPALATKLAHLVSTKGIAEASAMRLLAELLVLPDDLAAPQWVAHAGLDPRPYESGTSVHRPRRITKVGNRHLRAALYMPALVAIQHDTNVKAFYNKLITAGNKPMQAVVAVMRKLLHAICGMLKHDQDFDGNKFFKIAAKTA

SEQ ID NO: 306034 - protein, 449 aa, unidentified
MSRHRDKPAGLPIISGNAAGIDIGARFHVVAIPPDLCEEPVQTFQAFTADLERMADWLVSLGIQTVAMESTGVYWIPVYEILEGRGLEVIVANARESRAVPGRKSDVNDAQWLQRLHACGLLRASFRPGRDIAALRAYLRLRERHLDYAAAHIQHMQKALTFMNLQLHHVVTDVTGATGLKIIRAIVDGERDPLVLAKMRDRNCKSSVETIRAALVGNYQPEHVFALKQALALYDFYQARVEECDAQIAQSLAVLTADKASVPGPRGKPRQHSRHANALNFDVRTLLYRLVGVDVTQIHGVGPYLALRLVAECGTDLSKWRTAKHFTSWLTLSPGCKVSGGKVLSSHTRKTTNRVAAYLRLAAVTVGRTNTALGAFYRRLAARIGKAKAVTATARKIAVLFYNTMRFGMNYEDPGADHYERQYRDRVIKQLHRRAAEFGFSLQPSGGVS

SEQ ID NO: 306035 - protein, 318 aa, unidentified
MYLGLDIAKAKIDCCLMHDTKYLHRTFENNQDGFIKLTNWLEKHTANKVYACCEATGSYSEAIADYLHDTGHKISVVNPLRIKAFVTSELQNVKTDKQDAKSIAIYCQRNQPDLYKPASPSERELKALTRYLDGLKDLLTSHTNRSLVAHHSVKPYIETSIKNTKAEIKVIEKVIQSRIKSDGDLNQQAKLLKSITAISDGTIPHILTLFADKQFKTAKQATKYVGLNPIIKQSGNKSTRHLAISKMGDKYIRSALYMPAVVAFRMAVYQPFIRRLKDKGKTNKQIICAMMRKLLVYCFTVLKTGNQFDPKTILNQQS

SEQ ID NO: 306036 - protein, 338 aa, unidentified
MEITTVGLDLAKNVFQVHAVDGRGKTILKKRLTRNKVLPFFANMAPCLTGMEATGSAHHWARELGKLGHEIKLISPQFVKPYRKGSKNDQNDAAAICEAVGRPDMHFVPVKTKEQQDIQAIHRIRQRLVAERTAKANQTRGLLSEYGIIIPQGIRRLRKQLPFILEDAENGLSTLARELFGDLYRQLLELDDKLSFYDRKIGQIFMSSPVCQRLAQVEGVGPMTATAMVAAVGDGKNFKNGRQMAAWLGLVPRQHSSGDRYKLLSITKRGDRYLRTLLVHGARSVVRRSDGKSDSRSLWLNRIKDRRNKNIAAVALANKNARILWALLASGEDYRVSA

SEQ ID NO: 306037 - protein, 332 aa, unidentified
MSRQFTLGIDLAKDSFVATLLDPQGNTLLPVQTFVNNADGALQLLAAIPQPRHTQVILESTGVYGKLLIQSLSTSTLELFEVNPLIIKRLSCSMVQTKTDQADAVRIARVGRLLAESQPETLEKYRVQHDPDRENLALWVAEYKRLSEAGARLKQQIKSLAFHAAPQASVILERREQELEQIKQQLKTTKREIETLLRDHADEPAQCLMSIAGVGPLTTATALVSIQNIHRFSSADSLKAYWGVYPRRRQSGKQEGRTRMANHGNKLMRHMLWNAAKSAARHNPVCCELFERLIAKGKTAPAAYGAVARKLVQIIYGVMKSLTKFNPSPKCT

SEQ ID NO: 306038 - protein, 450 aa, unidentified
MLVQSSDPPRLVRVGIDAAVVAQHEVCLRITEADGRIRTDRFHVQPTLAGLRLLTDRLAVVPGVMAVVEPTSMTWLGLSVALRDAGCDLSLLGARHAARLRGAISGKHKSDVIDADVLARAGEVFELHPLRTVEPAQLALRRACVRRGAAVIDGNRYLRRLISLARWAFPDVWNAFRGSLPSAVAVLDRWPHLAQLAAARRSSLTALVALHTRGVADVPARVEAIRSSAAAWAAFWGGHLDLDALAFDVTEHLTDMAHAQARIERATVQAQRYWRQLYGDDDLLLSLPGMGPVTACVVRGFLADASTFASAKGAASYVGLNPSSWSSGTVSQPSRAITKEGPAVLRLAFFQAANAARRQDPQLAAFYHRLMTQHGHCHTQATVSVARKLVERTWTVLTRGIPYQLRDLDGRPISHGEAKTMIKQSCTVPDHVRAKARAHSAATNRAKLTR

SEQ ID NO: 306039 - protein, 370 aa, unidentified
MLNTTTFVGLDVHARSIKAVALDAMTGEVRSATFGYDAAEVAGWVSSVDPSAKCVYESGVTGFDLQKRLASMGIDCVVGAVSKMIKPPADRKRKNDRNDAEFLARMLSVGNVVEVWVPDDGCEAARDLVRALDDAREDLKRRKQRLSKFLLRHGYVFSETTPTGRRKGSWTAAHWAWIKSISFPEKADNDVLAYYVDAVRQAMEDKARLERLVEAEASKPRWKRRIDSIRCLKGIDVTSAADLVFEAGEFSRFKSARSFAAWLGLTPSEHSSGESVRQGGITKAGNKHLRRVLVESAWHYLGCSPHSKDLAKGQVPDPAARRHAAKGVRRLVERRRAMLERGVHKNKANVATARELACWCWAVGRMVENG

SEQ ID NO: 306040 - protein, 388 aa, unidentified
MVTGITAYKRRSLMYRIIKIGMDVHSKNYTLCAMEPTIGSEDRIFGEVQVAPDYKEIICFIESLKMKLGFYDDYSVECGYEAGCLGYTLYHQLTNAGVKCVILAPTTMLTQQGKRIKTDKRDARLIAQCLCYGGYHPVYIPTGEDDAVKEYLRMRDDHKLALKRLKQQINAFVLRHGHSYTGTKWTIKHVAWLKKVELDPIYRETLNEYMASYEEQETKIERYDKRIEEIASEARYQEKVKKLVCFLGVRTHTALSLIVETGDFNRFAKGNTYAAFLGLAPGEHSSSENVNRLGISKAGNTHLRRLLIEASKGVCKGAIGHKSKELRSRQSGQPAEVIAYADKANTRLRSKYYKMIRHEKKKNVAVAAVARELACFVWGIMTDHVELQ

SEQ ID NO: 306041 - protein, 325 aa, unidentified
MFVGFVGIDVSKNTLDAAVLKAAGKPRHKVFANTAAGHVQLLCWLQDNGLEVAHACLEATGTWADAIALALHEAGHQVSLVNPALIRAFGQSQLKRTKTDKADAQLIARFCQMHQPPTWTPPAPELRELQALVRRLESLEEMHLMEDNRLASGVSCQEVRADLEDHLADLQARIDKTRQQIKEHIDRHPDLKDKAKLLESIPGIGATTAALLLAEVGDISHFDNARQVAAFAGLVPRIRESGSSVRSRARLSKVGSSRLRKSLYFPAITALRFNPLIKALGLRLSAQGKPKMLIIGAAMRKLLHLAYGVLKSGQPFDPNFCLSTP

SEQ ID NO: 306042 - protein, 338 aa, unidentified
MGAMATIGLDLAKSVFQVHGVDADGKVLVRRQLRRGDVLKFFRGLPACLVGIEACATAHHWARAISALGHMVKMMPPAYVKPYVKRGKTDAADAEAICEAVTRPTMRFVAIKTVDQQGALMLHKTRDLLVRQRTMLINGLRGHLAEFGIIAAKGAGGVKAAIEALHEAQEQLPEAARMALHGIVDQLGQLATAIERLEARIVAWHRTNDVSRRLATIPGIGPITASAIAAAVPDGSMFRSGRQFAAWLGLTPKAHSSGGKDRQVGISKQGDGYIRRLLVVGATSVMRLARQDNASRQWAAKLLARKSAKLAAVALANKTARIAWAVMTRGEIYVAPAM

SEQ ID NO: 306043 - protein, 380 aa, unidentified
MIFVGTDAHYRNSFVHASGADGQVLARGRCGNTLLETARLWAPIERQAAAGREAIRVVMESTTNSRAIRNLLLQYGQQAGLDLTVQVLHARKLRIIAESVTKCDKLDAQVLCDLSRCDLKLPVCYMPDDEEFALREHLRARGDLVRMRTMLKNRVHAVLHRRGILTPTGDLFGKAGRTFLEQVSLDEAGRTILQRFLNTIEQLEAMIAESTASLKELARQPRWAKPAALLQTIPGVGLITALTILAELGDWRRFRSRAAVSNYAGLVPRLRASNEKCWSGGITHQGSSHLRAMLIEAAWMAVEKVPVYRSLFQRVEYKAGKKTAIVAVAREMLEDAFTMLRKDEAFRYVAAPVMPASAASQVGPPVKERIRRSAESSVAG

SEQ ID NO: 306044 - protein, 408 aa, unidentified
MEVLYPQCAGLDVHKDSVVACARLQEGAVVQHEVETFGTTTKALLALAHWLGERKVTHVAMEATGIYWKPVWHVLEEDYTLVLANAMHIKNVPGRKTDVNDATWIADLLAHGLIRSSFVPPTPIQELRTLMRTRKQLVRERAQHVQRIQKTLEDANLKIASVVSDITGTSGRAILDALIAGETRPEALLAVTTGRLKADRQSLVEALRGRVRAHHRFLFKLHLGQIDALEEALAAVDTEVGALLDPFREQAKRLTTIPGIGEVAAQVILSEVGADMTRFPSVGHLVSWAGLCPRNDESAGKRRSTRLRQGAPWLKSLLVQCAWSAVRVKTSYLRAQFFRLKSRRGAKKAIVAVAASILTAVYFMLRDGVDYHDLGADYFDRSDKTRATSRLVRRLMDLGYQVELKATA

SEQ ID NO: 306045 - protein, 372 aa, unidentified
MNYNTVYVGMDVHKESFSLCAYTIEAEKASHYQRTEADYKKILNYLEFLRTIYGDDANFICGYEAGCLGYTLYHQLTANNVKCIILAPTTMLEQRSKKRIKTDKRDAEIIAKCLAQHNYSPVHIPTAKDEETKEFLRMRDDHKLALKKVKQQILAFCLRHNYRYDGNSHWTAAHLKWLKALTPEALYKEILDEYLLTYQTLSDKLERLDKRIEELATQDEYKEAVKKLCCFIGVKTHTALSVLVEVGDFKRFASARHFASYIGLVPGEDSSGDDQNRLGITKAGNRHVRLLLTEASQCYARGQVGFKSRELKARQSGNTPAVIAYADKANERLRRRYYKMVLNKCKKHNVAKTAIARELACFMWGMMTDNIA

SEQ ID NO: 306046 - protein, 343 aa, unidentified
MEHYVGLDVSLKHTAICVVDQTGKIVCEGVVVSDPEAIEMFVKSKAPFVVRIGLETGATSTWLWSELKGKGLPIICIDARHAKAALKMQINKSDRNDAIGIARIKQCGWFKEVHVKGLDSHAIKALLASRALLVKVKRDLENHIRGLLKNLGRLIGRAKFNVFAERANELIEDKPELAVAVGPLLKAREIIERQIADFDRKVMKLARGDQQVRRFMTAPGVGPITALCFRATIDDPTRFKRSRSVGAFVGLTPRRHASGEIDWTGRISKCGDPMLRSYLFEAAGVLLTRVPKWSALKAWGMRLAKRNGLKKAKVAVARKLAVILHRMWVDGTEFSWSAKEAVA

SEQ ID NO: 306047 - protein, 338 aa, unidentified
MNIVFLGIDLAKNVFQLCGLNQAGKPVYTKRTGRKELLQTLANIPACLIGIEASTGAFYWQREFEKLGHKVKVISPQYVKPFVRGQKNDGNDAQAIAVALMQPTMQFVPLKSPEQQDIQALHRARQRIVNHRTATVCQIRGLLLDRGIPIGSAVSRARRAIPLILEDAENGLSSRMRRTIAELYDLFNDLERRIHFFDKEIETVFRQSEACQRIAKVKGIGPKTATAVVAAIGKGTEFKNGRHFAAWLGLVPRQHSSGDRQVLMNMTKKGDKHLRTLFIHGARAVVRVATNNNDGHMNQWVNQLKERRGFNKTTVAVANKNARIIWSMLRNDTEYQVV

SEQ ID NO: 306048 - protein, 349 aa, unidentified
MRFYTKQHQFYCGIDLHADAMYVCILDATGEIVEHRNLPTRPKAFLRLIKPYRDGLVVGCECMFTWYWLADLCADEGIDFVLGHALYMRAIHGGKAKNDKIDSHKIAVLLRGGSFPLAYTYPKPMRATRDLLRRRNHLARKRGELFSHIQNTATQYNLSEPLGCIAKPSERGDLLKKFPDPIVRRMVEVDLLTIEHYEALLGSLERELEKVATGHDPVSLSLLKSIPGVGKILGMVMLYEIESIDRFPREQDFASYCRLVKPAKQSNGKNYGHSGKKIGNAHLRWAFGEAVVLMLKGNPPAQALKQRLASRHGKGKALAILAHRLGRAVYYMLKNQVPFDQERFLRKAA

SEQ ID NO: 306049 - protein, 323 aa, unidentified
MPSVIGIDIAKRTFDIATQQPNGKYRTKAKLPNEVAGFEALQQWLLKHANAQAWIVMEATGAYHEALATWFHDKGYQVCVLNPAQVAYYARSQLQRVKTDKVDAKLIAEYGERHQSDLRAWQPEPPAVRRLKALVRRLEDLQEIQQMERNRLDLADASVQASIYSVLHHVERQIGETLRAIRDHIDDDPDLRNKRDLLTSIDGIGERSAALLLAELGDPLRFASSRAITAYAGLNPRLQESGSYKGQTRISRTGSSRLRAGLYMPAVCSLTHNPAISALRERLSAKGKSGKQIVCAAMRKLLHIAYGVLKSGQRFDPQLALAR

SEQ ID NO: 306050 - protein, 435 aa, unidentified
MSSKAYRTTRVNEVDWEQLARGKEGLGVTVGIDVGKFDLLVICRWADGRFERPWRVKNPWEIPTLVSVLKQVKADRKLVVALEPSGTYGEALRQALGDNGIDVQRVGAKASHDYAEVFDGVPSQHDGKDAAVVADLAALGKAKPWAYQAADSWEEELAYWVEEMVAQRQMLTPWQGRLEGLLARHWPEASQVLKLSSGTLLRILKRYGTPEALAEDADAARQLARWGRSLLSAAKIDKLLAGARSSVGVRAGPWERRQIQEYAERVLAARQQANRAQRRLRQLAEGHPVLEAQGKVVGVPTACVLWTSTGDPRHFDSAGAYRKAMGLNLAERSSGTYQGRLRISKRGSARTRQWLYFAVLRLVQRCGVRPWYEAKKARHEGEARRVLVAVMRKLAVALYHVGVRNQEFEPRRLFGRISRRSGRSAQRPGVSKQRA

SEQ ID NO: 306051 - protein, 390 aa, unidentified
MDIEMDTLIPNQSVHTTLNAIFVSLELSRSTWLVTSLLPGGNDKMSRHTLHAGDLNGLHQRLDKLSAKAKEQCNKVLPIVSIQEAGLDGFWIHRALLKTGVESHVVDAASIATPRRFRRAKTDRLDGETLLRALLAHKRGEPRVCSMVVPPSPEEEDRRRISRERRGLIAERIRLVNRIKGLLFSQGVAGFEPLKRDRRKRFEEVATGDGRPLPNRLSDEIVRAFDRLELLLEQIKAVEADRDQEIAAAKTAESIPVGIARLMTLKGVGPEFAEILWSEGLFRDFANRRQLASYAGLTPTPWQSGSISHEQGVSKSGNPRLRTIMVQLAWFWLLHQPGSALARWFKERVALEGGRRRKPAIVALARKLLVALWKFVKDGVVIEGAIIKSL

SEQ ID NO: 306052 - protein, 299 aa, unidentified
MQTITTIGLDIAKSVFQVHGIDAEGNVVFRRQLKRRYVLAFFHKLSPCLIGIEACASSHHWSRELQALGHTVRLMPPAYVKPYVKRHKNDAVDAEAICEAVTRANMRFVATKTPEQQSCLTLHRTRHLFIRQQTSVINAIRAHLAEFGIVAPVGRNGVEQLLGVVADVSDTRLPEVARACVAALGAQLQTLKAQILEFDRMIRAWHRSSEASRRLDEIPGVGPALATALVASVADPKAFRSGRDFSAWIGLVPKQNSSGGKDRSGFSRSVGSTDCAITCFHSRKLAARGSSATHAATAT

SEQ ID NO: 306053 - protein, 330 aa, unidentified
MTTNPPQIVFNHIVAFEVSKETLVVHTLPADEQCTIDNKPQAVRRLIKAEIKRNRNKQLGQMLVICEATGGYERHVLDVALEMGVSVHRAHGTRVRHFGHYRGLLAKTDPIDARLIAQYGLKTENIRLYSPPPPDTAALRALHARRTEIQQMIIAETSRLEHAQHKSVLKSLKAHIASLKAALAAIEADIAQLVKECETLRKKVALMQTVIGIGPISAMVVLAYLPDIGQLTKGQAARLAGLAPINNDSGKKRGARHVEAGRTAIRRALYMAAGVAMRTNPILKAFSDRLRGKGYPFKYVVTAVMRKLIVILNAVLRDGQSWKGAQIAAA

SEQ ID NO: 306054 - protein, 416 aa, unidentified
MQKKDYVEFEQVVERGCGMDVHKETVVVTIRGKGIKTVTKSYSTFTRSLKKLKEWLIEHGITHVAMESTGVYWKPVFNVLGDDFEILLVNARHVKNVPGHKTDKRDSRWLAKLLLSGLLKGSFIPKRVFREFRDLTRYKTKLTNQVSADKNRFLKILEDANIKLSMVLSDVFGASGTKMINHILEFEDYRPEELMQYVHGRVKASKEDIKEALIGHVTAHHRFMMKTILGNMAKIESTISEIDEHLSTVLEPYKFERELLETIPGVGRDGAIGIIAEISTDMDHFPDHKHLASWAGMSPGSNESAGKNKSGRITYGNKYLRGLLVECGWAASRTKNTYFSSKYKSLVGRRGKKRAIVALGHKILIAAYFIIKDKVEYQELGEEYLNNFRRDKLIAYYKKQIERLDPDIEPDGEIAA

SEQ ID NO: 306055 - protein, 344 aa, unidentified
MPHYVGLDVSQKTTAICVVDEQGRRLWRGACVTDPGAISARVLRHAGVVDVKVGIETGSMTPWLVHGLRSAGLDVECLDARRVKAALQMRLNKTDENDAEGLAQVLRTGWYRPVHVKSFDAHRARALLGARAQLVGMTTRLSNMIRGVLKTFGLLPGAGRGLRFDRSVETLLEGAPEIGLIVRPLLATWRQLREQIAVFDKAVQQRVRADPICRLLMTVPGIGALSSLVYVSTVEDPGRFSRSRAVGAHLGLTPRRYQSGETDRSGHISRCGDGLARTLMYEAAVVILHRIKRSLHLKDWAAAIEQRSGPGKARVALARKLSVILHSVWRSGEPFRWTPHTIAA

SEQ ID NO: 306056 - protein, 455 aa, unidentified
MKDQAKKKKVVSNDEFRLSIIQQQSGAIDIGSTLMMVSYADQNGAHHLFETSAYTDDLDQLARTLQTAGVQKVAMEATGVYWMPLYELLEQYAIEVTLVNPHHFKNVAGQKTDVKDCQWLHQLHAHGLLRASHIAPELYRELKDYIHERNILQKQKSDMLNRIQKLLTQMNIKVQHLISDIEGVSGLRLLRGIADGITDSEQLLSLIDIGKLKAEKTDLIRSLNGNYKKQYICILKNTLKSYDFLKTQMKEYEELIEDVLIKMVPVEGKYEVAKLKAKSSHVRKNQYTINVKEYLRLITGIDLTKIDGLDEISLLIIISITGIDMNKWPTANHFVSWLNLSPRPKKSGGKVIGHQKRFTKNQATQCFRLAAQSLWQNKGPLGQLFRRLSYQKGSKKAIKALARKLAVIFYSMLKNKREYEVNKLQIDSEKQTQIKIARLKKEAAKYGFILEKSVA

SEQ ID NO: 306057 - protein, 472 aa, unidentified
MFSWLGLYLELPVSNARLFGVLHIVDALIHTEMKGCVSLSKFINDFVVGIDVSSEFSVVAMLEPSGSLIRKPFRIDHNPKGFNKLLEILKKEEERLKQKPIYFVESTGIFHLPLFFFLRSNDLKGFVLNPLSVHSIKNFDLRKVKNDAKDAESIARLAKFQEVKYSLVPEPQILALRMMSREYYAMSDMLTEMKNRLCTDLYLLFPGYLDVFGNPFGKASLEILKTYSSPRALSEVDSSELALMISKISRKTVSWANKKVNALLEITTQALSMPMEFDILSLKIKTHVENIENFQNRLDGLIDQLKVMIQSPDFPAKERRYIELLEGMPGIGFLTAVTLIAEIGDFSKFHSPKAFVAFFGIDPSVNQSGKFNGDRNKISKRGTRFGRRVLFTAALASIRTTRKGDAINPVLRDYYHQKCENKKKKVALVAVMHKLLNYIFAVLRDEKPFALRSPKDHQSWRHTKGTALKLVA

SEQ ID NO: 306058 - protein, 350 aa, unidentified
MFVIGVDAHKRTHTLGVVDEVGRALETRTFPATVDGHSAALRWAQRWPERMFAVEDCRHLTRQLEADLIRAGEAVMRVPPRLMAEARRTGRELGKSDPIDALAAARAALREPGLPVARLDGEPRRLRLLVDHREDLVGERTRMQSRLRWHLHELFPGLEIAPKSLGRLHVIAALDRRLHEVDGTVAAIARELLVRIRELTERINELEREITTLVRPLASSLLAMPGCGPLSAAKILGEVAGASRFRSKAAFARWNGTAPIPVWSGNDSRHRLNRGGNRQVNAALHRIALTQWRGVGPGQAYVQHRLTAGSTKTEALRLLRRRLSDEVFRRLRADETTSAKATTTEEVVAA

SEQ ID NO: 306059 - protein, 317 aa, unidentified
MMSIQNYGGIDIAKKNFVIGITGMAKTKTETNNPKGFQHTVEYLQKHHVSLVVLESTGGLEIPLAKALHHAGLRVVIVNPRQTHSYAQSFSLGKTDIKDAKMLADYAQAIELKGLTADMLYQPPSLAEEELEALVKRRSQLVEMRTAEKNRLTQIHPSQQQSVEDLIQHFSTLIADLDKQIAKHNDSNFDGKNKIIGDIKGVGNTTCATLMSMLPELGRLPHKRIALLVGVVPPANQSGESVGKTGCIGGRMEVRNALYMATLTASRFEPKIKAFYERLIGKGKPFKVAINACMHKLLRILNARVRDYLQSDELQSA

SEQ ID NO: 306060 - protein, 373 aa, unidentified
MNLIQYIGLDVHNDSIAVSLAPSDSTEVRRWGILGGTHEHVQRLIKQLQSAHPGVTLKFCYEAGPRGYPLCRLIRGLGHECLIVCPSRVPRRPGDRVKTDRRDADQLARLLRAGELTGIHIPDPEDEAMRDLLRSRDQVRRAQHRARQQLKMFLLRHNIRYTGQSSWTPAHLRYLARIKMPFPAQQFALQELMNQISEAGARLERFEAQIAREVAGWRWEPAVRALMSLRGVALLNAATLIAELGDLSRFTRPQELMSYLGLCPSEHTSGADRQQGGITKMGNGYARRALVEAAHHYRVPARLTPHLQKRQEGLPKAVTEAAWEAQRRLHHRYQQLSGPGRKKAPVVITALARELSGFVWAIARQVKPLEKKG

SEQ ID NO: 306061 - protein, 396 aa, unidentified
MERAWAGMDIGRQYHHVAVVDTEGERLLSRRVANDETALLEVIGQVMDVAGQVTWAIDLNSSESALLLTLLLDHDQRVVYVPGMTVNRAAEGYKGAGKTDAKDALIIADQARMRRDLTILDGDDELIVELRLLVARRRDLAADRTRAVNRLHDQLLAICPALERALELTNQGPLVLLTGFQTPAALREIGIDGLTDWLRARKVRSAAALAAKAAAAAATQHTTLPGEQMAARLVAQLAEGVITLNEQLKDLDQLIEDRFRRHPSAEVIISMPGIGVLLGAEFLAATGGDMDRFASADQLASFAGVTPVPRDSGRVHGNLHRPQRYNRALQRVFYTSALISIQSCPDSRRFYDRKRTEGKRHTQAVLALARRRVNVLWALLRDGRVYQLTPPLPAAA

SEQ ID NO: 306062 - protein, 482 aa, unidentified
MKPNKQEQQEKASGRPAPGGWQQMNRKQRREWTRKIQAEEMSLQVVHPDAAGIDIGNEVHYVAVALSRDSQPVRRFGCTTAELKDMAAWLKQCRIRTVAMQSTGVYWIAVYDLLEEAGFEVYLVNARETKNLPGRKSDVQESQWLMKLHTYGLLRNSFRPSREIRTMRTYWRQRNDLVRSAARHIQRMQKALTQMNLQLANVLSDVSGVTGQAIVKAILAGERDPRKLAEFRDKRVKASAEEIARSLEGHWQEDLLFQLKQEQDGYEFCLKQMAECDERLQQYLQQREDRSAGASLPEEKRKERLRKKKENKPQFDLRAELFRMTGTDLTRIDGIDIRTAATVISEAGWDMSKWRTEDHFVSWLRLCPDNRVSGDKVIGKGRLPTTNRLTVALKMAASCLRQSDSYLGAQFRRLRTRLGAPVAIKAMAAKLARLVYRMLRYGMEFVDQGAEFYQARHRQREINSLKRKAANLGFQITEATAA

SEQ ID NO: 306063 - protein, 315 aa, unidentified
MAEQVVVGIDVSKAKLDVAILPSGGQFTVSNDRPGVGQLVQRLRQLGPSRVVLEATGRLEHLAASELAAAGLPVAVVNPGHVRHYAKARGKRAKTDKIDARLIAEFARDLQPEIHPLPDAQTQALAALCQRRNQLLEMQQMESNRLERAPRASQKSIKAMLRFLGRQVDQVEKEIDESIKKSPIWQAKRKLLETVPSIAQVSSSTLLARLPELGQFSRQKICALVGVAPYEDDSGEWHGRRHIAGGRARVRQVLYMAALSAVQYNPVLRDYYQRLLARGVEKKAALIAVVRKMLTILNAMVRDNTPWRPPCPTPA

SEQ ID NO: 306064 - protein, 351 aa, unidentified
MTIEHSIGFDVHKKSISFCIKRADGSIFDEGRFRATRHEIKGWVGRQTASWHGAMEATLFSGWIYDEMKPYAARLDMGNPSMMKAISAAKKKNDRLDARKIADLVRCDLLPKCYVGPREMRELRRMLRYRNAMVGHAVQIKCRMSGLLMESGAEYNGKQLHGKQYFSELMEGLEEVPASVKELLQMSRGMLEMFEKTQRQLVERLNEAPLLKKRLALLRTIGGVGEITSLTWALEMMDPRRFSSIGDALSYCGLTSALNVSADKAQRGPLSKQRNGHLQTVLIEAAKVAPRWNAQLAEVHEKELSRGHKNQATLEVARKLVAYLLAVDKSGRPFELRKPVQQPAEEVLAVG

SEQ ID NO: 306065 - protein, 343 aa, unidentified
MKLMRVGVDLAKAVFQVHGVDRNEKVTLRRKLTRVSWLEVLLDAVEPGCVIGMEACGGAHHWARALQAHGIAVKLIAPQFVKPYVKSNKNDANDAEAICEAMSRPNMRFVAVKTIEQQDIQAVHRVRFELSNQRKAKGNQIRGLVAEYGLVAPKELGHLRVAIPVWLEDAENGLSARFRRLLNGLWQDLLALDQRMTELDREIALIANADPVAKRLQQLRGVGPMIATALVATVGDAKQFANGRQMAASIGLTPRQNSSGGKERLLGISKRGDTYLRTLLIHGARSIVRTARGKDDRLSQWVTRIAETRHYNVAAVALANKTTRIAWAMMKHGTEYQADQTAA

SEQ ID NO: 306066 - protein, 356 aa, unidentified
MKGIAGKAGITIGLDVSDRFTEAYAIDANGEFVASWRIPTKAAAFREQLSRYPGARVVLEVGCHSPWISRQLRGDGFEVVVANPRRVRLIAESDSKCDRLDAEHLARLGRIDPGLLAPIVHRSEQAQRDRMLLLAREGLVRSRTVLINQARGFAKSLGTRLPSSSSEAFAKRVRDGVGENLFPGLAAILRTVEQLTREIHSIDRQIERLCEDRYPMTEQLRQPSGVGALTALAYVLTLEDPHRFAKSRDVGAFLGLRPRQRDSGDRHPQLRITKAGDQLMRRLLVGAAHYILGPFGPDTDLRRFGLRLAERGGKAAKKRASVAVARKLAVLLHRLWVTGEMYQAIGYGFTEGEQAA

SEQ ID NO: 306067 - protein, 342 aa, unidentified
MNDMMIGVDLAKNVFQIHGALRTGEVQFRKKLTRQQFTAFMARQAPCLIIFEACGGAHYWAREMKAPGHEVKLIAPQYVRPFVKRQKNDAADAEAIVIAARQAEMRFVGPKTVEQQSRAAVFRGRERLVHQRTADVNALRALLYEHGYVFPVGMRYLDRMTALVDDDTSDLPALIREECQDLLAQIAEKTARITERTAKLKALASQSDRARRLQTMPGVGPLTAIAVEAFGPDMAHFKTGRNFAAWLGLVPRQHSSGGKERLGRMTKAGQADIRRLLIMGAMSRLGWLGRRTLAQGNWLSRMLARKPTMLVAIALANKMARQIWAMLTKNEDYKDPALAVAA

SEQ ID NO: 306068 - protein, 418 aa, unidentified
MKKHSKSSQWSEPTLKRARARGPVQRDVKEVLAEVLGKLTGKLDAPAVSTSAKENRRGNTVSPNRDRLTVGVDLGDRWSQYCILGLEGETLAEGQLRTTQEDVREFFQALTVARVVIEVGTHSAWVQDVITEWGHEVLVANPRLMEGSKRRKRKSDRIDANKLARLGRVDPQSLYPIRHRSREVRQDLVVLRARDALVSVRTELINTARGLVKSMGTRLPRCSSPSFADKVKDAIPDEVREALLPLVQLVETVKDCIARYDQKIEELGREKYGHTTLLRQVKGVGPITSLAYVLTLEDPQRFRSSREVGPYLGLVPKQEDSGDSQPQLGISKAGDRMLRRLLVGSSQYMLGAFGPDTDLRRYGLRLCERGGKNAKKRAVVAVARKLAVLLHHLWVTGDVYEPLHHPGAETRTAQATAA

SEQ ID NO: 306069 - protein, 332 aa, unidentified
MSIVSTVGIDLAKNVFSVHAVDSQGLVVVRRSLSRAKLSELVAQLPPCLIGMEACSGAHEWARRFVMFGHVVKLMAPKFVAPYRKSGKNDGNDAEAICEAVARPNMRFVPVKSVEQQSDLTLHRVRQGFVEERTATLNRLRGLLAEFGHVLPLRPSELHRRVPQLLEKLPARVATCAQDLLEHARQLQVKALEYEREIKLHVHSNALACRAQTRLGIGPITASALVATVGNGRDFKNGRQFAAWLGLVPRQYSTGGKTRLGHITKRGDPYLRTLLVMGARAVLQRAASLTDPLSRWALAVRERRGYHRACIAIAAKNARVAWALLAKESTTA

SEQ ID NO: 306070 - protein, 337 aa, unidentified
MDANRLNNVSVPLTEPLYVGIDVAKDKLDLARSDAAGPGAAVAVFANDAAGIAQIVGLLGAARPTTIAIESTGGLERALLEALLDAGLPVALVHPGRVRHFAKGLGILAKTDRIDAGVLVRFAQQAAPRLAEKRSRIEADLRDLTACRRQLVVTRTQQTNRRGTTVNRAARKAIDAVLATLEKQIAALDKQIRELIDADDDFRHTDQLLRSVPGVGPTLAATLAADLRELGEVDRQRVSALVGVAPFPDDSGTIRGRRAIRGGRAPVRNTLYMATLAAMRSNPLIKAFAQRLKAARKLNKVVIVACMRKLLSLLNAMIRDDLSWLELSVVKKLATVP

SEQ ID NO: 306071 - protein, 452 aa, unidentified
MSESKRELPVINANTAGIDLGAEHHWVSVPEDRDSQCVRRFGCSTADLQAMARWLQECGIQSVAMEATGVYWIAVFQILETQGFEVKLVNARHVKTVPGRKSDVLDCQWLRQLHSYGLLAGSFRPDDQICVLRSYIRQRDTLIKSASTHIQRMQKALTQMNVQLHRVISDISGTTGLAIIRAIVAGERDLHKLAALKDCRIHASTDEIAAALTGDYRAELVFVLHQELQLYEVFQAQIAACDLQIESCLTQFADQVDLAAAPLPASKRRGKKQPGNAPSFDLRTHLYRMSGVDFTQIDGFGGLTVLTLLSELGLDPSRFPSAKHFASWLGLCPGSRITGGKRKSSKTRPVVNRVANALRMAAQTLVRSQSALGAFYRRMKARMGAPKAITATAHKLARIFYHLWKSGGSYRDPGIGAYERQQQERAVKNIQKKALALGFDLVAKPTAPECVS

SEQ ID NO: 306072 - protein, 337 aa, unidentified
MEFKRIAVDTSKSVFTLHGVDEHGRPILRQDLTRARFEKFLAKTSPTEVVLEACGSSHHWGRVAQALGHTVRLIPPQYVKPFVKRGKNNRNDAEAIGEAASRPTMRFVPVKSAETQAEAMDLSARDLLVRQRTQLVNAVRGHAAEFGVIAAKGISQVEPLLKKVADTDMPQAAKETLAQLGRVIAQLDSQLAEIGQRLAAQHKANPVSQRLAAIPGVGPLTALTVTMKVDAGQFESARHFAAWLGLTPKERSTGSRQSLGGISRAGNERLRQLLVVGAMAVIRHAKPGSKTASPWLLQLLERRPRKVAAVALANKMARTLWAMMANDTAYRRTPQAA

SEQ ID NO: 306073 - protein, 407 aa, unidentified
MPEQAVTTHVVGIDIGMESCTMSCLTKDKRQVIKSTPFANTLQGFDWLFERLEGLEVAPKHVLVGLEATSRYGENLLQALLKRGYQVCLLHPAQMHAFAQQRGLRAKTDRLDAVTIARALLSGEARFGYVPSEQVATYRELMRLQKQLSDDVVRYKNEIHALLVVLFPEFTQVFVDPTRPTALAVLKRYPSAQAIAQTGVETLSKFLHELAPRHYGRPTAQELVGLAKSSGSPGVAVAARSSSLRILCDQLDHTQKNLEQLQREIDQLLNQDPKATGMLGVPEFGPTTVAVLRAELGDLTRFTRIDQVVAYVGLDLQVKQSGKWKGQTKLSKHGSGRVRRILYLAALRSIHLEASPFGAYYQRLVARGMKKGMAVVAVMRKMLIVAVHLIQTEERYDPGKVARQAGS

SEQ ID NO: 306074 - protein, 340 aa, unidentified
MDEVTVIGIDLAKSVFQLHGATASGVPVFRKKLSRAQFMKFLGDLPPCLVAMEACASSHHWGREITKLGHDVRLIPPIYVKPFVKRQKNDANDAEAVAEAVMRPTMRFDPIKTAEQQSRSMVFKTRDLLVRQRRSVINALRGHLMEYGVIAPAGRHFVKKLAEHVEAPDNGLPPLVIECCQMYLDQLGILNDKIAEVEKRLKAEAKSDPETIRLQTAPGIGPLTAMAIKAFAPDFAGFKRGRDFAAWIGLVPVQHSTGGRQILGRTSKMGQRDIRRLLILGAMVRVRWALKNGAPKGSWLERMLERKPRILVAIALANKMARAIWSMMTRQEDYRDPCAA

SEQ ID NO: 306075 - protein, 315 aa, unidentified
MTQTNILTAGIDTSKAKLDVAVHDRTERWQVANTLPGWRALAANLAKVGVTRVGIEATGGYERGVVEYLRAAGFTVLVLQPIQVKAFGRVHLRRAKNDALDTVLIAACAATLDQPKIAPDPRLAELARYLTFLEQTEEDIARFKTRLEHIDEPRLRRLVTSDIARLKARRAAQIRDIAKHLRGHDDLAKRLALVLSIPGIGERTALALIIRMPELGQISREEAAALAGLAPFDDDSGLHRGQRHIAGGRGRLRRSLFAAALPAAFRWNKALVALYARLIAKGRAHNSALIACARKLLIYANTVVQRGTPWIEKAT

SEQ ID NO: 306076 - protein, 346 aa, unidentified
MMIIGCDYHPSWQQICWVDTATGETGERKLEHASGEAERFYRQLSAPVLIGMESTGNCQWFVEMATTAGHDVWTGDAAKIRACDVRAQKHDRRDAALILKLLLEGRFPRIWTPSGEEKDLRQLLIHRYKLVRIRAQVKNELQHLAMNQGISKKRKLWSKAGEQVLRELPLAPWAGRRREDLFRVREMLNGQIDLLDRAVVEAAEKNEKARLLMTQPGVGPITAMAFVLTMGDVQRFPRGKQVASYLGLIPREYSSGEHRRYGSISKQGNRFMRMLLVEAAQCAVRYDPGFRNEYLHRCHRKAKGVAKVAAARKLAIRLYWMLRTNTGYPGVVRVESSSRVPLVSAS

SEQ ID NO: 306077 - protein, 420 aa, unidentified
MNDFGTLKKTSAGRYIGLDVHKYYLIALGVDEDLNVVLPARRVELSNLESWMKKNLTKQDAVVLEMTTNTWQLYDELSVYAGSVMVVHPPHVALITRSQVMTDKIIAASILARLLAKGLLVGIWVPPQEVRELRGLVAQRQKMTRLATQAKNRLHAVIQRHHLKPPEGNPFAKTNNGWWVSLSLGRLEKMNLQSDLETLQFAEKQKERLQAEMTGIAVENEEIGRLLHLAGFGVITAVTVYAAIGDIFRFEDAEHLVGYAGLGTRVHDRGLTTRTGKITKAGRRDLRVALVEAAHVAANSHPHWKAELARLQPRLGYNKAIVAIARKLLVTIWHVLARKVVDRFAEPEKVSKKMLHFAYEVGKANRAGKSAAQFTRERLDVLGLGQDLTSIAWGSKKPIPLPPSKLLEKKVSDVPKVNSE

SEQ ID NO: 306078 - protein, 332 aa, unidentified
MFQIHGVDERGQAVLRKQLKRSEVLRFFANLPPCLIGMEACASAHHWARQLIALGHEVKLMAPQFVKPYVKTNKNDRNDAEAICEAVARPNMRFVPVKTPEQQALLAQHRARAGVMKARNAQANQIRGLLGEFGIVLPQGIGPLSRRLPEILEDGENELPGLMRALLRRLLAQLKQLDQQVGELEREIVLWHRDHEDSRRLERIAGVGPLTASAFVASVGNAKGFKNGRQVAAWLGIVPRQDSTGGKPRLLGISKHGDVYLRTLFIHGARSVLRHLEHRPDQVDSWLGRLLARRNKNVAAVALANKNARIAWALLAHQREFEPDYVSTAPSR

SEQ ID NO: 306079 - protein, 414 aa, unidentified
MELLHERCAALDIGKKDLKACVRTPSPKGKRSRHQEIRTFATTTDALLQLRDWLVGERVSLVVIEATGDYWRGAFYLLEDDLNVILVNAAHAKGLPGRKTDVCDSSWLCQMGECGLLRASFVPPEPIRQLRDLTRYRTTLTTERTREAQRLEKELEDAGIKLSSVATDILGVSGRAMLTALIDGERDAQVLAEMAKARMRPKIPQLVQALTGNFGEHHAFLCRLHLERIDQLSAAIGELSARIEEQMRPFARQLEHLATIPGVGQSIAEVIVAETGADMSRFPSAGHLASWAAVCPGHHESAGKRRSGKTRHGNRWLVRALGTAAMAAARTKDTTYLGARYRRLTRRVGKKKALVAVEHSILIAVWHMLTSDVDYADLGGDYFARLDPDLAMRRIVRQANALGFTVRFDPIQAA

SEQ ID NO: 306080 - protein, 389 aa, unidentified
MKIFVGIDIAKLNHFAAAISSDGEILLEPFKFTNDADGFQLLVSKLESFDKNSIIIGLESTAHYGDNLVRYLVAEFYQVCVLNPIKTCQMRKNNVRKTKTDKVDTFVIAKTLMMQDDLRFITFFDLDMMDLKALGRFRQKTIKQRTRLKIQLTTYVDQVFPEIQYFFKSGLHQHAVYALLKEAPSPKEIASMHMTHLANLLKVNSHGHFTKELAKELRVLAQKSVGANDSAISIQITQTIQQIELLDSQLEKIEAEMTDIMKFNDSVIMTIPGIGYINGGMILGEIGDIHRFSNPNKLLAFAGLDPSVYQSGNFQAKTTRMSKRGSRVLRYALVNAAWNVVRNNATFKAYYDAKRAEGRSHYNALGHCSGKLVRVIWKMLTDEVEFNLE

SEQ ID NO: 306081 - protein, 352 aa, unidentified
MNITHYIGFDVHKKSISYCVKTADGKIVEESKVRATHDSLRAWARKRSEAWHGAMEATLFSGWIYDALKPFAAELQMGNPSMMKAIGAAKKKSDKLDARTIADLVRCNLLPACYVAPPEMRDLRRLLRYRNLVVGQAVQMKNRMSGILMEVGAEYNKRRLHGKQYFNELLDQLEEVPESVKDLLRLSRGALETFAATQRQILDRLQTDPLLAKRVKLLKSISGVGEVTALTWALEICDPRRFPSIADAVSYCGLCSALVSSADKAKRGPLSKQRNAHLQTVLIEASKLAPRWNQQLAEVHNRELKRGGDRNQATLAVARKLVAYLLAVDKSGQGFEVRTPSARPQEEAAKVA

SEQ ID NO: 306082 - protein, 340 aa, unidentified
MEQASMIGFDIAKNVFEVHGRSSAGAVVLRRSLRRGQVEKFFAKLPPAVIGLEACGSAHHWGRVLGKLGHEVRLMPPAYVKPYVKRNKSDAIDAAACWEAMGRPDMRFVPVKTVDQQAALSLHRSRDLLVSQRTQLANALRALLSEFGIVAGKGKAGLARLVDELRAGTLELPADALVAAVALADQRAALDAAADALERRITTQVKADKKAILLKTAPGVGPLSAHATLATMPDPSLFKSGRHFAAWLGLTPRLTGTGGKTRSGRITKQGNQPLRRLLVLGATAWLRQVKANPEKGSPWLRGMLARRPAKVVAVAQAARTARILWAMLTHNQPYRAPAIG

SEQ ID NO: 306083 - protein, 311 aa, unidentified
MDTQVVSIIAVDVSKDTLEVLIGPNSQAVSMSNCSEALRRLLKKIKALPNLHFICEATGGYERTLVNFLHENRITVSIVSPSRVRDFARSEGVKAKTDPIDAKMLLRFAQEKELRPTTPPTPQRQEILARMDRRSHLAEQLKREKTRLKNSPSAIHSSIRQMCDFIKLQLKEIEAQIKELIRSDQNLKFAYKVLTAVTGIGQVSAWTIIAYMPELGQLTRNEVVALAGLAPYNQDSGKTQKPRRIFGGRAKVRKCLYLAALTASTHNSVIKTYVEGLKKRGKHHKSALTAAMRKLIIHCHYLLKKHEIVIA

SEQ ID NO: 306084 - protein, 352 aa, unidentified
MVVVGADVHKFKHTFVAVDEVGRKLGEMTVKATTEGHIAALMWARERFGTELLWGIEDCRNMSARLERDLLTGGQKVVRVPTKLMSQVRKSARTRGKSDPIDAQAVARAVLREPGLPAACHDEVSRELKLLTDRRDVLVAQRTSAINRLRWNVHELDPERSPALRSLTTAKQQQALAAWLDAQPDTVIVEIARAELTDIIRLTTEVNALQKRLTHQARPLAPTLLELPGCAELTAAKILGETAGITRFKSEAAFACHTGVAPIPVWSGNTKGQVRLSRSGNRQLNAAIHRIAVTQIRMKHTQGHAYYQKLIAAGKTKAAARRCLKRRLARVIYQALHADHQTHSEHPQQAAA

SEQ ID NO: 306085 - protein, 348 aa, unidentified
MKILALDLGKYKTVACEYEVESGRHRFHTILTTPAALQQLVLRVQPEQVVIEICNIAGWLCDLLRGMGLTVLVANTSDEAWRWRKVRRKSDRCDALKLARLAALNQVREVYIPSLSIRQWRALIAFRQQLVRRRSKVKNHIRDLLVSAGQLLPRGAQCWTQLGRAHLEALAHPLATVDWAELWRGQLEIELRQLQALQEEIAKIEEKLQAIASADPRVALLRTVPGVGPRLAEAIVALVDRPARFHEAAQVSAYIGMVPKELDSGETRRRGPITKQGSRLVRSLLVEVAWAALRYNSWARALYERISGGKKSRRKIAIVAVGRRLLVRCWAMLRDGTRWQAPTLSNSA

SEQ ID NO: 306086 - protein, 325 aa, unidentified
MQNQTIVGIDVSNATLDICVSSDQGNQSFVIDNDVKSICKFLGSYKESLIIGMENTGRYNWALYEALQESHHRVFVVSPLHLSKSIGLVRGKNDKADAIRIAAFIRKNHHELLPWKPSSRAIQKLKVLLTERSSRVKTRRLLLKQQYDYAKMKHLGVDKYLLSLNKQQLVLLDKQLVLIEREIEAVIKSDEPMKAQATLIRSVPGAGKVLCWMMLAKTEGFTTITEPRKMACYSGVVPFSYQSGTSIRGKDRISVYADKALKTTLHLAAMSAIRLENDLRTYYQRKVEEGKNKMSALNAVRNKIIHRIFAVIKKQMPYQQHLLLS

SEQ ID NO: 306087 - protein, 353 aa, unidentified
MTEGITYRIGFDVAKGVFQAHAVKNEAGEPVAFTKRLKRAQVERFFATLARSLIGMEACGSAHYWARVARKYGHEVRLMPPAYVKPYVKRNKSDPLDAEAICEAVGRPTMRFVPVKSEADQATMMLHRMRASFVERRTAAANQLRAALAEFGIVTATGARGLSDLLALIETETERFLALPAALRLVLAELARQWRSCDAVVRRMDAQIAAGVRKNERARRLTSVPCIGPLGASALEVMLGNPHVFQSGRHFAAFLGLTPREDSSGKTVRRGPITKKGDTYMRRILVLGATSYLARVRRGLMRSSPAWVVKMAAHPKRKLAAVALANKTARIAWAMLAKNEEYRAPAAAALQAA

SEQ ID NO: 306088 - protein, 375 aa, unidentified
MAKPITWVGIDDDKMNLTVAVLRGRQKEAQVRRIPNEDRALRRWVRRLVREADGGEIRMCYETGPNGFALMRRIEALGPVVVEVMAPSLTPRRSGQRVKTDPIDARKLVHLYRADELRAIAVPGEDSESSRDLVRLYHRIGEEATRKRHHILKFLIRRGRIYRDGSHWTGKHQAWLRSQRFDSWKDTVIFEELLSGLAELEARRQRLMESLEKLTQEDAHAAEVGVLKCFRGIDTASALTLVTEIFNAERFPHPREMMSYFGLSVSVYKSADSETRGGITKTGNRYARWVLGHVARHYRAQPRMGTELKRRRRGQPVWAIEIADRAHQRLHKRSWALLLRGMPSAKVTTAVARELVGFVWEVLVECRRRSRRKVA

SEQ ID NO: 306089 - protein, 352 aa, unidentified
MLIIGCDFHTRYQQIAMAREETGELLVERRLEHESGEAHAFYRELQSSKEPVRVGIEATGPIHWFERLLAELGHELWIGDSAKIRASEVRKQKTDERDARLILDLLLASRFPKIWVPTPAERDLRQLLWHRHKLVCLRTMLTNQLHFLAMSQGLCRKKKLFTKKGRAELGSLTLGPWAGRRREELLKLLGQLDPPIAELDRAVLEEAQRRDDAALLMTHPGIGPVTSLAFVLASGPITRFHRSKKIASYLGLNPSEASSGGKRRLGAISKQGNTMVRWLLIEAVYPAVRKDPALRQDYQRLKFRRGHAVAKVAIARKLAVRMYWMLRSGADYAQLVRRQGSPENVLVDVSLP

SEQ ID NO: 306090 - protein, 359 aa, unidentified
MIVIGVDPHKQTHTAAAVDRQTGELLGELTVRGNEEGHARLLEWARELGGERGFALEDCRQVSCRLERFLIGRGEPVVRVPPKLMAGARRSARSRGKSDAIDALAVARAAIREPDLPEAHLEGASRELRLLVDHREDLVCERTRVQNRLRWHLHEIGPELEPSRRSLGTLKVLDGLGRRLARRPQSVQVRIARELVAHCRELSRQADRLEREIETLVRREAPQLLALPGCGALTAAKLVGEVAGIERFRTDAQLAMHAGVAPLDVSSGRQQRHRLNRAGNRQLNRALHTIAIVQKRTYAPAKAYIARRQADGKSNKEALRALKRQLARRVFNILHLIAARANNPQRIQTSTPPQVPCLT

SEQ ID NO: 306091 - protein, 427 aa, unidentified
MNPNPKEQSSCPAQVPISVFVGIDWADAKHDICLLLPDEGDARHLQIENTAEALHDWVLKLIEEFGARGNIYVATEKARGALLYTLMQYPQLTLFPLNSKATGKLREALRAGGAKNDRWDCRLQAELVKHFHHLLPVWRPDDVLTRKLAALCEGRRKAVNTRTRLGQQIKAQLKASFPFALELLEGDCQSLLAADFLSKWPDLASLQRAGAATIRRFFYARNSRRMDRIELLLVKLKTTKPLTTDEAVIIPSALVLRTLAAQLRALLPFLAEYDKVLRSTFDQHPDAELFRSVPGAGEVMAPRLLTAFGTDRARFANAEAVSTFSGIAPVTKSSGKSLSHHLRYACAKFLRQSFHEFAASSIPHCAWAKAFYDSQRARNKGHHTAVRALAYKWIRILYACWKSRTPYNESLYLQSLKNRLAPIAICL

SEQ ID NO: 306092 - protein, 386 aa, unidentified
MQKLNDLSRSLTVLKGDSTLIAVIEMSQSSWLIAGIVPGVERQPLKKLAVDESALLKLLNRWREEAEKAGRGIERIAVAFEAGRDGFWLARWLRARDIEAHVIHASSIAVSREHRRAKTDRLDTELLKRAFLGWLRGERDHCKMVAVPTIEDEDAKRPNRERENLVGEQNRIVNRMKATLSRLGIRGFNPKLKKATDRLQGLRTPEGEPIPFNTLTELRRDMVRRLLLREQIRQIEDARLERLEQAPGDGPHAMVRLLARVIGVGIETADMLVQEVLSRNMRDRRAVARYGGLTGSPDESGTKRREKGLARSGNARVRRGMIQLAWRFLLFQKDSSLVKWFRARTENARGNRKTMIVALARKLLIALWRLVREGVVPDGVVLRPAQ

SEQ ID NO: 306093 - protein, 341 aa, unidentified
MPVIGIDTHKRTLAACAVDEVGTVIDERTFDCDPAGFVELAAWAGGVAPEARIGIEGSASYGAPVAHHLIAAGFAVREVPPQLSRRERGRSRRPGKSDPGDALAIARVTLREPDLPPVRLEDRSTELGLLADARDDLVHAQTRARNRLHAHLVVLLPGYGRTVAQLVSGRQLGAIERALGGQAGVRAELARALLAEIRDLGQRAAELERSMTALVARHPLLALPGVGVLTAARLVAEAGDVERFRSPAAFAMLAGVAPIPASSGEVQRMRLNRGGNRRLNRALYTIALSQAWHHPPARAYIARRQAEGKSWAEALRCLKHRIARPVFRLLQAGQFESAQAA

SEQ ID NO: 306094 - protein, 477 aa, unidentified
MLDLRHAVGTEVVLRLGANKPAYKLDPGFLEHPRLSPRVVIGPGARLLEFLFTGPLADDATQEKAMELLHRRCCGLDVHKETVVACLRLVSDGKVTTEVRTFQTTTADLLRLSEWLAANGCTHVAMEATGVYWKPVWHILDDGEFELVLANAAHVKNVPGRKSDVNDAIWLAELLAHGLIRASFVPDTQTQEMRNLLRTRKQLVREQSSHVLRVQKTLEDANIKLDSVLSDVMGKSGRAMIEALIAGETNPAKLASLADRRVKASPEELREALRGRVTKHHRFLLRLHLNQIDALDAAMATVDAQVEANLGPFRIAVELIMSIPGIKNLSAHAIVSEIGIDMSRFPSDAHLISWACICPRNDESAGKRRSNRQRKGATWLKTTLVQCALAATKKKGSYLQAQFHRIKARRGPKKAIMAVVASILTAIYHMLKDGTMYQDLGRDHFDRRSTDQQKKSLVKRLADLGYAVEIKPLAASA

SEQ ID NO: 306095 - protein, 427 aa, unidentified
MTNRQPIPTDALLVAIDIAKIRNEVLIEAPNHKRRRRLSVLNTRAEHDRLIETLRAYGKPVICAFEATGNYHRPIAWRLIEAGFDVRLVSSMALARTREALHNGWDKNDPRDAQVILHMLRIGATQRYHDPLRAGINDVQELSKTHEAIAKAKTEIQHRILTHYLPLYFPEIERFRGNSRSDWFFAFLDAFPTPASIMALSKEAFIEAAWDVVGRKVSKERLLADIYETARTSIGLPLPIDAPAIRMFRMVTAEARSLIRQREIEDMADAMLRDSADYKALRKVPGIGPVIALTVLAEGGDLRRFRHHRQFLKFCGLDLSTQQSGQHRGQTRLSKFGNARLRRTLWIAGQVAIRQRENGFRHKFERYIAKDRDNPDLRRKALTAITAKMARVVHAIIKSGSDYRPFVEGRVPGGRISFCGAVRAPKG

SEQ ID NO: 306096 - protein, 454 aa, unidentified
MAKRSKKSNFNVQSLPEHLRHINLNAAGIDIGSERHMVAVPEGRDEVSVREFGAFTADLQALANWLEQCGVTTVAMEATGVYWIPLFELLDSRGFEVKLVDARHVKNVSGRKSDVLDCQWIQQLHTYGLLAGAFRPTDELCVLRSYLRQREMLSQSSSMHIQHMQKALQQMNLLLHNVVSDITGVTGMKIIKAILAGERDPRRLARNRHKRCHNTSATIAKSLVGNYRAEHLFALQQAVDLYETYQAKIADCEEAIVKQVDKQPDLTADSLPPSEKPIQARERIRSGVDVRELLFKKSGVDLFATPGLAADTLLTLSSEVGFDMSPWKTIKHFTSWLGVCPGTKISGGKVLDKKTKRRPNRATQAFRMAAATQARSKTALGAFYRRIKSRAGGKQAITATAHKIARIYYTLLTKGTSYVELGQEAYEQKYKERRLHHLMTQAKSFGFQLVPCAT

SEQ ID NO: 306097 - protein, 359 aa, unidentified
MKRILRQSIGIDVGKDELVLKFARLHEDFQREIVSSQVVKNNLQGFSKLLSWCEKLKTMEIGLRFVLEATGVYYEALACYLVDHGQKVSVILPNRAKAFSKTLVIKTVNDMTAAESLAVMGLEKQLDDWQKPGEEINLLKQLNREKEQLIQERSIIKNQLHAEQHSAWPVEQSIKRMKDRIRYVTKQIKQVELEMEQILNGNASLKERIGQVCTIVGVGQVTALSVVAETAGFNLIRNKKQLASYAGYDVVDKISGTSVRGKPHISHKGNKNLRKAMHYPALTAIKHDPKMKQLYVRLLSKHGIKMKALVAVQRKMLVLIYTLWKNEQEYDPEYEIKLKNLGQPTKETALTELDQVRSY

SEQ ID NO: 306098 - protein, 386 aa, unidentified
MKRTVCGLDVHKDSVFCCIICTDGRKIQHKFGVLTDELVVLRDLMESEGVEECAMESTSIYWMPIWRVLEGSVKLHLVNPYFIKQLPGKKSDVKDAEWIATCLMNNLIASSFVPDEKIQRLRRYDRRIFDLNTSISRNLVKLDQCVQRCNIRISNYISTTDSKGYRSIVKLISQGITDASVLVEQLHGRTINKHGKETLIKALTGVVNDTDIDIINQLVEEIEMQQRHKDEAQKKMTALCGEWFPKELENLQSVPGVKERSATSIIAELGTDMDQFQTPKKLVSWVGLRPRNEESAGKIKSRRITHGNKFLRKTMIECAWASSRTKESFFAEFAYRQCVQRRKNRMKVQVAIARKMLVAVWYILHDGVPYKKPSDHYPTAVAAVES

SEQ ID NO: 306099 - protein, 346 aa, unidentified
MENIALDVHKKYTWARVEDSEGRELYASRLPHSRGCIKNFIGRWTPGCSVAVETVGNWYWVVDEIEAGGGKPQLVNARLAKLMMGNVNKSDKLDAKGMNRLQRTGTLPTVWVASSAVRDARELPRTRMVLSRQRTQLKNRVHATLSKYGHVVDEVSDAFGKRGREIINELLTKLPPHTGQALQHVLDQLDEVVKNLQAIERDMIGAFSPCSQTTLLKSLPGVGEILAVVIWTEIGIIERFNRAEQLASYSGLVAREHSSGGTFYRGAVRRDVNVYLKWAFVEAANSSILNRERSNYQHIDRLYQRIKGRRGHQRAKVAVARHLAEATFWMLKKGEPYREPMLSTQR

SEQ ID NO: 306100 - protein, 304 aa, unidentified
MYGIGIDVSQATLDVAVHEQAFRQFSNDKRGFVRLIQWLKQWPITQVVLEASGGDERAALEALHEAGLPMVRINPARARRFAQATGRAAKTDRLDAAVLAQMAHLLPLTRYVPPAPWQRRLTKFAQCRRHLVQMRVSEMQRLRQLTDPVLITIKQRHLAQLSEDLKQLDKAIAEQLAAQPCWKNIGTLKGAGPILVSTLACELPELGTLGSKAIASLVGLAPMNRESGTWQGKRSITGGRAVVREALYMAALTAIRYEPKLRDFYATLKAKGKASKVALVAVMRKMLVILNARKRDAEAALVCT

SEQ ID NO: 306101 - protein, 324 aa, unidentified
MIDGILGIDVCKNTLDVSISSYTKVRTKSFTNSPDGWRHLLDWLIAQKSQRVHACLESTGRYSLGIACALYEADHVVSIINPAQIRDFVRTKLGRNKTDGVDASHIREYCELFKPSPWAPPSEAHRRLGELQTIRSGIIAGLTEWKNRKNSGIVDAEAQALADATISHFTSQLGAVDKAIALTIDNDCDLQSKRDLLLSISGVGETLAGVVLAELPGPDVLRSSAEVVAYAGLNPRRHQSGTCIDRATRISKIGNAVLRAALYMPALSAMRYNSAIVALVTRLKSRGRLKPKQIVVAAMRKLLVLCFGVLKTGRPFDAAIAMGG

SEQ ID NO: 306102 - protein, 335 aa, unidentified
MTCYVGLDVSMEETAFCVRGPEGRILGQGKTATDPEAIAGALARFGRPERVVLETGRIANWLHRQLVARDLPVVCVDAHQAHAVLSKMPNKTDANDAAMLAELARTGFYRAVRVKSEAAQAMRALLKARNLVLGQRMDLDNTIRGLLTSMGVRLPKGPRRWSDRVELALEANEALALALRPLLRLRQDLARSLLELTRWLLGEAKGSGLCRPLMTVPGVGAITAYAFVATVDDPTRFAHSRSVGAYVGLTPRRYRSGEIDYSGRITRRGDGLLRTLLFEAASSLITRAGGGGALRDWALRLRAKVGHKKASVALARKLGVILHRLWVDGTEFRPA

SEQ ID NO: 306103 - protein, 360 aa, unidentified
MKKISKQNQQVKVAKPERSVGLDLGDRVIHYCVLNQEGEVMEEGRMQSSEPALRKHFADEAVMRIAMEAGTHSAWVSRLLKRLGHQVLVANPRKIRAITGSESKNDRNDAEQLARFAAFDPKLLSPIEHRSEQRQQDLNLIHARGTLVRARTMIINVVRGLVKSAGGRLPNCSTESFAERTKAAIPASLSEVSIPLLKQIGLLTGQIDLMDKQIDKLSKKYPEISLLKSTPGVGPLVAACYVLTLDSPDVLGDNRQAGAFLGLRPRQSQSGDSDPQGRISRTGNTYLRSLLVQSAQYIVGRFGPDSALRRWGLKLAASGGKRGKKRAIVAVARKLAVILHSMWRSRIPFLAFPQQVTVVA

SEQ ID NO: 306104 - protein, 350 aa, unidentified
MIIIGVDFHPEFQQIASVDTDTGEFQEKRLTHREEAEKIYRALACAGQKVRVGMEASGHARWFERLLAELQIELLIGDAAEIRTKRVRKQKTDRQDAQLILSLLLEDRFPRIWVPSWENRDLRQLLWHRHRMVQARTRIMNQLQAVALNEGLRCKKKLWRERGREQLESFRLAPWASRRRRDLLELLDRLNPTIAELSQAIQQEVEKCPEARRLMTHPGVGPLTALAFVLIIGEADRFQCGKQVASYLGLVPLEDSSGNRRRLGHITKQGSSMLRFLLVEAAQVTARSLPQWRSKYLHLMMRRGRKTAKVAMARRLAVHLYWMMRQGWDYQQRIKFSSHAGQLGNRHGVQ

SEQ ID NO: 306105 - protein, 381 aa, unidentified
MKYSIRFVGLDVHAASIAVAVAEAGRDGEVRSLGTIPNRPESVRRLVKQLGPPERLRVCYEAGPCGFVLYWLLTGLGVACEVIAPSLVPKKAGDKVKTDRRDAEKLARCLRAGELTAIWVPDADHEALRDLVRAREAAKKDQLRARHRVGKFLLRRGLRRPEGMSPWGARHMEWLRSQHFNRQPEQATFIDYLAEVDHAAGRIERLEKAIDEAIATAPVQMKALVEGLQALRGVAKMTAVTIAAEIGSTSRFQRPRQLMGYAGIVPSEASSGERTRRGSITRSGNAHMRRVVVEAAWAYRFRPALRDKLRARQAGLSAEIRDIAWKAQNRLHTRYRHLLVRSVPKPKVITAVARELLGFVWAIGMQVEREQAAAVPKKKAA

SEQ ID NO: 306106 - protein, 403 aa, unidentified
MSINGAPVMAATVVAVDVGKNTAALSVTDVGRRRLLGPVDFAMTAPALTAVLERVCAVLPPAAVRVGIEAAGHYHRPLLAAGVWPAGWQVLELSPARVAEQRRVQGRRRVKTDAIDLEAITELVLAGHGVPVTARAAAVIELTGWAMHRSRRVLTRTATKNQLLAQLDRCFPGVTLALPDVLGTRIGRLVAVEFADPHRLAALGVTRFVRFAASRGLRVRHSAADRLVAAARAALPAPEALVARQVLADDLALLAGLDAQIFAAEAHIARLLPDTPFAPLITVPGWGVVRAGNYGAAVGDPHRWPGARQIYRASGLSPAQYESAGKRRDGSISREGSVALRRALIDLGIGLWHADPAAKSYGQALRARGKKGGVIGCAMAHRANKIAYAMVRDQTGYDPSRWA

SEQ ID NO: 306107 - protein, 341 aa, unidentified
MQVSVLGIDLGKNSCSLVGLDDIGKVVVRRRLRRETVIVFASKLSRCIVAMEACCGAHHMGRALAAQGHVVRLMSPEYVRPYVKAQKNDDRDAEAIAEAATRPTMRFVELKSEDQLDMQTLHRVRDRLIGERTSLMNQIRSILLERGYVVPQGRAKLKARLGELLCDDAAALSPRIRELIADMHERWQRLDQRIADFDDEFTQQARNNEHARRLLTIPGIGALNATALVAAVGNARTFARGRDLAAWLGLVPRQATTGGKPRLLGITKRGSKYLRKMLIQGARATMPTLRNSDTRLGAWLRRLLSRAHPNTAVVALAAKMARIVWALLHHRRNYEAAAVSA

SEQ ID NO: 306108 - protein, 354 aa, unidentified
METTVGMDLGDSTHASVVLDDGGEVVRRVAVVSTEESVKKFLDGFPDPQSVTVAIETGTHSPWMSDLLERRGFRVLVGKSRALRAIWDTDVKDDWRDAELLARMARFDPKMLSPIRHRGRSAQADLAMVRSRDSLVRARSSLASSVRGMVKSFGDRIPDCSVEALPSKAEEHIPKDLRPALAPVLSSISSLTVQIRAFDKSIERMCGKKYPETERLAQVAGVGLLTALAFVLVLENPRRFRKSRDVGPYLGLVPGRDRSGQTDKPLPITKAGDTLLRRLMVGSANYILGPFGPDCDLRRYGERIAGSGGKVAKRKAKIAVARKLGVLLHRLWVTGETYEPLRNSNRNKKSAKAA

SEQ ID NO: 306109 - protein, 422 aa, unidentified
MSKTGLYPLHNLILRSDKFMNMNAVGIDVSKGKSMVAILRPYGEIISKPFEVKHTVSGIRSLIEQIQSIDGESRIVMEHTGRYYEPLVRELSKADLFVSAINPKLIKDFGDNSLRKVKSDKADAVKIARYTLDSWTELRQYSLMDEIRNQLKTMNRQFDFYMKHKTAMKNNLISILDQTYPGANTYFDSPAREDGSQKWVDFSATYWHVDCVRKLSLNAFIDHYQKWCKRRKYNFSRSKAVEIYEASKELVSILPKDDLTKLIIKQAVEQLNTASQTVEQLRTMMNEAASKLPEYPVVMAMKGVGKSLGPQLMAEIGDVSRFTHKGALTAFAGVDPGVNESGSYEQKSVPASKRGSSTLRKTLFQVMDVLIKTKPQDDPVYLFMDKKRAQGKPYYVYMTAGANKFLRIYYGRVKEYLSSLPE

SEQ ID NO: 306110 - protein, 345 aa, unidentified
MQITTVGLDLAKRIFQVHAVDASGDVVVRKALRRSQVLPFFVKLPRCLIGIEACGTSHHWARELTELGHEVRLMPPSYVKPYVKRGKNDAVDAEAICEAVTRPTMRFVAMKSAEQQAALSLHRTRNLLVKQRTQLVNMIRGLLAEFGIDIPQGLERALRLAHQIAAKEARPEVPAMATQVLGLLCGQVLDTHVRLQAIDRSISALQRTDDVARRLSTIPGIGPVGATALAASVADPGQFRSGREFAAWLGLTPSQNSSGGKDRLGHITKMGDRYLRKLLVIGATSLIRRARHKPEAADPRLLALLARKPARVASVAMANKMARVVWAIMARGETYQARHAASLAA

SEQ ID NO: 306111 - protein, 343 aa, unidentified
MDEYDGRQFVGIDLHRRRSVIVRQSESGEQLSAVRIVNDPVALGLQLEQAGADPEVVLEATYGWYWAVDVLQAGGARVHLAHPLGVKGFRYRRVKNDVRDAADLADLLRMGRLPEAWIAPPETRELRELVRYRAKLVAIRSGLKAQIHAVLAKAGVLIAAADLFGVTGRQRLAKVPLGPAYAERIRSLLQLIDILDGHEARFAAMIAERLHTHRGYHAIQQVPGVGPVLAAVFVAEIGDVHRFTDPAHLCSWAGLTPTHRESDTVVRRGHITKQGSKLVRWAAVEAIQRQPDTTKIALDRQRIEARRGRNIAKIAAARKLLTLVYYGLRDGHIRALAHRQVAV

SEQ ID NO: 306112 - protein, 407 aa, unidentified
MGAATRGELSSLLQKEPMELAMKCNDLSRSLVAFDQNSTLVAVVELSLNSWVVAGVVPGLGRDPVKKQSADCNALLKLLHRWRDEAIKAGGEIKRMVVAFEAGRDGFWLARWLRDQGIEVYVIHPTSVAVSREPRRAKSDRLDTQMLKRAVLGWLRGEPKHCSMVEIPTLAQEDAKRPNREHEHLVGERTRIVNRMKATMARHGIRGFKLNLRKARKQFAELRMPEGEPLPPNTLAELERDLARLQQVRDQINTIEKQRLKRLRQAPQEGPHPMILLLAKVLGVGIETADMLVNEALWRNLRDERAIGRYAGITGSPDESGSKRREKGLARAGNARVRRGMVQLAWRWLMFQKESALTKWFRARTAGGPRDVRKTMIVALARKLLIALWRYVTTGEVPAGAKLRPAV

SEQ ID NO: 306113 - protein, 355 aa, unidentified
MNKYSVGIDISKNDFHACFSGIDNNQQVKVLRSGTFKNNRKGFVELAKWVKDTAREKIVPVVIIMEATGVYFENCALYLFKSGFSVSVILPNKAKKYIAALGIKTKNDKADAKALSRMGAEQALQLWQPMDDYFYELRALTRLYQTLQESITATKNQLEAAELSMYPSKTIIRSLKKLISETEKQLLIIRDKIYKHLASNGSVATKVNNIAEIKGIAALTIAVLAAETNGFLLFENASQLVSYAGYDVIESQSGLRVGKTKISKKGNARIRRALHMPALNVVRYKVKKFDIFFERNFQRHGIKMKSYVAVQKKLLTTIYALWKKGEKFDPEYDLKNTTRDGEAVQSSRPNFTEVG

SEQ ID NO: 306114 - protein, 356 aa, unidentified
MSQKLNSAIAVIGIDIGKNSFHVVGHDQRGAIVLRQKWSRDQVEARLANVPPCLIGMEACVGAHHLSRKLQALGHDARLMPAKYVRPYSKGQKNDFRDAEAITEAVQRPTMKFVTTKTADQLDLQALHRVRERLVGQRTGIINQMRAFLLERGVAVRKGPRFLRAELPAIVAKRTDVLSPRMLHLIEGLAEDWRRLDERIETLSNEINALARTDSACDRLMSVPGIGPIIASAMVAAIGTGEAFAKGRDFGAWLGLVPKQISTGDRTILGSISKRGNRYLRALFVQAARVVLARIRPKQWERYGLKSWIEAAQRRLHHNVLAIALANKLARIAWAVLNKGRAFECAKTHAMAPRAA

SEQ ID NO: 306115 - protein, 371 aa, unidentified
MGKSSKSLFIGLDVHKDTIAVAYAAEDRGTEVVSLGMIGTRQYDIDKLIRKLEAKGATLLFAYEAGPCGYWLYRYLTRRGLSCAVVAPSLIPRKPGDRVKTDRRDAVTLARLLRSGDLSSIYVPTVDDEAIRDLSRAREDTVRDLKRHKVRLKAFLLRQDIRYEGRANWNAAHLRWLARVVCPTPAQQIVFQEYVHAVSEQTDRLGRLETELQTAVTTWRLYPVVAAVQALRGLNLTGAVTLIAEVGDLTRFDTPRKLMSYLGLTPSEYSSGEHRHQGGITKAGNGHARRALVEGAWAYRYPAKVSRHLQLRLENVPAEVRAIAWKAQLRLCKRYRLLSARGKHVNQVVVAIAREMAAFAWAIARTVPIAA

SEQ ID NO: 306116 - protein, 392 aa, unidentified
MQVIADRPEAPSVIRTNLDAIFASLELSHSTWLITSLSPGSGEKMSKHVVRGGDIAGLLQRFAQLREKALAQRCRNIPIIVIHEAGLDGFWIDRVLKNEGIESHVVDPASVATSRRRRRAKTDKIDGEALVRTLLAYKRGEPRVCAMVKAPTPEEEDRRRLCRERKVLITERVRHVNRIKGLLFSQGVCGYEPLHRNCRRRLDELRTGDGRPLPKHLKAQISRELDRLELLLEQIKAVETERDALLAAQQIAAPPSAAMLLAIKGIGPEFAAILWSEGLFRHFDNRRQIASYAGLAPTPWKSGSIDREQGVSKAGNPRLRTTLIQLAWLWLRHQPQSALALWFKERVVHNRGRLKKAAIVALARKLLVSLWKYVAAGVLIEGAIMQAAWCER

SEQ ID NO: 306117 - protein, 336 aa, unidentified
MDPHADLHVAAALDPIGGLLGVQEFPATGAGYASLLGWLGGFGDIALGGVEGTGSYGAGLARHLAMAGVRVVEVDRADRQDRHRAGKSDPLDAVSAARAAQSGRAAGEPKGRDGTVEAIRALMVAKRSTRAERTQAISQARALIVTGPDELRARFAGHRPAQLVEAIAALRPRPGDVPGYATRVALRELGRRARFLDAQLDRLDELIVPLVTARAPGLLALHGVGPDTAALLLIAAGDHPGRLRSESSWAHLCGVAPIPASSGKVSRHRLNRGGNREASHALWRIVITRRGSRPGHPATRAYVERRTKEGLPEKEIIGCLKRYVAREVYHQLRAGA

SEQ ID NO: 306118 - protein, 483 aa, unidentified
MKPKQKEKPKKATCRPTQGNWQQLNRKQRREMTRKIQSEDLSLEVVHPDAAGIDIGNESHYVAVPPTRDSQPVRRFGCTTAEVKEMAVWLKQCAIRTIALQSTGVYWIAVYDILEEAGLEVYLVNARETKNLPGRKSDVQESQWLMKLHTYGLLRNSFRPSQEVRTMRTYWRQRDDLVRTAGRHIQRIQKAMTQMNIQLANVLSDVSGMTGQAIIKAILTGERDPHTLAALRDWRVKASEEEIARSLEGNWQEDQLFVLKQEQDSYEFCQKQIAQCDQLLQHYLQQQEDRSQGASLPEEKRRERLRKKKKGNAPQFDLRTELFRMTGVDLTQIDAIDVTTAMTILTEAGADMSKWKTESHFVSWLRLCPDNRISGDKIIGKGRLPTKNRASIALRMAASTLRLSNTYLGAQFRRLRTKLGAPVAIKAMAAKLARLVYRMLRYGMQFVDQGAEFYETQNRNLQINYLKSKAAKLGLQIMEAPPA

SEQ ID NO: 306119 - protein, 412 aa, unidentified
MQDILTCVMGLDVHRDIIVACLVKGAVDAEPEAETRTFSTLIPEMQKLRDWVIEAECRNIAMESTGIYWQPIYEMLESCFDGEISILVVNARHMKNVPGRKTDMKDAQWIATLLRAGLLKGSFIPDKTFRELRHLTRYRKSVVHDITAQKNRIDKFLQSSGFRFTAFLSDTFGASGRNIIRHLIERGSIDREALDKCLKTKTRNRIDEILVALNGSLSVHQRRFLNIVFLHLEDLEAHKHTIEDEITEEVLKHTDALNLLCSIPGIDVTAAAAIVAEIGTDMSAFPDSQHICSWAGLSPGNNESAGKRKSVHINKGNPYLKSMLCETAWIMASHRKLYLSGWYWKVKQRKGAKRATIALARKVLSIIYTMLKTGTPYSEECFEQRRQRCERKRANRMVNELQKLGYTVVAPD

SEQ ID NO: 306120 - protein, 316 aa, unidentified
MDLTSALVLGIDVSKDRIDAHLLPEGRSWTVSSEPGELEAFIAGLPEGIALAVLEASGGIESPIASLLANAGIPVAIVNPKQVRSFAFALGQRAKTDPIDARLIALFGARVQPRPRPLPEEDQALLRELITRRQQLMGIRVAEQNRRLTARTKAVRKNIDAHICWLTKQLESIDKDLDTLVRQSPLWCAQEDLLASVPGVGTTTARTLLATLPELGTLDRKQVAALAGLAPYARESGRWKGKRFIGGGRPAVRTALYMSALTAIRHNPSMRAFYRTLLAKGKPKKVALTACMRKLLTVLNAMVRDNKPWSAGQVEA

SEQ ID NO: 306121 - protein, 358 aa, unidentified
MEGAPRLDTTTFIGLDVHARSIKAVSLDVMTGEVRAATFGYDAGAVAEWVRSVDPRARCVYESGVTGFDLQKRLSGLGVDCVVGAVSKMIKPSADRRRKNDRNDAEFLARMLSVGNVVEVWVPDDECEAARDLTRALEDARDDLSRSKQRLSKFLLRHGLAFDERTPTGRRKGNWTRAHWSWIESIRFAEGADNDVLAYYVDAVRRAAEEKARLEGLVEAEARKPRWRKRVDSLRCLKGVDTASAADLVFEAGEFSRFGNARSFAAWVGLTPSEHSSGESDRRGAITKAGNKHLRKTLVEAAWHYLTCSGRPKDLARGQAPDRVARRHAAKGVRRLVERRESLLARGVHGNKANVATC

SEQ ID NO: 306122 - protein, 410 aa, unidentified
MLFIGDDWAEAHHDIEIEDEAGRLLVRKRLAEGLAGVTLLHELIAEHLDPSGEPDQVLVGIETDRGPWVQALLATGYLVYAINPLQVARYRERHSTSGAKSDPGDAHLLAEIVRLDRAHHRRIAGDSEIAEHVKVAARAHQTMIWSRVRQVNTLRSLLREYCPAALAVFGTDLASPDALAVLAAAPTPELGRRLSQARIETLLRKAGRQRNIAATAARIKTALGSDQLTARPGVVPAYAASASALVAVLTTMVTQTEVLAGQVEQGFGRHPDVEIYRSQPGLGVILGARVLAEFGDDSDRYADAKARKNYSGMSPITRASGTKRVVLARYARNRRLGDALFRQAYSALRASPGARACYDRQRARGASHYQALRTLANRLVGILHGCLSHHTLYDENQAWHTPDDKLTIAA

SEQ ID NO: 306123 - protein, 368 aa, unidentified
MSNIKFIGMDVHKKTIAVAIADDGRNSQVRSYGTFANDLNALDKFCRKMVSTASQLHFVYEAGPCGYGIYRHLTRKGFDCKVIAPSMIPRKSGDRIKTDRRDAIMLARLHRAGELTAVYVPDNQDEAMRDLSRAREDAVIATRKAKQRLKAFLLRNGLTYSGRSKWSKAYFNWLSDIGMPHPAQQVALQEYINAVHENLSRVDRLTEQIRQMVPDWRLAPIVSALQSARGVSLIVAVTLLTEIGDLGRFDKPAQLMAYLGLVPSEHSTGDTIKRGEITKTGNGHARKVLVEAAWAYRMQPRVSRILLKRQQGLPDQVCRIAWKAQLRLCARFRRLAAKGKNKQIVVTAIARELSAFLWAIAKQVQPVV

SEQ ID NO: 306124 - protein, 345 aa, unidentified
MNYFAGLDVSLKRTAICIVDRDGNIVREGVTDTEPEALISWLRNTRFALQRVGLEAGQCSSWLHKGLSEGGLPVICVETRHAKSVMQAQTVKTDRNDARALAQMMRTGWFKAVHIKSEDSQKLRALMGSRRCLLDKQRDLNNHIRAALRTFGFKVGLIGQSRFEERVRELIVADGDLQALVVPLLEARRMLGEQARVLTRLIGRLVRSDATCRRFMTVPGVGPLTALAYKTTIDDPGRFRKSRHVGVHLGLTPGKYASGEVDYNGRITRCGDAFVREHLFEAAHSLMVNTRRWCSLKAWGIRIAKRSSMKNALVAVARKISVILHRMWCDGSDFRWERSEAAAAA

SEQ ID NO: 306125 - protein, 356 aa, unidentified
MSRDIKYIGMDVHKEAVVIAVLNSSGKLVMESIVETKASSILQFIHGLRGELHVTWEEGTWAAWLYDLLQPQVARVLVCDPRRNALLKEGNKSDQVDARKLADLLRTGMLRPVYHGEHGLRTLRELGRSYQTISQDLNRVMNRIKALYRGWSIPCAGTQVYAPRYREEWLNKIEHAGVRRRAELLYQQLDGLQGLRRTLRPELLAESRKHKATKLLRQIPCIGPIRAARLLALMQTPHRFRSKRQLWTYSGLGIETRDSAQYRYVHGQLQRAKKPQQIRGLNQNHNHEMKEIFKGAAIRASCGVGPLRDFYVALLEKGMKPEMARLTLARKIAAIALTLWKKEERFDAEQLKPQAA

SEQ ID NO: 306126 - protein, 398 aa, unidentified
MLHDHPSVGPTAIRTQFGAIFVSLELSRSKWVLTSLSPGNGEKMSQYSLTAGDIGGLLARFADLKRKAKERTGLDYPIITIHEAGLDGFWVHRVLQDEGIESHVVDAASIATSRRRRRAKTDKIDGEALLRALLAFKRGEPRVCAMVVAPSPEEEDRRRLCRERQTLLDERIVHTNRIKGLLFAQGIFDYAPLRRDRRKRLEGLRTGDGRPLPVHLKTQISRELDRLELLIDQIRSVEAEQEALLAMESNAAPEAGLEKAGSEAEPRNAVAMLLAVKGIGDHSAAILWSEGLSRQFSNRRQVAAYAGLAATPWRSGAVMHEQGLSKAGNPRLRTLMVQLAWLWLRHQPQSALARWFRARGERGRKGSVVALARKLLVALWKYVTHGVVIEGAVMKPAT

SEQ ID NO: 306127 - protein, 344 aa, unidentified
MDNHTQYLGFAGVDLAKKVMQIHFVTADGEITDKSAKRAEFLDFFRNRGKCLIGMEACGSSQDWARKLEAMGHEVHLLPPKAVKPFVSGQKNDHNDAIGIYKAMFNGVRRVPVKSTEIRDLQTLRRIRSQVTKDKVKEINHVRGLLAEYGIVMGKSLNAFNKDISSALESLKERGDVSPLVAEELRTTVEAIKTKIKRQKKLDQEIEQLARGCKNYENFLKTPGVGPFTAAMLCVLLCDPSIFANGRQFAAYIGLAPRSRGSGGKNYVTGIPSKFNCDSESRAVLVECAQAIARCKNKSLWVEEILRRKPKKVALIAIANKLARQVWAMANKGESFKQMAVLTA

SEQ ID NO: 306128 - protein, 423 aa, unidentified
MAYRIAGIDVHKKKLAVVVADVEVDDAYQFERRWFASNPEQLQRLAEWLLEQQVEEVVMESTAQYWKPLWSALERYWKPGCQNREGAGKMSGTLHLAQALSNRGRRGRKKDFPDAERLVKRLISQELTLSFVPDTEQRLWRTLTRTRYQRTRDKVRLQNQLEALLEEAHIKLSSLVSDLLGVSARRMLHGLAEGETDPASLAALAHQGLRATPAELRDALGACTELNPVYRRLVRLALDDLQLIEQQIGKLDQETASLLQQHQDAVQRLAEVPGLGVDSAQQIIAEVGAKAATFPSAKNLVSWVGACPGDDETAGVNRSKRSPKGNRQMRRILNQAANAAVKHKGSIFEIVYRRFVPRLGHNKTIGTISHRLCQLIWIILHNGVRYEERGPSVCEKAKRARTSRMIRTLRNLGYRVEPAAVPA

SEQ ID NO: 306129 - protein, 317 aa, unidentified
MERRQSSTKVAGIDVGKRGLDVAVHGLEDELKVENGPAGFSELIGWLKAREVGRVGLEATGGYERGVRAALEQAGFEVVVHQPLEVRRFAQLKRWRAKNDRLDARLIAAATAQVEAVKAAQDPRLVELAERLTVYEQITDQIVELKTFLESLTLKDMIALARTQIRSLERAKGKLSLDLLRRIKAEADLLARLRLLTSLPGIGAIVAASLVIRMPELGSMKKGQAASLIGVAPFDRDSGQWKGLRFISGGRARPRRMLYLAAVAAKRFDPGFKAFAEGLLTRGKPAKLITVAVMRKLIEAANLVLSRGQPWLKQLAT

SEQ ID NO: 306130 - protein, 320 aa, unidentified
MSGSIGIDVAQENFVVAREAIAGSKSYPNTDRGCRDLIKDLSRDGESVERIVVESTGGYERRVVAALGAAGLPVVVVNPRHVRDFARSKGQLAKTDQIDAHILADFAARIQPPIKPLPSTEQEDLRELLTRHEQLVQMLATEKTRLLQAEGQSRHGLRKKIKNHIKFLEREIVMLDSDLDDTLKKSEVWKETDDLLQSVPGVGKGTSRTLLGLVPELGTVSAAEIAKLVGLAPFNRDSGKSRGSRHIGGGRGRVRAMLYMATLCAIHCNPVVKAWYQRLISAGKPRKLALVACMRKLLVVLNQMVKTKTRWQASLAPTTA

SEQ ID NO: 306131 - protein, 296 aa, unidentified
MMNTHPQGGAANGVQRPNAGIDVSKEHLDLCIESTSLRTTNDAQGWNELTATLLARGVDVVVLEATGGYERGVLCALQYAGVAVARLNPRQARDFAKAMGTLAKTDQVDARALRDFANVLAAHKDRARYITPMQEQHRLELAELMTRRRQLVDMRVAENNRLEHAGRLAVRSIKSVLKTLDKQLQGVDDEIDQHMERHFKPQRHLLDSVKGVGPVTILTLTAALPELGQLDRRQIAKLVGVAPLANDSGKRTGKRRVWGGRAEVRAVLYMAATVAIRHSPVIKVFHSRMIAAGKPK

SEQ ID NO: 306132 - protein, 389 aa, unidentified
MKQTIRPEKYSTQATLYLAFELSNQEWKLGFTVGLGQPARQRKIAAGDTTALKHEIALAKQRFGLPADAPVVSCYEAGRDGFWLHRFLESEHITNLVVDSASIEVSRRGKQVKTDRLDVEKLLTMLLRYHAGETRVWSVVHVPSLAAEDQRQLHRQLLALKAERTRYVNRIKGLLVGQGIHLNVDADFLRQLATVRLWDGAALPAGLENRLKREYCGWQFVHRQVLDLEGERREILRNSQEPCIAQVRQLLRLKGIGENSAWLYVMEFFGWRDFHNRREIGALAGLTPTPFQSGADDHEQGISKAGNTLIRAMAIEIAWGWLRHQPDSELSQWYQARFGAGSTRLHKTCGERSRTIGIVALARKLLIALWQYLESGEPPPGATLKPAAA

SEQ ID NO: 306133 - protein, 467 aa, unidentified
MTLTLGIDIAVRAAHQATLSRDGKTVWRGRKFMTRPDELERVWADVGAEDPAGLTVVLEPTRNAWIVIAEWFRRRGAKVVMVPTTQSADLRKYYSKHAKNDRIDSELLARLPLLHPDGLREYSGQGPADPLRRLVKQRSTMVKRRTAVYARLDALIELLGPTWYAVLGSNYGNAALEFLARYADPHAVIRFGQARLTRFLITRSRGNWRDDHAAGLIAAARETLALWNVEGTDGMDFAELSADVAHEAEQALFLTRQIKEIDERIANLYADADPQGIVASAPGVGPTISAVIAGRLGDPHRFTSLAAIRAYTGLVPKVSQSGVVKTESSITKAGDPLLREMLYAAADQARKVDPQFAAKYHRLMAGDRHHDSAICHLATMLVTRIATCMRDGQPYQLRDIDGAAITESEGRAIVKQRYQLDPRQRDHVRHKLMRERRNKAGQESQESPSAPTSQPAKPKPTTSPQVA

SEQ ID NO: 306134 - protein, 345 aa, unidentified
MTNLPVHAGLDYHQGSIQTCVVDETGRQLLNRRCRNDVVEVAEAIRSRGEVRSVAIESCCGAAEFAETLHAATGWPVTLAHPGYVNRMKVNPDKTDFSDARLLADLDRVGYIPKVWLAPREIRELRTLVRRRQSCVERQKAAKLQLTSLLRTRRMTSPEWAGSRWSLRWMEWIRTVAASENERWTIDSMLEDLAYLKNQIRRAETRLKMVTRDDQTVAFLQTLPNIGPVTAWVMRAEIVRASRFRTGKQLARFCGTSPRNCSSGERVADSGLIRAGNPHLKTVIIQAAQRLRRCDPRWSVFANRLERAGKPACVVVGAVANRWVRWLFHRLKEFEASMRTESCMA

SEQ ID NO: 306135 - protein, 401 aa, unidentified
MNYVLVLDVAKGKSMFMLSSDIGEVLLEPTEYIHNKSYFEKIDSYINKLNIKDNLTVVMEATSIYHKSPERFFKENDYHVIVFNPLIGKEITNTIRKTKTDKQDCIKLTNLFWKGSIPDRNYTEDEIYTKLNELSRQYYHLDEGLTRHKNRYKELLHLCFPEFELCFKDGKTYDLTALNFIKEFPHAYIIKDKRVDALAYNMANTNNRHLNYYKRKANIIKEYAFTSYPGVNKNSKDVDNLKQLANIIINLTEQKDEVKNQMIELAKETKNFECINSLFGIGELSASLIIAELKDITRFNNIKQINASCGLDPTIVQSGKSINYHGPISKRGNRYARKILFNCSRNIITLSAKCDKENSIYVYYQKKKQEGKHFYACLTACSTKLIRIIYALCMNNSQQQN

SEQ ID NO: 306136 - protein, 337 aa, unidentified
MNYSGIDLHSNNSVVTVTDDNDRVVAEKRLPNDLAKIIGFLLPWREELAGVVVESTYNWYWLVDGLQAAGFLVHLANTGAIKKYDGLKHSGDEADARQLAHLLRLGILPTGTILPPEHRAIRDLARKRMQRVRSRTRHILAIENIMARQQAVKISSNAIKRLTADDIEQMGLPADVGLAVQSNLAVITTLGAQIDLLEQRLQERVGERPDYALLTSAPGIGRILATIILLETGPIDRFATVGNFASYARCVDSQHTSNGKKKGEGNTKNGNKYLAWAFVEAANFALRFCPEAKRFYERKKAKTSTVVAIKALAHKLARACFHMLKENKPFDVTRCFA

SEQ ID NO: 306137 - protein, 343 aa, unidentified
MSNTIRIGMDTSKSEFQLHGVDSQEKPVLKKKLRRAKVLGFFAKLEPTKVGIEACGASHYWARELVAIGHEVVLLPPQYVKPYVKRGKNDAADAEAICEAMSRPTMRFVPVKSQEQQAAQMLIGLRDGLVRRRTQLSNVIRGYGAEFGLTAAKGLVRVEPLLARIAQDEGLPALAKELFDTLGQEYARLQAQLRKIEAKLMAWHRHNEMSRRLAQVPSIGPVIATAMAIKVPDPKAFRSGRDLAAWIGLTPKDHSTAGRTRQGVITRAGDEKLRSMLVVGAMALIQQVKRGRGHPSPWLVELLARKKPKLAAVALANKTARIAWKLMVSGEHYMPQPGTRELA

SEQ ID NO: 306138 - protein, 330 aa, unidentified
MVHAGLDVGATELVVALLHEGHPEPTSTLPNTPAGHRQLLRLLTRRGASARVCLEATGVYSLNLALALQRTARVEVMVVNPRAIKDFQRARLTRAKTDRVDALGILDFLLRMEFVPWTPPPAAVLSLQQVSRRLLQLREELTREQARLHAVEFTPDRDGLIAADLRVNIRHLQKRLKALQQSAAELAAREPGLAAQVARLRSVPGIGELSALKLLGELLVLPRELKAKQWVAHAGLDPRPRQSGATDAPRHISRTGNRHLRLALFMPALVAIQRCPQIRAAYEGLLARGKKKKVAIVAIMRRLLHAIWGILHHQQDFNPQLFHANLISNS

SEQ ID NO: 306139 - protein, 341 aa, unidentified
MSLIAPVFSFDLNGYTGSGLALQDKAEKSLMQITIGIDISKETLDAYRFPDNQHIQVANGRAGHKTLVRWIGKQNGSLVVFEATGAYHRNLEAALAANGTAFSKVNPRQARRFAEATGRLAKTDRVDAVMLAKMGAILGLTAHEPKTEALHILRELITARRALMKDKVAAKTRLQTTRQTLLKNQINARLNQIKIQIRQVDAAIAEKVAQDEALSNKLAILISIPGIAETTAFSMLIEMPELGTLEGKQAASLAGLAPMSRQSGKWQGKERIKGGRAFLRRAIYMPALVATRYNPGLKAKYDQLIRAGKSGKVALTAIMRKLVVMANALLRDGRTWSELRP

SEQ ID NO: 306140 - protein, 307 aa, unidentified
MFVGIDVSKDRLDVHVLPGGEAFAVARHGEGLDQLIERLRALPAELVVLEATGGYETVVAAALAAANLPLVVVNPRQIRDFARAVGRLAKTDRLDAQIIARFAQAVRPEPRPVPSAEAQALGELVARRRQIVEMIGAESNRRRHLTHQRVLRGLERIVGELQAQLSEIERDIDDNVRGTPAWRETENLLTSMPAIGNTIARTLIAEIPELGTLDRRKIASLAGVAPINRDSGTLRGRRTIAGGRAPVRAALYMAVMVSIRHKLPLSLTYQRLRAAGKAPKVAITACMRKLLTILNAILRDQKPWQPA

SEQ ID NO: 306141 - protein, 455 aa, unidentified
MSKRARRSKSNISLPTLNPHAAGIDIGAKEIYVAVPLDSDCEPVQRFTTFTDDLHAIASWLARSGVKTVAMESTGVYWIPLFQILDSAGFEVFLVNSRHVKNVPGRKTDVGDAQWLQYLHSVGLLRPSFRPPQAVCAVRSLLRHRENLVQISSKHILHIQKALTQMNVQIHNVITDITGVTGLRIIDAILDGERDPQKLASLRDGRIKASADTIARSLVGDYRREHLFTLKQSLDGYRHCQELIAGCEVEIESMLKDFESRIDPAANQIPERRSHHKLSPAGVAIHEHVYRILGVDLTQVPGVDTHAARTLFCEIGSIMDRFPSANHFASWLGLCPDNRITGGRILSAKTRDVRSRAACILRMAANSLHRSQSRLGDYFRRMKARLGVPQAITATAHKLARIIFRLVREGTAYDDSVFATQDERHLQRKLRHIRKQAAELGLSLVPLTEAQPQVS

SEQ ID NO: 306142 - protein, 334 aa, unidentified
MNYAGIDVSYKHAVIVVSVKGKARQAKTFENTPAGHKAIIQLLSKLKGESRVCLEATGIYHFDLAVALSRAEGVEVMVINPKASHNFAKALMKRSKTDAVDAELLAIYSERMPFEAWQRPADEQIALRAISRRIAALSKQKTQTKNQLHALTATEETPALVIEHIKALIALLEKQIAAHRSSALELIRQHQPLAEALTWVTSIKGIAQASGIQILAELMILPQDMTARQWVAYAGLYPRVFESGSSVSKKPRISKAGNKFIRQALYMPALVATRFEPNIKGYYVHLIQDNGLKKVQAICAVMRKLLHAIHGMLNAKQAFDGTCFYKLPAEANSQ

SEQ ID NO: 306143 - protein, 331 aa, unidentified
MYFSQYIGVDISKDTLDAAIYPAKDKKMDFLHFDNTSKGLCEMLAWLKRRGIKSSEMVICAEHTGVYTNPLIAFAEKKGLALSLNSPLDIKHSMGIARGKNDAVDAGRIAEYAHRHQDRLKLYEKPSETIIKLQYLLTERRLYMRQRTALLNINSAMGKYETAEARSRNESAIHHIEKMVKKVEGQMTAIIYDDPEIKRNFDLISSVKSIGLINAINTVVYTNNFKSFETPRRYACYIGVAPFDYTSGISVKGKTQVSKICRTQQKAELSMAARSAIIHDPGLRRYYQRKMKEKGGGKEAHGVVLNAVKFKLILRMFAVVRSGEPYKVLNY

SEQ ID NO: 306144 - protein, 352 aa, unidentified
MTKHKYVGMDVHSATTVIDVQNEGGKTVATSTIETKSGPIKDFIRGLTGTIHVTFEEGVHAAWLYEIIKPLVAEVIVCNPNHNKLIRSGNKSDRNDAQKLAELLRLGSLKGVYHGDCGTRRLREAVRAYNALTGDCLRVMNRIKAMYRGRGIDCSGTEVYRVTHREQWLDRLGDPPATLRLGLLYQEFDNVSRLREIARIEMVNEVKSHPAYKVLKQVKTLGPIRVAEIIAVVRSPFRFRTKRQFWPYCGLAVRTASSGDFVIVNGNVRRKTKRPATRGLNPNYNREMKKVFKGAALQGIITEPFKQYYEGLTASGMKPEMARLTLARKIAAITLTVWKKGERFDASKVIQG

SEQ ID NO: 306145 - protein, 369 aa, unidentified
MGKYIEVFVAFDVAKKKHAVAIAEGGRTGEVRFLGDVENSPLPIERTIKRLAGRYDRLHICFEAGPTGYGLYRQIQALGHECMVVAPALIPKRSGERIKTNRRDAVTLARLHRAGELTGVWTPDAAHEAVRDLVRAREAATDDLRRKRQQLLSFLLRHSRIYSGGGHWTMAHRRWLANQKFEHAAQQIVFQEGIDAIEDAVQRLRRLEKQLALIVPEWSMAPVVEAYQAMRGASFLVAVTFAAEIGDVRRFDTPRQLMSFLGLVPAERSTGDTIRRNGLTLAGNRRARRALIEAAWTYRYPARVSETLRARLEGLPKPVRDIAWKAQIRLCARYRRLSATGKKLPVVVAAIAREIAAFLWAIGREVAPA

SEQ ID NO: 306146 - protein, 407 aa, unidentified
MNLRENYLYIGMDLHKDTHTAVLVNCWNEKLETIVIENKPSEFVKLAKKVNKKAIALNLSPIYGLENAYGYGRSLTVWLIENGYAVKDVNPALAYDQRKSFPTYLKNDEYDALCVATVLINQLHKLPNAKSEDNYWTLAQLVNRRDALVNNGIILKNGLHEQVSKAYPSYRKFFCEIDRKTALYFWKTYPSPKYLKGKTAEELYAEFKTIAANVYLHKSQFILDCVNTDGDTHRDFQDSRDFITQSLVRDLEYHIIELAQIEQEIEKMLKTFDMKLTTLPGIGTAFASKMIAEIGDIRRFRNADKLARFAGIAPVRFSSAGKGKEQSSKQGNRTLHSVFYFLAVSMVCCQKGKPNYPVFYDYFCRKISEGKTKAQALVCIMRRLVNIVYGMMKNGTEYRPFIAENME

SEQ ID NO: 306147 - protein, 323 aa, unidentified
MKYSGIDLHSNNSVVTVTDDEDRVVSEKRLPNDLPKILGFLSPWQDDLAGVVVESTFNWYWLVDGLQAAGFRVHLANTTAIKKYEGLKHSGDEADARYLAHLLRLGILPTGTILPPDQRAVRDLSRKRMQLVRSRTAHILAVENITARQHGARISSNQVKHLTAESVDQMPLSDDVALAIKANVAVITTLSTQIDLLEKRLQEKVVARPEYGLLTSVPGIGQVLATTILLETGPIERFAAAGNFASYARCVDSVLTSNGKKKGEGNTKNGNKYLAWAFVEAANFALRYCAEAKRFYERKKARRTTRWRSRRWRTSWRGRAFTF

SEQ ID NO: 306148 - protein, 342 aa, unidentified
MSEYVGFDVSEEETSFCVKDVSGKILARGKVATDPVALFEVLRAHCVCPERIVLETGTLSGWLSRELGKLGIAVEVIDARQAHAVMKLQHNKTDANDAALLAEIARTGFCRPVCVKSEAAQADRILLKARAHLVGQRRATQNTIRGLLGSLGIRFAKGPGKLAGLVREALEGRDELRATIDPLLRAAAALEREIARLDKAVSGRAKDDPAVRLLMTVPGIGPVTALAFAATIGDAERFAKSRTVGAYIGLTSRRWQSGEMDYSGRISKYGDAMLRALLYEAANSLLTVVRKAHPLKDWARRIRKRTSHKKACVALARKLAVILHRMMITGEPFRWPQKEAAA

SEQ ID NO: 306149 - protein, 352 aa, unidentified
MSEYIAFDSHKRYSLVEREDVATGKIVQQVRLTHAPGAVRRYLAQCAPGTAVALEATGNWYWIVEEIEQAGLQPRLVHPRKAKLMMGLINKTDKLDVHGLNRLQRNGTLPTVWIPPRPLRDLRELTRTRLVLVEQRTRLKNRLTATLAKYGVPPSEYSDAYGKSARAELEARIEPLPEQTRWVCKQLLAQIDFLVRQIRQLEQRLEDLVEVTPEMERLMTLPGIAEILAATIALEIGDIGRFPDAPHLASYAGTTPRVHASGGRVRYGRLRTDVNRYLKWAFVEAANSVAVNHRRCPERHVSQLYDRLRQRKGHHKAIGAVARHLAEAAFHVLRRQEAYRDPVLERGCTSEV

SEQ ID NO: 306150 - protein, 472 aa, unidentified
MSKGNGMTRGDRRRNARREQLRGMLPRDGVVIGIDLADEKQALAVIDHDARVLARKTVRVKAFRLGEALDWAAAQARARGFTSVTVACEPTGPRWLQMQRLCAERGLPMVCVQPLVSHIARQQQDYTRHKTDEADCVMIARLAVELHCYIPEELDEVWAGLRHLGRRRAALITSETASVQRIRDFLSVAWPVVPEACGQPFESMTWLAALQAVTSRCDGQPGELAVIGLEAFTAVVRDALPGWGGQRIHGPICKTVFTALTSTEGVVRGHRRGLLRRVAAELGDLQRSRAQREDTEAAMTAALSDLGLARLGEIPGLTATGAAAILAETGDPKRYDTSSSVVKHAGLSPSDNASGAFDGEAHISRRGRPGLRLTVWRAVWPMLIHNPVMAAKYAAMTQPADQAAADAPAGSSGHATSAAAAARRRRAKARVACAAALLRWIYCIVVHGTSWDADVAAGRKDHQAAGRHLEAA

SEQ ID NO: 306151 - protein, 458 aa, unidentified
MWPPLRPTRLCREHASVGVVCPPVSSAVKEGGRVRFIGLDVHRDFCEVAICEDGTVRSGPRVPTSPETLARFAENLGPGDEVALECTGNALAIARIIEPHVARVVIAHAKSVRAISWAKVKNDRIDARTLATLLASGFLPGVWTPDERTRLLRRLVGRRAQLLKHRTSAKNAIHATLQRNLVGRAPATDVFGRRGRTWLSSVELPRDEQDTVEACLRQIDFLDAEISHLDQVLAREVVDSRDVRRLMTIPGVNVTTAATFLSAIGDIDRFPTPRHLASYLGLTPRVRQSGIAEPRLGRISKEGSARARHVLVEAAWAVLKTPGPMRAFGERVAARRGRNVAAVAVARKLAVLCWHLLSTDTDYAFARPSLTAEKLRRMELVAGAESRRGWRGPGATFASKDQHARERAIVIQAETAYRRLVADRTGRRRGAGAITGARISSALEGQAARQDQAPGPAL

SEQ ID NO: 306152 - protein, 358 aa, unidentified
MRIIGCDLHARQQTIAMLDTDTGELEEKTLEHEGETVREFYSALRGPILVGIEATGSMQWFLELMEELGIECRVGHPAKIRKAETRKQKHDRRDARLLLTLLAENRFPTIWMPSTQQRDLRTLLRHRHQWVRMRSRVQHTLQSIALNHGFRRGHALWSQANQHALRALPLAPHASERRAALLTLYPHLQGSIEELDKEVCEEVQQHPQARRLLTHPGVGPITALATEVFLGDPKRFIDGKALASYIGMIPSEHSSGRRQRLGAMSKQGNTLLRYLWCEAAMHAVERDPELKRFYRRKLVQKGLGKARVAAARKLGIRLWIMMRDQIDYEEFCRRGKARQESGRVRAGMPAINSGPAQQ

SEQ ID NO: 306153 - protein, 413 aa, unidentified
MLKIVYPICCGMDVHKSFVVACIASTDGKGVTTYKSKRFSTFTKGLRELNQWLLANNCKDLCMESTGKYWIPVYNILETDCKIVLAHPKYVKAIRGKKTDKKDAKWIADIFKHDLVSGSFIPPADIRQLRDLMRYRNKLTNFNTGEKNRAQNCLTVSNIKLDDVFSDVFGKSASAITKQLLEHPGKTFDVSPFVDGRCKSPIEKIQASVDGLMCTEQAEKLRIIRVHMDSLETCKLNLESAILDVASKFLPQLNLVSTVPGIQSFSAIGIISEIGVDMSVFPTAKHLCSWAGLTPQNNESAGKKKTTRISRAGAYIKPLLVQCSNAVVTSNKHPEIRNRYLTLKKRRGHKKAIIAISRMLLTAIYNILEKNEPYNAELYRKTEKPPVHREVSVEEAIYIIQRQGYLVTAPGSA

SEQ ID NO: 306154 - protein, 362 aa, unidentified
MDKFDPCGIEVSAQELVVALSRDGRAERLRSFPNTAEGHAALLRYLHSGSQRVRVALESTGLYGLDLAYALHRDAQIEVMVANPRAVRHFASALMQRSKNDRLDAEVLREFAARMPFQAWVAPSAHCFALCAVTRRLETLTEQSTAEKNRLHAASLSVAFPPAVRRDLQRSVRSIQRALARLTREAQRILEQDPLLNSSYHLLLTAKGIGPTSALRLLAETALLSEDLDVRQWVAYAGLDPREYQSGSSVHKKVRISKTGNRHLRRALYMPALVAVRHEPHLRAFYQHLLAQGKCKMQALVAAMRKLLHAVYGMLKHRQPYDGAKLYRPRICMHPLLGTVPRRPHELTKRKGPVTPKEKLET

SEQ ID NO: 306155 - protein, 421 aa, unidentified
MKNSATEWEKVYDTCCGIDVHKKLLVACLNRGTKQEVREFGATTRELLELLDWLMKSGCEMVAMESTGSYWKPLFNILESCNMPAIVVNAQHMKAVPGRKTDVNDAQWIAKLLQHGLLQPSFIPDKAQRELRELVSYRKSLVEDKTRELNRLQKMLEGANIKLSGTVSNIMGKSAMTLLDEVLKGKAVDKSRIAQLRKEKKVASQLKASDEQLADDLNGFLTPLQTTMIREVLAHIKELDAHIRRLEDEIDRHMDEGQKEAAKKLEAVAGIGGDSAKAIISVIGTDMSRFPSDAHISSWAGVCPGNNESAKKKYSGKTRKGNKLLRSTLVVCAHSAIKNKKSYFSAQDQRICAHRGKKRAIVAVAHSMLVAIYHILKDGTTFQDLGAGYFNQFNRERKINSYLKKLKELGWEASATAVQPA

SEQ ID NO: 306156 - protein, 419 aa, unidentified
MKAWNEVKHYAGFDWAKDHHDVIVLDAGGKTVAEFRFDHTAGGWDEFSKKLAAFPDVAVAVETNHGGVVERLLERECCVFPVHTRSAKGYRQRKVPSGNKTDKIDAWSLADALRLDGAHWKQLSQQDPLTKELRLLCRDEVALIRDRSALITQLRQTLYDYYPAALEAFDDWTMPAAWSFVVSFPTPEVLIKAGKRKREKFLHIHKLARPATYQRRLEIFARAHQFAGSAATIRAKSKLAVARARQLQLLETQIAEYRQEIRRLFAQHPDAKLFGSLPGAGDKIAPRLLAEIGDDRALFSDAQGLQCLAGTAPVSYQSGQIHRVYLRRQCNKSLRNAVHLWANLSREFCPWAATYYTALRAKGKSHACALRALGQRWLKIVWKMWQTRTLYDADLHARNQLKHGSWVLQMVNQPTAIKT

SEQ ID NO: 306157 - protein, 411 aa, unidentified
MEVLYRCCCGLDVHKKSITACVLRVEKGKTRKEKRRFGTFTRELLEMADWLTNCGVTHVAMESTGVYWKPVWNILEGQFEGLLVNAQHIKAVPGRKTDQKDCEWIAELLQHGLLRASFVPDRPIRELRDLTRYRASLTQEINRIANRIQKVLEDANIKLASVASDPLGASGRAMLRSIVDGNENADQLAEMSKGILRNKIPELRVALEGRLTDHHRFMLKLLLEQLRSAEATITKVEQELEKRMRPFEETVHRLDTIPGVDLVTAWSLLAEIGFNMEQFPSAAHLASWGGLCPGNYESAGKRLSGKTRKGSPALRRCLCQVASVISHQHNNYLSARYRRIPARRGNKRAILAVAHSVLVVAYYLISNQKEYQDLGPDYFDRSNADRLRRSLVHRLERLGHRVTLEPLNQPV

SEQ ID NO: 306158 - protein, 307 aa, unidentified
MSFIGCDVAKREIAVYLDGALSLVPNEREALRACLKRMRIGSAVVMESTGRYHLALAREAFDLGRSVYVVNPKEFSFYRRSLEFRHTNDASAAELLARFGEKEHDRLTTWQPPLPHIESARALLRHRAVLVRARATIAQSLDGVSHEASENAVQALSQAVDDADREIAELLREEPGYTRLQSIPGVGPVTAAAMTCAFAKGAFRSADSFVAFVGLDLKFADSGTKTGDRRLSKRGDPFLRCLLYTAACAGAHSEVWLPFYQRHLDRGLEKVQALIALARKIARTIWSMLAHQTDFQPKRALRVDMKP

SEQ ID NO: 306159 - protein, 454 aa, unidentified
MAKHRKNKKAHGLVAAPVMEPNAAGVDIGATEIYIAVPPDRDTQPVRRFAAFTEDLKAAADWLERCRIETVAMESTGVYWIPLFQILETRGMKVCLVNARHVKNVPGRKTDVSDCQWLQYLHAVGLLRASFRPSGQVCAVRSLMRYRESLVGMAAVHLQHMQKALDQMNLQLHHVISDLSGTTGMAILDAILCGERNPLKLAQLRDPRIKASPETIAKSLVGDYRREHLFTLRQSVTAYRSYQQLLACCDVEIEQMLGEFPDGAGPDTPVLADPKDRHRPRRNEMKFDLRGHLYRIFGVDLTEVPGLNALTAHTLLTEVGPDLSAFPNVGAFASWMGLCPDNRVSGGKVLSSHTRKVNNRAARALRMAAQSLFRSQSWMGQYYRRMRAKLGAPKAITASAHKLARIVFHMLTNRHAYDETVFAQQEIQNQQRLQQRLMQQAKKHGFQLIPIAQN

SEQ ID NO: 306160 - protein, 319 aa, unidentified
MSKTKPTALSVGIDVSKENLDVDFAPTREPQQFANAPAGHATLVKWLSKMKIRVIVIEATGGYERAIVGELAAAALPVVVINPRQVRDFARAQGRLAKTDQLDAVVLADFGHAIKPPQRPLPDAELLQMQEKLARRRQVVAMITAETNRLEHATAQAVRWSIEAVFKLLRKQLQQIEDDLDHSIRRSAVWQEKADLLESVPGVGSQTSRTLLVQLPELGQCSRQQIAALVGVAPMNRDSGTFRGRRTIRGGRGEVRACLYMATLAATRCNAKIQTHYQHLLAGGKSKKLALTACMRKLLTILNAMLRDQESWNSVPYRT

SEQ ID NO: 306161 - protein, 338 aa, unidentified
MEYGAIDLHLRHSQIRIVREDGSVVADRRISTSREALTALFGGRAPMRVVVETGTESEWVAQTVESCGHEVVVVDPNYALMYGTWQRRVKTDRRDAAGLAEANRRGIYRAAHRVSASQRQQRRVLRVREQLIRVRTQAINLLRAQLRQEGYRLPSGSAVHAVGRYRALAVPGALAEALAPVVALLEHLVPAIATANTEATAAARQDPIVRRLTTAPGVGAITGLTYRAVVDDIGRFRDAAAASAYFGLVPREDSSAERHCRGRITKMGPSKPRSLLIQAAWGVWRQRARDPLQVWVHRLAQRRGRRIAVVALARRLCRILYAMWRDGADYQAAPLAEA

SEQ ID NO: 306162 - protein, 365 aa, unidentified
MQKISTMQTSEENIFKGQLTIGLDLGDHSSAYCVLNEAGKIVFEHKLATTPEAMKQVFSSMPRCRIAMETGTHSPWVSRLLTALGHEVIVGHAQKVRLITKSRRKDDRLDARTLARLARIDPELLSPVKHRSAQAQLHLAEIRARAGLVSARTALVNAVRGLVKSYGERVRKCGTQQFRRETTSGLSGGLREALEPLLREVESLNERIKEYDRRIEKMAKQTYPETALLKQVKGVGDLIATAYVLTIEDPHRFRKSRDAGCFVGLQPGRRNSGESEPQMHISKEGDEYLRTLLVQGAHYILGPFGEDSDLRRWGQKLAERGGKNGKKRAVVAVARKLAVLLHRLWVSGEVYEPLRNSHKAMSAAA

SEQ ID NO: 306163 - protein, 362 aa, unidentified
MERASFIGLDAHSRTCDVGWMTPAGQRRDVWHVRTSIPELTEVIQRVPRPRRLAMEEGPMADWLMRQLRPLVDELVVCDPRRNALIGKDGDKTDALDALALADLFRGGYLRAVHHAESMDREVFKRHVALYHDRVEHRVAEANKTLGLLRRYGIVVVEDDLAEKDRRQEAIARLPDDPTVRLGIDLLLAGYDSAAEQVRLARVALVKLAKKQEVIVRWTGLPGVKWVRAATLLVYLDTPDRFRSKSALWKYLGIGLQKRVSGNGPEVLRPAQRFNRHLKNTILGAATAAIRGTDNPFADQYQKLKEKGMAPRIARRTVARTMAAVMWGMWKHGGEYQPERVGVPDGKEGRSDRTSARTKPSR

SEQ ID NO: 306164 - protein, 322 aa, unidentified
MAIAVVGLDLAKHVFQVHAVDETGRAVLRRQLRRAGVEAFFKILPPCIVGIEACASAHYWARRIAALGHEVRLIAPAKVKPYVQRGKKNDANDAAAIVEAVMRPHMVFVPIKNEEQQAVLMLHRTRDLLVRQRTMLVNAIRAHLAEFGIVAAQGRRKVKELIAGLDNTEMPELARIALWQIADQIDECDKRIDALERRILAWHKSDESSCNLATIPGIGPITASAMAATVPSPSAFRNGRQLAAWLGLVPRQNSSGGKDRLSGITKAGNTYIRRLLVIGATSVIRFARSKAPGTAEWLKKLLERKSARLAAILFTLRARWRW

SEQ ID NO: 306165 - protein, 450 aa, unidentified
MVKRKRNEVVFPNAAGIDVGAARHYVAVPADAAADGVREFGAMTADLHAMADWLLACGVDVVALESTGVYWIPVFDILEQRGLTVWLVDARQLKYVPGRKSDVQDCQWLQTLMSFGLLRAAWRPAGDVCAIRAIARQREVLLVEQASWIQRMQKTLVEMNIQLTEVLSDIMGTSGQAIIRAIVAGERDPHALARLRHRRVKASEDDVLKALTGNWRDEHLFVLAQALAMYDNLARHLAQCDAKIDALLDQRGRAQVDIGKAPRAGTRAHTEFGVRQAMANWAGVDLTRIDGLGVTSVVKVLSEIGPDLKRFETVKHFCSWLGLCPGTKISGGKVLACATKRSANRVRQTLKMAAMSLSHSDSALGGFYRRLCSRMDKPRANTAVAHKLARMIYFMLTRGEEFVDRGQEEYEEKQRQRDIAALKRRATSLGFELNPKSPTPSSGNVHGLVT

SEQ ID NO: 306166 - protein, 412 aa, unidentified
MDVIYPCCAGLDVHKESVVACVRRVTAGKITREVRTFETTTAGLLDLSAWLSEQGVTHIAMEATGVYWKPVWHILSDGEFHLVLANAAHIKNVPGRKTDVNDATWIADLLAHGLIRGSFVPEPATQELRDLMRTRKQLVREQSSHIQRLQKTLEDANIKLESVISDILGVSGRAMVEALIAGESDPVRLAELAHRRIKAPPEKLRAALHGRVTDHHRFLLRLHLRQTDGLSALIGELDQEVDSHLAPFRSAVEQLITVPGIKDLAASTILAEIGVDMGRFPSAGHLLSWARLCPRNDESAGKRRSSRLKKGANWIKTTMIQCAWAAVRTKGCYFQAQFGRLKRRHGPKKAICAVAAAMLTTVYHMLKDGTLYQDLGADHFDRRSKQTKTNRLVKQLANLGYHVQINPLPEAA

SEQ ID NO: 306167 - protein, 354 aa, unidentified
MPRKTTSLEAVATIGIDIGKNTFHLIGLDKVGAIVLRQKLSRSQVDTRLANMPPCLIGMEACVGAHHLSRQLKALGHDARLMPAQYVRPYSKGQKNDFRDAEAIAEAVLRPTMKFVAIKTVEQLDLQGLHRVRERLVCQRTSVINQIRAFLLERGIAVRQGLRALRTAMPNVLAMTDKLSPRMIHMIEDFCTDWRYLDARIATVSNEIETLSEQDDGAKRLMTVPGIGPIISTATVAAIGSGDVFSKGRDFGAWLGLVPRQMSTGGRTVLGPISKRGNRYLRMLFVQAARAVLLRPQSWEKHGLKSWIEAAARRLNRFKLAIALANKIARTAWGVLHGGRNFEVRSMRTTPQAG

SEQ ID NO: 306168 - protein, 343 aa, unidentified
MEYYVGLDVSLKQTSICVVDQAGLVAREGVVDSDPEAISAYVRSKAPNAVRIGLETGPTSTWLWTELKRLGLPVICIDARHAKAVLKMQINKSDRNDAIGIARIMQTGWFKEVHVKDIDSHSVRALLASRALLVKIKRDLENHVRGLLKNLGLVIGRAKFNVFAVRAEELIEGRPELIAAIRPLLEARNAVEQQVSELDRKVMKLARHDAQVRRFMTAPGVGPITALAFKATIDDPARFARSRSVGAYVGLTSRRHASGEVDWTGRISKCGDAMLRSYLFEAAGVLLTRVPKWSAVKAWGVRLAKRNGLRKAKVAVARKLAVILHRMWIDGTEFNWSKKEIAA

SEQ ID NO: 306169 - protein, 342 aa, unidentified
MEHTTIAVDLAKSVFQVAVSHRPGHLDEERRLSRDRLLPFFAQHPPATIVLEACGSAHYWARQLQPFGHTVRLLPPHDVRPYVRRNKTDRTDAKGLLEANRNEEIHPIPVKTIEHQAIASLHRLRSTWLATRTARLNTLRGLLREFGIFIPVGAQHVGPHVRALLVEPTPVPLLLHTTLAAACDEIAMLETNMRAVERQLGALAAEMADVTLLQTVPGVGVITATALVALVADIRRFPSGRHFASFLGLTPKEDSSGSRRRLGAISKQGDVYVRMLLTHGARSVVWHAKTAARPTSLQQWAAQTEQRRGRNVAAVAVANKLARIVWAVWAQHRPFAADPRHG

SEQ ID NO: 306170 - protein, 360 aa, unidentified
MPTTMTFAGLDVHARSTHVAALEVASGELKRIRFGPGSEEVIAWLAALPQPVHGCYEAGPTGFALYRAAEQAGLRLDVVAPSKTPRAAGDRIKSDRKDAELLCRLLMAGQLKPVTVPAPAVEAARHLARAREQVRVDLMRCRHRVSKLLLLHGRVYPERSTWTQAHRRWLSRQRFEQQASELAYLDCLAAVDGLVARKQELDERLSRLALEGEWWPTVARLRCFRGIDTLSALVLSLEIGDWQRFARPAQLASWLGLVPSLDQSGESRLQGSITKTGSSYARRLLVEAAWHYLREPRIGVTLRNRQQGQPAHVLQIAWRAQHRLYRLQRRLRERRKPSNVATVAVARELACFLWAAAVAP

SEQ ID NO: 306171 - protein, 349 aa, unidentified
MLYVGLDVHSRQSSLCILNAGGGTVNQIQLKGPRSAVVDRLRQLNEPFSICYEASCGYGHLYEQLRPLAHHVAVAHPGKLRLIYGSKRKNDRVDAQKLARLLLLDMVPPVHVPGVDVRAWRSLIVLRQRVLQQVVRCKNQIRGVLRENDLAGVKWLWSKKQLAWLESLDLHAVAKLRLELAVQEFKALDVKIKRIEKELQKYAERHPGVKLLMTIPGVGIRTAETFVAWVDDITRFRNNRQIGSYFGLVPCQDASAEKNRLGHITRDGPPVMRKLICEATWTAIKKCTTFKQFFEQIMGGKSERKKIALVATMHRMIKVMGAMLRSGETYRAAPLRPATSSVESKTPDA

SEQ ID NO: 306172 - protein, 479 aa, unidentified
MNSIVLTANVQPNLDVNYIGMDVHSDNVVVCVRRNTINSSGQLIGKTIKTKKVVIKNSQEPLVELLSKYADGRQHIMTAESTFNWYWLADIAEDHGWNFRLADPCTVSQANIKAANDETDAEYLADRLRTGSLKSTSVLPRQLRGVRDLMRHRLRVMQEVSDKKVRLSNLYHNHCAHPMHGKLLAALQDAYDEINIDAVLESGICNNGSELIIGDLLTGLREAETRLAKIEAAVYARIDEVDSYKAERMLLKTSMKGCGDVLSAIIVTEIGDISRFRTMGDFVSYCRLAPTSKLSNGKSKGQGNAKNGNAYLSWALTELATLMARFNEPIRRYLERKQEKTGLRVVAVRALAAKLARCVYQVLRKKESFDLGLAFGSKPTHGQMTAAAEAAQTPPEPALPPVPAVAGEHHCPAEESDAPIVVKEPVPAKSKRSTRKKAVSAASSEPAVAAEGRQTARKADRVKARCALTATPPSCAGTS

SEQ ID NO: 306173 - protein, 433 aa, unidentified
MHMVCVPAASAPPETGDGGLPANVRRFGANSCDLHAIAEWLAACGVTTVAMESTGVYWVPLFELLEARGFEVWLVEPGQLSRCGARPKTDALDAQWIQRLHSYGLLQPSFRPADSVLALRGYHRQRQMLIRYAAGHTLHMQKALEQMNVKLAEVVSDITGLTGQRIIAAILAGERNPRVLAALRDPKCKRDAAAIARALEGTWRPEHLFALRQAHELYQFLHRQIAACDAAIQSELAKLPSRAGDKSFSAKPRRSGRKPNDLAFDAAGPLFRALGVDLTEVEGIDVGTALVILAEIGVDVSRFPTEKHFASWLGVCPRQHESNGTRKRRGPRKGKNRVAIALRMAAQAVGRTQSPLGLFYRRIKSRIGGQGAVTATAHKLARLVYRMLRYGAEYVKQSMAEYEAKLRASLERHLRTKAAKLGFELVPRAAAGP

SEQ ID NO: 306174 - protein, 386 aa, unidentified
MQTVAALIPAAVDYERTLVLAIEVSNESWVLAAQVPGLPHTKAKRTINPDAESLMTAIAGYRARAAATGHSVERVITVYEAGWSGFWLARWIMRQGMEAYVIQPSSVPVDRRMRRAKSDGIDAELLLRTLLAWLRGEPRVCSMVPIPDEADEDARRCVRERTELISERVGLTNRIGAVLATLGVSDYNPLLRNRHRRLTELRTGLGEPLPRNAQAKIERLLARLELVLAQIAELERERDAVVEAEASDKASKMIQQLTKLRGIGVQSATVLVREAFVRRFANGKTLGSYAGLASSPYSIGGIDREQGIGKAGNRRVRTVMVELAWLWTRYQPGAAQVRWFRERVGSTGRRARKIMVVALARKLLIALWRFVIDGVVPEGAILKPAA

SEQ ID NO: 306175 - protein, 400 aa, unidentified
MRAVALDVHLDFCEVAIVEDGEVRSAGRIETKPEQIELFAGSLGPDDRVALEVTGNAWEIARIIEPHVAQVLVVGPSDTGIRQARAKTDRLDARTLARLLAAGSLDAVWMPDRWTWVMRRRLSRRGQLVRARSRTKNEVHAVLLRQLVGRPPFSDLFGVNGREWLRGLELAVEERETVDGCIRQIEFLDSEIAEVERLIAGAALDSAEIKRLMSVPGVNVIVAASFLAAIGDIHRFQNPRKLAGYLGLDPRVRQSGVGPATHGHISKRGSARARHALVEACWTTVRQPGPLHSFYERIRARRGHSVAIVAAARKLASLFWCLLTREEDYAYQQPSLTKKKLRRLQITAGAKRYAPEAAGIWSANDAVREAERELARRPRSPTRAPCATGMPPRRRRWARA

SEQ ID NO: 306176 - protein, 335 aa, unidentified
MQIYGIDLAKEKFDVSFFDLTSKKVSNQPSHKVVTNNLKGIGKFFKGLPSDAVLVAEHTGVYGDTLLKCCMDSNVKIAFVGGYVIHRYRATPDRAKTDVLDCALLRDFGERYPDKLKYKKFPEEALYELRQLARHREMLVEQRKQLITADRSEDCRPIRSLAVKRSMDRIKEMLDTEIAETEKEMLKVINGHESIHHNYELVKSVDGVGLITAVELLVKTENFTKITTARQYAAYAGTAPYEKSSGKMDKGAHISKIGNRRSKTLLYICAESARLHNKEIKLYYERRTLIDKKPRHYVLNAIANKLLRIIFTLVEKGEYYDANFIRQDPRVVKYN

SEQ ID NO: 306177 - protein, 355 aa, unidentified
MNDSKYIGMDVHTATISAAVRDSSGNLVMEATIETKAETILEFVHGLRGSLRVSFEEGTCASWLHDLLKPQVTEVLVCDSRKNALLRVGNKNDREDARKLSELLFLNKLHAVYHGETGIRTLKELARSYLTITRDLTRVMNRLKAIYRGWGIACAGQQVYAPRYRAEWLAKIAEAGVRRRAEVYYQQFDVLAALRQEVRRELLAESRKHPAMRLLRQIPSIGPIRAALLIALMQTPHRFRTKRQLWAYCGLALRTYDSGEYRFVGGQLKRSKKAVTIRGLNKNHNHDLKNIFKGAATRAAATAGPFQKFYEARLASGMKPPMARLTLARKIAAITLLVWKKGVRFDAEQLKQQAA

SEQ ID NO: 306178 - protein, 369 aa, unidentified
MRSVALDLGKRKISYCEVNDGQVIQRLTISQIETLEAELGVDQASAVVAIEAHREAWHVYDLLTSWGNKVLVVDTTRVRRLGVGQHGRKTDRVDAEVLALAVERGGIPVAHLLSPARRELRRWLGVRRGLVETRAQMITTALGQPLKGCVVKLFLTHVRRTTLSPEVSAVLAPLLKTIETVNDECDVAERRLAALAAEEPVIGLLTTVPGVATIVASAFVSVIDDAERFEHAHQVESYLGLVPGENSSGGKRRVGAITKQGNRYVRALLNQSAWTILRQNVADAPLRKWAQTIVKRRGSRVAVVALARRLVGVLWSMWRHDTFYDPKILAQASSRGAKRAPQQSLDERLQVLRRAAKKQRVLKLVEAAM

SEQ ID NO: 306179 - protein, 357 aa, unidentified
MKKLFIGIDFSKEKLDATIILACGMNEIGSREYGCFPNNTTGYRKLCNWVKTNAWNTIAEEWLFCGEDTGSCSIGLSKWLYGKGYDIWIENAYAIKHSSGIQRVKNDKADSAIIAEYAWRQQDKVVPFEPLNESLAQLREIFLYRHKLVGQRVAMELRKEDKSQSNKSKAISFINRKSKHLIAEINKTIAECDKAIDSIIEADEELKENYAIITSIKDVARQNATCMLVYTNNFKKFGYDPRKIACYYGVAPFGKQSGTSVNTPAHTSHFANKLIKSLLGQAAHIAKIYNPEIRDYYQRLISKGKKPQVALNNVKNKLIRIIVALVRKKVPYDQNTYKYYEEREVIERKKNEKLIYC

SEQ ID NO: 306180 - protein, 406 aa, unidentified
MFYLGIDVALNTHRLVMLDDNGERVSSGISFQNNNADFEKVLSKLKELSINPDNSICGLEATGNNWENLYCFFTDKGFRVIVLNPHQTNKFREALRKKAKTDDIDAFVIAGLLRSNEFASSYVPEDKIQTLRELTKLRYEFIKDHKNYQRQTLALLNIIFPEYRQTALKNPFAIASIAIFKSFATAKHIALAKPKHIERIVRSIKGNNFNIKEIENLISIAKTSVYSGRCQESRALTLNILLTQVENFDKSIQQLEEQVNLILSPESNDDINSFPGSNLLTIPGVGPKTLAAILSCVGESGQAFSTGVKLIGHIGFFPQIYESGETKRANKLSNKGPAYLRHALYMASVACLKHNLQLRNLYHTKISQGKKPKQALICVAKKLAHICLSMLHSGQDYNPARVFSCA

SEQ ID NO: 306181 - protein, 350 aa, unidentified
MIIVGCDYHPGFQQIAFVDTETGELQERRLEHGEAAEKFYRDLAAQGMNVRVGMEASGHARWFERLLAELNFELWIGDATEIARKRERKQKTDRQDAQHILQLLMEHRFPKIWVPSWENRDLRQLLWHRHRRVQMRTRIMNQLQAVALNEGLRCKKRLWRQHGREQLESFRLAPWASRRREDLLELLDRLNPTIAELSQSIDQEAEKFPEVRWLMTHPGVGPLTALAFVLIIGRADRFQCGKQIAAYLGLVPLEDSSGNRRRLGHITKQGSSMLRFLLVEAAQVTVRSLPEWRSKYFHLMMRRGRKIAKVAMARRLAIRLYWMWRKGWDYEQVKKFGSHAGTLGTGRGVQ

SEQ ID NO: 306182 - protein, 391 aa, unidentified
MVCVGIDVAKDKHDCCILDSDGTIRADCITIPNNMDGFKQLLQTIRDCTKKSDKIKVGLEATGHYSYNILGFLLDNDLAVYVMNPLHTNLYRKSLSLRKTKTDRVDARTIATMLLSDVDLKSYTDTAYHNEELKSLTRYRFDKVRERAKLKQSVSRLVTILFPELEKLVPSLHIASVYALLSEYPGAKQISEIHLTKLTNLLATASKGRYGKDKAIQIRDAARTSIGSVMPAKFLELKHTIKLIRELTSEIDEIEVSIQKIMDELNPPILSIPGVGIQSAAMILAEIGDFSNFESPDKILAFAGCSPSTYQSGKLTNCYAHMEKRGSRYLRYALYNATKYVCHWNPVFAEYLAKKRAEGKHYNVALSHATKKLVRLIYALQKSGKAYLVAA

SEQ ID NO: 306183 - protein, 349 aa, unidentified
MHSTTVAVDLAKNVFELAIADGEWKITERLRLNRKSFSTFFVQLVPSRVVMEACGSAHHWARYIAALGHEVQLLPAQYVRAYVKRNKTDRADAAALLEALRCADIWPVPVKTLEQQQVLGLHRLRSQWMSTRQRYVNTLRGILREFGIVIAPGVGAAKRQIAQQLAQSPSELPSGIRPLLSLMLEQIADLERDVDQVERQLTSLTRSDERVQQMRQIPGIGLLTSTAIRATVGDIQRFPSGRHFASWLGLTARECSSAEHRRLGGICKRGDVYLRTLLVHGARSALVAAHQAQRSGRPMDYLRRWALECERQRGHNKATVALANRLARIIWATWKYERSFDGNWAAAVA

SEQ ID NO: 306184 - protein, 387 aa, unidentified
MSQLNDLSKSLVALEQDATLIAVIEMSQSSWLVAGIVPGVERQPLKKLTTDQDALLQLLHRWRKEANEAGHVIKRITVAYEAGRDGFWLARWLRAHEIEAYVIHPSSIPVSREHRRAKTDRLDTELLKRAFLGWLRGEPKHCSMAAVPTIADEDARRPSRERENLVREVTRLVNRMKANLARLGIRGFRPHLAQAAGQLQTLQTPEGTAVPANTLAELRRDMDRLRFVKQQIKQIEAARVQRLESEPGERRHAMVYLLARVVGIGVESADMLVQEVFSRKLRDRRAVARYAGLTGAPDESGNKRRERGLAKAGNARVRRGMIQLAWTHLLHQKDSALAQWYRARTADARGRTRKIMIIALARKLLIALWRLVTTGEAPAGLLIRPAA

SEQ ID NO: 306185 - protein, 338 aa, unidentified
MLYTGIDLHKRTVVIATVDEKGKVHSEASLPTSRSAVARYFHGLPEPTTATVEATSSWYWLRDLLEQQDVPLTLAHAKFVKAIAYAKVKTDAVDALTLAQLHRADLIPRAHMVSPELRPLRALLRTRLHLVEKRTSAKNSVQRLLEQYNVPEPLRLPDEATLQASLYAEQIELLGNQIHRIEKRLEPELIPNPDIQRLLWIPGVGKIVAFTLYLEIDGIERFPTVRQFFSYCRVVPGADNSAGKRRHGRRKDGNRYLKLALSHAAIRAVQYFPDIKRFYQRKARQKNPAIARTLVQKELARSAYIVLKEQVDFNHTFKGQPLSKRKASKWPRQASPDT

SEQ ID NO: 306186 - protein, 372 aa, unidentified
MHGLQHSTNVKRILALDLGKFNGVLCVYDPATHVHDFHSLQTTPRTVRDALVEHQTPDPAQTLLVFETCDVAGWVHDLAIAIGMRVAVANPAHEAWRWTRVKRKTDKDDALKLARLTVLGQLPTAHMPSPQQRQRRRLVHYRRVLVDRRTASKNHVHSIFSQQGMQLPARGKAWTNQGVAQIALHARPLAQCESLDDLWRGRLHLELQQLESLSRQIEQVDAKLDALGAQDERVRLLQSVPGVGPRLAEKVVAHLDDPHRFKTAGQVASYAGLVPKQIESGTMKRSWRITRRGPTLLRSMLVEVAWMVYIRNDWAKQFVARISRGVKGRKNIAIVALARKLLVTLWAMLRDNTRWREPRPRPTSPILTAAVA

SEQ ID NO: 306187 - protein, 359 aa, unidentified
MFSERTSVGLDVHARSVVAAAIDGVSGEVFKARLTPDHRDVLRWVQGLPGPVAVTCEAGPTGFGLYRALTVAGVRCQVAAPSKLQRPSGDRVKTDQRDALHLARLLRLDEVTSVTVPSIDQEAARDLVRAREDCRGDLMRARHRLSKLLLRQGIVYSGGQAWTGRHDVWLRQQHLPGAATRLAFDSDYDAVLTVAARRDRLDAAITTMAADSEFTSVVHRLGCLRGVSTLTGFALAVEIGDWTRFSGTSIGSYVGLVPSEYSSGASRVQGGITKTGNGHARRLLVEAAWHHQARYSVGKTMRDRWDLAPAPARARGDAGNRRLHARWVRFNDRGKRHVVANVAVARELAGWCWSLAIMD

SEQ ID NO: 306188 - protein, 344 aa, unidentified
MDATTVGIDLAKNVFEIALADERGHIVERQRLSRARFDRFFVNRAACRVVMEACGSAHHHARRLSSQGHDVVLLPAQYARAYVRRNKTDAADAAALIEAARCPDIRPVPIKSVDQQALQQLHRLRSQWMAARTARINFLRGSLREFGVGVPVGAQRAIQSVRDALASQDSPVPTLLHQSLLELLAEIDSLEQRCKRIERELARLNEHDPIVERLLQIPGVGPLTATALRASVVDVQRFPSARHFASWLGLTSREHSSGERRRLGRISKQGDPYLRTLLIHGARAVLLAARSAQRRGSSLDRLRTWALDLQERRGHNKAAVALANKLARIVWATWRFERDFSTKP

SEQ ID NO: 306189 - protein, 318 aa, unidentified
MSHGYDKYVGIDVAKESLDVSGLTADSPSQFENTAAGRAKLLSLLPQAGACLLVAEATGGYERELVAEVVAAGHHIAVVNPRQVRDFAKAIGLLAKTDRIDAGVIARFGEATRPTPQGFSEQQEQLRELIVRRRQLVDHRTAEKNRCEQAHSTLVRNSVRKSIEGIDKDLTRIDRAIIQLVESNDDWRGRYERLKSVPGVGAQTAATLMAELPELGRLNRQQVAALVGVAPFNRDSGQFRGRRTIWGGRATVRSGLYMAALSAKKHNPVIRAFAARLLAKGKPPKVVLTACMRKLLVILNAMLRSDEMWGPRLATLAP

SEQ ID NO: 306190 - protein, 323 aa, unidentified
MTAILGIDIAKQTFDATLLDGQDEKRRRHFDNTARGHEQLHQWVQRYSQGEVHVCMESTSIYWEALAEYLHQTGYLVSVVNPARIKGYAMSQLRRSKTDPLDGDIIADFCRTQKPAAWEPPTAEQKKLRALLRHLEALKKNRTQQSNRLSTCGDEEVRASILTLLQVIDGEIAAMKQRLDRFFDDHPDLKAKLDLLVSVTGFGRQTSTHIMAEMYDLEQYDNAKAAAADAGITTSHYSSGTSVRRRPKMSRMGKASIRSALYFPAITAIRHNPIVRRMAERLAAKGKHKSVIRVAAMRKLMNLAYGVLKHGQPFDPNYGLAMG

SEQ ID NO: 306191 - protein, 364 aa, unidentified
MAQEHLQAEAVLSVTIGIDPHKGSHTAAALDSRQCVIGQIRVLATPAGYRELRRWAAGWPERRWAVENVGGLGRPVTQWLLGDGETVIDVPPKLSARIRVLSTGHGRKTDPADAVSTALAACGPADLQAATLESHATTLRLLSDRRDDLVARRTQVLNRLHALLADLVPGTVPSRLSAETAAVLLRRSRPPAGPRRIRRLLASDLVREARRLDREIAALEARIAEAVTASRTTLTELFGIGPILAAKILGRVGDPRRFPSAARFASYCGVAPIEASSGDVVRHRLSRAGDRQLNFALSMMALCQARQHSEGRAYFLRKRAAGHSDKEALRCLKRRLADVVYRQLVRDARPAQSTAPSAAPAPRA

SEQ ID NO: 306192 - protein, 353 aa, unidentified
MVVVGADVHKRSHTFVAVDQAGRKLAEITVKAVTVGHDKAVRWAQDRFGAELVWAIEDCRHLSARLEIDLLDAGQQVVRVPPKMMAEQRRTARTRGKSDPIDALAVARAALREPDLPVATHDEASREIKLLTDHREDLVRQRTSIVNRFRWHLHRIDPTIDPAAKSLNIARSRARLRDQLADLGGIDARLARELLEDIEALTGRIDALEKEISALVKERAPELLELPGCAALTAAKIVGETAGIGRFAHEAKYAMHAGVAPIPVWSGNTRGRVRMNKSGNRQLNAALHRIAITQIRLGGLGRAYYDKRLAAGDTRTEALRCLKRRLARVVYNTLKNPNTNQSTATTPAYAAAA

SEQ ID NO: 306193 - protein, 411 aa, unidentified
MATMFCGIDWGESRHDVAIIDQAGIIVARAKITDDAAGFTELLTLLAEAGDCEDDQIPVAIEKDHGLLVSALRSTGRAIFPLNPLAASRYRARHQVSGAKSDATDAVLLANILRTDMAAHRPLPADTELAQAIRVLARAQQDMAWTRQRIGNQIRSLLKEFYPAALDAFVPLARGGLAHPEARTILAVAPTPAKAARLTRARLRTLLAKAGRQRRINTEADRVFEALRGKYLRHPSVVEDAMGIQLTALLTHFDAVCRASDDLEVAAREHFEQHPAAAVINSFPGMGTLLGARVLAEIGDDRARFAAARGLKAFAGSAPVTRASGKKTVVTYRRIKNNRLAAVGTIWALSALSVSPGAKRHYDARRERGDWNRQAQRHLFNKFLGQLHHCLQTGVTYDETHAFPTPLELAA

SEQ ID NO: 306194 - protein, 421 aa, unidentified
MKGSRAKKANMIQEGTLIVAVDIGMVSNHGYCTAADGRSTKTFSFDNTREGLDTFWSMILASKTRFQCTEVIVGYESTGPYGEPLIHSLKQKPVTIVQVNPLHTKRMSEINDNSPLKTDRKDPRVIADVIRLGHALSVVIPEGDAAYLRRINNARERHTKERTALLNQLQQFVFLIFPEFTRVIKTVYSKTALHILKKYTTPAKICSVNIEKLGEEMRRRSMGKFGVEHATALINFAKTTIGIQEGLDGLVMDIQHVLIQIEMVDSLRAEIEHEMEITLQRIPYSRKLLSIKGLGIVTVAGLIGEICDFTKFTTQSEIAKLAGLNLYEISSGKRQGQRRISKRGRSLLRKILYYAAMQTIRKNGIMHDYYQRLIGRGMKSMMALVAVSRKLLRIIFAIVRDDTEFILNHESQRKEEMRKAA

SEQ ID NO: 306195 - protein, 392 aa, unidentified
MVVSVGVDVSKDKHDCFILSSEGEVLADVFTIPNNLDGFRFLLQRIRDCTHAQDKIKVGLEATGHYSYNLLGFLLDNGLPTYVLNPLRTNIYRKSLSLRKTKTDRVDARTIASMLLSDAGLKPYTNTAYHNEELKSLTRYRFDKVKERAKLKSSIARLVCVLFPELEKLVPSLHIASVYALLEEFPGAKQIAAAHLTRLKTLLETASKGHYKRDMALEIRDAARNSIGSWMPAKSLELQHTIRLIRELDDEIAEIEKQIQAIMDELNSPITTIPGIGFRMAAMIFAEVGDFTRFDSPDKLLAYAGMSPSTYQSGQLKNCYPHMEKRGSRYLRYALYNATKYVCHWDPTFAAYLAKKRAEGKHYNVALSHAAKKLVRLIFAMEKSRQPYCLVA

SEQ ID NO: 306196 - protein, 404 aa, unidentified
MNAVGIDVSKGKSTVAIMRPFGEVVVSPFEVNHNAAELGQLAERIKGLEGETRIVMEVTGSYSQPVARFFHEAGLFVSAVHPLLVHGFGNNSIRKVKTDQADAVKIAAYALSNWLKLPRYVPEEDTRQMLKTYSRQYDKYVKLKTALKNNLIFLVDQTFPGVNTLFSPHSRKSNGHEKWIDFVADFWHCGCVCGLSLKAFTSAYRRWCKRAGYYFDEAKAGEVYDAAHGHVSVMPKSDTAETLVKQAVAQINTVGETLAAVAREMNQMAASLSEYPAVMEMRGAGEILGPQLMAEVGDVCRFRSKGSIVCFAGLDAPPFKSGQFESHNRHISKKGSPHLRKTLFQIVDGLIKSAPADDPVFQFIDRKRAENKPYYVYMTAGAAKFLRIYYGRVKEYLDKQNAGI

SEQ ID NO: 306197 - protein, 365 aa, unidentified
MEKISTVKMKGKKILEGQLTIGLDLGDRSSCYCVLDENGEIIREQKIPTTPEGMQQAFGKMARSRIAMETGTHSPWVSRVLTELGHEVIVAHAQKVRLIVKSRRKDDRLDARTLARLARIDPELLSPVQHRSAQAQLHLAEIRARAGLVSARTALVNAARGLVKSYGERLRKCGTQQFGQETTSGLSAGLREALEPLMQEVESLNERIKEYDRRIEKMAKETYPETELLKQVKGVGDLIATAYVLTVEDPHRFRKSRDAGCFVGLQPGRRNSGESEPQMHITKEGDEYLRTLLVQGAHYILGPFGEDSDLRRWGLKLSARGGKNAKKRAVVAVARKLAVLLHRLWVSGEVYEPLRNSQKAMTVAA

SEQ ID NO: 306198 - protein, 398 aa, unidentified
MGCRRLVGIDLGIASAHTVRVLDETGETVAKRKAWPTVESLAAVEAAALAGCPRGVRLEVVVEPTGPAWLPIAVFFAHRGHVVHRVSSAKAADLRRFLSRHTKTNGIDADTLARLALLDPAGLQPLQLPGVERAALDRRVRATDRLTRAAAEHKVRIKDLVRQLLPMTPLGGDLGVADLAVLERWADPNLLVKAGAKRLTTVIAKASHNHQGAPRASEWIAAAEASLELYAGHPAVAFADLAAEVATEVRLLRAVQAEQAGHAAERERCYRWVDPAGLARSLPGLAEIGGPALVACMGDPARFGRGKQFRAFTGLAPRASETGDTDRKGQPMSKAGSSLLRTTLVRAADHARKQDPQSPASTTCRWSSGARTTSALSASWPPTSPSVPGPSCAAACPM

SEQ ID NO: 306199 - protein, 360 aa, unidentified
MSQQQTSMKRTIVGGVDTHKDLHVAAVVDERDRILGSASFPTTRHGYKSMLGWMRAFGPVDRIGVECTGTYGAGLLRYLQHANITTLEVTAPDKTARRKRGKDDTIDAENAAHAAFAGIRIVTPKTRDGMTESLRVLKVCRKTAVAARRVALQMIQTQVVSAPEELRDLLRNMTRMQLIRTLAAWRPDLTGYRDVTTAYRIALKSLGRRYLELHDEIADLDVMIAAIVDELAPELIARRAVGYESAAQLLITAGDNPERLRSEASFAALCGASPIPASSGKTQRHRLNRGGDRAANSALHIIAIGRLRLDARTQDYVQRRLTEGHSKLEALRCLKRYIARELYYVLRSRHREINRAQIAT

SEQ ID NO: 306200 - protein, 343 aa, unidentified
MQITTIGLDLAKSVFQVHGVDASGKPVIRKALRRGHVLPFFKDLAPCLVGMEACSSAHHWARELAALGHTVKLMPPSYVKPYVKRGKNDAADAEAICEAVTRPTMRFVPVKTPEQQAAVMLHRTRALLMRQRIMVVNALRGHLAEFGLVAPQGAKGLAELVDKAFGDDAEAQVPPLARVALAPLISQVRELQAGIKTIDAELLAWHRQNAASTRLETIPGIGFITATAIAATVTDPSHFQSGRQFAAWLGLVPRQSSSGGKERLGSISKMGDCYLRTLLVVGATSVIRYARGKNAAGAAWINALLARRPARLVSVALANKTARIAWAVLTQERDYRKQALMAA

SEQ ID NO: 306201 - protein, 416 aa, unidentified
MEIEHTHCAGLDVHKKTVVAAIIVPDGQGGLRKEVRTFATMTADLLALSDWLVSFGVTHVAMESTGEYWKPIHNILEENFEVLLVNARHIKQVPGRKTDVMDAEWIADLLRHGLLRGSFIPPVGQRELRELTRHRANFVRERATLVNRIQKTLESANIKLASVASDVMGVSGRAMLDAIITGTANATEMAGLAKGRLREKREQLDKALQGRVKPHHRFVLSEYLCQVDNLDETIARFDAEIEKYCRPFEEAVELLDTIPGVARRTAEVIVSEIGSDMCRFPTANHLAAWAGVAPGNNESAGKRYSGTTRHGNRALTVALVQAAHAAARSRNTYLSAQYHRLAGRRGKKRAIVAVAHSILVISYHIIQRKEPFRELGGDYFDLRRPEATAKRLLGRLQHLGYDISRIEQPRLLPVAA

SEQ ID NO: 306202 - protein, 375 aa, unidentified
MRPDDSSCASDAIQPPPFSNLRINFSGQVYRHSFFWVFLFVLGLDVGKSERYACLLQVHGPGSLTLIGVVKAGAKTAKGHAQLLAGLTKSVAVRDDLSVVMESTRVSWERGAMTRHDAGDGVSVVNAAQMKFFAKRTLRSGKTDKLDAELIARSGAVMQPVCWLPPEAELIELRALLHARDTIVERLTLEAGRHHAVDHQHQPHPRAIGFCEARQKRLEQQLEEVNGAVQALVLGSEKRQEQVTLLASLPGIGPLTASILLVERMHLSRMESSNQWAASAGLSPVPRQSGSFPGRTRISKRGNGRLRRAFYRCALTASRMKNTFGDFYRHLIVQGKPKKVALIALARKLLRVAFAVLKSGQNFNPDDRRQPPVAA

SEQ ID NO: 306203 - protein, 330 aa, unidentified
MYLGIDTHKRYSQVAVVDDDGNLQDEIRLPNDRLSELAEEYAGSEAAIEASGNYRPIYEMLDEHLDVTLVNPSKNRIIADAAVKTDRVDAKRLAQMLRADMLAESYVPPDEIRVLRDLVRTRKSLVEERTAEKNRVRAVLTRTDNTYDSELFGPTGREFLAELSLSDADRAILEAHLSVIDAYDEQIEKIEEKIERKVLESPAAQRLLTIPGVGQYTAAVIVAEVGEVERFDEDKQLVSYAGLDPVVHQSGDKEVRGSISKEGSAPLRWALVQCASIAVRCDEYLGNFYTRLKQRKNHQIAIVATARKMLVSIFHMLTRKEPYDPPGVST

SEQ ID NO: 306204 - protein, 345 aa, unidentified
MYYIGIDVSTKESALCILDGKGKIVRETKLPTDPEIIARFIAATGLAIERIGLEAGCSAAWLFAGLQRHGWPVICIDARHAAAALQAGFRNKNDRNDARGIADLMRVNKYRPVWVKSPEAQRQGRLLTARATLQSQLVALENTIRGLLRQEGIGLTDRRTAFEAAVREAIGDDRLLEAAVHPLLETRNAVLQHRATLDRQILRIVRADPVCRLLMTAPGVGALVSLAFKVAVDDPRRFSRSRDVGAHFGLTPREYSSGEVSYHGRISKMGDREVRRLLYVAASRMLRRDAALWCPLKVWAVRLAQRVGIRRARVALARKLAVVLHAMWSDGQVFQWRRAEASASA

SEQ ID NO: 306205 - protein, 320 aa, unidentified
MDAVLGIDIAKAKFAAALLRPDGKVRHKSCANTPTGFADLAAWLLRQQVTHVHATLEATGTYGEALALWLHDAGHLVSVVNPSVIHAYARTQLTRSKTDRIDAELIARFTASHQPAPWTPPAPEIRQLQALVRRLDALQGMRTQELNRLASGVTVAEVRASIETVIASLDAQIAHVHQLIRDHLDRHPGLRAQRELLITIPGIGEATAAVLIAELFDKRYTSARQAAAFAGLVPRLVESGTLRGRTRLSKIGPGRLRKALYMPAMTALRWNPTIRAVRARLHAAGKPPMVIIGAALRKLIHLAYGVLKSGRAYEPTCAHP

SEQ ID NO: 306206 - protein, 413 aa, unidentified
MKVIYPVCCGIDVHKTFLVATVIKTESYTPKYFKKRFSTHNNDILKFKKWLIENNCYDVCMESTGKYWIPVFNLLEDTIHVTIANPKWVRAVKGNKDDKKDSKWIGDLFRLGLVPGSFIPPKDIRILRELTRYRSKLVSARSGEKNRFQNSFTVCNIALDSVVSDMFGKSATAISDYILTSDTFDPNHCVSLLKGKLKKKSDEVIESIEGYHMMQPQKDRALIIKKHIAFLDQTIAEVDEYLDSLVQPYEQLIQLLCSIPGIKRQSAIIIISEIGSDMTPFENAKKISSWAGLAPSSNESAGKKKSVKISRAGVYLKPALVQVAHAANKSKDTPYYKIKYDRISRRRGKKRAIIAIARMIITAIYHMINTGELWNPSDLIKIDTPEYILQRQKDKAIKEATKLLVKEGILKVS

SEQ ID NO: 306207 - protein, 327 aa, unidentified
MQGWAREAGYSITNIVGIDVSKRELVVVVSGHAALRRYTNDAAGRRRLCRDLAKIVGTGTLRVGLEASGGYERKTVSALRKAGFEVIVFQPIQVRAYARYLGQRAKTDPIDAHIIALATAAYEGEIGHSDERLSSMAEHLTFIEQTEEDIVRLKTRLDGFTDTALKTRLAAEIKRLTTRRNAEIRSLRKTLRQHLDLATRLDLVTSIEGIGERTALTLIIRMPELGSLTREEAASLAGLAPFDDQSGKTDRIRHIKGGRAKVRRSLYAAALPAAFKWNTALVDLYHRLTARGATHKKALIACARKLLIFANAVLARGTPWIKSGATA

SEQ ID NO: 306208 - protein, 398 aa, unidentified
MCAEIPKGFVSVGFDSHKKQHTMAIRGPDGWPVGQKVEIKNTKADFQLARDLINDAKTKTGAQGVRIGIEAASFYHLPLVSEMAPYHEDTRVYNPKLMGGRPRREVRQKKNDHKDADKIALAVRENVPGSMPYDNLPLMEIQELCRFLSRMLKDRTNLKKRYLRNLHVLFPGYDELVGEVFESCRTRMLSKYPSAETVRKANIQELQEATQRNGRWGMRKKTIESIVELANSVPDCPYYREALLIEQEMQLKRIRTLDNQIGKVSARISSKWRDMGVHPKYFQIEGLNPKYAISLYTEVRDLTRFPTVDKFVGFLGLDPWTKRSDKKVTYGRLTKMGSRYAREALGNAVGSMQNTNSAIGDCWKRAKERGRKSKECRVICMRKLARMMWGIENYQKNG

SEQ ID NO: 306209 - protein, 327 aa, unidentified
MNSICLSTDSLPVLGLDVAKKSVQAELRRAGGKTVRFGFENNAKGFAQLARVLKEHNVPKVWAGLEATGPYSHALALWLHGAGHRVSLLNPRRVKQYARSAGKRNKTDLLDAAIIADFVCAHRPAPWQPPTLEVAQLRALVRRREELSLMLQAEKNRLEGVAPNVSCSLRRIIATLSAERARLEKLITQQIRSHQQLSCDHQLLCSIKGIGSLTAAILLAEMARPGQVERARQAAAHAGLVPRREESGTSVRRNRGLGKEGNRYLRKALYMPALVAIKYNAPLRHFASRLRAAGKPKMSIVCAVMRKLVHIAFGVLKHQKPFNPSLA

SEQ ID NO: 306210 - protein, 338 aa, unidentified
MVLIGIDPHKATHTAVAVDKEETALGELTVKADRHQVERLLKWAIDFPERRWAIESANGLGFLLAQQLVAVGEDVVDVPPTLAARVRVLGSGKTQKNDPNDALSPAIAALRAKRLRTVVTENLGGVLRLLADHHHDLGSLRTQAVCRLHALVRCLIPGGTGLRLSAARAAVVLRSVRPTNAVDAERKRMALGFVADIRRLDTEIATSKARIVTAVTASGTSVTELYGVGPVVAAFLIGHSGDIARFANRDHYASYNATAPIEASSGPRVRHRLNPRGNRHLNHAIHLIAIAQIRHPNDGRQYFDRKVAEGKTTKEALRALKRQISNAVYRQLVVDSSR

SEQ ID NO: 306211 - protein, 357 aa, unidentified
MEEYIAFDSHKHYTWVEHQEANTGKLRQYRVEHAPGAIRAALHKCQPGTEVAVEATANWYWVTDEIEQAGCRPRLVHPRKAKLMMGQINKTDKLDTHGLNILQRNGTLPTVWIPPGPLRELRELTRTRVVLVAQRTRWKNRITATLAKWGLPASEYSDPYGKKARQELEQRLERLPEQTRWATRQMLVQLDGLSVQIKEFEKRLEELVESTPAMQWLETLPGVGVILSATIALEIGDIGRFLSAERLASYCGTVPRVHSSGDRTRYGRTRPDVNRYLKWAFAEAANSTAVNHRRFPERHVSQLYARLRARKGHNKAVGAVARHLAEAAFHVLSRQQAYRDPTNTSGSDQRGVNAIRS

SEQ ID NO: 306212 - protein, 386 aa, unidentified
MQKSSTHKKNENIDLFVGLDVHKETIDIAVAADGRTAEVRHYGKIGGDLAALDKVLRKLQADGRTLHVVYEAGPCGYAIYRHLTARQIACAVIAPSLTPKKSGDRVKTDRRDALSLARLHRAGELTTVYVPREDDEAMRDLSRAREDAKRAETRARQQLQALLLRHDLRYTGRTPWSAPHLRWLAQLKLPHPAQQITFQEYVTAIDEAAQRVARLTTQIEELLPSWRMAPIVEALQAMRGVALITAVCMVAEVGDLTRFDNPRQLMAYLGLVPSEHSSGGRRHLGAITKAGNSHVRRMLIESAWAYRLPARVTPIIQKRQEKLSKPVREIAWKAQLRLCARYRRLSGKGKTKQLIVTAIARELAAFMWAIAGEVTPAAGGAVASQQ

SEQ ID NO: 306213 - protein, 320 aa, unidentified
MTFELLAIDLGKSSFHLHSIALDGTILSRKISRSKLAETVKAIAPKTVAMEACASAHHWGRQFKDDGREVLLINPRFVKPFVRGSKNDAVDAAAIYEAATRPTMRFVPVKSTTQQDLQSLHRIRERLIVQRTSLINHARGLLAEYGIVLPQGPWRFASQAPSAIENAALSDLGRELFLELLDQLTDVNDRVARLDRKIGEICREREDCRRLSELPGVGPIIATALVASVEDGRYFKSGRELAAWIGLVPRQYTTGGKPRLGGIGRRANHYLRRQMIHGARAVISRLATHDDRRSQWLKELVARRGFNKGACRKFFWLTSC

SEQ ID NO: 306214 - protein, 355 aa, unidentified
MTRTVYCGVDFHARMQTVAYCDSANGEIQLVQLDHRKDDIRRFYSQFTGQVIVGLETGGYSSWFEAMLEELGHTVWMGHANEIRRRANWRQKNDRRDAELVLEIMLKGDFPRIHCHSRESVEVLRMLRYRARLVKMRTMISNNLQAIAMSCGLSERSRALSRARQQQLKSARMSPAFRHQSEDLVTLLVPINERIGRVDKWLKEQASIDDRAKLLMTHPGVGVLTALGVVHTLEPFERFSKQRSVVAYVGLEPMERSSAERKRYIGISKAGSRLLRFLMGEAAHVAVRFDPELKRFYERVGKRRGKSKATVAVARKLLIRCWIMMRDNIDYAEFRSRGVEARLARNIHRPSVSVG

SEQ ID NO: 306215 - protein, 377 aa, unidentified
MTEETAITSMPQHPLDRPDRPDRPDRRCIIGVDTHKDIHVAVAIDQLGVRLEELHVPTTTAGYTRLRRWANELGSVEAFGVEGTGSYGAGLARYLTSFGDRVVEINRPDRATRHRLGKSDPIDAEMAARSVLAGVATGQPKHGNGKVEMVRMLKMAKDSGVKARTQSLNQMKALLVTAPSDLREELADLSVTTLLQRCAAFRPGELTCPAAVAKYTLRLLARRNLELHEEIKNLSERIRLLVGAASPQLLEIFGVGPDGAATFLVTAGDNPERLRSEAAFAALCGASPIPASSGKTQRFRLNRGGDRQANASLHRVVIVRLRWHQPTQDYMTRRLAQGKTKPEIIRCLKRYVAREIYRTLRPATASADASRSTATAA

SEQ ID NO: 306216 - protein, 405 aa, unidentified
MRVYIGIDWSKRKHNICFLHENGEVLGSLEIQHRMAGFVELDKRRQQLGIEAGDCVVGLETAHSLLVDYLWDQGYNQVYILPPQAVRSAQGRFRQSGAKDDAWDARLIADILRTDEQRYTPWQPDRPLTRHIRAEVRFVYQMNKDLVRHTNQLLAVLWRYYPAATQIFSKLDGLVSLAFIQAYPTPEAAAGLSFADFKAFLRAHHHTQSRAWTHAYSQLRADYPPTPPEIVAAYTPQAIGLARLLIQVVHLKKEALTRLQELYAQHPDHILYDHLPVAGDLTEPALLAKLGDDRQHFPTPSVLQAVAGTCPVTYQSGKSRKVFFRQACDHQFRATLQQWARLTINASPWAEAYFRTVRPRCSSENDAIRRLANRWLEVVWRLWHDRKPYDEEYHLKRHTLRSKPK

SEQ ID NO: 306217 - protein, 429 aa, unidentified
MNIKPIAGIDVGKFFSEMVILSPSNELFARMRIHHDSNADMRRAIELLKKAEKDFASRPFIVMESTGHYHKILFHFLQKSGFEVSTINPIQTNCIKNFGIRKVKNDKVDARKIALLYRFHELKPTSISNEDIDCLRSLCRQYYKLSDELTAYKNRFISIVDQLMLNFKEVFPNVYSKTAIAVLEECPTPTAIIEADRDKLISIIQNNSRKSLEWATKKYELLVSKAREFEPLSINNAANVTMLGIHIAMIKTLQENLDKVLKAIHQLIADDLSKDLPVMALTIQLLQSIPGVGFLSAATIVAEIGDFNAFSKPKKLVAYFGIDPSVRQSGEFTGTHNKMSKRGSRLLRRVLYTIALANIRTKRNNEPCNPVLMEFYKKKSQNKPKKVAIGAIMHKLVFIIFAVLRDRKPFELRSPEQHAKILAKNRTVA

SEQ ID NO: 306218 - protein, 341 aa, unidentified
MKLHVLGIDLGKTVFHLVGLDSTGKVVIRKRCSRRQLLAFTANLQVQLIGMESCSGSHFLGRALRDQGHEVRLMPAQYVKPYVQTNKSDYIDAEAIAEAVQRPRMRFVPIKSEEQLDLQALHRVRERWVMRRTAVVNQIRSLLLERGFTLPKGRSYVEEALPRILEDAELPLSGSFRLLLAQLKLELEQLSARIDQLDAVILKRAKEDDACQRLTAIPGVGPVTATALIAAVGNGSAFQRGRHLAAWVGMVPSEHSSGGKQTLLGISKRGNSYLRRLFVQGARSVLQQRHRQAPGLSSWLAQLLARKHQNVVVVALANKVVRMAWAVLYKNESYRAPVLAT

SEQ ID NO: 306219 - protein, 326 aa, unidentified
MSRIQGKTSSLQLATHQVYVGIDVSKSHLDVYIHPCGIARRVRNDKTGIAALVRVLRPHTPETVVVEATGRYHRLCHRHLHNAGFCVAVMNPYRTRRFSDVLGQLAKTDKIDARVLAQFGAMVQPVASSPPAPAVAILSELLTARRQTGTEKTALQNQLSEAESNLVKRQIRARLKMCERHQTVLEKEIRTTIQQHSELKFRFDILTSIPGIALITAATLIAELDELGAANASQIAALVGVAPMNCDSGVWRGQRRIRGGRQNVRNALYMAALTASRASPDMAQFYNRLRNNGKPFKVAITAVMRKLAIIANTLITENRKWSPIHP

SEQ ID NO: 306220 - protein, 369 aa, unidentified
MVNRITYVGLDVHKEGIVVAVAAGGLRGEVREHGRIANTPTALDRLLRKLSGDGMRLRCCYEAGPCGYGIQRHVTAQGHDCDVVAPSLIPKRAGDRIKTDRRDAVSLAKLHRAGELTAVWVPDTRHEAMRDLVRARLDAVHSLRRVRQQLSGFLLRQGRHYSRPAWTKLHRRWLAGLKFEHAVHHIVLEDYIAAVEAAETRRDRLTAQIGAMLADWTLAPVVAAVQAMRGMALVNAATLIAELGDLSRFTNPRRLMAYLGLVPSEHSSGASIKRGGITKAGSGAARRCLIEAAWSYRFPARISRELLLRQENQPKPIRDIAWKGQVRLCARYRKLARAGKPANVVTTAIARELTGFVWAIARQVTVTPG

SEQ ID NO: 306221 - protein, 336 aa, unidentified
MHFTHFIGIDVSKDTLDFTVLHTGDFLFHLQVENSSKGISRFVNHLKKIKGKEDKCLFCVEHTGVYNYHLLEYASVNKLDIWVEPASRIKASAGFQRGKNDKVDSLRIAQYAYKNSESAKLWQAPRAVISQLKRLLAMRQRCINLKKQATVPVNENASFSSKVLCKLEASLFKQTLIALDRDLKGIERSIKEVIDNDIELKRLFTLMTSINGIGPVIAAHVLVLTNEFKDFNCAKKFACYAGVVPFDHSSGKSIKGKSRVSHLAHKGIKHLLHMAALRVIQLDGELSGYFIRKAEKGKNKMLILNAIRNKLIHRIFAVVKSGIPYQKNYISHLVLS

SEQ ID NO: 306222 - protein, 342 aa, unidentified
MQITTIGLDIAKNVFQVHGIDSNEKVVVRKQLRRSQVLAFFKTLPPCLVGMEACATAHYWARELTKLGHRVRLMPAKDVKAYVKRNKNDAADAEAICEAVRRPTMRFVQVKSAAQQSQLMLHRTRDLLMRQRTQVINALRAHMAELGIVAAQGRDGIKELLKIIASEQDARLPVDAHTSLVVLATGLQALQTMIRSIEKRIVVQHRSNEASKRLATIPGIGVIGATAIAATVPDPKVFRSGRDLAAWIGLVPREGSTGGKQKLGPISKQGDQYLRRILVVGAHAVLKRARQQPEKYPWLTGLLARKPFRVVAVALANKMARIAWALLAKGGTYRAPALTAAA

SEQ ID NO: 306223 - protein, 360 aa, unidentified
MTTDRESCRIVIGVDTHKSTHHVAAVHADTAKLLGDQEFPATMAGYRKLLKWAHSHGELVKAGVEGTGSYGAGLHRYMSAQGVAVIEVSRPNRQDRRARGKSDPMDAINAARAVVAEMATVIPKDRDGFVEAVRMIRAARRSAVKARRAALHQIHGLLWCAPEDLRAQLSRYDRAALVARCARLRIPRTAIIDDATVTTRRMLRRLAKRIEFLDEEIAEANEELDDLLSENTPNLLSVKGVGTEAAGQIITTAGENIDRLKSESSLARICGVAPIPASSGSTTRHRLHRGGDRNANSSIYLIVVNRLRWDEPTKAYAARRTQEGKTKKEIIRCLKRAVVRELYRALQADLTRRKVILDAA

SEQ ID NO: 306224 - protein, 320 aa, unidentified
MTDGSVFIGIDVAKAHLDVAVRPDGDTWQAANDASGIAALVAHLDQLRPTLVVLEATGGYERPVTASLVAAGVPVAVVNPRHAAQGAPGDFAKATGKLAKTDTLDAHVLAHFADAVRPTPRPLPDADTQMLAAILGRRRQVVAMLTAEQNRLHTAPTTIRERIGAHIVWLEKDLKEIDTALAQAIADDPTWRERDALLRSVPGVGPVLAVTLLAELPQLGALTRHQVAALAGVAPLNRDSGTRRGIRTVWGGRARVRGALYMAALVATRYNPVIRAFSARLCAAGKPKKVALTACMRKLLTILNALLAHHTPWQSSPSTT

SEQ ID NO: 306225 - protein, 338 aa, unidentified
MALYCGIDLHSRDSWLAILNEELEVVGETKVGNDLEAIIRVLEPHREALEGVAVESTFNWYWLVDGLMDAGHRVHLTNTWAVKQYEGLKYTDDRHDARWLAHLLALGILPEGYIYPKEERSARDLMRRRSFLVRKRTSFILAMRGAFECRTGMRVNSNDLKKWKAEDVRVYVEDPMAAFGITCLLEPMHALSAQIKKIEKAALSRGRLRPEFVPLETVWGIGKILALTIMYEVGDVARFRKVGNFTSYCRLVNTARLSAGKRKGSGNRKNGNPYLSWAFSEAAHHAVRHHPKAQKYFQRKRAKTNGIIAIRALAHKLARASYHVMRDHVDFDPEKAFA

SEQ ID NO: 306226 - protein, 425 aa, unidentified
MNDDVLIAVDPHKASNTAAVLDPVTKTVIEVARFANTVDGYGQLTSFAARWEQRRWAVEGCYGAGRSLAQRLVADSEIVLDVPAKLAARVRVYSCGHGRKTDKDDAVSVGVAALDGTGILPVTSDDATVSLRLLCDRREELTALRTQAVCRLHRLLAELTPGGMRRELTANKAQALLARIRPADDVAAVRVHIARDHLADIRALDARIKYISGQIAALVTASGTGLTGLFGIGPVIAGRILAEVGDVARFATKDAFASYNGTAPIDVSSGDQVRHRLSRAGNRRINHALHMMAVTQIRYPTTPGRRYYERKRCEGKTPKEALRCLKRRLSDLVYYQLIADRRGTIGACGSPTTPPPTRSTSTSPATRSRRAAPPSRPPHRPAQMGSSSWTGKTAAWSASRSSTPAPASTTISSRTPKPTAKTAAS

SEQ ID NO: 306227 - protein, 344 aa, unidentified
MKQVITIGLDLAKQIFQAHGADAEGSPLFTRRLRRAEVLRFFEKQPPCLVGIEACSGSHYWAREIGALGHEVRLIPPAYVKPFVKRGKTDAADAEAISEAVTRKTMRFVPVKSPEQQAAAMVLKTRALLVRQQTQTINALRAHLSELGIIAGIGTAKIASLIAIVRDETDARLPNAARFALTAIADQIDALALQINKLERELVAEVKHDEDMRRLATIPGVGAITSASIKALVPDPGGFKSGRHFAAWLGLTPRSHSSGGKERLGKISKMGNPELRTLLVAGATSVLRHARGNHKAPRWLVALLARRPFKVVAIALANKMARIIWALLTKGGTYRGLESSAASS

SEQ ID NO: 306228 - protein, 343 aa, unidentified
MKYVGVDLHKKVISLCVVMQKAGQRVVVKRETLRCDEPQRIQSWFRRLGAFQVTVEATSSYEWFVQLVEPLADRVVLAHPKKLRVIAESTRKTDKLDAQVLAEFLSLGMIPAAHRPSPRLREHRALVRQRQYIQRRITSAKNRLRHILSHYNADVKYLFSQKGQTYLNELPLSAADRFVVRQLQASLQHWRGQLAEIQAELRRFAKKAPEAEREARQVLESMPCVGPVTSEVVLSELGDVRRFRSQKQVAAYAGLAPGIRESASRTKQLGITKEGSGLLRWVMIQTAWRLVGKTRRWGLAYERLKARTGAKKAIVAIARRLLGVMVAMLTSGRRYCLASEARA

SEQ ID NO: 306229 - protein, 365 aa, unidentified
MNAKYIGFDIDSKKTVACVVQQGQKDRYGTLVTDLQEMQHYLQQQRQEGGELHLTFEVSGEAGYRYDALRDCVDTLTVSNPHKLTWVYRTSKKNDRIDARKQAVLLSIGEVPKVHIPGRQVRQWRATIQQRRGIVNRIVSVKNRIRALLRANGLPRPLHPGSLWKAANLQWMRQEARTWAEASPEQLWRVHLTDLLEEFKLLGEQLKGVTCYLDRLLEAHPGGTLLRSIPGVGPRTAEAILAYTDEVRRFRRSRQYAAYFGLTPKLDESGQTRRLGHISKEGPSVVRWLLVESAWRAIQKSPALKAFYEQIAGGQNLRKKVAVVATARKLLTIIRAMLQIGERFNEDLVSEKKERTQQAVNPQNN

SEQ ID NO: 306230 - protein, 415 aa, unidentified
MKVHRNCCGLDVHKQTIAACLIREDGSGKSYKEKRLFGTMTQDLRELSGWLREAEVSAVAMEATGIYWVPVWNVLERAGFHLLLINPEHYRAVRGKKTDLKDGERIAELLQDGRLEGSLVPSTELRVLRDLTRYRVKLVEHQSSVACRIQKLLEQCNIKLASVASNVLGVSGTAMLRALAAGETDSQRLANLAKKQLRRKIPALRLALDGCLLPHHRFLLGEMLHELSHIESQLARLEAEIESQMQPFEKALSAWMSVPGIKHRVAWTLVAEIGTDMNIFPSAADLASWVGVCPGNNESAGKRKSGKTRKGNRWARRALCEAAWVAAKAKNSYLAAQFRRFAATRGSKRAIIAVAHTILTIGYHMLQRGTTYQDLGANYFDQRHILRTTKRLVKRLEALGHRVILQSPILNPGIG

SEQ ID NO: 306231 - protein, 386 aa, unidentified
MKTVAGLDVHKGSVYLCILQENGEKIERVYGVLTPQLDSMRDFMAENKVSEVAMESTSVYWIPIWRVLVDSFELKLVNPYFIRQLPGRKSDVKDAQWIAECVMKELIRGSFIPSPLVQRLRLYDRRIFEINAELVRKYSKIDAILQRCNIRLSNYVSNTDCKSYKAVVKQISEGVTSPQELLRHVHKRIINKHGEDTILAALTGVVSDAEIDMLAQYVAESAILEDNKNKCIEKMREICNSEFKEQMKNLQEIPGVSERSALTVLAEIGPDVNAFPSAKHLVSWCGFNPRNDESNKKIKSNKITHGNRFIRIASVQCAWAASRTKECYFSKFYAFHTQVRKKFKLKVVVAVARKVLVCIWHILKFNVPYKDFEPQKSVTKDCIQFA

SEQ ID NO: 306232 - protein, 430 aa, unidentified
MKSNTQNAKIEAITEKTLVLGIDVGSEMHYARAFDYRGIEYSKKPFKFSNTEAGFVTFKEWILDLKERHEKDKVIPGMEPTGHYWFNLGKFLQDNEMKPVLVNPHHVKKSKELDDNNPTKNDRKDPKVIAGLVREGRYMIPYLPDGVYADLRTASNIRFQLQAELTRIQNRISRWFNIYFPEYKTVYGKPDAKSGMLILKAAPLPEDILTLGIDGVNQIWRDAKLRAVGKARAKTLIKAAEHSIGSKEGTMSARMEIRMLLEDYESQNMRLQEVMVLIEELVKEIPMAEKLLEIKGVGIRTVSGFLAEVGDISRFNNPKELQKLAGLALVENSSGKHKGKTTISRRGRKRLRYLLFEVAMSLVAKNPEFRELHNYYTTRRLNPLKKMQSLMAIAAKLIRVFYAMLTKGVDYDPKKMISDIKRPTVYLQAA

SEQ ID NO: 306233 - protein, 427 aa, unidentified
MSVAQNEKIRQVTETTMVIGVDIARDTHWARAFDWRGLELSKAVKFENSAEGFHYFLCWASELAAEQKKGRIMVGLEPTGHYWFTLAAYLQGGSMKMVLVNPYHVKRSKELDDGHPSKSDKKDPKTIAKLVLEGRYVLPYIPQGLYAELRVAMNCRWRVQKELTSVQNQIQRWLKIYFPEHKTVFGEFEGIGSMALLHAAPLPSDLVALGVDGINQIWRQMKLRCAGLKRAQRAFEAAQNSVGCTTGIEAARMELQILLEDYDAKLQQYERIMKVVESLCRQIPEVEELLKIKGIGLITVAGIFAEVGDLRRFSSPRQLQKLAGLAITENSSGKHKGQTEISRRGRAHLRAILFRAVMPLVARNEEFQKLHHYLTTRAENPLKKMQSIIAICCKLLRVFYAVATKGCAYSAEKMLADIRRNQPLKAA

SEQ ID NO: 306234 - protein, 307 aa, unidentified
MDNRKYIGMDVHKEAIAIAVLNAAGKLVMESMIETKANTIVEFLKGLRGELHLTFEEGTWASWLYDLLQPHVKRVVVCNPRRNALLKEGSKSDRVDARKLAELLYTKMLRPVYHRDNGMRAVKELARSYVTISKDQARVMTRVKALYRSWGIACSGKQIYTVRHRASWLGKIKEPSVRRRAEFYYQQLDGLRSVRRQVRRELLLESGKHKASKLLRQIPSIGPIRAALLLALVQTPHRFRTKRQLWTYSGFGIETHDSAEYRYVAGQLERSKKPQQVRGLNRNYNHDLKNLFKSAATNAVAKSGPLQ

SEQ ID NO: 306235 - protein, 429 aa, unidentified
MNSTQNKKIEQVKETTMIVGIDVGSEKHYFRAFNWRGIELTRKPIAFSNSMEGFNSFYNSVVELMQKNELKEALVGIEPTGHYWFDLGQFMGEKNIKFVMVNPHHVHKTKELDDNSPSKNDRKDPRVIAGLVRDGRYFYSYMPTGVYAELRNASNRRFVLVEEQTRAKNRLQKWIAVYFPEYKGIYTHIDAKGGLLVLKQAPTPEEIVRLGVEGIIKIWKDAKLRGNGNKKAMLILNAAMKSIGLKAGLTEARMEIQDLIEDYELQTKRLERVNDLIKELCQQIRYADKLLEIKGIGITTVAGFIAEVGDITRFDSTKELQKLAGLELVADSSGKHNGKTKISKRGRKRLRYLLFEAAISVVGKNEEFKEIHRYYTTREKNPLKKMQSLIAVACKLIRVFHVILTKGISYDASKMLKDIRHPGEQLKAA

SEQ ID NO: 306236 - protein, 407 aa, unidentified
MKKLYVGIDVHLRQHVVTVIPAVKFQENKTGWKKTRSIKIGNSRHDFEHLDSFIKSQITKVDQVCIAIDHTGGHYSEPIGYFLKSQGYEVYYLGPISVKAIKERLLGEENKTDKIDSATLAYLLYLRDFYDVSLHISATRVNFESRASILRSLALQSQYYQKLGTQTTNRLRQYSHAVFPEGEEKYFTRLVKIFPYNPTIAEIINDPDVLKKVRMSTNDREEFIELAKKTVGIPGETYKFIIQDLALLLKTNKERILAIDRTIKEAVLEHPYSQILMSFPGVKEKSAAIIISTVKDINNWPTKKQFRKGLGIYGTLRETGKKQVKFRRGLSGDRLCRLTLFLIGFTIIRLKNKNDFKDFYERQIKKDKPRIKALVATMGKLAEIMYHCLKFNEPYQYQSLQKMKPKG

SEQ ID NO: 306237 - protein, 403 aa, unidentified
MFYCGIDIAKYRHEATVIDQAGAAVQESISFANSKEGCEKLLALFQRLDISKEGLLIGMEATGHYWLSVYGYLLEQGFEVKVINPIQSEAFRKMYIRQTKNDRKDSFIIAQIMRFGQFSATNLAEEGIVAMRQLSRYRLALVDTCGDCKRRVIALLDQVFPEYDSLFSDTFGVTSKEVLSQYPTPEGMLTVSIRKLTTLLEKASHGRFGKEKAEQLKAAAASSFGVNFAKDAFAFQIRQLIEQLEFLERQVAELEEQIFSLLKQTGSYITTIPGIGDTLGAIILSEIGDIHRFDAPNKLVAFAGLDVRVTQSGEFTGTRQKISKRGSPYLRRAIWLAASRAAFCDPILSENYQGLRARGKHHLTAVGAVSRKLCNTIYTILKEDRPWQPIPPKGKKVSNYTEE

SEQ ID NO: 306238 - protein, 500 aa, unidentified
MNITHYIGFDVHKKSISYCVKNVAGEIVEEGKLPAQRAALRQWAERQQQPWRGAMEATLFSAWIYDTLKPYAQRLDMAHPARMKAIASGKKKSDQIDARMIADLLRCNLLPVCYVLSPELRDLRRLLRYRNLVVRESVRMQNKMAGLLMESGAPFNKTKLHGKKYFANLLKTLEEVPESVKDLLRMSRGAMEMFETTQKRLVGRLLAEPALGQRVERLASIRGIGEITALTWALEIADPHRFSSHADAMSYCGLTAALRSSAGKEQRGPISKQRNAWLQTALIEAAKLAPRWNPQLAVVHARELERGHRNRAGRRQEWATVPGSHPSLRSRNHNPRRQSWITRRPKSCGNLEIQPTAAGFPNFHSSDYGYQTCFRFVSDSPAGPRVLGDWARGLLLPMLLTVCFGVGRFTLTQSSWTALPRRSRKWMSGHAALALVAPSDRGQFGTAMTTTAIRESFPLSAGESPFPLDIYLSWMSPVFSQFFRVFCPQFFPQFFRAVWS

SEQ ID NO: 306239 - protein, 339 aa, unidentified
MKITTIGLDIAKKFFQLHWVDMTTGEVHRKQLKREQMAEFFATCEPSLVAMEACGSAHYWARKLRAFGHEVRLVAAQFVRPFVKTNKTDAADARAIWEAAQRPEMKFVAIKTEAQQSVLALHRLREQMVKFRTMQGNQLRGLLYEFGVALPPGRAKGMPAALEALGALEETLPAMVIDALRQQMIRIQKLDEDIADIEKKLTLWKKEERSAMNLMEIPGVGILSATAAVATIGDATAFKSGREFAAFLGLVPKQSGTGGRVRMLGISKRGNVYLRTLLIHGARARINFQKQRDPWIEQLLARRPFNTVVVALANKMARTIWAMMAHDRTYQKNYAANIA

SEQ ID NO: 306240 - protein, 363 aa, unidentified
MIVIGADIHKSTHALAAVSGDGGLVAGELEIRADESGHLAALRWARELDEERVWAIEDCRHLSRRFEQALIAAGERVVRVAPRMMGQARSGEREPGKSDQIDARAVARAVVREGVERFPTAFLDERALEIRLLADHRADLVAERTRQINRLRWHLVDLCPDLEAKIPARQLNSGVMLDRIARRLRREDHSARVRVALELVASIRAISRQADGIERELGKLILAYRPALLAEQGLGVLTAATLIGRTAGAERFPTDAHFARQAGVAPIPVSSGRTDRHRLHRGGDRQLNRALHVIAITRARIDPQTHAYLERKRAEGKTNREALRCLKRHLARRVHRLLSMPPINPDHRTRIQLNSAISVPCLT

SEQ ID NO: 306241 - protein, 433 aa, unidentified
MSKFFNSPTVGIDVSADFSFVAILAPNGDVFKKPFRIKHDISGFTHLLKEIKKVEEEFNMKTAIFMESTGVYHLSLFHFLNKNFDNTFVINPLVTKCNKNVDIRKVKNDKKDALYIAQIGKFQNIKLSQSVSMDIFQLKSLVREYYKLTDNCSTYKKKLSTDLRVIFPGYKNVFSNVTSNSSIAILNEFPTPQAILSAPKDLIINILMEKSKKGLIWSEKIYLNLINYANEATIIGLPLHGFSIKITSTINIIKALESEIKNLLEQIESLINSPDFSEQIRKNIEFIDSIPGIGRLTAVTLIAEIGDINGFLRPKHLVAFFGIDSSVNESGKFKGNQNKISKRGTRIGRRALYAAALACIRTNRNGVPINKVLLDYYQINLNGKKPKVALVAIMHKIINYIFAVLRNQTPFEVRDPRIHKQMYLENKNKNTAA

SEQ ID NO: 306242 - protein, 429 aa, unidentified
MNYNQKRRINQVGEGTLIVGVDIAKSKNVARAQNFRGVEYGHAIKFVNREFDFERFKRWMSDIKADTNKDEIIIGLEPTGHYWLNFFKYMIASGYKVVTVNPHHVKKSKELDDNNPTKCDKKDARVIAQLLKDGRYSEPNLPQGVYADLRVAMNHRRRLNKDFSRVKNQIIKWLDMYFPEFNDVFNSFEGKAALSTLKHFPLSSQVYEKTPQEIVNTWREDGIKRGVGLKKARKLLKAAESSVGLVAGTQMALEEIKHLLERYHLIKSQLSGLKEKIEKFLEEIPGAQKMLTVPGIGSLTVAGFYSECGKLTDYEHPKQIIKLAGLNLKEHSSGKHKGETTITKRGRPNLRALLFRASIPLVRHNDEFRQIHNYYTTRPKNPLAKKQSLIAICCKLIKILFALGTKEVEYDGDKLLNDIERPGEYRKTA

SEQ ID NO: 306243 - protein, 371 aa, unidentified
MKSIIYVGMDVHTTNYTLSCYTVENDMSFATVQVEPDCKNILKYLEQVRKNYGDPCEFLCGYEAGCLGFTLYEELKRHDVPCVILAPTSMPIYKKKEIKTDKRDAMKIAKCLAYNTYSAVHIPTKEDSDVKEYIRMRDAHKMALKKVKQQILAFCTRHGCRFSEGRDYWTQKHMKWLRALNLDGLLREILDEYLATYTQETDKVERFDRRIAELAEDERYAKKVHMLSCMIGIRTHTALALIVETGDFRRFKKAEQYAAFLGLVPGEHSSGDGQNRLGITKAGNSHLRRLLIEAAQCYNRGKVGYKSKALKARQYGNPAEIIAYADKANERLRRKFYHMVLKLNKKHNVAVAAVARELSCFVWGMMTEHAA

SEQ ID NO: 306244 - protein, 453 aa, unidentified
MARKIRKLKMKKVQPLHTLQPNAAGIDVGATEIFVSVPQDRDVEHVRCFTTFTDDLHKAARWLKKCEIKSVAMESTGVYWIPVFQILDAHGFDVMLVNAHHVKNVPGRKTDVEDCQWIQYLHSVGLLRGSFRPGQDICSVRSLLRHRGNLIKIASTHVQHMQKSLTQMNVQIHNVISDITGVTGLTIMDAIVDGQRNLNKLANLKDPRIKASKDTIKKSLKGDYRPEHIFTLKQALQSYRHYRQMIYECDIEIEKHLKDLESRIEPDQPARPPGDIKPRGNAPNFDLKHHMHRLLGTDLTLVDGIDVGTAHTIFTEVGPDLSCFPTPAHFCSWLGLCPNNKISGGKILSSKTKPGSNRVAQVLRMASISLLRSRSYLGEFYRRMRAKSGAPKAITATAHKLARIVYHLIKYQKAFDQSVFNKEQEMHKIRMEKNLRKQAKYLGYQVVPAETMS

SEQ ID NO: 306245 - protein, 356 aa, unidentified
MKYNTQNAKIKSITEKTLIVGIDVGSETHFARAFDWRNYEYSKKPLEFSNTEAGFMTLKAWMADFAEKYGKNVVIPGMEPTGHYWFNLGAYLQDNGMKPVHVNPHHVKKSKELDDNNPNKNDRKDPKTIAALVNEGRFSYPYIPTGIYAEIRSLSNLRLQTQEEITRIKNRIARWFSIYFPEIKDVYRNPDSVSGLMILKEAPLPQDIVKLGVDGINKIWRDAKLRAAGLKRAKTLVTAAEHSIGSQEAPDSARIELKNLLNDYEIYKNREEDLMSLTEEKLSEIPHIDKLLEIKGVGLKTVSGFVAEVGDITRFDNPKQLQKLAGYAIVECSSGKHKGRESHQLQRKKTPQICTV

SEQ ID NO: 306246 - protein, 395 aa, unidentified
MGEQGRVVIGMDPHKRSVTIEVMTADEGVVGGGRFGTDVEGFRQLCSYVAGWSERVWAIEGCRGIGRHIAHRLIAEGEQVVDVPPKLSARTRVFATGQGRKTDATDAHSVALVGVRMSGLRAVVADADLDVLRLLVDRRRQMGEEHSRKVSQLHALLLELIPGGAKKSLTAAQARRLLATVRPRDVVGKTRRRVAAELIVDLERIHARKKAADKELRALVAATGTGLLDLHGIGPQGAARLLVEVGDITRFPDRNHFASWTGTAPVDASSGDHVRHRLSRGGNRQINRALHMMATVQLRNATDGRAYYDRKKATGKSSMEAMRCLKRRLSDTVYRTMLNDLAHNAAKQTGTGPGGQRGNGSDSSAAGSQPQHRLFGQATPGPVNDKPKPALPKVS

SEQ ID NO: 306247 - protein, 365 aa, unidentified
MNCVGIDVSHCKSIIVVMRPFGEVVVSPFEVLHTDSELSKLAGLLKSLDGETRVVMESTGYHHTPVAWLLHDAGLYVSVVNAMLVHDYGNNSLKRAKTDKKDAVKLANCGLDHWLTLPRYVPEEDTRLMLKTCYRKYQQYSKVQTMLKNNLISLLDIAFPDANRLFTSPPRADGSEKWVDFVAAFWHCECVCNLSEKAFTAKYHKWCRKHRYKFCEDKTLDIYSSACGHFGVIPKTDTAKLLVEQAVFQIRATSTTLAALKQEMQSLAASLPEYPVVMGMFGIGPALGPPLMAEIGDVRRFHSKKALVAVAGIDAPPYQFGQMDVRSHSISKRGSASLRRTLFLVMSVILQHAPMNEPVYQFMNK

SEQ ID NO: 306248 - protein, 310 aa, unidentified
MDAIVVGIDVSKDRLDVAVRPTGETFAVERDAEGLNRLIARLAPLEPQAIAVEATGGYETVVAASLSAAGLPVVVVNPAQVRAFAKALGKRAKTDPIDAAVIAHFVEAAKPDIRPMPDEQTRLLADLVARRAQIVQMIVAERQRQKRLIEKRLQKSIARLLAALQKELSSLETDIDEAVRGSPTWRAKEDLLASVPGVGPTIARTLIAELPELGRLDRRKIAALVGLAPWTRQSGQWKGKSFIGGGRTQVRAALFMGALVAARHNPALRGFHQRLLDAGKPKLVAIVAVARKLLTILNAIIREQKPWLPA

SEQ ID NO: 306249 - protein, 387 aa, unidentified
MNAAGIDVSSRKSTVAVLRPFGEVVRLPFDVAHNTEGLASLAEQLKALDGETRVVLEHTGRYYEPVAKALHEAGLYVSAVNPLLIKEYGANSLRRVKTDKADAVKIARYALDNWADLRDYTPMDTIRYDLKTLNRQFQLASKQRTASANNLIALLEQSFPGIRKCFDSPVRSDGTQKWVDFVHTFWHVECVRKQSLNAFSERYRKWCKRHGYIFKQGNAVEVYSLAKNAVVLVPKSEVTKVLVQEAANQLTSISRSVETYRAEMERLASTLPEYPVVMAMYGVGKSFGPQLMAEIGDVRRFERKQSLVAFAGIDPMPNQSGDKNVRSNKSSFSVRAIWFKLPPILPYSAVSFPTAASNSSLTGKTVMMGRMAAPVMACRINSAWLMW

SEQ ID NO: 306250 - protein, 302 aa, unidentified
MNKLSRVGIDLAKNVFQLHGVDRHGKVVWRRRMTRDKWLKALLEKVEPSCEIGMEACAGAHHWARELQAEGFTVKLIAPQFVKPYVKSNKNEANDAEAVCEAMSRPSMRFVAIKTVEQQDIQAIHRVRSELIGHRTAKANQIRGLVAEYGLVAPQQLARLRAAVPDWLEDAENGLTGRFRALLNGLWNDLKTLDHRAAELDHEINMIAQSDPVAKRLQQLRGVGPMVATALVATVGNAEQFANGRQMAASLGLTPKQHSSGGKDRLLGISKRGDAHLRSILIHGARSVIRTAKEKDDRLTKE

SEQ ID NO: 306251 - protein, 347 aa, unidentified
MVTLGGDCHKRTHTLVAVDENGQQLGSKTVVAVEAGHLDALAWARQWPERRWALENCRHLSRRLEADLLGAGELVVQVSPKLMAGVRRSAREWGKSDPIDALAVARAALRESDLPVAQLEGKSRDVKLLLDHREDLVGERTRVQNRLRWHLHELEPSFDVPDRSLDRKVVLKQVGKVLAVHRGVAADIAVELLEHVSQLTYRINALERQIGFLVTELAPNLLELDGCAVLSAAKLIGETAGITRFKTPARFAMHNGSAPIPVWSGNAERHRLNRGGNRQLNVVLHRIALTQMRLGGRGHEYIHHRRACGDTKREAIRALRRRISDEVYRRMWQDSARATSNAAQAAA

SEQ ID NO: 306252 - protein, 355 aa, unidentified
MNKIKTNFEGQTIFVGMDIHKAHWNLGIHLNDMFVKSVHQKPNPFLMADYLKQHFPGANYKAAYEAGKFGFRIQRQLTKLGIECLVVNPADIPKSQKDTLQKTDPRDARNIGIRLQSGVLHSIHIPDEQQEADRIFFRHRKRIWKDLTRCKNRIKGCLAFSGIDIPEQYDNTSWSHNFILWLKSIDCRQISRRSALNYMIAQMEFLRVELLQISNDIRKMMREQRYKTNYYLLRSIPGIGPLTAASLLVEIGDIKRFETFYHLNSFVGLLPMEHSSGEKESKGILTVRKHRQLRSDLVESAWTAKRTDPAMSLYFQEQVKRKDSKIVIIKIARKLLNRIRYVLINQTAYEYGIVK

SEQ ID NO: 306253 - protein, 346 aa, unidentified
MSTNKLTIGLDLGDRKHTFCVLTAAGKILAEGTIANTHEVLAAFSARYPKATIIMETGTHSPWVSRLFEARGHRVLVANARKVRAISQNQTKSDVEDARMLARLGRVDPELLCPITHRSEKGQRALVRLKVREALVRSRVNQMNSVRFLLKSLGLAVPASVKATAFVRKFRQQAEATTCALVEPLLQMLDALNFQIKQLDEELETMAREQYPMTERLRQVDGVGPLTSLCFVLTIESPERFPNTRDVGAYLGLVPRRDQSGLTDKQLPITKAGNTALRCLLVNCAHYILGPFGPPSHLREAGERIAARGGKSAKKRAIIAVARKLAVTLLALWKSGAEYQALPRAA

SEQ ID NO: 306254 - protein, 296 aa, unidentified
MKQFIGLDASLKDTIVSVRKGGKRIWRGKCPSDPKLIADVIRKRASNAERVVFETGPLSVSFYHALTQEGLPAICIDARHAKVALDMAPNKTDANDADGLSHLAEVGFYREVRVKSFDSMLVRTLVAARNQLLRMTTQLSKQIRGLMKTFDLVVPKGAGRVFEGHVCSLLANNAGLKQIIKPLLDAWRGMRARAAELSKQLVASARASEQCQLVASIPGIGAVTTSSFVAAIEDPGNFRKSRSVGGWIGLTTRRYQSGEADYDGHISRRGDNHLRGLLYEAATVNRRIFGLRFSVR

SEQ ID NO: 306255 - protein, 337 aa, unidentified
MQKTNETKHFVESAGIDVSKLTLDVFLYNQKQHRQFANSQAGFELMQKWIFAIVGDEVDVIYCYEHTGWYCILLGQFLYHQNLFNCCINPLEIKRSMGFRRGKSDKTDAIEIARFAWLRKDELTSSIPMPMKLIDLQRFMSLREQLVKQSTALKNLEKGMLVTTQKVQGDIALKIIKQSLKQLELQIKKIETSMEDLIKTETEMQKNYKLSRSVKGVGRILAIQMLLHTHNYSRFDSWRAFSAYCGLVPYPFQSGTSINGKNKTHAISDVKMKSLLSMSAISAIQHDAELKNYYHKRVDEGKNKMVALNIIRNKIVSRIFATVKRGTPYVELGKFAA

SEQ ID NO: 306256 - protein, 401 aa, unidentified
MKRLSGGIDVGSGSHHIIILDEEDNFLYNQKVAHKLNEFTESIKLFRKIEKKEGGKISFALEGKNGYSNPLDRILLDQGFTLYNVDNLKLKRFREAFAGEWRDDERDSLMLSKMLKLKDYINSEREKVFIKIEKSSLITESLKLLSRHQQTLIDEKVRLVNRLGKKLLEVCPQILESGKLKNKKIIAILVKYPDFSKYKRITLKSLLKIKGIGEIQAPFLLKRLNHIEYMPGLTDIYKTIILSYAQRILQLREEIEDIDKKLDEIGEKSKEVNHLKTIPGVATKLSSRLIGEIGDINRFPSEKQLAIYCGVACVNNDSGKVTKAKAVYKANKICKQTLITMAGGSVRLSLQCKVYYLKKRAEGKNHNHALRCLARQLIKVIYKMLTEDREYIVRKELKKVA

SEQ ID NO: 306257 - protein, 369 aa, unidentified
MGEYSEAFVAFDVAKIKHAVAVAEGGRTGEVRFLGEIENRAGPIERTVKKLAGRYGRLHFCFEAGPTGYGLYRQLQALGHDCMVVAPALIPKRPGERVKTNRRDAVTLARLHRAGELTGVWVPDAVHEAVRDLVRAREAAADDLRRKRQQLLSFLLRHSRIYSGSGHWTLAHRRWLANQAFEHAAQQIVFQDGIDAIEDAIARRRRLEEQLIAIMPSWSMAPVVEAYQAMRGASFLVAVTFAAEIGDVRRFDNPRRLMSFLGLVPAESSTGDTVRRKGLTLAGNRRARRALVEAAWTYRYPARVSETLRARLEGLPKAVRDIAWKAQIRLCARYRRLSATGKKLPVVVAAIAREMAAFLWAIGREVTPG

SEQ ID NO: 306258 - protein, 363 aa, unidentified
MSNITFVGLDVHNESITAAILAPDSDEPQVLKLPADLMKVRQLFCRLAEKAPVRACYEASGAGFVLQRSLAVGGFHCDVIAPSLIPRKAGDHRKTDRLDAIMLARLYRSGHLTPVHVPTEEQEALRRLLRLRRSYHAQITSTKHRISGTLRNHGHIFNATKSAWTKKHFLWLGKLRQTLQGHLQTALSIDLEHLEYLESQIRAIDAELELAASAMPYRPKVEALCCLRGVKSLTALILICEIDDIRRFAAPSGLMAYFGLVPSEHSSGNVEHRGPITKAGNTHARRLLVEAAWNNRHGAAAELVLKRRRQGQPPAVVAIALKAQHRLHRKFVRLDQRKHRHVAITAVARELCGFVWAVLMAMN

SEQ ID NO: 306259 - protein, 354 aa, unidentified
MSQTLNAAIAVVGIDIGKNSFHIVGHDERGAIVLRQKWSRGQVEARLANMPPCLIGMEACVGAHHLSRKLRALGHDARLMPAKYVRPYSKGQKNDFRDAEAIAEAVQRPTMKFVATKTADQLDLQALHRVRERLVSQRTGIINQIRAFLLERGIAVRQGPRFLRAELPRILATPPDVLSPRMVRIIEDLAGDWRRLDERVEGLSNEIEAIARQDTGCERLMSVPGIGPIISSAMVAAIGGGDVFTKGRDFAAWLGLVPKQISTGDRTILGKISRRGNRYLRVLFVQAAWVVLIKPTVWERHGLKPWIEAARKRLHHNVLAIALANKLARIAWSVLARGRAFEARKMDQAANQSA

SEQ ID NO: 306260 - protein, 349 aa, unidentified
MSRKQSNPAVIGIDIGKNNFHLIGLDDAGEIVMRRKLSRRQLAERLVNLPPCLIGMEACVGAHYLSRRLLALGHDARMMPAQYVKPYLRGQKNDYRDAEAIAEAVQRPRMRFVTPKSVEQLDLQSMHRVRSRLVRHRTSVINQIRTLLLERGIPVRQGARFLFAALPEIVGQHGDLLSPRMEQLMMDLSGDLRHLDERLEAITEEIGTIAKENQACQRLMTVPGIGPVIASAMVAAVGDGTAFDRGRDFAAFLGLVPRQMSTGGETILGRISKRGNTYLRTLFIRGAKIILMHSKNWPKHRFGPWLEAASKRMHKNVLAVALANKLARIAWSVLRHGDDYDPKGTFRAA

SEQ ID NO: 306261 - protein, 367 aa, unidentified
MNHIIYCGVDFHARQQTICCLKTETGELTCHELKHDDKEALRQFYAELGGPVIVGLEASGYTPWFEQLLEELGHQVWLGDATEIRRRARRRQKNDRRDAELILELLCHGEFPRIHRPSPESREILRMLRYRHKLVKVRTLIKNSLQSLSIQAGLSLQAHLFTRQGTQQLAALAMSPVMRQQRQQWLELLQELNQRITATEEWLKQQALSDPRISLLRTHPGLGLLSSLGIVHTLIPVSRFPNTRKVAAYGGFEPMERSSADKKRYLGISKAGSRLLRFLLIEATQTAVRTDPDLQRFYRRLVPRRGKPKAKVAVARKLLIRSFIMLRDEINYAEFQQRAIAARLAREFARPNVPVPLIGQPASPAKS

SEQ ID NO: 306262 - protein, 347 aa, unidentified
MKITRIGLDLAKNVFQVFGVDAQDKRVLSRQLKRKEMQAFFQALPACLIGMEACASAHYWAWVLTEMGHSVKLIAPQFVKPYVKGNKNDANDAEAICEAVSRPGMRFVPVKTIEQLHLQARHRVRTELIKQRTAKANQIRGLLAEYGIVVGLGVRCLRHHLPEILEETENRLQEDFRVLLTGLREDLVYLDERIKTEDKAIATLANAHASARRLQQLRGVGPLVATALIAALGDGRQFSNGRQASAWVGLVPGQHSSGGKQTLLGISKRGDTYLRTLLIHGARAALRAARDKTDPLSLWLQGLCARRNKNVAAVALANKTMRLAWVLLRREEDYDPLHGHARPAQPA

SEQ ID NO: 306263 - protein, 349 aa, unidentified
MIVIGIDPHKQTHTAVAVDGATGTVLGELTIKARTPGFERLVEWARALEDERLFAVEDGRHVSGHLERHLIARGERAVRVSPRMMGEARRSDRVAGKSDPVDATAVARAALRHPDLPQATLAGPERQIGLLVAHREMLINERTDRICKLRWLLHDIDPDLAPGLRSLDRFKTLDRLAEALQVLGPAVEVEICLELLTQCRQITARANELERRIGALVRTHAPALLQIPGCASLTAAKIVAEAAQVRRFPTEGHFARYAGTAPIPASSGARHRQRFNRRGNRQLNAAVHRIAVTQIRMHDPAKDYLAKKRAEGKTKTEAIRALKRHITRVVFKTMTSMSWPADRLTAAAA

SEQ ID NO: 306264 - protein, 350 aa, unidentified
MTTLTRQITGGVDTHLDVHVAAALDERGGLLGVESFPTTPKGYGQLLAWLENFGEVEVLGVEGTGSYGAGLTRHLLRRGVKVVEVDRPNRLRRRRHGKSDPQDAISAARAAQGGDATGEAKTRDGNVEAMRVLRVARASARKGRGQALNQMRALIATGPDCIRAELRGLNVYRLLERASSYRPADKRDLVSINKLTLRMLARRALELEAEVSAIDAILEQLVIETAPALVAMTGVGTDVASALLVAAGDNPERLRNEASFAHLCGTSPIDASSGKHERHRLNRSGDRQANSALWHIVITRMVCDPRTRHYIERRMKDGLTKKEAVRCLKRYIAREVYNHLPIEDLALDSP

SEQ ID NO: 306265 - protein, 369 aa, unidentified
MARNGTLAKIQELKPSFQATTEQITIGIDLGDRFSHCCVLGPDGRILTEGRLRSTPETVARHFQDLPPSRIAIEVGTHSRWLSQLLTKWGHEVIVANPRNLRMIADSIRKSDQVDAHMLARLARVDPQLLSPIVHRKQESYPDIIQLKARDLLVKNRTRLMNAVRGVLKSAGLRLSPCGTSCFPSKAAMCVPDELKMSLTPLLETISHLNKQIYCLDKAIENTARNRYPETDRLRQISGVGPITALQYVLTIGDPGRFTHSRDVPAYLGLTPRRHQSGSVEQQLRISKAGNKQLRSLLVQCAQYLLGRFGPDSDLKRWGTRMFERGGKNSKKRAIVAVARKLAVLLHRLWVTGDTYHPLYNVAASSVTS

SEQ ID NO: 306266 - protein, 471 aa, unidentified
MGSPKLKQPKTKQSKKRAARNNKKQQDRPVIEANAAGIDVGAREMYVAIPPDRDPEPVRIFPTFTADLEALADWLVERGITTVAMESTGVYWIPLYQILEDHGIRPCLVNARHMKNVPGRRTDWYECQWLQYLHSCGLLRAAFRPEQEVCAIRALLRHRHELVQMASQHVQHMQKALTQMNLQIQHVISDINGVTGTAIVDAILAGERNPVVLAKLRHERVAADKETIRKSLEGDWRQEHLFTLRQSRKLYDSYVKMIEDCDKEIAPRLSQMEAKLDVSQKPLPQLSGPSRKRRKKRTGDFRFDVRKEAYSLYGVDVTRIPGLDGLVIPLFSEVGRDLKARFGTSDRFSSWLGLCTDNDKSGGKVLWQGIRKVKNRAGDIFRMAAAALHHSRSPVGDFLRRMKAKLGPAAGITATAHKIAIIFFTLVTNQIEYDGSVWAARDKEPHQRFEQKVKRQARQLGYELVPIQVPA

SEQ ID NO: 306267 - protein, 372 aa, unidentified
MNSLRYVGLDVHKETIAVAVAEEGRAAPTSVGTIRNEPAAVRKLIRQLGGRARLRCCYEAGPCGYVLYHQLTDQGVSCQVVAPSLVPRRPGDRVKTDRRDALKLALGLRAGTLTPIWVPAPADEALRDLVRAREDGLEDLLRARHRLSKLLLRIGVRGPRDLRSWSAKHRDWLAQVRLPHPAQQIAFEQYRLNVDQALEKVAALDRKLLELVGESRFAEVIAAFQALYGVGFVTALTVATEVQNFSRFSRARSFMGFNGVCSSEHSSGERQWRGAITRAGNPHIRRVVVEAAWHYRRRPKDTARRRRELAEQPPWLQAIVHEADERLSGRFARLSARRKVPQKVVVAVARELLGFMWSIGCALERRETALAA

SEQ ID NO: 306268 - protein, 426 aa, unidentified
MQYALPLVLPDVPAGGVCAGIDWATADHVACVVDLAGRVTDRFSAAHDKAGIAAMIARLRRNKVTEVAIERGDGPLVDGLLTAGLTVVVITSRQVKNLRSRFGAAGAKDDRFDAFVLADTLRTDRARLRPLVPDTPATISLRMAVRARRDLVRHRVAVCNQLRAHLAVAFPAGITLFHDLDSPISLAFLARFGSQDAAAELDEQAIGAWLATIAVRGRPAPASVLHARLQAAPPGATGADGAAQAGVTAALTATLTALSAQIKALETQIAGQLAAHPDGHIFTSLPRPGTVRAARLLAEIGDCRSRFPDAESLAGLAGVAPVTRRSGTRIAHGFRWSVNRQLRDALCDFAADSRHASPWAAAIYDDARARGKDHPLAVRITARAWSYVIWRCWHDGTAYDPAKHNALQAVLARQAAQTAGARQQDQ

SEQ ID NO: 306269 - protein, 446 aa, unidentified
MAPAGGHTCHNVGEVVVDEDEDQSLFVERIAALDLGKAVLEACVRLPHPSRPGRRVQEVRSFPTRTVHLLALADWLRCEQVTTVVMESTSDYWKGVYYLLEAEGFDCQVANAREVKNVPGRPKTDKADAVWLAKVAERGMFRPSLVHPEPIRRLRDFTRYRRSLVRDRSREKQRVEKLLEDAQIKLSSVISDLFGVSGRDMLDALAAGQRDPRVLADLARTSMRGKTAVLVEALTGFFTAHHGELLAMMLENIDRLTGQITSLETRIEELVAPFSQQVEQLAEIPGIGRTGAAEIIGEIGVDMTRFSTAAHLVSWAKFAPAVHESAGTKKQKKRPKGNPWLAATLGNAAATQTRSRTFLGARYRRIARRRGKGKAIVAVGNSILTIVWHLLSDPQARFHDLGADYYETRINAERRARNLAAALEAVTGQKIIIREGKAIVIDPAAA

SEQ ID NO: 306270 - protein, 377 aa, unidentified
MKRRTDLAHGTPWDGLILLGLFEKGGVVVLHVGLDLSRKRVDVCLISSDGELVEHFRAPADRDGIYGLSRRVAVYDEPVRGVIESMNGARFVHDELVRYGWEVLVADAQRVKGLAPLACKTDKVDSRVLAELSWRDLVPAIWLPTPELRAERERSRWRLHLVKHRAILKNRVHSSLIAFGYQVPMADLFGVAGRELLSELGFPEPWRSHVQASLELIDELERRIDAIERWLRRSGADHRYIPRLMTAPGIGWITGFTIASEIGDIGRFSSPVKLTGYTGLCPRVKQSGDMDQRGSLSKRGPRYLRWGLMEAAIAASSHPLYKERYQRTKRRLGRQRGAKVAQIELARKLTEAIWYMLTRNQPFQPFAPAGAIFALTA

SEQ ID NO: 306271 - protein, 339 aa, unidentified
MQVATIGLDIAKNIFQVHGITKDGTVAFNRSLRRAQLLAFFGRLEPCLVGMEACGSSHHWARALSELGHDVKLIAPIYVKPYVKRGKSDAADAEAICEAVARPTMRFVEIKSPEQQAILSLHRARDLIVRQRTQTINMLRGLLAEFGIVFAQGVGHGIRFAKRVIAGDMPELPHAACDVVTDLSEQLLTLHARVNWYGRRMTAVAKLEPRIALLQTIPGIGPITASAIVATVGSGEQFRSGRDLSAWLGLTPLNKSTGGKERLGRISKMGDRYIRRLMVVGMTSRIKQIKNAPERFDPWFADILQRKPAKLAAIAMANKTARIIWAVLSRNEPYEVRIV

SEQ ID NO: 306272 - protein, 358 aa, unidentified
MDRELYIGVDVSKKTLDLAYYDGETIDWKNAHIKVSNDDVGFKKIDSWVAKVGKDFDTFLFCMEYTGLYNQNFRLWLESKEYIYGMVEPRKMHHFEPDLDDDQRSLDRIKTDELDSFRIAIYCEQNHKKILRNPSKLPSPVYFKLKRLLVERKQNTKQSTLYKQQLHDICAYDTDLSVERKKLLLTNMQENQKAIDKEIDSYMNEDASISKNYDLLTSIPGIGRIIALETIVLTENFTAISNPRKYACYIGIAPFKKESGTSVRKRTAVSKKGFSEAKSDLSIAALSAITYNPAIRGYWIRKKKEKCGGIVLNAIKFKLVLRMFAVIKRGTPYVETDAYKSREYSKSELKLFPDQNYH

SEQ ID NO: 306273 - protein, 401 aa, unidentified
MNAVGIDVSKNKSTIAILRPFGETVAKPFDVKHTSSDITYLISQLKSLNGDTRIVMEHTGRYYEPMAQWLSDAGLFVSAINPKLIKDFGNNTLRKVKTDKADAIKIARYTLDNWCELKPYNNTDELRRQLKNMNRQFDFYMKQKTAMKNNLIALLDETFPGINTFFDSPARNDGSQKWVDFVTIFWHVDCVRRHSISSFSERYQSWCKKKKYNFQSQKPNDIYEFSHDLIATLSKDNVTKLLIQQAVDQLNIASKNVESLRLLMNQTAAKLPEYPIVLDMAGVGTTLGPQLIAEIGDLSRFSHKGALTAYAGVDPGANQSGDYEQQSVRTSKRGAPQLRKTLFLIMDSLMKLAPPDDPVYGFMMKKRAQGKDYYVYMTAGANKFLRIYYGRVNEYLSSLTS

SEQ ID NO: 306274 - protein, 357 aa, unidentified
MSKSSEDLSSVTRIGLDLAKNVFQVQAIDANGAVVVARSVRRGQVLNFFASLPRCVVAMEACSSAHHWGRALLELGFAVRLIPAAHVKPYVRRNKNDAADAAAICEAVGRPGQRFVPVRSLENQAQLMRHRTRELLGGNRTRMLNALRGHMQEIGVVAAQGAQNAYALKRLAKDGFDEAGEILVPDCVREALAPLIHQIDAIDAEIEAIDKTIATQIKTDDRARRLMTIPGVGPVTASAILATVQDIGAFASGREFAAFLGLTPRQSSSGGKERLGRITKMGDRYLRKLLVVGACAALIHRKGHHDALRNWASSMLERKTVKYKFKLTAVALANKVARIVFALLTRGGEYDERPIAA

SEQ ID NO: 306275 - protein, 348 aa, unidentified
MENPTTIAVDLSKNVFEIAVERQGRICQRKRLNRRQMVEFFSQCPSATVLMEACGSSHYWGRVLQRLGHDVRLLPPQHVKPYVLGNKTDRRDVEAILSARHRESIVPVPVKSIEQQSVVFLHRLRATWMKTRTSRLNALRGILRELGVTIPEGASRVLPAVSAALSDPSAPVPEVLHSVLMSAMAEVRELDERIEGVKRQLEAVAGTVPLVERLETIPGVGLLNATALAAMVGEFSRFPSGRRFASSLGLTPKEHSSGMRRRLGAISKRGDTYLRTLLIGGARSVLLSAHRTKTPHRLQEWALNVERRRGRNRASVAVANKLARIVWAVATRGVPFHPIPLAPQEVPV

SEQ ID NO: 306276 - protein, 384 aa, unidentified
MTATELTKYIPRAYDIFVGVDVDKKKLAITYTDHGSLHRSLSMPNKASQLLNYTRKHFAGQRVAFVYEAGPTGFGLYDELTAAQQLCLVVSPSTVPSAPRNKVKTNRLDSKKLSEGLRGGQLRGIHVPPPIYRELRHLVQLRDTQVAQLTASKLRIKSLLLYEGVPFPAANGKWSARVLRQLQQVPCNPSVRFKLDQLIDTLGFHYLAAAKTQKQIRQLCQSDPELHHCISYLVSLPGVGIITATHALARLGDWRQISNVRQIAGFLGLVSSEDSTGEKENRGPITRTGDSRLRNKLIQCAWTAIRQDPELRAFYRSIYERQPKKVAARKAIVAVARKLTTRMYAVLKEQRPYIIRPDSSIAPLTAEETAGLRDRLDGAQNDEP

SEQ ID NO: 306277 - protein, 424 aa, unidentified
MSKKKSRVAGLEALYARVCGLDVHKKVIVACVRILDAKDGTVQSTLRQFGAMTADLKDLRGWLGEFKVTHVAMESTGIYWQPVFNLLEGHFKTWVVNAQHIKKVPGRKTDVKDAEWIAQLLQCGLLRPSFVPERQQRELRDLTRQQTKLVQQRNSVDNRIQKVLETANIKLGSVASDVMGVSGRKMIEALIGGEKDVTVLAELAQRKLRGKIPELQRALEGELTEHHRFLLSRLLGQYDFLEKEITGVSERLGAVAPPSFRAAVEQLDAIAGVGERGGRALLAETGIDMSRFPSHKHLASWAGQCPGNHESAGKRRSGKTPPANRHLDAVLTEMAHAAVRTKNSYFKAQYHHLAGRRGKKRAIGAVKHSLLVTVYFMLRDNKPYTDLGVDYFDKLNPQQRIRYHVRKLQQLGQEVELSPMAAAA

SEQ ID NO: 306278 - protein, 354 aa, unidentified
MIIIGVDFHPAYQEIAAVNTDTGEYQEKRLAQPQEAEEFYGSLAWVGQAVGVGMEASGQAQWFERLLEGLRWELWRGDAAVIRAKRGRKQKTDREDARHILKLLLKDAFPRIWVASWENRDLRQLLWHRHRMVQARTRVMNQLQAVALKEGLHCKKRLWRASGRQQLECLQLVPWSSRRRGELLELLDRLNPTIAELSQAVEREAEKCPEAQRLMTHPGVGALTALAFVLIIGNAERFGCGKQVASYLSLVPLEKSSGNRRRLGHITKPGSSLVRFLLVEAAQVTVCSVPEWRSKYHHLVLRRGRKTAKVAMARKLAVRLYWMWRKGWDYEQWKKFGSYVGQPGHRDGAQSITE

SEQ ID NO: 306279 - protein, 362 aa, unidentified
MEVAGNAAGLDLGKKTYEMCLIGPNGKVTRTGGKTDFEGLDNLCKKLNKDDVVAIEACNLAFRIERIIRNKVGCRVIILNPGRLAIIFMSTRKTDKEDSMKLAKYLRSHDENEMPIVTPPSDEEWARRKLLSEYRSLKSLRTKEINRLHAIFEHNGYTQFKRKDMCVPKNRDNILPLLKGYEKEEAERLVERLILIEKQLELLNQKINEETKSDEKVQRLMTVPGVGPITALSYVAYIGDVNRFENAHQVSNFIGFVPKVDRSCTINRLGHITKQGNPILRSLLVQAAWSATRSKSGGALKDKYNYMAVTRGIGKGKSIVTVARKMGELLYTLLKNNQVYEPRISITPDAYISKLAEEALIS

SEQ ID NO: 306280 - protein, 339 aa, unidentified
MNSVAVGVDIAKTVFQVHYIDRESGEIVNKPIRRAKFLEHFANRPACQIGMEACGGAHHWARQLTKMGHQVKLMPAEFVKAFNIRNKNDAADARAIWLAVQQPGKSVAVKTEMQQAMLSLHRMREQLVKFRTMQINSLRGLLTEYGEVMGKGRAALDKAMPEVLGRVAERLPAVLIDTLREQWSGLTRLDEQVAEIERRMREWVKEDQAVKAISEIPGVGLLTATAAVAMMGDAKAFRSGREFAAWAGLVPKQTGSGGKVDLHGISKRGDSYLRVLLIHGARSVLTHAKEPGPWVEQLRKRRPFNVAVVAQANKTARMIWAILAHDRPYRKDYVSVKPA

SEQ ID NO: 306281 - protein, 329 aa, unidentified
MSEHSQGRESVMVRRPNAGVDVSKETLDVSVGGHAERFGNDAQGMESLAALLRRQDADVVVLEATGGYEAAAAAALQAAGLTVAVVNPRQARDFAKAMGVLAKTDKVDAKVLAAFADVIAQHEKRGSFLRAVPDEQRLRLAALVSRRRQLLEMRVAEGNRLALAHKGTRKSMAAVIKTLDKQISEFDRDIDNHIREHFRDLTKVLSSAKGVGTVTATTLAAHLPELGQLDRRAIAALVGVAPLACDSGKRVGHRHVWAGRAPVRAALYMAALTASRYNPVIRTFYQRLLAAGKPKKVALVACMRKLLTILNAMVRDGTQWKDALHCVSP

SEQ ID NO: 306282 - protein, 416 aa, unidentified
MNAVGIDVSSRKSTVAVLRPLGEVVCLPFDVTHDIAGLASLAEKLKAIDGETRVVMEHTGRYYEAVAKALHEAGFFVCAVNPLLIKEYGANSLRRVKTDKADAIKIARYALDNWADLRDFTPMDAIRYDLKTLNRQFQLASKQRTASANNLIALLEQSFPGIRKCFDSPVRSDGTQKWVDFAHSFWHVDCVRKQPFPAFCERYRKWCKLHAYFFKLRNAEKVYALAKSAVVLTPKSKVVKVLVQEAANQLISISRSVEVYRAEMDRLAAMLPEYPVVMAMYGVGKSYGPQLMAEIGDVRRFERKQALVAFAGIDPMPNQSGDKNVRSNKSSKRGSPYLRKTLFNVIRTYLQCAPQDEPVFQFLNRKRAEGKPFYVYMLAAANKFLRRYYARLRDYFASLDTLQPVAPIPTILKATL

SEQ ID NO: 306283 - protein, 435 aa, unidentified
MSNSIKYDLFISVGIDVGADFSFMSIALPNQTFVGKPFKIIHSDFNSLSMAVSKIKEAEEMYSLESRIFLESTGIYHYPLFCYLSDKGFLVSIINPIISKNSTNINIRKVHNDKFDSKKLALIGLKPDLKVSIMPSVLALDLRNLSREYYDLVDNRSAYINKLQGELRIAFPQYLKIFSKVTVNTSLTLLEKFTSPDGFLEASKDQIIASIRSTARFSITYAEKKYKAIIQAAKAAKTFSYSVNSNFKRILLYIRFIRQYNDEIEAILSDMRELVESNEDTDFVKQIRLIESIKGAGFLSAVTLMCEIGDFSAFKSPKQLFAYFGLDPAVKQSGNFKGTDVNISKRGSRIARRVIHTIALVSIALNRNGTANNPVLREYYLKKCQSKPKMVALGAIMHKVCNIVFAILRDEKEFKIITPEEHQANYLKAKYGIAA

SEQ ID NO: 306284 - protein, 355 aa, unidentified
MNSIQYVGLDVHQSTVSVAVLDDNGKLAMQCVLATEARAIVDFFRGLRGTLCVTLEEGTHAAWLYDLLVRRVAKLMICNPRKNALLKAGNKSDAIDARKLAELLRAGLLSPVYQGQRSTAAVKQLGRSYAALTEDTTRTMGRLKALYRSQAIACAGQKPYSLRHRAEYLSQLSEPGLQRRAQRLYQQLDLLQQLRREARRDLLLECRKHRESQLLRSIPWLGPIRVALLLARVQTPHRFRSKRQFWAYCGLALETRSSADYQMVNGQLQRRSKPAFIRGLNLNHNHDLKNLFKSAATTASSSGGPFGSFYKNLLLKGMKPELARLTLARKIAAITLHIWKKGEPFDAEYLKLHAA

SEQ ID NO: 306285 - protein, 446 aa, unidentified
MSDRTGLSRGDRNRNVRLARLRQLLPPENAIVGIDLADDKQAAVVTDHDSRVLAWRRVTARAWELGELLDWALGKAIAAGFGSATVACEPTGHRWRVLDQLAAERGLALVCVQPLLVYRARESEDLTRDKSDPKDAVIIARLAAGLHCYEPERADAVWARLRHLGARRLQLTTDATGQVNQIRDLLECAWPAVLAASGKPFRSATWRAAVAVTLDRSAGDLARVRRLGPARFEAAVRRELPRWGATRPCLRIVRAVFAALADSAGVIAHRPGALERAGLAMADWHDTRKRLADTETRMAAVLDDLGLTELVTSITGLTPVGAAAILAETGDPARFATPRSLVKHAGLCPRDNASGAFQGKTPISGRGRPGLRVAAWRAVWAALPNNPVLAAKFTRLTTRDDNRLARQQARTACAAALLRWIHVVITQQVTWDPAIAAGGAPLQQAA

SEQ ID NO: 306286 - protein, 296 aa, unidentified
MKVENNQSGIKKLIARIKHYQQKGKEVHACCEYTGNYYLQAAYALYHAGIKISVVNPLAIKLYAEYRLRRTKTDKQDAKLIADYCQRENPSLWQPLSISRNTLKCLNRRVEQLIVLLNMETNRRKVADWTTQGSLDRVIELLQSEIEQCRKEMQSLIEQDQELIRQHELLQTIDGVGQITATWLLSVLVDIDKFPNSRKLISYLGLSPMVKDSGTSVKMTKVSKMGDKFVRKALYIPARVVCLRSKFWRPWFEQKIKQGKHPKQVYILMMCKIVKYAYAVLKSGQPFDQERHRKVA

SEQ ID NO: 306287 - protein, 364 aa, unidentified
MKKSSKTQRGATVGESRPTQVVGLDLGDRHSHYCMLTGTGEAVEEGRIQTTAAAMEKHFASESRMRIALEAGTHSPWVSRLLKSYGHQVIVANPRKIPTLTKSESKNDRNDAEQLARMAAFDPKLLHPIEHRSPERQQDLNLIHTRSVLVRARTMLINSARGLVKSAGQRLPACSSEAFPEKAPAAVPPALKAACTPLLEQITQMNQTITAMDKQIDQLDKKYPEITILRTVPGVGPVVAACYVLTLDSPQAMETNRQAGAYLGLRPRQQKSGDSDPQCNITRMGNTYLRSLLVQSAQYILGRCGPDSELRRWGLKLAASGGKRGKKRAVVAVARKLAVVLLSMWRNRKKFEPFPQSVAQLTTA

SEQ ID NO: 306288 - protein, 401 aa, unidentified
MESPIVSIDVSNGNSHYMCFIKNNKRFGKVKKIDHDIEGFKRLLEDIQKLEAETNEKVCAVFEATGVYTKPLERFLSKNSIKTYIINPLESARKRKEEIHNKKTDKLDPISISKVYYDKEEMMELKKKDETHNWLRKKNRLYEDQLNHLIKYKVTFQNQLSICFPGYLDLFKDGYSDIPMTILKKYPHPDLLKNKKAETVARYLEKNTCHTHKVSLEYALKIIEFAKKTYPGCEKDDVEVEIFKILLDKVIETQRECEKTLNEMITVASTLEEYRYISSIDGIGPNLAARIIAEIGDIEEFKSREALVAYAGLDPHIYQSGDQDGKHLKISKKGNKYLRCLLFLAVGCSIRGAKDNPVNRFYQKKKQQSNPLNSKAAKTACTAKLLKIIYGICKNKTTYER

SEQ ID NO: 306289 - protein, 351 aa, unidentified
MSHKSTPSTSSTIGIDIGKNSFHLVGLDQRGAIVLQQKVSRAQLERRLVNVPNCLIGMEACSGAHHIGRQLAALGHDVRLIPAQYVKPFLKGHKNDYRDAEAIAEAVQRPTMRFVAIKTPEQMDLLALHRVRSRLVSQRTGVINQIRGFLIERGITVRQGVVPLRKALPDILSSQTGPLSPRMIGLLTDLAQDWRRLDERIASVSAEIEALAEQDNSCQRLMTVPGVGPIISSAVVAAIGNGVGFKQGRDFAAWLGLVPKQESTGDRTILGKISKRGNKYLRTLFVQAAHVVLVRRPSAAMRGLWPWIEQASKRLHRNMLAIALANKLARIAWAVLARGHDYQPRIAPHAV

SEQ ID NO: 306290 - protein, 401 aa, unidentified
MSLYVGIDIGKFFHIACFLDEGGTQLDSLKFDNTYQGFTKLEKLIEKSSTPDDGLILGMEATGHYWFPLYEFLTQKEYQVKVFNPLKVNRFRDFYIQPTKTDPKDAFVIASILRYGKVKPTSLAPVEVQRLQRLIRYRKSLCDRVTQVKNKIRCFLDEVFPEYQSMHIFSDLFGQASRALLKIAPTPAKILSLPVEEWIFYLERHSKLGWERAFEKAHLIYECARLSIGSKIVAEPLEECIKDLIYELEHLTDRIHFFTQEIEDVLSSTPGAILTSIPGVGVVTAATIMSGIGDIGQFKSADQLVCYCGLIPTSHSSGTFTSTRNRMAKRGQTSLAHVFYQIALVSLRCNLNLRKYYLKKLSEGKPKKVAVVAVARKLIRLVYSMLKNDEPYDDTFGSKSA

SEQ ID NO: 306291 - protein, 351 aa, unidentified
MDRYIGLDAHASSCTVAVLGPSGRKLQCQVLETNAKALINFLETIPKNRRLIFEEGTHSNWLYEVLAPHVQETVVVAVRQSRGPKDDERDAFGLAEDLRIGNVKVKVYKKQGKFSTLSHLARAHGTLVVDTVRCQNRIKSLLRSRGIATGGRQVYSVNGRSQCLSQLPNQACGQANFLYEQYDALSKIRKQAEKQMLVEARKHPVYKVIKTCPGMGKIRTAQIMPIVVTPYRFANKRQFWAYCGLGIVMRSSSDWVRTQNGEWIKAPIQKTRGLNRNFNRSLKHVFKGAATTVIGRANKDDPLYRHYQQLLDGGTKPNLAKLTISRQIASIVLSVWRSQEVYDPKKLSPKT

SEQ ID NO: 306292 - protein, 394 aa, unidentified
MILIGIDIAKNQHTFSIIDKETGEILSNPSVFNNNHEGFLLLIKKLSSYAKSNLLIGMEDTGHYHFALLKYLLDNRYTVALINPTTTDLTRKLQGGITKNDPLDSLTICDVIGSNQRKKPYRITKVNRFDLYEQKQLTRHHHNLKEELNIYKNRLQKCIDIVFPEFNSLFCSKYGIVYMSILKTFSSAKKIANSDIRTIRKCFEYNGRGKRITLSAEQLKTAAKTSIGIPSVAEEIQIRHLVCQIEMIEEQLSEIDKKIEEFSLQNNSPILSIPGISHFSGTSILAELGDICNYTKASQIIKFAGVAPYHYESSQFTAQHTAITKKGSRYLRKTLYQIIFPVINNNKVFTAYYNKKLAEGKGHRCAQGHCIRKLLRIIYHLLSTGQTFEPALLI

SEQ ID NO: 306293 - protein, 420 aa, unidentified
MKIIYRRCAGLDVPEKSVFVCARIMNGKSVDVIEATFPTFTEDLEELKAWLIRHRIKRVAMESTGVYWRPVWNILEQGGKLDLLLLNPQHVKALPGHKTDRVDAARIAELLQYGLVRASFVPPQEIRELRDLLRRRVHVQQDRNRVSNRIHRLLETANVKLSSVLGKVTTKTFHSILEGLATAEHIHPEALAILAMHKRVRPKQEQIRKALRGCRLTEHFRFLLTELLEELDRLTAKMAMLEQRIATRMEPHAELFARLSEIPGVDRIAAWTMIAEIGADMTRFPSAGHLASWCGLCPGNHASAGKRHSGHTGKGNRSIRRVLIQAAWAAARINRRRTFFTTLFYRISSRAGLKKAALAVAHRILNLAYCMIRDGSPYREQGADYFDRLHPERTKNKLVQRLDRLGFAVQITPKLSAKTG

SEQ ID NO: 306294 - protein, 414 aa, unidentified
MDVIVERCAGLDVHKKTVMACVRKPADGERVSVKREFSTFTYGLHQLRDWLASEGVTQVAMEATGVYWRPVWYVQEEMAGVELLLANAQHVKNLPGRKTDAKDAEWLGQLLECGLLQGSFVPTPVMQRLRNLTRYRNKLTQDRGREVQRIQKVLEDAGIKLDSVISDVLGKSSRQMLEALIAGERDPEALAELSKTRMRAKIPDLRLALVGRFGEHHALMARMHLDHIDHLDEMIDRLDQEVAREMAPFAEAAGRVVSVPGLGQRTTEGILAEIGTDMSRFPTAAHLASWAGMCPGNHESAGKSRSGRHRKGNAALQALLCEAAWAASHTKNTYLAAQYQRFLRRFGKKGKNKAIFALAHTILVIVWNILSKGGTYEELGYDYFERRIDTEEKKRRLIRQLESLGLLVTVEPAA

SEQ ID NO: 306295 - protein, 430 aa, unidentified
MSSTESTNQNPVAAFIGIDWADQKHAIVLRAAASTASLEHRSIGAEPDALAEWVLEVRERFAGQGRILVCLEQSRGALIHFLMGYECFELYPINPKQLASYREAFRPSGAKDDPIDAELLYQFVSLHHRQLRPWHPDDGLTRKLALLCQKRRQAVDARTTLSNQLKSELKQYYPLALAVLDNDLTTTLAADFLLQWPNFESLKKTAPHKLRKFFYGHQCRSEQKLQARLERIAAAQPLTRDSAIIEAGTLTVQMLAQQLKALVPYIARYEKEIAQLFEIHPDSSLFNNLPGAGPTLGPRLLVAFGTDRERFHSPLEAVTFFGVAPVTEQSGKSRWIHFRWACPKFLRQSFHEFAGQSIRFCDWAALYYQQQRARGKGHHAAVRALAYKWIRILFRCWKTHQPYDPQLYLTTLLQRGSPYSSPVKNSSPKT

SEQ ID NO: 306296 - protein, 354 aa, unidentified
MCKNRVKNWSRQLLFVGIDLHKNKWVVTVRTEAVTLKTFVTSPDKHELLKALRRQWPGAMMRAVYEAGCFGYHLAEFLCDNGIETIIVAPHTVPVKRGNFVKTDKIDSQKLALELSKGCLVGIYRPTREALQERSLARKRAQMMKRRIQIQSQLKSDLLFYGIKVRTTRSGHWSKEYVEQLKNLNIEDERYRKVFHMMIEEYEGLKKQVQAVTRLIVQLSGTDRYRKKVSILKTVPGISTLTAMILLLEIGDFGRFKSGNKFVSYLGLTPSEHSSGDFVRKGRLTGMGNGTLRCLMIEAAWVAIRKDPALLEKFNRIRVGKLKTTAIVAVAKSLAMRVRRILQYEEPYVIGVVS

SEQ ID NO: 306297 - protein, 392 aa, unidentified
MVVSVGVDVSKDKHDCFILSSEGEVLADVFTIPNNLDGFRFLLQRIRDCTHAQDKIKVGLEATGHYSYNLLAFLLDNGLPTYVLNPLRTNIYRKSLSLRKTKTDRVDARTIATMLLSDAGLKPYTDTAYHNEELKSLTRYRFDKVKERAKLKSSVSRLVCILFPELEKLVPSLHIASVYALLEEFPGAKQIAAAHLTRLKTLLETASKGHYKRDMALEIRDAARNSIGSWMPAKSLELQHTIRLIRELDDEIAEIEKQIQAIMDELNSPITTIPGIGFRMAAMIFAEVGDFTRFDSPDKLLAYAGMSPSTYQSGQLKNCYPHMEKRGSRYLRYALYNATKYVCHWDPTFAAYLAKKRAEGKHYNVALSHAAKKLVRLIFAMEKSRQPYCSAA

SEQ ID NO: 306298 - protein, 338 aa, unidentified
MEWTVAIGVDTHKDVHVAVAVDRFGAQLDSHEVETTETGYRSLLSWALELGLPAFAVEGCGSYGAGLVRCLELTGVAVWECERPRRRERRRGKSDLIDAALAARRLLAGEGLSLPRGGGRREELRVLLLERRSAVQARTAALNQLSSLLVTAPNRVRDRLRALSGERLAAAAVRLRPGTDLSCAAMRRLGRRVACLSEEIVETEQELAGLLAELAPDLLEECGVGPVSAAQLLVSSGNRERMTSEASFAALAGTSPIDASSGKQRRHRLKRGGDRQLNSALHVIALARIRHHGETAAYYQRLLARGRTAREARRCVKRALARHFYRRLREISTIALTT

SEQ ID NO: 306299 - protein, 474 aa, unidentified
MLLSSMEEPPVKNKRRRGQPRLSVLERINPNAAGIDCGSSEHYVAVPPDRDPTPVQSFRTFTSDLLRLADWLTTCGITSVAMEATGVYWIPIYEILEARGFEVHLVNARHVKNVPGRKSDVSDCEWLRELNIVGLLRGSFRPSDAIVALRAYLRHRQTLLETAGIHIQRMQKALLQMNLQLPVVVSDITGVTGLRILRDVVAGQRDPHRLAEHRDHRCHASTADIVAALTGNYRPEHLFVLQQNLELFDTCQAQLAACDRAIEAHVQTLIAPLAMPPTALPGPRVTRTPRARDNAPRFDIRTSLHHLTGGVDLSQIDGIAPYTALRLLSEIGTDMSRWATEKHFTSWLTLAPHNKISGGRLLSSRTQPSANRAAAIFRMAAMSLGRTQTALGAFYRRLAARIGKPQAISATARKLAILVYRALKGELVYQDPGADAYDSQQRTQALRRLRQRAASLGFALVNRQTGKLLSAGIS

SEQ ID NO: 306300 - protein, 338 aa, unidentified
MKLYAGIDLHSNNHVIVISDEEGKEMFRKRVSNDLENTLRTLAPFQSQIEGVAVESTYNWYWLVDGLMDHGYRLHLVNTAAVRQYEGLKYADDNSDAYWLANMLRLGILPEGYIFPREDRAVRDLSRKRCQLVQMCTANILSIQNIAARNLGYKLSANRIKALLPEDVERIFHQPEVALAVDANRMVVRSLSEQIDRLEKAMLAQARKRPEYRHLLTAPGIGKVLALTILLETGDIGRFPGPGHYASYCRCVGSARISNGKSKGKGNTKNGNKYLAWAYIEAAHFATRFNDRIKGYYQRKLHDTHPVVARKTVAHKMARACFYMMRDRVDFDINKAFA

SEQ ID NO: 306301 - protein, 408 aa, unidentified
MRVIGMDIHRAFAEVALLEAGKLTRLGRVDMRRALLQAFAEQLRKDDEVVIEATGNAAAVAEVIGPHVKRVVIANPKQVRIIAHAKIKTDKIDAAVLAQLYASGFLPEVWIADPCTQALRRQVTRRNQIVRQRSRLKNIIQSILHAHLIPPCPAADLFNRKGRAWLAMQPLPEDERLAIERHVREIDRLGEDLQGIERDLARHALACDDVRRLMTIPGVDMVVAIALVAAIGNITRFASPQQLVSYLGLHPSVRQSGPGPAQHGRITKQGRGHARGMLVEAAWAAVRAPGPLHAFFLRLRARRGQHIAAVATARKLAVVVWHLLRKQESYAWARPALHARKLRDLELKAGHARRRGQRGTAHAYNLAPVRKEERRWVEQAEKAYERFVTGWQPRGPKAHPGAAKEERQ

SEQ ID NO: 306302 - protein, 410 aa, unidentified
MQVVYERCCGLDVHKDTVAACIAITGGGRVHRDKRVFGTTTKELLDLSDWLAEHSITHVGMESTGVYWKPIWNILEAQFDITLVNAQHFKSVPGRKTDLKDGEWLSDLLRHGLLRKSFVPDKPIRELRDLTRNRAMLAKERARLSCRIQKVLEDANIKLASVASDVLGASGRAMLKAIVRGESDPAILADLAQKRLRAKLPELRSALTGCIDDHHRFLLRQWLELLEVIEGKIAEFDQQIELKMIPYKEAVTTWMAIPGIDRVAACCLVAEIGANMDQFPSARNLSSWAGVCPGNNESAGKKRSGKTRRGGVWLRRVLCEAAWAASHCKKSYFHAQYQRLAGKRGKKRALIAVAHSILGVAYVLLKEHREYQDLGADYFERANRESVTKYHVKKLQKLGYDVSLAVTTPA

SEQ ID NO: 306303 - protein, 318 aa, unidentified
MEPQVSFNQVVSRGCGIDVHQKVVVATISGEGLKKETREFGTFTRSLTELKDWLLENGVTHVAMESTGVYWKPVYHVLEPTLIKIWIVNARHIKYVPGHKTDKQDSAWICKLLLAGLLKPSYIPPREQRELRDLTRYRMKLIQNVASEKNRIIRVLEDCNIKLSSVVSDTQGVVATKLINKLCDGQAITMADIEEVYHKRLEVSKEDLYEACQGLMDKHHIYFLEMIRQNIASAEVSIESLNARIKDMLSVYDNVLENLKAIPGLSKKTVEDLVAEIGLDMSVFPTEKHLASWAGMCPGNNESAGKKKADAPTMATNT

SEQ ID NO: 306304 - protein, 354 aa, unidentified
MIIIGCDFHTRYQQIAMAREETGEVLVERRLDHESGEAHAFYRSLQSSQEPVRVGIEATGPIHWFERLLAELGHELWIGDSAKIRASEVRKQKTDERDARLILDLLLAKRFPKIWVPTSAERDLRQLLWHRHKLVCLRTMLGNQLHFLAMSQGLCRKKKLFTKKGRAELAGLALGPWTRRRREELLKLLDALDPAIAELDRAVLEEAQRRDDAVLLMTHPGIGPVTSLAFVLAIGPVTRFSRSRKIASYLGLNPSEESSGQRRRLGAISKQGNTMVRWLLIETVHHAVRQDPELRQDYQRLKFRRGHAVAKVAIARKLAVRMYWMLRSGAAYAQLVRRQGSPGATLVDASPSLG

SEQ ID NO: 306305 - protein, 343 aa, unidentified
METFVGLDVSLGETSVCILDKDGTRIFEGKVASEPAPIARLIRKRAPGVVRVGLESGPTSVWLTHALTAEGLPVVCLDARHAQAVLSVQINKSDRGDARGLAEMIRVGWFKAVQVKSLNAHERKALLIARHQLVDMRVRIDNQLRGILKTFGLVIGKCGCGQIGQRAQELSKGQPGIDGVVASMVAVRDSLLEQIIVCDRAIRRLAKKDDTARRLMTVPGVGPVVALAYISVIDDPKRFAHARDVGAYLGLTPKRYQSGEVDLAGRISKCGDGFARTCLYEAASVLLTRVERWSPLKAWGVRLMKRIGATKAKVAVARKLAVILHCIWTDGTEFWWTKEAATA

SEQ ID NO: 306306 - protein, 422 aa, unidentified
MSYCPVAGIDVSKRFSDMCILSPDNKIFAQEKIYHDETSINRANALLQKAERLFFSKPVIVMESTSHYHLILFQFFSEHGYDVIVVNPLQSNSMKDFSIRKRKTDRVDAFKLAMMYRTKTLRPSQIPQTATRALRQLCRHRAELLNDVSSYKNRLTALLDQTFPGYDKVFSDVGGVTSCAVLVRFPTLTILLVEEESELVEVIAAASKSSYSFAKKKAGLLISAAQKAQTLGIHSCADETLIVCTIQMLRTLSESVLQIETAIDNLLAQIKEMRNNVSLLQSIPGVGSHSAALLLGEIGDISLFKKPKQLAAYFGLDPTERQSGSFRGTKNKLSKRGFPYARAALHMGVVNSICKRGKDSAANPVLLSYYEKKCKNKPAKVAQAASMHKLVFIVFAVLRDQMPFELKTPEQHAVEQGFVKAA

SEQ ID NO: 306307 - protein, 411 aa, unidentified
MQEATQHDAVDVFVGVDVDVGVDVGKGQHHAVALDRNGKRLYNKALPNDEVKLRALIAELKTHRRLLFVVDQPSTIGALPVAVARAEGVLVAYLPGLAMRRIADLHAGEAKTDARDAAIIAEAARSMPHTLRSLRLADEQLAELTMLRGFDDDLAAQVTQTSNRIRGLLTQIHPALERVLGPRLDHPAVLDLLERYPSPSALAAANEKTLANRLTKLAPRLGKNWAAEIVQVLNEQAVIVPGTQAAAIVMPRLAQQLAALRKQRDEIAAEVERLVLAHPLWPVLTSMPGVGVRTAARRLTEAAPKAFATAAHLAAYVGLAPVTRRSGSSIRGEHPSRRGNKVLKRALFLSAFAALRDPVSRAYYSRKIQQGKRHNQALIALARRRCDVLFAMLRDGTIYPTIYPPKSAPDA

SEQ ID NO: 306308 - protein, 354 aa, unidentified
MHFIGVDYHKRYSHMTVLDAEGRILKAGNVPNTAEAVGTFLAPYREGGRAAVEATRNWTVIYDLLEAELEDVQLAHPLKVRAIAEARIKTDRISSWTLAHLLRCDLLPTAYVRPKAARPAQLILRQRLFFVRVQTMVKNRIHVLVDRQPGVREAAGEFSDLFGAAGLAWLRSVELPAAERQLLDSELELLEVLRLRIAQSDALVKQLAHGDRRVEWVRTVPGLGAFFSVLVVQEIGDVHRFAGPEKLHAYTGLVPSVYASGGRVFYGRLTKQGNKWLRWALIEAVAPAVRSDPDLARYYERLRHRKGPNAAKVATARRLLTMVYRVLSQGRPYEVRHRPGKAIRSRARTALVPS

SEQ ID NO: 306309 - protein, 429 aa, unidentified
MPYRIAGIDVHKKMLAVVVSDVEIDNEYQFERRKFGSNPEQLRLLAAWLLEQEAEEVVMESTAQYWKPVWESLERYWKPICEKREGARRKSGKLHLAQALSNRGRRGRKRDFPDAERLVKRLVAQELTLSFVPDAQQRLWRTVTRKKYQLRCDRIRLQNQLESLLEEAHIKLSSLVSDLLGLSAQRMLKAIAEGETNPATLAALADKHLRATPEQLCDALGACTHLNPVYRRLLKMAFQELRLIDQQIGRLDREMASLLSAHQDAVQRLAEIPGLGVDSAQQIIAEVGPTAATFPSEKCLSSWVGACPGDDETAGVNYSHRSPKGNRHMRRLLNQAANAAARTKGSIFEIVYRRSVLRLGHNQAIGAIAHRQCRLIWLILHQGVRYEERGPAVTKRSKQLRTWKMIRELRRVGYRIEPPNPQPAQAQAG

SEQ ID NO: 306310 - protein, 344 aa, unidentified
MTKISTIGLDLAKNVFQLHGVDALGVVVLKKQLRRGALEKFFAQLPPCLVGIEACGSAHHWARVISGYGHEVRLMPPAYVKPYVKRNKNDGRDAEGICEAVTRPTMRFVAIKSIEQQATLAVHGTRALLVRQRTMAANALRAALSELGIVAAQGYKGLRELMVRLEEPSEDIPENMRCALLLLARHWQALDADERVLERQIAKAARGNHDAKRLMDVPSVGPIIASTVLAKVTDAKLFRSSRDFAAWIGLTGKDHGTGGKHRPGRISKQGDRMLRAMLISGASSHLRQQIARGVSDPWLRDLLARRPYKVVMVALAAKTARIIWAMLAKGEAYRDRASASAAAC

SEQ ID NO: 306311 - protein, 356 aa, unidentified
MKYVGIDVHKKYCQAAVLDDEGELLDQIRFLNKKEDIKEFAMKLTTFRDDVKAVVESTGNLWIQIHDILEKFGFEVFLSNPGKTRLIAEAKNKTDKIDAKILARLLRADMLFTCYVPGEELRNRREFLRARQDFVKNRTQVRNRIHSILDKHGLRFPGTPYSKKSIVWLKEQDLGDMDNAVVKGQLALLETLDEQIQVLEDKIAAMGMEDPQVKLLMTMPGIGYFAASMLVAEIGDINRFRSDKKISSWAGLAPRIHQSGGTTRIGRVGQGNKRVSGLLTQCAHNARQHDARFKRFYDRYSKRSGKGKALVAVAHEMMRIVYFMLRDNEPYRGQNVEMTTRKLKSMKYRASISLQT

SEQ ID NO: 306312 - protein, 354 aa, unidentified
MKTVIEPIVKCAAGLDVHQDSVTCTVLEEQGAGAPRRETRQYATFPRRLKELGRWLQERGVELAVLESTGIYWKSVYAALEEAGIQTCLVNARHVKQVAGRKTDVAGSEWLAELARCGLLKASLVPPRDLRELRLLTRYRRKMSGYLAGEKNRLQKVLEDAGMRLGCVVSGIDGVSAQRMIKALAAGEKDPAKMAALAAGSLRRKQADLVLALEGDLSDRHRLLLQRITNHIRWLEEQLQELDVQIVAAMAPYQEEWRLMQTIPGLDHLSAAMLLAEFGPDMGRFGSKERLSSWAGMCPGNHESAGKKSASAPRRATNISGNSCVKRPTVRQRRTASSRGSSRGSSSGGGPSEP

SEQ ID NO: 306313 - protein, 351 aa, unidentified
MPRATSSTNVIATIGIDIGKNTFHVIGLDDKGAIILRHKLSRGQVYARLANIPPCLIGMEACVGAHHLGRQLSALGHDTRLMPARYVRPYSKGQKNDFRDAEAIAEAVQRPTMKFVAIKTVEQLDLQGLHRIRERLVCQRTSVINQIRAFLLERGIAVRQGLRTLRTEMPIVLAKTDKLSQRMIHMIEDLCTDWRHLDKRIEAVSKEIETLSEQDDGAKRLMTVPGIGPIISTATVAAIGTGEVFSKGRDFGAWLGLVPKQMSTGGRTILGPISKRGNRYLRMLFVQAARAVLLRPQSWQKHGLKLWIEAAARRLNRFKLAIALANKIARIAWGVLHGGRNFEIRPMNQAA

SEQ ID NO: 306314 - protein, 377 aa, unidentified
MYRIIKIGMDVHSKNYTLCAMEPVIGEEDRIFANIQVTADYKNILMFIEQLKMKLGMSDEYDIQCGYEAGCLGYSLYNQLTSAGVKCVILAPTTMLSQQGKRVKTDARDALMIAQCLSYGGYHAVYIPTQEDDSVKEYLRMRDDHKEALKKIKQQINALCLRHGHHYEGTKWTIKHVAWLRKLELSPLYRETLDEYMASFDEQTAKIERFDQRIEELASQEQYQEKVKKLCCFLGIKSHTALSLIVETGDFSRFAKGNTYAAFLGLAPGEHSSGEKTNRTGISKAGNRHLRQLLIEAARGICKGAVGHKSKELRARQNGNTAEVIAYADRANTRMRSRYYKFIRHGKKKNVAVAATARELACFVWGMMTDNISYRMA

SEQ ID NO: 306315 - protein, 366 aa, unidentified
MVKSISNLSSVAVVGLDTAKNVFHVHCVDEGGFVVLAKALRRAQVLTFFASLPSCLVGLEACSSAFHWARGLIELGHRVKLIPPSYVKPYVRRGKNDAVDAAAISRRMRSIRPGEAVGRPSMRFVPVRSIDNQAQLMRHRARELLAGNRTRMLNALRGHLAEIGVVAAQGAQHAYELKRLLVDGADENGEVVVPDCVRQALAPLVRQIDAIDGEIATIDDEIKALVKADDTARRLMTIPGIGPITASAIVATVQDMGAFASGREFAAFLGLTPRQNASGGKERLGRITKMGDRYLRKLLVVGACATLSHRKGHRDALRVWADQLLARKEVRYKFKLAAVALANKVARIVFVLMTRGGEYNEMPVAA

SEQ ID NO: 306316 - protein, 379 aa, unidentified
MKKHSTVFIGLDTPKDSIAVAYATDSRTEPVTYLGSIGTQHYAIRKMVRQFESRHPGCQLQFVYEAGPCGYWLYRLLSSWGYPCFVVAPSLIPKKPGQQVKTDKRDCMQLAQLLRNGDIDPIYVPEPEDEAIRDLSRARETTMWDLKNAKSQLKAFLLRHDIRYTGSANWSAAHIRWLSELVMPTPAQNTVFREMLYTIVERHKRLERLDNELTYQVRRWRFYPLVKAVQALRGVQLLVATSVVAELGDLQRFDNPRKLMAYVGLTPSERSSGNRRRIGPLTCAGNKRARRMLIEAAHAYRYPAKTSRILQQRQEDLPKAIVEKAWDAQVRLCRRYRSLIQRGKHRNVVVAAIARELVGHIWAIAREVVIAKPDPRLML

SEQ ID NO: 306317 - protein, 412 aa, unidentified
MTRTYELLIGIDWATEAHQVCTLTPEGEVLDESTVPHNAQAIHGFFNRLLRRVGGRADRVAVAIEMPRGPLVETLLERGVHVYTLNPKQLDRFRDRHSVAGAKDDRRDAYVLGDALRTDRHKFRRVDLDHPLIIQIRELARADEDLRQEFNRLTNRLREQLYRCASHLLALSPAADEPWFWHVVERVAGPTPGRLTQSQAAKLLRRHRIRRLDAAQVVRTLGEQPLPIAPGAAEAAHAHITLLLPRLRIVHEQRKTCAKQLRALLEEYAGDDEAGGGPSDLAILVSLPGVGVGVAATLLAEAAPLVLHRNYAALRAFGGLAPVTKRSGKSTVVLMRYGCNTRLRNAFYHWARTSTQHDSTARTYYAALRARGHSHGRALRSVADRWLRILMAMLDSRSLYNPDHQRRVCAAA

SEQ ID NO: 306318 - protein, 356 aa, unidentified
MSEKLNSAIAVIGIDIGKNSFHLVGHDRRGAIVLRQKWSRGQVEVRLANLSPCLIGMEACVGAHHLSRKLQALGHDARLMPAKYVRPYSKGQKNDFRDAEAIAEAVQRPTMKFVATKTVEQLDLQALHRVRERLVGERTGIINQMRAFLLERGVAVRKGPRFLRVELPTILAKRSDVLSPRMLRMVEDLATDWRRLDGRIEGVSSEIAALVNQDAACKRLMTVPGIGPIIASAMVAAIGTGDVFSKGRDFGAWLGLVPKQISTGDRTILGSISKRGNRYLRVLFVQAARVVLGKLKPQDWERYGLRSWIEAAQRRLHRNVLAIALANKLARIAWAVLHKGRAFECVKTNATASRPA

SEQ ID NO: 306319 - protein, 350 aa, unidentified
MNATTVAVDLAKNVFELALADGRWKIIERARLTRAQFERWFDNRSVGLVVMEACGSAHHWARLIRSRGIEVRLLPAQYVRAYVKRNKTDRADAQALLEATRAGDIRPVAVKSIEQQGLQALHRTRSGWMSTRTRRINTLRGFCREFGLVVPEGAATGLAQIARYLADEHSGLPALLRPSMRLVLEEIRLMEARIGELERQLLQLAKASPACQVLQSVPGIGLLTSTAMVAAVADPGSFASGRRYSSFLGLTPREYSSGNSRYLGRISKRGDRYIRMLLTHGARSILRAATVARRAGRQIDRLKSWALAVQARTNHNKAACALANKLARIAWAVWVKHEAYRSEPAPNTPL

SEQ ID NO: 306320 - protein, 363 aa, unidentified
MVESTRVTVGLDVHARSIRLAAVRADELLEERTLAYDEQAVERLLRRWPGVRCCYEAGPTGFGLYRHLVERGIECAVVAPGLVPQRPGDRVKTDPRDARKLARLLAGGLLEPIHVPSPELEAVRDLVRAREDARLDRMRDRQRLSKFCLRHGRLLPTSAWTVIRRKWLGEQRFEHAAEQITFDTYLHAVDLVDRRIEMLERAIRETAEQGPWSELVARLRCLRGIDTLTALALVAEIGDFKRFRTAEEFMAFVGLVPSEHSSGERRRQGSITKVGNSHVRRLLVESAWHARRRPKVGYELARRQRGQDAAVIERAWRCQQRLYSRWQRMAGRGKPQQKIVVACARELAGFVWAIATDQPLRST

SEQ ID NO: 306321 - protein, 356 aa, unidentified
MLYLGIDQHARQITISLRDDSGDVLQARQVSTRPEKIQAFFAKLTQECVRDGESFIAVVEVCGFNDWLIRLLKDFRCHKVILIQPEKRQKRKTDRRDAAALSELLWVNRNRFLAGKPVRGLRQVDIATPTDQENRRLTTLRKEASQARTRIINKIKHMLRRHNLQWHLPTKTFPTQRAIVWLKQLVLPEIDCLEMNYLLVDLEQAEQRVQELEQVIVKRCGESEDAQLLRSMPGVSYFTATSLACRIGRVQRFPRARSLANYWGLTPGCRNSGEHSQRLGRITKAGSNIARWLLAQVAHQALRKDARLREWYKRIKRRRGSSIARVAVMRKLATVIWQMLSKRQTYAECRAIAVAC

SEQ ID NO: 306322 - protein, 471 aa, unidentified
MKRKGRRPGSPGAAKQRSRRTRSLQRINPNAAGVDCGSESHHVAVPADRDPEPVRRFRTFTTDLLRLADWLTDCQVKTVAMEATGVYWIPIYEILEERGFEVILVNAHHVKNVPGRKTDVVDCQWIQELHSFGLLRGSFRPSAEIATLRAYLRHREKMVQNAGDHVRRMQKALVQMNLQLHNVISDITGETGMHILRDIVAGVTDPRALASHRNIRCHATEQEIESSLTGNYRREHVFVLRQHLELYDAYQRRIGACDHEIESLLQQMTSKLDQPKTPLPPARCRRTKSDNAPRFEIRGLLHRLTGGADLTQIDAIGPYSALRLVSEIGTDMTRWRTEKHFTSWLTLAPKNKISGGRILSSKTQPSTNRAAVTLRMCAMCVGKTSTALGAYYRRLAYRVGKAKAITATARKIAILVYRVLRGDLDYTDPGAHAYEAQHRTRVLRNLRHRAQDLGFGLINLETGELLPGTVS

SEQ ID NO: 306323 - protein, 345 aa, unidentified
MLIIGCDFHPGLQQVAIFDKQTGEISGKRLQHPQEARAFYAGLAGRARVGMEACGYTQWFERLLDELGHELWLGDAAQIRASVVRRQKTDRRDAEHLLELLLEERFPRLWVPTAEQRDVRQLLLHRHHLVRSRTQVKNQLQALALNQGVQKKRQLWSKAGRAELEKLALPAYTAGRRDECLQRLDYLDGQIRQLSQKVVAEAEKGEAARLLMTHPGVGPQTALAFVLTIGEVERFPNAKCVASYVGLIPTEYSSGGKQRLGRISKQGSPLLRFLLVEAAQSAARYDASLKRVYVRLCMRRSRGQAKVAVARRLATRLYWMLRSGKNYAQLTASGAGKPVSSRGAA

SEQ ID NO: 306324 - protein, 374 aa, unidentified
MKKNNTMRQSSRQSRKGTKTCQGSITIGMDLGDKTSRCCAIEESGEVLFEQSVATTKKGMAELFGGMARCRIALEVGTHSPWVSRLLAGLGHEVIVANARQVKLISQSTRKDDKLDARTLARLARIDPELLRPIRHRSEEAQLDLLQIRVRSELVEARTSLVNAARGLAKALGERLPKCDAGHLGGEQLQSLPPAVAQALRPLLEEVEALTKKIHACDERIEQIAREQYPETELLQQISGVGTLIALTFVLTVADPGRFRKSRDVGCYVGLRPKRSDSGESQPQLGISKEGDLYLRKLLVQGAHYMLGWRGPDTDLRRWGLKLAGRGGKNAKKRAIVAVARKLAILLHRLWVTGEVYEPLRNSQAQAAAKKKVA

SEQ ID NO: 306325 - protein, 457 aa, unidentified
MSEAKRSRSPRELSPVHPAAAAIDIGATIHVAAVGLDRDTEPVRTFQTFTDDLHRLGDWFARCGIKTVVMESTGVYWIPIYEILEQRGFKVMVVNARDAKHVPGRKTDVSDAQWLQRLHEYGLLRASFRPQAEMAGLRAYLRQRERLLDYAAAHIQHMQKALTQMNLQLHHVVSDITGVTGMLIIRAIVAGERDPGILASYRDPRCHASVETVRQALVGNVREEHIFALTQALELYDVYQAKVVACDKQIEAILKRLQKGAPAPLKELPPVRQRTRQPNAPAFDAREALHAILGVDLTQIHGLGPYLALKLVGECGTNLTAWPSAKHFTSWLALAPHNKISGGKVLSSKTRRTSNRAASLLRLAAVTVGRTDTALGAFYRRLSARVGKAKAVTATARKIAVLFYNTLRHGMSYADPGAAYYEDRYRQRVLSNLQRRAKSLGFVLHPADQAVGQAGVS

SEQ ID NO: 306326 - protein, 412 aa, unidentified
MNIVYERCAGIDVHKRNVVVCAITPDVQGQRQKEQRTFSTMMPDLLRMRQWFQSLNMTHVAMESTGSFWKPIFNVLEGHMEVLVVNAQHLKAVPGRKTDLKDAEWIADLLQHGLLRPSFVPPAFQRELRELTRYRTSVIEERSRTINRLQKILEDTNIKLSAVASDLMGQSAREMLAALVAGEADPAVLAQLARGKMRAKHDLLVQALQGQFKSHHRFLISEQLAHIDTLDEEIERLSAEIAQRLRPYEAQLKRLETIPGIKRRLAEVILAEIGPDMQRFPSARHLASWAGMCPGNRESAGKRLSGKTRKGSPWLRTALVEAAHAATHCKESYLSAQYHRLVLRRGGKKATIAVGHTLLVIVYHVLADEKDYQELGGNFFDEQDRQAVQKRLVHRLEKLGYEVILAPNSPAA

SEQ ID NO: 306327 - protein, 341 aa, unidentified
MEQATTIGLDIAKHVFQLHGADGAGHVLFRKRITRVKLLSFLAAQTRCVVAMEACAGAHYWAREIAKLGHHVRLIAPAYVKPFIKRQKNDAADAEAICEAAQRPSMRFVPVKTEEQQANGIVFRARDLLVRQRTQCVNALRGHLMEYGYVFPKGITHVESLIALVEDLQSSLPDSVRVILKLLIDTFTALEAQIAVLDAEINQRSKSDPTARRLMTIPGVGPITSTAITALVPAAEGFPAGRDFAAWLGLTPLQKSTGGKQKLGAVSKRGERTIRRLLIIGASAVVQQASRRGAPKGSWLAQMLARKPKMLVTVALANKMARIIWALLVKGGTYRTPAAAA

SEQ ID NO: 306328 - protein, 341 aa, unidentified
MKNYIGMDFHLQHSSIAVMDKNGNITEETKLYHNKVTEIKEFFEKFPKNTDVAIEATRNWYWMIDLLESLNMHVRLVNPKKTRIIAESTIKTDKIDARILAHLTRCNFLPEAYIADKETRDVREMLRYYMHLVRVRASLKNRIHSLLAKNNLSYLNHGFTDLFGKLGREFLKTLNLSLVYRDEMDGYLEIIDTLTSKIVELKKDIKKIGSKHRYVPLLTTIPGIGDFGALVLAAEIGEIERFSNAKKLSSYAGLTSTTRQSAEKTWHGSINKDSNKYIRYILVEAVQKAIMRDRKLWEFFQRIKEKKGRGSAVMATARKISIAIYSMLRKNESYRTNEGLR

SEQ ID NO: 306329 - protein, 425 aa, unidentified
MGTVVIGMDPHKRSATIEVMAGDETVLGGGRHGTDAAGYRSMVAAVRQWPERTWAIEGCQGIGRHIARRLLADGEHVVDVPPKLSARTRVFSAGQGRKTDVTDAHSVALAGTRMSGLRVVTDDQQLAVLRILADRRRSLGEDHTRMISQLHQLLLDLIPGGAKKDLSAAQARKLLATVRPRDTAGRARRRVAAELVSDLERIYQRKKAADRELSELLRATGTTLTGLNGIGPSGAARLLIDVGDVTRFPARAHFASWNGTAPTGASSGDQVRHRLSRAGNRQINRVLHIMAVVQLRHRDSEGRAYYDRKVAAGKTPREAMRCLKRRLSDIVYHQMVLDARAAGTGPGGHAGAAAGSSAAGSHPGAGTSEKSLPGPASHDPTPPSPFFRLFPAPSIPRRTTAVVKRSLLDNGEDRRTLPKREQPPS

SEQ ID NO: 306330 - protein, 325 aa, unidentified
MYYCIGIDVSKATLNVHISKNNQDLQIENTLAAVKKLYAKLKKIYKKEIEELVFVYEPTGSYSEMLRKFCADKSIRCFIINPKQFSNYAKALGVEVKNDEVDARVLAQSIVLAKPHQIKVPVYDIDVEQIKELMSFYKFTTKQTAQLKGHLESLTSKDGDKFSIKELKKSIAASKEREKRIIEQVHQLIQSNAQYKKAYENITSIVGVGQIGGIALLHLFLKYPEANQRQITSLTGLNPVYRQSGSSLQSSHKISKSGSIFYRGALFMGVMTAIRYDENFKVFYDRLKANGKHTTQAQIAVMRKMILVAHSLYKHDTRYIYKDKN

SEQ ID NO: 306331 - protein, 411 aa, unidentified
MIEQVTVGVDVGCHRHRVAIAAPDGKFVEEFDIPADSEGFKYFFGRLDFYRKSFDVPVVVAMEGHGGYGRPLDNSVKRSGYTLLNVNNLKLCRFKEIFSSPAKTDAIDARKIALLARMQDVLSPSREVLQEVRDVPQEHQILKRLSRRRRQLVDEKVVVLNRMQADLQAVSPGLADIVEYKDGVAFLNLLTCCSNLEDLSRLDKKELLSIGGIGEAFAGRVIKWQKKAYFSREVAYVGPMIIEDAKRIIEIKRSINELEEKIEDILKSSKLAETIGSIPGFGAVCTAELVAEIGTMERFSSERSLALYLGMAPLDKSSGKCQGTRTPTQINKRGKAAMMTAVAHNIRKVEESKRYYQKKRDEGKSHNQAVRALGRHMIRVIWSMTKRNEVYQIREGENKTCSDETSAAIPA

SEQ ID NO: 306332 - protein, 457 aa, unidentified
MGSYYMGIDISKGYADFVIFDGQKNVVEPNFQLDDTFGSHCKLFEILNLFFERHPESVLYAAVESTGGYENNWLYTLSGFQGVLNIKSARLNPLGVRANSRASLRRVITDKISARDVAEYMIAHPEKVTYQQDDSMAGLRRQWGFVRLLVKQKTQILNQFESMLYNVNPELIAYCKSGVPSWLLKLLRQYPTAAKLAKARVSSIAKIPYVTAERAKELIEQAKNSVASATDEASGKLIAVMAEQITNMDETIRIQTQQMNRQCTIPEVALLKTIPGIGDDSAIGLMLEIQSINRFSSAKKLAAFFGLHPVFKASGDGTSGIHMSKQGRKEPRKILFMVALVSLNANPHIRKIYDEHTAKGMKKMAAIGLCMHKILRIIYGMLKNNQAYDSQIDEKNRENTKEKKNVHASKNLNRRYEATEQNAPISRRQSKKRKEWKQSQSDNSTMCGIGVSIPSVC

SEQ ID NO: 306333 - protein, 387 aa, unidentified
MEVRMVNTPSADSNNEPVACYVAIELSKSGWLVGFLTPLSDKTGRYQVKAGDAQALLDLIERVHTRVARQLNRPVEVMSCYEAGYDGFWLHRVLEAHGIHNHVLDPASLQVNRRARRAKTDRIDVDRMLRALIQYLRGEPEACSVVQVPRVEEEDAKRLHRERKRLVAERVQHVNRIKGLCAAQGIYNYAPLRPDRWSQLDKLRTGDGRSLPARLKSEIVRELKRLELVLEMIETVEVERDATIKDPRSRHLNADKIKMLARLRAIGPEFATSLTGEVFYRKFANRRKLGRYVGLDGSPFRSGSVERDQGISKAGNPVARSMMVELAWTWLRYQPDSALSIWFRERVGNLKGRPRRIAIVAMARKLLVALWRYLETGVIPTGAVLKA

SEQ ID NO: 306334 - protein, 417 aa, unidentified
MKKHNNSRKNSELTSKRAKSRGPVQRDTKEVLAELVGKLREKLDPKVGAASAGEKNQRGELRPNLDRLTVGVDLGDQWSHYCILGLEGETLAEGQLRTTQQGVAEFFRALNAARVAMEVGTHSAWVREVICSYGHEVLVANPRLMEGSKRRKRKNDRIDANKLARLGRVDPESLHPIEHRSAEVRQDLVMLRARDALVAARTELINATRGLVKSMGARLPKCSSPSFAQKVEEAVPAQVREALLPLVRMTAALSDCIHGYDEKIEKLASEKYGHTALLRQVKGVGPITALAYVLTLENPERFVKSRDVGPYLGLVPKQEDSGESQPQLGISKSGDTMLRKLLVGSAHYILGPFGPDTDLRRYGLRLCERGGKNAKKRAAVAVARKLAVLLHCLWVSGEVYEPLRQGMSATIAPAVAA

SEQ ID NO: 306335 - protein, 371 aa, unidentified
MKKQTKTTPSVVTTPTPAAATASGFTLGLDLGDRSHYVCVLDNTGQILHEGPLVNDRVALTLLLTQYPAATVALEAGTHSPWISRYLTGLGATVIVANPRKLHAISRHERKCDRRDAVMLARLARADVALLHPIEHGSAQAQHDLLGLKLRDSLVRTRVNLINTVRFTLKSLGHTVSNPSSEAFHKNIVTAVPADCLPVVKPVLAVLAVLTEKIKRLERDLVRRSKKDYPVTQRLQQIAGVGPLTALCFVLKIGEPNRFGRSRDVGPYLGLCPGRDQSGGTDKQLRISKCGDGLLRRLLVSAAHYILGPFGPACALRAYGQHLVGTSVREKKRAVVAVARKLAVLLVSLWKHGTDYEPRVPAVPVLVLTPA

SEQ ID NO: 306336 - protein, 369 aa, unidentified
MKIHKYVGLDVHKEKSTIGIAEGDRNGETRHYGEVSSDLVSTERALRKIRGEKGVLHVVYEAGPTGFVLYRHLTRLGIECTVVAPSKIPQAKGGRQKTNRRDAMQLARLHRAGEVTAIHVPDAVDESLRDLTRARSDASCDLKAAKQRLKSFLLRQGFHYQGKANWGEAHQRYLRELVLPLPALKSVMEEYLLAVTQATERLKRLEELIAAQVPQWRLYPAVKALMCFRGFDLVAAATLVSEINEVRRFAHPRGLMAYLGLVPKENSTGDDRKLGAITKAGNAQARWILIEAVQHAGKTPKVSAPLARRQEGQPENYRRIAWKTQVRLHKRYWHLTCRGVMAGKVKVALARELVGFVWDLLRQVPMPKT

SEQ ID NO: 306337 - protein, 416 aa, unidentified
MKEHIDYLSTLFVGIDIASRIHVISALDFNQDFFIKMKPFENTKEGAGIVEKMIADVLADNHQFKYVVIGMESTGFYGVHLANYLSTSELLAPFSVRVYCLNPKEVKNYKKSFNDIGKNDGIDSFVIADFARVGRIAIKPWRGSQYLALQRLTRHRMHITECITREKTYMLNNIYLKFSEYALLRNGEHPFSNKYGATAEAILTEFTTNEDIVNSSIEELVEFINSKSKGRIADPEETAKIVQAAARNSYRLDKCLYEPLTISIASSFNCISSFEKELKAIDKAILQTVQGLNPEEYTVLNSIPGIGKVYSAGILAEIGSIKAFQNANQLAKYCGIVWNDNDSGDFESEDSRMSKAGNRYLRYYIIEATGSVISHCPEYKAFYQKKYAETRNHQHKRALALTSRKFIRLLFGLLFK

SEQ ID NO: 306338 - protein, 408 aa, unidentified
MQVLYPRCAGLDVHKDMVMARVRCVSDPPHDQVRSFATTTTALLELADWLAEHRVTHVAMEATGVYWKPIWHLLEEHFELILANAQHIKNVPGRKTDVNDAAWIADLLAHGLIRSSFVPPTPIQELRDLTRTRKQLVREISQHSLRIQKVLEDANLKLGSVLSDVLGRSGRAILAALIAGETDPEKLADLAQGSARKKRAELLEALRGRIRVHHRELLRIHLNLVEALYQGLVDVDARVGKTLAPIQHSARLLTSLPGVSELTAQVMVAEIGVDMARFPSAAHLISWAGLCPKSDESAGKRRSTRVRKSGTWLKTALVTAAWAAVRVKNSYLQAQFLRLKARRGAKKAILAVAASMLTAAYHMLKDGVEYRDLGADHFSRRDRSKAIQRLIRRLNDLGCDVQLTPQAA

SEQ ID NO: 306339 - protein, 411 aa, unidentified
MENVFACCAGLDIHQKSVEACVRRLEPTGPLHQQTRHWGTMTRDLLAMADWMAAQGVTHVAMESTGVYWKPIYNILESRFTVLLVNARHLKQVPGRKSDVRDCQWIAQLLQHGLLKGSFVPPRAQRELRDLTRHRAQLVEEKTRTVNRLHKVLEDGNIKLASVATDILGVSGRAMLEALMEGQEDPVKLADLAQRQLRGKIPELEKALEGHLTEHHRFMLRLLWKELGQQEELIAELDRKIEEQTRPFANEIERLDAVPGVDRRVAEVALAEVGSDMKPFPTHSHVASWAGMCPGNEESAGKRRRQRLTPGNRWLKRSLVQAAWAASHTKHTYLASQYRRLAGRRGRKRALVAVGHSMLVIFYHMLKDRTTYKDLGGDFFDRLEPERLTRYYVKRLEDLGHKVTLESSVPA

SEQ ID NO: 306340 - protein, 311 aa, unidentified
MTDDTIGIDVSKATLDVHRLSDEKMTSFSNVTAGFKQLAEFCNETTVIRVVYEATGAYHKGLERALGAHLPLVKVNPLQARRFAQAQGVRAKTDAVDAKMLAVMGDAFGLGPMKPISETQHVLKKLRAFRSGLITDRTRILSRQKTQTLPITRRQSRTSLARIDKQIAEIGAEIGRLIQTDDTMAHSMKILRSIPGIGEVCAATILIEMPEIGDMDRKQVASLTGVAPMTRQSGQWRGKSFIQGGRKVVRNALYMPALVAMRFNPDLKAKYQAMINAGKPPKVALTALMRKLIELANALIKANRLWVNKWA

SEQ ID NO: 306341 - protein, 370 aa, unidentified
MRKNTLWVGLDTDKKHIDVAVAEALPDGEVRIWGRTANTPASVDRLVKKLGQGGRELTVCYEAGPCGYGLYRHLASKRGVKCLVVAPSMTPRRPGDRVKTNRRDALKLAKLLRAQELTEVWVPDAAHEALRDVVRARTTAVSSLMRCRQHISSFLLRQGIHYTGKPWTKKHRLWLGRLEFEHAAHRLLLVELLAALDHQQARRDRLTDHIRELVPGWSLAWLVEAVQALRGYDLLNAANVVSEIGDLRRFTSPRQLMGFVGLNVCEASSGDTVRRGHITKTGNKRARKALIEAAWTYSRPTTATGKPIAARLPVEVQQIADKARHRLSRRYRHLLAHGKLKQVAIAAIARESLGFLWAIAHAAAPTSARS

SEQ ID NO: 306342 - protein, 427 aa, unidentified
MTYRIAAIDVHKKMLAVVVADVAGEGEYQFERRKFGATPDQLHLLAQWLGQQEVEEAVMESTAQYWKPVWGALEQYWKPARQNRDGATKMSGTLHLCQAKSNRGRRGRKNDFADGERMIKRLVAQELVLSFVPDPEQRLWRTVTRRKHQLTRHKVRFHNQLESLLEQAHIKLSSLVSDLLGVSARRMLKAIAEGETDPAALAALADHRLRATPEQLRDALGACAHLSGVYRQLLQMALEELKLVEDQIEQLEREAFGLLKDHQETVQRVAEVPGFGADSALQMIAEVGPTAAAFASEKALASWVGVCPGDEESAGESKSTRSPKGNRPMRRLLNQAAQAAVKVKGSIFQVTFQRLFPRMGYQEAIWAIAHRLCRLLWMILHRGIRYEERGPAVSAKSKRRRAARMIKELKALGYRVEGGPLLAGAQA

SEQ ID NO: 306343 - protein, 345 aa, unidentified
MKEINVIGLDLAKNIFQVYGVNRKGERTANRKLSRKQMLSYFSNLPPCLIGIEACGNSHYWARELIGLKHQVKMMNPKFVKPYLKGNKNDYNDAEAICEAVQRPNMRFVELKTTEQQSVLHLHKSRQLLVKARVGLSNHIRALLSEFGLILAQGVKVFEHETPVLITDECNGLPPLSRQTLWTMWESYQQHKRQIVELEKELTIWHKDNEDSSRLAEVPGIGVHTATALVGKLGNGRTFRNGREVAAFVGLVPKQASSGGKEKLLGISKRGDGYLRRLLVQGAKSVIRHVRRRLLAGLPGGNPWVESLLERKHPNKVAIALANKMARIAWVILAREEHYRQATMN

SEQ ID NO: 306344 - protein, 353 aa, unidentified
MSEYIAFDSHKHYTLMERQDTQTGRTVQRRIEHKRGALCACLHECEPGGKVAVEATGNWYWIVSEIEQAGHQPLLVHPRKAKLMMGLINKTDKLDVHGLNRLQQNGTLPTVWIPPVRLRDLRELTRTRMVLVAIRTRLKNRLSSTLAKHGLVVEASDPFGVGARAQWEKHLSELPPQTRFVTQHLLAQLDFLQRQIDQEEARLQELLQVTPEMQLLESLPGVGLILSAVLALEIGEVSRFASHEHLASYAGTTPRVHSSGDKLRFGRLRPDVNRYLKWAYIEAANVIVLHQGRWPQRHAVQLYLRLRNRKGHAKAVGAVARHLAEASYWILRRGEPYRDPALNRKAERTTIPV

SEQ ID NO: 306345 - protein, 390 aa, unidentified
MQVKADRPEAPSGIRSDLGAIFVSLELSRSIWLITSLSPGAGEKMSMHSVPAGDIGAVLARFSEMKQKAFARTGKSFPIIVIQEAGLDGFWIHRVLQKEGIESHVVDPASIATSRRRRRAKTDRIDGEALLRALLAYKRGEPRVCAMVKAPTPEEEDRRRLCRERKVLTTERVQHVNRIKGLLFCQGVSGYEPLRRNRRQRLDELKTGDGRLLPDHLKAQISRELDRLELLLEQIKAVEAERNALFAVAKAAAPTAAPVAMLLDLKGIGPEFAAVLWMEAFFRSFANRKQIAAYAGLAPTPWQSGSIDREQGVSKAGNPRLRTTLIQLAWLWLRHQPQSALAIWFKERVMCNGGRFKKTTIVALARKLLVALWKYVTAGVVIEGAVMKTV

SEQ ID NO: 306346 - protein, 366 aa, unidentified
MIVIGVDVHKRTHTLAAVDAITGRQIAQQQIQATDAGHVDAIRFAADLDDEVVWALEDCRHVSRRLEQALLSAGSQVIRVPPAMTGLSRKGQRQPGKSDPIDALAVARTVVREGVERFAVAFLDEHAMEIRALHDHREQLIAERTRQINRLRFALVVLDPALEADLAPRTLHFAGAQARIRRRLAKLSHTAQARVARSELAHIVALTKEINALHADLDRLTAAHNPGLRAETGCGPICAAMLIGQTAGARRFATDAQFARQAGTAPIPASSGNTNRYRLHRGGNRQLNRALHTIALSRARNDPDTRAYLKRKRAEGKTNPEAFRCLKRHLARRIWKIMFAAAPPPSPATTRATIAVAAPALMPCTG

SEQ ID NO: 306347 - protein, 364 aa, unidentified
MYDSTTTVAVGLDVHARSIRLAAVRADELLEERTLPYDEGAVERLLRRWPVVRCCYEAGPTGFGLHRHLVERGIDCLVVAPGLVPQRPGERVKTDSRDARKLARLLAGGLLQPIHVPSPELEAARDLVRAREDAPLDRMRDRQRLSKFCLRHGRTLPTSSWTVVRRKWLGEQRFGFAAQQQSFDTYVHAVDLVDARIEQLERAIRETAEQEPWRALVARLRCLRGIDTLTALALVAEIGDFNRFDTAEELMAFVGLVPSEHSSGQKRRQGSITKVGNSHVRRLLVESAWHARRRPKVGYELARRHRGQDAAVIERAWRCQQRLYQRWQRMAGRGKPHQKIVVACARELAGFVWAIATEQPLRHT

SEQ ID NO: 306348 - protein, 344 aa, unidentified
MQIAVIGLDLAKNVFQVHGIDDAGQAVLKRKLRRSEVLPFFAGLDAALVGIEACHTAHYWGREIAALGHDVRLMPPQFVKPYVKSQKNDAADAEAIAEAVQRPTMRFVPIKSADQQAVLMLHRTRDLLIRQRSRLISAIRAHFAEFGIVVGRGIRNVERLLALLETAGDQRLPALAAEMLGILAAQLRYVAEQVKEVEVKLLAWHRADETSRRLQSVPGLGPITASAIVATVGDPKQFKSGRQFAAWLGLVPQQRSSGGKERLGGISKRGDGYIRRLLVHGARAIVGWRKRSATHKTPWIERLLARRPTNVATVAYANKLARIAWAIMMHGNRYNPALAFATIP

SEQ ID NO: 306349 - protein, 355 aa, unidentified
MSQEKYIGMDVHQATISVAVMDGNGKLLMECLLETKAATILEFVQGLRGTLSLTFEEGTSAAWLHDLLKPHVSRLVVCDPRKAALLKEGNKSDRIDARKLAELLRTNQLKAVYHGEHGIRTLKELGRSYLTVSKDVTRTMNRIKSLYRSWAIPCPGTTVYAPSHRLEWLAKIVQPGVRVRAQHLYEQLDNLQPIRQQARRELLLESHKHPAVKLLRQIPSIGPIRAALLVALLQTPHRFRSKRQLWAYSGFAVETHDSGEYRYVRGKVQRNRERITVRGLNDNHNPDLKNLFKGAAISASTRPGPLHDFYVARVAKGMRPTMARLTLARKVAAITLTMWKKGVSFDPKQLQRQAA

SEQ ID NO: 306350 - protein, 406 aa, unidentified
MADIFALDVSMGKSYCVWYRGKHCLKEFSLVHTKAGFNALRDMIKKAQKPIIYFEATGIYSRVIEHFCETNGLRFCHLNPLELHLKSESLRRVKTDQKDAHRIALTVQENTFRLIVPWKKDYLQLHELSRFYNQLNADWNYRLNHLHTALEQVFSELKQLFVNRTSKLALNIVELFPHPALVRPYSRIKLKNILMASTDKRISKMKAYKYADRLIDLAQKSYPTVSGDAIQVDEVCYYARQLIALTRKKEEVIKRMESIAQRLPYYILYCSFPGIGKQTAAQLMGELGDISRFDNANQLNAFVGIDIRRYQSGTYLGQDHINKRGNPIARKLLYFTVGNMIRQQHANSNHIVDYYYRLKEKRPHPKLNKVAMVACMNKTLKCLLSMIKHHKKYHYRYTDSMVPVRA

SEQ ID NO: 306351 - protein, 352 aa, unidentified
MRRPKHQVSIGEDLFVGIDLHKNRWYVTIRTVDLEVFSASIPGTWEALQRVLARYAGHQLQAVYEAGYLGFRLHDRLVAHGIPCLVTPPSLVPQEYGNRVKTDRRDSSKLAHLLAKGMLKRVWVPSEEELYHRQVIRRRRQLVRDRVRTQSRIKAELRFYGIQLEEPRGRWTQIYFETLRRFRFGNRWMQESFNCLLEQYEFLSGQIDKQTQLLRELSETALYRERVEILQSIPGIGLISAMELLLELQDVSRFRRAEQLAAYVGLTPSQYSSAEKVRMGRITGIGKNTLRSLLVEASWTLIRKDQAMREKYGRIKIRSGGKRAIVAIARTLFLRMRRMLLDKQAYTLQLAA

SEQ ID NO: 306352 - protein, 392 aa, unidentified
MTTATTQHQESTAGATDRLLMAIELGRRQWKVGFTTQQGQRIRRRTLPADAWDRLPEEVAAAKKRLDLPTDAAVTSCYEAGRDGFWIHRYLVGAGVDNLVVDSSSLEVNRRARRAKTDAIDLTKLLSMLRRHVGGEHKVWRVVHIPSAQDEERRQPHRELWALKRDRTRVTNRITSLLATVGVSVTVDAKLLQRLDRLMQWNGQPIPGTLRARVAREWEKVALFTTQIQALEGARRLELRQEADATVAQVRRLLQLRGIGHQTAWLFVTELFAWRQFRNRREVGGITGMVGTPYRSGLLNHEQGISKAGNRRVRAMAIQIAWGWLLHQPQSALAQWYTRRFAHGGPVARKIGIVAVARRLVIDLWRYLDAGVIPDGAVFKDPALATNGGAGD

SEQ ID NO: 306353 - protein, 410 aa, unidentified
MSNLPELDARAAFVDVGSEQMHVSVAGGPPQVFGTMTSQLHELRDWLLGQAVCSVAMEATGVYWLPLYGVLEAAGLEVLMVNGRQLKNVPGRKTDMKDCQWGATLHAHGLLRAGFVPPAHIRRLQDYMRLRGEHITSAASHVQHMQQALERMNVKLHDVISSITGVSGLAVVRAILAGQRDPGRLLKLCDTRIQNAKAERIKEALRGTWAEEHLFALRQALQSWEHYQQQITECDRAVQALLQQQGRGGDASPDTPAQSGKRKSPGVNAPHIPRLREMLTQWCGGRDPTLLPAHTEYSVLQLVGEVGTDLTKWHTEKHFSAWLGLAPGAHQSGKRHRSVKRKRNRAGRLFCIMARSLARSKYIALGGFYRRMAARRGGLVANVALARKLAVLFWRVMVKGIDYTERGLTQ

SEQ ID NO: 306354 - protein, 317 aa, unidentified
MSKRSIICAGIDTGKHKLDVALHGRPERLQVANTAEGHEELFVWLRQHRVKRVGIEATGGYEQTVVRRLRQGRFVVVVFQPAQVRAYGRFHLRLAKNDKIDAALIAACTSDVRTIHAPPDRRLAELAELQTQIDQVVRAMARFKNHRESCRDAGLRQLWDDEIRRFRGLFRQRLKQLVAAIRQHPDLAERLDLILSVDGIALRTASALVVRMPEIGQLSRGQAGALAGLAPYDDDSGEHAGDRHIAGGRERLRNNLYAAAWIASLLWNPQLTALYKRLRAAGKEHKVAVVACARKLLIFANAVVARGTPWEVRTIAH

SEQ ID NO: 306355 - protein, 354 aa, unidentified
MFVHVQHICITSDWICTRIGLDLHKKTIGYCVKDASGKVHQQGKIGATRWELDTWLKTLPQPWTAAMEATIFSGWIYDHLKPHAAAVKVAHPLMLRAIAASKKKNDQIDAGKLADCLRCDFLPECYMASTGIRERRRTLRCRHLLVRQVVQLKNRVSSLLMETGVSYNKQRLHRAGYFPELLASKDAIDKSIRPLLRLSRDSITRLQRIESALIRSLQRDPLLAERVRRLQTIPCVGRITALTWALEMGDISRFRSIRQAISYCGLCGDEKRSAETAVRTPLSKQRNKHIQRVLVEAAKLAPRYDPDLALFYAREKQSGNANRATHRGCRGGCSPSPSPLQITGGIHLDSLAID

SEQ ID NO: 306356 - protein, 337 aa, unidentified
MCLDIAKSVFQAHGVDAAGQGVIRRQLKRRHVLAFFRKLPPCLVGIEACASSHHWSRELQALGHTVRLMPPAYVRPYVKRQKNDATDAEAICEAVARANMRFVPTKTPEQQSGLVLHRTRHLFMRQQTSVINAIRAHLAEFGIVAPVGRRGVEELLNVVADPTDQRVPAIAHACLSALGAQLRKIKEQILEFDRMITAWHRSSEMSRRLDDCPGVGPTLATALVATVADPKIFRSGRNFSAWIGLVPKQHSSGGKDRLGSISKQGDRYLRSLFVIGALAVIRYAKIHGTRHRPWLTALLARRPAKVAAIALANKIARMVWAMMAKCERYKEPVALAA

SEQ ID NO: 306357 - protein, 321 aa, unidentified
MSKYSETYGVDISKDVFDVANTTGFYRQYPNTVDGFKKFIKELEKSAIVVMEATGYYHYCLAQFLFESGQPVSVVNPLSVKRFIQMRLSKVKTDKSDAKAICDYALINPVPLYTGKDQNQAESLQLLRLLELYLKQRTQLKNKIHGEQALGIPSKAVFRSLNRSKRTLDKEIKSLETRILSLVKEEHQQQLTNLKSIPGLGDKTAALLIVLTDGFTKFETASQLCSFAGTTPTIRQSGSSVRGKSRISKMGNQKLRNLLFLCAFSASKYNTACRKIYERIIAKGKSKKLALIAVINKLIKQAFAIAKSGLPYDPNYATKLN

SEQ ID NO: 306358 - protein, 388 aa, unidentified
MEKATNPKRSKESEVISNNFSKDSKIDFNNQSIYIGIDVHKKQWTVTISMLGMHIETKTMEASAEGLSKYMRRRYPGGKYHSVYEAGFSGFWIHRELEAAGITNMVVNPADIPTRYNERTKKTDAVDSRKLARELSQEGSLKGIYIPGEKDEAIRGLSRQRKQLSKEQARIKNRIKSALMFMGIEFPENYQLQHWSRNFINYLRNREYRQEEQKITIEGYLRALEEIREIQAEQTKKLRSLLNEDLKSKEIIGYLQSVPGIGITTAITLYTELIDIERFSNFNKLVSYVGFAPSTSSSGEKERVLGVSKQQNRFLRNLMVEAAWIAAKKDPALMMSFGEYCRRMSKQQAIIKIAKRLLSRIMYVWRNKTNYVNGVVGEQKKEENNNKQ

SEQ ID NO: 306359 - protein, 427 aa, unidentified
MRSIALDVHRDFCEVAIKDESGLRLAGRVRSSVSELELFAQSLAPDDEVALEATGGALAIARILEGHVARVVIANTRKLSAIAESKVKTDKVDAKTLCELLAAGFLPAVWSPDEFTRALRRRLQRRSKLVRSRTRAKNECHAVLARNLKGRPPVTDVFGKRGREWLAAIELPADERETVDCCLREVDFLDNEVGLIERELARQAMSCQEIRRLMTVPGVSLVSAAAFVAAVGEAHRFSSPKKLVSYVGLDSRARQSGEGPARHGHISKQGSSEARHMLCEAAWVAVRTPGPVRAFYERVRARRGAQIALVATARKLGVLFWHLLTREEDYAFGRPSLTRRKLRALELKTQEGWRRGRYSGPRVNESRKEREREAEFAEQMESAYRRLVQDWQPKPPRSGAGATRGRASSKPSSGQQRGRASVPNSAL

SEQ ID NO: 306360 - protein, 361 aa, unidentified
MKKPAHDLIVEVPRRQARFEMTIGIDLGDVWSHYCTLNQDGEVVDRGHFRTTPKAIEKWFTDIPPARMAMEAGTHSIWISEQLQELGHEVIVANVRELRAISHSDRKSDQVDAEKLARYARLDPEILRPIAHRTVEQQEALTLIRARDLMVRLRTAAVNAVRGLTKSCGHRMPASTTSCFAKRSLAVMPPGLAQALGPVLEQIAAMTLKIKHYDQQIQQLSQAKYPETQALLKVHGVGHITALTFVLTLGNKERFGRSRDVGCYLGLRPRRCQSGDRDPQLGITKAGNVYLRSLLIECANHILRPHGRDSALRQWGIHLASRGGKQARNKAVVAVARKLAVLLHRIWTTQEPYMPFYEKAA

SEQ ID NO: 306361 - protein, 353 aa, unidentified
METSTVAMKTVTTVGIDLAKNVFQVHGVNARGNPMLQKQLKRAQVLTFFSNRTPCLIGMEACGGAHFWARELVKLGHTVKLMAPQFVNPYVKTNKNDARDAEGICEAVSRPSMRFVAVKTPEQQALLSVHRVRQGLVEARTATANQIRGLLTEFGLIMPKGIWNIDKRLPDILEDAENNLPPMMRELTATLRAQFKHLDSQVKALDAVIARAHREQPASRQLAAIPGIGPITATALVATVGDARQFKSGRQVAAWLGLVPHQNSSGGKERLLGISKRGDVYLRTLLIHGARAVVREASKRPESDTWLMRLVKRRHPNVATVALANKNARIAWALLAHPERKYQTDYTPLRAAA

SEQ ID NO: 306362 - protein, 339 aa, unidentified
MGRFVGVDLHKNMFMVSFFDPRTGGHQVTDYHIKDIVSFVDRLKCDDMVGVESTNNTRYFVNQIRDAVHKVKVVNPSQFKVISKSVKKTDKNDAKVIAEFLSKDMVPEVRMKDKKTAQINSLANTRDKLVKLRTALKNKIHNILSSHGILMKKESLSSYKGLNRILEQPVDPTARIELEVIVSQIQSLNEGIKKLDKELEDKGKELPGHENITSIKGIGKKSGSILLSVIGDINDFENEKKLAAYFGIVPRVSNSNETEWQGRITKRGSKLGRTTLVQCTLIAIKYSPYLRSFYERIKARKGSGKAIIATAKKLLNIIYFTLKENIIFEDFTNGVIRTT

SEQ ID NO: 306363 - protein, 357 aa, unidentified
MAKILAIDLGKFKSVTCLLKTETNETEFWTMSTDRQYLLTVLKNYDPDLVVIESCGLAGWVHDVCTEEGYQVLVCNPNQEAWKWKNVKRKTDRDDALKLAKLAALGQLVPVYIPSRPQREYRRLVKYRQVLLGRMNRVQNNIRAIFVQRGMPMVRGQKAWALERFELLAQYRQPLSECTLDSLWHGELDLELTELDQLRTQYLQVQKKLKGLALADERVRLLQTIPGVGRKTAEVVVAYLDDPKRFKNARQVSSYAGLVPRRHQSGETDRHGHIHKHGPRQLRGALVEAAWMMLRYNPWAKSVYERLTGGQKTRKKKAIVAVARKLLVRCWVMLLRKEPWKKEEATIGAGGVTVAAV

SEQ ID NO: 306364 - protein, 300 aa, unidentified
MPKSSTAVVTIGIDPGKNTLHLVGLDARGGIVLREKVARARIVSRLANVPPCLIGIEAGMGTHYVTRELLALGHDVRQVPPVYAKPFRQTHKNDFRDALAIAEAVQRPTTRCVPPKTDEQLDLQALHRVRYRLVGQRTATINQIRCFLLEHGLTVRQRLHWLRHAFAGHPCPRTDLLSPRMVRILEDLAQDWRHLDDRIEAVSGEIEALSKNTEPCRHLMTIPGIGPIISSAIVAAIGNGTAFTRGRDFAAWLGLVPKQISTGDRTILGRITKRGPRGTVDEVSSHVRLNLPFKLTTRPP

SEQ ID NO: 306365 - protein, 344 aa, unidentified
MKITTIGIDLAKNVFQVHGVDERGRAVLKKQLKRDQMAAFFAKLPACLIGMEACGSSHHWARKLQGFGHTVRLMAPQFIKPYVKTNKNDVADAEAVCEAVARPNMRFVPVKSVEQQAVLSLHRVRQSFVKARTAQANQIRSLLGEFGLVMPKGITNVRKRVPEVLENATDKLPAGFRHLVERLLDHLKELDRQVGQLEAQIKAWHRSSELSQKLEKIPGIGPLGSSALVASIADARSFDNGRQVSAWIGLVPRQHSSGGKPTLLGISKRGDVYLRTLLIHGARSAIVAAQRRAAVNPWLAGLLHRRNPNVAAVALANKNARTVWALLAHDREFRPDYVPTLAAV

SEQ ID NO: 306366 - protein, 438 aa, unidentified
MSNKVFFNLNDLFISVGIDVGADFSWMSIALPNQQFVGKPYKILHNSIASLTTAVSKIKEAEELYSLESRIFLESTGIYHYPLFCYLRDKGFNCSVINPIITKNSTNINIRKVHNDRFDSKKAALVGLKPDLKVSLMPSDLALNCRNLCREYYDLMDNRSAYVNKLQGELRMVFPQYLGIFSKVTINTSLTLLETYTSPSAFLKADKQEIIDIIKSTARFGLTYAQNKYNAIIQAATDANQFGYIIDSNIKRIRLYISFIRKYDEEINDILESLHKLVDSNEDTKFVKQVHLIETFKGAGFLSAVSIMGEIGDFSAFSKPKQLFAYFGLDPAVKQSGKFEGTKVQMSKRGSAIARRVIHTLTLQSISISRNGEAKNPVLREYYLKKCDSKPKLVAMGAVSHKVCNMIFAILRDNKPFKIIAPQEHIKQYNAAKCDIAA

SEQ ID NO: 306367 - protein, 339 aa, unidentified
MNEFIKKKCFIGIDISKDKLDLALVNEKSPGVFKDKIVDNSFKGFDNIQNWLSKQKVQLEDCLFCMEHTGTYGLLLFAWLGQMGVDYCVEPGLRIKRSLGMTRGKNDKVDARRIADYAFTNRAKLAPFSLPSNLLLQIKQLLTYRDQQTRIKVSLKNSRKSHVQYQQVSGLQSISDDLKNQIDECESRIEGIDEQIKNLIKSDETMKKNFDLATSVKGVGLVIAAFMLVTTNNFTGFENGRKYACYSGIAPFENTSGKYKGKTKVSHLANKRMKTLLSNGANSARQWDPELRVYYDRKIREGKEHNLVINSIRCKLVNRVFAVVKRQTPYVNTYQQNFA

SEQ ID NO: 306368 - protein, 388 aa, unidentified
MIYVGIDIAKLNHFASAISSDGEILIEPFKFTNDNDGFQLLLSKLDPLDKDSIIIGLESTAHYGDNLVRYLVACNYKVCVLNPIKTSTMRKNNIRKTKTDKVDTYIICKTLMMQESLRFVTFYDLDLMDLKALGRFRQKTIKQRTRLKIQLTSYVDEIFPELQYFFKSGLHQKSVYALLKEAPTPEAIASMHMTHLAHLLKVNSHGRFDKEMAQQLRVLAQKSVGANDSALSIQVTHSIQQIELLDSQLERVEAEMTDIMKFNDSVIMTIPGIGYINGGMILGEIGDIHRFSTPNKLLAYAGLDPSVYQSGNYQAKKTRMSKRGSKVLRYALVNAAHNVVKNNATFKAYYDAKMAEGRTHYNALGHCAGKLVRVIWKMLTDEVEFNIE

SEQ ID NO: 306369 - protein, 371 aa, unidentified
MRKGNKKSAKGKGVVVTAADRVFVGLDVHKRQIHAAVRMNGQEVGTHVLPARPAAVAKFLARYGAGLKHVVYEAGPTGYGLARHLRSAGVAVDVIAPSKTPQTPGDGAKSDRLDCRDLARLDEAGLLRPVAVPTEEEEADRQVIRLRDQAVQNRRRVRQRIKSFLLMHSLPEPRGLEHWSAAGVTTLGAMEVRNGRLRFCLDVLLEELANADETVAKIDHEMKEMAEEPRHAAAVKTLTDHVGVGRTTALPFETEMYRPERFSNERQVSAMLGLAPRVRQSGERRREGPLLKAGRGRLRTLLVEAAWVSPPTRPGGPEGVPAAGAEHRLATEGDRGDGAAFGVGFVAWTRKGAGGGLNRRRREATRTTTGR

SEQ ID NO: 306370 - protein, 346 aa, unidentified
MKILALDLGKYKTVGCAYESESGAHQFKRGFTSPAGLTRMVQEVKPDRVVIEICSIAGWVCDLLWELGIEVQVANTSDDAWRWRKVKQKDDRRDALKAARLSAVNQIREVYIPALEVRQWRALITYRQQLIRRRTKIKNHIRDLLLREGQILARGSSCWSEVGIEPLAAQARSFSECGPAELWRGELQLELEQLREVQRQVVTVTAQLDKIGAGDTRVKLLRTVPGVGPRLAEAIVALLDQPQRFRKASQVSGYIGMVPKALDSGETERRGHITRQGSGVVRSLLVEVAWAGLRHNAWVRQTYQRLSGGKKARKKIAIVAVGRKLLVRCWAMLRDNRAWDWQPQIT

SEQ ID NO: 306371 - protein, 344 aa, unidentified
MDHFAGLDVSVKDTSVCIVDDTGRIVREVKVASEPDALLEVLTNPAYRFKRIGLEAGPLSQWLFSALAEAELPVICVETRHMQAVLRSQINKTDRNDARGIAQMMRVGLYRPVHVKTLRSQKLRMLLTHRKLLQSKAIAIENDLRATLRNFGLKVGMVGTVKFEDRINELVENQPDLKMLVEPLLIVRRVLREQIVILHRRLLAIVRDDDVCRRLMTIPGVGPVVSLTYRATVDVPARFHKSKAVGAVFGLTCSKYQSGEINRSGRISRCGDEMMRVMLYEAAQSMLRSKKWSWLKAWAIQIARRRGMKKAIVALARRLAVIMHRIWVDGTEFRWTREQTPAAA

SEQ ID NO: 306372 - protein, 448 aa, unidentified
MKLYFGIDIGKSNHVAALLSRRLLTRYGHYHLCPTFKIEQSRAGFLSLLGLIKEHGSPRDTCVLLERTGHYGQALEQFLQENHIKVYRILAQTRYGKNKTDKHDARALAALLYSQIELRAPVVNEHDRVWPLVTPSDAASCLRGHVHRRYELVNESTQRRNQLTAICDELFPEFTEVYIDPNSDSALQLRERFPTPQSVASASIDDLCATRKHTRPGRADLISLQQLARATIGTTDHARRSSLILEQEQLIAELRLLTAHVGRLEDEIAVILESSREGQILNSFPGIGPINGAVLLAGIGSIDNFASMQHLRGYLGWAPKATQTGTSYDAVTLDKGGNVLLKRTMYLIALSAIRSDPSWKTLYTRLVERKCDYDARTGKYRDKMKVIGRIAGQIIGVLYVLLRKDYDLLTSLAPNEKPPPPELYSVEKHSIRLKAGEKTRHHSRSNSL

SEQ ID NO: 306373 - protein, 361 aa, unidentified
MTQPSHDTFAACIGIDWADAKHDLCLQAAGTAKRERFQLEHTPEAIDAWVTTLRTRFNGHPVAVCLELDKGPLVSALRKYDFLVLFPINPLTLARYREAFTPSRAKDDPTDAELQLELLLTHRDKLQPLQPQSPPMRARAQLVEHRRRVVGDKVRITNRLTSTLKNYFPQVLHWFQEKDTRIFCDFLSRWPTLKAAQLARRSTLETFFRDHHVRTADVLATRLHAIKTATPLTTDEGVIAPNTLLVQTLVSQLRVTLDAIEAFDQAIAQRAQHHPDFPLFQALPGAGPVFASRLLVAFGEQRERYASAAARQKYAGIAPVTERSGKKAWVHWRLQCPKFLRQTFVEWTAESMRHSFWAQVS

SEQ ID NO: 306374 - protein, 338 aa, unidentified
MELKRVGLDLAKNVFQVHGVDGYEVVRCRRQLRRSEVLKFFAGRPPCLIGMEACAGAHYWARELAKLGHTVKLMAPQLVKPYVTSQKNDANDADGICEAVGRPKMRFVAVKTVAQQEVQAAHRIRSELIRHRTAKVNQIRGLLAEFGLVVGRRIEVLRRALPELLEDGDNGLSGGVRRLVDGLRRDLVQLDERVAEMEAVIVAEARANEACARLQTIPGIGPLTASALVSAVGDGRQFKNGRQLAAWVGLVPRQDSSGGKPRLMGISKHGDTYLRTLLIHGGRAVERTCGAKTDPRSRWLRAVGERRHRNIAAVAQANRNARIAWALLTRGESYRAPA

SEQ ID NO: 306375 - protein, 401 aa, unidentified
MTVRPQLWVGIDVGKTNHHACAVDDAGKVVWAQKLTNEQRAIEQLIDRAHKAAEQVRWAIDLTSPMALILITVLLGAEQSVVYVPGRVVNTMTHGFRGEGKTDAKDARVIAETARLRSDLSKVTLPDELIVELTQLTGYRTDLMADWVRGINRLRGLLGSIFPTLEAAFDYSTRTPLILVTGLCTPSEIRAAGIDGVKAHLVEHKAWPAAIAKTAATAVALANEQELALAGEAGTAALVKRLARKLLELDHEIKDIDKAITERFRDHPYARIIESLPGFGPGLGAEFLVVTGGSLASFATPGRLAAYAGLVPVPKDSGRITGNLRRPKRYNRRLRRVFYLAALSSIRSNGPSRQFYDRKRGERLIHSQALLALARRLVDVLWALLRDDRKFTPHAPGTAAA

SEQ ID NO: 306376 - protein, 446 aa, unidentified
MAKRKRTNRKMERSLPVMRLNAGGIDVGATEIFVAVPADRDAESVRSFPTFTEDLHTLADWLQQCRVDTVAMESTGVYWIPLFQILEARGIEVHLVNAQHVHNVPGRKSDVLDCQWLQYLHSVGLLRASFRPEHAICEIRSLMRHRDNLVQMACVHVQHMQKSLDQMNLQIHHVISDITGTTGLAIVDAIVAGKTDPEELAKLRNYRIKASTETITKSLVGDYRAEHIFTLKQSLTAYRHYQQLITDCDSEIQQRIRSFETKDGGSASTSEQSSSTAKADFDLRTHFERIFGVDLTRIPGFDVLRIQTIFSELGANLSAFPTAESFCSWLNLCPKDGTSAGRRIRVYIKTKNRVTQAFRMAGQTLHNNKSYLGDYYRSQRARHGGLKAVKNAGHKLARIFYHLVTTRQPYDETVFAKLEARNHQRRLHKLKNMAKQMGYSLAQIHA

SEQ ID NO: 306377 - protein, 369 aa, unidentified
MGEYSEVFVAFDVAKKKHAVAIAEGGRQGEVRFLGDVENSPLPIEKTIKRLATRYDQLHVCFEAGPTGYGLYRQVKALGHDCMVVAPALIPKRAGERIKTNRRDAVTLARLHRAGELTGVWAPDPAHEAVRDLVRARESAADDLRRKRQQLLSFLLRHSRIYSGGGHWTLAHRRWLAGQKFDHVAQQIVFQEGIDASEDSLQRLRRLEKQLALIVPEWSMAPVVEAYQAMRGASFLVAVTFAAEIGDVRRFDTPRQLASFLGLVPAESSTGDTIRRKGLTLAGNRRARRALVEAAWTYRYPARVSETLRARREGLPKSVRDIAWKAQVRLCARYRRLSAVGKKPPVVVAAIAREMAAFLWAIGRQVAPA

SEQ ID NO: 306378 - protein, 347 aa, unidentified
MSTPLKYVVGIDIAKSSFVVCLGRLDLSQHLSFSKEVTFENTLSGFTALLTWVGKQQDAAAPLWFVVEATGVYYEELAYFLTDNRQLLSVLLPNKVKHFARSTELKSKTDQLDARLLCRLGLERSLPAWQPPTPALRQLRALARERQVLTRQGAQLKTRVHAYQHSYQPDSRTLARLAAQQELVVQQLSALDKDLAELLTAEPELARKLTQLTSIPGIGLTTAIVVVAETSGFVLVENEHQLASYAGLDVVQRQSGLSAHATRISKRGNVRLRTALYLPALSSLRHNPRQMAFYARLRTRHPSGKPGVIAVMRKLLVLCYSLWKNDRVYDPCYQPGHLAQQEIASAT

SEQ ID NO: 306379 - protein, 420 aa, unidentified
MKYVGIDIAKKFHIACVLDESNTYLKKNYRIESELTDFDMFYQLLELIDKDKSQFLIGMEATGLLFENLYLFLQKLGYNVVLLNPYQTTKFREMDTMKYVKNDNIDSQMIAALLKSGRYSTGFVSEDIYQAIKSLYRHKATLMQEMKNAKRQVSTSLAVVFPEFEQIIRDPFSVSGMALLEKYPTAKHYKGASGERILKLFRNIKGNNFNLQKANDLLDLARLTIYQGNASDERAYVILSNLRRIRFLKEEIEQCESQMFTLLNESEQAVSVSISKEEEVYIADLVDNLRSIDGVSDKTIFAVLSECGDIARFRSGQAFIGFLGLYPTLYQSGNTTKYGRLAKRGAKLAKMAIYLAAVACVRHNSELKKIYLDKKSSGRAPKECIVVVARKLAMIIYSIYKNNTPYNPARVFNTQASLSH

SEQ ID NO: 306380 - protein, 482 aa, unidentified
MKPKPEEKNKRTTNHPPQHHGHQMNRKQRREMMRKIQSEDLSLEVIHPDAAGIDIGNESHYVAVPPSRDSQPVRRFGCTTAQLKAMAAWLQQCGIRTVAMQSTGVYGIAVYDILEQAGLDVYLVNARDRKNLPGRKTDVQESQWLMKLHTYGLLRNSFRPSQQIRTMRTYWRQRNDLVQSAGRHIQRMQKALTQMNIQLANVLSDVSGMTGQAIIKAILRGERDPYKLAAFRDCRVQASEEEIARSLEGNWQDDLLFVLKQEQDGYEFCQQQMAECDRQLAQYLRQREDRSQGASLPEETRKGRRKKKRANKPQFDLREALFHMTGTDLTRIDSIDVMTATTIISEAGWDMSKWKTEDHFVSWLRLCPDNRISGNKVIGKGRLPTNNPISIALKMAASTLRLSKTYLGAQFRRFRTRLGAPIAIKAMAAKLARLVYRMLRYGMKYADQGAAFYEAQHRQLQIKQLKWKAAKLGYQVTPVPAV

SEQ ID NO: 306381 - protein, 336 aa, unidentified
MASDYQLFVGIDIAAQTATAAWTRLDRQVSQVVTIAQSAEGYQELNTLLLATGTVACEILVVMEATGTYWMQLAWALHQQGFAVSVINPMQAHHFAAALLKRAKTDAIDAQTLAQLALLLQPSPWTAPPAVYEELYQRLTERDALMQMQRQERNRLHALHKRFVLIPSVQQRIQQHLDLLQRQITSIERELEHVFCQDAEWAAAAERLRSVPGLGAVTVGWLLVSTLNFSLGHTPDQLASYAGLAPHPQQSGTSLHTHGQVAQGGHARLRTALYMAALTAIRLNPVLAAFYRRLRERGKPAKVALCAVARKLLHLAWALVTKHQMFDPHHESCAVA

SEQ ID NO: 306382 - protein, 421 aa, unidentified
MDDNTNTQSIDPAAPVAWIGLDWGHYEHAFSLEDRTGRKEEATLKHSAESLHGWLRELAQRYGGHPVALGVEASRGAVLEVLLQYHWLVIYPINPITSARYRTAFTPSGASDDLPDARVLLELVRDHRAKLRPLEAQDPQTQELNALVQARRDMVDRRTQVLNQLTMLLRSYYPQALELVDNLDSVLAVDLLKRWPDMLALKTAKASTITRFYYAHNLRRPELLEQRLELIRNAVALTTDHGRIKAAVLHLRLLLDQLQAFRKHIPIIEVQIKTLFGQHSEAALFRDLPGAGAHLAPRLCVAFGTVRTLYPEPTSLQKLSGVAPVREKSGQQLWTHWRWRAPVFIRQTFVEWAGQTVVYSAWARTYYEAMKAKGKPRHVILRALAFKWIRVLWKCWQDRTPYDEARYLRQLLHRKSPYAVV

SEQ ID NO: 306383 - protein, 403 aa, unidentified
MNSVGIDISKGRSTIAVMRPFGEVVISPFEVRHTGSELSKLARQLKSLDGETRVVMEATGNYHASVAKLLHDAGLYVSVVNAKLVHDYGNNELRRVKTDRKDAVKLANYGLDRWLTLPRYIPEEDTRLLLKNCYRQYRQYSKVQTVLKNNLISLLDTVFPNANRLFSSPIRGDGSEKWVDFVAEFWHCRCVSEKSERAFTSKYLRWCRKHGYNFREAKAHTIYAEASGHIGVMPKSETTKLLVKQAVSQLRATSTALAALKHEMQSLASQLPEYPVVMDLFGVGPTLGPQLIAEIGDVRRFYSKKALVAYAGLDAPPNDSGDVTGRHKSMSKIGASSLRRTLFLVMSVYLQTAPLDEPVYQFMDRKRAEGKPYRVYMMASANKFLRIYYATVKAYLESLEHTA

SEQ ID NO: 306384 - protein, 365 aa, unidentified
MTEITCSAVVRVGVDLSKRVFQVHAVDRGGRVVLARPLSPDRFFAWCAELPGNCIVAMEACGGAHHVARRLRLGGLDARLIAGHFVTPYRMAGRSGKNDANDAAAICEAAGRPHMRFVPVKTAEQQGQLAVHRLREGFKEERTAVINRIRGLLAEFGLVFPQSPEALRKVLAEVIEDGANELPGVARLALQQAHLHWIDIELQMAWCDERIASHVRQDERAQVAATLQGIGPITASALVASVGEFKQFDNARQFGAWLGLVPSQHSTGGKSSLGRITKRGDDYLRTLLIQGAKSAVMSAAKRNDRISRWLVLLKARAGWQKAVVALANKNARILWAVLTRGHRFDPDHVPEPPAARCCLVPRPAE

SEQ ID NO: 306385 - protein, 430 aa, unidentified
MKSNTQNAKIEAITEKTLVLGIAVGSETHYARAFDYRGIEYSKKPFKFSNTEAGFVTFKEWILDLQEKHEKDKVVPGMEPTGHYWFNLGKFLQDNEMKPVLVNPHHVKKSKELDDNNPTKNDRKDPKVIAGLVREGRYMIPYLPDGVYADLRTASNIRFQLQAELTRIQNRISRWFNIYFPEYKTVYGKPDAKSGMLILKQAPLPEDILTLGIDGVNQIWRDAKMRAVGKARAKTLIEAAEHSVGSKEGAISARMEIRMLLEDYESRNIRLQEIMTLIEELVNQIPMAEKLLEIKGVGIKTVSGFLAEVGDISRFNNPKELQKLAGLALVENSSGKHKGRTTISRRGRKRLRYLLFEVAMSLVAKNPEFRELHTYYTTRRLNPLKKMQSLMAVAAKLIRVFYVMLTKGVDYDPKKMVGDIKRPAVYLQAA

SEQ ID NO: 306386 - protein, 373 aa, unidentified
MTLPTATPRRHRLCQNEVVADLKQRGPSVEQISRIGMDTSKHFFQLHGVNAAEKVVLRKKLRRKEMVAVFEALAPTVIGIEACGASHHWARILRSFGHEVKLIAPQLVKPYVKRGKNDTADAEALCEAMSRPTMRFVPVKTAEQQAALMMVGLRDRLIRNRTQLSNAIRGYAAEFGFTAARGMAHIDPLLDRIQADESVPVLARELFAAQAEEYAQLQAQIAEVDAKLMAWHKTDECSRRLANIPGIGPIGATLLLMKTPAPEMFRSGRQFAAWIGLTPKDHSTAGKVRLGVITRAGDEALRSVLVVGATAVIQHVRRGGRGSPWIVGLLKRKPPKLAAVALANKMARIAWKLMVTGNSYAAKSAPAALMGAA

SEQ ID NO: 306387 - protein, 353 aa, unidentified
MLPTPNAPVPGTTVVVGVDTHTDTHHAAVLDLNGRLEGDAAFPATPAGYQALVDWAGSYGIIDRIGVELTSSYGAGLTRALTGAGIHVLQVNTTDKATRARRGKDDRSDAIAAAQKVLAGMATAIPKDTTGVIESIRMLTLVRNSAVKSRTQALNQIKDLLVTAPTPLREQLRRFSLPTIAKHAAALQPDTGRYADPAHAAEHALKRHRVAALNDEITAADQELRALTTATAPTLLARPGLGVHTTAQFLITAAENIDRITSDAAFARLCGAAPVPVSSGQTHRMRLHRGGDRQANRALHMIIIGRMKNDPDTRAYITRRLTEGLSKRDTIRALKRYVARQVFNDLKTDLTKN

SEQ ID NO: 306388 - protein, 358 aa, unidentified
MVDKVTKAAVVGGVDTHKDLHVAAVVDQNNKVLGTQYFSTTRQGYRQMLAWMTSFGTLKRIGVECTGTYGSGLLRYFQNAGLEVLEVTAPDRMERRKRGKSDTIDAECAVHAAFSGIRTVTPKTRDGMIESLRVLKTCRKTAISARRVALQIIHSNIISAPDELREQLRNMTRMQLIRTLGSWRPDASEYRNVTNVYRISLKSLARRYLELHDEIADLDVMIAAIVDELAPELIKRNAIGYESASQLLITAGDNLQRLRSESGFAALCGVSPVPVSSGKTNRYRLNRGGDRAANSALHIIAIGRLRTDAKTKEYVARRVAEGHTKMEAIRCLKRYISREVYTLLRNQNRRINSIPITA

SEQ ID NO: 306389 - protein, 346 aa, unidentified
MVIIGCDFHSDFQQISWLEMETGEVKELRLQHREQARAFYRALPPGAVVGVEACGQTQWFEAMLAEQGHVLRMGDPTKIRAAMPRRQKTDRRDAEHIRVLLQENRFPEIWVLSPAERDARQLIVHRHKRVQMRTAVKNQLHALAINQGLRLRWRLWTEAGRKQFEALPLLPYAAQRRQELLRLLDEMDRDIAALDAAVAREAQARPEVVRLMTHPGVGPVTALAFVLTIGPVERFARARQVASYLGLIPAEHSSAGKQRLGHISKQGSPLLRLLLVEAAHVAARHEPELKRCYTRLRHKHAAGVAKVAIARKLAVRLYWMLRNQSPYQQLRAGHMQVSPSHSVVEG

SEQ ID NO: 306390 - protein, 388 aa, unidentified
MEPASIHPTAVRTDLGAIFVSLELSRSTWLITSLSPGSGEKMSKHVVAGGNVAELLDRFEQLQQKARLRTGTLFPIVTIQEAGLDGFWIHRVLEANGIESHVVDAASIATSRRRRRAKTDKIDGEALTRTLLAFKRGEPRVCAMVKAPDPKDEDRRRICRERKVLIAERVRHVNRVKGLLFAQGVSGYQPLRKDRRRRLEELQTGDGRELPKHLKAQINRELDRLDLLLEQIAAVESERNSLLSTYEQPAVEATSPAAMLLSLKGIGAEFAAVLWTEALSRRFDNRRQIAAYAGLTPTPWMSGTIDHEQGVSKAGNPRLRTTMIQLSWLWLRNQPASALSRWFVDRVQSNGGRLKKAAIVALARKLLIALWKFVTAGVVIEGAVMKTA

SEQ ID NO: 306391 - protein, 419 aa, unidentified
MTFHLARGYVGTNKSVDQSSVKYSFGGSVMFYAGIDVAMDKHDCVVLDSDGNVVFEVFTFENNRNGFKSLKKVLRSCSKNPKKIKVGLESTGHYSDNLLAFLNSIGYAPVLFNPLHTNLFRKGQSLRKTKTDHVDAHTIATMLRTEDLKSYSQQSYHLSELKSLTRYRSTLVSDCSRHKLSFVRLCQILFPELKTLVPSLHMNSVYTLLSELPSADKIAKCNLTHLTALLSSASKGHYGRDKAVEIREQARTSIGIKSTVKELELQQTIELIRIFQRQIEAVEEKIDELMDDINSTITSIPGIANRMAAVIIAETNNFQDFERAEQVLAFAGLDPSVYQSGQLTSTHSKMVKRGSKYLRYAIFNAAKYVCHWDPTFNAYLAKKRAEGKPYNVAVSHAAKKLTRVMFHLVKTNKEFVPQV

SEQ ID NO: 306392 - protein, 317 aa, unidentified
MDFLGIDIGKLQLHAALLQGERIARKSVSNNVTGFEQLVKWLSNREVQELHICLEATGSYGDSVAEYLHDQGHRVSVVNPMQTKSFGQSELIRTKTDKVDAGMIARFCRAMKPPAWNPGSAEIRAFRAMVRRRETLTQMIASEKNRLEAAIEPAVKRSISSTIAALRDELKRLASDIDGHLDANPDLGEMVKRLDELPGFGSLTAQKVIAETKGFSVCDTRQGIVAFAGMNPRQSQSGKRDLRGRITKIGNAALRKGLFFAAMAAKRSSPYFRAFVARLQAAGKRPKVIIVALMRKLLIVAFTLVSRKTRFNPAYAA

SEQ ID NO: 306393 - protein, 317 aa, unidentified
MDNGSEPHRYVGIDVAKSHVSVYVRPDGMAFTCKTDAQGLAELTARLRAPAPKLIVLEASGGYEAVVAASLAEVGLPIAVVNPRQTRRFAGALGRLAKSDSIDAADIAHFAEAIRPEPRPLPDEQTVELRALLARRHQLVVMAGAEQQRHDRAETVLARRSCAAMLRSLRTEIARIERAIDKLITASPIFCAKQDLLKTIPGVGDVVARTLIAELPELGTVDRHKIAALVGLAPMNRDSGRMRGERHIKGGRPQIRAPLFAACLSVIQHNPPLRRFYLRLVQAAKPKRLAIIAVMRKLVCIANSMLRTQTPWAHAQS

SEQ ID NO: 306394 - protein, 350 aa, unidentified
MIIIGCDFHTRYQQIAMMDTETGELVERRLEHENGEARAFYASLPKPVVVGMEATGYAQWFERMLAEFGDELWIGHASEIRAGVVRKQKTDARDALHLLHLLLEKRFPRIWIPSPAERDTRQLLRHRHKLVCFRVSVKNQLHALAMSQGVCRKKKLFTAQGREVLEKLSLGPWARRRCQELLEMLDQLNTVIEELDRAVQQQAESHAEAARLMRHPGVGPVTALAFVLTLGPVTRFRRSKHVVSYLGLNPKERSSGGKQRTSTISKQGNTMMRWLLVEAAQTAARYDPELLRLYQRLKFRRGANVAKVAIARKLAVKLYWMLRATASCAQLAPMQGSSRGTLVPQAGSSF

SEQ ID NO: 306395 - protein, 374 aa, unidentified
MNFIGIDLHTNRFTCCYRDEWASMEDPRKDRVVKTFELDAEGLAAFYATLTVDTYVLVEATITTFSFARLFRDRVKEVVIANTYELKQISLARCNTDKIDADKLCRILKMQVLSREQTISPVTIPPKEIQDLRSLFSTYRLYKKQNTQLKNRIHSLLKEHLYGFTQEEIFGRKSRQEIRDISDDPVLRFQLNQLLDRLERDEVDAEALKDQVLLQAAPFMAQIEILTSMKGVSVFIAIAIIADIIEVSRFRNAKAFTSYLRSAPHVANSNTSTSIRGTNKKGRKLSATLLTQSLNHVMAVSPKLRRWYDRLAEYKKPGLVRTGLRRRVFAEIFQMLKKGEYHYGRDPKKHEAKMAEYRRFLKGQKNAAVLKKSA

SEQ ID NO: 306396 - protein, 370 aa, unidentified
MLDTTTFIGLDVHARSIKAVSLDVMTGEVRAATFGYDAGAVAEWVRSMDPRARCVYESGVTGFDLQKRLSGLGVDCVVGAVSKMIKPSADRRRKNDRNDAEFLARMLSVGNVVEVWVPDDECEAARDLTRALEDARDDLSRSKQRLSKFLLRHGLAFDERTPTGRRKGNWTRAHWSWIESIRFAEGADNDVLAYYVDAVRRAAEEKARLEGLVEAEARKPRWRRRVDSLRCLKGVDTASAADLVFEAGEFSRFRNARSFAAWVGLTPSEHSSGESDRRGAITKAGNKHLRKALVEAAWHYLTCSGRPKDLAKGQAPDRVARRHAAKGVRRLVERREALLARGVHNNKANVATARELACWVWAVGLMAEEA

SEQ ID NO: 306397 - protein, 405 aa, unidentified
MSEIQQHERVEVFIGLDVGKGTHHAVALDRKGKRLLDSALPNDESKLRALIGKLKEHGQILLVVDQPATVGALPVAVAQAEGVWVAYLPGLAMRRIADLHAGEAKTDARDAYIIAEAARSMPHTLRSMKLADNEVAELTMLCGFDEDLAGQITQTSNRIRGLLTQIHPALERVLGPHLDHPAMLDLLERYPSPAQLAALSSKQLANRLVKLAPRMGKTWAAEIVQALSEQTVVVLGTQAASIVLPRLARQLAALRVQREEVAKEVERLVLAHPLHPVLTSMPGVGVRTAARLLVDVASRAFASAGHLAAYAGLAPVTRRSGSSIRGELPSRRGNKQLKRAMFLSAFAALRDPLSRAYYTRKISQGKRHNQALIALARRRCDVLFAMLRDGTLYCPPQPKMLLTTT

SEQ ID NO: 306398 - protein, 418 aa, unidentified
MTRREDSRIIRIVHPICCGLDVHKESVSACVIFPNDTGEEQYDVKIFGTFTDDLMRLRDWLAGHHCPVVAMESTGVYWRPVHNVLEDSVAVVLANARDMHNVSGRKTDIADSKWIAGLLRHGLLKSSFIPPQDVRHWRDLTRLRKKYVHTVGDYKKRTHKLFESANIKIDSVASDLFGVTGRNLMQLLVTDRELTLSAIQSCVRGKLKGKEVELFRSIQGFFTDHHRFVLKMLLATIATLEAQIAALDLQLRSAMKEHDALLDRMKQAPGIADVASREILAEIGPVLDSFPKDTSLVAWCGLCPGNNESAGKRKSGKSPVRKHHLKTIMNEVAWAAIKKKGSYFKDKYYRLKARRGAKRAIVAIAHRILLGIYHVIKDGADFRDLGGDYLTLKNKSQKVFHLRKQALAMGFDLVPQAV

SEQ ID NO: 306399 - protein, 352 aa, unidentified
MLIIGCDFHPSFQQVAIFDNQSGEIQEKRLGHRAEAEQFYRGLSGQEVRVGMEACGHYPWFERLLQELGQELWLGDAAEVRAKMVRKQKTDRRDAYHLLQLLLEGRFPKIWVPSLEERDVRQLLVHRHKQVQARTRVKNQLQAMALSQGVQKKRKLWTQVGRAELEKLELLPYAAQRRQHLLLQLDRLEAEIGGLSRRVEEEVGRRPAAMRLQTHPGVGPVTALAMVLTLGPAERFASGKQVGSYFGLIPSEHSSGGRQQLGRISKQGSSFLRFLLVEAGQSAVRYDAELGRFYRRLAVRKHRALAKVAVARKLATRLYLMLREEWNYTQLCRAVVQVSPSHSVVEQQKPTA

SEQ ID NO: 306400 - protein, 347 aa, unidentified
MTNRCQLHVEVFAGLDVSAREISVARLRSKEKTPTVASFANNASGHKALLAYLLQGTEHVRVCLEASGNYSLDLALALHAHRQVEVSVVNPRRARRFAESLGERSKTDPVDARVLCEYAARMPWVTWRPPTARALRLRAITRAIESLGVMHTQEKNREHALKASQALPSLVIREMRRHQRYLEHRMEQLRREARRLIAKDPELDRRFRLMVTVPGVAETSALQILGELVVLPDGLDARQWVAFSGLDPSQFTSGTSVEKKPRISRGGSRHLRHALYMPALVALRREPHLRAFYQRLVSRGKARLQAVVAVMRKLLHALFAMFRSDQTYDGSKLCSHELPATVTTSCA

SEQ ID NO: 306401 - protein, 344 aa, unidentified
MGEVSTIGLDIAKSVFQVHGIDVAGAVLIRKRVSRAKVLEYFSQLPRCLVGIEACPSAHHWGRELQALGHTVRLIPPSYVKAYLKRSKNDANDAAAICEAVTRPSMRFVPIKTTEQQTALMLHRTRQLLVRQRTMLSNALRGHLAELGIVSAKGRNGTAELLRIIADGEDSRVSPAVCGILDVLARQYDAIGVEIASIDKSIMSLHRACEASRRLAEIPGIGPIGATALVAEIGDWNTFSSGRSLAAWIGLVPKQHSTGGKDKLGSITKQGNRYLRWLLVVGAMAVIRYARKHGTERRPWLARLMERRPTKVAAVALANKIARMAWAIMVRGERYKEPKLSLAA

SEQ ID NO: 306402 - protein, 356 aa, unidentified
MADKLIVGIDISKDWLDLCASNAAGVERIANTPEVVAAWLERVGAGLIAFEPTGGYERTLIAAVRERGIAFVRVHPNDVVAFRKSRGIKAKTDAIDARLILAFVCDKAARAELRTSLIGDDRLRALAARRRQLADALQAERCRLDAAALPAVRASLEAVIAVLRHSLGVLEAELADAVAAHPQTAELAKLLQTIFGIGPVVAITLIADLPELGLLSAKQIAALVGLAPHTKRSGKTRYRETTGHGRPGVRRVLFNAARAAVRHPSLFKDFYDRLVTANRRPGKVALTAVMRKILITANAVARDHEPWHGRLAAGTPCRPHAEQTDHRAGRVKAAAARRAVARSASLCVGHVRQFWG

SEQ ID NO: 306403 - protein, 332 aa, unidentified
MSVYVGIDVHRKRSQVAVINQDGEVLANRNVPNGVEPILRVIGGLPSGTPAAFEAAFGWGWLVELLEDYGFEPHLVHPLQCKAIASARLKNDKVDAAILAQLLRADLLPEAWIAPPAVRQLRALLRHRIQLVRLRTLLRNRIHAVLAGHGHDRPAGYWSGPGRDWLASLDLPAVSAEVIADALALIDALESVTGRLDAEIRGHARSDPRVTVLTALPGVGPFTALVLLAEIGDITRFGSARKLAAWAGLTPTVRGSDRMVRHGHISKQGSVWVRWILCEAAQTAKRSPEFAARYQAIARRRGKKIATTAIARKLLTRACHLLTDASSDGAPR

SEQ ID NO: 306404 - protein, 315 aa, unidentified
MSQFNVFVGIDVSKDHLDVHVLPEDRSWRVANDEAGCTELSERLSGLSGVLVVMEATNVFWRLAATRLASAGVSAAVVNPRQVRDFARATGQLAKTDAIDAQVLALFAQRIEPPVRALPSEQCQVAAELLARRAQLMGMRVAEKNRLATARAAKVRKDITATIAFLDKRIGALDEEIDQWLKSTPIDQSRANLLKSFSGIGEHTAKSLLITLPELGSLSAKQIGALAGLVPFARDSGNKRGQRQIRGGRSTVRAALYMPAITAIRCNAVIRALYQRLIGAGKHHYVAITACMRKMLVILNAMLKSNQPWKNPQEV

SEQ ID NO: 306405 - protein, 397 aa, unidentified
MSVVVGIDVGAYKHAAAVCRTGEREAEKKVLRYEATRSGFDELDAWLQRQGQVDRVVVESSGHYWWPLASHLRQRGVPLAVVNPLEAKYFAKSRLQRSKSDPADARTLAALGMRDQPPAREPLLGAEVREAARFCMRLVRDQANVCQRLLRLVEIGFPELKEAFEDPTCDTALAILRQAPTARSAARRRLSTLAQAIKPGGRRAVGVGRANRVQELARDTIAPAELDEQMALEVRLLIEQYDLLGRQIEAAEKRVAELLDSELSRRLQTIPGVGPAIAASLIAEIGDIWRFDDFDQLAAYAGSHPQEQSSGRHGANPETSWRMAKTGNAYLRSALYRMAVVGLQHNPIIKQHYRRKREQGKAPMNAVGHCMGKALAIVWGVWRSGQDFDPSKGGPKT

SEQ ID NO: 306406 - protein, 345 aa, unidentified
MKKIIIGIDFSKETFDATLFDSRNSELSEAVQSAVHEKFTNKKEGFQAFLTWIKSSVKKINSDELLLCGEKTGKYSLALSNFLYAKGYSIWLDSGLRIKRSLGISRGKSDKADSLKIALYAYRYQDMAVCYVPLSKNVSRLKELFLYRQHLVSQMKAMAVRKNVTDDFKKELGDVRFIVDSATKIIQQIKATIKKCEEKMQEIIEEDEELKTTHDSITSVKGISLINATAFIAYTNNFKDFGGNAKKIATYWGVAAFAQESGTSVHKGARVSNIASKMLKSLLTQAARIAVRWEPKFRQYFEHLISRGKHQGVALNNVKNKLIHVITALAVSKEKYNQEYKCINR

SEQ ID NO: 306407 - protein, 453 aa, unidentified
MVNETLKKTKAKKFVIGIDPGDTEHKAVLVSPDSFPLCKPFSIKVNAEGFETFSKRLVQMRREYKINQEDLILAIESSCNLWQTFEFYFKEKGYKIVKVSPMTTYLSRGLKNSNLSKSDNKDCLLVAESVLNGKFTECYEIGKIYERLITLNIALNKLQDTCTQAKLRVRGILHKIFPEFLNILDLDTATAGFLLKKYIFPVDYLKIKDSEITELGEVLKKLSQSQHNSETIHKLKNAAKKSIGIRKEYTEEAERILFKSFFDVYENLSRKVLTVGEKIIQTAYECREFHILVSVKGISEISAAQITAEVGGFLRYSHYKQIEKHAGLNLRINQSSKTANARHINKIGNKRLSKVLYQAARHVTNYVPEIRIKYVNRKQKHKAYKKNIIACISPLLRLLFSLVKNDKPYQLDENAYKELCAIEIKYNIKNKSIEHYTPKEKSRFTKKHLQNKI

SEQ ID NO: 306408 - protein, 336 aa, unidentified
MTIIRIGLDTSKHVFQIHGVDENEKPVLQRQLRRSEVEKFFAQLPPTRIGIEACGASHHWARLLRGLGHAVLLMPPQYIKGYVKRGKNDAIDAEAICEAMSRPTMRFVPVKTAEQQAALTMLGVRDLLVKQRTMLINALRGHAAEFGVTAAKGPNKVVELLQRLATGEGVPALAREMLGMLASQLEAVNGKFKAIEARLMAWHRQDQTSQCLATIPGVGPIAGVSFALKIPDARAFRSARHFAAWIGITPRENSTAGRHRPGKISHEGDESLRRLLVLGATAVIQQAKRGRVSPWLLGLLARKPKKLAAIALANKMARVIWAMMVSGEVYRRPQGV

SEQ ID NO: 306409 - protein, 406 aa, unidentified
MDVVYSHCCGLDVHKKNVVACVLTPEGKEIRTFATLTDDLLQLIDWLKNKKCTVVAMESTASFWKPIFNLLELEEIQPLVVNAQHIRNVPGRKTDVKDAEWIASLLRHGLLKGSYIPTREHRELRELIRYRRSLIEERSREANRIQKVLEGANIKLSSVIRDVLGKSGRAMLDAMIAGEEDPVVLSEFAQKRMKSKKAELQRALHGLMGPHQKQMLQIQLRHIDFLEAEILTLNAEVKARMSPFEEDLERLDTIPGVGRSTAEHIVTEAGVNVQEQFGSAARLCAWAGLAPGQNESAGKQKNAKTRKGNSKLRSALIEAARAAARTQDTYLSNMYKRLAARRGANRAAVAVAHRILFIAYHLLTKQQDYKELGSNYFEERQREHSIRRSVKRLEALGCKVTLESVG

SEQ ID NO: 306410 - protein, 341 aa, unidentified
MTISGLAIDLAKHIFQLHGVDRSEAVVLRKRLKRNQLLAFVHSLPPCTIAMEACSSAHFWGREFARLGHTVKLLPPQYVKPYGKTNKHDAADAEAIAEAAPRPSMRTVRVKSQEQQDLQTLQRGRERVIKTKTMLLNSLRGLCAEYGIITPKGSGWLTRNLASTRQQLEAVNSPVLNLLFERSLAEFHRIEEDEQFYTAQLERIATTHPVAVRLMQIPGVGLLSATAALAVVSAPQEFKNGRHFAAFLGLVPRQHSSGGKAKLLGISKRGNSYLRRILVSGAQSLLRWSPRRSDALGRWVTALRQKKPWNVVAVALANKNARVLWPLLRYDVDYCPHAAIA

SEQ ID NO: 306411 - protein, 355 aa, unidentified
MNAIKYIGMDVHLATISIAVLDANGKLTMEVTIATQSSALLDFIRGLSGTLNVTFEEGTAAQWLYTLLEPHVAKVVVCDPRQNPRRLGEKKSDRLDARKLAEGLRLGTLKPVYHGNALGPALKEVSRSYRTLVSDTPRVMSRLKALYRARGIRCAGSRVYSPRFRDQWLQQLREPGVRGRAERLYKQLDLLLPLRQEARAALLSESRKHPAQKILRSIPTLGPVRVALLLALLQTPYRFRGKRQLWTYAGLALVTRTTADYQVLDGQVTRSRKPALVLGLNANHNHFLKALFKDAAVTALTRPGPFRDFYTTRVAQGMEPELARLTLARKIAAIALTLWKKGECFNAEHLKTQAA

SEQ ID NO: 306412 - protein, 546 aa, unidentified
MDRYIGLDAQSSSCTAAVVSPGGRRLQTQVLETNARVLVSFLNTIPKPRHLCLEEGTHAGWLYEVLSPHVQEIVVAGVGGERSRGPKDDKRDAFALAEGLRIGAIKTRVYKGLGEFGRLRELSRAHSMVVSDSVRIQSRIKSVYRSRGIPTGGKEVYSRVARDEWLKKAPANVRPLVGILYHELDAIRDLQEQAEKELLVEARKHRIYRILKSCPGMGPIRVAQMLPIVVTPYRFSSKRSFWNYAGMAVVMRSSSDWVRAADGRWMRAAVQRTRGLNRNFNHTLKWIFKGAATTVIQRARQEEPLYRHYQQLLDSGTKPNLARDHRAPDCIDHFVDVAIQGGVRPSQVEDDIAFFWVGEIGSDGVRRSWRRARTLDGFGGEHPLNCWSRTMCSESPLIGYAPLENRTKQWAQESPIEGWFPFWNGERCSCDVTGDARGERSCRHHRSRRRGDNPQSPRLLRHQERVGHLGRTAVPDAGCKTQTIRWMGKMRLDILPHRRDRRPAPPGGAGSPRARGSDARRRAGWATAGAGGRPPCPPGRARDAPG

SEQ ID NO: 306413 - protein, 348 aa, unidentified
MLADQLDYVIGVDPHRDRHALAIVEIRTGGIVFETSVAASSSGYARALELAREQAPGRRAFAIEGSGSFGAGLTRFLSGKGERVLEVGRLRRERRSGGKSDALDAIRAARSVLAQTRPAEPRAGGGREALRALMAAREGAVNARRAGLCQLRDLLITTPEPLRSELRPLTRAQLLRRLTAMRPQRQRDVELRGAVQALRTVARRVQQLTAEERELAGEIERLARKLAPQLLEQPGVGPLAAVQILISWSHRGRIRSEAAFARLAGSAPIPASSGQTIRYRLDRSGDRRLNRALHMILVTRRPAHAPTIAYINRRIQEGKSRREASRCLKRYLARSLYRLLEHGAPLAS

SEQ ID NO: 306414 - protein, 369 aa, unidentified
MYLAIDQHSKQITVCVRNADGDTVLSRQVSTRPEKLKAFLQELTEMDREFMAILEVCGFNDWLIEELRRWNCREIVLIHPERPSKRKTDRRDARKLADLLWLNRERLAANEPVHGLRRVYMVTQRERENRHLTALRKTLGQRRTRTLNKIHRIINCHNLIWNYPTKTFQTQAGRRWLEKVELPEFDRLEMDMLLKEWTTWNEQIAQVDEKIVERANHREPGEIVSAAQILMTAPGVSHYSGLALSSRVGPIERFPRPRSLANYFGLTPGCRNTGKATDRLGSITKEGSTIARFILGQLVLHFLKQDPQMRSWYRRIKKRRGSKIARVAVMRRITTVFWHMLTYQEAYSIGGPPPRLRQLNSPTTRSDAA

SEQ ID NO: 306415 - protein, 375 aa, unidentified
MRKTTRFVGLDVHADSIAVAVADVGAEVRSLGTIPHEAESVRKLVGKLRSSGASLRVCYEAGPCGYALYWQLVGLGVQCEVVAPTLVPVRSGDRVKTDRRDAQKLARLYRSGDLTTVWVPDQRHEALRDLVRAREVAKKDQLRARQRLGKFLLRQGRRPPTRMTAWTQKHLSWVKTLHFDEPAQETVLLDYIHEVEHAQERIARLEQAIAAAVNGMPKALREIVDGLQALRGVAQTTAVTIVAETGPLSRFERPKQLMGYSGAVPSEHSSGHQLRRGAITKTGNSHLRRVIVEAAWAYQHRPAISAQLRKRHEGIDERVKEIAWKAQHRLHGRFVRLRARGKSKQEAVTAVGRELLGFIWAIGVELEGRPARKAA

SEQ ID NO: 306416 - protein, 460 aa, unidentified
MSKHIQEKKAEQSRVDAMSQINRNAAGIDIGAEEVYVAVPPDRDEDSVRSFPTFTADLQNLADWLKACRIETVAMESTGVYWIPLYEILEERGFQVCLVNARHLKNVSGRKTDVLDCQWIQQLHTYGLLSPSFRPPEQIVAIRSLVRHREMLVQYRSAHIQHMQKALTQMNLRLTSVLSDISGVTGLKIIRAIVAGERNPRVLASFRDPGCKKSEAEIIKSLEGHYKRELLFALKQALELYDFYDRQLWECDAELEALYQSFDPPKDPGTPPPDPRHTKPRKNQAHFDLAPALYRMTGVDLTQVDGLDALTIQKVLSEIGTTMNKWPTEKHFASWLRLCPNNKITGGKVIHAGVQPTQNRVSTALRLAAASLTRSDSALGAYYRRMRARHGAPSAITATAHKLARIIYFMLKERKPYHDFGADYYEKQYRTRVLRNLKRQAVRLGFRLEPAVKAPLLEVS

SEQ ID NO: 306417 - protein, 384 aa, unidentified
MQKQDSYDYYVGIDCAQNKHDFAMKNNQDKFLIKKGHFSNTLQGYEKFLNTVLSKCLDKDKILFGMEVTGIYGTNLYERLKSDGYHVVMIFPDSVKNYRDYKRLNKTDKIDSACIAELLLNGDAQIVHAEKNGYTDLKAYIRRRNALKVTCTQETNRFLAKVCLYFPDLLKVFPSGRATLKAIFSIYPTPYSIIEADFNELVSVLQKASKNKFGVDKANELIHAARNSIVVRKSISDGELYNIHSLIDSIDSLESEIRNLEKIIDSKAEEFPAYHVLLTLTGCGKITAATIVAEIGDISRFHKASQIVSLAGLYGDNSKSGSSVNKRGKISKKGSRYLRHAIYMVAEFARRNNPIFKAYFTKKDTFNKLGYKAKINTHTTSYIN

SEQ ID NO: 306418 - protein, 372 aa, unidentified
MLIHYIDIAKRNFVIAVSSLSKTKTETNNPKGIAHTIEYLKKHKVALVVTESTGGLEIPAAKAIHRAGIAVIIANPRQTHQFAQSQSLTKTDAKDAKMPAFFAQMKAQKEDWQTMPYHPPTEAEEVLEALVNRRNQSADMRTAEKNRLHQVHETQVGSVKQLIAHFDRLIDESDKQIDDHTHTHFDGKAQVAEQIKGIGSITTATLMAMLPELRRLSHKRIAGLAGIAPHPRESGETKFKSRCFGGRSAVRKALYMATVAATRFEPLIRDFHQRPLSEGKPYKVAVTACMRKLLETFAKFLSLTTTEIPTQVFGCFRPKYRLILPKHPLNPPRTPDNQASGLPFRRQRAHLACWRLSTGSNTSPSDGFAHSL

SEQ ID NO: 306419 - protein, 384 aa, unidentified
MSNVRVTFAKGKPIHCGIDSHKETWAVVIRCEGEEIYRAEIGADTDRLINLLRRFEASEVHTVYEAGPTGFWLHDALEAAGFHSLVTPASKVPQVNDKVKTDHRDARKLAQMLEAGFLKGIHIPTPEERAHRQMYRTREQVMKHRTQTQNQIKSMLLFNGVRRPKGVRERWTQQYVRWLETLSFEHEEIQTSMGVLLKLFRWLDEQVKELDRKLQDMALRDEYRETVEIMDSVPGIGVHTAMAIKLELRDVARFSKGSQLSSYLGVTPSEHSSGQMTRKGSITHCGNPRLRDLFVESSWTLIRHDPEMRRTYERIRHQSGSGKKAIVAVARRLALRVRRMLLDKKPYQIEMNKGSSDGAGGSSRPVVKAASSVGAKRFVLKQRA

SEQ ID NO: 306420 - protein, 355 aa, unidentified
MKYYTSTTEYNCGIDLHARQMYVCVMDRQGKKLVHTNVKENDFAFFLKLVQPYKHSLTVCCECMFGWYWLADACLEAGLSFVLAHALYVRAIHGGKNKNDRIDSEKLTHLLRSNLIPPAYVYPATLRPVRALLRQRVCYVWRRSELLARIYSHQLAYNRIPVRQSRRDRDPWKERLLAQEDHPLRRFALQNDWAMIVQYDTQISLLELELVRVTKASAGRDYALLQSVPGIGQSLGLTILYEIGSIDRFPTVKDFLSYCRLVKGTVASAGKIKGLRGAKLGNPYLRWAFGEAAVIAKRDHAIIGPLAQRLEAQMNGNKFKANTVLAIKLARAVYFMLKNKTVFDPERLVAVLAKN

SEQ ID NO: 306421 - protein, 364 aa, unidentified
MKRKVYVGMDVHKETNRIASLTNNTKEIVKEQQIKHNEVQIKKFVNKLKSEWNEIHSCYEAGVTGYPLYRYLKSLGVNCILVAPGKIPRQSSDKIKTDKRDAIKLAKLLRSGELESIHVPSEEDEAVRDYLRSRDSLRLDLGRNRQRLMKFLLRKGITYSATKYWTVSHNKWLNNLQFNNEILQETFNDYYSRVRVQEENLKAMDKRIQEIAESEPYREKVGILRCFRGVDYLTAMFLLCEVCDFKRFKTAGSFMSFLGLVPGEYSSGSKRKQTGITKTGSPRLRRILTEAAWQHRFPGTGSKIVTARRSGQPALVVALAEKASLRLHKKFRNLQQRGKTPQVMITAVSRELSGFLWAAMNLVA

SEQ ID NO: 306422 - protein, 380 aa, unidentified
MKNNRTLHDVPSSTPTASVGKPADARAPRHRFTLGLDVDLHLVVSAIQCDHGAIKPAHKWTRPQLLKWVQEQTAAGHAVHTVYESCGFGYTLHEELVAAGAQSIVTTPMRLAPERRRKNDRLDARELCVRQGRHLDGRAHELRPIRIPTKEERERRELGRQRAFLVREVRRVENHGRALRLEHQHQTLPGGWAGPRKWKQLSAQCTPFVRAQLEPFVAQLRLLKEQLDRLTTQIEARMAGEKIPTGLGALAVALLDGEVCDWQRFQHRKAVGSYTGCCPAEHSSGGVQRFGHIDRHGNRHVRVLLVEAVWRLLRWQPNWHARRKHLVKLKHGASLKKKIAVALARQLAIDLWRWRTGRATAAELGWTFERQKLKAQTLNG

SEQ ID NO: 306423 - protein, 390 aa, unidentified
MSQPNDSNKSVIPLEQDNTMIAVIEMGQASWLVAGIVPGLERQPLKKLGSDEQALFQLLQRWRNEAVQTGRTIKRLVVAYEAGRDGFWLARWLRARDIEAYVIHPNSVAVSREHRRAKTDRLDTELLKRAFLGWLRGEAGHCSMAAILTIEEEDARRPNRERENLVGERTRIVNRMKATLARFGIRSFKFTLRHADERLNDLRTAEAASLPANTHAELRRDIARLRVVRDQIKEIEQQRLQRIEQAAPSEKGPHAMIRLLARVIGIGVETADMLVNEILSRQLRDRKAVARYAGLTGSPDESGKRRREKGLSRAGNARVRRGMIQLAWRFLMFQKDSALAQWYRARTAHARGGTRKTMIVALARKLLIALWRMVTTGEIPEGISLRPAVA

SEQ ID NO: 306424 - protein, 408 aa, unidentified
MNAVGIDVSKGKSMVAALRPMGEVALLPQEFLHTEVGLEQMAYAIIALGEDTRVIMEATGRYHEPVAAALHEYGIYVCVLNPLFIKQSGGGSIRKVKTDKADAMKIAKYGLDNWVDLREYTPMDTVRQQLKLCSRQYNLYMKTVVSLQNNLISLTDKTFPGVNELFSSPERADGHQKWVDFVMTFWHCDCICRVSEKAFTERYQKWCKRKGYHYSAEKALDIYAGSCGHFTTLPKNDNTKLLITTAAQQLLAGKMTLAALRAEMARLARQLPEYDTVHAMYGVGEITAAQLMAEIGDVRRFPRRSSIVGFAGVDPAVNQSGKHAAQSAPTTKRGSPHLRKTLYQIVCTYLRKAPEDEPVYQFLDKKRAEGKPYFVYMTAAQNKFLRIYYARVKECLEDFDAQQNSAQS

SEQ ID NO: 306425 - protein, 344 aa, unidentified
MSEVITIGVDLAKNVFQVHGVDFEGVVVVSRQLRRAQVLPFFKKQPPCLVGMEACATAHHWARQLIELGHDVKLMPPHYVKPYVKRNKNDVADAEAICEAVTRPTMRFVSVKNMEQQSVLMLHRTRNLLVRQRTMLINAIRAHMAEFGIVAPGGVPQVKKLLSIIADTHDGRLPPIARTCLESLASQFLQLHNEIHAAEKHIHAWHRSNEASRRLETIPGIGPIIASALTASITDPEVFKNGRELAAWIGLVPRQHSTGGKQRLGKISKQGDQYLRWLLVAGAMSVILHAKRRDTTNMPWLVDIIARKPTKVAAVALANKNARIVWALLRQGGTYQKPTTTPAV

SEQ ID NO: 306426 - protein, 424 aa, unidentified
MKFKMQDNQNQLIERISDKHLVVGVDIAQQLHVARAVNFRGIVVGDPLSFENNEEGFATLLKWIHTLQSKNNLDSAIVGMEPTGHYWINLSKWLFNHNIEVVTVNPYSVKRNKENRDNTQSKSDKKDALVIADMVKNGYYSFVRNTPESFEKLRVLMSNRDVVVKRLVSSINQLNRWVDIVFPELRQVFKDVTAKGAIATLRLFPMPTNLRFMKPEEVVTGWKSIMKRQPGLKKAQLLVQVAKRSIGSLQALDAYEFHLEQLLEEYDLAVKQLERVESQVTEVLQKIPYAKKLLMIKGISEVSLAGILGEAGDLSGFSHGNSLLRHAGLHLAEASSGKWKGQIVISKRGRSRLRRFLYLATMSLVMNNPEFKAIHSHNVKVKKIKKMKSIMKLIGKLARIFVGMARRNEAYSPDKLQSLLPQAA

SEQ ID NO: 306427 - protein, 399 aa, unidentified
MSVVGWDWASQAHDITVLDDAGAVLDRWAFPHTEAGWVMALARLRRRGEPGDLPVIIEKTSGLIVDRLLAAGHPVVPVHPNSFHAARPRWGASGAKSDPGDSYKLADYLRTDGHRLRRLEPADPGLRELQALVRLREDQVRARTAATNQLWAMLGNHWPGPRDLFCSLASGIALAFLTAYPTPQSAARLGEARMAAFLRRNSYRGGKSPALLLARLRAAPQAPVALPAATLAAMVGAHVQQLRSLQAAITGIERLIAERVAAYPRTRLLARLPGAGTINLAQLLAEVGPILDRATSAEQAASETGTAPVTRASGKTTGVYFRWAASTRARKAITAFAHNARMQSPWAAKLYADARARGKRNPHATRIVARAWIRVIWACWHTAVPYDPAIHHARQRFTT

SEQ ID NO: 306428 - protein, 307 aa, unidentified
MHAALLQEKRPASKSVTNSSAGIAQLQTWLKNRKVERVHVCLEATGGWSEEVAIALSEAGHIVSLVNPARIKAFAQSEMLRTKTDRIDAALIARFCRLHEPEPWTPPAPEIRILQGLVRREHSLIEMRVAEENRRDAPMVAPPVMASIDAMLAQIDRELERVEREIEQLFKDYPTLRRQRELLVSIPGIAETTAARILGEMPNITEFRDVKAVAAYAGLSPRHYQSGSIEYRSRLAKTGNSHLRRALYFPAITAIRHNPPIREFADRLRARGKTKMTVVAAAMRKLLTLAYGVLKSGCPFDPAYGVA

SEQ ID NO: 306429 - protein, 338 aa, unidentified
MVYGAIDLHMRYSQIRIVDEDGAVVRDQRVVTSRERWTQAFANHGPIRILLETGTESEWVAQALETAGHEVIVADPNYAPMYGELRRKVKTDRRDAAALAEANRRGWYRRAHRSSPAQRETTQMLRSRRFLVQTRSGAVSLLRSLLRQSGHRLGTGSCETVPTRVSRLAVAPELGETLAPLCRQIATLTTEIHALDARLQTRTATDAIVARLRSVPGIGLIVATTFRAFVDRHERFGHAGQVSAAIGLVPREDSSAERRHRGHITKAGPREVRSMLIQAAWVCWRHPGSATLRGWTDRLAARRGRRIAVVALARRLSRILFALWRDETTFDGRTLAAA

SEQ ID NO: 306430 - protein, 306 aa, unidentified
MKTLVAVDVSKETLQIQTESKGWVESNDSNGIATLIKGIGKMEEPFVVCEATGGYERLLMQYMHDRAVPVCRVNPARVRAFARSEGIRAKTDPVDAKVILKFAREKELAPTVPPTPEHQRLGELLDRRSHLTEMLAREKNRLQNSSKGIHSSIRRIIRALENEEIRIEGEIRKLTTNHPTIKKQVDVLTRIIGVGEITAWSVLGYLGEIDRIGRNEVVALAGIAPFNRDSGKMKGKRKIIGGRAKVRKCLYMAAQTAALHNPVIKRYFEHLTAKGKPYKCAMVAVMRKLLIHMRSELIILKKEVAL

SEQ ID NO: 306431 - protein, 492 aa, unidentified
MRGNTSEKSQTSKSTHKKNRNSSTPPTSGKWSEMNRRQRREVIRKMQSKDLSLEVVHPEAAGIDIGNESHYVAVPPTRDSQPVRRFGCTTAELKMLAEWLKQCGIRTVAMQSTGVYWIAVFDILEEAGLEVYLVNARETKNLPGRKSDVQESQWLMKLHTYGLLRNSFRPSRQIRMLRTYWRQRQDLVRSGGRHIQRMQKVLTQMNIQLANVISDISGTTGQAIIKAILAGERDPHELAAYRNARIEASEQEIAQSLEGNWQDDLLFVLGQEQSGYEFCQKQMAECDRQLAHSLAQLEDRSQGATMPQETRKNRLHRKKGNKPQFDLRAELFRRSGADLTQIDGVDVMTAMTIVSEVGWDMTKWKTENNFVSWLKLCPDNKISGDKVIGKGRMPTNNRATNALRMAASNLRLSGTYLGAQFRRLRSRLGAPVSTKAMAAKLARLIYRMLRYGMRYVDQGAEFYEAQYRKQQVSYLKRKALKLGLQVIEAVAA

SEQ ID NO: 306432 - protein, 316 aa, unidentified
MNEIITEPCVGIDVSKATLDIFIDSAGQGWQIPYDEPELDALITKLQEFKPGLVVIEATGGLEVLIATTLAGKGFPVAVVNPRQVRDFAKATGRLAKTDRIDAGVLAAFGKAIRPQARPLKDEATRALDDLVDRRRQLIGMRAQETLRLGTAATKPLQKSLKKHIQWLDRQIADVDRDLTQRLRESDAWRTKDDLLQSIPGVGSVTTVTMLAKCPELGTLNRRQLAALTGVAPMANDSGKHRGKRFIWGGRAEVRAVLYMAAITAMRCNPVIKSFADRLKKAGKPPKVVIVACMRKLLTIMNSMLHNNTPWNPKTA

SEQ ID NO: 306433 - protein, 438 aa, unidentified
MSNKVIFNLDDLFISVGIDVGADFSWMSIALPNQQLVGKPFKILHNSMNSLLTTVSKIKEAEELYSLESRIFLESTGIYHYPLFCYLRDKGFNCSVINPIITKNSTNINIRKVHNDRFDSKKVALVGLKPDLKVSLMPSDLALNCRNLCRKYYYLMDNRSAYVNKLQGELRMAFPQYLGIFSKVTINTSLTLLETYTSPSAFIEADKQEIIDSIKSTARFGLTYAQNKYNAIIRAANEANEFGYIIDSNIKRIRLYISFIRKYDEEINSILEAMHELVNANEDTNFVKQIHLIKTFKGAGFLSAVSLMGEIGDFSAFSKSKQLFAYFGLDPAVKQSGKFEGSKIQMSKRGSAVARRVIHTLTLQSIGTSHTGEAKNPVLRDYYRKKCESKPKLVAMGAVSHKVCNMIFAILRDNKPFEIITPQEHIQQYNAAKYDIAA

SEQ ID NO: 306434 - protein, 422 aa, unidentified
MEELHPRCAGIDIGKKFAKVCVRVPGLGGPGTRRKVERVSEVVTTWGSMTHQILQLREHLVAQRVTCVVMEATSDYWKPYYYLLEDLGHEVPGCEVMLVNARHVKNVPGRKSDVNDATWLAQLGAHGLVASSFVPPPAIRELRDLTRTRTALVRDRNREVNRLEKLLEGAGIKVSSVLSELDGVSGLAILRGLAQGLRDPVELAALAHWRLNGKKAQLIESLTGRFTDHHGFLVATHLRLVDELNILIEDLNDRIEVVIEPFRGFRDLICSIPGISTLVADVITAETGADMTQFPTPAQLASWAGVCPGNNESAGRVRATRTRQGNTHLKGALGIAALSASRTKNTYYHAKYKRLAGRRGKKRAVVALMHDMLTTIWHMAQTGELYNDPGPDFFQHLDPQREQRRARTILEAAGYHITKKAS

SEQ ID NO: 306435 - protein, 373 aa, unidentified
MSRSFGSERLFPMKKTAQHLIAEVPCRRSRVETTIGIDLGDVWSHYCTINQDGEVVGRGRFRTSPKAVEKWFTDLPPARVAMEAGTHSIWISEQLQELGHEVIVANVRELRAISHGDRKSDQVDAEKLARYARLDPEILRPIAHRTVEQQEALTLIRARDLLVRLRTAAVNAVRGLTKSCGYRMPASSTRCFAKRSLAVMPPGLTQALGPVLVQIAEMTAKIKQYDRQIQQVGQTEYPETQALLNVHGVGHITALTYVLTLGSKERFQQSRDVGCYLGLRPRRSQSGDRDPQLGITKAGNVYLRSLLIECANHILRPHGRDSSLRQWGLHLASRGGKQARNKAVVAVARKLAVLLHRIWTTQEPYMPFYAKAA

SEQ ID NO: 306436 - protein, 471 aa, unidentified
MVIRKKVPKSPVSLPKSKALSKKIKKLIKNEASLEQINFDAAGIDIGSRSHFVAVSASRDPQPVREFLTFTGDLQRMSDWLKDCHITTIVMESTGVYWIPAYELLVDQGFDVVLVNAHYVHNVPGRKTDVLDCQWLQKLHTYGLLSGSFRPSEDICALRAYIRHRGNLIRYAGSHTQHMQKALNQMNLQLHHVVSDITGVTGMRIINAMVEGEKDPATLAQLRDYRCKESEETIRKALEGHWRKEHLFNLSQALELYNFYHKKIRECDKEIQAHLAQFDTQCLPSPSIESKPYKIKDNGLNFDAKPELHRIMGVDLTKIDGLEAHSVLKIVGETGLDMSFWKTEKHFASWLGLCPGSKISGGKSLSGKTKPSANKAAAAFRLAAQGLHNSQSALGAFLRRIKSRLGAPKAITATAHKLAKIFYSMLKNGTEYVDAGQDYYDKQYEHRVLDNLKRKAKKLGFELIQTNPEPA

SEQ ID NO: 306437 - protein, 355 aa, unidentified
MNQEKYIGMDVHDATISAAVMNAQGKLLMECVLETKAATILDFIQGLRGTLALTFEEGTLAAWLHDLLKPYVSRLVVCDPRKNALMRDGNQNDRADARKLAELLRTNQVHAVYHGKHGMRALRELGRSYLALTQDSTRVMNRIKSVYRSWAIPCAGTSLYSRRHRAEWLEKLVEPGVRVRAEHLYQQLDNLEPIRQAARRELLRESRKHAAVNLLRQIPAIGPIRSALLVAILQTPHRFRTKRQLWAYSGFAVQTYDSGEYRMVRGKRQRNRERITVRGLNRNHNHDLKNLLKGAAISAIERSGPLQDFYTALVQKGIRPSMARLTLTRKIAAIVLIIWKKGVSFDPKQLQRQAA

SEQ ID NO: 306438 - protein, 356 aa, unidentified
MPSIPHRREAAITTIAHPEPSRVTVGVDTHAEVHVAVANDSLGRRLDTISVATTPAGYAELLGWARRLGPINAWGIEGTGSFGAGLTRFLRSRGQVVVEVNRPDRQARRRRGKSDPLDAEAAARAAQAHEGVIPKAGDGQVEMIRSLRVARATAMKARTQAINALKALVVTAPDELREQLRALSAGRLVQTAAKLEPGLVTTPAAAARLGLRTLARRYQALSAELTILDAELDRLTATAAPRLVALFGVGSDSAGALLVAAGDNPERLRSNACFAMLCGASPIQASSGKTQRHRLNRGGDRQANAALYRIVIARLRHDQPTKDYLARRIREGKSKKEAIRCLKRYVAREVFAALQP

SEQ ID NO: 306439 - protein, 391 aa, unidentified
MNSLTTAVSKIKEAEELYSLESRIFLESTGIYHYPLFCYLRDKGFNCSVINPIITKNSTNINIRKVHNDRFDSKKAALVALKPDLKVSLMPSDLALNCRNLCREYYDLMDNRSAYVNKLQGELRMAFPQYLGIFSKVTINTSLTLLETYTSPSAFLEADKQEIIDIIKSTARFGLTYAQNKYNAIIQAATDANQFGYIIESNIKRIRLYISFIRKYDEEINDILESLHKLVDSNEDTKFVKQVHLIETFKGAGFLSAATIMGEIGDFSAFSKPKQLFAYFGLDPAVKQSGKFEGTKVQMSKRGSSIARRVIHTLSLQSISISRNGKAKNPVLREYYLQKCDSKPKLVAMGAVSHKVCNMIFAILRDNKPFEIITPQEHIKQYNAAKCDIAA

SEQ ID NO: 306440 - protein, 308 aa, unidentified
MNILYVGLDVAKLSLQLHLAGRFYALANDAKGHTQLLKHLRTHPNAQVVCEATGGYEQPVVHALQAAGIPVSILEAGRVRYFARAQGQRAKTDPIDAAVLSEYGVAFQPRPAPPPSLQQRQLADWSQRRRQLVQLLVIERNHLEHYSDAFRRRQSQQLSRLLEKQIGQCDQAITKLIAQDVQLAHKASRLQAIPGVGPVVAATVLAEMPELGTLNRQTAAALAGVAPYNRDSGGQKGLRCISGGRGVVRCALYMATLNAMRRDRILKEFYLRLRAAGKKPLVAMTACMRKLIILMNRLLKNDHFQLAS

SEQ ID NO: 306441 - protein, 378 aa, unidentified
MTKPQLTPTQGILVAIDIGKTRNEVLIEIPGQARRRRLTVLNTRADYDRLIDLLSGLGQPVTCAFEATGNYHRPLAWRLLQAGFTVRLISSLALARTREALHNGWDKNDPKDAQVALHMLRIGASQHYHDPLAAGLNDIQEVSKTHEAISKAKTEVLHRILTHHLPLYFPEIDRFRHNSRSDWFFAFLDRFPTPGSITALSKEAFIAAAWGVVGRKVAKERLLGDIYETARASIGLPIPIDAPAVRLFRLVIAEARSLIEQRNALEAMAIELLHESPDYKLLCRIPGVGPITALTILAEAGDLRRFGHHRQFLKFCGLDLATHQSGAFRGQTKLSKYGNARLRRALWLAGQVAIRQKENSFRDKFERTIARDRHKADL

SEQ ID NO: 306442 - protein, 376 aa, unidentified
MQAVQRQGYEQEAVLYMAMELSNSNWKLGFSNGQRTRRRSIEARDRFQLIEEVQLARQKLGLEPDTQVVVCFEAGRDGHWIYRWLSAEGFRVLEIDSSSIETPRGRKHVKTDRIDVEKLLDMLIRYCLGFRKAFRVVRVPSEEAEAEQRLHREDEYLIRQRARVSNRLKGLLVNQGIVEVPLKRGFEGWLETAQTWDGSGLSEALKTEIRRLYVQYQLMNAQIAEVEQVYQQELLSDTAVADKRRQLERLKCIGPKTSRILSAEVFSWRVFSNGKQVGGMAGLTPTPSQSGDVSREQGISKAGNRRVRRVMIELAWFWLRWQPESHLSQWFNQRFAHGGKRMRRIGIVALARKLLIALWRYVEDGVIPKGAILKVA

SEQ ID NO: 306443 - protein, 352 aa, unidentified
MSQITEVGVDLASRVIQVHAIDASGHVVLARAMKPERFIEWCRTLPSGTAVTMEACGGAHHMARRLALMGLSVKLVAPPFVTPYRKQGASGKNDANDAAAICEAGSRPSMRFVPVKTAAAQGWQAIHRLREGYKEERTALVNRIRGLLFEFGVLAPSGIEALRRDLASLIEDASNELPGVLRLGLQRAQLHWIDLDVQLAWCDEQIARHVAIEPQAQAATQLCGVGPLTASALVAQAGDLKQFRSAGQFGAWLGLVPSQHSSGGKTRLGRITKRGDDYLRTLLIQAAKSAVMTAHRRADRLSRWVAQLKERVGWQKAVVALANKHARILWAVLTKGRTFDPNHVSVMPTAAP

SEQ ID NO: 306444 - protein, 365 aa, unidentified
MPELTHIGLDVHKETIAVAVLRPGESECEERVVANTPEALRRLFARFPDRAALRTCYEACPTGYDTWRLLSSLGVPCEVIAPSLIPKRSGAHVKTDRTDARNLARLLRAGELTAVRVPTPSEEALRDLVRTREDLKSDLRVAQQRVRSFLLRYGRRYPVPRGRWGVRYELWLQTQSFEEPAAQAAFDHLVGAASVRGAQLTAIDRQIEEAALSGPLAEPVARLRAFRGIDTLTALTVVSETCDFARFPTAAGYMAFTGLVPREHSSGASRRKGSITKAGNAHLRRVLVEAAWAYRHRPAVRGKLAGRQEGLPPELLAYSWKAQQRLHATYRKLAARRGANKAAVAVARELSGFVWGAMTGRMGAA

SEQ ID NO: 306445 - protein, 339 aa, unidentified
MLLTPVGIDIAKSVIQVHHMDATTGRTVSKTVKRASFLQYFANRPPCLIGMEACGGAQHWARELTKLGHQVRLLSPRFVKAFNIGNKSDAADARAIWLAVQQPGKQVAVKTETQQAVLAMHRVREQLVKMRTMQINALRGLMTEYGEVMGRSRATLEREMPGTLQRLAERLPEMLIDTLRERWSEVARMDEQIARIEQRLRVWLKQDRNCSAIAEIPGVGLLTATAAVATMADPKSFRSGREFAAFIGLVPRQSGSGGKVNLFGISKRGDSYLRTLLTHGARCVLANAKDPGPWVEQLKKRRPANVVVIALANKLARIIWAVLAHDRPYEKSYGSVRPT

SEQ ID NO: 306446 - protein, 380 aa, unidentified
MSRQQSVFRNTVGYMPKNTDNQTTDGEEKSKPEVIKLGLDLHARQVTECRQLDGSTPKPAQQWDPWKLMDKVEEWVKAGIKVYSCYEAGPCGYWYHRELTKLGAVNYVVAPRLLENQRTKRQKTDRLDARSLLGNLESYLRGNRDAMSIIAVPSPLQEQQRSVVRFREQLMRNRRRAEARGRALALTQGIPAPVGWWRPVAWKQFKSQLPEWMSFQLENWQEEALALNAKERKIRQELEQMVTEILPVGVGALSWITLQLEIRGWGRFHNRRQVASYTGLCPGIHNSNGRGREGRINRCGNTIVRYTLIEMVWRLIRWQPEYPPIKKLRNALLSKRGKRRLIVAAARRLAIDLWRLATGRATAQELGLQLSNPTTQKSTT

SEQ ID NO: 306447 - protein, 461 aa, unidentified
MKKNRARVGRRRAVSTESSIINIDTHPDAAGIDVGAEEFVAAVPRGRCEQTVRSFASFTSGVWALRDWLLQCGVKTVAMESTGNYWITLYDVLTAAGLDVYLVNARHVKGVPGKKTDVCDAQWLQQLHAAGLLRKSFRPELDIVPLRFLLRHRSELVGDAAKQLQLMQKVLTEMNLKLQHVFSDIDGASAQAIIAAILDGQRDPEVLAGLRDPRCRSPKQAVLEALRGDYRPEYLFVLGQCRQIYLKLRESVADCDRQIGELAARVQCEVVVGELPAAPKDQHKRSKNCPQFEVFQSAWRFYGVDLSTVPGVSAAVLCALMSEVGNREQLLAAFPTPERFASWMGLCPDNRISGGRLLKAKTRKVKSRLAGTLRLGAFGLQKSQSAMGGYLRRMKSRLGKAEGTTATAHKLARIIHGMIKSGKPYDEKEAFKPTPQNEARRRRSLEKQAAALGLTLQPMAA

SEQ ID NO: 306448 - protein, 351 aa, unidentified
MTIIGCDLHSRYQVVAWVDEGTGEIRTRRLEHENGEARSFYSGLPRGSLVGIEATMPALWFERILGELGHELVVGDAAKIRASETRKQKYDGRDAEHILDLLCTNRFPRIWTPSLQERDLRQLLVHRLKLVRARTTVKNQLHALAISQGVCRKHKLWTAKGRAELESLPLLPWASQRRNELLAMLDQLDAAIEPLDQAVEKEAKTRAEAVRLMTHPGVGPVVGLAFVLTLGPISRFANSRKLVSYLGLNPREDSSGGRQRLGAISKQGNEMMRWLLVEAAQTAARYDPELRRAYQRLKFRRVSGVAKVAIARRLAVRLYWMLRARLDYAQLVRMSGSPSSAVVPQGTGSTV

SEQ ID NO: 306449 - protein, 415 aa, unidentified
MTESYRIFVGIDWGADAHQVWVTDAAGTAVGEQTVDHTGTAIAALVDWIVGLAEGDARAAAVALETPRGPIVDAFLARGCPVFAINPKQLDRFRDRFSVAGAKDDARDAEVLSSAVRTDRRAFRHVTAEDPLTVQVREYSRQDTELGEDLRRLANRLRDHLLRTWPELLRLVPAADEPWFWALLKRAPTPVEGRRMRPAQVRQLLRAHRIRRITAEALLTVLRAPSVSVAPGVREGVRVRILDLVDQLPVLARQRRAAERRLATTLEAMTQGPDGESVREHTDVTVLQSLPGIGTRIAATMLAEAADALRDRDYHALRLLAGAAPVTKRSGKSCVVIMRYACNHHLQTALYHWARGCMQRDPRSRAHYAQLRRAGHGNARALRGVADRMLTVLIAALKTHMPYDATRRRPWAAGA

SEQ ID NO: 306450 - protein, 385 aa, unidentified
MQTPNDLSQSRIVLKQDSTLIAVIEMSLSSWLVAGIVPGVERRPLKKLAVDESALLKLLNRWREEAEKAGRKIERIAVAFEAGRDGFWLARWLRARGIEAHVIHASSVAVSREHRRAKTDRLDTELLKRAFLGWLRGERDHCKMVAIPTTKDEDAKRPNRERQSLVGEQTRIVNRMKAALIRLGIRGFNPKLKKAAGRLEDLRTPEGEPIPPNTLAELRRDMERRRLLSDHIRQIEEARLERMEQAPGDGPHAMVRLLARVIGIGIETSDMLVHEVLSRRLRDRRAVARYAGLTGAPDESGSKRREKGLAKAGNARVRRGMIQLAWRFLLFQKDSALAQWYRTRTEGAGKKRKTMIVALARKLLIALWRLVTTGEVPAGVVLRAA

SEQ ID NO: 306451 - protein, 348 aa, unidentified
MTLVAEQFEHVVGVDTHARTHTYCLVHAATGARVDTATFPTSAAGNARAVSWIARRSKGTTVLAAVEGTSSYGAGITALLTETGMDVAEVRPAARASHAHAGKSDLLDAEAAARSVLGQDLEHLSRPRQTGDRTALRVLLTARSLIDQQRTANRNALNALARSTDLGIDARKPLTDTQIKAIAAWRTSHNTGTLHVLRSEAKRLAATIGEQTELLHANHRELAALTEKLAPGLQELPGIGPVTGAILVTTYSHHGRIRSEAAFAALGGIAPLPASSGNRTRHRLSRSGDRQLNRAIDVIVRTRMSFDPGTRAYVERRRTEGLTPREIRRCLKRYVARALFRELQTRMT

SEQ ID NO: 306452 - protein, 340 aa, unidentified
MKKLYGAFDLHSSNNYLGISDEKDRRVYKQRLPNQPDVILAELEPYREHLVGIVVESTFNWYWLVDLLMDNDYQVHLANPAGIQKYKGLKHSDDKHDSFWLAHLLRLEILPEGFIYPKEERPVRDLLRKRGHLVKLRTSLINSLQAIIHRNCGVKLNARKIKAIREDNVMPLLSGQEDLALSGMVSKEAIDYLGRQIRKVENVVLGKIKLKEEYIYLLTIPGIGKILALTIMLEVGPVSRFQKAGNLASYCRKVPTKWTSNNKKKGKGNKKNGNKYLAWAFSEAAEFARRYDDQARAFYNRKTSKKNFMVAHSALAHKLARAAYYVMRDQVEFDSQKLFA

SEQ ID NO: 306453 - protein, 348 aa, unidentified
MKIVGCDLHAKQQTIAMVDTETGEFTEQKLLHEGNQVREFYAALEGPVVVGIEATGAMQWFLELLEELGIECRVGHPAKIRAAETRKQKHDRRDARLELKLLVEERFPAIWMPSTEQRDLRTLLRDRHQWVKIRTQVQNTLQAIALNHALRRGRGLWSQAGQTALRALPLPPYTSQRRDELLSLHAQLHKRIQELDRQVEEQARQRSQALRLLTHPGVGPVTALATEVFLGDAQRFENGKTVASYIGMIPCEHSSGKRQRLGKLSKEGNSLLRYLWTEAVMHAVRKDPELKRFYRRKLIQKGMGKARIAAARKLGIRLWIMMRDQIDYEEFCRRGKLRQERGSPCGNA

SEQ ID NO: 306454 - protein, 355 aa, unidentified
MLIIGVDFHPEFQQIAWVDTETGEFQEQRLQHGEPGERFYRALAVAGRQVRVGMEASGHARWFERLLAELQFELWIGDAARIQSKRGRKQKTDRQDAQHILKLMLKDDFPKIWVPSWENRDLRQLLWHRHRMVQARTRIMNQLQAVALNEGLRCKKRLWRAGGRQQLEAFRLAPWASRRRHDLLELLDRLNPTIAELSQAIEQEAEKCPQAQRLMTHPGVGALTALAFVLIIGNTERFQCGKQIASYLGLVPLEKSSGNRRRLGHITKQGSSMLRFLLVEAAQVTVRSLPEWRSQYFRLMIRRGRKTAKVAMARRLAIRLYWMWRQGLNYEQLKSSVRTQDSPDIAMVCSRTPSN

SEQ ID NO: 306455 - protein, 387 aa, unidentified
MKNVYSNVACSGMDVHYEFSKVTFRSEAGSVVRRERLDHRDRERLRERVSQWPKGLPVILEASFGWGWLSDLLEEAGLEPHLSNCYKVEQMRKARGWVKTNEKDADLVSLLPFEASTWWEVWRAPPEVRDQREQMRFRADLVALQTCVKNRIHAVFHRHGIFHDFSDLFGGQGRAFLSELCLHNPTGLPPQAWLALRGQVRLLDHVRWQLADIERNLHRQWVTTPLVRRLKTIQGIGLVLAHVLAAEIGRIERFGNHKRLASYSLLAPRANDTGEADLTAAPLGRHLGTRGNRTLKWAFIEAAHGAVRSGGRWRAMFDRVTQGGRKDRNRGYIKVARELVKVVYVVWAKGVPYAPIPPARPGHRKHQKKSRSGTGQLCHPMVHALGA

SEQ ID NO: 306456 - protein, 426 aa, unidentified
MQNCLFIGVDVALKGNQFCVMNFDQHIYFNLKFPNNPEGNDMVINKIKDIENKFFFEKIIIVMESTGMYSFHPACYLSSNEYLNKFHTEVYQINACDFDKYKKSFHDLDKEDGIDAYVLADYARVGRTKALYPFRGSQYIALQRLTRQRYHICKELIREKTYVLTNLYLSFSGLMSLDKNELPFSDLFGATSSAFLEEFVSPDQIAESSVEELINFISEKSKKHSSNLNDKVTTLNKAMRASYRLDQTAYEPINIAIACSLNTIKFYQQQLKNIDKAILNTALGLDSNTYHILLSIRGIGKVYAAGIMAEIGNIDRFSHNSKLAKYSGLYWKKNQSGEFDSQDKKSSKKSNKYLRYYLVEATASCVRQNFPFLKDYYNLKYKEVTKHQHKRALVLSARKLERLIFGLLRKNQYYKPIDSVQNSKIS

SEQ ID NO: 306457 - protein, 342 aa, unidentified
MEDYIGLDVSMKETAISIRRGGARVWRGKCNSDPARIAQIVRKRAPDAVRVVFETGPLSVWFYHALKEEGLPVICIDARHAKAALDMAANKTDANDADGLAQLAEVGFYREVRVKGYDSMLARSLVAARTRLVRITVELSNQIRGLMKTFGLVVPSGKGRNFDANVRRLLADQTELSGILLPMLNAWLDMRMRAADLTKLLLAVARKSHACRLLMTIPGVGAITATSYATAIEDPSNFKTSRAVGAWLGLTSRRYQSGEVDYSGRISRRGDRHLRGLLYEAALVILTRSKAQSDLQTWALKLKERVGTKRAAVALARKLAVTMHAMLKTGSMFNPIAQPKGL

SEQ ID NO: 306458 - protein, 457 aa, unidentified
MPARRKKPRSGAASPAHTIDPNSAGIDIGATEIYIAVPADRDPHPVRRFSTFTEDLLAASDWLKQCGIKTVAMESTGVYWIPLFQILEAGGMKVCLVNARHVKNVPGRKSDVCDCQWLQHLHSAGLLRASFRPEQQICAVRSLVRYRDSLVQLSAMHLQHMQKALDQMNLQLHHVISDLGGKTGMAIVEAILAGERDPHQLATLRDPRTKASKETIAKSLVGDYRREHLFTLRQSLTGFRQNGQLIADCDVEIESLLKEFSSGEGPGAEAVPEPQAELKRKPRRNEMNFDLRTQLHRIFAVDLTEIPGIDTLTAHTLFTEVGRDLSKFANVAAFTSWMGLCPDNRVSGGKILHAQTRRVNNRVAKALRMAAQALSRSHGWMGQYYRRMRAKLGGPKAITATAHKLARIIYHLLTTGQAYDETVFAQQEAQNNQRNEKRLRHQARKLGFELTLIPTEV

SEQ ID NO: 306459 - protein, 435 aa, unidentified
MSNNIKHDLFISVGIDVGADFSFMSIALPNQTFVGKPFKIIHSDFNSLSMAVSKIKEAEEMYSLESRIFLESTGIYHFPLFCYLRDKGFLVSIINPIITKNSTNINIRKVHNDKFDSKKAALIGLKPDLKVSIMPSDLALDLRNLSREYYDLVDNRSAYINKLQGELRMVFPQYLKIFSKITVNTALTLLEKFTSPDDFLKASKDDIITSIRSTARFGIAYAEKKYNAIIQAANDAKTFGYSVNSNFKRILLYIRFIRQYDEEISIILSDMHEIVDANEDTEFVKQIRLIESFKGAGFLSAVSLMCEIGDFSAFKSPKQLFAYFGLDPTVKQSGKFNGTDVKMSKRGSRIARRVIHTMALVSIALNRNGSANNPVLREYYLKKCQSKPKMVALGAIMHKVCNIVFAILRDEKEFKIITPEEHQTNYLKARCDIAA

SEQ ID NO: 306460 - protein, 337 aa, unidentified
MGLYCGIALHSNNHVVTVINEEDRRLYERRLPNDLAITKAALEPFRTQLVAVAVESTFNWYWLLDGLMDAGYQVRLVHTGAVVQYEGLKHTDDEHDAFWLAHLMRLGILPTGYIYPKSERGLRDLARQRMRLVQHRTSHITSVQSQVWRSTAVRLRSETIKGKGKQPWPELLDPDVALSVETGRAAIDALSAQIERLEELLLKRVGLLPQFQLLKTVTGIGPILALTIALEVGDIKRFPGVGEFASYCRCVDSRRLSNTKKKGEANRKNGNSYLAWAFMEAAHFAIRNLPAAKRFYERKRRQRNALLAVKALAHKLARACFYILRDQVPFAPDRLFA

SEQ ID NO: 306461 - protein, 382 aa, unidentified
MSSRRRGPGPSSVLLTPDHAGNVVGVDPHKRSLSATVVDSRGGLLAGEHFRVSGDGHRALEAWARQFGPIARWGVEGASSWGRHTAVFLARRGYDVRDVCANRTPRSDRARQRGKSDTLDSERIARETLAHPLLPRAFKRAGQDSGLDESHELLALWHNQRRSILASRQHLVNEAENMLCELPLELREQLPDSKAVRPRLAALADRNRRRRYDRPTALRLRLLDEYRARIAKLDADEKAVCHELSALVRASGSTLDRLCGLSTRSVAELLIEVGDPRRFTEGGFARFNASAPLAASTAEGPGEPVRHRYNPGGNRRINRILHLMAITQLRCEPRAQAIYANARARGHTKKEARRILKRHLSDVIYRRMIRDLAAHAQPLLAA

SEQ ID NO: 306462 - protein, 415 aa, unidentified
MGGRQQWYAGVDWGSQSHHVVLTDGDGRKIGERSFKHGGEGLAEMAAWLMAASCAAEPGQVLAAIEVPHGPVVETLIERGFKVHAINPKQMDRFRDRFTMAGAKDDSRDAEVMASALRTDPRCFRSLAAADPIIVELREWSRIAEDLGVERNRLINRLREQLWRYFPALLELEDDLGAEWLLELWEAAPTPNTASRLREATIAKLLKRHRIRRFDAASVVNALRRPPVRVAAGTVEAASAHVALLVPRIRLLNRQIKDAHSRIDGLTARLMPAEAAEPGQKKQHDAGILASLPGVGRTVLATLLAEASDALQRRDYAALRSLAGVAPVTKRSGKSCVVVRRQACHDRLANAVYHWARVAVQHDPRSRAKYAELRPRGHSDGRALRSVGDRLLNVACAMLKSGAAFNPSSAAQNPA

SEQ ID NO: 306463 - protein, 347 aa, unidentified
MTTLTRSVTGGVDTHLDVHVAAALDEKGTLLGVEYFETTREGYKKLLGWFEDFGPVVLVGVEGTSSYGAGLTRHLLGEGIVVVEVDRPNRQRRRRKGKSDPEDAISAARAAFSGDACGAAKSQDGNVEAIRVIRVARLSARHARTQALNQMRSLISTAPEPIRDELRGLNVYNLLERAASYRPGSRHDVVSLTKWTLRSLARRAIELEEEIKGCDALLEPLVAKTAPALVSAVGIGTDTAAALLVAAGDNPDRLRSEAAFAHLCGASPIDASSGKQERHRLNRSGDRQANSALWHIVVTRMVYDPRTTVYIERRMKEGLSKKEAFRCLKRYIAREVYGLLPMDRLTA

SEQ ID NO: 306464 - protein, 413 aa, unidentified
MVPVVGVTARSSGVLLEDLVAVPVDVGKHTAMAKVVDFTGAELAGPFEFSLDRRGVKALVGRVRRVAPPSVSLVRVGLEAAGHYHLPLAGGVLPSERELRLLNPGHVAMQRRVNGQRGVKTDRIDLAAITDLLLAGRGVLAPPFADPVMTLCGWVAHRRRRSLLRRRTIQQLTTHVDRCFPGLGTTMWSVVLSKAGRLVITDLADPARVARLGPCRLRAFAATRGVRMTTPLAERIVEAARQALPVPGAEISRRLLTADLGLLADTEAQIAAADLEIDALLPHTPFGVLTSTPGWGPVRVAHYGAAVGDPQRWPSHRQLYRAAGLTPRLYESAGHRNDGHITREGSVLLRVALIDLGLGLWHQEPASRHYGAELRTRGKPGGIIACAMAHRANKIAFAMVRHQQPWEPDRWAG

SEQ ID NO: 306465 - protein, 335 aa, unidentified
MDFCYFIGIDIAKETLDWAVYTRTGIQLNTHSANTLAGIKAVLAELKALPGWNPQQAIFCMEHTGIYNAHLLEVLHQQHLSIWLESSLQINQAGGMQRGKTDQVDAQRIAQYAFRFRDQMRLWQPPREVIQKLAFLSATRQRLNQAYNLLSVPVAEQETFINKFLKKTLKGNVKKSLMALKEEQKAVDQAIKELIQTDARLKELFDLMVSVPGIGPVIATELLITTNEMQTINDPKKLACHAGVAPFEYRSGTSVRGKTKVSHQARKRLKALIHMGTMSAIQVKGDLQDYYLRKLAEGKHTMLVLNAVRKKLIHRVCAVVRRGAKYDKNYTLTLV

SEQ ID NO: 306466 - protein, 350 aa, unidentified
MFIIGCDLHTRYQQIAMLDTVTGEVVTRRLEHENGEARAFYASLAKPALLGIEATGCTQWFERMLAELGHELWVGDPAEIRARAVRRQKTDTRDAEHMLDLLASNRFPRIWIPSLQERDARQLLKHRDKLVRMRTSVKNQLHYLAMSQGVCRKQKLWTERGRRELEGLPLGTWASRRRQELLELLDRLEPRIEELDEAVKVEAEARPEVLRLMRQKGVGPVVGLAFVLTLGPVERFPRSKQVVSYLGLNPREASSGGHQRLGSISKQGNEMLRWLLVEAGQSASQADPELRRKYQRLKLRRGTKVAKVALARILAVRLYWALREASPQRSPVRMPGSPAQTLVDASPSRL

SEQ ID NO: 306467 - protein, 404 aa, unidentified
MSPKLNSEIAVIGIDLGKNSFRLVGPGSALQPCQQSKLAGTPKTKEHTMSQKLDSEIAVIGIDIGKNSFHLIGQDRRGSIVLRQKWSRGQVEARLANVRPCLIGMEACVGAHHLSRNLQALGHDARLMPAKYVRPYSKGEKNDYRDAEAIAEAVQRPTMKFVATKSADQLDLQALHRVRERLVGQRTSIINQIRAFLLERSIAVRQGLQFLRAELPAILAKRTDVLSPRMLRVIEDLAGDWRRLDERIESISAEITRVVEQDAACQRLMTVPGIGPIISSAMVAAIGRGDAFAKGRDFGAWLGLVPKQMSTGDRTILGSISRRGNRYLRKLFVQAAWVVLAKITPEGWERYGLKSWIEAAKQRLHRNVLAIALANKLARIAWAVLHKGRAFECVKTNAPSSRPA

SEQ ID NO: 306468 - protein, 379 aa, unidentified
MGHHSEAFIGIDTAKLRNAVAVADAGRNGEVRYLGEMDTSEAATRKLVAKLAAKYTKLTFCYEAGPTGYGLHRLIEGLGHTCIVVAPSLIPKKAGDRVKTNRRDAEGLAKLLRAGELTSVWVPDERHEAMRELTRARDASRQDLTRKRQQVSSMLLRLGRHYPGIKTWGARHRAWLANQKFVHPEQRLAIEELLLAERQAGERIARLEQAIRTAVADWSLASVVPALQAMRGIDLVSAVTILAEIGDLSRFESPRQLMAYLGLVPSERSTGESVKRGSITKAGNGRARRVLVEAAWAYRHPPRVGYEKQAQVAAAPVRAREIAWRAQVRLCARFRTLSRKGKKSTVVATAIARELAAFIWAINREVSGQITAAGNSRHA

SEQ ID NO: 306469 - protein, 354 aa, unidentified
MSKVRTVCFEGQTIYVGIDVHKRNWKVQSRMGDIELAGFSQDPNPEILNNYFKRNYPGAKLKVVYEAGFCGFGIQRSLTELGMECIVVNAADVPSSDKERKRKDDKRDAYKLSRELNDGSLKSIYIPGIEMEQARTLVRQRYRLVQDQTRCKNRIRHMLMFSGIKLNIEKERWSNKYVKTLEEVKCRTMALKQALNLAIEEYKQIRMLLKQATVGIGKLAEQLPFAQIQPWLQSINGIGLINGMVIQTEIQDVRRFKTLDQLCDYAGFVPDISSSDQKTIMKGVTHRCNEFLREAIIESSWMLIRKDPAMLMKYNEYRKRMNKNKAIIRIGKHLLARIRYVWNNQKKYEKGIVM

SEQ ID NO: 306470 - protein, 423 aa, unidentified
MAESFTFFVGVDLGAERHHVVVLNATGETVGRRSVEHNGADVLELFSWLAKITADTIASLIAIAAETPRGSLVESGLERGHPVFSINPKQLDRFRDRFSVAGAKDDYRDALVLAASLRTDQHCFRGLQLGDPRLVLLRELSRTGDLLQRDLRRNCNQLWSLLQRYFPALLSLSPAADDPWLWTLLQSAPLPAQAARLKPRQLEKILADHQIRRVSASQLSELLHQPPLPLAPGAAPALAESAVLLLPHLRLLHQQTAQLARRIDNLIEELQQDPDFAEHRDIEILRSFPGLGRVFTATVLAEAHRPLVDRDYHALRALGGAAPVTRQSGKTKLVLLRRACNHRVQHAVFHSANVFVQKDPRAREQYHRLRLQGNTHARALRGVADRMLALLFTLLKNGSCYDPDRRLASNQPEGTPPQKNLDK

SEQ ID NO: 306471 - protein, 349 aa, unidentified
MKIIGCDFHPSFQQIAICDLETGEVQERKLSHADGQAERFYRELGEPALIGIEATGNSQWFLDLVQRLGHEIRVGDAAKIRASYVRKQSTDKQDAGHILKLLLEKRFPQLWRPSAAMRDQRQLLRHRDKLVEIRTKVKNSLQHLAMNRGMQKKSRLWTRHGMEQFQQLALPGWAGVRREDLLHLLKQLNRQIEQLDQAVKQAAEQHPQAQLLMTQPGVGPVTALAFVLTIGDVARFAGSKQLTSYLGLVPSEHSSGSKRRLGAITKQGNCFLRKLLVEAAQTTVRKDEGFRKEYQHRCHHRPKAVAKVAAARKLAVRLYWMLRGNVGYPEIVHIESNPRVPLGEVCPKL

SEQ ID NO: 306472 - protein, 313 aa, unidentified
MTHIGIDVSKDRLDIAVHESGETFHCHNRSQAFADLIERLRGLSPTLIVLEASGGYEQEVLFALLAAGLPAALVNPRQTHNFAKAMGYLAKTDCIDARILAHFAAAVRPRLTEAPSPARLALTELVSRRQALVEMLVAEKNRLRLTRTQPARGHIERHIQWLKAQLDDMDRELRTWIAQSEVWRELDRLIESVPGVGGIAAATLLALLPELGRLNRREIAALAGVAPFNHDSGKHRGARRIAGGRTAVRTTLYMCAVAGVRCNPMLKAFYARLKAQGKPSKVALTACIRKLLVTLNAIVRDRRPWEATRGAAA

SEQ ID NO: 306473 - protein, 342 aa, unidentified
MNQYAGIDVSLECSSVCVVDANGKILREARVASEPEALIAWFRSSGFELERIGLEAGPLSQWLFAAMREAGLAVELLETRHVRKAFEAMPVKSDRNDARGIAQLMRLGWFRPVHCKSMSAQETRTLLTARKLVQSKLRDVENSLRGILRGFGLKVGKTTELGFAGRIEELVAGHPHLQVIAKSLLSVRTVLRSEFAAFQKRTRKMAQSDARTRLLMSTPAVGPIVALTYASAIDDPARFTSSKQAGAHFGLTPKKHQSGETDYSGRISKIGDSSVRTALYEAAHIMLTKPLKGCSQLKSWAMRIARRAGMSKAKVALARRLAVIMHRMLADRTPFNPAAGAA

SEQ ID NO: 306474 - protein, 351 aa, unidentified
MSADRSHLGPDDIAVGLDLGSQGHQAVILASDGRRLTSFRVDHSRAGLAELVRRATPERWHARRAVYAFEATGHLWEAVAYVLREQGLPYVLVNPLATFRVREARQMGRDKRDVTDADQIAHLLRTGMTTRTQLEPEPYLMLRRAWGAFLRLRKERARLKTLVSHQLYGAFPELLGVWSDIFAPGALAVLRVGLTPFEIAALSLCDFASQVADARRGRRVWRFKVAQAHAHAQSTVALPHGAVPMMREIRRVIARVDLLSDQMTDLETEIRTLLPTLDEAAYLMTMPGVGWTTVAGVIAEIGTIDKYRHGRQLVKLAGLNPSRHESGAMRGRTMLSRRRRAGLRTVVYLAT

SEQ ID NO: 306475 - protein, 357 aa, unidentified
MAEGSWVGLDVHARSTVAGVLDGCSGELRVQRVPSGSGQTVEWLRALPQPVRVAYEAGPTGYGLARACVDAGIACTVAAPSKIPRAPGDRVKTDRRDAERLARLLRLGELVAVRVPEPHVEAARDLVRAREDARGDLMRARHRLSKLLLRHGLVYDGSAWTQAHDAWLHRQRFPSRPLALAFDECYGAVLQTKTRRDALDAAIGEIACEPSFAEVVGRLVCLRGVSTLTALALTVELGDWQRFRPQSLGPFLGLTPSEDSTGERRRLGAITKTGNTHARRLLVEAAWHQRRPLRASVTLERRRQGQPAAVRSRADQSARRLHQRWHALESRGKRRTIVAVAVARELAGHCWALATMK

SEQ ID NO: 306476 - protein, 338 aa, unidentified
MHYIGLDHHRKFTQVAVIDSEDAVVLEMRMPNTLEAVQHLLSRLEPSPLAVVEAGPSWGWIYDTFQKLGVHIVLANPLQVRLIAETRCKTDRRDALTLARLLRVGWIPKVHVGDSMTRLQKQLWRERIWLVRMQTRLKNRIRRHLDHYHVTLPDLSDLFGQAGRAFLAALKLPGPAHQMLQTQLALLETYKEAVRDAQALAQAATAHRPEVAYLKSLPGFGETFAPVAALEIGDVSRFPDAAHLAAYCGLVPSVSSSGGMTYRGDTGPAGNHWLKWVFIEAAWSALRTMPSLRLRFDRIKQRRGSKIAIVACARHLCEIAYSLLKQRRCFEERSLVYA

SEQ ID NO: 306477 - protein, 408 aa, unidentified
MKHHRYFPEAMLRICPGLYDYSVRKNRPVLSDGGPDAVSGLRLSRLFRRSFAPDRRSFSCDKPDSIMDRLSPVTRICKVGFTMENELHFIGIDVAKAKLDVDILRPDGRHRCKKFDNTLSGHEALVRWLRGHDVNRAHVCMESTSTYMEDAAAHLSDAGYTVSIINPALSKAFAQSEGLRSKTDKVDARMLAHFCREKRPSAWEAPHPTERALKALVLRHQALTEMQTQEKNRRETAPEVQLASIDILLGCLSAELARIEKQIKDLTDNDPDMKRRRKLLNSIPGIGEKTAAVLLAYTGLRLKFGTARQFAAYAGLTPVQHESGSSVMRASRMSKAGPVQLRKALYMPALSALYHTAWGKAFRKRLEESGKGAKVIIGAMMRKLAQVAYGVLKSGKAFDASQHELLIA

SEQ ID NO: 306478 - protein, 405 aa, unidentified
MIFVGIDWAEHHHDVCLVDATGQVLATGRVADGVQGVSRLHELVAAHAEDPAVVVVGIETDRGLLVGALTAAGYQVYRINPLQASRYRERHVTSGAKSDAGDARVLAEIVRSDRHHHRLIAGDSDQAEAIKILARAHQGLIWARQRHLNGLRNALREFYPAALAALGTDLADPEALAVLGAAPTPERGRALQVTQITGLLGQAGRRRNLASRAAQIQQALTSPQLAAPAPVTLAYRHVVGAAVKVLAELTTQINALEQELTSAFEIHPDAEILRSLPGLGVVGGARVLAEFGDDPTRYHHPTARKTYAGTAPITRASGTRKVVLARLARNKRLSDACYRWAFSALTRSQGARAYYDQLRARGATHHQALRALANRLVGILHGCLRHRSTYDERTAWAHRSQQAAA

SEQ ID NO: 306479 - protein, 424 aa, unidentified
MKSLTDGEFAAFIGIDWADSKHDICLQVANTEKREFAVLPHRPDAIDQWACSLRQRFQSRPVAVCLELRKGPIVYALQKYEFLILFPVNPITLAKYREAFTPSHAKDDPTDAEYQLELLVQHRDKLKALRPQSAPMRTLESLVEQRRRLVDDSKRITNRLTSALKQYYPQAVQWFEEKDTALFCDFLSRWPTFKQVKQARRATLEGFFWGHHVRSAKLVEERLAAIKSATSLTEDIAVITPHRLLAQALVDQLRVTLQAIERFEVEISAISQTLPDYPLFRDLPGAGVALAPRLLSAFGEQRERYENAAGVQKYTGIAPVTERSGKQRWVHWRLQCPTFLRQTFVEWAAETITRSFWAGAYYRQQRAKGCSHPAAVRALAFKWIRILYRCWQTRTPYDESKYLNALRRRGSPLLNSIAEATKNA

SEQ ID NO: 306480 - protein, 435 aa, unidentified
MNPKRSKSRNGGKMPMVHPNAGAIDVGATMHMAAVRADRAPEPVRSFGTFTADLHRLVDWFTECGVETVVMESTSVYWIPIFELLDARGFTVFLVNARDAKQVPGRKTDVSDAQWLQRLHSFGLLRASFRPKGKIAELRAYVRQRERLLEYAASHIQHMQKALTEMNLQLHHVVADITGATGLRIIRAILAGERDPEALACLRHYSCHSSAETIAKALTGSYRAEHLFALEQALALYDAYHEKAFACDARIEAVLKELSIHRGHGHGSAPRASRRRNRTDQANAPAFDVREALFALLGKDITTIDGLGPYLSLKLIAECGDDLSSWPSAKHFTSWLGLAPSNKVSGGKMLSSRTRRSGGRAAALLRLAAVTVGRTDTALGAFYRRLSARIGKAKAVTGTARKIAVLFYNAVRYGMDYVDPGASSYETRYRTCIFQ

SEQ ID NO: 306481 - protein, 420 aa, unidentified
MNKIKAKRFYAVNKKVLIATVDGGKDKHYGYYRFPDGTDGKSLPFENNGMGFHEFLERITSAAGTHGLEEIIVGFESTGPYMEPLAQFLKSKRGIRLVQVNPMHTKRLKELSGNSPLKTDRKDPKVIADIIELGHALTVVIPEGPAAELRRLTQGRERTITSRTRLFNQLQCLLASVFPEFLQVMKDVTTASAQHLLMHHPTPQDIVNLGELALTTLLRKVSRGKLREDRARALFEASSASVGIRDGRDSMLLEIRLILETIVSYDRFIDDSEAEMVRHLEQIPYSRIILSLKGIGPVTAAGLIGEVGDFTKFGTISEVMKLAGLDLYEVSSGKHRGKLRISKRGRPLMRKLLYLAALSAVRKGGVMHEWYQRALSRGMQKTKALVAVSRKLLGLIFALVRNHSVYVENYVKPIHLQEAA

SEQ ID NO: 306482 - protein, 603 aa, unidentified
MLAPTLPYRQRVRLPAGNLPPATAPITVIGVGIDTSRYGHYVVFLNDQLQTAAAELEVIESAAGYTRLRQRFAELVAKHGRVSFRVRLDAAGLYADNLLAWLDELALPNAAFSISCGDTQRNKNYRVAIYGHQKSDPVEARACARYALTERPDSHRPHSPQLRRLRQVACRLQAVVRQRTRLLNQLHQLLARSFPELAMLVNDIAVGWLLELLHRYPTAQRLALASSSELQNVPYLPHARIDELLARARDSVASLDGPLAEELVRDQVRQVRDITARQKRLENLLTSAYRDLPQPNHLDSIPGFGPVTAAILTAFILDIDRFATEGKLVNYFGVMPIEAASGFDRDGTPRGPKRYVMSRRGNDLVRRYLWMAALTAARYNPACRALYARVVAKHPDKKAIAVGHVMRKLVHLAFAIWNTGKPFDPNHYPWPTPAHVDPEISEQKSELRSERAEQMEQAAGLRKGQAPIRPEVTAACAATVAAAPTVVDGAGVWIDFAHLKRQLPLARVLDHLGLTPRLRGAGPQQRCACPIHRGDGRGRTFSVNLDSNAFHCFDTHCQKQGDVIDLWAALHHLSLRDAAVDLVHTFHLEPAPVNREEARLENG

SEQ ID NO: 306483 - protein, 374 aa, unidentified
MAGDYNAFVGLDLHKETISAAIADAGRDGEVRLIGVIQNQPEAIGKLARKLIARHGKVEFVYEAGPCGYGVYRQLIALGLDCRIVAPSHTPVRPGNRQKNDTRDAVMLARLLRAGELTYVWVPDPVHEAMRDLVRARHVASHDTRKARTLIQLFLLKHGLRYEGKSWSNRHRRWLTDRRFEHRGQQIAFQSYLNRLNQAEARKKELEMQIADLMPDWSLGPMVTALRSLKGVGMVVAATLVAEVGEFSRFASPRKLMAYLGLVPGEHSSGGSIRPRGITKAGNSDMRALLFEAAWSYRTTPKVGQWMSTRTSNVPQEAKDIAWKAQLRLNSRYRKLVGRGKKSNVAITAVARELVGFMWDLARRFEPAPGAAPA

SEQ ID NO: 306484 - protein, 450 aa, unidentified
MGGEQDWRLNLKVVHPNAAGIDIGNEAHYVAVPPDRDSEPVQRYACFTEDLRRMAEWLKSCGIETVAMQSTGVYWLPADEILVASGMRVFLVNARHTQNLPGRKTDVQECQWLLQLHTFGMLNDSFRPPEEICVLRAYWRQRAEHVAAASACVQRMQKALTEMNVQLANVISDISGTTGMAIIQAILDGERDRYKLANLAHPRIQASQEEIARSLEGNWRKELLFLLRQERNLYEVYQRQMKECDQELAAHLKTLDDRVEPGCPLPPRPANKRAGGNAPSHFDLRSEWYRISGTDLTRIDGINVMTAQTILAEVGVDMSRFPTEAHFASFLGLCPDNQITGGKVFRHGTRHVENRAATALRMAATSLWRSKTYLGAKFRHWRMRLGAPKAITAMAHMLARLVYRMLKYGEAYVDKGMNYYEEKYRENEIRRIQKKAKELGLVAVLTPAVP

SEQ ID NO: 306485 - protein, 420 aa, unidentified
MHERVAGLDVHKAMIVACVRIMAGAKITRECRTFDTSTSGLRGLLAWLVESGCTQVAMEATGVYWKPVWNILSDGAFELIVANAAHIKNVPGRKTDVNDATWIADLVAFGLIRASFVPEQEIQELRSFMRVRKQLIREQSSHVLRIQKTLEEANIKLDSLITDVMGLSGRRMIEAIIAGETDPIRLAELAHRGVKAPRDQLVEALRGRVTDYHRFMLQLHLEQYDAVDAAVAKIDHVVDAAITRMDEEVEAGQASFRSLISLLCTIPGVSTLSATTILAEIGRDMSRFPTAGHLVAWAGLCPGHNESAGKRKSSRLRKGAPWLKTMLVQCAWAARRKKDSYYKAQFNRLRGKRGEKKAICAVAASMLTAIYHMLKDGTQHQDLGADHFDRRSTEVKAKRLVAQLNKLGFQVELQPVAAAA

SEQ ID NO: 306486 - protein, 338 aa, unidentified
MTQYSNFVGTDMASDSFMACVGTSPWKLVVKPVKFDNDEEGYVFFLSWLKAQNLMPENTVVCMEATGVYSEGLAYFLAANGYAVAVEAPLKIQRKFPVNASKTDWLDCQYIAEYACRYVDQLTFWQPRNEILEQVKLLLTTRQQFSVQLAAHKNALHAVNRKKVSSKVAQQAHQDIIQQIVKLVTDIDVEIKRLINSDPIFKQTLLLLLSVPGIGLQLAAHLLILMQTSLDPRELSAFIGICPYEHQSGTSIYAAPTSRHYGPSALRKLLYLAACSVRTHRKEFQHYFLRKTAQGKAGKLVLNNIQNKLLKIACAVVRSQKPFVPDYVSVNPLFLKKA

SEQ ID NO: 306487 - protein, 350 aa, unidentified
MKYYAGIDTSLESSSVSVVDQDGKIFREAKVASQPAALIGWFLKLGVPLERIGLEAGPLSQWLFAALRGAGLPVELIETRHARAAFATMIVKNDRKDGRGIAHLMRMGWYRPVHCKSLPAQEVRAILTSRKLVQKKLHDVEMHLRGILRNFGLKVGRTTPKGFAGRVRELVVGHPTLEMIAAAMLPIHEVLLREFAGFERRVRAIARAEKDVRRLMTAPGVGPVVGLTFAAAIDDPSRFTSSRTVGAHFGMTPTKYQSGETDIDGGISKAGDASVRAALYEAAHVMLTRRVKGSTLKSWGMRLAKRSSMKNAKIAVGRKLAVILHRMWVDGTDFDFSRGEKHALPQTKAA

SEQ ID NO: 306488 - protein, 301 aa, unidentified
MEHYAGIDVSLELSSVCVVYAQGKIVRETKVASEPEALVAFFASLGFAVKRIGLEAGPLSAWLHAGLKRAGFDTVLLETRHVKAALSAMMVKTDRKDARGLAQLIRMGWFRPVHAKSMGSQEVRALLVARKQLLGRLIDVELSIRGILRGFGLKVGVVTRKSFEGRIWELVTGHITLERIAGAMLSARATLKLEYEKLHKIVLAIVREDAVCRRLMTVPSVGPLVAITYKSAMDDPNRIAKSKAAGALFGLTPKKYQSGEKDVTGGITRTGDEGLRAVGLRLAYSHLVFLLVIPAPRSGAR

SEQ ID NO: 306489 - protein, 326 aa, unidentified
MTAPKLGIDISKKTFDVALIRDPETMKVKQRQFSNTPDGFRALQTWLAKQGVGRVHAVMEATGAYGLDLAECLHGAGHLVSIVNPAQIKAFGQSELQRNKTDRADAALIARFGWRHNPAPWTPPAPEQQELQSLVRHLDDLIEQRTQVSNRLSEGRLTKVVRESWEEILQALNERIAGVKRQINQHFDDHPTLKRQRELLDSIPGIGPETAARLLAEMPQLGEFDSARAAAAHTGLTPKRHQSGTSINAPARISKIGNSRVRHALYLPAMAALRSSKEFKELAARLTERGKKKMQIIAATMHKLVRIAYGVLKNQQAYDPNYGSAA

SEQ ID NO: 306490 - protein, 342 aa, unidentified
MKQRYYVGLDVSRDVTAICVRCANGVVERRCETVTEPEAICAALVDLRDALERVVLETGRMANWLHGELTRRGLPAICVDARQAHAVLSQMHNKTDANDATMLSDLARTGFYRKVEVKSRDGQERRALLAARDAAIGARRNAENTIRGLLASFGLRVPGRPRTYEARIRAVLEGQDALAPIILPLLAIRTEALRQAAALTKELVRQVKSSDACRRLMTVPGVGTVTAATFVATIDAPGRFTKSRSVGAYAGLTSRRHQSGAVDYGGRISKRGDRLLRTMLYEAANSLLCRVKPGRGQALKDWAMAVKRRTSHKKAVVALARKLAVMMHAIWVSGGVFEEREA

SEQ ID NO: 306491 - protein, 352 aa, unidentified
MKPPSNKHVVGIDLGNVKHAICVTDRASGEILDERNITNHRESLRRLSQKYPGALIAMEVGAHSPWISRFLAGLDHEVLVANPRKVRAIFENDRKCDLYDARMLAKIARFDRSLLYPIEHQSEEAQRDLLQIKLRDSLVRRRVDLISSVRGTLKSLGIPLKSPNTNYFARHARRDLEGEHDATLGLIEPILTALDAVTEQIKVLDKEIEALAATRYPQTDLLMEITGVGVLTSLCFVLVVGDPERFIKSRDIGAYLGLVPKRDQSGDLDKELRISRKGDAYLRRLLVGSAQYILGPFGPECDLRTRGLALAARGGKRAKKKAVVATARKLAVVMLSLLKTGVSYECHRNPAA

SEQ ID NO: 306492 - protein, 466 aa, unidentified
MTRPQKSTSPRRSRKQHGPAKLKPQDGTLGLTVVHPRAAGIDVGNAEHYVAIPPHLDAEPVRRFECFTADLEKLADWLKQHGIETVAMQSTGVYWIPLCDILSRRGIQLLLVNARDTKNMPGRKTDVQECQWLLKLHVYGLLKNSFRPEEQTLVMRTLWRQRQQHIADASRTIQHMQKALTQMNVQLANVISDLSGWTGQAIIGAILKGERNPRKLAELRDARVKATEPEIARSLEGNWRAELLFVLQQEFEMYQTLQRKIQECDQEIERQFQSIPPKADPEELEEVPRNKRPHGNVPENFDLRDEMYRITGVDLTAIDGLNVLTAQTILAECGSDMSRWETEGHFVSWLNLAPRNKISGGKVIGRDRRKVVNRAGQALRTGARTLLHSQSYLGAQYRRLRTHLGAPKAIKAMAAKLARILYRLLKFGQSYVDRGTEFYENKHRQLQIQILTKKAAGLGLQLVQSA

SEQ ID NO: 306493 - protein, 414 aa, unidentified
MEPVYRSMAGIDVHKKMVAVVIRQWRGEQVEYQKRKFGSTRTEIQHLQAWLQSQAVSEVVMESTAQYWRPVWYGLEPHFKLHLTHPLKTRAPRGRKSDFRDAQRLADRWSSGDLEESFIPGSEQRAWRWLTRTRVQLKKKLGVIHNHVEGLLEQGGIKLSAVVSDLFGVSGWAMLEHIAQGVTDVEVLAGEARGVLRKKEAELKEALVGRLEPVYRLLLRQHMDQVRLLRRQVEEINQALAEAMKEHVAALHRLSKIPGVDLYAAQELLAEIGPKAAAFASAERFASWVGVCPGSQESAGVNYSRRSAKGNRYLRRLLCQIAWAAIHTKDTFFAGLFARVKPKVEGKGAAWAVAHRIAKVIWLVLHQEVEYQEKGSAPPNERTLVRKFKRLVKEFGSLGLDVRALLDQQLNATA

SEQ ID NO: 306494 - protein, 417 aa, unidentified
MTQYAAYLGIDWADKKHDLCLVDSANGKQTKQVLAHTPQAIAEYFTNLRSRYPGQPIAVGLEQSRGPLLFALLQYDFLVLYPLNPTTLAKYREAFTPSRAKDDPSDAEYAAELIMKHNDRLKAWSPDDDQTRSLRYLVEQRRRLIGDRTRFNNRMTSLLKCYFPQVLTWFPELTTVLVCDFLLRWPALERLHGVKRSTLLNFFRAHHSVRADTLERRLASIKASVPLTTDRAIIDSSVLMITALAAQMKTTIGAIKQFDEAIDKLCVVHPDFPLFKSLPGAGEVYASRLLAMLGTQRDRWTNANQLACLSGIAPVMERSGQSVWIRWRYFCPKFMRQSFHEYAGESVKHSFWARAYYEQQIAKGKSRQAAVRALAYKWLRIIWKCWQTRTPYSEVKYLEALRRKGSTLLSYAATNAA

SEQ ID NO: 306495 - protein, 429 aa, unidentified
MNNTTITDKTTSPTSFAAWIGLDWGDREHAYCLALGREGEPEKGKLLHSAENLHGWLKGLEERFGGRPVALGLESNRGALFHVLAQYPWLEIFPINPVTSARYRKAFIPSGAKDDLPDALILLDLVRFHAHKLRPLLWDDASTRKLAALVQARRDTVDRRTQGLNQLTGVLKSYYPQALELVGEDLSAPMALEFLRRWPDLIELKSARPATLRRFYYRHNVRRPERVEKRLQGLPGMVALTTDEAVVSVARLQLKLLLELITTFNKHIAVFDAQIAAAFAAHADQALFRELPGAGKVLAPRLAVAFGSERTRYADAASFQKHAGLAPVREKSGGQLWTHWRWQAPVFVRQSLVEWAGQTVVWCPWAKRYYERMKAKGKKHHVILRALAFKWSRILWKCWQTHTPYDDARYLKALKQHKSPNLPLTQAAA

SEQ ID NO: 306496 - protein, 394 aa, unidentified
MILVGIDIGKNKHTFSIIDKNSGEILLSPSDFSNNLKGFLFLIQKLSSYTKSELLIGMEDTGHYHFALLKYLLDRRYTVALINPITTDLTRKLQGGITKNDPLDSITICDVISSNHRNKPYRVTTLNCFDLYEQKQLTRHHHNLKEELNTYKNRLQKCIDIVFPEFNSLFHSKYGIVYMNILKAFSSAKAIANADIRSIRKCFEFKGQGKRISLSAEQLKLTAKSSIGIPSVAEEIQIRHLVSQIELLEKQLSEIDKRIEEFSLKNNSPILTIPGISHFSGTSIISELGDICNYTKASQIIKFAGVAPYHYESSQFTAHHTAITKKGSKYLRKTLYQIILPVISNNEVFYAYYTKKLNEGKGHRCAQGHCIRKLLRVIYHLLSTRQPFNPKLLV

SEQ ID NO: 306497 - protein, 353 aa, unidentified
MNNIKYVGMDVHKSITVIVVLNELGQFESRSQIKTKGENICDFFRGISGKVEVVFEEGTHSAWLYKLLKPLVASVTVCDPRHNKLIEDGNKSDDEDAETLAQLLRLGAVKAVYKGDDQQQQLKEICRAYDNLIEDSTRVRNRLKAIYRGRGISCSGHALYRADQRSDWLAKLGEDAARFRAESLLEQLESLSQLRKQSKQQLLAQARTHADYRILIKLPGFGPVRVAQLIAVVGTPHRFRTKRQFWPYCGYAVVTRSSADYQIVEGKIVKQRKKVSTRGLNRNHNPQLKQVFKGAALTALRHEAIKAYYQRLIDQGTRPELARVSVARKLASIALTIWQRREEFNVKKAFAQD

SEQ ID NO: 306498 - protein, 340 aa, unidentified
MVVLGIDAHKRTHTVVAVDEVGRQLGVRVTQSTGTAAHLELVVWADRFGSERRWAVEDCRHLSRRLERDLLAAGEQIVRVPPKLMAHARDSARTYGKSDPIDALAVARAALREPGLPAARLLADHREDLVAERTRAINRLRWHLHELDPAWDPRPRSLARRKNVAAVAARLAGLDGLVARIAAGLAARIAMLTAEVNALEREITARVQALAPSLLALPGVAALTAAKIVAETAGIGRFKSKDAYARHNGTAPLPAWSANPHRHRLSRTGNRQLNCAIHRIAVTQKRCHPPAQAYLHRRATTGDTSTEALRALKRRLSDIVYRTLLADSADAQTAPASRAA

SEQ ID NO: 306499 - protein, 362 aa, unidentified
MKKGSREMESEWKQRPERTVGIDLGDRFSRYCVLNRDGEVLEEGQVRTGAEGFRRHWEGELRQRIVMETGTHSPWISRLLQSFGHQVIVANARKLRAISQNESKNDRQDAEMLARLGYCDPKLLAPIRHRSAERQRDLNLLRARDTLVRARTMLINATRGLVKSAGGRLPAAASDYFVARVAAAVPAELEAATQPLLHQIAALSAAIRRLDQAIEKLGERYPEIVRLRTVPGVGPVIAAAYVLTLDGVDAVERSRSVGAFLGLRPRQSQSGNSDPEHNISKTGNQYLRRLLVQAAHYTLGRFGPDSALRRWGLKLAAGGKRAKQRAVVAVARKLAVLLHHRWRTGQDYRNFPEAAAVAGSAV

SEQ ID NO: 306500 - protein, 350 aa, unidentified
MLIIGCDYHPSAQQIAFVDTDTGELRERRLGHPEEAEQFYRELKQQNVAVRAGMESSGHSRWFERLLQELGFELWIGDPAEIQSKRVRKQKTDRQDAQLLLRLMMEDRFPRIWIPDAANRDLRQLLWHRHRLVQMRTRVMNQLHVVAVNEGLRRKKALWRSAGRAELEAIALAPWATRRRQDLLDLLDQLTPNIQQLTQALEEEVEKRPVTRLLRTHPGVGPLTALAYELVIGTPERFHCGKQIASYVGLVPEEKSSGDRRRLGHISKQGNALLRFLLVEAAQVTVRSEPQWRSKFLHLAMRRGRKIAKVTMARKLAVHLYWMWREGRDYGQSQKFGSHAGQPGNLDGVQ

SEQ ID NO: 306501 - protein, 414 aa, unidentified
MELLHERCAGLDIGKKDLKACVRTPNPSGRRSRRQEIRTFATTTNALLELRDWLVAQKVTLVVLEATGDYWRGAFYLLEDCLNVMLVNAAHVKGLPGRKTDVSDAAWLCQMGECGLLRASFVPPEPIRQLRDLTRYRATLAAERTREASRLEKELEDAGIKLSSVATDILGVSGRAMLTALIEGERDVHVLAEMAKARMRPKIPQLVEALTGNFGEHHAFLCRLHLERIDQLSAAILELSTRIEDQMSPFARQLEHLTTIPGVGQATAEVIIAETGADMTRFRTAGHLASWAGICPGHHESAGKRKSGKTRHGNRWLGGALGTAAMAASRTKDTTYLGARYQRLVPRLGKKKAIVAVEHSILTAVWHMLTHDIDYHDLGGDYFTRLDPERAMRRIVRQANALGFTVRFDPIQAA

SEQ ID NO: 306502 - protein, 367 aa, unidentified
MKDSITVVGLDVHKNSIEIVTADTDRAMEVRRLGRIGGTMDALDRAVRKLVSGGSTLRFVYEAGPCGYEVYRHLTGKGFSCKVVAPSKTPQKSGDRIKNDRRDSETLARLERAGELTAIYVPREEDEAMRDLTRAREDAVKALKIARHQLNAFLLRYGKRYPGKGSWTLAHMRWLSDIALPHPSQQMVLQEYITTVRVCTERTARLTDQIAKLFPEWRLNPVVKALQALRGVAPIVAATTIAEIGDMSRFENPRQLMAYLGLVPSEDSSGESTHRGSITKTGNGHVRRALVEAAHAYGFPARVSRHLLKRQEGLPQPVLAIAWKAQVRLCGKFRRLMARGKLKNKIVTAIARELSGFMWAIAREVKG

SEQ ID NO: 306503 - protein, 308 aa, unidentified
MSKAHLDAAWAERFEHVSNDADGWDALVAKFQADRVDVVVLEATGGYEKAAACALQAAGFAVVVLNPRQGREFAKAMGQLEKTDRVDAYSLRDFAAVIARHPKRERYIRELPDAQRAHLAGLVMRRRQLLNMRNEESNRLHTSHRAALKSVQAILKAIDKQLGAVDDDIDHHMQQHFKDIRTWLESVKGVADVTSSTLVGLLGELGRLPRRSIAKLVGVAPLARDSGPRKGTRAIWGGRAEVRAVLYMATVSAITHNPVIRQFHQQLIAKGKPNKVAMVACMRKLLTILNAMARDHATWDDSKHVKPA

SEQ ID NO: 306504 - protein, 340 aa, unidentified
MPLYLGVDVAKETLDAVGASATLEQPLPTCSNQVRGWKALARKATVMAKEQGESMIHLIIEPTGGYERGLVDYAFSLGWSVTIVNPFYVRRFIQGQGQRGKTDSIDALMLARYGVQQQPESQWQMVEDAQELQGLLSRQDDVKKLLRAERNRRMQARQNPRTPVAVLRSIERTIGMLEEEEAALNEAIKGLLSRSQLLANIERLLRTVPGVGRQVVLRLLTLFYRFQALTAGKGTAAELVAFLGLDPQPYESGRSVRHRPTISRMGDKAGRADLYMGALGGLRGRNPLRTFYDRLIQRGKAKKLALVACSRKILIWAWAVFSSGQPFDPQRALPNSPIPS

SEQ ID NO: 306505 - protein, 412 aa, unidentified
MAQRMSVLGIDIAQQGFHVVGMDDSGHVVLRKRLARSDWLNCMANVPPRRMGMEACGSAHDWARRFRAQGHDVRWIAPPFVNASVKSPKHDARDAEAIGEAVTRPTMRFVPIKRVDQQDRQALHRIRARLINARTALVQEIRGLLNAPGMVLPHRIAKFRAVIVDQLREEQAKLTTLRTEVFWHLDDEFLAVENRLTSDDEQLAAIGRAHPACQRLHTIPGRGPRSATALIAAMGDVTQVKNGRQLAAGRGLVPREHATGGKPRRLGSSTRGDRDRRQRLVHGARATLRWVDTKCEARSQWLRALIARRGKNRAAVAWANNKARILWALLAHHHEDHVGTIVETCCAEVVITDDPRQCQVSTCTDDTLGQTGFSPPCVATWPPRPWCYRGGAARMSSGPQELSMRFTYRPDR

SEQ ID NO: 306506 - protein, 387 aa, unidentified
MPQVDDLSRSLVAFDQDATLIVVVEMSEASWLVAGMALGVDRRPLKKLGPDPDALLRLVERWRDEAVKAGKMIERIALAFEAGRDGFWLARWLQARGIEVHVIHSTSVAVSREHRRAKTDRLDTAMLRRVFLGWLRSERGHCGMVAIPTLEDEDARRPSRERESLVGERTRIINRMKAILAWLGVRGFNPKLRKAPQRLDDLRPPEDLPLPPNTVDELRRDMARLAMVCEQIKALEQARLANLEQAPGTGSHAMVRLIANVIGVGIETADMLVQEVLSRNLRDRRAVARFAGLTGAPNESGSRRRERGLAKSGNARVRRGLIQLAWRFLRFQKDSALAQWYRVRTEGPAAARRTKMIVALARKLLIAFWRMVTVGEIPAGFALRQPA

SEQ ID NO: 306507 - protein, 385 aa, unidentified
MTKQLQYPTFIARDYDIFGGLDVDKKSMAVTFRDHGIMRKSFRLAYSASQLLNYTEKHFPGQRVAFVYEAGPTGFGLHDELTAASHACLVVSPSMVPTVQRKRVKTNRLDSLKLAEGLRGGQLRGIHVPPPSYRELRHLVQLRDTQVGQLRATKCRIKSLLLYEGIPFPAANGKWSAQALRELEALPCNATVRFKLDQLIDALQFHFLAAAKVQKQIRYFCQNDPELRRCISFLVSLPGVGTITATHALARLGDWRQIKDVRQIAGFLGLVSSEHSTGDKENRGEITRIGDSRLRNKLIQCAWTAIRKDPELRAFYRRIYERQPKKVAARKAIVAVARKLTTRMYAVLKEQRPFVIRADSSIAPLTAEETGGPRERLDAAQNEQP

SEQ ID NO: 306508 - protein, 347 aa, unidentified
MVTLGGDCHKRTHTLVAVDENGRELGTKTVAAVEAGHLEALRWASQWGQRRWALENCRHLSRRFETDLLLAGETVVQVSPKLMAGARRSAREWGKSDPIDALAVARAALRESDLPVARLEGESREVKLLLDHRDDLVGERTRVQNRLRWHLHELEPSFDVPARSLDRKVVLSQVAGVLARHHGVATEIAVELLERVRELSLRINELEGQIRTLVTRLAPNLLQLEGCAALGAAKLIGETASVSRFKTSAQFAMHNGSAPIPVWSGSQARHRLNRGGNRQLNAALYRIAITQIRFGGRGHAYVERRRASGDTKREALRALRRRISDEVFRRMWQDHLAGETAVREAAA

SEQ ID NO: 306509 - protein, 403 aa, unidentified
MAAVSGIDWASQWHDVDIADEHGTRLLAARFAHDERGVCALIAALTEHAVCRVAIERPDGLLVARLLAAGITVLAIHPNQVAAARDRFRAAAGKSDRFDGFVLRELCRTDSHRFPVLAVSGDETLALRALVRAREDLVGARVALANQLRAQLDHFWPGATRIFSDTDSPISLAFLARYPSHADARGLGPKRLDAFLARHAYCGRKTPEALLERLRSAPTPQLGEHESDARRNAVLGLVSALEPLVAQISQLTGEIRGAIHRHPDGPIFLSLFRDPKSVVTAAGLLAEIGDNRARYPTDDTLAADAGQAPVTKQSGKHRAVSFRWACDKRLRTPLGVLADSTRHWHPWAHDIYQRARDRGCDHPHAIRILGRAWTRVLWRCWQDGVPYDPSQHRALLRHLATNG

SEQ ID NO: 306510 - protein, 354 aa, unidentified
MSSILAGKVEFVVGVDTHRDSHTAAIVSAATGGVVDQLTVATDALGYRELQDFADRHAPGRRVWAIEGTGSYGSGLTTALLEHGQWVVEIDRPTRPARRDRAKSDDLDAVRAAREALGRDHLALPRARGDREALRVLTTARAGAVVAGTKAINQLKALIVNAPQPLREQLRHATSDEQLRRCARLRTQPTHSIEHRATIRAIRGTARRALALAAEAAEYETELKQLVVAICPALLERPGIGTITAAQFLISWSHPGRIRNEAAFAALAGAAPIPASSGTITRHRLNRAGDRQLNRALHTVAMTRLRIHEPTQAYTARRTAEGKTPREIRRCVKRAIAREVFRIMTHHAKDPVAA

SEQ ID NO: 306511 - protein, 344 aa, unidentified
MKKFTLIIGIDISKASLHVSYQHQQGKAVSLQLDNQAPAIAAFLEQMLGLEPDPAKVLLCCEHTGTYGSRLALAAKAAGVTLWMVHPLVMRHASADLSRYKTDKADAAKIRSFAHTHLAKATNFHHPSAAAHQLRLLQQARKQLVGLRQQLLNMITDNKDKAQPLSLVGVVFQEVKAYLTQAIRQIEQEVGRLIASDASLRRMHTVLLSIPGIGPVTSIHLLAVTDRFTRFPGPKALACFVGTAPFPNQSGSSKNPKARVSKKAYQPLKVELHQGALSVSRKGLFFHDFYQHLAEQKHHHLDIINRIINQMINLAFTLIRKDQLFDKKTYLSNKKSPGFLLEMS

SEQ ID NO: 306512 - protein, 478 aa, unidentified
MPSKRKQQNSRQVRGRGRKRRQKGMCLEDRPVLEPNAAGIDIGAREIFIAVPPGRDEQPVRACATFTEDIEQLADWLVACRVTTVAMESTGVYWIPLYDILESRGLQVCLVNARHMKNVPGRRTDWHECQWLQYLHSVGLLRGAFRPEVEVTAVRTVMRHRHELVQMSSQHVLHMHKALTQMNLQIHHVIDDITGLTGLAIVDAILAGQYDPAELAKLRNWRIQADEETIRKSLVGNWRREHLFTLEQSRELYRTYQQQIVKCDQEIETLVGGFEPRVDPGKKPLPPDRKRYRSDKKRAKKNGRLETGFNLRTEAYKLFGVDVTQIPGLETLALPLFGEVGRDMSKWPTADHFASWQGLCPDNDISGGRVLWKGTRKLHNRAGQMFRQAAFSLHHSLTPMGDYLRRMKTRLGPAAATTATAHKIAVIFYIMVKNQVEYDETIWATRDLKRQQRIEARLKRQANRLGYQLVPLEEKPAA

SEQ ID NO: 306513 - protein, 453 aa, unidentified
MPKDRTRSKPLGLPIIHPFAAGIDIGSRFHVAAVSPDLCDEPVQTFQAFTSDLQRMADWLVATGIKTVVMESTGVYWVAAYEVLESRGLEVILANAREARAVPGRKSDVNDAQWLQRLHACGLLRASFRPGRDIAELRSYLRAREKHTDYAAAHIQHMQKALTFMNLQLHHVISTITGVTGMRIIRAIVAGERDPDKLAAMRDVRCKEDMETIRQALVGNYQPEHVFALRQALALYDFYQHCIDECDVEIERAVARLNIAQPQPEAPLPQAKHRTKQPSEPKFDVRSAMYQLAGTDLTQIHGIGPFLALRLIGECGTDLSRWPTAKHFTSWLTLSPGCKISGGKVLSAHTRKTSSRITVALRLAAVTVGRSNTALGAFYRRLAGRIGNAKAVTATARKIAVLFYNAMRYGMDYRDPGADHYEQQYRDRVIKQLHRRAAQFGFALQPQDSQACR

SEQ ID NO: 306514 - protein, 347 aa, unidentified
MEYIGIDVHSSESQICMLTEQGEILEQRLRTRPDRFAEVLGDRPRARILIEASTESEWVARCLESLGHELIVADPNFAPMYATRSRRVKTDRRDAQALMDACRLGAYRPAHRTSDARRQVRADLAVRDALVRTRARFISLIRALLRREGLRVSSGMARNFPRRLALLTVPDELSAAIAPLLAVMEALNQQIDAADARLAAHAAQDPVVRRLETVPNIGPVTALSFVATLDRVERFRGPHPAAAYLGLVPGERSSGEQQRRGPITKHGHGRTRWLLVEAAWGMVRHAHPDTAELRAWAARIAARRGRRIAAVALARRLAGILYAMWRDGTDYQPQRAMPTTREMAMPS

SEQ ID NO: 306515 - protein, 313 aa, unidentified
MDKVTIGIDVSKDHLDAHRLPDGAASKFANTKSGLTRLIRWIGCGSSVARVVFEPTGRYHLQLERHLDTAGLPVVKVNPRQAKRFAQSLGVRAKTDRADAAMLARMGAALALAPQPVRSEILQDLNDLMAARRAMVKDRTAAKNRANGLRLALLARLNRMRLARIEAELAAIDKAILEIIETDPDLRARHKILVSISGISEVTAAAILTMMPELGQLDRKQAASLAGLAPVTRQSGRWTGKAFIQGGRAALRQALYMPAIVACRFNPDLKAKYDQLVTAGKPPKLAITAIMRKLIVLANALIRDNRYWQASRA

SEQ ID NO: 306516 - protein, 411 aa, unidentified
MEAIIERAAGLDVHQGSVVACVIVGAAGRRASRETRTFGAMRRDLAALRDWLCEIGVTHVGMEATGVYWQPVHAALEDAFTVVVGNASHMRNVPGRKTDVKDAEWIADLVRHGLVRASFVPPPEIRMLRELVRHRKALAGTMAAERNRTLQLLEGAGIKLAGVMSDVFGVSGMLMLRALAEGSADAATMADLAKRRLRRKVDQLALALDGHLAEHQRLLLGLHIRRLGEIDRDLAEVEAAILKAMQPFAAQQALLVTIPGVDALLAATILAEIGADMAAFGTAQRLAAWAGVCPASHESAGRQKRRGTRKGNTFLKAALVTAAVSAAQAKGTYLRDKFHRLKARMGAKKAAMAMAHKILIAAFHMLQRGVGFADLGADYLDRVNKHRTARRLVSRLDALGYAVMLRPKPAV

SEQ ID NO: 306517 - protein, 313 aa, unidentified
MSQYTKFVGIDVSKDTLDVHTLPDGQSWQVSNDDAGAAALAQRVPPGALVVMEATNVYWRLVASTLASAGLAVAVVNPRQVRDFAKATGQLAKTDATDAQVIALFGQRIEPPVRALASQQCQMAAELLSRRSQLMGMYVAEKNRLGTARAKRVRADINTTIGFLQKRLDALDKELDQWLKSTPIDQSRIDLLKSFTGIGDKSAKSLLIALPELGRINNKQIAALAGLAPFASDSGKKRGARHIRGGRSVVRAALYMPAVTAMRCNPVIRALYERLISAGKNHYVAITACMRKILVILNAMVRSNTPWHCPQTT

SEQ ID NO: 306518 - protein, 345 aa, unidentified
MEITTIGLDIAKRVFQLHGVDGAGKAVWRRKLQRSEVLAFFKALPPCLVGIEACGTAHYWAREIRELGHEVRLMPPSYVAPYVKRGKTDAADAAAICEAVTRPTMRFVPIKTADQQAVLMLHRTRDLLVRQRTMLVNALRGHMAELGIIAPQGIARVADLMAVLLGEDTTNVPGLAREALRGLAAELEALDRRVKEIEVAIVRWHKDNEASRRLATIPGVGPITASAIVATITDPFQFHSARHLAAWIGLVPRQHSSGGKQRQGGISKQGDRYLRRLLVLGATAVIRHSRSKSTAEAGWLKSLLERRPARLVSVAQANKTARIVWALLVRGGAYRMPAAVPGGAA

SEQ ID NO: 306519 - protein, 313 aa, unidentified
MSVSYFAGIDVSKLYLDVHILPNGAGWRFENTAAGHRQLVKLLREFEVYLVVIEATGGYERLAVVAMVNAGLRVHVAQPQIVHAFAVSLKLRAQNDKIDAATCARYARDRHQDLLVIDAIDKTQQALQALVVRRNQLVGMQTMEQNRVQQVHDKQARKSLERMLKTLKKEIVRVEKQIDALIGADATLKAKAQKLQETKGVGPQTTRTLLAYLPELGKVSVKRLNSLVGVAPYASDSGDKQFVRHITGGRAIVRNGLYMACLSAISTNPVIQPYYQKLLERGLAHKTAMMACIRKLLAYLDKQVRLALQPATS

SEQ ID NO: 306520 - protein, 317 aa, unidentified
MSKPTTICAGIDTGKRKLDVALEGGRERLEVDNNAAGHRALADWLRGHRVKRVGIEASGGYEYPVVVELRRRGFVVIVFQPAQVRAFAKFHLQRAKNDKIDAALIAMCTAGVKTIHAPPDSRLGPFAAHLTMLDQISDDVARCKNRLESCRDPHTRRFWKEEIARFKKLYKIELKSLVAAIRQYRDLAERLDLINSVDGIGLITAVAILVRMPEIGRISREQAAALAGVAPYDDDSGQLIGVRHIEGGRKRLRGALYCAALPASQRWNPQLIALYQRLRAAGKEHKRALIACARKLLIFANTVVARGTPWTARPNPA

SEQ ID NO: 306521 - protein, 320 aa, unidentified
MRNAVGLDISQNTFDAAAIVNGQRKQALFDNRINGFENFKHWLDGFDCELHICMEATGNYFEDVADYIGQFYTVSVINPYKISEYGKSRFHRTKTDKQDARLIAEYCHTAMPKDLPARQKISIGHYRLKRLLALYEQLKTQKTAQKNRLKVAKDEFVRKIHQAQIQELDQHIQQAEAEIQAITNDNQDLKTVSESLQTIPSIGKLTAAILTNYLLSGDFKTANQFTAFAGLNPQQKESGTSVKGRSSMTRYGNRRLKAALFMPAMVALNRDYFHDFVKRLKAKNKPKMLILGALMRKLLVVAYHVYKTQKPYNPERYKPA

SEQ ID NO: 306522 - protein, 360 aa, unidentified
MATPSIAHDPVVAGVTVGVDTHAEIHVAAAFTSDLGRPLGHLEIPTTPAGYGRLLHWAQAFGDATPRFGIEGTGAYGAGLARHLRHAGCTVIEVNRPNRQTRHARGKSDPVDAEAAARAVLSGEAASIPKWDEDRVGMIRTLRVARRSAVQSTTQISNQITALVVTAPAEIREQLRSLTGRTLIEHLAAMRPGAITTIAAATKMTLRTLARRHQFLNEEILTLNVELERLTLEVAPELCALKGVGPDVAGALLVAAGDNPERLRSEASFAHLCGVAPLPASSGKTTGRHRLNRGGNRQANNALWRMVMTRLAWDQPTKNYVARRTAQGLSKKEIVRCLKRYVAREVFRSLPAKTELAEAA

SEQ ID NO: 306523 - protein, 410 aa, unidentified
MEVLYPVCCALDVHQASVTACLRAPGDGPQRRQQVRTFGTTTPELLRLAGWLTAAGCTHVAMESTGIYWRPVYNILEGRFELSLVNAQHVKMVPGRKTDVRDSEWLAQLLELGLLRRSFVPPAAQRELRDLVRYRKRLIEERAREANRVQKVLETANIKLASVVTTVLGVSARAMLKALIAGEQAPEQLADLAQRRLRRKRAALGEALTGRVTAHHRFLLDHLLRHIEFLDGAIAACDRQVETLTAPHAEALTQLDTIPGVARRTAEVIAAELGCDMTRFPTAGHAASWTGLCPGNHESAGKRLSGRTRHANRTLRQALVESARGAVRKRDSYLAAQYRRLVKRRGDKKAIVAVAHSILVIAYHVLRDGQPYRELGGDYFERLNADRLTRYHTKRLAALGYTVTLTKDAA
